United States Patent Application Publication US 2011/0183924 A1 - sequence listing, part 223

SEQ ID NO: 576535 - DNA, 1319 bp, Homo sapiens
ctaggcggctggcggcggcggcggctcctcagatgtcctggctcagtgctccgtgctgctggctccagcccgctgatgccccaattcctgatgaccacttgcgctggtgccgttctgcgcctgtgtggctatcctgcaactgtgtgtgtgctgtgcctgtggacttcatgctgcagcccctcaccatcatcacgtggtccatgcttggcatgcaatggcatgcattggctgccactgtgcccaggagacctgatccaggccatcaattggtgatgatgcacatgatgctcatgacacacctgtgaggcacaagaacctgcatcaatggtgctgccacgatcacctcacactgtctgtgagcagtgcctgagtgtgcaggatgctggcccagttgccccatgatgacagcaatggctcaggcaacacagtgatccacatacgatcctgagatccaaggacggcatgcccaacaaccatgcatgtgcggccctcagtgcaccgggactggtgcccagaagatgcgcatgaccaaagcctgggatctccatatggacaaacccacatcgctttccagtacccctcacaatggcagcagcgaggccacccttgcagcccagattgagcaccctgcaatagatgacatccaaaccacacagacggctgaaccaagccagagggactccccgcgagacccgggactgcagaagtccgaacctggggcatccgaagggtgaacaggatgctgcgggacgccaagacaagaagaccgtggacagagagaagcacaaaagcaggatccaaggcatcactacccagatacatatgcaagggaacattgtaacaaaggccagagccaagcgacagcgagaatagcagcccggcagccatcagcagacacccagggacacctacaaagcccacgggcaaagccagtacaaggcagagcacacacgaacgagcaagacatgaacacgagcatagcccacaaaagacagccgcacgtagcaaccaacgtcgaattgatgatggaccccaattgctatcagtggccagagagacaacggtcataccaacatacccagacagaaatcactgagtcacaggtacatggtgccattaaaccactaacaatcttagaactcaactaactaacaaataggtaaatcttagtataagcaccgaacaagagctataacaacatcacttcaataacatttatcgctatactcatacaacaagacactatatagatatatcactctcaaatacatcaagcctaatatgaatctcacatgcccttcgtcacaacagcaaacgaa

SEQ ID NO: 576536 - DNA, 385 bp, Homo sapiens
cacgtcaaccgtgcttgacaaaatcaatggaaagaggaagaccgccaaagcacatctgaggcaaactaagacatgacagacacgtgagcacgagagcaaaggagaggcaggtgtcagaggcagaggaaaatgggacattggatatgacagacatacacacctacatggaaatgtatcaacgtgcgcaagcgtagcggcggcgggcagaggactactacagatgcaaaatcaccccttctgcaagaaagcctctttagcaaccggtgcacttacaatctggtattacctgggagtgaaaagaactattacagccatgcctaactgacttcttgaggtcagaatggcggcagtggagcatcgtcattcttcaggattgccctactgg

SEQ ID NO: 576537 - DNA, 518 bp, Homo sapiens
  misc_feature (364)..(364): n is a, c, g, or t
gccagagagtaaatattttaggcttcaaggcaatatgaccatttttgcccactaagatttatgtcacatttgggaggaagatagaaataatgagcaatttgggactttgttgtacaaatgtagaattaagtaagttggttaaaatactaagaatggcagaatgtggtggctcacatctgtaatctcagcactgtgggaggaagcaggaagatagcttgagctcaggagtttgagaccaacctgggcaacatagtgagaccatggctctaccaaaactttttaaaaaattagctcgaaaaaaaaaaaagaagaggggtgtttttttttttaaaaagggttttttggggggccccccaattttggnatttaaagaggtgtagccccagcttctcaggaggctgaggaaggaggattgcttgagcccaggaggtcaaagctacagtgagccgtgatcacaccactgcactccagcctgggcaacagagcaagatgctgtctcatttttttgggacaaaaaa

SEQ ID NO: 576538 - DNA, 149 bp, Homo sapiens
ctaggaaaaacccttgtagagagagtaaaaaatttaccccccatagtgggcctaaaagcagcccccaattaagaaagggttcaagctcaaccccccctacctaaaaaatcccaaacatataaatgaactcctcccccccaattgggcca

SEQ ID NO: 576539 - DNA, 362 bp, Homo sapiens
attatcagtatctattacaatgtaataataatagaaataaagtgcaggataaatctaatgtgcttgaaacatcccaaaatcatcctgcccccaatcccatcccggtctgtggaaaaactgtcttccgcaaaattggttcctggcaccaaaaagttaggggacctctgctataagagcacttcaacttgtggccagtgcggtgactcatgcctgtaaatcccggcacttagggaggctgaggcaggtggatcacgagatcaggagttcaagaccagcctgatcagcttgacaaaaccctgtgtctactaaaaatacaaacatcagccaggcatggtggcaccaaccagtagtaccagctacta

SEQ ID NO: 576540 - DNA, 499 bp, Homo sapiens
  misc_feature (279)..(281): n is a, c, g, or t
  misc_feature (288)..(289): n is a, c, g, or t
  misc_feature (291)..(291): n is a, c, g, or t
  misc_feature (296)..(299): n is a, c, g, or t
  misc_feature (301)..(301): n is a, c, g, or t
  misc_feature (390)..(390): n is a, c, g, or t
ccagttttaacaaaggattttattttgttccctaaaaagtaaaatctagaaaatagcaacccactgcaagaagagttctatactaaaacattttcaatcattctctcttcttttcacatggtgtactctttcatgtacacatcatcggaaaacagactgataaatgcaaaccctgtgtgaaaggcacatggcactaatattgctcacacctgctacacctccttgggagccaagggaagccttttctgcaatctccccattttgatagaaaacactttnnnattttgnnanaaacnnnnanaaatttttttatagcaaaatatttaaaggtctctttccctgctcttcacttatctactaggaaggtacagaattaaaaagctttttttnccccagctgtgatcaagatgtattaaaagaatatgaaagagcatctgggttattctagaagttctgtgatcaaaacatattaaaaaaaattaaagcgcatctgggttat

SEQ ID NO: 576541 - DNA, 318 bp, Homo sapiens
tgtcacccaggctggagtgagcccaggatctcggctcactacaagctccacctcccgggttcacgccattctcctacctcagcctcccgagtagctgggactacaggtgcacgccaccacgcctggctaattattttgtattcttcagtagagatggggtttcaccatgttagccgggatggtctcgaccttctgacctggtgatccacccaccttggcctcccaaagtgctgggattacaggcgtaagccaccgcgcccagccaaaattcttaattcttggtgacactagacacatttttaagtgctcaacagctac

SEQ ID NO: 576542 - DNA, 292 bp, Homo sapiens
atcacttataaaacatgatgccatgaaaaattccacagatcagctttagttgtatcgttgtcaacgttatatgtgctctcaatgaagaaatatttgtagcatgtacacggttatttctgtttcttcaacagtcattgtacagtgggctattaaacttggattttactttttatcaatgccagtcatgttctttttattcaagtatgcaactagttgcagaaactatcagtcatatgcatttttaagcagctttcatgttctcacttcaacaatgtgaacttgtactatcgtt

SEQ ID NO: 576543 - DNA, 278 bp, Homo sapiens
ccggccatagttcgagagaaatagaaatcttcaccaatgtcagtgactgcatggtaccaaaaatcacatatgctattacctcacagtaggaaggcttctttcccattgtaggctcagagacacacttttacagaaatcaaacctatttacaggggtggcacccctatttctgtaggcatctagatcatgtcatactcccaatgctcctgcaagttcttatatccagtgttgtatcttatgctgagctgacaactagatttctctcggtgccaatggga

SEQ ID NO: 576544 - DNA, 536 bp, Homo sapiens
  misc_feature (103)..(103): n is a, c, g, or t
  misc_feature (140)..(140): n is a, c, g, or t
  misc_feature (315)..(315): n is a, c, g, or t
  misc_feature (327)..(327): n is a, c, g, or t
  misc_feature (335)..(335): n is a, c, g, or t
  misc_feature (342)..(342): n is a, c, g, or t
  misc_feature (348)..(348): n is a, c, g, or t
  misc_feature (350)..(350): n is a, c, g, or t
  misc_feature (360)..(360): n is a, c, g, or t
  misc_feature (375)..(375): n is a, c, g, or t
  misc_feature (381)..(381): n is a, c, g, or t
  misc_feature (392)..(392): n is a, c, g, or t
  misc_feature (400)..(400): n is a, c, g, or t
  misc_feature (403)..(403): n is a, c, g, or t
  misc_feature (406)..(406): n is a, c, g, or t
  misc_feature (408)..(408): n is a, c, g, or t
  misc_feature (410)..(411): n is a, c, g, or t
  misc_feature (420)..(420): n is a, c, g, or t
  misc_feature (430)..(430): n is a, c, g, or t
  misc_feature (432)..(432): n is a, c, g, or t
  misc_feature (437)..(437): n is a, c, g, or t
  misc_feature (440)..(440): n is a, c, g, or t
  misc_feature (444)..(444): n is a, c, g, or t
  misc_feature (446)..(446): n is a, c, g, or t
  misc_feature (450)..(450): n is a, c, g, or t
  misc_feature (462)..(462): n is a, c, g, or t
  misc_feature (492)..(492): n is a, c, g, or t
  misc_feature (499)..(499): n is a, c, g, or t
  misc_feature (505)..(505): n is a, c, g, or t
  misc_feature (520)..(521): n is a, c, g, or t
  misc_feature (528)..(528): n is a, c, g, or t
  misc_feature (530)..(530): n is a, c, g, or t
tgcaataacatgactgaagaaacagtattcaattaaaatacagaaattgtcaactgaaaaatagtgcatgacagaatatccaacactgtattgaatattttcngattattaaaccaaattacttaaaccttatacttganaactaatgcacattggtttttaaaatgacctactgaaaccaccataaaatgtatcttttatacaggttaattatagtaacaaatcatattgctttacattgttaaaataatattttcttcaatcatatgacctacaaaattatacccttattttccactgattctcatatttaanaccagaattttnagattttnctaaatnaatttncntcagttttgncttcgcttgcgactnagggtngaatctataangggctggntanaantngnntactatgtnacagatattngnctgangcnacangnttangatttgataggnatataaactatttctataagtgatattgtncttcagnggcctntatttttccaaatgnnggggtgngncttctg

SEQ ID NO: 576545 - DNA, 308 bp, Homo sapiens
ttctgtggtcttgatgaactttggtatcgaacgccttcatcgggcgttctgagtacatctcagcagcgcctagttcttgcgttactcacaagtggcccacctaggtactcgtatttccacgcccgtctccacgcacagcgatcctggcttcttacccttttaaagtttgagaataggttgagatcgtttcggccccaagacctctaatcattcgctttaccggataaaactgcgtggcgggggtgcgtcgggtctgcgagagcgccagctatcctgagggaaacttcggagggaaccagctactagat

SEQ ID NO: 576546 - DNA, 164 bp, Homo sapiens
  misc_feature (152)..(152): n is a, c, g, or t
  misc_feature (160)..(160): n is a, c, g, or t
tgcgtccggaaaaacgtgctttgaggagagaagagtgagcggtggatcgctacaatgattgcctgagcaggggttgcttccctatccttcttattatcgtgtttccactatcctgaagacatttaagtcttacaagagatgatgaaacacantttcaagnagag

SEQ ID NO: 576547 - DNA, 394 bp, Homo sapiens
gacgctctctgtggggcagagtaaattggagactgctgaatcaatagagagacaaatggccttatcgcccctcagtgagagatgctgactgcactcacgctcctaggacatgaaagacaaagtttcagtccctattccaggtagcaggatatggcctagagtctatcagtgagtattcaatagacacacttatgaaccccggcaagagaaagaaatggtgctgggtcatctccagaaacaaaagagcaaaatagtgcattgtctacgtcaagccaagatgaagagtttatgtacgtggtagagaagtctgcagaacccgcaggccaaatcctgtctcatttgtcttcagaacttaaagaaatgtccacaagtaactttgaatcatcccctgaag

SEQ ID NO: 576548 - DNA, 566 bp, Homo sapiens
ttccccatctagcaagctgccatcatctgcttcagaaatacgtgaacgccacaagatactcctgagaaggcaactccagacacataatgtcagattcaccaaagttgaaatgaaggaaaaaatgttaaggcagccagagagaaaggtcagttacccacaaaggaagcccatcagactaacagcagatctcttcgcagaaactctacaagccagaagagagtgggggccaatattcaacattcttaaagaaaagatggggaaaaaacagagcagaaaaactggaaactgtaaaaagcagagcgcctctcctcctccaaaggaatgcagctcctcaccagcaatggaacaaagctggatgtggaatgactttgacgagctgagagaagaaggcttcagacgatcaaactactctgagctccaggaggaaattcaaacaaatggcaaagaagttaaaaactctgcaaaaaaattagatgaatgcatcactagaataaccaacacacagcagctcctacaaggaaaacactagacagctgaacagcaagagacatcacagagcgggcgcc

SEQ ID NO: 576549 - DNA, 1009 bp, Homo sapiens
tttcagtggaaagtgtacctcatctatattttgtatcctattcttcaattgcagtgcatagggagctttcaccccgttatagactgagtcttatctttatgttttttttagcagattgcctatgtctcctcttggattgccgactgcttttaattcatgtcttctgctgtcaatcgcggataggataacggtaggtatgaactcaatgttgtaggtctttacaccaaaaggttgtggccctaatgggcacgcagtcattcttattgtctgttaagtcaatgattctgtttcaagttatgcatagatggttcatatctaagtttttggtgacccagaattaaggccttttggaaagggttaaaccctcacaaatctatcatcttttatggtgaattacttgaaccatatgtttagtccccctaggctattgaacatgtggagatatgtgatcttacatctggctgttctggtcttgtgtttcctagagatttctgcccttgaaaaatacaagggcttgtttggtgagagcagaacttagatggtgatgatagttgggcctctggtctacaacagattgtgcattaactcctttggaaagcttcgtgtataatcattcttaactttctttggtgaagcgtaagaaatttagagtagttgaaatcttataggaagggaacttctgagggcccagataaatagtgtctcgacgggcacaattcttaaactgacttaactagctgtaactatagtttcttgtggatttattgcactgatgttgtaccttgtggtatatctgtccctattataataagtcgttgttttctcctctttaatattgctgtgaacagtggtgcccattgtagcatatgtttgattgtttgtttaattatttcataagaaactacgttaatttcaccttactttcaattgtaaattagcctgtcttcctatctggatttttttgtgtgcatacatattctactggacttaactacgtttgcagtattta

SEQ ID NO: 576550 - DNA, 239 bp, Homo sapiens
cgagctgaggcaggagctggcgtgttgtgagaggtggagatgcagtagcagagatcgcgctactgcactccagccatgttcaaacagcaagactctgtctccaaaaaaaaaaaaaaaaaatttaattaccctggtttgaaacaagcctggtcaacttggggaaacctcgtctctactaaaaatacaaaaagttttgctgggtgtggtggcaggaccctgcctgtagtcccagcttctgg

SEQ ID NO: 576551 - DNA, 85 bp, Homo sapiens
ctcaggatactcactattagagttggattacagtgacttttgctataagccaatgtatattcaatggcctgaaggatctttattt

SEQ ID NO: 576552 - DNA, 1382 bp, Homo sapiens
  misc_feature (422)..(422): n is a, c, g, or t
  misc_feature (494)..(495): n is a, c, g, or t
  misc_feature (505)..(505): n is a, c, g, or t
  misc_feature (530)..(530): n is a, c, g, or t
  misc_feature (546)..(546): n is a, c, g, or t
  misc_feature (571)..(571): n is a, c, g, or t
  misc_feature (597)..(598): n is a, c, g, or t
  misc_feature (833)..(833): n is a, c, g, or t
  misc_feature (917)..(917): n is a, c, g, or t
  misc_feature (920)..(920): n is a, c, g, or t
  misc_feature (992)..(992): n is a, c, g, or t
  misc_feature (1039)..(1039): n is a, c, g, or t
  misc_feature (1045)..(1045): n is a, c, g, or t
  misc_feature (1077)..(1077): n is a, c, g, or t
ttttttttgtagagatggagtctcactttgttgtccaggcttgtcttgaactcctgggctcatgtgattcttctgccttggcctcccactctgctgggactataggtgtgagccattctgcccagccatattgtcaaataatatttaaatgatatttaaataagatgacaaaacactcctggtacaatgaatagatttatgtatatgtatgtcaagagtgagagagacataaagactgtctgatatttactaaatttttaaatttatatttactaaattattaatagtaattttactggtagtggttttatagtaattttccttttaaaatctattttctttctttcataggtgaggaaaataaactacctgaaggtttccctttaaaaaaatctgtatttggggggcttcccactttgggngttagagctcactgggcccagggattcttatccaggggaggggatctatggggtacccaggtgggctcaatnnatggacactntgaccctcctgaaatgacacctgtnatgtttagtgcaagtntcttcaggggagactgttcacagcnctatcagattctcaaagctgctcccnnttctccattacagggaagggaggctgggtggtctgttcagggtaacacagcaggtgaatagcagagctgggatgtggctcactcccactctgtagtgctcagcaggggctgctggaagctgtttaaaggcagctcttacttgctgaaactccctggaatgtctctgaccaaaaagccagggaactaaacacctctggtccctagccagagcttgggaatgccagactgcccccanggggagcttgcagcctcacaagtgccggtgcagggctgggcagcccaggggtatttgggggagggaagagagcataggggccanacnatggacatgccatggccgacgggatgctctgggctgcaacatttatacatgggtgatggcagagagcgattnggctcagtagtgacagaatgaaattacatgttttctccaaacttaanggctgnccaaggacaacccttcttaatctctcagtctntacagcccacattcataacaggaagataataaacctcacttgcctcactgcattgacgtggggataaaatgatgtaagctatcttgtcaaacactgagctggaactcgctctccctctagttctccagggtaaaaaacatggtgagcatttcagatcataaatctatgtgcactttggaataataagtggttctggtgcagtaagaggcttacaaaagcagcagtacttcaataaagtactaacagactacgtttattcacattatacacaatttcccctctccctggttttattttttcacttt

SEQ ID NO: 576553 - DNA, 889 bp, Homo sapiens
tccccaaaaaggaaggattgtggttgtggctttaaaaaccctgtgcgattccctttggccctctaaattttcccctttccaaagtgggcatcagcttttggctttagaactttagtcccgttggtggagcaactacctaccttggctaggctctgagatgcaaagagcaccacctttctgctttcaagtgggcaattatctatgcaatttccaggtgtccctataataccgccagcatttcccacttgtctaagacactgttttggctaagggaccccatgatgctatacacacacagataaactcctcaatttattaaccacaggggatgtgggttgttccacttcctgggaaaaccccatcttaggtagaaaattatcctaggtggaagcattattttatgacttaataccctgggcactatcatagtttaacttaccttactttaaattgctcagaacacctatttagcctacagttgcgcaaaacaaagcttttttacaatgaagtgttagtacctcatgtatctcttgaactgtctggaagttgaaaattagaccgggccagtcaacgggggcttacacctgtaatccagtgcttgggagccaggtaggacacttgctgggccccgtgtatcacccatggtcgcactatggggcccttttccaaattctaagtaggcatgttgttggcgcctgtgccagccgagaatgggcggcgacctgacccgagttctggtggaagccactgccgtccccgggggcgactttaattgagggctgccgagggggcgcgcgcgcctcgagtccccctgtgagggggcctttgtttttgttctctcttctttcttgtgcttactgttctctcgttctcttcgccgcggcggcag

SEQ ID NO: 576554 - DNA, 897 bp, Homo sapiens
  misc_feature (225)..(225): n is a, c, g, or t
  misc_feature (277)..(277): n is a, c, g, or t
  misc_feature (336)..(336): n is a, c, g, or t
  misc_feature (396)..(396): n is a, c, g, or t
  misc_feature (429)..(430): n is a, c, g, or t
  misc_feature (433)..(433): n is a, c, g, or t
  misc_feature (457)..(457): n is a, c, g, or t
gctcattccttcggaaacggaattggtctgaatgctccgggatgaagtaacccaggctggagatccagagggcccctgagcgccccaccggccaacggggctgtgggcccagcatttagcccgcattgggcacccaacattttcccggagtgctgggtcctgtggttctggaggcagaagaccgtttttctctctgccttccattctctgtttcttgctcctttngcccctcggtccatccttccctctgttcttccttccctcccccggttttttnctccctttctccctccctccctctttctctcccttccggggtccctccttccacccatnctttcctagctccatccttccatctcactctatctccgttcctgtctcatctctgcctgncttccctcttgcctggaaagggcagcacctcgnnttngcatgaggtctcgggcctacattnagttgcaaggcgctccatggtgctggcaaggaggctggcgggacacgggttagcaagtgatggtgagcgaagaggcagaggagtcgagctgcagacaaggagaactggcctggcttctgccccgagccagttgtatcgcggactgaggtctccgacaacccgcctgaagaacgcggggaaaaagggatgagagctccgcctgggctagtcagagaacccaggctgctgcctggaaacccggccatgcgcagtagagagccacttccgggtacctggaccggcctgggatcccgggatgctcaggaatcctttcttgtcattcttgacagcctcctctgtgtggagtctctcgctggacctgggaatcagggaatcttaggcaggtcagctgaagggagacacgccttccataccagcttgaggtcaccggaagaaagcgc

SEQ ID NO: 576555 - DNA, 282 bp, Homo sapiens
gaaactttaagcccccatttaatattcagattccattaggaccttaaacagattaacaggcaaaaaaaacaggcttacttccccagaagcctcaaggcttcttggaatttctgttaaaaattcagatgtactgatgataaatttctaaataccacaatttcagccaattttgttaccaaatgggaaaaaaaaaggaaggtttttttgaccacagaacctgttttaaaaattgggggggaaatggcagttacactggcgaatctgtgaaaaccagagttcgga

SEQ ID NO: 576556 - DNA, 332 bp, Homo sapiens
cgacggctgccgtcttgactgatgggggggtgacacgaaaggaacgggctaccgttcgtgactattccgtagtcgtgtgcagaacatgactcacgggtgttacactgggcttccgctaccagatgaagtctgtgtatgctcacttccccatcaacgttgttatccaggagaatggttctctatgttggagatccgccatttcttgaggtggcaaatacatccgcacggttcggatgagaccaggtgtcgcttgttcagtatctcaagcccagacagatgaattactccttgaaggaaatgacattgtgcttgtttcaaattcagcggcttag

SEQ ID NO: 576557 - DNA, 234 bp, Homo sapiens
gaatctgtttttctaactgcataacttcgatatctactcaagttctttaaagagactgtaacttgtatctactaatcactagcggttgtgaagctttaataagaaaatacttgtaaagcacttgtatcatacatgttcaacacgggttggtattgttggatataggccatataaactggctgagacttacactgtgtttgccttgtgctgttagttgacactttagttcttctg

SEQ ID NO: 576558 - DNA, 281 bp, Homo sapiens
ttaatgttcaattcccacctaccagtgagattatgcgggttggttatgttctgcgatagttactgagaatgatgatttccaatttcatccatgtccctacaaaggacatgaactcatcattttttatggctgcatagtattccatggtgtatatgtgccacattttcttaatccagtctatcatcgctcggacattcgggctcggtcccaagctcattcgcctatcgtgcaatactgccgcaataaaacatacgctgtgcatgcgctctccactacgcagc

SEQ ID NO: 576559 - DNA, 207 bp, Homo sapiens
taatatcctctttctgtggaatataagcaagctttgagacaatgagtggtaatcctaaaccaatcagaaatctggtccccccacttgggcccatcagggccatataaagcctagaaatacacaaacattgtgaaatgttcagtgttttttattactttttattatataccttagttcccgacaaacgagatgttttagttttccagt

SEQ ID NO: 576560 - DNA, 262 bp, Homo sapiens
tcgtgtgaagtggctgggatgacgccgtttctctgacgtaccccatagatcttggtcatggagccaaacccagtgctacccggaggtacaggtgtcgcgctgtggaaacagctcgcgtgttgaaccagttctcatacgtagggagcaagctctttgtgctatggccagcttgatggtattcacccattttttggactttcagctttcccggagtatttgaggaagggtgccagagctctgacgaaatacctgctggttcacg

SEQ ID NO: 576561 - DNA, 118 bp, Homo sapiens
  misc_feature (13)..(13): n is a, c, g, or t
  misc_feature (28)..(28): n is a, c, g, or t
  misc_feature (36)..(36): n is a, c, g, or t
  misc_feature (55)..(55): n is a, c, g, or t
  misc_feature (117)..(117): n is a, c, g, or t
ttcacccgaaagntcccttttattaaangaaattgnctaactccaaatatatggntcagaattagatgtcaagaataaagcagttgtccgagtctaagtttctatattattaataant

SEQ ID NO: 576562 - DNA, 469 bp, Homo sapiens
  misc_feature (218)..(218): n is a, c, g, or t
  misc_feature (228)..(228): n is a, c, g, or t
  misc_feature (258)..(258): n is a, c, g, or t
  misc_feature (263)..(263): n is a, c, g, or t
  misc_feature (271)..(271): n is a, c, g, or t
  misc_feature (318)..(318): n is a, c, g, or t
  misc_feature (322)..(322): n is a, c, g, or t
  misc_feature (345)..(345): n is a, c, g, or t
  misc_feature (385)..(385): n is a, c, g, or t
  misc_feature (469)..(469): n is a, c, g, or t
tactgtgagcagtggccaagcttggcatttcttgtagcccagatgtcatggaggaattcatacttgctacctacagataaagaaacagaaagtcaatgacttacccgaggcatttagccactcctacaacttaattaaaaaaaaagaccaaaacccaaaaacaaaaaagaagacaaacaaaaaacaacaaaacaatgggcaaaaggtttgagcaaccntttataaagntacacagtgaccaataagcacacacaaatnttgcntaacatcntagttgagcattaatgactgctcaattaatatatgcaattaattgcntgtntaaatgcaattaacatgcaatanatataccatgagatactattacacaccggtagatggctanatttaagactgaccatatgagcatggtgggtgtccagccactgggactctccaccttactggtggggtatagggggcccaccan

SEQ ID NO: 576563 - DNA, 446 bp, Homo sapiens
  misc_feature (7)..(7): n is a, c, g, or t
  misc_feature (21)..(21): n is a, c, g, or t
  misc_feature (91)..(91): n is a, c, g, or t
  misc_feature (175)..(175): n is a, c, g, or t
  misc_feature (442)..(442): n is a, c, g, or t
  misc_feature (445)..(446): n is a, c, g, or t
ctgtccncctatgatcaaaanttccctccccttttaaggcctgaaataatactcccactgtatgccatagaaccccatttcatttaccccncagacacataggttgccttcccaccttttgtcctactgtcaataatgcctccctgtgaacacagttaacaagttcaggccgcgngtgtcacgccctgtaatcccaacactttgagaggccaaggcgggtagatcgcctgaggtcaggagttcaagaccagctgaccaacatggtgaaaccctgtctctactgaaaatacaaaattagctgggcgtggtggcaggcacctgtaatctcagctacttgggaggctgaggcagaagaaatgcttgaacccgggaggcggaggttgcagtgagccaagatcacaccattgcactccagccagggcaacaagagtgggactccaantann

SEQ ID NO: 576564 - DNA, 303 bp, Homo sapiens
cccatgtcacaggatgatttctgaggatcaactcaggaggatgtctgttggcatctgtggggagaagccagatctgttcagctgtgtgtgtgtgtgtgtgtgtgtgtgtgtgtgtgactgtgtatgagagtgtgtgactacgcatgtgtgattgtgttcgtgactgattgtgtgtgtgtgactgcgtgtgtgactgggtgtgtggctgtgactgcgtgtgtgattgtgtttatgactgagactgtgtgtgactgattctgtgactgtgagtgtgactgtgtgagactgtgactgggtgtgtgg

SEQ ID NO: 576565 - DNA, 814 bp, Homo sapiens
catcctgatccagtcagagaagagtgatcgtcgtcttaacttcgtgtcatgctatgacgtactagaaagtcttctgaagtacatgctggatattatcgaggattgaatggctgtacaagcgtgtcaggataaatggactcagagatgtctctacagcgaataaataacatacataatataccaagcatagcgtctagactatgggtctagcacatgtgaccgatcaatggtccccgggagtaaggtgtacttccaatcaggcaggggaccactgctcggtgtgaaagaggtatcatttgtacccctggatgcttggtgtgagacctcaaaactgtttattccctatgatacactcgtctgagctctgggaacccctttagaagacgaggtgcgtcaaatggaggcacacgaagtagaattagctctatgcataggaatatggcagagatagaggatgagagtgtgtaaatagtaactccactgaactgactaaggtgatacaatcttggggttaacgaccgggtccttatctagatattttatacaatattctaggataatatgctttggtgtgctgaatcgtgaagaaatgtgttgatcaaattagacctttcgatagatattatatacgaaagtgactggaaatatgccaagtagtggtacgccaagttccgtatgggtgaatgtgaaaaggactcctggttggtattcgatattaagtagttaaaagtatgaaagccaacagattaatgggggtcaaagggtcaatgtcggctagactgtggcattacattttgagtacaagtggctattg

SEQ ID NO: 576566 - DNA, 833 bp, Homo sapiens
gggggcctacggggcggcaaggcgggcggtccttcgacctgcggcgcttcctgatgcagccgcaggtgttggcgcgcgcgtgtgcttggtcttcgccttgatcgtgtctcctgcatctatgtgtgaggtgctacagcattgcccacgagtctaaggcgagatgtactgcgtgttcaacccgcgacgagtgtatgcctgccgcgtatggcagtgccatcggggggtgcttggccttccttggcctcggcctttcttcttggtggtcgacggcgtatttccccccaggatcagcgaacgcctacttgaacccgcaagttcctggtcattggtgaccttgctcttctcagctctctggaccttcctgtggtttgtgggtttctgcttcctcagccaaaccatgttggggcagtcaccaagcccgaagggacggtgctggctgggggccgactcttgtgagggcaagccatcaccttcagcttcttttccatcttctcctggggtgtgctggcctcccttggcctacccagcgctacaaggctgccgtggacgattcatccaggaattacgttgaccccactcgtgggagccctaacagtgagtaggcctcctacccagggtgcatcctcgtggacaagtaccaacagccatcccttcagccagaacgcgggggaccaccgagggctaccagcctgccctgtggtcttggcggcgggttgccgtgggaggggggccgcgagggcctccccttttgccctgggatttcccatgagcgctcttgtgaatgcggccccctctttaccggtccatcctgttgcgggtgcccacaggtttgg

SEQ ID NO: 576567 - DNA, 134 bp, Homo sapiens
tacttttcacaggtgctcggacggattcttggaaaagtgaacagcgccggctacaggttagcattataatcagtctagttggcacagtggcatgcgttcggttcatcaattttagtgggagggcttccagcctc

SEQ ID NO: 576568 - DNA, 539 bp, Homo sapiens
  misc_feature (105)..(105): n is a, c, g, or t
  misc_feature (128)..(128): n is a, c, g, or t
ctagaggacccagcgtaatatgtaacactacacccatagtacatttaaaaggtgatgctaatactttaaaatgtttaagatatagatttaaaaagcattgtacantgtatactgcagtgtcgtctacnatggcattgggacaggacataatgtaaaacataaaagtgcaattgttacacttacatatgatagtgaatggcacgtgacaattttgtctcaagttaaaataccaaaaactattacaggtctactggatttatgtctatatgacaaatcttgatactgcatccacaacattactggcgtgcttttgcttgcttttgtgtgcttttgtgtgtctgcctattaatacgtccgctgcttttgtctgtgtctacatacacatcattaataatattggtattactattgtggataacagcagcctctgcgtttaggtgttttattgtatatattatatttgtttatataccattatttttaatacatacacatgcacgctttttaattacataatgtatatgtacataatgttattt

SEQ ID NO: 576569 - DNA, 111 bp, Homo sapiens
tcccgactgtgatctgtggcttcttcctccttgtctcttgtatggttcatgttctactttacccttttacatgtgcacagatcacccttcgtgcacagatcacccttcgtg

SEQ ID NO: 576570 - DNA, 345 bp, Homo sapiens
tttggtctttgctcaaatatttctggatttcttaaatgtacctttataattaatttctactttaattacattgtggttcaagaacatacttagtgtttttcagtacctttaaatttattgagatttgtgttagggcctagcgtatggtcttatcatggagagtgttgcttgtatattctgctctgttgggtggagtattagatatcagttaggttggttgatagtattgttcaactctttcatattctcactgattttctctatttgttctaccccttatttagagtgaagtgttgaactctccagctattactgttgaattatctagtctgggcaacagagcga

SEQ ID NO: 576571 - DNA, 345 bp, Homo sapiens
atagttctctattatgctgacatcaaacccagctgtttgcagacccagctctagtcccacacctgcctcagaccactttccccagggctccagcctgcagtgtcctttcctagtcttacaacacttctctgacaatggaatactattcaaccagaaaaagagagagaaatcctgtcttttgcagcaacagggatatacccgaaggacattatgctaaatgaaataatccaggcacagaaaggcaactaccgtacaatctcacatgcagaggctaaaaagttgctatcataggagataacagaacagtggttaccaggggtggggaggagagagggggatggagca

SEQ ID NO: 576572 - DNA, 239 bp, Homo sapiens
caggtacatacattacacccctataactacaaaacttcaccatcgggtgcatttgatttatgttatatatacagtagggatctacttcaggaaaatgtgatagtagtactggataaactatttcatccgctgtatcctcacccaaaacacacacacagagcaaactcccttacataaaagccctcatatccactggcagaccccgttcgcatcatgaactccctgtgaaacttcgccat

SEQ ID NO: 576573 - DNA, 536 bp, Homo sapiens
cacgagtgtgctaaaattttttttttgaggggggcacgagggctactgtgtcaaaactgtgcatttacttgtgttatttgactttcaaaatactattaccttaatgggcaaataatcagaacatatcacactataggatggatataaggatatgaggaatttacatttaaatggtatataccgatctagaagtgaagtgagaatcctctttttagaaagtgaaccatggatctgtgaccaaggtctaactgtgaaaaggggacattttacacttttttctttggataggatcaggtcttaagaacaggcccggtaactggaggaatgggaaccgctttgatgagaaaaatgggctggagagaaggagaaggagtttggaaaaacacagaaagcgattaggaacccatactagatgatttaaaacagacccaaaaaggctttgtttcccttgggaaaaaggcccaaagaaggtttgggaacttttttgttgcaatgaaagatctgtgaggggttccgggcctgttttgtggtctgtt

SEQ ID NO: 576574 - DNA, 326 bp, Homo sapiens
gtgccatatgcatcataagtcctgcctgttactggtgtagtagccgcctatgtaccttctagtaatatttcatacttattgcgtattatagccagttctcttagatccagcttttagtagatttcatgtgtatagtgtaaagttagggtccaactatcgtacttttgcatataaatatctcatttttccaaaatcatttgttgaagaggctgtcctttccccattaagtggtcttggaaccctcaccaaagatcatttgactatatatgtgacgatttatttccaagatttatattctattctataattctatatctttgggcaat

SEQ ID NO: 576575 - DNA, 414 bp, Homo sapiens
ctagttcctagtcattgctctgaattgtagcacttccttcatacttcagtcttgagtggacatgaaacctgaaaattatgtgtttctatgaaaatcacttattgatctgcacaagaccgagaggatattactaagttgatttatgtttatgcaataatgtagatcaaattattttgaaatgttttgagtctagactgaataagtgagttttcctttgaataattggtattgtgtagataaggcctttattcctctcattcaatctagaccaatttgaacctcagttcgtcttgtgtctggtaacgtcaggagccatcaggatccagaataaagaatgaatcttatctctcctctgctctcctcttctccgcccttcttcctacttcaactccttttttttcctctcctttttct

SEQ ID NO: 576576 - DNA, 575 bp, Homo sapiens
atggccccttggtcccgcagttcctaggcactggcacctgaattttgctccgagagggagtcctagcggacggacgccccgatgccagaaagaccacgagggtgacttacccccttagaaagagacgactgaatgaaaatgggcccccagatactgcaagcccataaaaaagggattatgacaagagaggggaacagcatacaggaacatcaagcacaaaagaagcatgcacagcaaacgacgaaaacggcgcagagacacaacaacagacacgaagccacaaccccaagcaataagcgaaccgaacgcctgacaacggaaggacgcacaccatgcgtctcaacacagacaggaaccccgcacaaagcacagaagtagcacaaagcggcccgcgagccgaagatacacagacgccaaaggacaacacacaccaccgagacccaacagaatgctccacgacccaagagaaaggccggcaaacgcgctcaaacaaagcccatcgggacaaaacgtaaacgagcgacacaccgacacaacaacactcaaggcaacaacaccaagaacgacggctcccg

SEQ ID NO: 576577 - DNA, 204 bp, Homo sapiens
ctgcagccgtgccgccgccgctctggagagaggagcggagagagccacgtcgctgtaccaatatctcagccgcgcagtccgaagagtgtaagatgttcgcctgcgccaagtcgcctgcgaccccctctctgatccgagctggatccagagttggcatacagaccaatttcatgcatcagtagttatctcggaccagacgcttag

SEQ ID NO: 576578 - DNA, 607 bp, Homo sapiens
atatacatggcatgcaccaaaacgaggacagttctgcattttccagtgggtgagcacggagagtaatcgctatagtctcgatcatatttctgcacggttcacttctcaggtaggtggatccatccttggcatatcacataagtacaagaaaaagaagtatggactaactcggttatggtataaggggatggtagtcttagaagggaattatttcatgatatagggaacaaaatttcatttagacttaaccaaattcgggtggtaccaggtttggtttccatacatttacctctcctacggatgaaaaagtaagtcaccgtgaactactactttctttcttatttaatccctttttttcccacatttcctccaaggagacacggatggacttggccttaacttccagggatatcggggcccggtggcatgatgctgagaaccaaacagtagtgaaatacatcaagttggaacggtaggggtcacttagtgctgtcatcctacctcaccccaagcaatgtcatgctaagaagaggagaggacgggcgccgagtctcatggctgtaatcctaaagtgggagagggcgggcaggcaatcactaagccagga

SEQ ID NO: 576579 - DNA, 132 bp, Homo sapiens
  misc_feature (27)..(27): n is a, c, g, or t
  misc_feature (64)..(64): n is a, c, g, or t
  misc_feature (68)..(68): n is a, c, g, or t
  misc_feature (78)..(78): n is a, c, g, or t
  misc_feature (89)..(89): n is a, c, g, or t
  misc_feature (97)..(97): n is a, c, g, or t
  misc_feature (126)..(126): n is a, c, g, or t
atagatttttaccttcttccttatttncttagcatgctttgtttctttgcatttagtatttctnaatntcaaacattntttcggttttntttggccnaattttttttccttttttccagacattcncatttc

SEQ ID NO: 576580 - DNA, 377 bp, Homo sapiens
atccgacttcttgtgtaacaccttagagtcagcttgcaagatatgctcagatcctacagaggatgaaatagtgttcttagttccagatccaatgcaaaaaccttgcttagagaattattgcggatctatacattacttcacgaatctaaagtccttcatattattcaatctcacgtcgactatatttggaggctcttcatattctactaattcttccagccgcctactgtcttagttgttgttacataactccagtccttaaagtagctaagagatgtgatttttatccaagtatcccttctagctacaagtattcttctaaatcggttctggtctacgtaaacaccctcatcttctcaagctttaccttctaactt

SEQ ID NO: 576581 - DNA, 398 bp, Homo sapiens
  misc_feature (5)..(5): n is a, c, g, or t
  misc_feature (61)..(61): n is a, c, g, or t
  misc_feature (117)..(117): n is a, c, g, or t
  misc_feature (133)..(133): n is a, c, g, or t
  misc_feature (139)..(139): n is a, c, g, or t
  misc_feature (141)..(141): n is a, c, g, or t
  misc_feature (143)..(143): n is a, c, g, or t
  misc_feature (148)..(148): n is a, c, g, or t
  misc_feature (172)..(173): n is a, c, g, or t
  misc_feature (176)..(176): n is a, c, g, or t
  misc_feature (205)..(205): n is a, c, g, or t
  misc_feature (215)..(215): n is a, c, g, or t
  misc_feature (231)..(231): n is a, c, g, or t
  misc_feature (235)..(236): n is a, c, g, or t
  misc_feature (238)..(239): n is a, c, g, or t
  misc_feature (242)..(242): n is a, c, g, or t
  misc_feature (260)..(260): n is a, c, g, or t
  misc_feature (263)..(263): n is a, c, g, or t
  misc_feature (266)..(266): n is a, c, g, or t
  misc_feature (269)..(269): n is a, c, g, or t
  misc_feature (278)..(279): n is a, c, g, or t
  misc_feature (282)..(282): n is a, c, g, or t
  misc_feature (316)..(316): n is a, c, g, or t
  misc_feature (327)..(327): n is a, c, g, or t
  misc_feature (332)..(333): n is a, c, g, or t
  misc_feature (359)..(359): n is a, c, g, or t
tacanaaaaacaatataatttatctttacaaaaattacagccaagcaataggaaagggggntgttaatgatgaagatagcaacacatatgtttagtacatatatcttacacattganatgctacatcttatancctganangncatgngtagagggggaaggggggtaaatnnggnctcattactggggttaagacttatttggnaggaatttanttcttatatgtgacanattnngnnaanactttctatataggggtnggnagnggntgacggtgnntcncattatagatctgggaagttgggtcttctttgtnggcagtataanatttnngaccagtatcaaaattgtggtaaaanacaaattgaagggattttctagtgtatgcgaacattacg

SEQ ID NO: 576582 - DNA, 422 bp, Homo sapiens
gctaggaacaatttcagtagctttgccctgaaccaaacgagaaaacaaaagggaactcccgtatgacccacgtcacgtggggcactcagagtgtgtgcggcatgatcctcggttgctcctcctctcactttagtagaggacgcggtggacagctgatttccttcagttgtttacccacttccgtcattgtcctccgctagaataacagagtagttggtaatcatggccagaaggggggtgggggcagtgtgaggacttggggtttttgtgctgtgtgacacaagaaaaaaaaggacaatctggaatccccaactccccctatccgaaaaaaaagagggtttaaggggggcaaaatttgaagttttaaaaaaggaccaagttcctgaaattcaataaaatatttttattaattttaatggaaa

SEQ ID NO: 576583 - DNA, 484 bp, Homo sapiens
cccatgtggtatagctgagtgtgaacgcgccctgacactgccatgctcagccccgagctgcttctgctctgccagcagccatgaaaggattctttgagctccgggtgtaattgtcgttctttctgccaacttcccggggctcaggcttgcgtaactgcactgtcgggggcttccctgcctgcctctgggacgtggtttgggtccgtgtcctggaagcgtgtttgtgagcatgttcctcgtatgaatgtgtttgtgagcagcttctcggatgggggactgcttgggaagcagctgcactggcacgggttcccaccctcaggccctcacccgttcccctgacctctggccctgcaggagctgagcccaggtgaccaccctgagaaagggcagaacacacctggcctaaagccatcaagacacgtggagagggggcagctaagcagaaagaggggggcttcctggaggacccctctggcagtgcagg

SEQ ID NO: 576584 - DNA, 522 bp, Homo sapiens
taagggctgtgggtttagaaattaatctcctatccaactagatgcagaatgagttcccagtttccacagtatggtaggacgtgcattggagaagttcttctcttgaaatgagaggatcgatatgtaagtagattccaggtgatactatgctaattgtaaacagttgttgttttttacagttgctccgtaaagactgggtgagtatcctgtaggccagatgcctggcctacaatgctgtgtgccttggtaactcgaaagcatatgctgtgccttcctccagagaccactgtgttccctcccagggtggtgtgagcatcctctccaggagtttttattagcagttttcttatgagggagggtcagcatcaggagcttggcattttctgtgaattgttcatatttgttgcccatttgcttttgggatgttgacctcttttagattgatttgtaccttttttataagttagccctttgggtaagagttccaagtatttcttctggtttgtcagtttctccaccaaa

SEQ ID NO: 576585 - DNA, 394 bp, Homo sapiens
tcgatcacagtaactcgactcctgtaatgcacataacatattcaacccagatgaacacactaaaataatttagaaacaggctaaaataattcctatgctgagagctctgtaaacatctggaccaatcttattctatcatatcacaatgtactttaataactaagtctattctaggcacatggccacgactacttgcataggtaacagatgatgattctcaatataagatgtatgttgctatggcatcaacaaagcagtgatctgtatgaatcaattctcgttatttaccaggatcattatgaaggaaaataaaaaattactgggttctcgtagttacatgtttacatttatgataaagtgtaaagtttagcacgtaagtatgggtaccgagctc

SEQ ID NO: 576586 - DNA, 196 bp, Homo sapiens
ccctgatccagatatctctcagtgtcagttgcctgcgctatcgaattgaagaggaggaagaggcatttacttctctgctgaaaagcaatgggaagtgcagacacatgcttcagaatgtgactccttaaaattctatccacttggaacggaaacagtctcctcctttaagcctcgagatataccaaacattatctcc

SEQ ID NO: 576587 - DNA, 424 bp, Homo sapiens
aacacagtagcaggaggtgcaagttgaggcggatggagtcacgtacttggtgtagttaggatgtgtccccttacattcttgcattggaaacttaattcctgccctcgtgagtggattactgttgctgtcacgggagtgggctccttatcacgtgagtggctatctaatcaaagtgagctctctttggctctctggctcttgcgcctgtcagcatgtgatgccctctgcgggctttgacataccaagaaggccctcaccagatgctggcaccttgatcttggacttcccagcctccagaactgtgagcgcaatatccttctgttgcttataatttacccagcctgtgatattctgttacagcagcagaaaacataccaagacatggatgtgtgtgtgtgttggtgggcggtgaggaggttattgg

SEQ ID NO: 576588 - DNA, 364 bp, Homo sapiens
gtttttttgggttgcccacttatttagccactggcatttaaatgggaatttttccaacttttaaacctttatttttgaaggtaattttgttttttgggtgggccttccgtgaagtttttgggctttttttccgacaactgactgggttttttttgggatggatttggcttttgggtttaatcctttaaggtcctttttttggccggcccttgttacttaaactggaaactaagtaagtttttttttgggggattttttttaaaattttttttggaagtcccttaaacttaatttggaggaaaaatcctggtgcttttaccataaatttggataaattttttttaagggaactcccctttttgga

SEQ ID NO: 576589 - DNA, 158 bp, Homo sapiens
  misc_feature (53)..(53): n is a, c, g, or t
  misc_feature (130)..(130): n is a, c, g, or t
accgtaggagcaggcatgacttgcccacgcctgagtcgcctatcaaaagcagnttaaacaggtagtcatatgcggggttcatggcggcggtggtgggccgctcggtcgctcccagtcgattctgctccgnctcccgttccggataacacgttcgcgag

SEQ ID NO: 576590 - DNA, 1321 bp, Homo sapiens
  misc_feature (269)..(269): n is a, c, g, or t
  misc_feature (427)..(427): n is a, c, g, or t
ggtcctgcgcatcttctttagcgtcgccagccgagccgacatcgctgaggacacctagtggtggaacgtgtgaaagcgtccgagatggtccaacagaggagtatctgggtcagtagttggcgctgcctggtctagcgcatgggactcgcgtctctgtgaacctgctaggtaatccgtggatatagtggccatcaatgaccccttcattgacctcaactgacgatggtttgactatgttccaatatggattcctacccgatgggtcgaanacttccgatgtgcgaccagctcaaaggcatagagtaaccggcgcaagcctggtcgatctcaatgcgtagaatcccaatccaccgagtcgttccgaggagccgacgatccactcgcaaacatcgaacgctggcggcgatgccttggcgcttgacgtacngtcgctggaagtccacttggcggtacttccaccgaccgagtggaagcagaggctgggggcttcattgtagcaagggggggacgccaatacagggtcatttcatcctactggaacgccctctggctgatagcccaccgagtggttacagtgcatcggcgtgtagaaccatggagatagtatagacaagcatggctcagaggatcatcaggcacatgcctcgctagcgtcaacaagtaggtgtagacacgctctaggccataggttcatccgattgacaactttgggtatacgtcggaaggactcatcgagcacgagtccatgccatcgactgggcatctcaagggagatcatggtggcatgagcccactccggggaaaacttgtgggacagttagattagggctggcgaggaggcatctccaataaacattcattctctcgggcctccttgctaggtcgccttggccaaaggcctgtgggcaaagggtcatccccttggagtgaacggggaaagctccacttggccatggggccatcccggtgtcccccaagtgggccaccgtgtccagtgggttggaacttgacccctgggcgggtacttaaaaagaaacaacctttgccccaaattaaattgacatggaaccgttccaagggacggggtgggctggaaaacccgagggcgtttccgaggaggagccgccccacaaagaggaggagacatcactggagcgagtaaacacagtgtgaggacccccaggggggtcgttccgcccgtgatgttttaacaaacgagagaaaacgcaaacactcctcaacactattgtagtgcacgaggacgtgctgcatgtacccctcacagcgagacaccatatgttgagacaaccataaccgtgga

SEQ ID NO: 576591 - DNA, 172 bp, Homo sapiens
cgataaatgggtacgatgaggagtaggaggttggccatgggtatgttgttaagaagaggaattgaacctctgactgtaaaagttttacagttttatagcgattacctgggctctgctattcttaaacaaaccctgttctttgggtagggtgtcgggtataataactaaggtt

SEQ ID NO: 576592 - DNA, 598 bp, Homo sapiens
  misc_feature (595)..(595): n is a, c, g, or t
ggacggcgctgctcggtcgagtacatcccttatgaggctggcacctacagcctcaacgtcagctatggtggccatcaagagccaggcagtccctttcaaggctccctgtgcattgatgtgacaagatgcgtccaagagtcaatgtgctctgcggcccggccttgagcccagtgcatgtgttcgtgccaacctcctctcagtccttccaggtggacacaagcaaggctggtgtggccccattgcaggtcaaagtgcaagggcccaaaggcctggtggagccagtggacgtggtagacaacgctgatggcacccagaccgtcaattatgtgcccagccgagaagggccctacagcatctcagtactgtatggagatgaagaggtaccccggagccccttcaaggtcaaggtgctgcctactcatgatgccagcaaggtgaaggccagtggccccgggctcaacaccactggcgtgcctgccagcctgcccgtggagttcaccatcgatgcaaaggacgccggggagggcctgctgggtgtccagatcacggatcccgaaggcagccgaagaagaccacattcagaaaccatgacggncgt

SEQ ID NO: 576593 - DNA, 893 bp, Homo sapiens
tccgccctccccccgcgcctaaaaatctcgtgggtttggatttccacatcccacgcatctcccctctagtatatactccggcgcgctctattaatgtttctcccccgccgctgcacggtgtacgtgatgagggaaatcgcctcgccgtggccctccgttgcaacataatcagctcacttcgggctgacgtctcgcgcgacacttttcgctgccccacgcccacatattgctgctggtgtggtgatatcacgccctgccggattccagctcgtcatcatcatctctctgcgcactctattttctctcgcatctcgtcgcgcgcggcgatcactcgcgcacccactcaatatcgctcccgcgcgcgaggggttttgctcccgccccccactctctcgcgtctcggcggcgcgctcctctcgtcgattttttgtcctaacctccgaggggatcggtccgtatcgtctccccacaggcgcccaccactggtcctgctcccccccccccgcgggggcgaactccccctccccaccgcttgtcttctctgggtgggcgtccccgatcgggggggttctgtcgccccgcgccgctcgtattgccctctcggcgcgcatctatgtcgctcgcctctctcctctctgtcctcgggcagctcttgcctgcaatcaccccccctgttctgcatttgggtggatactccccgtgagttcaccccgcggccctcttttctccacaaggtccgcgcattgacctccctcttctattttctctcgggtcgtctaggctggcggggactactctggccacccctgttggcgtctgccggacttagcagggcatgcgcctacttgtcccccgcccgtcactcccccctgtgggccccaccccgcccccaa

SEQ ID NO: 576594 - DNA, 103 bp, Homo sapiens
ggtatcccggtctggaaagatgtccagctgcccgaagttctttcggcggcactgacagacagccaaggcaatgaggaagacaatggccagcgcaaccacgaca

SEQ ID NO: 576595 - DNA, 227 bp, Homo sapiens
  misc_feature (47)..(47): n is a, c, g, or t
gcggtgattgaggatccccccgcgtacagttgcgccagatggaagtntaaccttcactccagacaagcagtttgtaggcaaaccagatccagtcaccgtaaaacgcgtggataagaacggtactccagtcactgcgacttacagtccagagtttactaaggtgactccaactggaacaggcgcaactagcacaggtcctcaaggacttccgcaactggtacggcggg

SEQ ID NO: 576596 - DNA, 104 bp, Homo sapiens
taaattagcaaccgctcgactacggtaacaaagatataatcacctaggactacaaatatttttaggactcacgttaactcacatttatacagcagtcgacgcgg

SEQ ID NO: 576597 - DNA, 382 bp, Homo sapiens
aacagcaactaggggggttagcacttgtgctaacaatttatgagcaaaaggcttagaatttgatgatgtcctcctttacaacttttttactgattcgtgaggcttataaggaatggaagatcatttcctcattcacacctacctcaactgactccagagaggaaaaccggccattggttgaagtacccctggacaaaccaggctcttctcagggtcgatctctcatggtgaatccagaaatgtacaagctcctcaacggagagctgaagcagctgtacaccgccatcacacgggctcgggtcaacctctggatctttgatgaaaaccgagagaaacgggctcccgcattcaaatacacattagaagagacttttgaaatatc

SEQ ID NO: 576598 - DNA, 1205 bp, Homo sapiens
aaattgcctaaaatgagattatctaaatacatgaatactggtcgtccaatgcagcaacttgaccatattgctttctggtgtaactgtttgatggcccattatcccacactttaggttatgtagtcctgtctcacctcgtgccagtggaggctatccgtatgttgaaatattgctcttaatgacccgcacatgatattggtatcattgtttggcgcaccatggttgctattagttatctccgccacagtatctctcagacgaggactatccacatcgatggggcatctcggagtaactactttgcttctcgtgtcatgagtagtagtgccgatcttccaatcagcctactaatgccagatgacaattagaactaaaagatttcgattgggtggggaccccgggtaatccaggattcagctgctactagtccgagttcgcttgttacctcatccaccatggtcctgttcggaattaatcaagtgttacgcgaccttggggagataactccttgtgcagcttatcccagccttattaattctaccttttgccacgttgtagtgaccgactaataacgtcacgttaggacgttaactacccgacggaatggcacctggaactgattgtgccgttaacctcctagagagtctgtctctggccctggaataggccgtaattgtgcaaagttggtaaaggcggcaagagatcaatgggtcgataatggcaccgctaatgaattcttggtacaatcttcgacttcagttaatggtaccccagtgtagtgttccactaacctgtgcacagacgctctcgtccattacagtcacggcacgtaatttgtccagaacaacatacgcggcgtgcaatgagtgggaccccacactatggataggccgcatgttcccgttactccacgcacccgtgtagccccacgcggtcgcgaggggtaaacagatcctcgtgacttgggcggaagtgccccttaagttaacccaattacttaatgaaatatattgggtgctcccggtgtcggttaatcagctcggtatctctaagagtagccccggatattaattatactaggtcacccgcaacactatgaaatgattagcaaccgaatcgatactgccagcgtatcgtctccctttctaacccgtactatgcatgttagttgtaggaatagaccgttatatcaacttctccgacat

SEQ ID NO: 576599 - DNA, 414 bp, Homo sapiens
ggtggagtggaagcggagacaacagagcgcctgtatggtggggccggccagtgcttgcgtggatcaagcgtgctcgcaactgggtacagctactcggtggtgcggacgtagatcatgcagtggagtgtcggcagctggtcttagatgaagctcggaggcagtcggaaccggaaagtacacctacgtatgcattgacccgtatcacatagaagacaaatcagagtgctatactgggaccgcacgctttcacgctcttttccacgtcagcgtcacttcgaagacggctcgattatgctggtggacatacagagatgcttcctgccagtgacaaagcggcacccgtcacgatggccgcgtgagatcgtgtgaccgacaacggggtgttccccacgattcctagctgcttggaagggt

SEQ ID NO: 576600 - DNA, 961 bp, Homo sapiens
ttgcaagtgcacagaaacaacctgcggggaaagtccagatagtctccaaaaaaagtgagctacagccatattcagtccaagatgtggttccaaggacaatattaagcatgtccctggaggtggtcatgttcagactcagaacaaagaacagtggacactctcataaggtctcctccaacgtgtgtgcgatctaacgagctaaccactcaaagacacaagcctggatggacggacgatgtcaagatacgcaaacgctcagaagtatgaaccttcacaggacgaacgagacacacggacacaacaggatgagacgactccacatcgaacataaaaatgatgcgagaagccaccacataaacaatgacaagagaacagatgacaagaatagaacagaaccatgaagagacgacagagacgaggaaacacagcagagaacacacaccagaagctacacaggagcacacgcaaacaatgaacacaggaacgaaacggaaagacacagagacacaaatcatcaatagagcgaaacgacagaaccaaagaaaagacaagagacaaacaaaaacaagacaaactaaagaaaccaagacaggagacaccgtctagaatgagacacaaagacgcagcaaacacataggaaaaaaagaacaggaataggaagaaaaacaaaaaaggaaaaacgaaacacaaggcacaaaaaggaggaagagaaaccagagaaaccaacgagaagacaacaaaaggaaaaaacagagcaaaggaacagaagcagaaaaccagagacacagaagaagaaaaacaagagaaaaacagacagaggaagataacgaagacgaaaaaacgacatagcaaaagaagaagcaagacaagcaacacgaaaaagaagaaaagagacagtagacaacaagaacagcacaccagaaagaagaacgaaagcaagacaaaatacaaaaagccacac

SEQ ID NO: 576601 - DNA, 317 bp, Homo sapiens
caaaaaaaaaaaaaattataataataaaaacatggtataaaagtttcaacaaagacttagtagcactggtgtcacatctggctggaactaaagattttccaaccattggggtgcatggcttggcatttccagttaagatattcatttaatctatgtcccggctagtttactctgggcaagactggaagatgaggtactttggtgggtgggggtgatccaggcggtaaatctgaatttggcatgatggcctttccctggccatgatcctcctggggtgaggctaaatgattggtttggttgtggggcctcacgccaag

SEQ ID NO: 576602 - DNA, 351 bp, Homo sapiens
  misc_feature (181)..(181): n is a, c, g, or t
cctaacaggtgaaggggtggcatatgaatgtgcttcaaggcacctaaaccgtggggaactgaccgcttagccaaaggcttttatttcctagcttacctgatattactgggggagggtgcaaaggggactctcacccatccacagaagacaaaatggcaccagccagtcttccacgtggganccgggtgcaggtctctctaggttccccagcttgggggtgctcagcttctgtgtcgggggctggctcgttagagcagtgggtcccacacgaggcagctgtactatggacacttggctgtccactcagtttcaccacctgccagggaaagatgatggctgtgaaaagaggca

SEQ ID NO: 576603 - DNA, 308 bp, Homo sapiens
gagatgtagactcactctgtgacccacactgaggtgcacagggctgatctcggctcacatgtaagctctcgcctctctggggtcaagcgaatcttctggcttagactcccgagtagctgggaatacaggcacccggcataaagcccggctaaattttggattttggtagagacagggtttcaccatggtggtcaagctgtgcttgaactggtgaccttaagtgatacggccgccttggcctcccaaagtgctgggaatgcaagtgtgagtcacttcgcctggccagacctaaaatctttaagtggcga

SEQ ID NO: 576604 - DNA, 1041 bp, Homo sapiens
gccgcgtccgccccggagcacagagcctcgcctttgccgatccgccgcccgtccacacccgccgcctagctcaccatggatgatgatatcgccgcgctcggtcgtcgacaacggctccggcgatgtgcaaggccggcttcgcgggcgacgatgccccccgggccggtcttcctcctccatcgtggggcgcccctaggtcaccatgggcgtgatggtgtggtcagtgggtcagagaggattcctagtgtgggcgacgaggcccagagcaagagaggcatcctcagcctgaagtaccccatcgagcacggcatctgtcaccaagctgggacgacatgtgagaaacatctggcatccacactcttctacagatgagctgctgtgtggctcccagagtgagcagcccctgtgctgctgaccgagtgcccccctgaagccccaaggcgcaaccgctgatgaagatgacccagatcatgttcgagaccttctaacatgcccaggcatgtacgttgctatccaggtctgtgctatccctgtgacgccatctgggcgtacctagctggcagtcgtgatggactccggtgacggggtcatccatactgtgcccagtctacgaggggtatgccctcccccatgccagtccgtgcgtctggacgctggctggacgggactctgactgactagctcatgaagatcctcaccgagcgcggctacaagttcagcaccacgtgcgagcgggaaatcgttgcgtgacattaaggagaagctgtgctacgtcgccctggacttcgagcaaggatgggcacggtggttccagtcctccctggagaacagcttaaagtgctgacggcacgtcgttccccattgggcactgagcggggccggtgcctgagggactcttttccggccttccttcctggggctgggggtccgtggggtccccgagataccttcatccctcatgaatgttgctttgcacatccggagaacttgttccccacattggtgtttgggggccccaggttcccgggattcgcaggagcg

SEQ ID NO: 576605 - DNA, 195 bp, Homo sapiens
tcttgccacgactcgcaacataacaatgacgagactccatcatgtagcttgtgacacttttattttatcagtcaccggggaacttttcagtgatgaacatacacagggtaataaaccttcacatggcttcaaaaggaaaccaagcaactcttctctaatctactcttactataacttcctaagcgcacaccaaac

SEQ ID NO: 576606 - DNA, 295 bp, Homo sapiens
gtcaccatattcctccatctaacagttacttttaaaaaaattaaactttggaggccatgacggcaggagtgagaggccaggagtttgagaccaatctgggcaacatagcaaaactctgtccctacaaaacaataatagtaattataaattagctgggcatggtggtacatgcctatagtcccagcaactcaagaggctaatgcaggaggactcgcttgagctcaagaggttgatgcaataacctatgatcatgccactgcactctagcctgggcaacagagcaataccctgacat

SEQ ID NO: 576607 - DNA, 403 bp, Homo sapiens
acagagctttcctgtgagtatacccgctctcgtatagcggtaaaagtgttgtgttatacacgccgggattgcgcctgtgtttaaacgcaatgtgtgggcacatctcaagagccaacctcttgtgatggtaatttatacgaattgggctctcaatcgggaggtccacccattgtgtcacggccaagaattcacagttcgctgggtccaagaatatattggggaaggtatgtagaatttaaagtttagtccccggaagccgtggtcctggaagttcaggtcccttggtggcccatttgttttatggttaaggaaggatcgtttaccttgtttggtatgttaaggattggtaaggattggaagcccattaggcctaggattatggcgggcaggtatagttcagacg

SEQ ID NO: 576608 - DNA, 835 bp, Homo sapiens
ggggaggcctgggagggggtgttaggtgttttagggccaccgagctcaaacacaaggacccctccccggcaccaggagtaatggggatctgggattgatcaagcggtatcgtttgacagtatgtaccaacaacaacagaagaggagggagggtggagacgaggggaacagcgaacaacaccggaacatcacacaagacccggaccagaaatacactgcgaccacacgcagtgtgtgtgtatatccacgcgcgcccacacaaattccacccacgcggagacacacaggacaaaaagaaagcaaccttgtgatacaaacaccacccacgcaaacaattatagccaacaagagatgtggtctctccagcaaaagccaccacaaccaccactggtgaacagcggggtgggcctccactcaatagaaaacaacagaaacacaaaaagacgagagaaaacaaaagaaagaagaaacacagaaaaaaagaacacaaagcaagcaacaaacaaacaaagaaaagcaaaaaaacaaaacaaagaagacagagaaaatagtaaaaacgtaaaaaaaagaaaaagcaagacaacaacaacacacaacacaagaacaagaacacgaagaatcacaaaacagaacaaaagtaaaaaacaaaaaacaaacaatgaaagaaacaaaaaacaaaaagaaacaaataagaaaaaaacacaacaacaaaagacagaaagaacaatacaagaaaacaaaaaaaacacaacgataaaaacaacaggaacaaaaccaaaaagaaaaaaaaaagaattcaaaaaaagagaaaaaagtaacgcaaacacaacgacacg

SEQ ID NO: 576609 - DNA, 121 bp, Homo sapiens
agatatatgccgtggatcacttaagatcctgctctcctgctgaggtggagactgcagtgagctgagatcgcaccattgcactccagccgtgggcaacgagtgcaaaactcagtctccagat

SEQ ID NO: 576610 - DNA, 108 bp, Homo sapiens
agttatacttgtttcattgtggaccttctcaactattttcccaattaggataaaggattattgttttcattatacgactctacagaataggacacttgaactcagtta

SEQ ID NO: 576611 - DNA, 497 bp, Homo sapiens
tggtctaaccaatccagcgtggcattcacccatcgcaaggtgttcaagagaaaagtgtcgaacaatcccaaccagcggcagctatacagagaccagtgcgtgggtcctgccattcccatctctttgtgtcttactctaaaaagactcagagtaacaacgcagaaaataggcgcgcctgaggcaggaccgggagtcagggcggaaaagtctagcagagcagccaaggtgcctgcagccccctgcccggtctggagaggaagaagactagccaaaacccctccaggaacagagtcctctccactagcacaaaatcgaagcaggaattccccactttgggagcgtgccagcctcggccaggcctccatccagaatggcaaagacagcctaaccatgccagggtcccgggcctccacggcttctgcttctgccgcagtctctgcggaccggccccgccagcaccagagatccatgtcggcctcagtgcaccccaacattga

SEQ ID NO: 576612 - DNA, 147 bp, Homo sapiens
tagctgttctagaggatcccgaagacaatgtgtactggattcgatgttaccaattaaagaggccaggcatgcatgcctgtaatctcagcactttacggggctgagacaggactgcttgagcccaaaagtttgagacaaagggaaaca

SEQ ID NO: 576613 - DNA, 671 bp, Homo sapiens
tggggcttattattcaaagttaactggacctccccagccaggggggcaaacccttccgagcaggggaaaggtccatctagctgccctctgtggggttgcagcctatgccatggaaaggtgtactgggaacgcaggagggacgcctctgggcaagggcaggccttaaaacgcaaggggaagtctggagcaaggaagatctggcacactcaaccccatttggatattcttactcctctctcagtctatgggccacgcgttgtggtgtagcactagacacgccggtgtgcccacaaatgagctcgcgggtgggccattctgcccggggtgtgaaaagcggcggggcccttttcttctaaagaatcctatgtgggtagtgggcgcgcacaagaagacaatatatgaggtctgtgcaaaccttacagggtccctcccaccgggcactagtgggaagagacctctctatttaacactatggtgggaggcgggccgacaaggggaaaataaaaactgcgccaaaaaaacgaaggggcccccaaggtggtggtccccacaagaggtctccgagggggcgagaacacacatttgtaacgagggcgcatgtgatacagtgtgggggacccaaacaaaaagaggaggggggtccctttggagtggaggagcggggacaacaa

SEQ ID NO: 576614 - DNA, 345 bp, Homo sapiens
tgaagtttaaaagggagagtggcttaaccacactaacagcaagagtatggatgagaatgacacagtccaacatttaaaccaattaaggcaaatattcagtgagtgagttcaattattattattttttgagacaagggctcactctgttacccaagctagagtgcagtggtgtgatcttggctcactgtagcctcaacttcttcagactcaagcaatcctcccacctcagcctcctgagtagctgggactataagcgtgtgccaccatgcctggctaattattttattttattattctatgagatggagtttcattcttgttgcccacgctggagcgcagaggtgc

SEQ ID NO: 576615 - DNA, 128 bp, Homo sapiens
cgttactggcatttgtgaaatgatggtgaaagtaagtggtagcttttcccgttctttttcttctttttttgtgagtgtcccaagcttgtaaaaattataatgttatggctactcatgttagcctccat

SEQ ID NO: 576616 - DNA, 585 bp, Homo sapiens
  misc_feature (27)..(27): n is a, c, g, or t
  misc_feature (171)..(171): n is a, c, g, or t
  misc_feature (316)..(316): n is a, c, g, or t
  misc_feature (543)..(543): n is a, c, g, or t
  misc_feature (545)..(546): n is a, c, g, or t
  misc_feature (555)..(555): n is a, c, g, or t
agatctctatgttcgatcgatatcatngttggcttctacatactggtagcaagatgacttctgattgtcatcttaggtaaattatagataaatgaaacaggccagtaatcatacactaagattaataaacagcacttcaaaattaaccgcataagggctgtgcttgcagcnaggtttcacaagacaaggcacccagattttttcttcccacgtctagcttgcagacgcagctctcgtagccatttcaaaaacctctctcactccatctttggtctttgctgaacactccatgtacccaaaagcgccaatcctgttngccatatctctgccttcttcaggtttcaccggctcctgcttcatcttggctagctcccgccttgtgtgctcatcattccgaagatccttcttattcccaagcaggatgatgggcacgtggggacagaaatgcttgacttctggggtccacttttctgggatgtttctaaactatcagggctgtcgatggaaacacacatcagtataacatcggtatctgggtaggcnannggctcaggngatcataatctacctgcccagttgtgtcca

SEQ ID NO: 576617 - DNA, 860 bp, Homo sapiens
  misc_feature (95)..(95): n is a, c, g, or t
cctggattagccgggttgtatttgcaaaccgcggagtgagtattcccgtggctgtgtaggggctaacaatggaccacccagaaggacgttcaacncttccagaagcagcaacccaatgatatatactctgtgggagcagttgtcacacagaaaatttgaaattaaaattctaggggatccaaatcagatgcagaagaatgtggtctaccgaaataagttgtaccaaagaaaatggacctaaaaagaatgtggtcgttttgatagctcgactgaaatgctgggaatccaagaggaatgtcttcaccttataacttgggattgtgctctctttcccatttctgatgtgtgggtatagctttacgatttttgtgcttacagtagtttccccactttatctttcgggagattacattttccagaggcccccagtgaaactcttgaaaaccctcaaaacatgttacccaaaccttttatagcactgttttttcccatatatattattaccctattgatacaacgtataactgtatacaaattaacgcatagccaagagatttatactaagttgtaatagaaacatttgataacatactataatacaacgttatgtgaattgttggtgggtcctcttgctttcacaattttctttttgtacagtactcacctatttagaatgtggttggctacgggtaaccaaaccacggagggcactttggttagggggcctactgtctttggattcagttttactttggttatttacgccctttttggggtccaccacatttgttccgcttgcctccggcttgtgtgtttttttcaccactggtgggcccccttttaactaattggttgacgct

SEQ ID NO: 576618 - DNA, 518 bp, Homo sapiens
  misc_feature (1)..(1): n is a, c, g, or t
  misc_feature (17)..(17): n is a, c, g, or t
  misc_feature (28)..(28): n is a, c, g, or t
  misc_feature (61)..(61): n is a, c, g, or t
  misc_feature (98)..(98): n is a, c, g, or t
  misc_feature (245)..(245): n is a, c, g, or t
  misc_feature (437)..(437): n is a, c, g, or t
  misc_feature (487)..(487): n is a, c, g, or t
  misc_feature (516)..(516): n is a, c, g, or t
naaaattgacagtatgnagaaatattgntcgttaataattatgtactgtcttaatgtgggncacttcatttgttagtataatactagataatagcagncctagttctttaggtatttgacgattcaaattttttttttgttttttgtttttgtttttttttgagacagagtcttgactctgttgacccagggctggcgtgcagtggtgtgatctcggctcacttcagcctccgccacctcaaggncagttcaagcaattctcctgcctcagcctcccgagtagctaggactacaggcgtgtgccacctctcccggctaatttttttgtatttttagtagagacggggtttcaccgtgttagccagggtgatctcgatctcctgacctcgtgattcgcccgcctcggcctcccaaagtgctggaattactggcgtgcncccaatgcccagcctcaaatatgttttaaaaaatatcattgtcctctctnttaagattttttaagtattttctcaaggnct

SEQ ID NO: 576619 - DNA, 357 bp, Homo sapiens
  misc_feature (280)..(280): n is a, c, g, or t
  misc_feature (292)..(292): n is a, c, g, or t
agcatcgtagcttcgagctggcggataacggcatcatctttacgccgcaatctgacctggtgatcctgaactacatcgccaactatatcattcaaaacaatgcgataaatcaggacttcttcagcaagcacgttaacctgcgcaaaggggcgacggacatcggctacggtttacgtccgacccatccgctggaaaaagcagcgaagaatccgggttctgacgcctccgaaccgatgagctttgaagattacaaagccttcgttgccgagtatacgctggnaaaaactgccgnaatgaccggcgtgccgaaagaccagttagaacaactggcggagtgtatgccgatccgacaagaag

SEQ ID NO: 576620 - DNA, 394 bp, Homo sapiens
cgaggatcacatgccaataacctccaatgtaggaggtggtcagcaggcaatctcctgggctataaggatgcggactcatcctcagcagcgcccatgtttgtgatacagcggtgtttgtaggatgggtttaaaaataactagaaaaactcagggccctccattttctcagatctccttgaaaattgagggcttttcgatagtttcgggtcaggtaacgatgggctccctggcgtaagcttttcaagggattttttggaggcttattggtaacttgtgataggaactttgggaccttgatacttacgtatcatgtggagaagagcccatttaacaaactaggaagatgaaaagggcaattgtggccaaaactttgggaaaaggaggttattggcat

SEQ ID NO: 576621 - DNA, 173 bp, Homo sapiens
agtaatgcaggaaggccgacaaaatcctccccctaacctcccccctggggccctggtgatgctttatgaacctaaatggggtcaaggggtccccggccacttaaagattatttaagacttgaacttggaggagatactgatttatgtagcgaataaaagccgtttttttttta

SEQ ID NO: 576622 - DNA, 1038 bp, Homo sapiens
  misc_feature (2)..(2): n is a, c, g, or t
  misc_feature (13)..(14): n is a, c, g, or t
  misc_feature (171)..(171): n is a, c, g, or t
  misc_feature (354)..(354): n is a, c, g, or t
  misc_feature (523)..(523): n is a, c, g, or t
  misc_feature (660)..(660): n is a, c, g, or t
  misc_feature (665)..(665): n is a, c, g, or t
  misc_feature (1005)..(1005): n is a, c, g, or t
cntgggggagctnngcgagctgcgtcatttgggtcgggtggtcccgctcgtatttgggaccaatcaccctctttttttcgcccacaactccctacgggggcgagcgaagccagcccggacacagaacgattgtaagataaacggagcattacagaataacagctataaatnaacaatattgaatatgataacaatcgaacttatcgaaaaaaagaagataactttaaagtatgcataagtagtataagtattgaactatataaaagtataacaaatatgaaatacattcacaacctactaacaacaccacacacaacctacacccacgccacacacacacgtagttagtttatngatcaactagtatcatggattatataatataataattttgagtccagaccattaaattgtcattacagaaacttgaaaaatagcaccaaacaacgccacgagaaataacaaaaaaacaaaaagaaaaaaaacgaaaacagacaagatcaattacaatatgcaaagaagnacccctcaacataacaaaagaatcgaataataacctaacagaatttcatctacgctagtataattatctcttattttagattacaatgtctttgtgttgtgtttgagtagtgcgcgacctgccacctccatatatancctcntgactactttacactactgacggacactcccagcagtgagatgtcaccgtcatgctcgtcgtgtgtaaatcatcgatcgttacttatatagtactaggccggttatgacgtatgggttgagacagcttcattcttaccgacagtagctatacattgcctatagacatacctcctcgactgcagcaaccgtacgaagctaaagaggtcatagatgacgcagaagagggagctgtatacatcatattgattatgtatagatgagtgtagtatgcaggttaaggtgtgagattatacagtactacgatacttatatttcacatatatagaaatatgaaaacancaatccacctcacacatgactctcgaaactcga

SEQ ID NO: 576623 - DNA, 2284 bp, Homo sapiens
ctgggtcatcggttccctggaaggagaaaaagctgccaattgaacggggcctcccggtcccaggaatgtcgcgacgcggggacgacgcatctcacgacgtcagcctgaaacacgcgggcctttcatcacccgagactcctccagcccaggagggccccgctctttcgcctgcctcctgggggagagcctctggacgacgcacgcgacagcgttttctccaaaaaaggcagagaagagaagcgtagcagtggccgcaagggcgacgggcggcgaagggtactacgcacgcccgcgtcggccacgcggagagatacgcccgactcgagtcccgcggcgcacgcccctagacgcccgaggtgcgcgggccacgcccctcgcccggccaagagcacgccccttccgtcgcccctcccgggggcgtttaccgttcctccccgccccggaagcgcgttcttacctccttcctcgcgagagttccgtgcaccggcacccagatcgcgcgagacagcggaaggagcaagagtgggaggcgcgcgcggaggccgcgacggacgcaagatggcgacggcgaccatagctctccaggtcaatggccagcaaggaggggggtccgagccggcggcggcggcggcagtggtggcagcgggagacaaatggaaacctccacagggcacagactccatcaagatggagaacgggcagagcacagccgccaagctggggctgcctcccctgacgcccgagcagcaggaggcccttcagaaggccaagaagtacgccatggagcagagcatcaagagtgtgctggtgaagcagaccatcgcgcaccagcagcagcagctcaccaacctgcagatggcagcagtgacaatgggctttggagatcctctctcacctttgcaatcgatggcggctcagcggcagcgggcgctggccatcatgtgccgcgtctacgtgggctctatctactatgagctgggggaggacaccatccgccaggcctttgccccctttggccccatcaagagcatcgacatgtcctgggactccgtcaccatgaagcacaagggctttgccttcgtggagtatgaggtccccgaagctgcacagctggccttggagcagatgaactcggtgatgctggggggcaggaacatcaaggtgggcagacccagcaacatagggcaggcccagcccatcatagaccagttggctgaggaggcacgggccttcaaccgcatctacgtggcctctgtgcaccaggacctctcagacgatgacatcaagagcgtgtttgaggcctttggcaagatcaagtcctgcacactggcccgggaccccacaactggcaagcacaagggctacggcttcattgagtacgagaaggcccagtcgtcccaagatgctgtgtcttccatgaacctctttgacctgggtggccagtacttgcgggtgggcaaggctgtcacaccgcccatgcccctactcacacctggagtcatcacaggtgtgaccccagcccgtcctcctatcccggtcaccatcccctcggtgggagtggtgaaccccatcctggccagccctccaacgctgggtctcctggagcccaagaaggagaaggaagaagaggagctgtttcccgagtcagagcggccagagatgctgagcgagcaggagcacatgagcatctcgggcagtagcgcccgacacatggtgatgcagaagctgctccgcaagcaggagtctacagtgatggttctgcgcaacatggtggaccccaaggacatcgatgatgacctggaaggggaggtgacagaggagtgtggcaagttcggggccgtgaaccgcgtcatcatctaccaagagaaacaaggcgaggaggaggatgcagaaatcattgtcaagatctttgtggagttttccatagcctctgagactcataaggccatccaggccctcaatggccgctggtttgctggccgcaaggtggtggctgaagtgtacgaccaggagcgttttgataacagtgacctctctgcgtgacagtggtccctctccccggacttgcacttgttccttgtttcctctgggttttatagtgatacagtggtgtccccggggccaggcgcgctctgcccagcccagcctacagtgcggataaaggtgcggatgctgctggccctgaaaaaaaaaaaaatccttggcggcggttacaacgtcgtgcttgggaaacccttgcgtacccaattaattgcttgaagacatcccctttgccaggtgcggg

SEQ ID NO: 576624 - DNA, 2483 bp, Homo sapiens
ctgggtcatcggttccctggaaggagaaaaagctgccaattgaacggggcctcccggtcccaggaatgtcgcgacgcggggacgacgcatctcacgacgtcagcctgaaacacgcgggcctttcatcacccgagactcctccagcccaggagggccccgctctttcgcctgcctcctgggggagagcctctggacgacgcacgcgacagcgttttctccaaaaaaggcagagaagagaagcgtagcagtggccgcaagggcgacgggcggcgaagggtactacgcacgcccgcgtcggccacgcggagagatacgcccgactcgagtcccgcggcgcacgcccctagacgcccgaggtgcgcgggccacgcccctcgcccggccaagagcacgccccttccgtcgcccctcccgggggcgtttaccgttcctccccgccccggaagcgcgttcttacctccttcctcgcgagagttccgtgcaccggcacccagatcgcgcgagacagcggaaggagcaagagtgggaggcgcgcgcggaggccgcgacggacgcaagatggcgacggcgaccatagctctccaggtcaatggccagcaaggaggggggtccgagccggcggcggcggcggcagtggtggcagcgggagacaaatggaaacctccacagggcacagactccatcaagatggagaacgggcagagcacagccgccaagctggggctgcctcccctgacgcccgagcagcaggaggcccttcagaaggccaagaagtacgccatggagcagagcatcaagagtgtgctggtgaagcagaccatcgcgcaccagcagcagcagctcaccaacctgcagatggcagcagtgacaatgggctttggagatcctctctcacctttgcaatcgatggcggctcagcggcagcgggcgctggccatcatgtgccgcgtctacgtgggctctatctactatgagctgggggaggacaccatccgccaggcctttgccccctttggccccatcaagagcatcgacatgtcctgggactccgtcaccatgaagcacaagggctttgccttcgtggagtatgaggtccccgaagctgcacagctggccttggagcagatgaactcggtgatgctggggggcaggaacatcaaggtgggcagacccagcaacatagggcaggcccagcccatcatagaccagttggctgaggaggcacgggccttcaaccgcatctacgtggcctctgtgcaccaggacctctcagacgatgacatcaagagcgtgtttgaggcctttggcaagatcaagtcctgcacactggcccgggaccccacaactctgggaagcacacaggctacgggtccatgctgagtacgagaaggcccagtcgtcccaagatgctgtgtcttccatgaacctctttgacctgggtggccagtacttgcgggtgggcaaggctgtcacaccgcccatgcccctactcacaccagccacgcctggaggcctcccacctgccgctgctgtggcagctgctgcagccactgccaagatcacagctcaggaagcagtggccggagcagcggtgctgggtaccctgggcacacctggactggtgtccccagcactgaccctggcccagcccctgggcactttgccccaggctgtcatggctgcccaggcacctggagtcatcacaggtgtgaccccagcccgtcctcctatcccggtcaccatcccctcggtgggagtggtgaaccccatcctggccagccctccaacgctgggtctcctggagcccaagaaggagaaggaagaagaggagctgtttcccgagtcagagcggccagagatgctgagcgagcaggagcacatgagcatctcgggcagtagcgcccgacacatggtgatgcagaagctgctccgcaagcaggagtctacagtgatggttctgcgcaacatggtggaccccaaggacatcgatgatgacctggaaggggaggtgacagaggagtgtggcaagttcggggccgtgaaccgcgtcatcatctaccaagagaaacaaggcgaggaggaggatgcagaaatcattgtcaagatctttgtggagttttccatagcctctgagactcataaggccatccaggccctcaatggccgctggtttgctggccgcaaggtggtggctgaagtgtacgaccaggagcgttttgataacagtgacctctctgcgtgacagtggtccctctccccggacttgcacttgttccttgtttcctctgggttttatagtgatacagtggtgtccccggggccaggcgcgctctgcccagcccagcctacagtgcggataaaggtgcggatgctgctggccctgaaaaaaaaaaaaatccttggcggcggttacaacgtcgtgcttgggaaacccttgcgtacccaattaattgcttgaagacatcccctttgccaggtgcggg

SEQ ID NO: 576625 - DNA, 2452 bp, Homo sapiens
ctgggtcatcggttccctggaaggagaaaaagctgccaattgaacggggcctcccggtcccaggaatgtcgcgacgcggggacgacgcatctcacgacgtcagcctgaaacacgcgggcctttcatcacccgagactcctccagcccaggagggccccgctctttcgcctgcctcctgggggagagcctctggacgacgcacgcgacagcgttttctccaaaaaaggcagagaagagaagcgtagcagtggccgcaagggcgacgggcggcgaagggtactacgcacgcccgcgtcggccacgcggagagatacgcccgactcgagtcccgcggcgcacgcccctagacgcccgaggtgcgcgggccacgcccctcgcccggccaagagcacgccccttccgtcgcccctcccgggggcgtttaccgttcctccccgccccggaagcgcgttcttacctccttcctcgcgagagttccgtgcaccggcacccagatcgcgcgagacagcggaaggagcaagagtgggaggcgcgcgcggaggccgcgacggacgcaagatggcgacggcgaccatagctctccaggtcaatggccagcaaggaggggggtccgagccggcggcggcggcggcagtggtggcagcgggagacaaatggaaacctccacagggcacagactccatcaagatggagaacgggcagagcacagccgccaagctggggctgcctcccctgacgcccgagcagcaggaggcccttcagaaggccaagaagtacgccatggagcagagcatcaagagtgtgctggtgaagcagaccatcgcgcaccagcagcagcagctcaccaacctgcagatggcagcagtgacaatgggctttggagatcctctctcacctttgcaatcgatggcggctcagcggcagcgggcgctggccatcatgtgccgcgtctacgtgggctctatctactatgagctgggggaggacaccatccgccaggcctttgccccctttggccccatcaagagcatcgacatgtcctgggactccgtcaccatgaagcacaagggctttgccttcgtggagtatgaggtccccgaagctgcacagctggccttggagcagatgaactcggtgatgctggggggcaggaacatcaaggtgggcagacccagcaacatagggcaggcccagcccatcatagaccagttggctgaggaggcacgggccttcaaccgcatctacgtggcctctgtgcaccaggacctctcagacgatgacatcaagagcgtgtttgaggcctttggcaagatcaagtcctgcacactggcccgggaccccacaactgagtacgagaaggcccagtcgtcccaagatgctgtgtcttccatgaacctctttgacctgggtggccagtacttgcgggtgggcaaggctgtcacaccgcccatgcccctactcacaccagccacgcctggaggcctcccacctgccgctgctgtggcagctgctgcagccactgccaagatcacagctcaggaagcagtggccggagcagcggtgctgggtaccctgggcacacctggactggtgtccccagcactgaccctggcccagcccctgggcactttgccccaggctgtcatggctgcccaggcacctggagtcatcacaggtgtgaccccagcccgtcctcctatcccggtcaccatcccctcggtgggagtggtgaaccccatcctggccagccctccaacgctgggtctcctggagcccaagaaggagaaggaagaagaggagctgtttcccgagtcagagcggccagagatgctgagcgagcaggagcacatgagcatctcgggcagtagcgcccgacacatggtgatgcagaagctgctccgcaagcaggagtctacagtgatggttctgcgcaacatggtggaccccaaggacatcgatgatgacctggaaggggaggtgacagaggagtgtggcaagttcggggccgtgaaccgcgtcatcatctaccaagagaaacaaggcgaggaggaggatgcagaaatcattgtcaagatctttgtggagttttccatagcctctgagactcataaggccatccaggccctcaatggccgctggtttgctggccgcaaggtggtggctgaagtgtacgaccaggagcgttttgataacagtgacctctctgcgtgacagtggtccctctccccggacttgcacttgttccttgtttcctctgggttttatagtgatacagtggtgtccccggggccaggcgcgctctgcccagcccagcctacagtgcggataaaggtgcggatgctgctggccctgaaaaaaaaaaaaatccttggcggcggttacaacgtcgtgcttgggaaacccttgcgtacccaattaattgcttgaagacatcccctttgccaggtgcggg

SEQ ID NO: 576626 - DNA, 2438 bp, Homo sapiens
ctgggtcatcggttccctggaaggagaaaaagctgccaattgaacggggcctcccggtcccaggaatgtcgcgacgcggggacgacgcatctcacgacgtcagcctgaaacacgcgggcctttcatcacccgagactcctccagcccaggagggccccgctctttcgcctgcctcctgggggagagcctctggacgacgcacgcgacagcgttttctccaaaaaaggcagagaagagaagcgtagcagtggccgcaagggcgacgggcggcgaagggtactacgcacgcccgcgtcggccacgcggagagatacgcccgactcgagtcccgcggcgcacgcccctagacgcccgaggtgcgcgggccacgcccctcgcccggccaagagcacgccccttccgtcgcccctcccgggggcgtttaccgttcctccccgccccggaagcgcgttcttacctccttcctcgcgagagttccgtgcaccggcacccagatcgcgcgagacagcggaaggagcaagagtgggaggcgcgcgcggaggccgcgacggacgcaagatggcgacggcgaccatagctctccaggtcaatggccagcaaggagggagacaaatggaaacctccacagggcacagactccatcaagatggagaacgggcagagcacagccgccaagctggggctgcctcccctgacgcccgagcagcaggaggcccttcagaaggccaagaagtacgccatggagcagagcatcaagagtgtgctggtgaagcagaccatcgcgcaccagcagcagcagctcaccaacctgcagatggcagcagtgacaatgggctttggagatcctctctcacctttgcaatcgatggcggctcagcggcagcgggcgctggccatcatgtgccgcgtctacgtgggctctatctactatgagctgggggaggacaccatccgccaggcctttgccccctttggccccatcaagagcatcgacatgtcctgggactccgtcaccatgaagcacaagggctttgccttcgtggagtatgaggtccccgaagctgcacagctggccttggagcagatgaactcggtgatgctggggggcaggaacatcaaggtgggcagacccagcaacatagggcaggcccagcccatcatagaccagttggctgaggaggcacgggccttcaaccgcatctacgtggcctctgtgcaccaggacctctcagacgatgacatcaagagcgtgtttgaggcctttggcaagatcaagtcctgcacactggcccgggaccccacaactggcaagcacaagggctacggcttcattgagtacgagaaggcccagtcgtcccaagatgctgtgtcttccatgaacctctttgacctgggtggccagtacttgcgggtgggcaaggctgtcacaccgcccatgcccctactcacaccagccacgcctggaggcctcccacctgccgctgctgtggcagctgctgcagccactgccaagatcacagctcaggaagcagtggccggagcagcggtgctgggtaccctgggcacacctggactggtgtccccagcactgaccctggcccagcccctgggcactttgccccaggctgtcatggctgcccaggcacctggagtcatcacaggtgtgaccccagcccgtcctcctatcccggtcaccatcccctcggtgggagtggtgaaccccatcctggccagccctccaacgctgggtctcctggagcccaagaaggagaaggaagaagaggagctgtttcccgagtcagagcggccagagatgctgagcgagcaggagcacatgagcatctcgggcagtagcgcccgacacatggtgatgcagaagctgctccgcaagcaggagtctacagtgatggttctgcgcaacatggtggaccccaaggacatcgatgatgacctggaaggggaggtgacagaggagtgtggcaagttcggggccgtgaaccgcgtcatcatctaccaagagaaacaaggcgaggaggaggatgcagaaatcattgtcaagatctttgtggagttttccatagcctctgagactcataaggccatccaggccctcaatggccgctggtttgctggccgcaaggtggtggctgaagtgtacgaccaggagcgttttgataacagtgacctctctgcgtgacagtggtccctctccccggacttgcacttgttccttgtttcctctgggttttatagtgatacagtggtgtccccggggccaggcgcgctctgcccagcccagcctacagtgcggataaaggtgcggatgctgctggccctgaaaaaaaaaaaaatccttggcggcggttacaacgtcgtgcttgggaaacccttgcgtacccaattaattgcttgaagacatcccctttgccaggtgcggg

SEQ ID NO: 576627 - DNA, 546 bp, Homo sapiens
aaaaatcctacctattccattcaaaagggatgaagaggctggtatgcagtggctcacacattatcccagcactttgggaggccaagatgggaggatcacttgaggccaggagttcgaaaccagcctggccaacacggtaaaacccggtctctactaaaaacacaaaaattagctgggcatggtggtggttgcctgtaactccacctactctggaggcctacaggcaggagaatagcttgaacccggcgagacagaggttgcagtgagcccaaatcacacctatgtactccagcctgagtgacagagtgagtgagaaatctgtctcaaaaaaaataaaagaaagtgttaagtccccctatgggaatctcctcttctcctgccctctctggaacctcacttgtcagttcttcctcccactttcctgtatctttaacctatcccccacttttagctccttcccatcatcatttaaattactcaaacttcttctgtttgaaaaacctctccctaaactcagtgagaggtctcctgcacacccattgagcc

SEQ ID NO: 576628 - DNA, 346 bp, Homo sapiens
  misc_feature (344)..(344): n is a, c, g, or t
aagagggaaaagcagataacccaacaggaggtggtggggtctgacgtgtccaagtgctggcagacaccctggtcacccaggacagagcggaaaaaaaaaaaagaggtcagggttttaacgagctatgcaatctttttccaaaacccaaggttggctgcttcccacccctgcctgttccccttctccggcctcctcacaatgtgaagctgtggtgcagtggccaaggctcttgctcctgtctctcctcgggtcatgataccaccctcctcctcccaacccgggatcctcactgttgctgtccacagatttgtgaactcctggtagtaaaacacttttgcatcccnaa

SEQ ID NO: 576629 - DNA, 2341 bp, Homo sapiens
ctgggtcatcggttccctggaaggagaaaaagctgccaattgaacggggcctcccggtcccaggaatgtcgcgacgcggggacgacgcatctcacgacgtcagcctgaaacacgcgggcctttcatcacccgagactcctccagcccaggagggccccgctctttcgcctgcctcctgggggagagcctctggacgacgcacgcgacagcgttttctccaaaaaaggcagagaagagaagcgtagcagtggccgcaagggcgacgggcggcgaagggtactacgcacgcccgcgtcggccacgcggagagatacgcccgactcgagtcccgcggcgcacgcccctagacgcccgaggtgcgcgggccacgcccctcgcccggccaagagcacgccccttccgtcgcccctcccgggggcgtttaccgttcctccccgccccggaagcgcgttcttacctccttcctcgcgagagttccgtgcaccggcacccagatcgcgcgagacagcggaaggagcaagagtgggaggcgcgcgcggaggccgcgacggacgcaagatggcgacggcgaccatagctctcggcacagactccatcaagatggagaacgggcagagcacagccgccaagctggggctgcctcccctgacgcccgagcagcaggaggcccttcagaaggccaagaagtacgccatggagcagagcatcaagagtgtgctggtgaagcagaccatcgcgcaccagcagcagcagctcaccaacctgcagatggcggctcagcggcagcgggcgctggccatcatgtgccgcgtctacgtgggctctatctactatgagctgggggaggacaccatccgccaggcctttgccccctttggccccatcaagagcatcgacatgtcctgggactccgtcaccatgaagcacaagggctttgccttcgtggagtatgaggtccccgaagctgcacagctggccttggagcagatgaactcggtgatgctggggggcaggaacatcaaggtgggcagacccagcaacatagggcaggcccagcccatcatagaccagttggctgaggaggcacgggccttcaaccgcatctacgtggcctctgtgcaccaggacctctcagacgatgacatcaagagcgtgtttgaggcctttggcaagatcaagtcctgcacactggcccgggaccccacaactggcaagcacaagggctacggcttcattgagtacgagaaggcccagtcgtcccaagatgctgtgtcttccatgaacctctttgacctgggtggccagtacttgcgggtgggcaaggctgtcacaccgcccatgcccctactcacaccagccacgcctggaggcctcccacctgccgctgctgtggcagctgctgcagccactgccaagatcacagctcaggaagcagtggccggagcagcggtgctgggtaccctgggcacacctggactggtgtccccagcactgaccctggcccagcccctgggcactttgccccaggctgtcatggctgcccaggcacctggagtcatcacaggtgtgaccccagcccgtcctcctatcccggtcaccatcccctcggtgggagtggtgaaccccatcctggccagccctccaacgctgggtctcctggagcccaagaaggagaaggaagaagaggagctgtttcccgagtcagagcggccagagatgctgagcgagcaggagcacatgagcatctcgggcagtagcgcccgacacatggtgatgcagaagctgctccgcaagcaggagtctacagtgatggttctgcgcaacatggtggaccccaaggacatcgatgatgacctggaaggggaggtgacagaggagtgtggcaagttcggggccgtgaaccgcgtcatcatctaccaagagaaacaaggcgaggaggaggatgcagaaatcattgtcaagatctttgtggagttttccatagcctctgagactcataaggccatccaggccctcaatggccgctggtttgctggccgcaaggtggtggctgaagtgtacgaccaggagcgttttgataacagtgacctctctgcgtgacagtggtccctctccccggacttgcacttgttccttgtttcctctgggttttatagtgatacagtggtgtccccggggccaggcgcgctctgcccagcccagcctacagtgcggataaaggtgcggatgctgctggccctgaaaaaaaaaaaaatccttggcggcggttacaacgtcgtgcttgggaaacccttgcgtacccaattaattgcttgaagacatcccctttgccaggtgcggg

SEQ ID NO: 576630 - DNA, 2516 bp, Homo sapiens
  misc_feature (415)..(415): n is a, c, g, or t
tgcagtattacgagacgaggccatggatggtgaaggcacgtgaacttgtgtggccaacctttgtgtgccacccacagccagctttgaccttcagggactggttggggctctggttgcctggggaggggtctccaggcttcctgccctttgagcctgggccagcatcccagcacttggcaggcaggagggggttcttggggcttgggccagcctgtcccttcctgcctcctgtgtccctctgtccttgctcatcacttctgtgctggggacccttctctcttctctgctgtccctcaaggctgtgtctggaagtctcggagggcccggtggtgggccagtgatcttgtgcttgctgagctggaggacaggcgcaggcatgctgtttgcccatcccacactctgatgggcctgctanccatgcctccctgctcacacagctgcgttcttccctctgcaaaaagcttagagatggattttgacaggagggacgtaaacataatcctggttggcatcagcttgggtctgcagtggctgtgactgcccaagggcctcttggtccccaggcccacctggctagggtgccagtggggtctgctcctggcttctcccagtgggccaggcaaagcccatgcaagagtgtgtggaagtgagctggagccctcttcagggctcgtgtggcccgagagaggcctgtgttctctgggagggcacagactccatcaagatggagaacgggcagagcacagccgccaagctggggctgcctcccctgacgcccgagcagcaggaggcccttcagaaggccaagaagtacgccatggagcagagcatcaagagtgtgctggtgaagcagaccatcgcgcaccagcagcagcagctcaccaacctgcagatggcagcagtgacaatgggctttggagatcctctctcacctttgcaatcgatggcggctcagcggcagcgggcgctggccatcatgtgccgcgtctacgtgggctctatctactatgagctgggggaggacaccatccgccaggcctttgccccctttggccccatcaagagcatcgacatgtcctgggactccgtcaccatgaagcacaagggctttgccttcgtggagtatgaggtccccgaagctgcacagctggccttggagcagatgaactcggtgatgctggggggcaggaacatcaaggtgggcagacccagcaacatagggcaggcccagcccatcatagaccagttggctgaggaggcacgggccttcaaccgcatctacgtggcctctgtgcaccaggacctctcagacgatgacatcaagagcgtgtttgaggcctttggcaagatcaagtcctgcacactggcccgggaccccacaactggcaagcacaagggctacggcttcattgagtacgagaaggcccagtcgtcccaagatgctgtgtcttccatgaacctctttgacctgggtggccagtacttgcgggtgggcaaggctgtcacaccgcccatgcccctactcacaccagccacgcctggaggcctcccacctgccgctgctgtggcagctgctgcagccactgccaagatcacagctcaggaagcagtggccggagcagcggtgctgggtaccctgggcacacctggactggtgtccccagcactgaccctggcccagcccctgggcactttgccccaggctgtcatggctgcccaggcacctggagtcatcacaggtgtgaccccagcccgtcctcctatcccggtcaccatcccctcggtgggagtggtgaaccccatcctggccagccctccaacgctgggtctcctggagcccaagaaggagaaggaagaagaggagctgtttcccgagtcagagcggccagagatgctgagcgagcaggagcacatgagcatctcgggcagtagcgcccgacacatggtgatgcagaagctgctccgcaagcaggagtctacagtgatggttctgcgcaacatggtggaccccaaggacatcgatgatgacctggaaggggaggtgacagaggagtgtggcaagttcggggccgtgaaccgcgtcatcatctaccaagagaaacaaggcgaggaggaggatgcagaaatcattgtcaagatctttgtggagttttccatagcctctgagactcataaggccatccaggccctcaatggccgctggtttgctggccgcaaggtggtggctgaagtgtacgaccaggagcgttttgataacagtgacctctctgcgtgacagtggtccctctccccggacttgcacttgttccttgtttcctctgggttttatagtgatacagtggtgtccccggggccaggcgcgctctgcccagcccagcctacagtgcggataaaggtgcggatgctgctggccctgaaaaaaaaaaaaatccttggcggcggttacaacgtcgtgcttgggaaacccttgcgtacccaattaattgcttgaagacatcccctttgccaggtgcggg

SEQ ID NO: 576631 - DNA, 165 bp, Homo sapiens
  misc_feature (84)..(84): n is a, c, g, or t
tctaacgatcccttactcgaaaaggggctgctaaaacaggcagattaaagagctgaagaaagctcagaggcagtgggagctgantgggctgctgctctgggggcgtggaggggagcaccctgtagatgcaccgcgcaggccctacccccttttcccagagccctt

SEQ ID NO: 576632 - DNA, 202 bp, Homo sapiens
cgcataatgcctggtgacagactgtgtgtgtgtgtgtgtgtctacgcgcgagggtacattgctcacgtcctctctccattcccacgagtgtattcacccagaagtatacaacttcacgcttcagttaccagcatcctcctcattacttctctggtctacactctcttccagtgtagtctgttctcttagaccaaatcttata

SEQ ID NO: 576633 - DNA, 2147 bp, Homo sapiens
  misc_feature (2085)..(2085): n is a, c, g, or t
  misc_feature (2087)..(2088): n is a, c, g, or t
  misc_feature (2095)..(2095): n is a, c, g, or t
  misc_feature (2097)..(2097): n is a, c, g, or t
  misc_feature (2117)..(2117): n is a, c, g, or t
  misc_feature (2120)..(2120): n is a, c, g, or t
ctgggtcatcggttccctggaaggagaaaaagctgccaattgaacggggcctcccggtcccaggaatgtcgcgacgcggggacgacgcatctcacgacgtcagcctgaaacacgcgggcctttcatcacccgagactcctccagcccaggagggccccgctctttcgcctgcctcctgggggagagcctctggacgacgcacgcgacagcgttttctccaaaaaaggcagagaagagaagcgtagcagtggccgcaagggcgacgggcggcgaagggtactacgcacgcccgcgtcggccacgcggagagatacgcccgactcgagtcccgcggcgcacgcccctagacgcccgaggtgcgcgggccacgcccctcgcccggccaagagcacgccccttccgtcgcccctcccgggggcgtttaccgttcctccccgccccggaagcgcgttcttacctccttcctcgcgagagttccgtgcaccggcacccagatcgcgcgagacagcggaaggagcaagagtgggaggcgcgcgcggaggccgcgacggacgcaagatggcgacggcgaccatagctctccaggtcaatggccagcaaggaggggggtccgagccggcggcggcggcggcagtggtggcagcgggagacaaatggaaacctccacagggcacagactccatcaagatggagaacgggcagagcacagccgccaagctggggctgcctcccctgacgcccgagcagcaggaggcccttcagaaggccaagaagtacgccatggagcagagcatcaagagtgtgctggtgaagcagaccatcgcgcaccagcagcagcagctcaccaacctgcagatggcagcagtgacaatgggctttggagatcctctctcacctttgcaatcgatggcggctcagcggcagcgggcgctggccatcatgtgccgcgtctacgtgggctctatctactatgagctgggggaggacaccatccgccaggcctttgccccctttggccccatcaagagcatcgacatgtcctgggactccgtcaccatgaagcacaagggctttgccttcgtggagtatgaggtccccgaagctgcacagctggccttggagcagatgaactcggtgatgctggggggcaggaacatcaaggtgggcagacccagcaacatagggcaggcccagcccatcatagaccagttggctgaggaggcacgggccttcaaccgcatctacgtggcctctgtgcaccaggacctctcagacgatgacatcaagagcgtgtttgaggcctttggcaagatcaagtcctgcacactggcccgggaccccacaactggcaagcacaagggctacggcttcattgagtacgagaaggcccagtcgtcccaagatgctgtgtcttccatgaacctctttgacctgggtggccagtacttgcgggtgggcaaggctgtcacaccgcccatgcccctactcacaccagccacgcctggaggcctcccacctgccgctgctgtggcagctgctgcagccactgccaagatcacagctcaggaagcagtggccggagcagcggtgctgggtaccctgggcacacctggactggtgtccccagcactgaccctggcccagcccctgggcactttgccccaggctgtcatggctgcccaggcacctggagtcatcacaggtgtgaccccagcccgtcctcctatcccggtcaccatcccctcggtgggagtggtgaaccccatcctggccagccctccaacgctgggtctcctggagcccaagaaggagaaggaagaagaggagctgtttcccgagtcagagcggccagagatgctgagcgagcaggagcacatgagcatctcgggcagtagcgcccgacacatggtgatgcagaagctgctccgcaagcaggagtctacagtgatggttctgcgcaacatggtggaccccaaggacatcgatgatgacctggaaggggaggtgacagaggagtgtggcaagttcggggccgtgaaccgcgtcatcatctaccaagagaaacagggaggaggaggtggcaancnntgtcaantntggggggttccatagccccnganaacctaagggtcaggctaatgggcggg

SEQ ID NO: 576634 - DNA, 2248 bp, Homo sapiens
ctgggtcatcggttccctggaaggagaaaaagctgccaattgaacggggcctcccggtcccaggaatgtcgcgacgcggggacgacgcatctcacgacgtcagcctgaaacacgcgggcctttcatcacccgagactcctccagcccaggagggccccgctctttcgcctgcctcctgggggagagcctctggacgacgcacgcgacagcgttttctccaaaaaaggcagagaagagaagcgtagcagtggccgcaagggcgacgggcggcgaagggtactacgcacgcccgcgtcggccacgcggagagatacgcccgactcgagtcccgcggcgcacgcccctagacgcccgaggtgcgcgggccacgcccctcgcccggccaagagcacgccccttccgtcgcccctcccgggggcgtttaccgttcctccccgccccggaagcgcgttcttacctccttcctcgcgagagttccgtgcaccggcacccagatcgcgcgagacagcggaaggagcaagagtgggaggcgcgcgcggaggccgcgacggacgcaagatggcgacggcgaccatagctctccaggtcaatggccagcaaggaggggggtccgagccggcggcggcggcggcagtggtggcagcgggagacaaatggaaacctccacagggcacagactccatcaagatggagaacgggcagagcacagccgccaagctggggctgcctcccctgacgcccgagcagcaggaggcccttcagaaggccaagaagtacgccatggagcagagcatcaagagtgtgctggtgaagcagaccatcgcgcaccagcagcagcagctcaccaacctgcagatggcagcagtgacaatgggctttggagatcctctctcacctttgcaatcgatggcggctcagcggcagcgggcgctggccatcatgtgccgcgtctacgtgggctctatctactatgagctgggggaggacaccatccgccaggcctttgccccctttggccccatcaagagcatcgacatgtcctgggactccgtcaccatgaagcacaagggctttgccttcgtggagtatgaggtccccgaagctgcacagctggccttggagcagatgaactcggtgatgctggggggcaggaacatcaaggtgggcagacccagcaacatagggcaggcccagcccatcatagaccagttggctgaggaggcacgggccttcaaccgcatctacgtggcctctgtgcaccaggacctctcagacgatgacatcaagagcgtgtttgaggcctttggcaagatcaagtcctgcacactggcccgggaccccacaactggcaagcacaagggctacggcttcattgagtacgagaaggcccagtcgtcccaagatgctgtgtcttccatgaacctctttgacctgggtggccagtacttgcgggtgggcaaggctgtcacaccgcccatgcccctactcacaccagccacgcctggaggcctcccacctgccgctgctgtggcagctgctgcagccactgccaagatcacagctcaggaagcagtggccggagcagcggtgctgggtaccctgggcacacctggactggtgtccccagcactgaccctggcccagcccctgggcactttgccccaggctgtcatggctgcccaggcacctggagtcatcacaggtgtgaccccagcccgtcctcctatcccggtcaccatcccctcggtgggagtggtgaaccccatcctggccagccctccaacgctgggtctcctggagcccaagaaggagaaggaagaagaggagctgtttcccgagtcagagcggccagagatgctgagcgagcaggagcacatgagcatctcgggcagtagcgcccgacacatggtgatgcagaagctgctccgcaagcaggagtcaaggcgaggaggaggatgcagaaatcattgtcaagatctttgtggagttttccatagcctctgagactcataaggccatccaggccctcaatggccgctggtttgctggccgcaaggtggtggctgaagtgtacgaccaggagcgttttgataacagtgacctctctgcgtgacagtggtccctctccccggacttgcacttgttccttgtttcctctgggttttatagtgatacagtggtgtccccggggccaggcgcgctctgcccagcccagcctacagtgcggataaaggtgcggatgctgctg

SEQ ID NO: 576635 - DNA, 255 bp, Homo sapiens
cacgagtggtaggatgagaaggaagagtggcctgctcagagtgggtggtccagaggcctctcgggggaggtgactcctttttattttattttttttgagatggagatctagctctgtcgcccagcctgaagtgcagtcgtgtgtttcatgcgcgtccgtgtgaagagaccaccaaacaggctttgtgtgagcaacatggctgtttatttcacctgggtgcaggcgggctgagtccgaaaagagagtcagcaaagg

SEQ ID NO: 576636 - DNA, 669 bp, Homo sapiens
aaacataataatgggacgtgactaccatccaaatcttccacgtatttggctcactacctggcaccacactgagtaaagagaggccagtatgggatgacttaagtttgtaagccttattattagtaattatattatcatatcaaaacacatagaaatgtccctatcctttttgctttttatttagtctacagcccttaagtcattctgcctaaaattcatcaagctcctcttcttattaggtccaatatcccatataaaataaaattgccttgcatgtagtgcatgctcaatacaaacttattttactggaagtatcacttcctgtgagagcaggctgttataaagtgaagttgcttagcaatatttgaatgccgactttccccttccaattctccaacatgttctccaaatatatgtaagtatcagagacttatatatatctttttagttcctagttatacttcccaggaaattacctttccacacagtctgagagtctggaagtcaagttggatgcgggagcatcgtgcccccctatagcatacagcagtccattccaggtcgtcactcctacgccacctctcctttttgacatctgtgcacacagagtccaattataagtatagaggatcaaaacatactactgatttgagacaagaacttccatca

SEQ ID NO: 576637 - DNA, 1971 bp, Homo sapiens
agcggggcttgcggcctcagcttccggcctgcggaccccagcttccggcggggcggggcgggggcctgggcgcggcgtgtggcccttgcgggcgagcctggcggggttgcgttcctgtccgctagcaggtcaatggccagcaaggaggggggtccgagccggcggcggcggcggcagtggtggcagcgggagacaaatggaaacctccacagggcacagactccatcaagatggagaacgggcagagcacagccgccaagctggggctgcctcccctgacgcccgagcagcaggaggcccttcagaaggccaagaagtacgccatggagcagagcatcaagagtgtgctggtgaagcagaccatcgcgcaccagcagcagcagctcaccaacctgcagatggcggctcagcggcagcgggcgctggccatcatgtgccgcgtctacgtgggctctatctactatgagctgggggaggacaccatccgccaggcctttgccccctttggccccatcaagagcatcgacatgtcctgggactccgtcaccatgaagcacaagggctttgccttcgtggagtatgaggtccccgaagctgcacagctggccttggagcagatgaactcggtgatgctggggggcaggaacatcaaggtgggcagacccagcaacatagggcaggcccagcccatcatagaccagttggctgaggaggcacgggccttcaaccgcatctacgtggcctctgtgcaccaggacctctcagacgatgacatcaagagcgtgtttgaggcctttggcaagatcaagtcctgcacactggcccgggaccccacaactggcaagcacaagggctacggcttcattgagtacgagaaggcccagtcgtcccaagatgctgtgtcttccatgaacctctttgacctgggtggccagtacttgcgggtgggcaaggctgtcacaccgcccatgcccctactcacaccagccacgcctggaggcctcccacctgccgctgctgtggcagctgctgcagccactgccaagatcacagctcaggaagcagtggccggagcagcggtgctgggtaccctgggcacacctggactggtgtccccagcactgaccctggcccagcccctgggcactttgccccaggctgtcatggctgcccaggcacctggagtcatcacaggtgtgaccccagcccgtcctcctatcccggtcaccatcccctcggtgggagtggtgaaccccatcctggccagccctccaacgctgggtctcctggagcccaagaaggagaaggaagaagaggagctgtttcccgagtcagagcggccagagatgctgagcgagcaggagcacatgagcatctcgggcagtagcgcccgacacatggtgatgcagaagctgctccgcaagcaggagtctacagtgatggttctgcgcaacatggtggaccccaaggacatcgatgatgacctggaaggggaggtgacagaggagtgtggcaagttcggggccgtgaaccgcgtcatcatctaccaagagaaacaaggcgaggaggaggatgcagaaatcattgtcaagatctttgtggagttttccatagcctctgagactcataaggccatccaggccctcaatggccgctggtttgctggccgcaaggtggtggctgaagtgtacgaccaggagcgttttgataacagtgacctctctgcgtgacagtggtccctctccccggacttgcacttgttccttgtttcctctgggttttatagtgatacagtggtgtccccggggccaggcgcgctctgcccagcccagcctacagtgcggataaaggtgcggatgctgctggccctgaaaaaaaaaaaaatccttggcggcggttacaacgtcgtgcttgggaaacccttgcgtacccaattaattgcttgaagacatcccctttgccaggtgcggg

SEQ ID NO: 576638 - DNA, 1111 bp, Homo sapiens
gatgaatcatgtgacggtggcttgatggagtgaacctgtctttaaatgctgtccctgaatgtgacatgctggaggagaaccatgtgcagcccagaaaacccaggcgtggacgattgatcctgcagagcagaaggggggttccatcaatgggcgggatgaccctaaaaagcgatacttgtaattcaacaatgttacccaaggtgtatgcaaggggcttccaattgcccatatgtggtgtcagaaatacgcagcatggagttacccgtgataaattcaacacgttgggcaacatgaccaagtggctccaggagcaatgctatgtgagcgacctgagttacatatatcccaacattttggcccctttgacaaaacaagtaccccacagggcacaggcgacaaccttttggggacactatttcccagaacacactcaaacaggtattcagtcgtgttaacctaatagagcagtcttaaacaaaggattgattacccaacattaacaaatgcgataaacaccttagtgggtgagctaggcgatataccaaatacgccacaaggcaagacgaatgatggccaataatacccgactggggaacagtcaaatgtgggccaagcccatcaggcacaacaaggggacaacctttgggcataccaaattggttagatgaagaggaacagcgttgtgaggcacccaagtgattagtggtgaggaccactgttttctcttttaacgatccatgtgggaccagagatgtggagcatataacatccggagggtgggatacacgccgctttaagactccctatgacaattgtgaaattaaaaccagaaacaccagatagaacgaacatcccacgagtccccaatggcaaaaatcacattttaccagacaacattaaaccaaaaataaacacattaaacttttatcatacgatcgccccacctcgattgacccacccaaaaataaaaaaaacggaagcgaccacactgtatttaatccccaaaaactttattacattcactataaaatgacgcaagctcatacgtacagttaaattcatgcacgtttgagtcaccaataaaactattatagacaattttaagtttacg

SEQ ID NO: 576639 - DNA, 2059 bp, Homo sapiens
ataggctaggtacgaggctgggtgtttaatcggccgaggatggcgacggcgacatagctctctctcatgggaggttgaatggagcagctgaacttggctgacagtggcctggtggggaaggaagccagaagatgcagaagggcctcccctcccatgggcatgccttctgcctggtggctgcagaatgaggccggctgcctctttgcagcaaggcaggtcaatggccagcaaggaggggggtccgagccggcggcggcggcggcagtggtggcagcgggagacaaatggaaacctccacagggcacagactccatcaagatggagaacgggcagagcacagccgccaagctggggctgcctcccctgacgcccgagcagcaggaggcccttcagaaggccaagaagtacgccatggagcagagcatcaagagtgtgctggtgaagcagaccatcgcgcaccagcagcagcagctcaccaacctgcagatggcggctcagcggcagcgggcgctggccatcatgtgccgcgtctacgtgggctctatctactatgagctgggggaggacaccatccgccaggcctttgccccctttggccccatcaagagcatcgacatgtcctgggactccgtcaccatgaagcacaagggctttgccttcgtggagtatgaggtccccgaagctgcacagctggccttggagcagatgaactcggtgatgctggggggcaggaacatcaaggtgggcagacccagcaacatagggcaggcccagcccatcatagaccagttggctgaggaggcacgggccttcaaccgcatctacgtggcctctgtgcaccaggacctctcagacgatgacatcaagagcgtgtttgaggcctttggcaagatcaagtcctgcacactggcccgggaccccacaactggcaagcacaagggctacggcttcattgagtacgagaaggcccagtcgtcccaagatgctgtgtcttccatgaacctctttgacctgggtggccagtacttgcgggtgggcaaggctgtcacaccgcccatgcccctactcacaccagccacgcctggaggcctcccacctgccgctgctgtggcagctgctgcagccactgccaagatcacagctcaggaagcagtggccggagcagcggtgctgggtaccctgggcacacctggactggtgtccccagcactgaccctggcccagcccctgggcactttgccccaggctgtcatggctgcccaggcacctggagtcatcacaggtgtgaccccagcccgtcctcctatcccggtcaccatcccctcggtgggagtggtgaaccccatcctggccagccctccaacgctgggtctcctggagcccaagaaggagaaggaagaagaggagctgtttcccgagtcagagcggccagagatgctgagcgagcaggagcacatgagcatctcgggcagtagcgcccgacacatggtgatgcagaagctgctccgcaagcaggagtctacagtgatggttctgcgcaacatggtggaccccaaggacatcgatgatgacctggaaggggaggtgacagaggagtgtggcaagttcggggccgtgaaccgcgtcatcatctaccaagagaaacaaggcgaggaggaggatgcagaaatcattgtcaagatctttgtggagttttccatagcctctgagactcataaggccatccaggccctcaatggccgctggtttgctggccgcaaggtggtggctgaagtgtacgaccaggagcgttttgataacagtgacctctctgcgtgacagtggtccctctccccggacttgcacttgttccttgtttcctctgggttttatagtgatacagtggtgtccccggggccaggcgcgctctgcccagcccagcctacagtgcggataaaggtgcggatgctgctggccctgaaaaaaaaaaaaatccttggcggcggttacaacgtcgtgcttgggaaacccttgcgtacccaattaattgcttgaagacatcccctttgccaggtgcggg

SEQ ID NO: 576640 - DNA, 240 bp, Homo sapiens
  misc_feature (152)..(152): n is a, c, g, or t
cgatcctttcggggtgctgtcgggaatcgggtgttgctatgctgatgcccacgctgtgtcactcacctcaggagaaacgtgagaggcaaaaaaatcttcctcctgtggtggaggggacaaaggtggaacgcacacaactatcaatgccacangattcagtgccagtgcttccgctgttgcttgagcaggcgagcgcatttgattttctcccatatagagtctgagcagcaccatcgaatt

SEQ ID NO: 576641 - DNA, 195 bp, Homo sapiens
ctgctagccgcggcgccggtgttggggtgctcgggagcggcttgcctccttgttgcgactgtctttccgccagacgcgagctcgcggcccttgtgttgtcgacccactaccacgtttcttgcggtacacttgtccttcccagacacctggctccctgcttccccagggtgccgcccgctctcctcccggtctccg

SEQ ID NO: 576642 - DNA, 198 bp, Homo sapiens
cccgtgaatcgaacggaggaagcaggaaaaattgtgtcctcgcatttcaagaagaaaacactggctagagcagagagtcactccacaccgtgacatcgagcaggtagagtcaccccacaccgtgtcatcgagcagggagagtcaccccacaccgagcgctcgctcgggagcttagagcgattcccgtgaggtactgca

SEQ ID NO: 576643 - DNA, 830 bp, Homo sapiens
ttccattcctctaattagggaaagattcatcttgtcatacagaacaagatatcaataagcacttctctgtgcttgccaactgattttatccacttgtgtagacccctaagaggtgcagcttccaccttggaaaccttggattcgatgtaaggaagctattgcatgacatctgcgtatagaaaagaaagaaagacaactctgaaagggacagtttcagatgtgtatatctgctgtctttgatggactgtgttcatgattgtggtgtggctgtattctctccttgttaactgttcattcctattagttaatggtcttggggaggtctctgtaaaatatatggacaccacgaacagtggggctgctcacctcccaggtaaccaacacatgttggtgtttggagtctgctcatttcctaatactggatgatgtatgtaatccatgttatgtctcttagtgcaaaacagaaacatcatttccttagggctggctcactctgtcaggcctaatctaacaggcttagatagtaaggtcactgtgactgctgctatcacataaataattcaatattacatattcggaaaaaatctaaagactaagggacgggggaggccaaaacgatatcctgcccgaagggagcccaagataatcgcagtacccaagtctcttgtgtgatcgcaagagggcccctactatctgagtgggcttctacatgctagagaccttgcccttccttgttagaagggactcggatggcgcactcttctgtcccctggcacgctgggacgacgatatccgagggagaggactgggccgatttcctagccgtgcca

SEQ ID NO: 576644 - DNA, 287 bp, Homo sapiens
  misc_feature (270)..(270): n is a, c, g, or t
ccgccgccagctccagcctttgctcccctcccaaagtccctccccggagcggagcgcacctagggtacctcttccgtgcccccagaccaggctacccgttcagaccagtcagcctcggggaggcacgccgcccagaccagactgcacatccgctctcacgacttcatgcctcatgcacatgggcttcctccgagagccaatgatatgctctaaccagaattccgtggtgaagacgctcatcctcagccgtccctctgccagtcgattctntggcttactgcgtcacg

SEQ ID NO: 576645 - DNA, 419 bp, Homo sapiens
ctcgtccgtacatcatcaggacagcttccctcactgtgtatcagaaccgcaagaacgggaatagagtggtcagaacgtgttgtctcactctgaacaacgcaggagatgtacgatgatgaaagagacaatgtagtactgttggtccaaaagcatttaatctcaataaatctgggattatgtgtccttacgtagctggtcgtctttcttcacataaatcgatccatgttaccacatagtagttttagtttaggattcagtaacagtgaagtgtttactatgtgcaagggtattgaagttcttatgaccacagatcatcagtactgttgtctcatgtaatgctaaaactgaaatggtccgtgtaagcattgttaaaaatgatgtgtgaaatagaatgagtgctatggtgttgaaaactgcag

SEQ ID NO: 576646 - DNA, 282 bp, Homo sapiens
aaaatgaacggtgtcaaggtgaccagagaggggtgtctggccttagtgacacagctacctctctggggcaccctatctgcattgtctctgtccaggaagtgttacggctgactgggtgactcagcaaggcagatgtcagagctgggacttgggcgtaggcctttgtcctcatccccagcactggcctccctgtggaagatgaacatatcccagccacctgtgtacaggggctcactttgtgtgctccttgttgcctgagaagaaaccttgggcgtacgggga

SEQ ID NO: 576647 - DNA, 623 bp, Homo sapiens
  misc_feature (18)..(18): n is a, c, g, or t
  misc_feature (20)..(20): n is a, c, g, or t
  misc_feature (24)..(24): n is a, c, g, or t
  misc_feature (31)..(31): n is a, c, g, or t
  misc_feature (37)..(37): n is a, c, g, or t
  misc_feature (44)..(44): n is a, c, g, or t
  misc_feature (51)..(51): n is a, c, g, or t
  misc_feature (58)..(58): n is a, c, g, or t
  misc_feature (68)..(68): n is a, c, g, or t
  misc_feature (73)..(73): n is a, c, g, or t
  misc_feature (75)..(75): n is a, c, g, or t
  misc_feature (95)..(95): n is a, c, g, or t
  misc_feature (109)..(109): n is a, c, g, or t
  misc_feature (111)..(111): n is a, c, g, or t
  misc_feature (139)..(139): n is a, c, g, or t
  misc_feature (154)..(154): n is a, c, g, or t
  misc_feature (156)..(156): n is a, c, g, or t
  misc_feature (185)..(185): n is a, c, g, or t
  misc_feature (532)..(532): n is a, c, g, or t
  misc_feature (593)..(593): n is a, c, g, or t
gagtagacttcccttaanangtanctcctgncagtgntaaattnggggttncaaaatncaaagctcancaaananaacttttcttccattttgcncatttctaatattnangaaatttaaaatttgcttatttctaatnttaaggaagttctcngnatctctctctgtttagaatagttaaatancaattatgtttttaaatgagggaaagttgttctctgaaacatttttaggtactacagtgtccaaagttttctagaactaggaatcaggagagaaatgatatatttagctatttgtttccccacattggatatgcaggcgagttctcactttaatgtataaggaatacactgggcagtagagaagggtgtgcttcttttgttgtaatacttcttctacttcttacaattttctgctttcatcctttgacttctctcttctttcagctaaaaataggtcctcaagaatcaaagtttaaagctatcagaattctcaaagtaacagtccagtagaaccttgataataaacnccattccttcacaagcagatggctgtcattatcttatgtgtttttatgtattatgtcttgnggaatttaaaattaaaaggaaaatgtttta

SEQ ID NO: 576648 - DNA, 985 bp, Homo sapiens
  misc_feature (718)..(718): n is a, c, g, or t
gatcgtgaaaaagctttcaaaggtgtaaaggtactacacatctgcctctgttgatgacatggtttctctcaagtgactactgcagcagaatgaaggagaaccagaaagatatctaccttgatatctacgaggatgagcaccagagggaatcgaggttagctgactcacccgttggtggaacgttctctcggaacacatggtgcgttgaaaaagtgagtctactatgattgagtcccatagatgagtgcctgtgtccagagcagctgaccggaatttgcacggggtaacgtaactttaggtgtcagatcacccaaagtaaggcctggcacaccttccagaggagtgtaagtaagaagaaacttgagaatcgggccgatggaaatgcacgactgttgtgaggaacctctgcgacctgtcaaaaacataataaataataaataaatgtgtcgggggtgctaggtgcctcgtaaagatgatgtttaaagtatcactgggggatgcgggaactacatatgataggtgaaccttatggccacgggtgactttcccaacgagaacttttggatctcattcttgtctttgctgttctcccaataaaaggcccgtgacggtcaggtgtttttgaccaagcaccttactgtggtactgcgtaacttacatgctcctgaacactgtaagaccgagaagatctggtacaaatacggaggggcggagaganagcattgcgaagatggctggtcacactgtgctcccattgcttacagacccaacggccttgaaggactcattaataaggacctggcctgttaaactactggagtccgatttaattcgaaccgggactggcgtttttcgtacgcgaaaattttttcggacccaacacaggacatctagggacattataggaacctaaccggcgagcaatcttgtggacacagagcatcggcgcgacctctgacccaattgtgcgagaagtacaccaagg

SEQ ID NO: 576649 - DNA, 125 bp, Homo sapiens
tattatatatatacacacatattgttatatctatacacacacacatatatttatatatacatacacatatattttatatatatacacacacatatatatattatatatatacacatacgacggca

SEQ ID NO: 576650 - DNA, 82 bp, Homo sapiens
  misc_feature (81)..(81): n is a, c, g, or t
gaacccgtatcaccgagttgtatgaccatcaccacaataaatcttagaacattatcacctctaaataaaacttttagctant

SEQ ID NO: 576651 - DNA, 291 bp, Homo sapiens
  misc_feature (27)..(27): n is a, c, g, or t
  misc_feature (38)..(38): n is a, c, g, or t
gggtagcaggactagtctaagccactntgactggacantccaggtgcgaaggaggctctgcttctttctttacgcatctgcagtatgtgactgtcactcacccctctagaattgatcggaagccagcctgatgggatggcaattatttacctgtgtgtggcctctccgtggcaaaagctctttgctctgaatttcgaagaccacaaagactcacttgggtgtgtgcatcagtctaggccacagagggctcactgggtgttgatggcctagtttcacctacccacaaccctg

SEQ ID NO: 576652 - DNA, 705 bp, Homo sapiens
aaaatgtgtccagtcatggccttagccagcgtctaaggacaagcctcatagggtcatgtacagagtattaaccagtgcacacttgaggccgttcagcacattgagctatgtgagagcgccttgtgattatatgcagccagccttcatagcagcacattatcagttctagctgaattctgtcataagcatccatgctgccataaagttaagaagcgctggagcctattcgtaccaacgagatcagttgtgtcaaagactgggtctttgtgtgtgtcagcttccgccacgttagggcctactccatatgcatgctaatgacctgctcttatgaaatgaacaaagacaagtgctaaagcatgctagagtgatcatcagtcagaggctcatacacccacgcacgttgcatctgtttccatatggactcagtcgtatagattactaacaccaacgctcatgagtagctataacgttcacatgaagtgaatagattgtgtagcagactaacaccatatgctttgtttcgtagtgaagaatctcttgaccagctctttgatgatggtggtgtttatatccttcttctcgacaggcaagtccagcgtaagcatggtattcagcagttgctgctcaagcctgggtgtgctggtggtcctgcatctcacccaggatctgcaggactggctgtgcagtagggatgtcctgggaata

SEQ ID NO: 576653 - DNA, 425 bp, Homo sapiens
tccagggagttcccttcccggccctaccagcgccgtttggttgagccccttcccacaccagggtgtttttccgggcctttcctttgaaacttgccctgcttaagggccccttttcccagattgggcccaattgggtttttcccccctacctgtttagttttccgggcccgtttaggtttaggccctttaaggccttaggtttagtttgaaggatttattggggacaaaaccccccttttttgagccttcagggtggtttttggatttagccatttccaggggcttttttttgcttggaggttgggtttggatttggggttggtgccacctttttttttcagtttactttttttttttttccctttgggggtttagagccccagtttactttgaaattcagttttttgccttcggctttcccttca

SEQ ID NO: 576654 - DNA, 195 bp, Homo sapiens
  misc_feature (173)..(173): n is a, c, g, or t
cgacattacgataaaagtcacaaggcagatttggctaatacactctagagacatacattaggatagcaatagcctgattcactgaagtctaaactaagctgacttggcagaaaagttgcttgctctgcttgtcttcttgtttctcgacatccgtgaacatatgcctcattganaataccattttcagtgacatct

SEQ ID NO: 576655 - DNA, 472 bp, Homo sapiens
ttcaatgtattcaaaatgtgaaccaaaatattttatgtatattaacaatacataaaattattgttcaagagaaaatcaggccgggtccagtggctcacgtctgtaatcccaccactttgggaagcctaggcgggtggatcacgaggtcagaagtgccaagccagcctgacaaaggtggtgaaacaccgtccgtactaaaaatacaaaaagtagccgggcacagtggcgggcgcctgtaatcccagctactcaggagactgagacagagaattgcttcaacccgggaggtagaggttgcagtgggcccagatcatgccactgcactccagcctgggcaacagagcaatacttcatctcaaaaataaataaatatatacatacaaaaagaagctggggggcaagcgcatggctcatgcctgtaataccgcactttcggagctgaggcagcagatcactgaggtcggagttcaga

SEQ ID NO: 576656 - DNA, 916 bp, Homo sapiens
caaacgaaggagacgctcttagctacttggaatggaagaaatgggcttcacggattaaaactggggcaccaagcagataatctgaatataaataaagaatactggtatattctaaccaccagacttacggtggagccctgggttaaaagattccattttgtaataaggcctgtgttgcttgtggtgaatcctgtagttctattactagaataagacaaagacatgatctcatggagtgaaatttgagttctaatactgctgattatctgaagagaaataagactaattgaggagcgagaagaagataaatagactctgaaacattttatttcagaatggcgtgtcgcctaatgtatgtaacaattactgtaattatactagtaatttttcgtgaaatctaggcaggaaaaaagtagaacacttgcgagttccagtgtgctcaacgggaaactgtgtaagagtgtcagaattgtggaaaaatctttgtaacctaagattaattttcacatttaaactaaaaactctagttggctggtatggaagctcaagtcatggtacaacttacttcgagtggtgtattggggaagcaggagaccttcagcgtcagggagatgcactcatgtgtgcattcctatccgatgtcacgtaaagacttgacatgattcttttcaaccccataggaacatcacggcacaagagtaaggtgtcaccagtctactattaagatcttctactagagcttctaaagagcaactaagttctggtctaattggacgttcatctcttgcgttactttcctagcttgaagctctgattggaaggtgttgaatgaggccttactttaggataattggcggagaggcaagacaacagtcacaaacgggctcctggccaattccacatgtggccttgggac

SEQ ID NO: 576657 - DNA, 849 bp, Homo sapiens
gggaattactccgagtggagagagcgagctgaatggttgtgtggtcgtgtctcggaagagccggtagcgcttgcatgggatggtcttgaacaattgactgaataggacatgattgcaagtacattcaacaggagagtgtttgtactagtaatttgtgcgaaagtagtgggtgatggaatcataatacaacaacagagaaggagaatggtcgaacatgttaaatgacgaatcatcataggggacgaagaagttcctagagagaaggcagaggttcagaggggaaattgagttgtaaatggaagtggagttgatgtatggataaaggctacgattgactaagccgggaagttgtcttgaggaattgatgggtgagaaagagttgacagacaaagatctgtgatagaagagattcagagaaaacattcctgtggtgtattagattatacggtaatgggacgagaagggggtcatgatgtaggtgcgtggcatgaatcttgcgtcgctaggtgagtgacaataccctgggaagatggaagttccacagatgacagaagttgatgagatgatcagggatcgcagatattgaatggtgatgtgtcaagtaatatgatgaatgaggttgtagatactgatgaacgggaacagtgaaagactttgttgtgaatgtgttagatttgcttggttgtagacttgtgatatgggggctggtgtgggtgcggagcttattcgtgaagggtttttcctactggttaagaaaggtttgatgtataggcagttaggaactattcctcctatggtttcttccttttttttgggcttgtctcacactttttaaaaaagtggtcataa

SEQ ID NO: 576658 - DNA, 858 bp, Homo sapiens
  misc_feature (297)..(297): n is a, c, g, or t
gattgtacatgagtgatagacatcataatcggaggcttaaggaacctgtctagggtaaggaccagatctacagacgattatcgtcacagcccatgctttggtaataatgttctacatagtagatacccatcataatcggaggctctaggcaactgagtacgattccccgtagtaatctggtagccctcgcgatatggcgtctgccgccagaccgaatgtaacaagatcgtaagtttcggggtactcttgacactcatctactgctctctgagtccttgtctcgcgtctgtgcttatnagttgggaggcctggagccaggaacgaggttgaaccagtctgaccctcccttgaactagggaactgaaaagtaggaaacaacacaaaaaagaacaaggagaatataaaacagagatactcagataaacaaatataaaagaaggatggtgtgcgtggttttggggttagggggataggagctccgacttaccttggctagctccatgacagggactctgcaagctatgcgtttttatgaagtcgtgaaagtctggtatagcacatatgctgggagaggagaatacttatctctgggcacatcactatattaggttggctctgcaggactgaatacactgcctgacaattggccgggctcctatggaaagctcgcataaggttcgaatacaaacccaatcaggtgatgcaacactttgagggatgcaatcccaccactgttaacgaagaaggcgtaaagcatcccacaaaggggagaccctcggaaggacagaagcaaacagaagaaccgcgcgtggaagaagcgaacacggccactggatacagccacagaaatcaaacgaa

SEQ ID NO: 576659 - DNA, 747 bp, Homo sapiens
agcggaggaggacctgagcatctagtatccagaagaaagatcttggggaagtcattgtcagggtaataatctagtcatattcagaagtaatctggggagagaataatagttgtacaataagggtaggagtatgcatgactaccagaggatcatctcctgcccttcagctcctagtctcaactagacagctatactatattacactaacaccatcgcttgcatatagacaaaaatagatgaaaacgatattacttagccaactatcacggatggtttgcaaacaaaactagcactcgaacatacactgaccattgctgagaattcgtacttccaagactacatatcacatacaacgtaaagcaactgattcgcatataaggaacaacggcagtatcatagaacaataggaacaaccaagggaatttacttcgcaggaactattactaacacggggaacactaatacaactctagacataaaaacgggcacgacaagagaatacaaagcgcgacgatccacgatacaatttaaaccacttggtaaccccacaaaaacgacacactgaacagacaagccatataccttggccttagctcggcctccaataggagaaccaccttagaggcaaacggtacctacaaagacggactaagaacacgggagatgcgattaacgacagtcataagaacaggtacccacaagaggcagcgcaacaagacaaacatgcaaacactacagtcataggta

SEQ ID NO: 576660 - DNA, 2431 bp, Homo sapiens
ctgggtcatcggttccctggaaggagaaaaagctgccaattgaacggggcctcccggtcccaggaatgtcgcgacgcggggacgacgcatctcacgacgtcagcctgaaacacgcgggcctttcatcacccgagactcctccagcccaggagggccccgctctttcgcctgcctcctgggggagagcctctggacgacgcacgcgacagcgttttctccaaaaaaggcagagaagagaagcgtagcagtggccgcaagggcgacgggcggcgaagggtactacgcacgcccgcgtcggccacgcggagagatacgcccgactcgagtcccgcggcgcacgcccctagacgcccgaggtgcgcgggccacgcccctcgcccggccaagagcacgccccttccgtcgcccctcccgggggcgtttaccgttcctccccgccccggaagcgcgttcttacctccttcctcgcgagagttccgtgcaccggcacccagatcgcgcgagacagcggaaggagcaagagtgggaggcgcgcgcggaggccgcgacggacgcaagatggcgacggcgaccatagctctccaggtcaatggccagcaaggaggggggtccgagccggcggcggcggcggcagtggtggcagcgggagacaaatggaaacctccacagggcacagactccatcaagatggagaacgggcagagcacagccgccaagctggggctgcctcccctgacgcccgagcagcaggaggcccttcagaaggccaagaagtacgccatggagcagagcatcaagagtgtgctggtgaagcagaccatcgcgcaccagcagcagcagctcaccaacctgcagatggcagcagtgacaatgggctttggagatcctctctcacctttgcaatcgatggcggctcagcggcagcgggcgctggccatcatgtgccgcgtctacgtgggctctatctactatgagctgggggaggacaccatccgccaggcctttgccccctttggccccatcaagagcatcgacatgtcctgggactccgtcaccatgaagcacaagggctttgccttcgtggagtatgaggtccccgaagctgcacagctggccttggagcagatgaactcggtgatgctggggggcaggaacatcaaggtgggcagacccagcaacatagggcaggcccagcccatcatagaccagttggctgacctctcagacgatgacatcaagagcgtgtttgaggcctttggcaagatcaagtcctgcacactggcccgggaccccacaactggcaagcacaagggctacggcttcattgagtacgagaaggcccagtcgtcccaagatgctgtgtcttccatgaacctctttgacctgggtggccagtacttgcgggtgggcaaggctgtcacaccgcccatgcccctactcacaccagccacgcctggaggcctcccacctgccgctgctgtggcagctgctgcagccactgccaagatcacagctcaggaagcagtggccggagcagcggtgctgggtaccctgggcacacctggactggtgtccccagcactgaccctggcccagcccctgggcactttgccccaggctgtcatggctgcccaggcacctggagtcatcacaggtgtgaccccagcccgtcctcctatcccggtcaccatcccctcggtgggagtggtgaaccccatcctggccagccctccaacgctgggtctcctggagcccaagaaggagaaggaagaagaggagctgtttcccgagtcagagcggccagagatgctgagcgagcaggagcacatgagcatctcgggcagtagcgcccgacacatggtgatgcagaagctgctccgcaagcaggagtctacagtgatggttctgcgcaacatggtggaccccaaggacatcgatgatgacctggaaggggaggtgacagaggagtgtggcaagttcggggccgtgaaccgcgtcatcatctaccaagagaaacaaggcgaggaggaggatgcagaaatcattgtcaagatctttgtggagttttccatagcctctgagactcataaggccatccaggccctcaatggccgctggtttgctggccgcaaggtggtggctgaagtgtacgaccaggagcgttttgataacagtgacctctctgcgtgacagtggtccctctccccggacttgcacttgttccttgtttcctctgggttttatagtgatacagtggtgtccccggggccaggcgcgctctgcccagcccagcctacagtgcggataaaggtgcggatgctgctggccctgaaaaaaaaaaaaatccttggcggcggttacaacgtcgtgcttgggaaacccttgcgtacccaattaattgcttgaagacatcccctttgccaggtgcggg

SEQ ID NO: 576661 - DNA, 1738 bp, Homo sapiens
ctgcgaccccacactatgactgcaggatggagcccgcacctccctgtcatgtggggagccctccccacagcagggctgggtgggtgggccaggaggggagtgggctgcccagcctcctgccgcccctgacgagccagcggttctctcccctctgtcctgctgcagatggcggctcagcggcagcgggcgctggccatcatgtgccgcgtctacgtgggctctatctactatgagctgggggaggacaccatccgccaggcctttgccccctttggccccatcaagagcatcgacatgtcctgggactccgtcaccatgaagcacaagggctttgccttcgtggagtatgaggtccccgaagctgcacagctggccttggagcagatgaactcggtgatgctggggggcaggaacatcaaggtgggcagacccagcaacatagggcaggcccagcccatcatagaccagttggctgaggaggcacgggccttcaaccgcatctacgtggcctctgtgcaccaggacctctcagacgatgacatcaagagcgtgtttgaggcctttggcaagatcaagtcctgcacactggcccgggaccccacaactggcaagcacaagggctacggcttcattgagtacgagaaggcccagtcgtcccaagatgctgtgtcttccatgaacctctttgacctgggtggccagtacttgcgggtgggcaaggctgtcacaccgcccatgcccctactcacaccagccacgcctggaggcctcccacctgccgctgctgtggcagctgctgcagccactgccaagatcacagctcaggaagcagtggccggagcagcggtgctgggtaccctgggcacacctggactggtgtccccagcactgaccctggcccagcccctgggcactttgccccaggctgtcatggctgcccaggcacctggagtcatcacaggtgtgaccccagcccgtcctcctatcccggtcaccatcccctcggtgggagtggtgaaccccatcctggccagccctccaacgctgggtctcctggagcccaagaaggagaaggaagaagaggagctgtttcccgagtcagagcggccagagatgctgagcgagcaggagcacatgagcatctcgggcagtagcgcccgacacatggtgatgcagaagctgctccgcaagcaggagtctacagtgatggttctgcgcaacatggtggaccccaaggacatcgatgatgacctggaaggggaggtgacagaggagtgtggcaagttcggggccgtgaaccgcgtcatcatctaccaagagaaacaaggcgaggaggaggatgcagaaatcattgtcaagatctttgtggagttttccatagcctctgagactcataaggccatccaggccctcaatggccgctggtttgctggccgcaaggtggtggctgaagtgtacgaccaggagcgttttgataacagtgacctctctgcgtgacagtggtccctctccccggacttgcacttgttccttgtttcctctgggttttatagtgatacagtggtgtccccggggccaggcgcgctctgcccagcccagcctacagtgcggataaaggtgcggatgctgctggccctgaaaaaaaaaaaaatccttggcggcggttacaacgtcgtgcttgggaaacccttgcgtacccaattaattgcttgaagacatcccctttgccaggtgcggg

SEQ ID NO: 576662 - DNA, 1652 bp, Homo sapiens
cctgagctcctcccctggggtctcttctgggcagtggctgccctgtcttctgacctcctctcttctggccaccaaaccaatggcggctcagcggcagcgggcgctggccatcatgtgccgcgtctacgtgggctctatctactatgagctgggggaggacaccatccgccaggcctttgccccctttggccccatcaagagcatcgacatgtcctgggactccgtcaccatgaagcacaagggctttgccttcgtggagtatgaggtccccgaagctgcacagctggccttggagcagatgaactcggtgatgctggggggcaggaacatcaaggtgggcagacccagcaacatagggcaggcccagcccatcatagaccagttggctgaggaggcacgggccttcaaccgcatctacgtggcctctgtgcaccaggacctctcagacgatgacatcaagagcgtgtttgaggcctttggcaagatcaagtcctgcacactggcccgggaccccacaactggcaagcacaagggctacggcttcattgagtacgagaaggcccagtcgtcccaagatgctgtgtcttccatgaacctctttgacctgggtggccagtacttgcgggtgggcaaggctgtcacaccgcccatgcccctactcacaccagccacgcctggaggcctcccacctgccgctgctgtggcagctgctgcagccactgccaagatcacagctcaggaagcagtggccggagcagcggtgctgggtaccctgggcacacctggactggtgtccccagcactgaccctggcccagcccctgggcactttgccccaggctgtcatggctgcccaggcacctggagtcatcacaggtgtgaccccagcccgtcctcctatcccggtcaccatcccctcggtgggagtggtgaaccccatcctggccagccctccaacgctgggtctcctggagcccaagaaggagaaggaagaagaggagctgtttcccgagtcagagcggccagagatgctgagcgagcaggagcacatgagcatctcgggcagtagcgcccgacacatggtgatgcagaagctgctccgcaagcaggagtctacagtgatggttctgcgcaacatggtggaccccaaggacatcgatgatgacctggaaggggaggtgacagaggagtgtggcaagttcggggccgtgaaccgcgtcatcatctaccaagagaaacaaggcgaggaggaggatgcagaaatcattgtcaagatctttgtggagttttccatagcctctgagactcataaggccatccaggccctcaatggccgctggtttgctggccgcaaggtggtggctgaagtgtacgaccaggagcgttttgataacagtgacctctctgcgtgacagtggtccctctccccggacttgcacttgttccttgtttcctctgggttttatagtgatacagtggtgtccccggggccaggcgcgctctgcccagcccagcctacagtgcggataaaggtgcggatgctgctggccctgaaaaaaaaaaaaatccttggcggcggttacaacgtcgtgcttgggaaacccttgcgtacccaattaattgcttgaagacatcccctttgccaggtgcggg

SEQ ID NO: 576663 - DNA, 1833 bp, Homo sapiens
ctgggtcatcggttccctggaaggagaaaaagctgccaattgaacggggcctcccggtcccaggaatgtcgcgacgcggggacgacgcatctcacgacgtcagcctgaaacacgcgggcctttcatcacccgagactcctccagcccaggagggccccgctctttcgcctgcctcctgggggagagcctctggacgacgcacgcgacagcgttttctccaaaaaaggcagagaagagaagcgtagcagtggccgcaagggcgacgggcggcgaagggtactacgcacgcccgcgtcggccacgcggagagatacgcccgactcgagtcccgcggcgcacgcccctagacgcccgaggtgcgcgggccacgcccctcgcccggccaagagcacgccccttccgtcgcccctcccgggggcgtttaccgttcctccccgccccggaagcgcgttcttacctccttcctcgcgagagttccgtgcaccggcacccagatcgcgcgagacagcggaaggagcaagagtgggaggcgcgcgcggaggccgcgacggacgcaagatggcgacggcgaccatagctctccaggtcaatggccagcaaggaggggggtccgagccggcggcggcggcggcagtggtggcagcgggagacaaatggaaacctccacagggcacagactccatcaagatggagaacgggcagagcacagccgccaagctggggctgcctcccctgacgcccgagcagcaggaggcccttcagaaggccaagaagtacgccatggagcagagcatcaagagtgtgctggtgaagcagaccatcgcgcaccagcagcagcagctcaccaacctgcagatggcagcagtgacaatgggctttggagatcctctctcacctttgcaatcgatggcggctcagcggcagcgggcgctggccatcatgtgccgcgtctacgtgggctctatctactatgagctgggggaggacaccatccgccaggcctttgccccctttggccccatcaagagcatcgacatgtcctgggactccgtcaccatgaagcacaagggctttgccttcgtggagtatgaggtccccgaagctgcacagctggccttggagcagatgaactcggtgatgctggggggcaggaacatcaaggtgggcagacccagcaacatagggcaggcccagcccatcatagaccagttggctgaggaggcacgggccttcaaccgcatctacgtggcctctgtgcaccaggacctctcagacgatgacatcaagagcgtgtttgaggcctttggcaagatcaagtcctgcacactggcccgggaccccacaactggcaagcacaagggctacggcttcattgagtacgagaaggcccagtcgtcccaagatgctgtgtcttccatgaacctctttgacctgggtggccagtacttgcgggtgggcaaggctgtcacaccgcccatgcccctactcacaccagccacgcctggaggcctcccacctgccgctgctgtggcagctgctgcagccactgccaagatcacagctcaggaagcagtggccggagcagcggtgctgggtaccctgggcacacctggactggtgtccccagcactgaccctggcccagcccctgggcactttgccccaggctgtcatggctgcccaggcacctggagtcatcacaggtgtgaccccagcccgtcctcctatcccggtcaccatcccctcggtgggagtggtgaaccccatcctggccagaacttccagcgtagggtcgtatggctgcccagttggtggaggtagtaggatatttgtc

SEQ ID NO: 576664 - DNA, 2430 bp, Homo sapiens
ctgggtcatcggttccctggaaggagaaaaagctgccaattgaacggggcctcccggtcccaggaatgtcgcgacgcggggacgacgcatctcacgacgtcagcctgaaacacgcgggcctttcatcacccgagactcctccagcccaggagggccccgctctttcgcctgcctcctgggggagagcctctggacgacgcacgcgacagcgttttctccaaaaaaggcagagaagagaagcgtagcagtggccgcaagggcgacgggcggcgaagggtactacgcacgcccgcgtcggccacgcggagagatacgcccgactcgagtcccgcggcgcacgcccctagacgcccgaggtgcgcgggccacgcccctcgcccggccaagagcacgccccttccgtcgcccctcccgggggcgtttaccgttcctccccgccccggaagcgcgttcttacctccttcctcgcgagagttccgtgcaccggcacccagatcgcgcgagacagcggaaggagcaagagtgggaggcgcgcgcggaggccgcgacggacgcaagatggcgacggcgaccatagctctccaggtcaatggccagcaaggaggggggtccgagccggcggcggcggcggcagtggtggcagcgggagacaaatggaaacctccacagggcacagactccatcaagatggagaacgggcagagcacagccgccaagctggggctgcctcccctgacgcccgagcagcaggaggcccttcagaaggccaagaagtacgccatggagcagagcatcaagagtgtgctggtgaagcagaccatcgcgcaccagcagcagcagctcaccaacctgcagatggcggctcagcggcagcgggcgctggccatcatgtgccgcgtctacgtgggctctatctactatgagctgggggaggacaccatccgccaggcctttgccccctttggccccatcaagagcatcgacatgtcctgggactccgtcaccatgaagcacaagggctttgccttcgtggagtatgaggtccccgaagctgcacagctggccttggagcagatgaactcggtgatgctggggggcaggaacatcaaggtgggcagacccagcaacatagggcaggcccagcccatcatagaccagttggctgaggaggcacgggccttcaaccgcatctacgtggcctctgtgcaccaggacctctcagacgatgacatcaagagcgtgtttgaggcctttggcaagatcaagtcctgcacactggcccgggaccccacaacacaatgggaggcacaagggtacgggttattgagtacgagaaggcccagtcgtcccaagatgctgtgtcttccatgaacctctttgacctgggtggccagtacttgcgggtgggcaaggctgtcacaccgcccatgcccctactcacaccagccacgcctggaggcctcccacctgccgctgctgtggcagctgctgcagccactgccaagatcacagctcaggaagcagtggccggagcagcggtgctgggtaccctgggcacacctggactggtgtccccagcactgaccctggcccagcccctgggcactttgccccaggctgtcatggctgcccaggcacctggagtcatcacaggtgtgaccccagcccgtcctcctatcccggtcaccatcccctcggtgggagtggtgaaccccatcctggccagccctccaacgctgggtctcctggagcccaagaaggagaaggaagaagaggagctgtttcccgagtcagagcggccagagatgctgagcgagcaggagcacatgagcatctcgggcagtagcgcccgacacatggtgatgcagaagctgctccgcaagcaggagtctacagtgatggttctgcgcaacatggtggaccccaaggacatcgatgatgacctggaaggggaggtgacagaggagtgtggcaagttcggggccgtgaaccgcgtcatcatctaccaagagaaacaaggcgaggaggaggatgcagaaatcattgtcaagatctttgtggagttttccatagcctctgagactcataaggccatccaggccctcaatggccgctggtttgctggccgcaaggtggtggctgaagtgtacgaccaggagcgttttgataacagtgacctctctgcgtgacagtggtccctctccccggacttgcacttgttccttgtttcctctgggttttatagtgatacagtggtgtccccggggccaggcgcgctctgcccagcccagcctacagtgcggataaaggtgcggatgctgctggccctgaaaaaaaaaaaaatccttggcggcggttacaacgtcgtgcttgggaaacccttgcgtacccaattaattgcttgaagacatcccctttgccaggtgcggg

SEQ ID NO: 576665 - DNA, 162 bp, Homo sapiens
  misc_feature (36)..(36): n is a, c, g, or t
  misc_feature (108)..(108): n is a, c, g, or t
gccataagctgggcatgcgtctgtgcagttgaaagnccttgcagctgacaaaaggactgaacattgttgtaggctgtggatatggttacatgtgcagcagacacgtgngcccatctgactgcgaggtgtctcagcaatgcctggcatcgtgtccatgtctat

SEQ ID NO: 576666 - DNA, 553 bp, Homo sapiens
gcacgaggagaaaaaatgtggaggaagaaaatggcagtgacgagtctgaaattgacattagtagcaccgattcagaaaatgaagaagagcaaaatggagaagaagagatcgtaaatattgacttcgattttttcggtggtaacccagaagttgattttcatgctttaaagaatttactgcgtcagttatttggtcctcaagaaagtaccaggattcaactaagcagcttggcagatttgatcctaggttccccaaccaccacaattaaaactgacggcaaagaatctgatccatactgttttctttcattcgttgatttcaaagctaatcatctaagtgattatgtcaaatatttacaaaaagtggacatgagactttccactttcttcaaaactatgattgatagtggtaataaaaattgtgctttggttctcagtgaaaggctgattaatatgccaccggaagtcgttccacctttatacaagattacgttggaggatgttgccacggcacttggcgatgacaaacattatgacttctatatcatcgtcac

SEQ ID NO: 576667 - DNA, 408 bp, Homo sapiens
cggcacgaggacaagttttcatttctctgggataaatgcctgtgagtgcaactgctgggtcatatggcaattgcatgtttagttttacaagaaactgccaaactgctttccagagtggctgtcccattttaaattccctccagcaattataagaggtgcagtttctcggcattctttccaaaatttgatggtgttgccattttttatcttagccattttggcaggtgtgtagtaatatcttattgtgggttttacgttgcatttccctaattttaatgttgttaaatattttctcatgtgcttatccgctatctgtgtatcctcttcgtgaaattgttcttcatgtattttgttcatttcctgattgtgttttaattgttaaatttttaaagttctttagatattcta

SEQ ID NO: 576668 - DNA, 2547 bp, Homo sapiens
ctgggtcatcggttccctggaaggagaaaaagctgccaattgaacggggcctcccggtcccaggaatgtcgcgacgcggggacgacgcatctcacgacgtcagcctgaaacacgcgggcctttcatcacccgagactcctccagcccaggagggccccgctctttcgcctgcctcctgggggagagcctctggacgacgcacgcgacagcgttttctccaaaaaaggcagagaagagaagcgtagcagtggccgcaagggcgacgggcggcgaagggtactacgcacgcccgcgtcggccacgcggagagatacgcccgactcgagtcccgcggcgcacgcccctagacgcccgaggtgcgcgggccacgcccctcgcccggccaagagcacgccccttccgtcgcccctcccgggggcgtttaccgttcctccccgccccggaagcgcgttcttacctccttcctcgcgagagttccgtgcaccggcacccagatcgcgcgagacagcggaaggagcaagagtgggaggcgcgcgcggaggccgcgacggacgcaagatggcgacggcgaccatagctctccaggtcaatggccagcaaggaggggggtccgagccggcggcggcggcggcagtggtggcagcgggagacaaatggaaacctccacagggcacagactccatcaagatggagaacgggcagagcacagccgccaagctggggctgcctcccctgacgcccgagcagcaggaggcccttcagaaggccaagaagtacgccatggagcagagcatcaagagtgtgctggtgaagcagaccatcgcgcaccagcagcagcagctcaccaacctgcagatggcggctcagcggcagcgggcgctggccatcatgtgccgcgtctacgtgggctctatctactatgagctgggggaggacaccatccgccaggcctttgccccctttggccccatcaagagcatcgacatgtcctgggactccgtcaccatgaagcacaagggctttgccttcgtggagtatgaggtccccgaagctgcacagctggccttggagcagatgaactcggtgatgctggggggcaggaacatcaaggtgaggcaagggagccaaggcctcgatccgcatgcgttgcaggcttgccatccacggaagcctttttgtggccgtgcctgcgttgaccggtctttccatctcaccggcatcttccccaggtgggcagacccagcaacatagggcaggcccagcccatcatagaccagttggctgaggaggcacgggccttcaaccgcatctacgtggcctctgtgcaccaggacctctcagacgatgacatcaagagcgtgtttgaggcctttggcaagatcaagtcctgcacactggcccgggaccccacaactggcaagcacaagggctacggcttcattgagtacgagaaggcccagtcgtcccaagatgctgtgtcttccatgaacctctttgacctgggtggccagtacttgcgggtgggcaaggctgtcacaccgcccatgcccctactcacaccagccacgcctggaggcctcccacctgccgctgctgtggcagctgctgcagccactgccaagatcacagctcaggaagcagtggccggagcagcggtgctgggtaccctgggcacacctggactggtgtccccagcactgaccctggcccagcccctgggcactttgccccaggctgtcatggctgcccaggcacctggagtcatcacaggtgtgaccccagcccgtcctcctatcccggtcaccatcccctcggtgggagtggtgaaccccatcctggccagccctccaacgctgggtctcctggagcccaagaaggagaaggaagaagaggagctgtttcccgagtcagagcggccagagatgctgagcgagcaggagcacatgagcatctcgggcagtagcgcccgacacatggtgatgcagaagctgctccgcaagcaggagtctacagtgatggttctgcgcaacatggtggaccccaaggacatcgatgatgacctggaaggggaggtgacagaggagtgtggcaagttcggggccgtgaaccgcgtcatcatctaccaagagaaacaaggcgaggaggaggatgcagaaatcattgtcaagatctttgtggagttttccatagcctctgagactcataaggccatccaggccctcaatggccgctggtttgctggccgcaaggtggtggctgaagtgtacgaccaggagcgttttgataacagtgacctctctgcgtgacagtggtccctctccccggacttgcacttgttccttgtttcctctgggttttatagtgatacagtggtgtccccggggccaggcgcgctctgcccagcccagcctacagtgcggataaaggtgcggatgctgctggccctgaaaaaaaaaaaaatccttggcggcggttacaacgtcgtgcttgggaaacccttgcgtacccaattaattgcttgaagacatcccctttgccaggtgcggg

SEQ ID NO: 576669 - DNA, 1549 bp, Homo sapiens
ctgggtcatcggttccctggaaggagaaaaagctgccaattgaacggggcctcccggtcccaggaatgtcgcgacgcggggacgacgcatctcacgacgtcagcctgaaacacgcgggcctttcatcacccgagactcctccagcccaggagggccccgctctttcgcctgcctcctgggggagagcctctggacgacgcacgcgacagcgttttctccaaaaaaggcagagaagagaagcgtagcagtggccgcaagggcgacgggcggcgaagggtactacgcacgcccgcgtcggccacgcggagagatacgcccgactcgagtcccgcggcgcacgcccctagacgcccgaggtgcgcgggccacgcccctcgcccggccaagagcacgccccttccgtcgcccctcccgggggcgtttaccgttcctccccgccccggaagcgcgttcttacctccttcctcgcgagagttccgtgcaccggcacccagatcgcgcgagacagcggaaggagcaagagtgggaggcgcgcgcggaggccgcgacggacgcaagatggcgacggcgaccatagctctccaggtcaatggccagcaaggaggggggtccgagccggcggcggcggcggcagtggtggcagcgggagacaaatggaaacctccacagggcacagactccatcaagatggagaacgggcagagcacagccgccaagctggggctgcctcccctgacgcccgagcagcaggaggcccttcagaaggccaagaagtacgccatggagcagagcatcaagagtgtgctggtgaagcagaccatcgcgcaccagcagcagcagctcaccaacctgcagatggcagcagtgacaatgggctttggagatcctctctcacctttgcaatcgatggcggctcagcggcagcgggcgctggccatcatgtgccgcgtctacgtgggctctatctactatgagctgggggaggacaccatccgccaggcctttgccccctttggccccatcaagagcatcgacatgtcctgggactccgtcaccatgaagcacaagggctttgccttcgtggagtatgaggtccccgaagctgcacagctggccttggagcagatgaactcggtgatgctggggggcaggaacatcaaggtgggcagacccagcaacatagggcaggcccagcccatcatagaccagttggctgaggaggcacgggccttcaaccgcatctacgtggcctctgtgcaccaggacctctcagacgatgacatcaagagcgtgtttgaggcctttggcaagatcaagtcctgcacactggcccgggaccccacaactggcaagcacaagggctacggcttcattgagtacgagaaggcccagtcgtcccaagatgctgtgtcttccatgaacctctttgacctgggtggccagtacttgcgggtgggcaaggctgtcacaccgcccatgcccctactcacaccagccacgcctggaggccgcccagcctacagtgcggataaaggtgcggatgctgctg

SEQ ID NO: 576670 - DNA, 1967 bp, Homo sapiens
ctgggtcatcggttccctggaaggagaaaaagctgccaattgaacggggcctcccggtcccaggaatgtcgcgacgcggggacgacgcatctcacgacgtcagcctgaaacacgcgggcctttcatcacccgagactcctccagcccaggagggccccgctctttcgcctgcctcctgggggagagcctctggacgacgcacgcgacagcgttttctccaaaaaaggcagagaagagaagcgtagcagtggccgcaagggcgacgggcggcgaagggtactacgcacgcccgcgtcggccacgcggagagatacgcccgactcgagtcccgcggcgcacgcccctagacgcccgaggtgcgcgggccacgcccctcgcccggccaagagcacgccccttccgtcgcccctcccgggggcgtttaccgttcctccccgccccggaagcgcgttcttacctccttcctcgcgagagttccgtgcaccggcacccagatcgcgcgagacagcggaaggagcaagagtgggaggcgcgcgcggaggccgcgacggacgcaagatggcgacggcgaccatagctctccaggtcaatggccagcaaggaggggggtccgagccggcggcggcggcggcagtggtggcagcgggaggtgggcagacccagcaacatagggcaggcccagcccatcatagaccagttggctgaggaggcacgggccttcaaccgcatctacgtggcctctgtgcaccaggacctctcagacgatgacatcaagagcgtgtttgaggcctttggcaagatcaagtcctgcacactggcccgggaccccacaactggcaagcacaagggctacggcttcattgagtacgagaaggcccagtcgtcccaagatgctgtgtcttccatgaacctctttgacctgggtggccagtacttgcgggtgggcaaggctgtcacaccgcccatgcccctactcacaccagccacgcctggaggcctcccacctgccgctgctgtggcagctgctgcagccactgccaagatcacagctcaggaagcagtggccggagcagcggtgctgggtaccctgggcacacctggactggtgtccccagcactgaccctggcccagcccctgggcactttgccccaggctgtcatggctgcccaggcacctggagtcatcacaggtgtgaccccagcccgtcctcctatcccggtcaccatcccctcggtgggagtggtgaaccccatcctggccagccctccaacgctgggtctcctggagcccaagaaggagaaggaagaagaggagctgtttcccgagtcagagcggccagagatgctgagcgagcaggagcacatgagcatctcgggcagtagcgcccgacacatggtgatgcagaagctgctccgcaagcaggagtctacagtgatggttctgcgcaacatggtggaccccaaggacatcgatgatgacctggaaggggaggtgacagaggagtgtggcaagttcggggccgtgaaccgcgtcatcatctaccaagagaaacaaggcgaggaggaggatgcagaaatcattgtcaagatctttgtggagttttccatagcctctgagactcataaggccatccaggccctcaatggccgctggtttgctggccgcaaggtggtggctgaagtgtacgaccaggagcgttttgataacagtgacctctctgcgtgacagtggtccctctccccggacttgcacttgttccttgtttcctctgggttttatagtgatacagtggtgtccccggggccaggcgcgctctgcccagcccagcctacagtgcggataaaggtgcggatgctgctggccctgaaaaaaaaaaaaatccttggcggcggttacaacgtcgtgcttgggaaacccttgcgtacccaattaattgcttgaagacatcccctttgccaggtgcggg

SEQ ID NO: 576671 - DNA, 435 bp, Homo sapiens
agcggcgggggcctcgcgcggcggccagcagtcctgcccggaccaaccatccttccagccccttccgactccggatcctaccagaaacttcctcggccctttctttccaccatgcttgttaacatgcccgtgatgggcgcgcaatcgcgtaaggtgattgtaggcctcgattctgagcccgtgagaagaaagctagaccctcgtccccggcagcaattcatttttcagttagtatgtgttgagtagctgttatatacgcgctgtgtaacaagacacgagaagaagtcccttctctcaaggacagcgcattcttgtgggggcggtggggaggacgtgagtcttaatgcgagtcagtagagtagaacgagacctgtgggataatcagggttaggaagaagacagatagggtgatgtgatagagttgactggagtggg

SEQ ID NO: 576672 - DNA, 1613 bp, Homo sapiens
  misc_feature (1422)..(1422): n is a, c, g, or t
  misc_feature (1424)..(1424): n is a, c, g, or t
  misc_feature (1435)..(1435): n is a, c, g, or t
  misc_feature (1437)..(1437): n is a, c, g, or t
  misc_feature (1440)..(1441): n is a, c, g, or t
ctgggtcatcggttccctggaaggagaaaaagctgccaattgaacggggcctcccggtcccaggaatgtcgcgacgcggggacgacgcatctcacgacgtcagcctgaaacacgcgggcctttcatcacccgagactcctccagcccaggagggccccgctctttcgcctgcctcctgggggagagcctctggacgacgcacgcgacagcgttttctccaaaaaaggcagagaagagaagcgtagcagtggccgcaagggcgacgggcggcgaagggtactacgcacgcccgcgtcggccacgcggagagatacgcccgactcgagtcccgcggcgcacgcccctagacgcccgaggtgcgcgggccacgcccctcgcccggccaagagcacgccccttccgtcgcccctcccgggggcgtttaccgttcctccccgccccggaagcgcgttcttacctccttcctcgcgagagttccgtgcaccggcacccagatcgcgcgagacagcggaaggagcaagagtgggaggcgcgcgcggaggccgcgacggacgcaagatggcgacggcgaccatagctctccaggtcaatggccagcaaggaggggggtccgagccggcggcggcggcggcagtggtggcagcgggagacaaatggaaacctccacagggcacagactccatcaagatggagaacgggcagagcacagccgccaagctggggctgcctcccctgacgcccgagcagcaggaggcccttcagaaggccaagaagtacgccatggagcagagcatcaagagtgtgctggtgaagcagaccatcgcgcaccagcagcagcagctcaccaacctgcagatggcagcagtgacaatgggctttggagatcctctctcacctttgcaatcgatggcggctcagcggcagcgggcgctggccatcatgtgccgcgtctacgtgggctctatctactatgagctgggggaggacaccatccgccaggcctttgccccctttggccccatcaagagcatcgacatgtcctgggactccgtcaccatgaagcacaagggctttgccttcgtggagtatgaggtccccgaagctgcacagctggccttggagcagatgaactcggtgatgctggggggcaggaacatcaaggtgggcagacccagcaacatagggcaggcccagcccatcatagaccagttggctgaggaggcacgggccttcaaccgcatctacgtggcctctgtgcaccaggacctctcagacgatgacatcaagagcgtgtttgaggcctttggcaagatcaagtcctgcacactggcccgggaccccacaactggcaagcacaagggctacggcttcattgagtacgagaaggcccagtcgtcccaagatgctgggtctcatgaactntngactggtggcngnctnncggtggagtgcaacggctgctatacgcaagctgggcccccgcccgtgggggggctgcctgcaaacagtgaaggcggacggggtcggcagagggcagaagggcggctacgagaggacggggagaggcgcatacgtagccagaggctaaagacacaccggtagaactaatagta

SEQ ID NO: 576673 - DNA, 209 bp, Homo sapiens
cggctggtggaccctctgatccgaaagcatcaggaaggccatgtagagcaacagggcacccaccacggacaggtagatgacaatgatgaccttgatggtggtggtgctgcgtcctcgtacctgcactcgcacagcaggcagtaggctccacgtcatggccaggcactgatgggctccaccacgtcaggcagttgcagtccttcttggcg

SEQ ID NO: 576674 - DNA, 1538 bp, Homo sapiens
  misc_feature (1439)..(1439): n is a, c, g, or t
  misc_feature (1442)..(1442): n is a, c, g, or t
  misc_feature (1446)..(1446): n is a, c, g, or t
ctgggtcatcggttccctggaaggagaaaaagctgccaattgaacggggcctcccggtcccaggaatgtcgcgacgcggggacgacgcatctcacgacgtcagcctgaaacacgcgggcctttcatcacccgagactcctccagcccaggagggccccgctctttcgcctgcctcctgggggagagcctctggacgacgcacgcgacagcgttttctccaaaaaaggcagagaagagaagcgtagcagtggccgcaagggcgacgggcggcgaagggtactacgcacgcccgcgtcggccacgcggagagatacgcccgactcgagtcccgcggcgcacgcccctagacgcccgaggtgcgcgggccacgcccctcgcccggccaagagcacgccccttccgtcgcccctcccgggggcgtttaccgttcctccccgccccggaagcgcgttcttacctccttcctcgcgagagttccgtgcaccggcacccagatcgcgcgagacagcggaaggagcaagagtgggaggcgcgcgcggaggccgcgacggacgcaagatggcgacggcgaccatagctctccaggtcaatggccagcaaggaggggggtccgagccggcggcggcggcggcagtggtggcagcgggagacaaatggaaacctccacagggcacagactccatcaagatggagaacgggcagagcacagccgccaagctggggctgcctcccctgacgcccgagcagcaggaggcccttcagaaggccaagaagtacgccatggagcagagcatcaagagtgtgctggtgaagcagaccatcgcgcaccagcagcagcagctcaccaacctgcagatggcggctcagcggcagcgggcgctggccatcatgtgccgcgtctacgtgggctctatctactatgagctgggggaggacaccatccgccaggcctttgccccctttggccccatcaagagcatcgacatgtcctgggactccgtcaccatgaagcacaagggctttgccttcgtggagtatgaggtccccgaagctgcacagctggccttggagcagatgaactcggtgatgctggggggcaggaacatcaaggtgggcagacccagcaacatagggcaggcccagcccatcatagaccagttggctgaggaggcacgggccttcaaccgcatctacgtggcctctgtgcaccaggacctctcagacgatgacatcaagagcgtgtttgaggcctttggcaagatcaagtcctgcacactggcccgggaccccacaactggcaagcacaagggctacggcttcattgagtacgagaaggcccagtcgtcccaagatgctgtgtcttccatgaacctctttgacctgggtggccagtacttgcgggtgggcaaggctgtcacaccgcccatgcccctactcanccnagcngccggaggctccccctgcagtctgggccactcagaaccactgcagaaaccgtcagaaacaggcggagcaggtgagacctgagcactgcatgt

SEQ ID NO: 576675 - DNA, 449 bp, Homo sapiens
  misc_feature (39)..(39): n is a, c, g, or t
gggtcctttatgaatggagaagatgtatggtgtctgcangctatgaagaaatactgagacaggtaatttataaagaaagatgttaattggtctgcagcggtacagaaagcataacacagatgtctgttctgaggaggcctcaggaaggttacaatcatggcagaaggaaagggggaggaggggtctcgcatggtgggagcaggagcaaaagagaaagagccaggcgccacacttttaaataggcagatctcctgagaagtcaatcactgtcgtgaggacagcactaagaggatggcgctaaaccattcatgagaaatccgcttccatgatcccatcaccttccaccaggccccacctccaatactggggattacagttcaacaggagatttgtgcagcgacacagatccaaactatgttacatagctactttcatcagcatatatataa

SEQ ID NO: 576676 - DNA, 1371 bp, Homo sapiens
taaagggctgatctccctcttaaaaattttttactacggttcacagcaccaacgggcggaaagggcggccccaaactctctttgtgccccgcgaggtaaactctgtgggggttttgccaccctttcgggggctttcctttatacccccgcctttcagccaaagtgccgcctctcaggttcttttcctcaacctttgactcgtgtttgcgttcttcgaggccgttccctctctcgtggaaccttctcctctccggagaggaacacgcgcgcgttctttctttccacacagcttctccggacactgtggtgggtggtctcactcttctccgccgcggggaggatatcatctcacagccaccgtgtctttgtgcccacgtgacacatgtgtggagaggcggccatctctccggcgaacccccctttcgactctccccgcttggctctctgggccctcctttttccccccttatatctgggcctgtgtgcggggggccacacgtgtgtcgtcaggactatgtgcgaggcgtgtgcgacccccccacaatctcccctttgtgcggtctcccccggtttctctccccacgttcttgtgcgccgagcgacaaaccccatgcgggcgccccggttgtaaacccccagctctctctccccgaggcgcgcccttgacgctgcccacattttttctccctgtgtggggacccccaccgcactatctctcctcttccagggctctcccccagggctgtgggcggcccccccctttttgtcagacgggtcgctgacagcgcgcgcccctgccctcttacccctgtgtgggccccgggccccggtggcacctcgttttgcgcttctgtcaaaaggcggggcgcccaccgctaaaaacccccccggtgttctatgcccccacagaacatctcccccaaaaacacatcaccgacgccccacactggtcatctatcactctggcacacctctctcatccacaacgttacttccctcctcccaaagagggcgaccccccaacacgttttacactcgccccctattacccccacgcccacctttttctcttcgctgttcccaccctgcgttgtgttccccccctaattgggctggcgcctccccgtctttttatctaccgccctcttctggccccctcctgtgcgccgtcgtcgcccttattaccccaccgcgtcccgtccgtgcctccgttgtggcccaaccacatctggctccttatctcgttggggcccactcctctcgtcggcgaccagcgaccgcccttatcatcctccgcgtccgcgccgcgtgtccccctcaatcattctggtacgcccctgcttcctcccttttcggcagcactatctcccc

SEQ ID NO: 576677 - DNA, 419 bp, Homo sapiens
  misc_feature (33)..(33): n is a, c, g, or t
  misc_feature (115)..(115): n is a, c, g, or t
  misc_feature (159)..(160): n is a, c, g, or t
  misc_feature (164)..(164): n is a, c, g, or t
  misc_feature (197)..(197): n is a, c, g, or t
  misc_feature (306)..(306): n is a, c, g, or t
  misc_feature (314)..(314): n is a, c, g, or t
  misc_feature (395)..(395): n is a, c, g, or t
agagaccacaggttgcttaaacacttagaggtntggaaatagtgaagaggagagtgatttggatgggggaaattttaaataagatggagatgggagagggaatagaaagtttggnaagttaaatttggtagataattgtgttgagtggatatggaaagnnaggntgtgtgggatgagttggtgggtgttggtggggntttagtatggtttgtagttattttgatggtgaggaggtggttgggtgttgtggtagtttgtagtaggttgaggtggaggttgaggaggaggtgggttgggtgggttggntgggttgnggtttggagggggggtagagggataatgctgctgctgatagaattttttgggctgggccaacttgatataaaaattgcttncactgaaagtatggaaattttttt

SEQ ID NO: 576678 - DNA, 381 bp, Homo sapiens
  misc_feature (6)..(6): n is a, c, g, or t
aaaccnatttttaacctgtgtggccccccctagctgtttgccagcaaatttaatatttatgagactttatttaaaaaaaatatatcatttagaggtggtttgctgtgcctgatttatttatgtatttatttaatcagatggagtctcgctctgtcacccaggctggagtgcagtggtgcaatctcagctcactgcaacctccgcctcccgggttcaagcagttcgcctgccttagcctccctggtagctgggattacagacatccaccaccatgcccagcaaatttttgtatttttagtagagacagggtttcaccatgttggccatgatggtctcgatctcttgaccttgcaatctgcctgcctcggcctcccaaagtgc

SEQ ID NO: 576679 - DNA, 543 bp, Homo sapiens
caacgatggtcctcagctgaagatgtcaccttttcatctactttctcccttgcttcctccatctaaacaaagacgcagagttcgaactctaaacaaaaactcacagagagttcaggggttctctgctgcgacttccactctctggcttagtgtgcatccgtttccacgggctattttacctcttgatttttggccctgtggtctctgaatgctggatgtcatgcgctgaagcctggagacgtccagatccggggtcaggaaactgcagcggggggcagccgcctgcttttgtgaacgcagcgtattgaaacacacacatgcccatttgttcacagatgctctgtggctgagtgtgccctacagcagcacggttcagtaggcaggggccaacttctactacccggctaaggaaaagatgggcagagcctgctctggatgacgctgtgttccagccggcggagagggtccccatttctcggttaaggagggtgactcctcgctccaatcagggactgagctgagctgaggaccatctgggggtac

SEQ ID NO: 576680 - DNA, 247 bp, Homo sapiens
aacccgatagccgacagctctggatcttactgaagcgtgggctcggagctccccttactctcgtgtctcctctcggccccctttatttccttcttgctttgggtctttaacacctctcgagcctgtcctccccccgccactggaagtcttcccgtctctaaatggaattagtggagcccggagcctctggtgtaacgcacagacatgatccatgggcgcagcgtgcttcacattgtagcgggtttaa

SEQ ID NO: 576681 - DNA, 125 bp, Homo sapiens
tctagaggatcccggaggtgcagtgacggaagtgtgaaagagcttgtgtgtctcacagtggtcattgctcaataaatggcagctactgtttttactcgtaagggtgatgatttggatgcacagaa

SEQ ID NO: 576682 - DNA, 181 bp, Homo sapiens
agacgtgtcaacagatgcattcatttacatatgtacacacgtgcctcggctctgaccgtccacacagggcccgtgtcaacagcagcgactcaaggggcgtgtgtacatatgtaaatgagaatggagacgtgtcacagatgcattcatttctcttggctgtgtattgtcttcttttgcgacc

SEQ ID NO: 576683 - DNA, 628 bp, Homo sapiens
gagagatagagagagagagagagagagagagagagagagagagagagagagagagagagagagagagagagagagagagagagagagagagagagagagagagagagagagagagagagagagagagagaactagtctcgcgccttcacactcttttcaccctccttagccaagtgcaatccctttgacatccactgcatcgccgtccccaacacaccagaccactcccctctctgccaatccctgaaacaggccccattgttcacctgacccatcaatccccggccacatgctttgcggggagccaacccgccagccactcacccctaccaagactttcacccttcccggccaaggtcgcagtcaccgcccgcgcttcggtaacgcccacttctcaccgtcccaccccccacctcccactccgaccctctcccgcagcctggaccccattcgtacaccctgtcgccccacgaacgcctcactccatcatcatcggcccactgctcgccaccctccactcctcttcttccacctctccgcgaccatccccttcttctacgctctccgctatcccttccccgcatccgtctccctcccctcacccccaccttccctcctccacttccct

SEQ ID NO: 576684 - DNA, 885 bp, Homo sapiens
  misc_feature (885)..(885): n is a, c, g, or t
agtcggtattttcctcattggtgacatccaaatagtaacgtgaatattccatgtatggctggcaagaacaaatgtacgattattgatgactaactactggcatctctccataacagtccatctgctgacaggctgcctgcttcttgatccgtcgactctttaggtttctccccatgtattccagcctgatcttcaacaaccccatttctatctgccaaagcgtcttactgagctagtaggcggatgcacgatgtatgacatgccacctatcacaagggcctaaccgagccctggctgcggatcttcattgtagttcacattatttccattcttacaccctacttcatgttgtacactattttcttacatttgctgtctcttctaaacattctttgctgcaatccactttttctctattgtgctctaggtgctgcagaggctaatgctgggtttcctttcattcctccttgcagctcagcacctcccttctcaattcctttgccatgtctccactttaaatcttaacctactccagatagtcttttccttcacactattggcatctgtgcttgggttgctttcagtctattctctgatctatgatttcttgcatgatcaaagaaggtgccatgaaaggatcccttaagaaagcctgtcattttagccagaacgaactagcttcatgatagcaccaggaagactgatatctcccaggaaaacaaccactcaggggggtgctccttttgccttcctatggagtgtttggctgctgtttttgaaacccaagggtttctggttaggctgcgccagatggagtggctaaaagctgggatgggacactaaacacatgtccaggtcccctgtggatttttaaccatgacggcn

SEQ ID NO: 576685 - DNA, 414 bp, Homo sapiens
  misc_feature (406)..(406): n is a, c, g, or t
atttgatttaaaagtgaaagatgtgtgacctccttcccttttgccttaaaccaccttaccaagcccattgtagggttaatagttggccctaatttcaatgtaaatgtgtcctcagggaatatggaggccccacagagagggagagagatgagagaagggcagagcagtcagaacacacaacatttttcgattaagttgaccttcttttctgggtgtggtttgtggtaccccaaaacaattataataaaaccatgaaagatcactcatcacagatcaccgtaacagatacaataataatggaaaggtctgaaatattccaagaattaccaaaatgtgacccagagacaaagtgagcacatgcaattggaaaaatggctcgaattaatgcagggttgccaggaaactncaatatgt

SEQ ID NO: 576686 - DNA, 253 bp, Homo sapiens
cgtgaggaaaagacgattaaccgagattccgtatattagtggcgatgcgaactgcggaccatagccagtgcgttctaattcaagctagcagaaccatctggaaagatgggccatagctggtgcccgtgctgtatgcgaaagtgatgttagaagactcgagtagggcgggacacgtgtaatcctgtctgaacatggggggaccaccctccaagcctaaatactcgtatgcgaccgatagcgaactagtaccgta

SEQ ID NO: 576687 - DNA, 341 bp, Homo sapiens
aaaagtgggagctaaacagtgggtattcacagaacataaaaatggcaacgattggccgggcgcggtggctcacacctgtaatcccagcactctgggaggccgaggtaggtggatcacgagtcaggagatcaagaccatcatggctaacacggtgaaaccctgtctctactaaaaatacaaaaaattagccgggtgtggtggcaggtgcctgtagtcccagctactcgggaggctgaggcaggagaatggcgtgaacccaggaggcagagcttgcagtgagccaagatcacgccactgcactccagcctggctgacagagcaagactccgtctcaaaaaaaa

SEQ ID NO: 576688 - DNA, 357 bp, Homo sapiens
gtctacaaaggatagaaatggtctgtatctgtcattttgttcaagtcctctttatatttggttccattgaggaaaaccaccctctctaatcaggagatcacgttctttctgttatcctagctcattttgtagacgtgtgttctaggcccatggcgctgtgtcaatatatacttagataaaactgataggcctgcaatggagcattcacagtttctctagctgcaatcctactaattttacacgattttaaaacaaccaaggacccacgagaaggtaacaccatatttcaacgaacacgacagcacagcctgtgcaaaggctacatatcctatactgcacatatcaaagagagaggca

SEQ ID NO: 576689 - DNA, 195 bp, Homo sapiens
cacgagtggtaacgagggagaatgtattagcaggggagagtttgagagagagggacagatcccaacagagcacagccgagcgagggtgcaccgcaggataccccaagaagagccaacgacagggctacaatccacatcatgccaaaggctacacaagggcacaaaggtctcccaaggcctgccatgaacgctgct

SEQ ID NO: 576690 - DNA, 162 bp, Homo sapiens
  misc_feature (162)..(162): n is a, c, g, or t
gagcttaggctgcctgggttttggtgatttttgtctgattgcaatgtctggacgtgggaagcaaggaggcaaagttcgggccaaagcgcaaatcccgctcttctcgcggctggtctccagttccccgctggccccgttccaccccttcctcccctaaaggcn

SEQ ID NO: 576691 - DNA, 1043 bp, Homo sapiens
  misc_feature (1043)..(1043): n is a, c, g, or t
agcggaggtgcatcgaggaggacggaatgcattgatctgcggcccagtccccatgtgagagcgatgcacgagtgcggctcttcatcatcctgccaaccccatacagctagagcattcccggagaacctgagacaaccttaatgaacaggctatggcagtattcgatagacggtggagagggtcttatgcagagctggatgcactcgatttggactcctgttctgaaatgatcaggcactctcttggtagccaaggcccagctgacgcttccaccgtagaagaagtcggactgtgaactggtcaggatcccggtactttgcatgggtcgtagggattgattgatcccaaagtccagcggattcttgggcgctctggacgtttccgctcgttccgcacgcgaatacttctccgagctccgttgttaatgcttgcactaccactagtagaaaagacacacatgagatgtccattgcgtatcttttctagttagcggctcttgggacgagaccgactatacattcataggttccgagaaatcatgggatttaataaaacggcaagttgcggagctagatgggccacctatgattcggccacgataagtcttccaattcctagtcaaaccaaaggggagctggtagacgcgtcaacaatggcaaaagatgtgccaagaagacctaggaacactttattccacgcgatttgccttgaaacggtgcaaaccagtccatcgcaatcgctattcgacaaccgtttcttgctaagtagattccttagtgacctcgaggtggaatctcatcatgggtaggataagggctacgtggggatggaatctggtgtattacaccaacatatacggccacgaagaatacgccccatgaggactgtgtgctaatggctaaggacgttgtacctttctccattactctcaatggccctctatggggtcgtttggggccttctcataaagacctctaatttttcccccttgtgccaggcattgtaagctccttgacttggtatcgacctgtttacaccaacan

SEQ ID NO: 576692 - DNA, 789 bp, Homo sapiens
ctttctcccctacttatacagaaaaaaaaaaaaagaataattactaatctcggggcttggtatcttggtgtccctttggcatagactggtctttcttatccccaacccggcctatgggttaccatgaaatgggaattaaatcctcaacaatgagtgaatattagccaggcctaggtggggaaaggggaaggatattagaggtaaagggaccagcaatgtgtacaaatgtgcaggtgagcaggagtcagacttttataagcaggagtgaaagggcttggtggtgcctttctaaggatggtggggtttaatcctacaagtaatagcacatcactgaataattttaacaggagagtgggcttcaggttgggcatttcagaaagatggtctgggctataatgggggaaaagggatgggaatgagggctaaatcttttcaagatgcaaaagggggcaagaaaacaggttagaaagctaagtggaataacctaagggaggcgtgagaatgatacgttatggatagtgggttctacctggtggtcacaacattggacaatacactttctacaacagatactggttaacatggggagaatggagtcggggtactatgagctaaacaccaaaactgggactggacttggtatttagaccttatctcttgaattactcctggccttggaacaaacaccaaattctgcgattctacctctaagggtctctgagataataacctcctttccatctggctgccatgggcttatcaggcctgggttatcgtaacgtcttctcc

SEQ ID NO: 576693 - DNA, 305 bp, Homo sapiens
gtcgacccgggttcaagtgattcttgtgcacagctcctgagtagttgggattacaggcacacaccaccatgcttggctagtttttgtattttttgtagaaacagggtttcaccatgttggccaggctggtctcgaactcctgacctcaggtgatccacctgcctcagcctctcaaagcattgggactacaggcatgagcactgcaccgggccctatttgttttttttgttgttgttgttttttaattgagacagagtcctcgctttgttgcctagactggagtgcagcagcgctagtcgacgcgg

SEQ ID NO: 576694 - DNA, 311 bp, Homo sapiens
ttttttaaaaaagggggcccccccggggggggaaaaattggggttttttttttgggggggggttccccccccccggggcccccccattccccggggggggtttgggggaaatctttggtggggttttaaaacttttttttttgcccggggaaggggccccccttttttcccccgggtttttttttttttaaaaaaggggctttttttttcgggggtttttaaaaccccgggggtcccccccgggggggttggggtttttttccccccgggggccccccccgaaaaaaaaaggttttttttttcccccccca

SEQ ID NO: 576695 - DNA, 1467 bp, Homo sapiens
  misc_feature (1011)..(1011): n is a, c, g, or t
  misc_feature (1019)..(1019): n is a, c, g, or t
cttatgcgtggtcttctggttgactccttgtgtttgtctgctctctcattctcatacgtctctgcatggtgctatgtgtgtctttgatgcgttgattccttctcgtgtgacgcttcgcctagtctactcccgcgcatgagagtcgtcctagctggttctgcaacccccccctttttgtgcctagccgctcaccccgtgggtgcccccccacgtcttgttttttggtaacttgcgcgccccaaacattttgggggccggttgcccaccccctctttctcggggagggggcaaccttgtggataaggtccacaagagaccgtggtgggcacaccctcttcttggtgaagagcacccttttttctctctctttgggggaaaaaggatccccgtcccctcccagcccgtgggtgtgaagtttgcctttccttgaagccacccttgcgcgccagggtttccgcgaagatataaaatctgtctaagcctgggttattgtctctgaacacagggaccttttattctggagcctcgtgcccccgctgggagggggtgaaaaccgcgcacagaatctgtggtgcacaagagacaacacccagggcccccctttccgggggacgcaagggtttcccgcccgcttcgctgagagccacgtgaccatcctcgggagaataggaggagcccgcttctctttcccagtgaccaggagctttctcgtggtcactgcgcacacaacattgtgtgtccaagtgcctcttccccccccatgagaccacagggcgctctccgaggtcgaagaaaaaggctcacagagagcccacgcggtgtaacccacacgagatggagaacaacatgagaagggcgcggacacacacgagaggccgcgtgagaccacccctcgtagaggcacacacgccactcaccaacgcgggagagacaccgctttataggcccctctctcggagttatacttcgcgcgggcaacagcgtttctgaagctcgaagatgttcacgcgncccctccncaccacaagagaggttggaaaggagagccacagagagtttttccttctatagaactctcccccgcggcggagaaaagggagagacactcccctgttccccccgttttgctataagtattgccgggtggttgttctcccttcaccacgagttttctcgcgtatcccgctatggcccattggtgcccgcctgggccacaccgggcgcgttttcccacagaatgctggcgcgtcacccgctaagagcccaggaggccctctctggtggggccctcgtccacggcactaaccacgaaggcgtcgcacacttcttgttctttctggtgcaccaccctccacctatgtgcccctccacgctcctattcttctgtatggcctcggtgttttcctagattatgattgtagagcgaggattgttataatattggaataaagagttattgctcaccca

SEQ ID NO: 576696 - DNA, 125 bp, Homo sapiens
acgagctgcccctttcaggcggagtaggaggtgctgcggagaagccggtgcccgtgcggctgggagtgcggttgtgggtgtggcgtgcggatatttggtgcgagatgcgggcgcagtgtgtgagg

SEQ ID NO: 576697 - DNA, 485 bp, Homo sapiens
tcataggtcgcaggcagggaaaaatacacagtctcttgcatagcaaaagtgacctttactccagttcccaacaatctgcccatctccatctgagaccacttggccggaattaatgtccatatcacaatcagcatttcggtcaaagccattcaacaagtctgtaggaagtctgaaactttccaacattttcctgtcttcttctgagacctccaaactgttccaacctctgcctgttacccagttccaaagctgcttccatatttttgggtatctttacagcagtgccccactctctttggcaccaatttactgtattagtttgttctcacattgctataaagaacttcccaaaactgggtaatgtataaaggaaagaggtttagttgactcacagtttcggagagctggggaggcctcaagaaacttacaattatggcagaaggggaaagcaattatgtccttcttcacatcctgcgaacctatga

SEQ ID NO: 576698 - DNA, 613 bp, Homo sapiens
aagacattggaacactatacctattattcggcgcatgagctggagtcctaggcgcagctctaagcctccttattcgagccgagcgtgggccagacaggcaaccttctaggtaacgaccacatctagcaagcgttggatcgtcgacagcccatgcaatttgtaagtagatcttcttgcatagtaatacccgatcataatcggaggcttgggcgaagctgactagttccgctaataatcggtgcccccgatatggcgtttccccgcagtaaacgaagcataagcttgctgatcgtcttagcgctccctctctcctactcctgctcgcatctgctatagtggaggccggagctaggaacaggtcgacacagtgctaccctcccttaggcagggaactactcgcgcacgcgctggagcctccgtaggaacgtaagccgatactatctccttacacctagcaggtgtctgcgctctatcttaggggccagtcaattggtcatcgaccaaaccattatcaactatgaaaccccctggccataagcctaataccaaacgcccgctcttcgtcgtgatccgacgtaatcacagtagtggcatacgttctccgtatgtctcc

SEQ ID NO: 576699 - DNA, 937 bp, Homo sapiens
tgctagcgtacagtgtagcgccttgtctggtagtggttcgcccgaactagagtgtgtccacatgggtgaagccctatcttcgggggcccctttatacgcggcaagctatgttgcgccgtggaccccgccgtgtgggggggatcccgccatgctctgccagtgctgccacccaactggggggaaccatcactaaaatcttaagcgcttgttcaccatttgccgccaacccttttgtaacgctcgtgcaacaccggtaatgtaacaatgtttgttgcaagaactcacgaaaacctttccccgttaattgctgaccaccgctgtaaattcttctttttcccctcaatatatgcgccccccggtgtgtttccaaacccaatctttgctgtgaaaagacaccttctcgctttagggtcttcaacacaattataacaccccgcgtattttgtttcccggaataaatcctatcttaaaccagtgttggcggcttctccccatgcaaccccaccgaactgcgccttgatatgtcagatacatagcatacactgctcttctaggaaaccacgtgaaattatatttgactgtattaaaataaccactgccaacttcttaataaaggtataatacaaaatatacccatcttactggttcaatttggctgatcgcccgcgatacctcgcttcaaacataacaatagtgtccccccctcgaccctctgttgatatctacgggacttccccatagtccgtcgctcacctcacctagcactttccccccctggcacccccacaatacgttccccctccttctcacacaaaaagaagtgaaaccataaaaatatgaacaaaacaaatccccatatttttcaagactggcaggaatagacaaaatttttaaaaaccccattgggttttaaagggttcccggcccaacaaaaaca

SEQ ID NO: 576700 - DNA, 650 bp, Homo sapiens
tggaaatggagtcttgctctgtaacccaggtctgcactgcaggggggtgatctcggctcactgaaacctctgcctccccagttcaagcaattctcatgcctcagcctcccaggtggctggtaaccggcgggttgtgttgccaccacgccccaagctaattttggtatttttatagtagaagacgagggttttcaccaatgttgggccaggcgtggtctcaaactccccaactctcagatgatcgcggccacctgtggcctcccagagggtgcgtggcataacgaggcgttgagccaaccaacagcccgggttatacagtgcattttttatattcaccagcaaacggtgaacactcgtgatacccacgtgaaaagagagcctccagaatctccgacccttacacccgcagaaccgctgtggttaacccacatatttctacagctttctctttctcgtagaatttctcgcctttcattatgtgagtgtggcgactcaacacacagcagttgtgctcctttgtgggtgtttaaggcatttcttactttagcagagccatcaccgtggctcgaacagttcacgtggggccaacatatttttcgccccaggtgtcctccagaaaagaaagattctggagggtcaggccactcttt

SEQ ID NO: 576701 - DNA, 543 bp, Homo sapiens
aactgacaatgacagctaacatatcaataagataaacaacatactacgataatattgaagctgctactcatatcacaaatcaatgccagatcgaccagaacactgctataaagtcaagtgttctattctgaagggttgacttggcctgtattgcaccacaatcaagttatacttttagtatagtactgaactggtctgggttcagtttcctcgaagaaaataccacctagctagtttatgtaagaaaggacagcaaattattaaaatgattgcagaattgttgagagcacttgaataatgatcctcaaactttagcatgaagtcagtatcagtttggaggcccttgataacagattgtaggccccaccctcaagatttatagactataaggggtgcaccaccaacaaccggccaatttttgtaattttaggagagatagggttacgctattttggccatgctggtcttgaacttatgacctcaggtgattagcatgcctcacccttccaaagtgctgggattgcaggcgtgagcctccacatg

SEQ ID NO: 576702 - DNA, 253 bp, Homo sapiens
tgcagggcaccacgatgcccgtcctgccgaagcacacggtcactttcattcctgtgccccgaccacgccgggccgggccgaacaggtgtctgaccccgcgcgcagcccccactctcggaggacgccggggcgggtgggcccagagtaccggggcgccgctctcccggaacagccctgcaggcccggagtgcttcgcgcagcgccccttccacctggcaggcggcaggtggcgggaatcggggaggggcggccc

SEQ ID NO: 576703 - DNA, 895 bp, Homo sapiens
gagagccggaaccgggcgggcagaggggcgctcgtacggttggcggacgcctgtggcttggctgcagcggccggcaagaccctggaagagaccgtggcgtatggaagacggccaaggctgtcttggaatgtcctgagcagccctccgagtcggagcctctgccacccgacgtttcttgagtgacgctgggttggatataggatttgaccgttgtgtgaagtctactcgggacgacgggcgatcctgtatctcgttgtgggcgcgccacgccacttggataacgggttcattggctagtttcccaggggggccatggggcggaaggcgccttgtccctgtccttgtagagccccaagtgaggagcgctctctatttggtattagtctggggtgagggttccaggccctgttccaaggagcccaggataaggggggctaagccccagtcctggagagtttaggatgagggggcctggcactttcccaaagagctcagtgtatggggaatgtgatcctgcctcttggactccaggattggaggtgggggtgttatggcccttgtagaggaacggggtgtatggggtacagccctttcccagactgcggcaggcatggaccttgtcacgagatgctaaggacaaggggacatgatcctgtaactgggaagtctggaacggggagcatggccaaatcctggctggcgatacggggattgtggacagtgacttgggggaaacattgcttaaaacttaactgaagagtaaccaggaaatggagcacgagaatcacaagacaagaaaggaaagaggatgggacactacgggaagcaggtctggaaaacgcccaaagcctccccatgcccagatactccggaaaccctgagaacagggcaccat

SEQ ID NO: 576704 - DNA, 919 bp, Homo sapiens
  misc_feature (1)..(1): n is a, c, g, or t
  misc_feature (74)..(74): n is a, c, g, or t
  misc_feature (91)..(91): n is a, c, g, or t
  misc_feature (98)..(98): n is a, c, g, or t
  misc_feature (101)..(101): n is a, c, g, or t
  misc_feature (107)..(107): n is a, c, g, or t
  misc_feature (136)..(136): n is a, c, g, or t
  misc_feature (152)..(152): n is a, c, g, or t
  misc_feature (172)..(173): n is a, c, g, or t
  misc_feature (190)..(190): n is a, c, g, or t
  misc_feature (197)..(197): n is a, c, g, or t
  misc_feature (200)..(200): n is a, c, g, or t
  misc_feature (203)..(203): n is a, c, g, or t
  misc_feature (205)..(205): n is a, c, g, or t
  misc_feature (213)..(213): n is a, c, g, or t
  misc_feature (215)..(215): n is a, c, g, or t
  misc_feature (218)..(218): n is a, c, g, or t
  misc_feature (221)..(221): n is a, c, g, or t
  misc_feature (224)..(224): n is a, c, g, or t
  misc_feature (226)..(226): n is a, c, g, or t
  misc_feature (232)..(232): n is a, c, g, or t
  misc_feature (237)..(237): n is a, c, g, or t
  misc_feature (240)..(240): n is a, c, g, or t
  misc_feature (263)..(263): n is a, c, g, or t
  misc_feature (265)..(267): n is a, c, g, or t
  misc_feature (273)..(273): n is a, c, g, or t
  misc_feature (281)..(281): n is a, c, g, or t
  misc_feature (288)..(288): n is a, c, g, or t
  misc_feature (293)..(293): n is a, c, g, or t
  misc_feature (308)..(308): n is a, c, g, or t
  misc_feature (315)..(315): n is a, c, g, or t
  misc_feature (327)..(327): n is a, c, g, or t
  misc_feature (329)..(329): n is a, c, g, or t
  misc_feature (346)..(346): n is a, c, g, or t
  misc_feature (365)..(365): n is a, c, g, or t
  misc_feature (371)..(371): n is a, c, g, or t
  misc_feature (374)..(374): n is a, c, g, or t
  misc_feature (377)..(377): n is a, c, g, or t
  misc_feature (381)..(381): n is a, c, g, or t
  misc_feature (383)..(384): n is a, c, g, or t
  misc_feature (392)..(392): n is a, c, g, or t
  misc_feature (410)..(410): n is a, c, g, or t
  misc_feature (430)..(430): n is a, c, g, or t
  misc_feature (452)..(452): n is a, c, g, or t
  misc_feature (455)..(456): n is a, c, g, or t
  misc_feature (500)..(500): n is a, c, g, or t
ngccaacatcccccttcccaaaaataacattgaaacgggtaaccgtacctgtcaaatcccccggctggcaactntcaaaatccggcctccncccaacnccncaaatntgacaaagtcatttttgtttgtgtaagtnataccggttatccacntccagtacatgtaccattannccagaagcccataaatnatattancanttncnatgtagananccngangtncnaaaggncaatnccncccagccgacacccccccccggncnnncctgtngccaaggntcccccnatttnaatcgtttggcaatngcctttngccccattttcncnttttcagactgtctgcnttgtcccagagtatatgangtaacnacnatnaacncnncggttacnatggattccctggtttcngatttgtcggtatccgaatnaatttcaggcacagaatgaccntcnnggagggcatttgcctcctccagtgccttttccaccccgaaaganggctcctgaataccgctccgtgtcaaccaggggtgctttagacattcttcagcagtggctcgatcttcaggtttcttaactaaaagtgtcctgatgaaatcaacagccgactcagacaaaacatcaaattcttcctcagaataacttaaattcatctgtgagatgtttaagaatgtttcttgtttatcattgcctaagaaaggtgatattcctgtaagcatgacatatgttaacactccaatgctccacatatctgttgccatgcttataggatcataactaagaatttcaggagccacatattcaggggtaccataatttctcggagctcttcactgttcttcaatattcttgagaggccaaatcaacaatcttaatgtcacccaatggagattcacttgtcaacagaatattctgag

SEQ ID NO: 576705 - DNA, 200 bp, Homo sapiens
gccagttaccatacaccatgatgaagttcgcctgctttgaccgtactgttgaggcactgtccacgttgtggttcctaagccccgcagtgagtgttcaaggccagagcaggctggtttgtaacatttgtaggcagggttacataggctgggggtcttttgtgccaattgttttctcaccctgcctgattctgtgggatctg

SEQ ID NO: 576706 - DNA, 208 bp, Homo sapiens
cccccccccccgccggtaacttttatattttcagtacagacagggtttccctatgttggccaggctggtcttgaactccttacctcaggtgatcccctcccctcagcttccccaagagctgggattataggcatgagcccctgcccctggccctgtgctgaaaggcttttgacttatcctagtgttcttgccatattagccccatttt

SEQ ID NO: 576707 - DNA, 918 bp, Homo sapiens
  misc_feature (918)..(918): n is a, c, g, or t
aaagcctgaggcggcggcagcggcggagttggcggcttgtgagagctcgggagagttccctggaaccagaactatggaccttctacgcttctgtcctaccgtattagtctacctacctcgtgcgggagccctcgcgacgcgcccgagcccaaatcccccaagccaacacgcagtccagcatggatatgtggagtgtggtcctgcagtgatagaagagatgataagattgtctatgaatgagtaaaacagtaccgtggtgagagtttcttaggatgtacagaggacaagagcaacatgttcagatggaaccaggtagaatagaactagataatatagctggtcaagtcgatgtggactccagagatgtcgcatgctataattatgactgcataatgcagttgtcaaacgctccggtagacgagtgacgtgattaaggtctaattgccattggcaagtatcttcccagcagcagtagaggcagaagagcagctgtcgatttctcctctagaatctcagagaggcccaattacttactaccttatgaagtctccttgtctagtctttttgtgatgtgtcgtgagcaaggcatattgcgttagtcagagttaggaaagttatggaagtagctctaatgccgcccccaagttgcagagaacaagaatggccgctaatttgatggatttgagtggcttgtctggaaagatattatgagtggtgacacagcgttggagggcccacgtcgcctcaaaaggtaggacccgagattatttgggtggtcaagacagattcctaattgttaatggcggaccaacgtagtggagcccagctgataattacaaagccgagataaggtccgatcgcgggatccaaaacagcaagggcccgaggaggatccaactggtcgcattcttggcgggn

SEQ ID NO: 576708 - DNA, 1214 bp, Homo sapiens
ctgggtcatcggttccctggaaggagaaaaagctgccaattgaacggggcctcccggtcccaggaatgtcgcgacgcggggacgacgcatctcacgacgtcagcctgaaacacgcgggcctttcatcacccgagactcctccagcccaggagggccccgctctttcgcctgcctcctgggggagagcctctggacgacgcacgcgacagcgttttctccaaaaaaggcagagaagagaagcgtagcagtggccgcaagggcgacgggcggcgaagggtactacgcacgcccgcgtcggccacgcggagagatacgcccgactcgagtcccgcggcgcacgcccctagacgcccgaggtgcgcgggccacgcccctcgcccggccaagagcacgccccttccgtcgcccctcccgggggcgtttaccgttcctccccgccccggaagcgcgttcttacctccttcctcgcgagagttccgtgcaccggcacccagatcgcgcgagacagcggaaggagcaagagtgggaggcgcgcgcggaggccgcgacggacgcaagatggcgacggcgaccatagctctccaggtcaatggccagcaaggaggggggtccgagccggcggcggcggcggcagtggtggcagcgggagacaaatggaaacctccacagggcacagactccatcaagatggagaacgggcagagcacagccgccaagctggggctgcctcccctgacgcccgagcagcaggaggcccttcagaaggccaagaagtacgccatggagcagagcatcaagagtgtgctggtgaagcagaccatcgcgcaccagcagcagcagctcaccaacctgcagatggcagcagtgacaatgggctttggagatcctctctcacctttgcaatcgatggcggctcagcggcagcgggcgctggccatcatgtgccgcgtctacgtgggctctatctactatgagctgggggaggacaccatccgccaggcctttgccccctttggccccatcaagagcatcgacatgtcctgggactccgtcaccatgaagcacaagggctttgccttcgtggagtatgaggtccccgaagctgcacagctggccttggagcagatgaactcggtgatgctggggggcaggaacatcaagggtggggcaggaccccagccaaccaataggggccaaggccccacccccattta

SEQ ID NO: 576709 - DNA, 351 bp, Homo sapiens
  misc_feature (29)..(29): n is a, c, g, or t
atttcaagcacagagtcagacggcaaggnacatagcgagacccacttctaccaaaaaatacatatccatatctatagatgtatagatattaaaaattagtaaattccttgcttcccacagttcctgtactaagccagtcagaataagggctgcatgtcactcctacatttcacagccttaggagtaatctatatatttgactggctcagtgctgtgttaaataaacacagattaattgactaggctgaggatgaaataataatctgaggtagctgtgaaattacatagttatttacttatgtagttatttattatcattattccttcatacttatttacttttttccccta

SEQ ID NO: 576710 - DNA, 1290 bp, Homo sapiens
ctgggtcatcggttccctggaaggagaaaaagctgccaattgaacggggcctcccggtcccaggaatgtcgcgacgcggggacgacgcatctcacgacgtcagcctgaaacacgcgggcctttcatcacccgagactcctccagcccaggagggccccgctctttcgcctgcctcctgggggagagcctctggacgacgcacgcgacagcgttttctccaaaaaaggcagagaagagaagcgtagcagtggccgcaagggcgacgggcggcgaagggtactacgcacgcccgcgtcggccacgcggagagatacgcccgactcgagtcccgcggcgcacgcccctagacgcccgaggtgcgcgggccacgcccctcgcccggccaagagcacgccccttccgtcgcccctcccgggggcgtttaccgttcctccccgccccggaagcgcgttcttacctccttcctcgcgagagttccgtgcaccggcacccagatcgcgcgagacagcggaaggagcaagagtgggaggcgcgcgcggaggccgcgacggacgcaagatggcgacggcgaccatagctctccaggtcaatggccagcaaggaggggggtccgagccggcggcggcggcggcagtggtggcagcgggagacaaatggaaacctccacagggcacagactccatcaagatggagaacgggcagagcacagccgccaagctggggctgcctcccctgacgcccgagcagcaggaggcccttcagaaggccaagaagtacgccatggagcagagcatcatgatgacctggaaggggaggtgacagaggagtgtggcaagttcggggccgtgaaccgcgtcatcatctaccaagagaaacaaggcgaggaggaggatgcagaaatcattgtcaagatctttgtggagttttccatagcctctgagactcataaggccatccaggccctcaatggccgctggtttgctggccgcaaggtggtggctgaagtgtacgaccaggagcgttttgataacagtgacctctctgcgtgacagtggtccctctccccggacttgcacttgttccttgtttcctctgggttttatagtgatacagtggtgtccccggggccaggcgcgctctgcccagcccagcctacagtgcggataaaggtgcggatgctgctggccctgaaaaaaaaaaaaatccttggcggcggttacaacgtcgtgcttgggaaacccttgcgtacccaattaattgcttgaagacatcccctttgccaggtgcggg

SEQ ID NO: 576711 - DNA, 1511 bp, Homo sapiens
gtatggcgcccgagtgcactgaagatggcggctgctgtagcgacgtgtatgctccgagcgtcggtttgccctgacatgtgagtgccattccttgggggcatattctgccactgcaagccctcagtgcctgctgcaatgtggcaagaaacgagctttgaccaactttcactttgtagtatctgggtttccaggtgcaaggcacaaacttatctcacgacacccatgtaaccttcattgccaattgaaccctggttggtcacacccagacattgcaacccctactttccacaggggtcacagccgggtaggtcccacatggggcagcaaggttccacaaagccacttcaaggccattcggaatggcaactctccccaaggggcgggccacacatccattttggggtgggctatattccattatcataaattccctttgtgcggcatttcccgacccatatatgtctggttgttcccttacaccacaggacaaccatcatgggtgtgggccgtctgtacaggttggcaacccaacaggtcttcatagcggcaaattctacaaagcggtacgttgcttgcacaccctttgtgttgacaacaggttcgtgtcacgaacaaagggtacatccgacaggctggggcaatttatccccgaccgcttttgcacggcgcacactccattatgacccgtggttggacttacacacattaaacccaacgcccaacatggaagcacagcgaaacgcttggagcatgtggcgctatcgtggtagtgccccacccaacatttgtaacctaccaacattccgtgagcacacgcgatccgtttggtgatctcgaaccggccacgcattcatcaaacgttaacacggatccacagcacagtcttctagccgccggtgcagcgtaccattaaccgtgtgctgtgattgacattggttacaagacacaaggacgactaccgatgggggctacgaatcgtgcacgaccaatcaacacggaagggggatccgatcatatttacaaatatacactttgtgacaacgccgccaaaacatcgggtgaacgtctcaatcacgaagaggcggagtacatgggacacagccgacttaacacagcgacaagtcactcccaccaacgatcttggtgggccgtggcacaagggctgtgaaactgaaaaaagccgccatcacggacattgggagtggcacgagggcgcgcataccacgggcgacggtgtacggcaagacacacacagtatgtgcgcggacacacggcaccagtggaccgcccaggaggacacaccgttgtaacaccacccggagagaactgacgtacaacatacggaacgacaggacgcaacgctaccacacggacgagcgcatccaccaacgacaagtacaccttaccgaggcaggaggcgacaaaacaccagaggagagactcaccccacggtggggtgactaccagcagcacaccgacgccactcaacagtaggtgaaacgaaagacaca

SEQ ID NO: 576712 - DNA, 1043 bp, Homo sapiens
ctgggtcatcggttccctggaaggagaaaaagctgccaattgaacggggcctcccggtcccaggaatgtcgcgacgcggggacgacgcatctcacgacgtcagcctgaaacacgcgggcctttcatcacccgagactcctccagcccaggagggccccgctctttcgcctgcctcctgggggagagcctctggacgacgcacgcgacagcgttttctccaaaaaaggcagagaagagaagcgtagcagtggccgcaagggcgacgggcggcgaagggtactacgcacgcccgcgtcggccacgcggagagatacgcccgactcgagtcccgcggcgcacgcccctagacgcccgaggtgcgcgggccacgcccctcgcccggccaagagcacgccccttccgtcgcccctcccgggggcgtttaccgttcctccccgccccggaagcgcgttcttacctccttcctcgcgagagttccgtgcaccggcacccagatcgcgcgagacagcggaaggagcaagagtgggaggcgcgcgcggaggccgcgacggacgcaagatggcgacggcgaccatagctctccaggtcaatggccagcaaggaggggggtccgagccggcggcggcggcggcagtggtggcagcgggagacaaatggaaacctccacagggcacagactccatcaagatggagaacgggcagagcacagccgccaagctggggctgcctcccctgacgcccgagcagcaggaggcccttcagaaggccaagaagtacgccatggagcagagcatcaagagtgtgctggtgaagcagaccatcgcgcaccagcagcagcagctcaccaacctgcagatggcagcagtgacaatgggctttggagatcctctctcacctttgcaatcgatggcggctcagcggcagcgggcgctggccatcatgtgccgcgtctacgtgggctctatctactatgagctgggggaggacaccatccgccaggcctttgcccccttgcccttatagagggtaccgagctcggttcg

SEQ ID NO: 576713 - DNA, 807 bp, Homo sapiens
acctgcctgaggaaaacctgtgtactattagccatgtgtcaaccccacctgtgttcttctgacatttgcctgtcagactggatgagcccttgaggcctgacgtctcctttgcagctgtactgccatgcaccaatggtccccaaagcaccagccagcacacacattttctgttgcatctcgcagccaacttggcagcagcacacagtgcattctcgcgttcatacacggtgtttccatagcgttatcccacgaagcacattcatatcccaggtggctttccatcgtgtcacacgggctgcgttgaacttcaaccactgcccatcacatggccacttggtcgcggcaagatccatactcattggcgcgcgcacacattctgaccgcacgcaggcaactctccatccctcacaagctatcactgtggcagtcacagtggcagtcatatgctcacacatggtcataaaattgcatcgtgaacccgcacacatcaaaacttgtgtaccacgagtcaataatacatccttgcctccttgaccacaggcactcggacgctcgcgtatcgcacatcgcggcacgacaatggtcgagctggtcccggagcccaaacaacggtcgccgaccgccgcaacgcggccatcgcacctccatcaaggtcgagcacaggccccaatcgcgcaccccggccaaacggaggggtccccagaggaacattgggacaaggaccacaaaccaacacgaccaagacatcccacacaaacctggcctgcacccggtacagacaacactccgagactcacagctccgacc

SEQ ID NO: 576714 - DNA, 232 bp, Homo sapiens
  misc_feature (30)..(30): n is a, c, g, or t
  misc_feature (47)..(47): n is a, c, g, or t
  misc_feature (61)..(61): n is a, c, g, or t
  misc_feature (67)..(67): n is a, c, g, or t
ggagctcgcggggaggccaggctcgtgccnttttgcagacgccaccnccgagggaaaaccngtggtnctattagctgttcttggacattcccgtcgacgggagcccttggccgggtctcctttgaggtaaggggcctggataccaagaagtgacttctcatctaatccataaagctatgttaacagattgggggtagtggcattttcattacaggtaactaaaagaacacct

SEQ ID NO: 576715 - DNA, 1071 bp, Homo sapiens
ctgggtcatcggttccctggaaggagaaaaagctgccaattgaacggggcctcccggtcccaggaatgtcgcgacgcggggacgacgcatctcacgacgtcagcctgaaacacgcgggcctttcatcacccgagactcctccagcccaggagggccccgctctttcgcctgcctcctgggggagagcctctggacgacgcacgcgacagcgttttctccaaaaaaggcagagaagagaagcgtagcagtggccgcaagggcgacgggcggcgaagggtactacgcacgcccgcgtcggccacgcggagagatacgcccgactcgagtcccgcggcgcacgcccctagacgcccgaggtgcgcgggccacgcccctcgcccggccaagagcacgccccttccgtcgcccctcccgggggcgtttaccgttcctccccgccccggaagcgcgttcttacctccttcctcgcgagagttccgtgcaccggcacccagatcgcgcgagacagcggaaggagcaagagtgggaggcgcgcgcggaggccgcgacggacgcaagatggcgacggcgaccatagctctccaggtcaatggccagcaaggaggggggtccgagccggcggcggcggcggcagtggtggcagcgggagacaaatggaaacctccacagggcacagactccatcaagatggagaacgggcagagcacagccgccaagctggggctgcctcccctgacgcccgagcagcaggaggcccttcagaaggccaagaagtacgccatggagcagagcatcaagagtgtgctggtgaagcagaccatcgcgcaccagcagcagcagctcaccaacctgcagatggcagcagtgacaatgggctttggagatcctctctcacctttgcaatcgatcaatagaaatgctcacttcttccggggctcatgtccttagtcagggctagaggggggcagtgcagcccacgtgctggggaccttgctcccctggccggtcctgcccgccagctctggacgagcgcagcagagcgccaggcgtggtggggccggtggtgtgggc

SEQ ID NO: 576716 - DNA, 149 bp, Homo sapiens
caagatcctgaagcaatgatagagtgtgaaactgagaccagatgggggatggagatgtagttgctgacatccatggatcgaatccaggccctgttagcttcatttgccagacccaccattagagagtgaagatgaagagagaggctgca

SEQ ID NO: 576717 - DNA, 281 bp, Homo sapiens
  misc_feature (42)..(43): n is a, c, g, or t
  misc_feature (75)..(75): n is a, c, g, or t
cccgggttttaaagggggcccccccccccctttttttttttnnccgggggggtttttttttggccccggggcccnccccccccccattattttttaaaaagggggggtttgggggggggcggtttccccaacacccccatttttttttttttacccgggggggcgggttttattgttttgccccccgggttttttgggggggggtaaaaaccccggttttttttttttggggggtttttacccccccccccccgggtaaaatggttttttttcccccccca

SEQ ID NO: 576718 - DNA, 245 bp, Homo sapiens
gtaacaggcacagtaatttgttttgattctaactggggatatcaagatacattttttaccaaaaaaaaaaaaaaagggccttccggtgcccttcaatttaccattcctccgttaaaaccatccacgggtttaccaaaacgggctcctttgttctacactttatcgggaataatcggcatacctcgggccccttcatttccattcacgttccattacccccaccgcgctcttttgtactttttcaa

SEQ ID NO: 576719 - DNA, 126 bp, Homo sapiens
ttatgttctgacccacatcacctcccactggccagccaggttgtgtcagtgcaggaatatcatttcgtgtacatcattttgtatcccccttttatctccctctctcttctccatagacttgttgct

SEQ ID NO: 576720 - DNA, 262 bp, Homo sapiens
gaccgcccccacctacagcaggcgcacttccacaggggcagttgttgccgcgagctgcggggcccgtgcgtcgccgggcacagtataatctcgaatcaaatgcctgtcgataggagcaccgggagagcgaggcttacaccacccggccggagccccgccattgtgatcgtcactttctccaaaccagagggagcgcccgggggcagacaggccaatatgtgcgagaggggggagaagcagagaccactttctacagcggccg

SEQ ID NO: 576721 - DNA, 185 bp, Homo sapiens
catcatcatctcgtcacatattgctctctgactcattaatatttgcttgagtgtgagagatacactcatcagctcagggaatggtgcatcgtgtgtaatctataaatatcttcgacgtccttctagtctgagatccagccctggttggcttcactgaagtagcccaattggctggtcgagcgagc

SEQ ID NO: 576722 - DNA, 1066 bp, Homo sapiens
gaactcggttgttcccaattggcaatgatgtaatctacagaggagatgaaagccatagatggcctaaacagaaatgtgcgatatttgacccttgatatgtaagtgattttggagatggatgtcctaatttattttcagaggaggaatgtaagatgggtgttgagagtgaccttcacgccaggggcacagaggccaatgtgagacagaggtgagacaggagctttctggaagtctcctcctggattcactccagagctctgttctctggcagggagagtggccctgggtcagcatgggtcaacctgtgcctctgctctcgtgactccaaggaactttccagagcagccaagatcattgctgaatctgcaccttccatgtaggcctgctgtttgtgctactgtctagtgtacacactgtggatattgcccatgtggtcgcattagatgtttccaaatctgtgcttctatcttgttcttcccaacctgctcaatgtcttaccagatcaaaggcagttccgtcaatcttgtgggccaggttccaattcccacctctttcacatggaattgcttgctggatcctgtcgatttagcatttttaatcatttcaaacctttttcgtgcctgtctttgcatgtttgcccatgagccaaacactgcatttgcctccagaaagtctgtcttagtggagcgaataggagcacttggccttggtgttctgcaatatggagatctcagtgcagagaatgaagaaatgttaaaatcaaatgcagagtgtagatgcaaaagcaccattgttggagataatttataaccaataacagaagtttactattcctctgtgttctaaggttctaggattcatagaaggtcattcatataatgagggaaaaaagaagttatgtaactgctggcagtagggatttcaacaagtaatagagatgatgagataatgtgtgaaaaaaacaagcacaatggtacatcataagtacccaaaatttggtggatattattagtagtattttattcatttagaggaaaatacaaaatgaaaacggagatgataaaag

SEQ ID NO: 576723 - DNA, 181 bp, Homo sapiens
gtgacagccggtacggccccgggttagggcaacctcgattacgggcggctccagtcccgccagtagcgccccggcaatgcaacaagtgtcaagagagtgtaaagacggacgtagtatatggatcatataggaatagtaagaagtggtaggtagtggtgcgagatactcgttgcggcgggcg

SEQ ID NO: 576724 - DNA, 1076 bp, Homo sapiens
ggcggatcctcccagaggtggcacaatggagcgatctccaggagagggccccagccccagccccatggaccagccctctgctccctccgaccccactgagcagccccccgctgctcacgcaaagccagacccaggttctgggggccaacctgctggccctggctgcggcgggtgaggccctggctggtgctagacttcattcgggaggcggttgctggtgctgatacctgtgtatttggccgggggcagtggagactcagcgtgggtaacgtgctcttcggcctcgccctctacctgggactggcgccgggtccgcgacgagaacgaaccggaagccttcgagcagcgaggcagctactggacgacgaggagcagatcacatgcggaaaacctctctatatgagtcactcgagcagctaccatgcctgggtcagcttcacaagacgtggaaaaggctgacatggctcactacgatagtggaccaggtctggaaccttacctgggccagatactatggagaagcatactgacctgaaactgtggctccggctgttaggggatctaaaccaccagtcatgcaaacatatacatttaccacgacgtggaactggagtgacaagcaatcggcgcattcactggagtcgagggttcacccaggtcagcagaaacagagcacgatcctgcaggcactggacacatcaagccactgcacggtgcaaggctgcagactgaatgctggaaacgagaacgaaacgaaaagcaaggcaacacacccgaaccacgggcgcccgccacccaccgaccagaactgcacacgagagcttccgtccctgaccagccaccataaggagagatacacctgtctgggccaacctggcacagcagtacgacacaccggactcactaccacagacaagagaacgacaccgtgccacgtaaagaaagcaggagacaccaggactccagtgacagccaacagtgaccgggcagaggagcggcaacccccccatgcgcttgtggccccaattccacgaaagctgacagtgatgtcgggcacgaaccaaaatcctcactcc

SEQ ID NO: 576725 - DNA, 649 bp, Homo sapiens
  misc_feature (84)..(84): n is a, c, g, or t
  misc_feature (138)..(138): n is a, c, g, or t
  misc_feature (497)..(497): n is a, c, g, or t
  misc_feature (517)..(517): n is a, c, g, or t
tggaaatgacaggcttttaatttctcaggaacagccgaaatgacctccagaaggtttccagcgaagctgtaacaatccacccgntgcagctctatgacagggaggagggcgaatcaaatccatcatcttacgccaganttcagcccgtggcgggagcgtgcgtgcctccaaagaaagcggggaccggggcggacggcgtctctcccccggtgtggagaacgtgacagatgtgaaggtggggctgacagacacacggcctgcagcagcccagccagtcccccacagcatcgagccaagtcatttaaaagggatttaggccactgcctttttctgagggaggagcggccagcattgtgccccggcggctcacggggcctgtctaatcacacagcaggtggcaaagggagtatctgccagacgcttcctatcactctattctggtctcctcatccacctgaagttcaccccgtttccccaatgacttagaagggcttggngctaagtttaaatggtagtntgggctatccggtgaattaacaattcaaacaaaataagaaagccatgttgttaaccagtagagggagccagggactcggtctccattctctcatcacacacaagtcatgctctctaccaaaaaaagaaaaac

SEQ ID NO: 576726 - DNA, 399 bp, Homo sapiens
agagcccagaatcccttctcatgccagtgtgaatctaagagcttgaccacaggcttcctcacaggtgaaattgaaaaccagcccaagctgctcagccaagtctcttgggcacttgtcactgttaaaggttggccagaatctggaaggtgtaaaagatccagttaaaaggtgcacccattaggaattaaggctcaaggtggggtctccttggcttgggccaaagtgcttccccacttgccttgtgggaaaggagaaagtgaaatggccggtgtacagagcctctaacgcctctgtaggcatcactgtgaaaaactctgccaacacatgtgttgtggtcacaacagtgccgagcatgtagtacagccacagacagctctcccacagacgagtctggtctcc

SEQ ID NO: 576727 - DNA, 661 bp, Homo sapiens
  misc_feature (84)..(84): n is a, c, g, or t
  misc_feature (138)..(138): n is a, c, g, or t
tggaaatgacaggcttttaatttctcaggaacagccgaaatgacctccagaaggtttccagcgaagctgtaacaatccacccgntgcagctctatgacagggaggagggcgaatcaaatccatcatcttacgccaganttcagcccgtggcgggagcgtgcgtgcctccaaagaaagcggggaccggggcggacggcgtctctcccccggtgtggagaacgtgacagatgtgaaggtggggctgtgaacaaaaacacacgcggcctgtgcacgacatgccacagcacagttccccacaacagacatctctgagcacaagctaatttaacaaacagggattttagggccactgtgccttttatctcgtgaggggagagacgcggccagcatgtgtgtgtcccgcggcgggctatcagtgtggggccgtgttatatatatctcaacaacgagcaagtgtgtgcacaaagagggacgaatattctgtgccaagaaaggccttttccattatttcaactctctatatatatcagtggtctccctttcaatctccaacccttgagaagttttacaccccgcgtgattaccccccaaaagtgaactttaaaaaggtggcttggggtgcataaagttttaaaatttgggtagtttgggggacaaaatg

SEQ ID NO: 576728 - DNA, 153 bp, Homo sapiens
tctctactgagctccaggagcactgccaccccaccatcacagaatgtctgagctgtcttgagcacactgctggactcaatgagtgcagattctcaatggacaggcgtgaggctggctcagctgtcccctgccgcagcacatggccaggcacgt

SEQ ID NO: 576729 - DNA, 368 bp, Homo sapiens
  misc_feature (108)..(108): n is a, c, g, or t
gtggaaaccaaagagcaatttcaagaagcagttccaggaagaagcttagcccaggaaaaacaaagaccagttggacccagagatgcctgagttggagatgaactttgnccaactttcctcatcaccatacttaaaatcctgtccaaggaggagcttattcaccattttctatacatgtgacatatgtagcagcataaccgacaactgggactgcgctgccttgactccacctctacatacaatgactcagctaaccagactaataaaagccatgtttgcaccattgctcagcgaggcattgctttggggaattattcccagtgtcctccttacttatcgcaagtaataaaatccccctgggaaatcca

SEQ ID NO: 576730 - DNA, 105 bp, Homo sapiens
tacttgcgctggatattaggggcccgggtcagaatcttgccaaatgaagagaagggccctgtgtctgtgtccctcagtacgaagactaaagtgctggttagtgtg

SEQ ID NO: 576731 - DNA, 444 bp, Homo sapiens
  misc_feature (6)..(6): n is a, c, g, or t
  misc_feature (40)..(40): n is a, c, g, or t
  misc_feature (97)..(97): n is a, c, g, or t
gaagangtttcttcagggtaattatttaatgataggattngagcccagtcatatattaaaatgagttcttattatatttaaaaaactatatggcaantcatttcaattaattggggaagttaaggatatattaatacatggtgttagcctttaacattaacttaacattacagtccggcacggtggctcgcgcctgtaatcccagcaccttgggaggctgaggtggggggatcatgaggtcaagagatcgagaccatcctagccaacatgttgaaaccccgtctctactaaaaatacaaaaattagctgggtgttgtggcgcgcctgtagtcccagctactccggaggctgaggcaggagaatgacttgaacctgggaggtggaggtgcagtgagctgagattgtgccactgcactccagcctggcgacagatcaagatccgtc

SEQ ID NO: 576732 - DNA, 853 bp, Homo sapiens
cctggcaagagttaatatctcacaagggtcccttttttttaagggtacagtgatcgctaggtaaccctggtaggcacattgactcgctgctgatacctccatagtccatagaggcccgtccccccaggccagaaaaggttttggccttttgggttcacatctcttgctggggaataatatggggaaatgcgctcgttttctgctaaaattttagcttaatatcttagtcccagggagagctcagcacattaggaaccagactggaagactgtgaattttaacacccaaacaccactggcttaacattaattttatttgggactaccacgaaaaatattataatttctggagccaataaggtcactataccccgttttcacgtcctcgacactttaacggatttcttgagtcccccatcaccagttaacctgctggtgtttaactctgttacatttattattggtgtccaaagcacacttgactgggtgtaaccccgtgagcatctttttgagtgtttcataaagcaattttcccacttggaaaccataattgagaaaatagccctattgtatattttatgccctgagctagaaagtgccctttttactgatgctattacgactgataattttctctgaagtgagaatttaacccttttttctctttagtattatagtttatatatagcccatatttttagaaagccattcccagatcaggcatggtggcttacacctgtaatccccagcactttggaaggctgaggtgtggggattgcgtgaaacccccagatttgagacccgcctggttagcaaggccagatcccccactctaccaaaagaaaaaaaaaact

SEQ ID NO: 576733 - DNA, 923 bp, Homo sapiens
  misc_feature (233)..(233): n is a, c, g, or t
  misc_feature (242)..(242): n is a, c, g, or t
  misc_feature (247)..(247): n is a, c, g, or t
  misc_feature (251)..(251): n is a, c, g, or t
  misc_feature (268)..(268): n is a, c, g, or t
cacgaggttttctaattcattcaggtaaatatgatttatccctggggtagtggcacacacacagtatccattagttaaactcttcttaaggaagatcaggaacatcccatctgtgcttaaccagaatccagcatgtcagcacacaagtgattttattgttattttgttgtttttacttgcatttgttgtggttactttcatctgcagcatttggagtttaaaaataatgtaangggttctantaganatantgtcctaaggccaattncctaccatactaacaatcagcagataaaattctggacgtgagattccttatgatctaattatacctgaggttgagcaagaaatgtcttcctttagaaaatctcatgcaagtcaggttcttctctacagttcatacaattgagaatggatttaattaactagcgattctaggccagctattgctctgcccgtgtgaaggaaaaaggaatcgttctcaacctgataatctgtgtaagaacacaatcccatatgaacaatctggtcattaacatacatatgatacggagtctctttgtcagtcgaccaagtgaacatatcttgctcatggtgggttggacgaaagtaactacatgttacgagggtcacgaagcttctggtgttcgtgcgtgtatgctttaaatacgccttggggtgcttgtgatagaacggccttacaaggggagcatcagcgttaggaaagtgtgactctgtaggagtgtagaaggccggggtgtatgatcttagcctcgtgcctgatgcctgaatccagccagctgtggctctgatccagagcaatagagcaagttagccatcaccagtcattgtgtacagaggcagggaatactggtttgagtccatgggtagcatggagtgtatgaggagattcaagacataga

SEQ ID NO: 576734 - DNA, 175 bp, Homo sapiens
aatggaggtttgagcattaagttcctgagggcctttgtcattgtggttagtgacccatctggatgcttaggctgtcacattaatacctggcctgttgattagcgtggcaagaaggttcatgccggttgtggtggcttgcgcctctaatcccactgccttaggcaggtcgaggcag

SEQ ID NO: 576735 - DNA, 134 bp, Homo sapiens
ggcttgagagctgaatagcataatttctcctgcctcatcagtcacagggactggaagtccatcttgtaccctgatccttcacagacctgagcaagccaggcgaaaccccatcgctacagacctgagcaagccag

SEQ ID NO: 576736 - DNA, 414 bp, Homo sapiens
  misc_feature (414)..(414): n is a, c, g, or t
atggccggtgaagagattcgaggcaagccgactgacggcagggcgacgtagcagagaaagacagaagaggagggacgtctggacaccgagagatgtttggctcggggcagtcagagcggagtccagcccctgggcggcccaactccaggggaagatcaccttcccacttcatccatccccacccttccagctccccatccatcctgctgaaagccatttccaccactcaataaaacctcgcattcatccttcaagtccgtgtgtgacccgatttttcctggattctggaaaagagctcggaatacagaaagctgtcccctggtcctttgcccttgtgaaaaagcagaaggtccattgagctggttaacactccagctgtctgtggtggccaagctgaaagagctttgtaacacn

SEQ ID NO: 576737 - DNA, 442 bp, Homo sapiens
gctcaagttgatcctcaataccaggtttatgaaactcaaaaacaggcagaacgaaacaccaggcttttcagcaggcagacatggtggataaaacttttaaaaaaggccaccggatgaccctttccctttttatggaaccggacacaccggtccctaacccaggacccaacaatctgtggcctacaagaaacagacatcatctataaggaaaaacacagacggaaaataaagcaaagaaaaaagatattccagggctgggcatggtagctcatgcctgtaatctcagcacttggggagaccgaggcgggtggatggcttgaggtcaggagtttgggaccagcctgaccaacgtggtgaaaccctgtctctactaaaaatacaaaaatcagcggggcatcggggcaggcacctgtaatcccagctactcaggaggctgtggcag

SEQ ID NO: 576738 - DNA, 545 bp, Homo sapiens
gcacgtgatgcgtgcagagctgattctagaggatcccaattgtcaggcaagagtgtcgcatcctagcaccagaggctgcgctttgtctcccaggcacagttccattttgactccactgtcaatgaattgatagcagagttcagtatccaaatgcttgtaaaaacaggttttacatttgatttcccatttctcatatttaggtaaaacattgtcctataaattggggttgccacctgatagctctttttatgtggccaggtgcctccataaaattagatgcttgagatatcagatataccagctgtcctggagagagaaaagtttcctatcttgtgcgcatttttccataaaggagttcttcttatctgaagagaagtaatggctcttgtattaatgactatatagtgtttcccttcagtgtattccacaacagaaaaacgacagtggactgtggagtctttgtgctccagtactgcaagtgtcctcgccttagagcagcctttccagttttcacaagaagacatgcccccgagtgcggaaaagga

SEQ ID NO: 576739 - DNA, 2382 bp, Homo sapiens
agtaccgctgcggccgggggattgggccggggtctccaccgccgaccgaggggagcggcgtccgctcggccctgctttttgcgacctgccgtcagccccacgtcgccggcctggaggggcgaagaggacgaggggcgcaaggcttcctccggggacattggctccctggattatcaagcagtttgtagttgacattgaatccaggctgaggatggaaggtgtggaacttaaagaagaatggcaagatgaagattttccgatacctttaccagaagatgatagtattgaagcagatatactagctataactggaccagaggaccagcctggctcactagaagttaatggaaataaagtgagaaagaaactaatggctccagacattagcctgacactggatcctagtgatggctctgtattgtcagatgatttggatgaaagtggggagattgacttagatggcttagacacaccgtcagagaatagtaatgagtttgagtgggaagatgatcttccaaaacccaagactactgaagtaattaggaaaggctcaattactgaatacacagcagcagaggaaaaagaagatggacgacgctggcgtatgttcaggattggagaacaggaccacagggttgatatgaaggcaattgaaccctataaaaaagttatcagccatgggggatattatggggatggattaaatgccattgttgtatttgctgtctgtttcatgcctgaaagtagtcagcctaactatagatacctgatggacaatctttttaaatatgttattggcactttggagctattagtagcagaaaactacatgatagtttatttaaatggtgcaacaactcgaagaaaaatgcccagtctgggatggctcaggaaatgttatcagcaaattgatagaaggttacggaaaaatctaaaatccctaatcattgtacatccttcttggtttatcagaacacttctggctgttacaagaccatttattagctcgaaattcagccaaaaaattagatacgtgtttaatttggcagaactagcagaacttgtccccatggaatacgttggcataccagaatgcataaaacaagttgatcaagaacttaatggaaaacaagatgaaccgaaaaatgaacagtaagtttggcatctagtccaaacaagactgaagaatgtgctgatggagcagtgctgtttctgcattcataatgcatttattggcccatatttttatgtaacctgttacaaaatagacttgactttttcataatggacttttgtattatacaagggactgttcactgctgtactggtttgcaaatttcttgaatttagctctttaatagctaactgtattattatcgttttatattttatattgctaaatagagaaccacactttatataaagtagtttttgcatttgtttattgaatgatgcatcttcttcggtgaaatatttatatgcataaatggcaaaggaaagaaataatatatatttttatgtcattgagcaatattttttcaatgtgtacctgtcttatggaagaaatatgcaggtatataagaccacgattttctaagctgccatataagaatttttgtttttgtaaatggttaaatacatttcctgggtaacttaggaaattaagctttttcataaggcaacagatggtaaactgattgtcatgaatacccaaagatcatgtatataatcgaagtgtattagtaccatcccaaggtttttttctcatttaacatatttgtttcataattcagcaagtacagatgcaagcgcattgcacactttttcctttctaaacttaaagacaagtcaaaaagccattcttagaactagaggatttaagcagggtcggaattacgggtttgtatatatgtatatactcgtttgtatatatgtatatactgggacattttatcttctggcccaaagtcagaactttataaaaatcttgagtttgttcacttaatgtgaaataagctatgtgtccagggtattgctcccctgagtgtatatgagtgctgagtagtattgcagagaatgtgatgagttatcactgtcacaactttttctatagaaaacaggggctgcttttaaactctcactatgggacactttaccaaaatacttccatatcaattatttgaacccggtagtttgtttgacctagttagattgtggtgtttattcaagtttgaaatcatgtttgacaatactgtaaattaggttaattttgaagtcttagcatcatcatattgtgctgttttggataacacgtttgttcaagaacatttaaactgtttctttggtgtcctttacattgaaataaattgtgtttgtgcctcc

SEQ ID NO: 576740 - DNA, 433 bp, Homo sapiens
atgtctatcctacctgaccagacatcaccctttggtaatgtctgttctacttcctgtctctgaattggcgttattctaggtacctcataaaagtgaaattataacatatatgcccttccgtgtctggcttatttcactaagcataaagttttttttaatttttctctgagacggagtttcgctcttgtcacccaggctggagtgcaatggcgtgggcttggttcactgcaacctctgcctcccgggttcgtgcgattctcctgcctcggcctcctgagtggctgggactacgggcatgtgccagtatgtccggctaatttttgtgtttttggtggagataggatttcaccatgttgaccaggatggtctcgatctcctgaccttgttatctgcccacctcggcctcccagggtggtgggattgtaggcgtgag

SEQ ID NO: 576741 - DNA, 800 bp, Homo sapiens
cggccgcacgccgcggagcagtgcgctcgcgaggtccgggtattacgtgtgctcgagcacgctggtggcgaaaagacccgtgacttgaactgtgttgtgcggcgccatgcaggtctccagcctcaatgaggtgaagatttacagcctcagctgcggcaaggtcccttcctgagtggcttctctgactaggaccgcaacgagagcgcatacagagacggaaagatgtagagtgtccgtaggaggaattgaactatattcagggacttgtgcaaagtgccatactgtgatgtacccactattaaggtgtcacaagatggactaggtacattttagcaagctggaacattataaaccgtcgggttcgatgtgatgaccacctatcaattatccttgcaagtttgcaaaggtgtgcaagattcaggaagttgtcacgctttgtaaatactgtctgcatggacttactcaaaggtagtgtgatatacggcactaggccttggtactgactaggagccgacagaaactgagtgagtggacatgaatattatagtgaattaagctaagatagataataacgtatatgacaattggtagaaaagcgttaaaattgcgctggcgtaaggatagcataatacaggtcagaacccaaacacacactggagcataagaagtacgtggttgtagttagttgatagaacgatacatgcaataaaaagaaaatagtatccaaagcatctagagagacgacgtagaaagcacaacacacgtcccctcaggtcccgttatcaaaccccctacatcga

SEQ ID NO: 576742 - DNA, 131 bp, Homo sapiens
atctacttgttaacctccccctcgagataagaacactaaagggtatcgggcagatatcaaatatgaaggctcatcctccactcgcatacagactccgacagggaactaaccatggtgttagagatggcagt

SEQ ID NO: 576743 - DNA, 304 bp, Homo sapiens
tttactggaattttttttttggggttttgtgaaccaaactcctttccaaccatcaggagattcagactttttcaacttaaagaattcctgaatttttacacccaaaagacttccccaggacttccccatcctttttcaagaccaaacaaccagattcccccccattctgattcttcaaaacccagggttcagaccacattaaaaacttcagatttccacttcgcctttcaaattttttccaaagactttccttattcaccgccaaattttcgattcgttcgacctcggaactttcattcccaag

SEQ ID NO: 576744 - DNA, 439 bp, Homo sapiens
agccaaattcgcacaggcgctggttagagtgtgggtcgcaggttaagcaatcaaggtagggtcaacgaaaggtcgaatcgaaaaactgtccgacccacccccagggttggggtcggtggagtccagcaggatatcaaggttgtttcacgaccgttggggaaaaggtccgcgttaaatgcaaccggatatacctcggggccttaagaagtgattcagcccaaatggtacccgtggaacaagattgtcctaagaagtggtacacgatttttaaggaccacgtgtctctgggggactataaacccgatgggataacctggagctttattacaataaatagaatcctcatcttcctgccccgctttcctctcccatcctcatcccccacatgggatagagcttgtttgtaaaaactccccttaataaagattaaatgtgccca

SEQ ID NO: 576745 - DNA, 199 bp, Homo sapiens
ctaaagtatagcagagttacgctcacgcacccgtcttgattcctacttctgtttattcttgacttctcaaatctctttggatgccagtgtgtccttttgctacagcttctccattccttaattctttattttgatttatctctttatctgtgtggtttctttgtctgttatcctccttgagaagaatttgtggagttac

SEQ ID NO: 576746 - DNA, 102 bp, Homo sapiens
caacaatcagctagatacaaagcagtaggtgattgcagtgaaattggaatggcaccacagatgtgagacaaaatatgaaggaagcagaactgtaagaactta

SEQ ID NO: 576747 - DNA, 1501 bp, Homo sapiens
cgcggtggctcacacctgtaatcccagcactttgggaggccgaggcaggcagacaacaaggtcaggagtttgagaccagcctggccaacatggtgaaaccctgtctctattaaagataaaaaaaaatcagccaggtgtggtggtgcacgcctgtaattccagctactcaggaggctgaggcaggagaatcgcttgaacccaggaggtggaggttgcagtgagccgagatcgtgccattgcactccagcctgggtgaaagggcgagactccgtctcaaaaaaaaaaaaaaggtttccattggcccttttttccagggggcttttggcaattttcctggaagatccctagtgggactgaaaattctaacggtgacccgggggctggacgtggaaacccatggggtagtcacttgggtccattatcctctggtcgccagtatttatgggctacaaaatacttttataacaattttctcccaaagaaagagcttacggcgcaatctagacctcagaaaataccaaaccacatttaaagggtacacctatagtaatgtgaccatgaacgaagcgtccagagaactgacactgagggcaggatccaggacttttcctatgacaaattagtttgacactacacagtggttctccccgtgggctcttcacctttatctgcaggaaggccccacgaaaaatgacaacctgcgtaataaaccactatgccactgagtatcgaccagcaagatcagccctcgcacacattcatacggtcccgaacggcggctgcagttttctttattcagccacgatagagatagaaacaagaagcgagccaacacacacacacacagagggtcatagaaacacgcacacgtaaccctatcacaccgccacaccgcaaccaacacaacaaccacacaagcggggggacacgagaacacgccgcggcgacgaggccccacgcgccggcacaaccaagccgaccacacacgcaccgacgaccgcgacaacacagaccgacggaggagaagaccagaaggaacgaacgagcgggaagagcgaagctgcgcgagccgacgcgcggagaagagggacagcgagcggaagggggaaagagaacagagaggaggcaagagagcgaaggcggccggagagcggacgagggaagagaagcccggggcagagacccagcagagacggacagagggcgaggccgacacgccgggcgcagggcaggcccgcggggagcgcacacgagcagcgggcgagcaacacggcaagaagaggcgccggcgggaggaacgaacgacaacgcgccgcaacacacgcacccagacgcagggaaaaagaacgacgagagagcagcaaaccaaaaggaggagggacacacaagagaacagggggagaagagacagagaacccggcggaccaacaaagcggaaccgaacagcgaacgcaagcaacacaccagcagaccgagcaagacccgcagcagacaacaccac

SEQ ID NO: 576748 - DNA, 918 bp, Homo sapiens
tgtctctctcgcgttgtgtgctgatttttgttcagcccgtgttacctcccttgtggtgtcgtgaccacctgctcgcgtgggggtttcgttggtggcgtactgttggtgtcgccaactggtccggtgaggaacaagctgttctgtgcacaatatagcggttgcgctcctcgcttcccactattaaggagtacttcccagcactctcatgtaaagtcaatgggggccgctgccggtgggcgcccgtcatgtacaaggtcacgtccaagcaccttggaccacacgtatgttgacagaaacggtggaacctaccaggggcagcgcacatctctgcgttggaacacccccgccctcggttactccctgggtatttgcgagggcccgtgggcaagggcgcacaggtcacccgcctgcggggcggtcctaatggtgtcttcaaacaacattgcccctcaaaacatatgtcaccggtaacccgcgggttgttactgcacccaagatgttgtgtgccgacgccacttcgcgaagtgcagtcgcgcgggcccacgttcgtcgtggacgccttattgccgcaacacacgtatctacttgcgttacagtgagtgggatccctccctccctgacttatcgctcgggcaccccagaagggctattccctcgatccccgaaatcaccgacaggggcccacccccccagaggactgccgcggcccaagttcccccggaggaacaagaagagatgcccagagtccctccctctacagtgcggcggtataccggatctcccccacacatcttccgtacaagagactcccccgcacgcgtgccaacagggaggattaaacatacccggggatgccacggcagggcgggtaaaaaaacaggccctcccagtgaccccccaaaaacaacaaacaaaaca

SEQ ID NO: 576749 - DNA, 932 bp, Homo sapiens
  misc_feature (308)..(308): n is a, c, g, or t
  misc_feature (313)..(313): n is a, c, g, or t
  misc_feature (873)..(873): n is a, c, g, or t
agtttattaaaatggctccaattctccaaaattatatggtatatatttgtaagttatttaaaaaaacttccatggcccttccattcccctctcctctcaaaatagggtattggtccaggttggatccaagtggccacaaaggtctaaccatggcacccacgaaagcacgacgaagaacagggacgggtccacgagggaaccagggtatggcctgggggtcacctaactcggcaactggacgacggtccaacggcgcaggttaaactcactgggctgggggggcaaacgaactggagaacgagactaantacancaggaccaacagccaaacaggaacagcaaatagcggcgagagctaggaaccagaagaacagtgttacaaatattcattacaccaacatttaccaacattatattcaggggggaggccccaaccaacatcccggaggagcaaccaggaaccaaaacttaacccaccatggaaggggaaggaactctaggccggggggcgtccgtcttctccctacaaaacctccgtttctaagcaaataatttagggaagccccaaacgagggttccacaggttcccggcgttccccggggtgcgtggtccatattttgcgcggccttatggccatctcaccaaggggcaaaatggccagccagcagggcctttttggggggtggccaaggcccactggtgacaaggtgtggaagaatctacacttggtaactttccaataattttggcgccctgtgttcccattttcaggcaatggtccttcaacatggattcttcgaatagttagagcgcgggaatttcccccatcatgggttgaaactgagggttcttacggggcaatccaggctggngcccggagacaattaaattcttcacattccaggtgagcgcatttggcttctggggggag

SEQ ID NO: 576750 - DNA, 301 bp, Homo sapiens
atatctatcggggaggtaatatgtgtatcgccgtgagcaatatattgagtcggactgggtgtcagaggacgcgtgtcagagttgccttgtagaaataatcccaggaacctgggataactggatacacccggtatccaggcactaccagagcgtgaactttaggctggccaaggcctggagccagagtgtgtgcagcgctcccacggccgcctgcccgggactgccccccgacacatgcttagtggaattctcccggtggcagcccaagagtctccggaacgaaggtcaccaacagccaaag

SEQ ID NO: 576751 - DNA, 512 bp, Homo sapiens
cgcggtggctcacgcctgtaatcccagctctcagggaggctaagaggcgggaggatagcttgagcccaggagttcgagacctgcctgggcaatatagcgagaccccggttctccagaaaaaggaaaaaaaaaaaaaaaaaacaaaaaaaaaaaaaaaaaaaaaaaaaaaaaattgtgtgtggggcgcgcgcgccggggccccggaaaaggttttaaaacccatcgcgggggggcgcgcgggggcccccactggagcgacagggacacatgtgggccaaagcgcggtggccacaagagagagaccccggggcactatgagaacaggggcgggggtttccacacaattaaaaaaagaggggggggggaaccacggaggggttttgggagcaaaacttccaagaagggggggctacagaggaggccacaaaaggggggggcttctttaaaagggggggcccaccgcggcgacgccggagttctacaatttacccccgagggggggggggggaggg

SEQ ID NO: 576752 - DNA, 285 bp, Homo sapiens
catcacgtctggtgtatgagcagtacattgaagtcaattggtgtgatatccgaattaaggtgaaaaatatctaaattggaagactcgaaaagaataacttcgagtatttcaaagaaaacgaactcttgatctcccctacttatgctctttgtttaactcatcatgatccttttttcttctctcattgtttaaatttctacctcccatacattaatctgattggccctcctcatttcggatctagccttctattggccattgagaatgtactttttaggagtgagg

SEQ ID NO: 576753 - DNA, 144 bp, Homo sapiens
tagagattgatgactatcgaggtatgtgtcaccatggcaaaaattcaataggtctattctaattagtccaggacgaactgtatagttttcaagtggcctgggaccctggtcttcttgtccttactgacttttgtgcatttttgg

SEQ ID NO: 576754 - DNA, 321 bp, Homo sapiens
cccacttatgtgtatatagtcaaaggatgtgaaatcagtatgttgaagagatagctgcactccaatgttaagtgaagttttcttcacaatagtttagttatcaattcaacctaagtatccatcaataaattaataaagaaaatatcgtatatataggcaagaccttggagataccatgggttcgatttcagaccaccacaataaagcaaatattgcaataaaatgagtaacacaattttttgtttcccagtgcatatacaagctatggttacatcatactgtggtctattaactgtgcaatagcgttatgtctaaaatgag

SEQ ID NO: 576755 - DNA, 945 bp, Homo sapiens
tccaaaaattttccccttttttttaaaaaaaaacccctttaaaaatggcttattaaaaataaaggggggtttccccaacccattttttgggtttttttttcacctgaaaaataacccaatttattcccaagaggttagacctcaacactctcttccttttgtgttccccctcgtttttcaagagtgggtgtttttcccccaagttcgtgagagagtttcccccccaagatattttttcttaaagttgggcccaataattttaataaatccgcccatgaaatttaaatttcctctttattttacagtggaagttccctcttctcgtgaccccacttatattagggccatcaaaaggaacggtttaataattctcggctcaaaaaaaacccgtccagtgtggaggcgtgtgtttcatctctctcctcgatagagtcactcacacaatttctcttttaaacaagacagcggggccgcgctttagtggaccccaccccatctgcaaaagcggcttccgcgtgtaccctctttcttgtaccctcggtggcgccctcttttatagtctctctccttatttcttgaagaggacccctcgatattttctttatcccccctccctgtttttttgtgccctcgttcctttaaactctcgcgtctttaccgaccatccccgtttttttttctccaaacaccaaaccactttttcaccagaacaccaaacattcttcttcattggcatgttcaaggaggaccgtttaccttacaacacctacatatcatcgagatacataatcatcaagtgtccgatagaatacgacaccgaacacagaatacgtacgagctaataagaaatcctctgatacatccctacacacttatgaaccgggctgtcctcaacatgatcgtcatcatcctgtcctcatatgctacgcactcttgactaggcag

SEQ ID NO: 576756 - DNA, 804 bp, Homo sapiens
cccgtgacacggcaagaggagagagcaaagacagaagcgagcagaaagagagagcgacagcacggaagcccaacgagagagacgagcagcagaagagacgacaagcagccagaagagacaggaccacgaccgccagagcgcacacaagccaagcacccagcgcacaccaggagcaagacagcgaacgagagcggcagagcaaagcagagggaaacagccgacacggcccagcacaaccagaagaggaccaacgacgcaacacagacacagaagaagagagggaaggagagaacaagaagacaagcaagacaaaggacgggacagagagaggcagacgaaggaaaggaagagacgacaagaagatagacaaggcaaaggacgccacaacaagaccagcaagcagggggcagacacggaggacagaagaagccagagaagagcgagaggaaagaagcagccggagcccggagagcgagaagcagcaggacacgtaggcgcagagactagagcccacgagagaacaggagcaagagaagaaggaggaaaacaggagacagacgagcagagagaacgaggagaagaacagcagaagcgaaaaggaaagaaggcagacacgcgagagcccagaaggcgtcagaagaagcagcgagagacacgacacacagcagagcataagcaagaagcacaatgacagcaggcgcgacgacggagaggcacacaaagagagcggagacagtaggagaacagagcgagcgaaggagaagcgcacaagagacagaagagcggcgaggagcagaggcgagt

SEQ ID NO: 576757 - DNA, 411 bp, Homo sapiens
agatcaatgaaaaggaaaagttgttttcttgaacaggattaaacaaaggtcaactaaccctttaatctgactgaaaaaaggagagtgactcaaaataaaacaagagacaaaaagggagacattacaactgataccacagaaattcagatgatcattagagactgttatgagaaactgtatgacaatacattagaagtcctagaagaaatggataaattcctagacacctataacctatcaagatagaaccatgaagaaatccaaaagccgaatagaccagcaacaaataatgagacaaaagcagtaataaaagtctttcatcaaagaaaagtctaggacctgatggctttactgctgaattctaccaaacacttaaagaagaactaataccaattctactcaaattgttac

SEQ ID NO: 576758 - DNA, 158 bp, Homo sapiens
gaggagcctactagggtgtagaataggaagtatgtccctcgttcaggcgttctggctggttgcctcatcggtgatgatagccaaggtggggataagtgtggtttcgagagatataaaatatgattagtctgtggctgtgattttatattaaggagatt

SEQ ID NO: 576759 - DNA, 162 bp, Homo sapiens
tccaagcggaaggaggaggaggaggaggaggatgatgatgatgattcaaaggagcctaaatcatctgctcagctcctggaagactggggcatcggtagacattgaccacggttctcagaggaggattatcgaccctcaccaactacaaggccttcagcagtt

SEQ ID NO: 576760 - DNA, 1194 bp, Homo sapiens
ggtcggggtttcctgtcttgcaacaggtgcttggacgtgaacccgtgcgctcgttcccgcaccccggccgggcgcccatagccagccctccggtacacctcttcaccgcacccatcgagtactgccgccaagggccccgcggccgccgctccagcgccgcgcagccaccgctcgccgaccggcgcctctccattaggtcgccgaacatgactgaccgcgtccacctcgcaggatgcgccagaagctaccaccatgagactcacgaggccagacatcaaccggccagatcaacctggagctctacgcctcctacgtttacctgtaccatggtgagcgcgggcgggcctaagcggtggcgggggccgtggcgcggtgtcccggggcgcgcgctgggtgcgggcctgggggtgtggccactccgcgggctcatcccgcactctcctggcgcccttctggacacacatgtgcggctgctcgaggttgccgaggactatctctggacgcagaagagtcggggcagctggatacttctcggctgtaccctgagaatgctccctcgctaggccaggggcggctctgcagcacccttctgtatgaagagagaccttggtgtcctgaaatcctggggtagcagactgacagactgtgtgatcaatcctgcggcttaggacaggtggagttcaggcattaccatctgtagctctgcctccgcatttggacctagatgggacagcgtgaaaaggctgcaggtactcccagctacccgggccgacctggtggtgtgaccggacgctgccgggaacaccgaggcgaaatagcaaaccttggggggctggcaggcacgatgggtcacacagaggggaagaacacatcgaggagacgcagagatccacacaatgcggcaccggacaacgcacaaggccccactggattggaacgccactctcaaggaaacgacccctctgtcgcgcacacgcaaaggatccctgcaccgtgcccctgggcgcccacataccatagcgggcccacagacacacgccggggacatggaccaaaaagaacccacatatgcaaaagacccaccagcgggcacaacaagcgtacgaggacaaacacccagcgcgacgcgacagagccacccgaaggcgagaccaacaacagagtggaggcaacaacaacacacacagagctccc

SEQ ID NO: 576761 - DNA, 598 bp, Homo sapiens
  misc_feature (532)..(532): n is a, c, g, or t
ttttttttttgtacagagcccctgactggagctaaaagtttaacagcgttgctacgagctatcaactgcgccttggcaaggagcgcttttgttcggaagcctgtccatccaggagttatcggatagccagatgcatgaactaatctctacaggattacacttctttatattaacgcatcccccattactacaagcatgacaatgccttcttagacacccatgattggtatgcttctagaatccaaaggcggataatgccaagcaagaacaacagaggcactgccggatcacttcaccagacaattcttcagataaacatggtacaactctggatactgcaaggagctgccacagggaggagcgcctgcctttgtgttctcagacggactaggaagcactctgactacagaggccgataatgcctacgccactgacgtcagtctgaagacgatgcccaagcaccggaatgagtaacgctccatggacacgttagtggaccgttcgtattcttggtccggagacatactctgcncacccatgcacagatactttgaggctgaactcgatgtgtgccctcgcttgttttcaaaaagggcaa

SEQ ID NO: 576762 - DNA, 1352 bp, Homo sapiens
gttttcttactgacgacaactcctcgtccagtcatctgtggaaccacttgaacactagatgatgaagatggtcttcctgaaaaacttgcccagcaagaatccacatgtatcaaaaggcagcagagaaacccctcctcgtctttgcgccagccatggccacgtttgcagttacgcaatcattctacagcgcatggacacgtcttctggactgaaactgggacacaaacacggcaccacgcggacccaacgcttgcacacacacaaacactgcacacgcatgcaacacagcaccaaacctcgcgcacacacgctgcacaactgcgcacagactgcccctactccactgaaccactcaagcgcacacacttctcttctgccgcccaagcactctcgactcgacgcaccgaccacgcggcacacgcacactctacaggcaccggccactgcggacacgcaaacctttcaccacacatccgcacacgccacacagtggcccacgccaaacaccggctaaaacacgacacaacacttgccccacacctccgcaccgggccaaacgccacgcgcacgcgcacaccgcaccagctcaaccacacgcccgcagcgcacacgcagccaactgcacatgcacctacccgccccacaccaggcctgccacgcaactctgcgcaacacgcacaaccaccacaccaccatgtacagggaccggacccccaccccacagcacccccacgcgcgccaccaccgcctcacacacccacacgaccccgcaacaacctcgagcgcaccccacaccgcaccctgctcgccccatcccccacaagccgccgcaccacacacggcaacgaaccccaccacgccccccacacacatgcgaccgcctgggcccccacgccagagagacacgcccacccctgggaagaacgccacctcgccgccgcacagcaaactcccaccccctcacaatgcccggcataaccaccaccagggcaccgccagccccaccacagcagccgcccaccacacccacccacccccgcccacccacccccatcaaccaccgcccccacgcaccgcacgcgccaccgagcccctcagacagaccccaacctcacaacgcccgcctctttaaaccatggatcaacaacccgcacccaatcgacgcatctacccaccccacagggcgaccccccattcataccccgaacacccccagcggccgccaacacgcccactcccacctaagcaccgtccttagtcggcgctgtctccaccacaaagcaacaaaccatgcggaccgcagcaccaaacaagtggaacacaccaaccatgcgcccagccacgatacaaac

SEQ ID NO: 576763 - DNA, 559 bp, Homo sapiens
  misc_feature (377)..(377): n is a, c, g, or t
ctcctgggactggtgcccccggaggtattggggacagaggagggctgcagcacagtggggagggcagaggggtctctagtgaaggtgacctagggggtgacatctgtgactctggggcaaggccagtggtctagacgtgtcagtagcgaggtgggttccagcacccatgaggccagtgttgctggagggatggcagggccaggtgccctgggtaggggtgttggggaccctggctagagtgtgggcagcagatggggtgggggaagagcctccttgccaggttcctgtgggccagtcactggtgccacaggggtctccctggtgggcctctgcctttcttctttttgagacaggtgtcattccgtcacccatcctgnagtgcagtggcacgatctcccggctcactgtagctgtggcctcctgggcctaagccaccctcccacctcagtcctgagtagctgggactacaggcgtgcactgtcacacctggataatttttgtattttttttgtagagatggggttttggcatgttgcccaggggtggtctcaaactcctg

SEQ ID NO: 576764 - DNA, 932 bp, Homo sapiens
gggctatggcaaaggtcaccaccgggtcgattaaatcttcgcaattgagataaccgttcatcagcagttcccaacaggtttcttcaatacgcttgcggctccagcgcggataatccgggttcggttcgctgcacgcgcgagagaagacaatttggcgttattgaaatgcgcttcgcgtccgaggttaaaaccttcggcaaacggcttggcaaacgcgacataggagatggtgccgccataagccagaccgcggagcgccgattgcagcgcgtcggcgtagccgctggtttcgataatcacatcggcaccctgcttgccggtcagcgtttaggatctctttacctacatcagtgccgatggggttaaggcagaaatccgcgccgtggcgacgggcaatatcacagcgatgggcgataggatcagacgccaatcaccacagaagaccgccagcgcgtaagccagtcggatggcaatagaccgatgcgccaagccctaccaccaccacaaaaatcccctacgcgcacgtggcatcgcgcacgccgtcatggcaaactgcgccgggtcgtagcagacgggtttccacggagctgccactgcaggatattggcgccagctgaaagtaatgcactgcgtcaatgatgaaccgccacggagagcggccgagacgcatacgctggtagccaccggagtccgaacgacgcagcggcccgaaaatggcgcacaacagtgccagtggaattgcaagacaagacggcgagacgccgaagcgaagaacacagcacgcgaaagaccacaatacggggcggggaatcaccacgccaggaaaaataaactacagggaccaccaagaaccagcaagaaccgaaaagggggcgaaaggcaacgcgaacccgcaagaggagcaacagaccaggagcgcaacagagaacaca

SEQ ID NO: 576765 - DNA, 187 bp, Homo sapiens
atagatgggttaagcacgcgcagcgaccttgagcagaatgaacacagcggatcgataaacatgtagagcactggcgcctcgggggcagcgtggttggcctcaatccacatcagataggtgtcagcctggctgcgcaattgtttgagggttgcgaaggttggaatggcagcgccattgtctggtgggt

SEQ ID NO: 576766 - DNA, 842 bp, Homo sapiens
taaaaaaattaacccttttttcccgttgttttggcaaataaaagcgggctaagtgggtggcttttgggggtttatccaaaaaaaccacatccccttttcctctccttcccgatctcctccgacatcttcttcctctgtgtggattttcaccctcttgaggtcgtggggcgtctgcagccagccaggaggagcacagctgtgtgtgtggtggccagcagccacaccgaggggtcagccagcccacaaagaggccagctgtgagtttcagcccaagagagagcgaccttttggcactctttttctcgagacagagtgtgggaagaggtgtgttacactcgcgtctctctccagcgagaacagaggccgcgagagaactctcgtcatgtgtgtttcccccgtgttggggtgtgaattagacagagtgggggtctcaccgtgtgttgtgcccccacgtggtttggggggttcccacacactttctgtgtcggagacacggagacacgctgcgggtggccacacctttgtgtggggcgagacaccccctctctgcggagggaaggagagcgcggagaataatttgtgccggagaaagatctcccccctctcctggtgggggagaaatctcatcaagacgcagcatctctctcagaggggcggggtgtgagtacaaaacgtggcctcgtcgcccctgtgtgtgttcttaaaacccccctcctgtggctgtgggtattttgcacccagcgccccccaaaaggggggagacagcagcgggcgggggaacaaatgtgtgtgagacgccatttttctcccaagcagagcggggtgtggtctcctcccgacgg

SEQ ID NO: 576767 - DNA, 287 bp, Homo sapiens
atgtgtgtgtatgtgtgtgtgtatgtgtgtgtatgtgtgtgtatgtgtgtttgtgtgtgtatgtgtgtgtatgtgtgtgtatgtgtgtgtgtatgtgtatatgtgtgtgtgtatgtgtgtgtataggtgtgtgtttgtgtgtgtgtatgtgtgtgtatgtgtgtgtatgtgtgtgtgtatgtgtgtttgtgtgtgtgtatgtgtgtatgtgtgtgtatatgtgtgagcatgtgtatgtgagagcatgggtatgtgtatgagagagagcatatgtgtgtggtcgacgc

SEQ ID NO: 576768 - DNA, 914 bp, Homo sapiens
cggcgagcggacggctgcatttacggggtctcccggagggccagagtcgtgggttacacgaagagacgaaatgtggtctgagggacgactagtgaatatgaaacgaattccgagagaacggagcacctcctcgaagtcatcccaggtgatggctagcaactaggactcagttgaagtatttgtgccaataagggaaatcgcacgcacgtggctagactagaccttgggtagaacggagaggcatacgaagtgagagtagtttacaagtctatgatagattgaccgatgagtatgacgagggccgcagtggttctcatgatcggagaagtggtccacctcacagaggaggatgcaatctggttattagatgtggacgaagagtacgatcattctgcaagcaggcaagcctgagatacagggtaccatgacgagatcggcgttgtaggaatgaacaaagtttctactctatcccattatgctgacgagagcggtctccattataagagagggagcatatactgtgtgtaatgcagagacatcacctagttgggccgaaaaggagttgctccagagcagacagatactggtgtccaggtgtcagtaggcagatagctactctcgccagacaaggagcgaaaatcatactcatttccatcagggctcgaacattagaagagtccgtgcgtcctggtgccatcctacaaacggcagagatgaaggaaaatcctgaagagagcataacagagagggctgtccaggtcttttgagaaacatcaagagattacttcaacgctcaaggtggttcagcagtattcttgcatcaaaggtgttagaacaagaccagtaggctaacgtgacaaaggaacttgcctgaggctgcaagcaggtgggcttgctgaaaaagctaggagaaa

SEQ ID NO: 576769 - DNA, 383 bp, Homo sapiens
  misc_feature (103)..(103): n is a, c, g, or t
  misc_feature (106)..(106): n is a, c, g, or t
  misc_feature (109)..(109): n is a, c, g, or t
aagaccgccgcccagcagagcggagctcgcggcccatcgtcgggtcactcatgttggctactaacccttttcgtgcgccgggcattctagccgccggccgtgngcnggntcagataggcggcggcgatgccctgcttggtgttggcgggttgtggggacgagtactcggccagataccgcccgacgggaacgacgcagtgggccacgccatgggtgggcgtgtccctagcggtgtagcacttgctgttggggatgtccgcgacagtccaggtggatccgcccggaatctccagagcctttgcggtgatgagccggtctgccagcaaactggcgccggcagcatcccgggcgcggtaggtggtgcttgcgcccagaccaataac

SEQ ID NO: 576770 - DNA, 1136 bp, Homo sapiens
ttgggtaactgtatggggcgtttcttgtggtcctgggaacaaacagcgggatagtgccggtaatgtgcggtaaaccccatgggggttcaccccttggtcttcacggggtttgtctgggagtccatcttggggcgcctttcccgtgggccctttttggaacgtggtctttcccaagggtcacatggaatcggcgctttagttgcaatttcccgtagtggtcgtccaaggccagggcctgaggccattggccaaggcgctgaggcttcaatgcgttggttcgtgggtcaaggcttcttgggttctgcgctacgaggtacctttgggcaaccgtaggtcagatggcaaggcgaccgcatcaggactacagtggaggtcccttcatgggcaatgcgactgaaggggaccggtcttgaggtctgtagcacaaggccaagtcctgcaacgcgcagctccttgggctctgtctggtcgagagatccccattcctgtactgggtgcaagactgcagcctccggatgcagttctcgatgtccatcattcgcacggagagagacggtctcgggtaccagggagtaggagggaggcagcccctgccgtgcaggtcctggccgatggcgcctctaccgctgctgccctggggctttatggccatgaagcaaattccttgagtggggggtactggggcctagcacgctatcgctggtacctagtccactgcccacccgccgtcgtgctggctgccctcacttctggctgacagtagggacgccgaccagtctgacaccattgtcgaccgcacgctgctgcccccacaccacgttgcaagaggtcacaccatgtgcagcagccttgcgactgacccgcagccggccccgcaggcctcagagttgcatggatgctatccggtgcggctgccaacaggcatcagtcgttcccttccgcaggtggaggggcgcgctgtcccgcaggcatctgagctctgtgccggggccgtggccatgggaagatgttgccacgctgcctcctcacatcgagttttacctcaggatacactcttgaatgtctgagtgagggtcgtgcttagctctattggcctgtgagatgctattgcaaaatcttgcaggtgtttttaagat

SEQ ID NO: 576771 - DNA, 201 bp, Homo sapiens
gtgtcagactctgtcgatgttcggatcagcagatttacgtccagcgctatctagggtctctggattgagaaagtgtctgttctcactatggagtaaagttttccactacgcgtttccgtgaatgttgtcccaggatatcgttgaagtgtggatctaggtctatgtgatacttcttcatatacccatacagttcttcatgta

SEQ ID NO: 576772 - DNA, 238 bp, Homo sapiens
tatacaatcagctcctaccgttcgctcggacacacacaagcggtgatcatacgtcagggcctctgaagagagaagggatgttggcctccaccgtgtcccagtccaacgtgttcattgcgcctgctgccatcgccaggcagtcaggggtgacctgtctcccatgtcactgcaggctcctggggtcccggagttccacagcagcatcctggtgacagatctcggccatggtccgagcgga

SEQ ID NO: 576773 - DNA, 162 bp, Homo sapiens
gacagtagagacgaaaatgaaccaattcaggagcgattcttcagacctcacttcttgcaggctcctggagatctgactgttcaagagggaaaactctccagattgggcttccaagtcaagtgggttaccaccccccagatcttaagctggcaacctaggtgg

SEQ ID NO: 576774 - DNA, 152 bp, Homo sapiens
  misc_feature (69)..(69): n is a, c, g, or t
aaccttacctcccttaacctcttatcatagctgccgtctcgcaggcgcccacccgtttgaggcgctccnactcgtgcagcacgcgaaccgcccatgtgcttgcgcccccaggaaacgctagtacctatgaccggcaggaatgcccggtaagt

SEQ ID NO: 576775 - DNA, 351 bp, Homo sapiens
  misc_feature (1)..(1): n is a, c, g, or t
ntgtggctctggacactcccctataaaatatatgcctctgttgacaagtgtaaggatcaaaaggatcacatgtggcttccatgaaaagaaaggtatcttaaaattgttgtcaatcaggtatctatttcaatgcaacttaccaatatgaccatcgttcaatataataaacacagctatcaggtttcctcccaagctgtcatcgagcgctacagacggtcatagattcccatgttgcaacaccagtatagccaccctccatcctgcttctaccaggacggctgtataaaggcatcagtgtaacatactgatatatggtcacgcattttaaatgcactgtgctctaggttagcc

SEQ ID NO: 576776 - DNA, 316 bp, Homo sapiens
tctctccacactggacacagtaggtagtgtcagccagagattcggggcagtagataatgttcattttactgatgcactttagtttttgggtccgttactggttttccagaaaattgggggctttttaggcggggagttagggcgacccaaaccagtgaagagcccccaatccccttgcagtttttgtgggctatccagtggtggggtgggaccaggtcctaaattgggggatcttccacgcttcctttccttgaaggggcttggcaccaggacaggcttaacccccaagaaggggtccaatggttggggaaggtgg

SEQ ID NO: 576777 - DNA, 1045 bp, Homo sapiens
  misc_feature (1045)..(1045): n is a, c, g, or t
agcggacttccgcgtcacctcgccgctccgcggcgtcccctacctgattggaatgctgctaaggtcccgggtaacacctgacgccgaacggcagtgcaagagtacggtgccagcgcagcctgcacggcgtagaatctacacctgccgcgtggcacggagtcgactggtccacgatcacactcctggtacttgtaggtactcgtaccgcggcgtaacactgggaagtcgtgttgctagcacctgaccatgcggacatgaacaccagaaacgaacagcgaggctagcgcgattacgccaacggcagcgacgggcagtataagctgagtgctacggagatgcatcttctcttatccgtctcggttctgtcagcaagatgttacctcgccgtagagattgaaggactgggcgttcctggtccttccaaaactagcgcgattgaccaaagcatccaattagcatacgtaggacgacacgcactgaggatcgaaaggttggtcgatgatagtacgtgaacgttagggctgtagggaactcgattcgggaggattgtgcatgaacctgaaatcgtgagagtgccgctgtcatgtgtgagctgtgtggtgtaatgaattctcggtgatgtccgatagggaccaaaagtttgtgacaataagtgaagtctctttatctgctcccgactgggagctcactattgatttcgcgtcatcttgcacctatcgttgctaccgtccccgggactggacttggaagcaatcgctagacttcgaaggtctcagggacgatatgtgcaatagtctcgacttgggggtggccactttttccccaggaagacctttcgtgggccagaccgctaacaacgggagaggcccacttacggccttaggggataagggcgcgatatgccacacagctctgagaggtgttagaataggccagcgcttcacattaagtagaggcgtttaaacgccacacatttgcggaccttcgagccaagaaagcccggaaccctcacgcaggcaagaaaggcgcgaaaagaccgatgatn

SEQ ID NO: 576778 - DNA, 640 bp, Homo sapiens
aagcccgccgccggtggaaggtttgttcttaggtccacaccgctttcgggaggcccaatggccgtccccaaagggccacaccgtcgccaaatcttgtcccaggtcttttctggaccgcctaagaaagaccagcggaccaagctttggccgccactgccaaacagcgcgccaatggtcttccatcaagagtgaaccgggcggccccctggaaatgattgtacccgccgccaccgctcaccagtcaccaagacttcttggacgcccaattcttgcgtttctcggcaaaggaggcgatttgtctggtgtaagaacaatcccgtgtccgctggtaaaagggtggtggtacaacgtgggcccacagagtttaatgctatccgctcacagtccacttctcccaaggccctcggtggcctattaccacgaaaaaatgtggaatgaggcttcccagaaaggagatcacaagacactcctcactccacgtatgaccggagaccctgctggtagctgagccctcgtcgctgcgaggtcccaaaagtttggagggtcctggtgcccgcgctcgctacccagaaatcctaccgataagcccctcgtgactccaaactcaccttgtataataaaccgtttttgagggatttta

SEQ ID NO: 576779 - DNA, 344 bp, Homo sapiens
  misc_feature (7)..(7): n is a, c, g, or t
  misc_feature (28)..(28): n is a, c, g, or t
caccctncaagtgttggtccaacttttncccacttgttcttctagaaattttcctgtttcagcagggcccggtggctcacgcctgtaatcccagcactttgggaagcccaggctggcggatcacgaggtcaggagatcgagaccatcctggctaacacagtgaaaccccgtctctctaaaaatgcaaaaaatgagccgggcatggtggcggacgcctgtagtccctcccagctactcgggaggctgaggcaggagaatggcgtggactcgggaggcggagcttgcagtgagtcaagatcttgccactgcactccagcctgggcgacagagcaagactccatctc

SEQ ID NO: 576780 - DNA, 399 bp, Homo sapiens
  misc_feature (64)..(65): n is a, c, g, or t
tggtagtctaggctttaaaaatgcttatctgacattatacaaatttcctgaccagtactctcannagtgtgaaggtcatggaaaacaagaaaagactgagccactgatacagattagagaagactcaggagacatgacagctaaatacaacatggtatcttatatttaatcctagaataggaaaacagcattagtgaaaaaacataaaacccagattaagtcgatagtgtagttcataatgctgtgccatgttaatttcttagtctttataaatgtactgtggttatgtaagatgttaacattagaggaagaccaggtgtgggggctcaccccagcactttagcttgagcccaggagtttgagaccagcttgggcaacatggtaaaaccccatctctac

SEQ ID NO: 576781 - DNA, 547 bp, Homo sapiens
  misc_feature (193)..(193): n is a, c, g, or t
  misc_feature (201)..(201): n is a, c, g, or t
  misc_feature (209)..(209): n is a, c, g, or t
  misc_feature (212)..(212): n is a, c, g, or t
  misc_feature (224)..(224): n is a, c, g, or t
  misc_feature (226)..(226): n is a, c, g, or t
  misc_feature (239)..(239): n is a, c, g, or t
  misc_feature (250)..(250): n is a, c, g, or t
  misc_feature (489)..(489): n is a, c, g, or t
ggatcaccatggcacaaggcgtgcttgagtacaaggacacctacggcgatgaccccgtctccaaccagaacatccagtacttcctggaccgcttctacctcagccgcatctccatccgcatgctcatcaaccagcacaccctcatctttgatggcagcaccaacccagcccatcccaagacacatcggcagcntcgacccnaactgcancgnctctgaggtggncnaagatgcctacanatggctaagcncctgtgtgacaagtattacatggcccgtccacccgtggaagcccgtggcaaggatcccaaggcaggaaatcccaagtgccccaggcgccaaagcgttcccaaagagccaagccccggaagtttcacaaatgggtctacgtcccctcccacctctaccacatgctctttgagctcttcaagaatgccatgagggcgactgtggaaagccatgagtccagcctcattctcccacccatcanggtcatggtggccatgggtgaggaagatctgtccatcaagattagtgaccaaggtggg

SEQ ID NO: 576782 - DNA, 500 bp, Homo sapiens
  misc_feature (193)..(193): n is a, c, g, or t
  misc_feature (201)..(201): n is a, c, g, or t
  misc_feature (209)..(209): n is a, c, g, or t
  misc_feature (212)..(212): n is a, c, g, or t
  misc_feature (224)..(224): n is a, c, g, or t
  misc_feature (226)..(226): n is a, c, g, or t
  misc_feature (239)..(239): n is a, c, g, or t
  misc_feature (250)..(250): n is a, c, g, or t
  misc_feature (442)..(442): n is a, c, g, or t
ggatcaccatggcacaaggcgtgcttgagtacaaggacacctacggcgatgaccccgtctccaaccagaacatccagtacttcctggaccgcttctacctcagccgcatctccatccgcatgctcatcaaccagcacaccctcatctttgatggcagcaccaacccagcccatcccaagacacatcggcagcntcgacccnaactgcancgnctctgaggtggncnaagatgcctacanatggctaagcncctgtgtgacaagtattacatggcctcacctgacctgtagatccaggaaatcgatgcagccgaatccaaacagtcgattcacatggtctacgtcccctcccacctctaccacatgctctttgagctcttcaagaatgccatgagggcgactgtggaaagccatgagtccagcctcattctcccacccatcanggtcatggtggccatgggtgaggaagatctgtccatcaagattagtgaccaaggtggg

SEQ ID NO: 576783 - DNA, 321 bp, Homo sapiens
tcataaaggtggcgcctccggagtgtcgttcctcccgtctggagttgttcctccctcctggtgggttcctagtctcgctggctttaggagtgaagcttcagaccttcgtggtgagtgttacagctctcaaaggcggcacggacccaaagagtcaacagcagcaacatttagcaggaagaacaaaggaactaagcttccacagcatgaaaagttgctgttgctggctgaggtggcctgcttttattcctttatctggccccaaccacatcctgctgattggtccattttacagagagctgattggtccaatttgagagaatg

SEQ ID NO: 576784 - DNA, 804 bp, Homo sapiens
cgtcggtgcgtgcgcgcccagacgttctgccgggtggcagtcccagcggagtttgcgggtgcgggcgggaccggatttcgtccgtgggcccgggggcggcgggggccggggagtgaggggccggctgagcccacctcgctgggccctccctggcgccccgccttgggcggcggcgagctgctgcgggcctgccatgtctgtagcagtgctcccgcaccttgcacaactggctgggcagtgtgtgaccgagtgccatccgtctcgtgagggaggacctgcgtaggtccgatcgatccgcttcgtgccacagacctgggaatccatactgtgcagtgaacgctggcacgaggtccttgtacatgcatcgccgacgaaggtggtggtcataagacatcggcgtgcgtcttcagaatccatgctgcctggcagcctcgacggctaggcatggctggcagatgtgcagggccctttgtcgtcatcacatccgagtcacatgctcagcaagatgctcattagctaggaaacagattttatgctgttactcgtacagtgttaaggcgtctttgcccagatttgctcattttccagactcctttatgtccaaatttcttggtgattacagaatgcaatcactggtatcactaagtggacaacacaatagtggaccacacacttaaggacagttgaaatgggctcactttggggtaatgtaatatgggtcttttaaaatagtctgatgttggtattggccaataaatttggatagctttattaataaacttttaatgcgaatattataatata

SEQ ID NO: 576785 - DNA, 81 bp, Homo sapiens
tggaaatgtttaaaagggctttattggcgggggagcaggaatttaaccaaaaaggccaaatcccatgtcatcatctggact

SEQ ID NO: 576786 - DNA, 405 bp, Homo sapiens
tctagaggatcccggtgtgtccttggtcttcaaactcagtaaatccacaattttaaaaaacaaaaacctttcaccgggcctactcacatttttactaaaatccctacacagagccatacattctgcttttcatttgacttctccaagctgctgccttcaccaaatagactccacgagcctcccaagtggtatccaccaatatatgtgatactcaaggaaaagtaggtattaaagagtaattaattcaattgatacgaaatcttttcttttaaaattttaccttaactttaaaaagcccttttctggatggaggtgaaacagcataaatccttagaggaaacggttatcctttacgtggactctccatcagccccataaggtgagtggcataaagaggcatttttc

SEQ ID NO: 576787 - DNA, 481 bp, Homo sapiens
gggtcgatctagcgatccctgagtttccttgtctaccaaatcttatagaacggccacccctatctccctttgctgactctcttttcagactcagccagcctgcccccaggtgaaatagacagccatgtgctcacacaaagcctggttggtgtctcttcacacggactcgagtgaactttgatgccgtggctcggatcgggggacctcccttaggagatcaatcccccgtcctcctgctctttgctccatgagaaagatccacctacgagcttaggtcctcagaccaaccagcccaagaaacatctcaccaattttaaatccagtaagccgcctctttttactctcttctccaacctccctcactatccctcaacctctttctcctttcaatcttggcgccacacttcaatctctcccttctcttagtttcaattcctttcattttctggtagagacaaagggaaacaccgggtaccgagct

SEQ ID NO: 576788 - DNA, 767 bp, Homo sapiens
gcagcacccatgtggcgctgcagccgaatcatgcacatgcagcgagagctccaacccacccttctgtcttccctggaaggcatcgtctatcagatggtctggttcagagaaaattggcatgaagaggttctcaggcagttccaacagggtcctggcgaaatgttactccgtggcgttagagaactacgtggagcggtgtccgatgctaaagatcacctccctacactctcaccattttgtgaagaagttgtgtgagcacgtttggggtgggcctggagacactgtgtccaatcgtctctgaccatgttcgtccagacgcatgcctctgagtctctggcccgtgcgtgagtcgctaggccatatgcgacaaaagacctgtccttgtcatgatagactcgaacaagtgccagttcacgacggatgttgacttccgtcgttatccaggtaatccatgacgacttctactaattcttatgtctaagtcgaaagcatgtggattcacaacatcgttggaggccaagatcaagccaactccccaaacgttcttcctcataccgaggcaacaatgtgccggtctctttgagcaatttctcggcacagacagttgaagtggaacttcctggtggagtttctgatgccatagtcgaactgcattattacatcaagattggacggttcatgccccgtggtagacgcttcgtgcagaagacttaacaccgtagtccggcggattgtcatccgggggactcacatggcaagatctacca

SEQ ID NO: 576789 - DNA, 1214 bp, Homo sapiens
agaatgtagtttgctctgcagcgtgtgcgtttgccctcctcccccgccctcagtgtccacaggtcaccatggcgtattatgggcatcagtgcctgcggcagcattggcctttgcagcggcggaagcagctccatgctctgcatccgagcaaacccccacgacggtcttatgaccattggctgcttctcacggcattctagcacgcagctggtatgactagtagaccgacaacagactaccgctttcgaatttaatgcggcattctctcagattccggactagagcaaccgtgatatgaccgagactgagactacctgaggcaagaccgaccgttcgctttgagttgggtggtactttcgactgtactcccacgttaccgtagccctggtctggcggtattggagtggccttgacaagaagagtcactaacggtactcataaaggatgatgtatccttgagaggtagggacaaagcatctttcaaaagcactcataggggttcgtccagacgtacggatgacttaagtgtccggagtccatacgttatgtgctggctcgattggcttgggcttggtccagtccgcttccaaccaacaagcaagggagggaatgcgcttcctcccggtgacacggatagtgactgttgggacgataaactgggattatggaacgtagttccacgttgtgattgcccctggatggggatagtttcactgaccctcttaacacccactgtccaggttgtagcttctgtacccaactttgagcatgagacttggtcccactctctttggccgctaactagctgctaggacagacgtatttacggcggtgcaccctcgaacgggcgaaccccgaattgtggcctctcccggaacaattttcacacaagatccgacctgggttgccgccttaaactattttaaaacggctttcccactatcaccgagggtccggcccggcattaccgaccggtcctttgtttagacgcgggtcgtgtgacattgatgttcctgggagagtacggaggccgaaccgcgccgcgagtgtgcccagatgcctgcgtgcatcagggggggaaaggcccgtcggaaaatgaggaggcatgggtgagccggaggcagacggggggcagaggccgagccgttgcgggggggcgcggaaggggccgagcggggtccgtggagtgaggggcggacgaggagcgggagacg

SEQ ID NO: 576790 - DNA, 145 bp, Homo sapiens
taaaaaaaatggctcggctgggttgggagacacagcaataactacggtggccagggaggggttaccagcgtagcagcgggtttatcagcccgcttggacatacagctaagggaaatatatgctggggggccagtgggaggggtac

SEQ ID NO: 576791 - DNA, 518 bp, Homo sapiens
acactgggttcgagttcgagaccagcctgaccaacatggagaaacctcatctctactaaaaatacaaaattagccaggcgtagtggtgcatgcctgtaatcccagctactcggaggctcaggcaggagaatcacttgaacctgggaagcagaagtttgcagtgagccaagatcacgccattgcattgcagcctgggcaacaagagcgaaactccatctcaaaaaaaataataataataaggaatcaataatgggccaggtgcagtgacttatgcctgtaatctcagcactttgggaggctaaagtgggaggactgcttgaggccaagagttcaagaccagcctgggcaacatagcaagacccaatcactacaaaaaattagctgagtatgtagctaaaaactagctaggcctgtagtcctagctactcagggagggtgaggcaggaaatagcttgagcccaggagttcaaggttgcagtgagctgtgattgcatcactgcactccagcctgggtgaga

SEQ ID NO: 576792 - DNA, 245 bp, Homo sapiens
tcctgatacaaaatgacatcacgctactacgttgattatgacagcaaagtacctacattcctggaggagcaatgactctgatagacaaaggatgtggagctttcctcgccagtggcagagttacgagcagagcacgcatagagcccattatgccttggcgtaatctgagggataaagagcttatgtcctgatagctgaaacttcccattaattgcccacgaatactagtgctgatagattcgaga

SEQ ID NO: 576793 - DNA, 623 bp, Homo sapiens
gctggcgagtgtaccctttctgcagaaagtaaaatatgcccttgcctgaggaaattaaatttatgttcaagtaagtttctttatggcactgggaaacaagcatttctaacaatttggtggaaatccgtgaacatggatacgtggctcttctgggggcggtcgtccagtcgctttctcatgagggagcaacactcctctgacctcattgcagtggcctcagggatatggaattaagatccacctggtgtgatgaagtaaacccagactctcagcaacgcaggacaaataaaacaataaatctggccggcgatttgaaaagtaaaaggatcctcacattccagcgttgaacccaggaaacctctgtgcccaatatcgacgaaaaatagatacactgggagagccgaattaaaaagtctttaagcacgggtaccagccctagaatttccagtacaccagcagcagcctgggaaaccagatcctcattcaaaagacagaaagaaacaaaactcgagcagcctgagaaggaccctattttatgctgttaaccactgagactgtgccatcctcacagttgagaaaggttggacccaaccatactcaatgtcagaaaaacattttcctcg

SEQ ID NO: 576794 - DNA, 401 bp, Homo sapiens
  misc_feature (48)..(48): n is a, c, g, or t
  misc_feature (52)..(52): n is a, c, g, or t
  misc_feature (62)..(62): n is a, c, g, or t
  misc_feature (77)..(77): n is a, c, g, or t
  misc_feature (100)..(100): n is a, c, g, or t
  misc_feature (161)..(161): n is a, c, g, or t
  misc_feature (165)..(165): n is a, c, g, or t
aagtgtgcaggccaccacggcctgggctcaatttttgtattttacagntagnagcatggggncttcatcatgttggnccaggtggttcctgaactcctgnacctcaagtaatctgcctgccttggcctttccaaaatgcttgggattacagggcgtgacanctgngacctgggtccctattttctttttacaacagaccttgggaaatattttcttcccccaagaggttgaggcccatggaatgcattaggggcaggtggggtggtggtgctctgtagcctttaggacttctagaatcaggcttctgggccaccttcttagcaggtgtatacctctttgttccagacttactttctgtctcacaatatcttcactatttccacagttgcagccaagacagg

SEQ ID NO: 576795 - DNA, 396 bp, Homo sapiens
agggaactaagtttattagaaaggaaaacaaaaacacaaacaaaaaaaattcccatttctttaaaaacaatactttaacattttcacaggttggtcaaagggtaacatttgaaacctgaatgtaaaattccagtttagtaagggacaggctgaccacatgcctggaaaatttcagcaaggcatgaacacttcttgatacctagctgcaaagagacagtatttagagatccctgagcaaagacttaaactttctaggactggtctgactcccccttaataattgaggacaaggcacagggtagcctaagctagcatcattgacctttaacagaactaaaatggctaacaagcttaacagcctaccgtacctgtatggaaggactgcataaggcagtc

SEQ ID NO: 576796 - DNA, 893 bp, Homo sapiens
  misc_feature (563)..(563): n is a, c, g, or t
cctctaagacatctttctaacacagccgtttgtcttccctccataacttttttcccttacccccctcacctggtccccactccccgccttgtccctcaccaacgcgtaatttccaggtcccacaaccttaactccccgttatctcaataacaccccggccccaatccacctaggagtttgtgcggctcccccaccttttcttcagggagatgtagctccactctatactcttacaagcgctattttacccaccaaggcgcccccaacactttgtaacttcataaccccgatattttatgaactggcgtcacattactaactcacgtcaaatcttgttatggacaggagcttccaatcaaaattcttcctaaagatatgaccagtattgattagtacaaagtattccgagtattccaccacgcctctggtccccgcttctcccccagaatgtattttgaccccccttagtgcaaaaaaatttttacaggaggccacaaaaattttaaaaattctacttgtatgtgcataacacccgaacactttatgactaccccccctttaantaccctaggcgtaacggtctcccaccaaagaactatgtggtaaaattgacatagtgtgattatgttctaataaccacgaagcatcatggcctcacatgtaacgatcagaggataagcatggcacgaacttaacgatcctccagctagaacatggtggcgcgcctgggtttctaactcaatttactcgctctctgtcatctatgtgggggcgcaataccccgcgggagagatgaacgtaacttcgcgggggcaccgaggaggtccctagaatacgggacagcggcccatggcccccccacctgcaacgaggaaatcttcccccacaaaaca

SEQ ID NO: 576797 - DNA, 519 bp, Homo sapiens
  misc_feature (307)..(307): n is a, c, g, or t
tgtacatggaacgtgagctggggctgcagcgtgggcttggtagatccttggccttggcttggcttggcctttgcgcggcacagctgagcccttggatacgggcacgagcacgcttcccaagcttggggtgggcaatgtaggcaagtcgatcgagcttgcggctgacaccctttggaatcttgggcttaacctccttgggctatacgagggccttgatggcctcggcacgtgcactcatggccttggcatggttggcctgcatcttctttaggcccttttggttgtgcttcttggcaaagcgcatgtncctcaggaacttggggtccaccccgcttaagagactcgtatctttgtgatcgggggttcttgataccatttctgtgccatttccgggactggttgtgtgtggagtggttcttggacttggcattgtctgcccataagccggggctccccggggggctggcttgattacatcctgtttgtagatgcggacaacctgatcctcaaccctgacac

SEQ ID NO: 576798 - DNA, 330 bp, Homo sapiens
  misc_feature (153)..(153): n is a, c, g, or t
ggtaaaatcgagtccttacagccataccacaaggtacgtccatttggactacaagaagagcttcctttaaagttcctatttcagcataaagaggctgtcctttttttttaggaatatgtttggaacttgtgccttcctgtggaagggctgagngactgcaagaaggagagctagcaagatatgcctgttccacccctctcgtggtactgtgtggctgtgcaatgtatgttttatatgatatatctcggcgcatgtgttgtgcaattgttgttatatataatagaggtttgtgttttatatgtgtttcctctttttcacaatgtaaagggc

SEQ ID NO: 576799 - DNA, 850 bp, Homo sapiens
cccagcccctcccgtccgtgcgcgcgctgcaccgccgcaccgctgggggttggttgagtgcggacggtggggtccgggccggagtacgtgttcccgctgcgctaggggaacgcgggcagtcagaaaaatgggtaagaagagtcgagtaactaactcagaaatctggcactggtgctacaggcaactgtgtcaccaaaggaaatcttgaaccttgaccagtgagctgctgcagaaatgcaggcaagtcccggctgcctggcccaggaaaacagacgtgggaagagtatgtgcagatcctggactctgggttgaagacacatacggcaccacaagcgaagagaggtctgtccgttacactttttgagtggcaccacacgacgcacgatttacttttccattgatctaatggaacactggggcctctgcaaacatggggcttctgtcgagggtctagaaagtgggttacacctttcaaccgacagaaggggcttctgggtctatgagaacgcgaaacaaggagaatactcacggcagtacagcaaatatgtttagactggggttcccactgaacaagatttgcgtacagtgactgttggaacatcttgctacagaggcatttcagcttggttggggacgcttatacttcctcacgaagcctgaaatcctttcaaagccatgagaaaacatcggcactggggcttttcatttgcagtgtggagcggagccagcactaagctcacttctgtggagaccgtatattccaaaacggtccgcgaagggaataatgaaaggtcctcatactaatttgcaagaaggcaggagcgttggggaatcgtcaagtcacccaaaa

SEQ ID NO: 576800 - DNA, 166 bp, Homo sapiens
tctacaaccttcctgtacaaaaatatataaaattagttgagtgtgtttgtgtggggtgcatagtattccatggtgtatatgtaccacgattttctttattcaatctgtcattgatgggcatttacgttgatcccatgtctttgctatggtgaatagtgctgcaatg

SEQ ID NO: 576801 - DNA, 492 bp, Homo sapiens
  misc_feature (391)..(391): n is a, c, g, or t
caactgcaagcgcgctccaacattggttgctagagctgctgttttaatttttgcaccatcagatttttcagtgggctcttttatttgtttgtcagtaatcatttttttcatagccttcttttttcagccacacacaagttagagaagaaaaatagtctccctttcattaggattttgtctacacaaataatatccgtgaatatttctaactgcaaagtagcctctctagttgactaattctcctgttgaaactctttgcaacaattgctgccataatgaagcaccaccgatttggaacccttcattctgttttgccacaaaggacatgttgctaagccacatttctcagtgttttcagactcacttactccacataaaaagccaatgtatnttttttggaactctgagagtaagaattttgtcttcaaactatcacttcattgggcagaccagtcttacagattgtttcgttattacatttgttttacatgg

SEQ ID NO: 576802 - DNA, 366 bp, Homo sapiens
cgaagacacacacacacacacacacacacacacacacacgtgtgtgtatacgcgctattatggcgcaatgtgtcactcaagaggcctgagagacgagaggcaagatatatctggtgtgtgctctgctcatgtcacctcagttattcttctcattttatagtacagaagtgtttataggcattatgtgccttagagctcctatggggttgtatgtgcaagagggatatatacacacaggtgtgtgtgctgtgagcgctcctgttgccaccagaacgtctttgaagcgcgggctggagctggcccttgagggttgtatagaattgattggagagaagggcgccccagcagagagtgtgtgcagtgtgt

SEQ ID NO: 576803 - DNA, 410 bp, Homo sapiens
  misc_feature (181)..(181): n is a, c, g, or t
  misc_feature (245)..(245): n is a, c, g, or t
  misc_feature (318)..(318): n is a, c, g, or t
  misc_feature (384)..(384): n is a, c, g, or t
cccatcaatggataaattgtgttacatacacacaatggaattttattcacccattaaaaaaagaagtactgatttatgctatgtagaggcaccccgaaaacatgctaaacgaaagaagctagacacaaaagtcttattattgcatgattccatttagatgaaatattcagaatatataaanccatagagacagaagggagatggtggttgccagggcctggggaaggagggattagagagtgacnccttaacgagtttggggttttcctttggggtgatgggaatgttttggaacgagatagaggtggtggttgtgcnacattgtgaatattatgtcactgaattgttcactttaaaatggctgtttatgttatgtgaatttcncctcaataaaaaaaatttttagaagg

SEQ ID NO: 576804 - DNA, 887 bp, Homo sapiens
caccaatattatggcttgtggatagagtgcaaattcacacaaatctgggggccaacaaagtgagcccggagaccccacctcggggtgattcctggtgggtttatgatgccccccctgcggacgacaaaatttatggcttctcgcgcatggatattacttactcagggcgaccaacaagaggcagtatttcttccctaggagagcgcccgctcgtgtttagtttaacacgcacagatcctgcccgttcctgacacagattgtgtgtgaggtaggcgatgcccacctttcgttgcgcgcagcttgcttcactctcctgtgtgggtaggcgcacacaatatttgctttacggtcagctaggttcttcctcgagcgggcgactcattctcgtgcgcgtacacaacccctgttggtatattccccccgcccgcttctttgctcattccaccgcgcgctctctgttactcacgcgcagcggacgctctgttcatccccacccgctctctgtattcatccaccggctggttgtgggcgcaccccatacagtgtcgctcgctcacactccccggtttttctcccctgctcatactgctctcaccgccgtcggggagatgtgcccacgcaggtgtggctgcaacccttgtgtggtgtcagagtgcccggcgtatttcgccgccaagcagggcagttgtgttgtctcctgtggaggcgccagtccagtcctcgcctgtttggtggttcccgtgcgttcgctatgtgggtgctgggtcatcaccccataggggttgtgcttcctcgccgcatgtcgacacctccccttcactcccgggcggggagtatttctaccgtccagaaaagttgcagaaaaaagcccttgtcccaacaaaaca

SEQ ID NO: 576805 - DNA, 588 bp, Homo sapiens
aaggcgggcacggtggctcatgtttgtaatcccagcacgtttgggaggccaaggtgggtcgatcactgaggtcaggagttcgagactagcttggccaacatggtgaaacctcatctctactaaaaatacaaaaaaaagtagctgggcgtggtggttggcgcctgtaatcccagctactcgggaggctgaggcaggagaatcgcttgaacccgagagacggaggttgcagtgagctgatattgtgccactgcactccagcctgggcgacagagcaagactctgtctcaaaaaacaaaaaaaagagagaacctaaatttaaaatttacgttttcatcccaagatggtcttttctggcatttcgtttggccttatttacaagcatggataaaaatcttaaagggtttaacttaaaaatgatcaatatactgggtgaatctttggagaaatctcttaacggcatgggctatttttctctcgtgctgaaagatgactatgataatcgggtacaactgggtcttcatgtcaccaatttggctgcaagcatgggggaacggctttaaattctgtaacataggtcttaacatctgt

SEQ ID NO: 576806 - DNA, 895 bp, Homo sapiens
ctcaagaggtctagataccggagttatgaagagagagggagaaggctctcagtgtctgagtttaaaatgaaatcctggaagaaattgagattgccattcaaggagtactcctgagtgagtaatggtggcacgtcaagctaggcattcatcagacgcatgaatactggaatgttgggacagacagggagatgtgaaagaagcagcgtttatttctgtgcttatagaagtgaaaatggtaaacagagggagcaggaaaagaagagcatgcatacacataatgaaataagaatagctaaagaaatggcagtctctcagaatgggaagaatgagagaagtcatatgccccggagaacatatttgactacagtcattccttatgagaaaaaaaaacggaccaccgtcgggtgaagatcttcaaatattaacaaaaattctttgtgccatgaaggaggacccgtgaaatcagttccgagcttgttaactgattatattctgaaagttctgtgtcctacatagagcagcaacgtttatctgcggtgggctccaggctagatttccgacagcattattctgagagctggtaccattacccttcttgtatggaaactcagcacatttgaacttgggtttggatccagtattaacagatctgaatacactaatcgttatattatagaacccagagattggctattgatctagagatggttggctaacttatattaaagggtctgtaatgaaaagagaattcatgggagggggggttttcataagggaggcactggtaaaggattaaggcgagaaaaacgggggaaaaaaacaggggaaccggttggaagggtccaacgggagggaaaaggggcacaattgcttataaaggtgtccaaatatgtgt

SEQ ID NO: 576807 - DNA, 302 bp, Homo sapiens
tgggtgatctgcaggatcctttagaatgagaggtgggatggggtgccttcatcctgcgctgtggaaggcctgaacgagcgcagtgcgaggtgaggctgcagttccatggatgtgggcggggacatctttcaccagcagtgcaagcgcaacgagctggtgatcccgcgtgcagcccaaacgagggccgtgtacaccaaggattgatgaccaagaagccgggcattgttcttcaacccccgaggagtcggagctggaccttgactacggcaacagatacaagaacgtgaagctcgtcataacgg

SEQ ID NO: 576808 - DNA, 360 bp, Homo sapiens
tgatctagagtatccctgctgcggactatttgtcggaagcagcactggaacttgagcgagctcacatggtattgttaactgaattagctatctatactctaaatttaagcctcagaaaatgagggagcacctgaagctgtactggtctagagtgaatattcccaaggtgctaagagctgcagaacaagctctatctttgggcagaactggtgtttgcgtatgacacgtatgaagaatatgatattgccataattaccatgatgaatcatccaattgatgcctggaacgaagggcaatccaaagatatcattaccaaggttgccaatggtggaactctcacgacacgagcaataacagtcc

SEQ ID NO: 576809 - DNA, 108 bp, Homo sapiens
atggcaacatactccttccccggcgatggttttctgtgactgcaagaatgtggggatcccaatgcactgggaatgctggaaactgagggccggcccctgaaaggctga

SEQ ID NO: 576810 - DNA, 970 bp, Homo sapiens
ggccccggaggatgagcccaggtctccacggtccctagctagaccccacgcgattcctcacctgagaccccgtcccacacgagccccagctggggcaaacagggcccctccccatcttccgcatctgtaatttgcagggacgatcgacgacgtgatcagcgcagacctgcagtctctccaggtggggactgttcctggaggggcggtagtggtggcggggatcttggtcagtcgctaatacttccgcgcgatgcggcaggggccctacctgccccgggggagctggggtgggagcgggctgttgcaggcagctggttggatagccattggcccataacctccagccccagagtacgatcgggctcaggacctgtgagcagctgctgcgtgttttcgggcatgggtcaagagcctgggcttacaccagttccagcagctctggggctacctcctggacgttggcaggccaatattcgacaagttcgatgaggacacctcttggagaccatgagctgtcctaggagctgaggctggcactgaatgcagagaggtttccacatgagacaaccagtgacccagaacctcaccagcgtaccgggatagccggctgcggtgtggacttcgagccggaccgtgtcctgtgtggcccacttcacctggattttctgggccttgcagcagcccctggatgggtgagggggtcaatctggcctgaaccacggaccgggttggaggggccccctttctaaggatctcggatgggggcctggtgccacaggcaggtggtgagagacacctcctaaggtcggcgggatggtgcccatcttcggtaccccgctgggtatccgggccaaggacgcacgggacctggcggatctctctgaaaaaaaaggcgcctagaagaaaatacaaagaaacgcccggtcaaggggagggaaagtgagcctaaagaggcccggcacaacattgg

SEQ ID NO: 576811 - DNA, 757 bp, Homo sapiens
atatttcactcactttcacatctccagctgaatgactgaggaaggtgctacagtagagcccccttcactgtgcttctgacttgttacggacctttggcttcgcttcaggaatggcttgatcatgatcgatcgtggcgatggaattgtaagaatccgagcatctgtatgcagttgctaactccatggcgtttcgagctccatggaagtcttgtgcttctagattcaagacagaggacacatcgaacacgcgacttagagagcacgatttacttgactccactcatgccatcacagtccaaatgattgagatgaagccacaatgttcccttcttggtaagtatgactcgtgctgaatagtcgtgttgcagatcttgctataactagatattgaactagacccagtctggagggaatacgagcgagcaagctacatcgaagcagtgagcttgtagcgagaaggcaagacttcactacttgcttcagtatggctctaaaggttgtgaaagcgattgttgagcacaatatatcccagttccagcacatacattctgtacacagtcagggtcttttacatacacctagggatgctgaatccatggaatgagtagtatctttgcatactgtggaatatgattaatagcatggaaaaggagagatagtcgataaatgacgagagaattcctttatagtttctgaaacgtcagctgtagtgagaaattaatcctcagaagaccatacatatttctagtaagagatc

SEQ ID NO: 576812 - DNA, 1822 bp, Homo sapiens
  misc_feature (1078)..(1078): n is a, c, g, or t
ccacagtgtccggagacggtgtggggagagcctcaatgccgttgcagggtcacatgtgaagtaggggggcggagcgcttagcttgtagtcgtcctccacgtttaagcacttcgcgctcttgcgagtatccgttggaagatcccttgtgtgcatgcgttagcataggagtgtgcgccacggagtgtcttagggaatcccgcagacctcgtggtgtaccgaggggttcctgtgtccgagttttccgcctcttcgcctagcgcattgtcagagcttcgagttgtcaagacagatacgctcaagcccgggcactcgaattcgtggcagcaaatagtcgcaccgggacgacactagatgggcctgtaaagacgccaagcgagggtgcgcgccgaagtgctgccctgatacttgaaacgcaaagggactctcgcgttggcgcgcgttagtcgctcggggacgtcgccgtgtgttcagggctcgagtggccaccagttgagataggcccccgcgattccacggtggtctcacagggtggcgcataccctttacataccttggggcggctccctactgtgaattcgccactgtacgatcgagggccatctgttgcccatcggggccacggccttggtgggcccccgtaatgcgtgcaacaaaccgccagatcccagacgcgtcagcggtggatccagcgcgttgccatctgtgatcccctgcccacgtgttccgttggcggcgccaaggggactggcgagcgctgggtacgtcatcccgggggttccggagggggtacctcccctttgggtttgtggcgttggaaggccgcaccggggcgccagggccttttgtcggcgccgtggcgcgccttatagggattcccacctttggtctggccacccgttgtgaggggcccttccccacatttcggcattttggccaccccttatcggggcgcccgttggcacccccgccgtctggggggcgtggggcgaacttcccttgtgggaggcttataccggttccgtgactctacggtttagcgagcccccgtttatgggcagagagggcccctcttgggggngtcctggttgttcgcagttggccaccttttatgggaccacatgtggggaggggcttccggacgtgggacattaaccccaagggatgccgcgaccaaagtggtgaagacctaaaggtgaccagccccactggctctagaaacacagcggcgtgcagccacagaggtgtaaacaatggcgacgaggggtaccttctagctgcagagaactgtaaggcaactttcgccaacattgaccaacacgtgccataacatgaaggatgtgcggaagcggcccttaataagttctccaccaaatagagggcagagtgaacatcgtgagaaccaaggaaacagaacgagagacaacttggggataaagataggggagccccacacgtggtagttccagaagagaggaccagaagagacagcgagagcccgtaatacaccgtacccgaccatctgacggggggcaccccaacctcatccaaataggggcccacacaaaaggagctcgtggcccccctaaccagcagagcccccacagagagagacctcaggggtgtatggagcccagaagaagagttaccagtcagcaaacgccaaacagtgcaacgtcgagaagaaaacacaagacacgaaagagaatcccctaggtgtgcaacaaatcaagcgacacaaaattcacgcagcacacacacacgcgcggcacaagcacgtcacaccaaaccgcaggcagtaataggcaactgcaaacaaactcgg

SEQ ID NO: 576813 - DNA, 414 bp, Homo sapiens
accgtcctatatacctaccctactgtctttgcaccctaccccaagtttttctctccgggtctgggtgaacatcctgaagagcccccagtttggctttgacatcgacacgacagaccacatcgacgcctgcctttcagtcatcgcgcagccattcatcgacgcctgctccatctctgacctgcagctggtcaagtattcgccaaccaacaagctcctctacgccaagtagattcctgagcaccggaagatcgtgccgcgctgctacaagcagattcaggacatgacgccgctcagcgagcacgacatgaatgcccatctggccgagcagtcgaggaaataccagaatgagttcaccaccaatctggccatggcagagagttataagcacgccaagaggaatccgccgcagatcat

SEQ ID NO: 576814 - DNA, 271 bp, Homo sapiens
agatgctcttcgttgacgtgtctatatcactgcacaaaatttggtatattatcagttaaaacacaacatcacaaaggcagcaatttttataataagattttgctatattttgttttgtttgaggtaagtgagctgttgctaggctgtgggagctagttcgtttatacagagtttttgttttaataatattttacagtagaacatgacttttatggctctgccctgtcttctgagttattcttctagatctcttccttgtgtcttatatctc

SEQ ID NO: 576815 - DNA, 181 bp, Homo sapiens
atgcccaaactccgcacgacgactctggttctaatgctgtccagtctcttcaaacgcattttctgccttttaagtatgcttgtaattttctgttgataggtagacctgatacactgggtaaaaggaattgcagtaaacagggctttcatcctgttttcaggtgttggggataacatcaggc

SEQ ID NO: 576816 - DNA, 226 bp, Homo sapiens
cccagagcttcgccactttcctttccaggctagcccccaagggtatacacttatcctcggctttcacagcattatattcattttgcctctttttgattttattctccaaacgtcaattatatatcatataattgagccatatactctttagcatctgtcttctgtcattcacattatgtatgtgagagtcatccatatgttgcatatagttgtagataattcattt

SEQ ID NO: 576817 - DNA, 322 bp, Homo sapiens
acgagtcacctcaatgtccagacgagtcacctcaatgtcctgacgagtcacgtgaatgccccgacgagtcacctcactgccccgacgaggcacctcaatgccccgacgagtcacctcaatgccccgacgagtcacctcaatgtcccgacgagtcacctcaatgtcccgacgagtcacctcaatgtccggacgagtcacctcaatgccccgacgagtcacctcaatgccccgacgagtcacctcaatgccccgacgagtcacctcaatgccccgacgagtcacctcaatgccccgacgagtcacctcaatgccccgtcgacgc

SEQ ID NO: 576818 - DNA, 111 bp, Homo sapiens
tttcaccgggtgaccaaagctttatttttcaaaagcaggtacaccaaagtactatgtgtaccatatcgtgcaaaatgtaatatggaatttccaaacatcaatgaagggatc

SEQ ID NO: 576819 - DNA, 1571 bp, Homo sapiens
  misc_feature (334)..(334): n is a, c, g, or t
  misc_feature (368)..(368): n is a, c, g, or t
  misc_feature (446)..(446): n is a, c, g, or t
  misc_feature (505)..(505): n is a, c, g, or t
gcaatgccgtggacagccccctcctcaatgtacacgcgcctaaatactcagttgcttacaagtggcggcgcccattcctgtgcacgtgtcctgtgagtctggattcgactgccttccgagacgtccgaaggcgtgggcatgtccacacaaagctaatgaggtatgccttgctatacccaagctctcttcgtcgtgcaattactcgcgagggaaatgtcgagaggtgtgagtaaagacacacaagttcgcgtagtagggccctagcgaggaagccatgagatcgatgtgacaggcatgcacgatccgatagctccgcgatgacagcgcaattacngacatcactattcgtcgcacgggctctgagaacnacgtggcgctcacgctagcacaaatgcgtgcgtggagctagtctagatcgaagagacctatcccgaaggtggcggatngtaagtgagcgatcctggacgtcctgagatgacccccaaccgccagatcctcacctagnttgccccctgatcgtcttcgcttgttgcgcacatctatgactccatgagaagtacgcgttgtgcgtggcggtatcactattgctagtcacgaaagctttaccttcccatttattcctcattcatggcgtgaaggttcgccgtggcgggggaccaacagattgggccagtgtttgcgccaccacgtggggcgttgtcatggcacttgtctaggggtgggcggcccataacgtgctcgcgagagtcgtggactgagggctggcacccagatcagcctcgtgcttggtctacatcgacttaatgaatcgcggcatttgacgcaacgccgcatggatcacaaatctaatttcttgagagcccacccacgataattggtagccgctgtctcattcccacaaagagaaaccattggctgggtagccaggaaaatcctgctgggatttagcaggaagcctaatttcggctatagcgggcattggcgtgacccaaggcgtactatgcggcgcgaccacgaagatattgggctcgcccagtaattcttcccgtagaatagcaaggcgtttgagttcatttgattggcctgtggtgtttcgtcctgtatcttttgaccccagatttttagtccccccgtcaaaggccataggctgtctctcaatggccaccttgtgtaggccccattggagaaccttggcgaggtcactggagctgggggggcactgaccgatttatacagcgacaagcaccggtgaaagcgcccaccaggatgaaggaagacgaaccacaaggggaaacccaggggccaggaggaagggaagacaccgacctagaggcaaagcggattatccaggagaagagaatgcgcggaaaatgagcggtcccacaaaccaacaaaagaacagggcgaacaaaaacaaaacgacgaccatgcggggagaagagaaaaaaccatcatacgacccacgccggaggagcccctgggaggtaacagagaacacgacaccaaacatccaacaaaagatagaggctgtgaacaaaagttgagcaaccataatccgctcgatgaaccca

SEQ ID NO: 576820 - DNA, 140 bp, Homo sapiens
tcgagctcggtacctgttctggccgcacaagtcagtgtgtacatggtgtgtagactcatcatccttgcacatggatgtccttgttgatcagacacgttcttgcccttgatagtctaagatgacatgataccgttcttggt

SEQ ID NO: 576821 - DNA, 979 bp, Homo sapiens
  misc_feature (14)..(14): n is a, c, g, or t
  misc_feature (29)..(29): n is a, c, g, or t
  misc_feature (63)..(63): n is a, c, g, or t
  misc_feature (99)..(99): n is a, c, g, or t
  misc_feature (111)..(111): n is a, c, g, or t
  misc_feature (123)..(123): n is a, c, g, or t
  misc_feature (129)..(129): n is a, c, g, or t
  misc_feature (144)..(144): n is a, c, g, or t
  misc_feature (249)..(249): n is a, c, g, or t
  misc_feature (415)..(415): n is a, c, g, or t
  misc_feature (417)..(417): n is a, c, g, or t
  misc_feature (481)..(481): n is a, c, g, or t
  misc_feature (579)..(579): n is a, c, g, or t
  misc_feature (647)..(647): n is a, c, g, or t
  misc_feature (649)..(649): n is a, c, g, or t
  misc_feature (670)..(670): n is a, c, g, or t
  misc_feature (767)..(767): n is a, c, g, or t
  misc_feature (771)..(771): n is a, c, g, or t
ggtgaggcgccggngcacacccaaaccgngctgcgcccgctccttccgggccccggagatggngcctccacgggatgagctagccagcctgggcaatancagaggcggccntcggcgcgcgcnggggancgagctggtcgcccnaaccgggtttggatattgcgtagagtaggcatctggcggctgggagtcttccaagtgactggatgttctattctctgtgcgagccgaggatcatgtagagcgaanaagtgtgacgcgtcatgatgcacttcagacctgcttccaggcgtgtccagtgcattccgtccgcgagggcatgctggtggacctagtctcttgaggggcaagcaactggctgatctcagccatctgtcaatccgtaacacagtgggtgaacgttctagagtcatgncntggacgcgccgccttggaccgtgatcgaccggaacgtgtctaacaacatctatagcattcatantcattgcagctcactgtggctactcctgagatctcataactggaggcgcacaagaggttgccctgctaggcacaaagcttgaaagagggtgaggctgncctccactattttgaggagcttccctctgccaatggctcagtgcccattgtctggcagggcacccccngncctggctggtgatcaccatcntcactgtggacaggcagcctggcttccactacgtcctgcaggttgtgtcccagttccaccggcttcttcagcaatgtggcccccagtgcgaggggancaantcttcctgtgcaacgtggagcgtagtgtgaggcattttgatgccaagtggtcttccaagtattgtcctggtggacaaatcgctatgcagggcctgaggttgatctgggcggatgaaacctttggcgcaactgggtggccacaggacccgagcaagggcaaagccggaggacaccctggaactataaccaaaaagcccgatggtacacg

SEQ ID NO: 576822 - DNA, 293 bp, Homo sapiens
cacgtgcatgtgccaaatattccatactcttttgagggggacacttcacaaatgattacataaaaaaatattaccccacttcttattatactagtatatgttggacgggagcccaatctttaaccgaatcactttaaaacgcgcatatcactattttacacctgtggctttcttcaccctgtcagcatttgtcaaacatgaattgtcttccatgttttcttaaaggccacttgtggaaaagcctatatgttttgtatgagctttaagacagtatttaaccaggtcaagcacca

SEQ ID NO: 576823 - DNA, 260 bp, Homo sapiens
ctgacctagaggttccgtaaacgagcgcctgaagcagtctgtagctgttaggaggcgtgttaggaagggctggttaggaggcgctgttacggacgtgtaaggacggcgtcgttacggaagcgctcgttacggaggcgctcgttacggaggcgctattacggaggcgctcgttacggagggctgttacggagggctgttacggagggcgctcgttacagaggcgctcgttacggacgtttacggaggcgctcgttagggag

SEQ ID NO: 576824 - DNA, 401 bp, Homo sapiens
  misc_feature (28)..(28): n is a, c, g, or t
  misc_feature (94)..(94): n is a, c, g, or t
  misc_feature (102)..(102): n is a, c, g, or t
  misc_feature (148)..(148): n is a, c, g, or t
gttggtttatttcgtagtccttgggcanaccaatgtctttgttcgaaagagggaaaatatatcctaaacgtttttcttttaactttttttttangttcaggngcacatgtgtaggcttgctatataggtaaattgcatgtcaccaggntttgttgtacagattatttcatcatccggataaaaagcatagtaccagataggtagttttttgatcctcaccctccttccatgctccgacctcaggtaggccccagtgtctgcggttcccttctttgtatccatgtgtactctatgtttagcttctacttataagtgagaacatgtggtatttggttttctgtttctgagtgagttcatttaggataatggcttccagctccatccacgttgctgcacaggac

SEQ ID NO: 576825 - DNA, 892 bp, Homo sapiens
  misc_feature (14)..(14): n is a, c, g, or t
  misc_feature (29)..(29): n is a, c, g, or t
  misc_feature (63)..(63): n is a, c, g, or t
  misc_feature (99)..(99): n is a, c, g, or t
  misc_feature (111)..(111): n is a, c, g, or t
  misc_feature (123)..(123): n is a, c, g, or t
  misc_feature (129)..(129): n is a, c, g, or t
  misc_feature (144)..(144): n is a, c, g, or t
  misc_feature (336)..(336): n is a, c, g, or t
  misc_feature (372)..(372): n is a, c, g, or t
  misc_feature (492)..(492): n is a, c, g, or t
  misc_feature (560)..(560): n is a, c, g, or t
  misc_feature (562)..(562): n is a, c, g, or t
  misc_feature (583)..(583): n is a, c, g, or t
  misc_feature (680)..(680): n is a, c, g, or t
  misc_feature (684)..(684): n is a, c, g, or t
ggtgaggcgccggngcacacccaaaccgngctgcgcccgctccttccgggccccggagatggngcctccacgggatgagctagccagcctgggcaatancagaggcggccntcggcgcgcgcnggggancgagctggtcgcccnaaccgggtttgatttctgatgactctggcctgagttccaggatggttttttcttgggaccagacatgaacaaaagttgacctcatgagcacttcaacctctccagctgccatgctcctccggaggctgcggcgactctcctggggcagcactgctgtccagctcttcatcctaacagtggctgacccggttnctctcgggggccccccccttttggggccccttgggncccccccccctgggtctctgtcacctgacttctacactcttacttctatctgcgccattggcatctgaaccaaatgagccaagagttcctgcagcaaagcttgaaagagggtgaggctgncctccactattttgaggagcttccctctgccaatggctcagtgcccattgtctggcagggcacccccngncctggctggtgatcaccatcntcactgtggacaggcagcctggcttccactacgtcctgcaggttgtgtcccagttccaccggcttcttcagcaatgtggcccccagtgcgaggggancaantcttcctgtgcaacgtggagcgtagtgtgaggcattttgatgccaagtggtcttccaagtattgtcctggtggacaaatcgctatgcagggcctgaggttgatctgggcggatgaaacctttggcgcaactgggtggccacaggacccgagcaagggcaaagccggaggacaccctggaactataaccaaaaagcccgatggtacacg

SEQ ID NO: 576826 - DNA, 422 bp, Homo sapiens
tacatagtgctattggggccgtaagggaatctgaacacagactgtcagattattggtgtggatcctcgtggccttcttgagtggggccgtggtccacggccatggagaaggacgtccttgcccttaggatgcacccaaaaggctcagcaacgagagagagaggatgcacatgcagcaacttgtacttttcttcccgtttttacaaaataaaatctttgaaaatagaaccttgggtgatgtggtggtggaagaacacactgggctgctttattttacaagctggatgcctccctcgtgagaacggcagaacgagccgtggtacatccgcaccgtggagcgtttccaggcatctagagaatcagagcgtgatcatcaccagaaaatcccagctgactgaggacgacatggacaagcgatgacag

SEQ ID NO: 576827 - DNA, 377 bp, Homo sapiens
gaaactgagcttccttagcctagcagagaggtcaaagcttgaggcatcttgcttggaggacagtcagactagagatcggagcaggccagcagtgagacactgatctgcccggtgtcccagcatcatctcttaactcggaggcctgcggaggcacaccaatccttagtttctcctttagtttgagaaaagacagacttggggtgggtatgtttttgtataatctttccttttctttttttacgcataagctccgtcaagcttgctggatgagcgcccatgcagcaatggctggaaggaagcgtcagagccctgtaagatcccagctcgctctccccagtgtcagcaacagcacttccttcgtggaggaagtggactcg

SEQ ID NO: 576828 - DNA, 152 bp, Homo sapiens
caggaggatcgcttgagttcaggagttcaagaccagcctgggcaacatagtgagaccctgtctgtattaaaaacaaaacaaaagaaaaaacctataaagggaactcttaattggaatgactcctaggtgctattgaaacttctaaaactagg

SEQ ID NO: 576829 - DNA, 1230 bp, Homo sapiens
  misc_feature (400)..(400): n is a, c, g, or t
  misc_feature (410)..(410): n is a, c, g, or t
  misc_feature (420)..(421): n is a, c, g, or t
gcacgaggctgctgaagaacctagagtcttatgtattatacaagatactactaattcaaagacagtgaatgaacggatcactttaaatttaccagcatctactccagtcagaaagctctttgaagatgtggccaacaaagtaggctacataaatggaacctttgacttggtgtggggaaatggaatcaatactgctgatatggcaccactggatcataccagtgacaagtcacttctcgacgctaattttgagccaggaaagaagaactttctgcatttgacagataaagatggtgaacaacctcaaatactgctggtaagctacttagaaagccccatatttataatttttgtgcactgtcacctactacttgaggatgcagtttcccaaaggaaatangatgtgtttngtaatttgtnnaataaattaatttttttcatttctatgtcggctcttgtctatcacgtgctgtagaactaacatagattacactggcacatccacagcaacacttattcgctgtatacagtcatgtatgccgcacttgcgatttaaccatatactgctgtcttacaagaccactgccacaccagggcatgggggtgggtactagcgataagtcaaagtagccaacaaagactctccctgtggtaccagtagtgacccatatccatctaggactaaagccatatgccctgcgttcgctgtcaaatcatcacggtaggatacattgacgcgcttaatcagtatcttgcaatcaagagtccttctccgtttctcacattacttcccctaacctggccacctattcacaggaaatgactgtctcgtataacctttacacattgtttccactttcctattctcactaatcggtattattctccaaaagttaacaataacttaacagtgtgacctatgtaccgtggattcacagcacccaatttcgtccattagcatcaaaatcatcttaaatggacgacactaacttcccacacatatggacggggataatatccatactagaaccgaatttgagtaattacttcctcaatcccctctgtaacattctttccaaagggaacacattgtaacgtttcaacaccctagcgcgcaacaagaaacagcacggggcctcacagcacatgtgcctcggttgtacagccaaatcttcagttcgcaagcttaacgccgagtctacatctgtgacatacgcctgttcaaccgcg

SEQ ID NO: 576830 - DNA, 123 bp, Homo sapiens
tgatgaaactgcgtatttcagaaacacagaaacacgagacctcaaaatcccctgagaaggacgttcccagtggatagaaaagaagagcaagaaacccaagaagaaagagaaaaaacacaaaga

SEQ ID NO: 576831 - DNA, 1532 bp, Homo sapiens
  misc_feature (81)..(81): n is a, c, g, or t
  misc_feature (96)..(96): n is a, c, g, or t
  misc_feature (111)..(111): n is a, c, g, or t
  misc_feature (175)..(175): n is a, c, g, or t
  misc_feature (178)..(178): n is a, c, g, or t
  misc_feature (188)..(188): n is a, c, g, or t
  misc_feature (213)..(213): n is a, c, g, or t
  misc_feature (270)..(270): n is a, c, g, or t
  misc_feature (322)..(322): n is a, c, g, or t
  misc_feature (343)..(343): n is a, c, g, or t
cccagccccgggccgatgacagcttttcctgaggaccccggccacgcagctgttcccccacatggacagatggacacacanagcctcggcggcccntgctggcacggtgtnagcgccaggcatttcccccccgcccctcccgacggcccaaccaggggctgtgcaaacgtggggnccncggaacccanatgccctttagaccagggagctggnccggcctttggcaggcccccccctaacttattttgcccggctgaggttgtggggggngcctcctggggtgcccgattccctcagctttgggtttaatgtattatatttntttggggccgccagtgccccnataaagggtcagaagtgaaaagaaaaaaaagaaagaaaggaaatagattctgaagagaattcaatagatgaagcaggtgcggggaaaatagagggataagatagaaaaggggaacactgtggttagatgagactggttgtcaagagacacatagaagtgtatataaggtgcacagaccgcgggcaacacacacatgtgggcacgggatctcccacacaatatcacaggtgaccgatgagtaatcaaacaaagaacagagataaacgcacgcaggggtaagacgcctcggcaaataccaagccgaacactcgggggacaatgaacgataccacggagatccacacggacaagcgcgacaccacaaccagaaaacggccccagcgaaggggacgcgagccaaacccaccacaagcaccatccaccacgagccaacaatcgagagtaaaagaccagagacacacgggcaaagacaagaccaaacggacggcagcaacacaacacaggcacagaggcaacaggaccgacaagagagaagtccaataggaacacaggaacgcacagcaccaccacaacaccacaaacagccacacggacgaaccaaacgacaagcggcaaccaaaggacacttagagacacaccgagaaagcgagaaagacacaacagaataaagaagaaaccacagaacgaaagccagcagcgagacagacagaggcggacgacccaaacaagacaaaccacagaaaagcagagcagcgaaaacacggaacaacaacggaagacaaaaacacccgacagagacaccaaggagcaacgagagagcagaaaaacaagagacagaccgaaacgcagagaagaagacggaaaacgaggaggcaacgaaagaacgacacggggaaacgagagagagaggggactagcaaaccgaggaaaggagaaagaccaagagactaaaagcagcggagaaaccaaggcagacaaaacagagagaggaacacaaggacacaaggaggcaagacaggaaaagaccaggcaggagacgaacgaaggaagaggggaaacaaagcgacacgcgcgcgacgaggaaacagaaaagagagaagaaagacgcaggaaggagcgagcgagagtcagcgacagaggaacagcgcagccgcacatgtccgtcatctgctcagctgaagaaacagaa

SEQ ID NO: 576832 - DNA, 118 bp, Homo sapiens
caggctctctacctatagttggaccaacagtggacccaaaagggttatgggtcttcagcggttttaattatatccacgactagatacgtgggggtctggtattcttcaagaggggtgg

SEQ ID NO: 576833 - DNA, 1430 bp, Homo sapiens
tcgtctggtccctgttcaacaccctcttccatgaacccctgctgcctgggcttcatcagccattcgcctcactccgtgcaagtctcagggcacaggcacagcatggttggcgcacgtgcaccggtggccccagagcctcatgcctcccaccgccaagtgcctgcaacatctgggccctgcattcatgggccatcctccatgcaccacattctgctccatcgatcatccccagatgctagcatcattccaaggcctcatggcatcagcatccaggcaggcatcaactgcagagccaggcagcatctgcccaatgcaacatgtatccacacgtacctccaaccttcacaatgtcctcgacccatgacacccacgagagaccgagatcctgatatcaggccacttatatacctcacaacgacattaatactaccaaaatggccactttcaagtaaaagagtgacaacgaatgtaaacatggctgacaaacacaccaacacaaacaaacagcaacacaaaacaaagaaacaaaaagaggaatgagagagagaacaaacaacaaaccacaacgagaggaggcaaacagacaacaaaggaacaaacccaacaagacaaaacaacgacaacacacagagaacaaaataagagagaagagcaaccgacatagaacagaacaagcacacagcaaacagagaaccagaaccaaacacaccaaagcgaacgacacaacagagataaaccacaagggagaaacaacaagagagaacacaaacaggaagacaagagaacaacccacccacagcgacacagaaaccacaacacaagagagcccacaacacacacaaacaagagacaaaaaacagacgaacaaaagacgaacaacacaacacaccacacaaaaacccaaccgcacaacacgcaccaagcgaacacacaaaccaacacacaacgaccacgagaacagcagagaacacagcaaacaacgtacacgagataccaaaggaaaaagacgaaacacaaacacaaaaaaagtaacaaagaacagaacccgaaagaacagaagaaaaaaagaccaaagaaaaaaaagacacacagacaacgaacagaacagagcacagaagaaacgagaagaaaaacagagacgagaggattacgaccagaagaacaggaagcagaagacaagagaggaacaggaaaaaagagagagaaaggagaaaaggacgagacaagacgaaagagagaacaagagcggaaaagagcaagaacgaagaaagaagacaaggcacagagcacacagagcacaaaagaaaagacaatgaaaacgaaaagacacaggaacaggagagcgagggacacgagcgacaaggcgacgaaaaaaaagcgcgaagagtagaggaagcagacatgagagagacgagaagcaccagtcgaaa

SEQ ID NO: 576834 - DNA, 360 bp, Homo sapiens
  misc_feature (81)..(81): n is a, c, g, or t
  misc_feature (96)..(96): n is a, c, g, or t
  misc_feature (111)..(111): n is a, c, g, or t
  misc_feature (175)..(175): n is a, c, g, or t
  misc_feature (178)..(178): n is a, c, g, or t
  misc_feature (188)..(188): n is a, c, g, or t
  misc_feature (213)..(213): n is a, c, g, or t
  misc_feature (270)..(270): n is a, c, g, or t
  misc_feature (322)..(322): n is a, c, g, or t
  misc_feature (343)..(343): n is a, c, g, or t
cccagccccgggccgatgacagcttttcctgaggaccccggccacgcagctgttcccccacatggacagatggacacacanagcctcggcggcccntgctggcacggtgtnagcgccaggcatttcccccccgcccctcccgacggcccaaccaggggctgtgcaaacgtggggnccncggaacccanatgccctttagaccagggagctggnccggcctttggcaggcccccccctaacttattttgcccggctgaggttgtggggggngcctcctggggtgcccgattccctcagctttgggtttaatgtattatatttntttggggccgccagtgccccnataaagggtcagaagtg

SEQ ID NO: 576835 - DNA, 1746 bp, Homo sapiens
  misc_feature (139)..(139): n is a, c, g, or t
  misc_feature (154)..(154): n is a, c, g, or t
  misc_feature (284)..(286): n is a, c, g, or t
  misc_feature (356)..(356): n is a, c, g, or t
  misc_feature (445)..(445): n is a, c, g, or t
  misc_feature (519)..(519): n is a, c, g, or t
aatttcggacttgttaacatgtctgcagttctgaccatcatagcctatcaatgcatacatgtaagagagtctagtggatagttagtccatgaatgcaccttcgagtcgtaggcgcctagtgtacgcacatcgcatgccnccacagcatgtaccnacaccgtcgcactccacaacacttctgcacaatcgtacgtagccttcccgttgctcatcgtaccttatcgttggtccttacgcgtacctcatagatgtcgtatccacctcgtcttactcatcgcatgagnnnccttgcttgcaccaatgtggctgtcctcatacgcacatcttctgtccgttacactacctcatgtagaganctccatacaggcgatgaatggccacatgattgtaggtggcgctgagcgcatgacacccgtgcgcgcacaccaatgtgacccccatatgncccatcacaattcagactcaataagaatgaactgtggaatcactcgatgtggcctcgcgtgcactatgtatgtngtgctgtctctatctggtgaacccacatttctatgacataattcacttcaatatcgccaaatctgtttgggtaatcgcatctcaatgttgactcttgtctgaaaaatcacgaaatcgatcggatatgtgtctaactcagaaagtgcaagtggtcccaggttgtatgtggggtccatgtcttgcgggtagcgcccaccagttgatgtcaattcacacaacttaaataatcaatcagtaaatcttatttcaccaaactcctcatcattctttccccacgtggctctcgcctgagtaatgtggtccctcctgtcgcaaaacttctctatggaccgggctcttgacaaactttgtgttatatctcctcggatcattttacctttctctcaattcactttctggaaaataaactctcttcaggtctcccctgtggttcacctcttctaactaaagttaccttcgaaagggtgtctatcggcaggaaccatttcaactcaaatgttgtggtcgcctatcttaggtattcccgctcttacacaaccgtggtccgccacttaggaggctatatttctacctttttacattatcgccgcggttaattatggtccgtttatattaacttgtgggtgattaaaacacaaggaaaacacttggccttttctattggcttctacatacatcacggcggattggcacatttatctatggaaggattttttcccttttggccaaagaaaacccccccaaaatgacgaaacaagggcccaagcgattcgttttggcggcacacaacatttttcccaaccttttgggcgcccttagggggggaacacgagacagcaaggctcctcttgtacattacaacggcaaacactttggtttttgcggcgccgacacgcgtgttgtgacacccttctacctgggctaccatttccccagcaaatacgttattagcggctactaccatatccacgtttatgtagccttccctctggttaaccaaccagcgggcatttttgcgacacaaaggttttaacacccaaccacaagtatggggaggacctgcgggcccggggggtatcccaaaccccccttgtgttgtagcggttttagacacacagcacacagagcgtatcttctccttggacaaagagggccgaagggaacacgctttttctcgaagccacaatatattcatcaaacacgactgttaatagaggcccacgtcga

SEQ ID NO: 576836 - DNA, 231 bp, Homo sapiens
gatgatcaccggcttacacatagcgacggaatgcgaggcagtataaatcactgccgaagttctgttgaggcgcagtggttacgaatccaactaggaacatgaggttgcaggttccgtccctgccttgttcagtgggttaacgatccagcgttgctgtgagctgtggtgtaggttgcagatgcggcttggatccggcgttgctgtggctctagtgtaggccggtggctacag

SEQ ID NO: 576837 - DNA, 1476 bp, Homo sapiens
taaaaaaaggtaacgaaaggtcttcaggagatgtagagttttatttggtctctgtctggatagaggtttgcgatttgctctcgcaatgtcccacgggtggcaagagaaactaggagaaaacgcccaggatgtaccaggtctatctgggcataactctatctcccctcattctctcatctttcacccatcaaccagagacgacgcacgcaatcacttggcttgcagaaactgaaccttaagaacgcgtggatttcaccgtcagagttctcatctggcgctcaaggtagcaagatactgaggacgtctatagactcctattcttgcgcccatctttttcctatacctagacctactctatcacaagtaggtaactactagttaccccatcacagaacatcactgaggaccacaccggctaacagacgtctacccccaaagtataaggcgccctttatctgcgagcggcgcaatattactagtaccacgattctcaaccctctctcacttttcacaattcctgtttgccccttatacgcgtgggactcgcatataccctaccaagagtgagcttatgcaccacctgggacagaccttaacctattataccccgcgcgaacaccaactctgcttacggggcgaacactcgacttgacctacgtaggggctcccttggcagcaccttcctggaacacaaactcccgaccggcagacggaggaacgcgagggtatcacggcaacacccctgcgtccccggaccgtataccgcaccgcccccaacagagcccaacatcacacatccaccgttcttctcgggcgccgtgcacgcatagccggcgggccctcgcggcaaaaatatcaaccccattatctaagcgcgcggcgcccctagaaacgtccacagggcgatacaacaggcgcgcaacgcggctcgcccagaccaacacgccatagaggcggagaccaacagccgggcagacgaacaaaacacaagtcaaaccgagcacgcacacgacgccaaatagaaggcaacacgctcgacatccaccacaagtacgcagaccgaccaccgagcagacaccacgcgcgacgccgagcagacgcagaaccacacccgcacagagccgcgcacgaccaacatgaccacgacgaaacaaccaggacacacgcggacagagccgaacgcgacagacgcagcacccacacaacgagaccgccggagcaggaaacggccacgacaccagcgccgcaagacaccgccgtggccgtcccccacagcccgcaccaccgcgctaccctcacgcgggacggcgcaccggcgaggcagacaacgtcccgcgcccgcactgcacgtctccggcccccccggccgctgcagggagcgacgacgtgactcctccacgaccgcagacgacgccgcccgacgcgcacatcccgagagcacgaacacacgaggccacacacaacaccaacaacaat

SEQ ID NO: 576838 - DNA, 340 bp, Homo sapiens
actagtctcgaggattattattttcattgtttagattcttgtccattctttattaattgaagcacagcgaaatgcggctgagagattaaagagatttatgtgattgagacagggtgttggctttacaccaacgaattggatgaacatgtggatacgcttttgatcgtgatcacctttctgttattctcatggaaggctgtgcttttccttctaggcgaatcgggtgtacttatcgtcagacttgcataattctctacataagctgagacactatccatcagctatcagttgctcttctagggtcttggactagtgtgtgacaggctcagctggtgcacgc

SEQ ID NO: 576839 - DNA, 676 bp, Homo sapiens
cggccagccatctgcttaatttttatgtacattgcttatttttgtttcttgagataaaattcatgtattaataattttatttatttaaatgaaataaatgaagacgaacaccagctcatcttcaacttatcccaaatgtttaaatctcctcttaagtcattcagacctaccagatatctcatcattttcatttcttgaaagagtcatcattttttttttctttttcttttttttttggagacggagtctgggctctgtcacccaggctggagtgcagtggcatgatctcggctcactgcagactctgcctcccaggttcaagcaattcttcctgcctcagcatcccaagtagctgggactacaggcatgcaccactatgcctggctaattttggtatttttaatagagatggagtttggccacgtgggccaggctagtttcaaactcctgacctcaagtgatccgcctgcctcagcctcccaaagtgctggtattacaggcgtgagccacttgcggctggtccattttcatctaggaggagtcatccatacatttacacctccttgaatgagtttcccgtggaagtcttctggcctgctggattatgaacaactgtgtcctataagtcatccttgggatccagggaatcttacttcacaggcatccgtggagatta

SEQ ID NO: 576840 - DNA, 150 bp, Homo sapiens
gctagaatcttttgtccagtctgtatatttgcaaaatagcagtgtgtctctgatgtgttacctgcagtggcaccctgtacaacaaaatcaacagacttattgcactaaacacaccaaccacaaacaaacccaccaacaaaaaaacacaac

SEQ ID NO: 576841 - DNA, 110 bp, Homo sapiens
catcaaacaccttgaagatagggtccaggatcctccctcggatagcacagttgccttgatcctcggtgagaggccggagagtgctcgttcatggatagtcgacgtcggta

SEQ ID NO: 576842 - DNA, 680 bp, Homo sapiens
ggacgcgtgggtcgatccacgcgtccgtgacaacatgccagtgttaagaccatgatgaaaggtgtcataaaagccgtaggatcgcgcaacccttgtgtagtgtggttgctggtacgatgtgatctttgacaaccttgagattaagtccctctggaatcagagcttaaccagcatagttatatgatagactattaggatggttgctatgtattagttggaacaaacgtgacttggtaaacttggtaatgctgacatgctatatttacgttatacaacgttgtaaattggaagtgtgtcaatttaaatttatgtgatttgcttaccatttcggaaggtttgttagaccagtgtaaggttatatgaaagatacgtacttgtgatgtgctatgtgatatttatgcttgttttcaagaagcacaactctatgaatgtcgggttgatgagtgatcaattcataaagaattgctccatataacatgacattggcaagcgtgatgcgctcctgtgtgatccatgtacagcagtcttcacgatcgtaggtactcttcatgatagatttgttatctgtgaaagattccttgataactgtcatagtgctctctgatacaccacttatgcaggtcggtctaatcatcatgtatctgtaaggtcagttgtattggcactccaaacttgtgagt

SEQ ID NO: 576843 - DNA, 386 bp, Homo sapiens
  misc_feature (123)..(123): n is a, c, g, or t
gtcggtaccgagcagtatacagcatgtctttttctgttccaggatccatccaggaaaccacatttccatttgtttctgtaggtgcctctggctgtggctgtttcttcttagacttgtcttgtntctgatgaccttgacagttctaaggagttctggttgggtatttagtaggatgccccactattggaatttgtctgatgcttttctcatgattggactgggcctgtgggttctgggaggaagaacagagatcaagtgtcattttcatcacatcctatcatggtacataccatcgacatgacatatcactgctgacattgacctcagttgcttggctgaggtcatgtttgttgactgtctccactgtaaagttacttttttttttg

SEQ ID NO: 576844 - DNA, 1230 bp, Homo sapiens
tccagttgccatcctgctatatccatggaatagaacagtttgtgacttgggcccccaagtttcgagagaactgggctttcggcgcggggggacagaggaggactcgtgggagagcgtttccccactggacgcttacgcgcagacctgtcagtaagaaactcatccagacccagtgagacgaccgtgcctcagaacttggggaccctgaagagcccggagaggaggctgcagatggctcagacactgtgtgtcctcagtctctttccctgcacccctgagcctgtgaatcctgaaccggatgccagtgtttcctctccactaggcaggcagctccctgaagcactccaccacatctcaccgaaccggcagcgagggaacgaggtgtcacgctctgccggcctagccctagtactcccgtgtccatccaccagcgtcagctagcacagggggagctggaccagctgaaggagcatttgcggaaaggtgacaacctgcgtcaacaagccagacgagcgcggcttcacccccctcatctgggcctccgcctttggagagactgagaccgtgcgcttcctgctggagtggggtgccgaacccacagaatccgtgggcaaacgagcgagagagcggccgtggtacgcagggccagcaagaggcgggtaacacagaccattgcgggggactggctggctggtctggcgtggagcgtgggaccttcagcattccttctgctcgggactgtgatgcgaccgtccccttggtggtatcgcttcggtcgccgggaaaccccggtgtatattggcgtttgataggcctttgtttggcccgaggtcgtggtcctctaccactcggattctcggtctgtatcacacccgcagatggacctgtcatggggggccacctgaaggaatccagccgccaagcgacacaagggcgacgcaagaagacgaacgacagatctaacgagagagatgaaacgaacaaaacacgaggagactggaccaccataacaagaagaaagtgacagagcgagtgaaaaacacaaacggcgtgacgcacctagcgcatcacgaaggaagaaaacacataaacaggaacaaaaaagagagaagcagagaagcacacagacagagcacacctgcaacagaaaagtagagcaagacgacaagcgcagctagcggctatatattctatctgcccgcagcaccacacgtcgagaagataaggagc

SEQ ID NO: 576845 - DNA, 145 bp, Homo sapiens
aaagtgacagagagtatagaagtccgatactatcagagcacagaggtgcacgagttttcagtcgacagagtgcaataacagtcagagactttgatgacagaggcatcattctgattcaggttggatatttttcgtgttcctagag

SEQ ID NO: 576846 - DNA, 151 bp, Homo sapiens
ctataaaatatgattaattaaaggtagttaatactcaagatggtcttgagtttttaggtctaacatcatttagatacttcaatcagaatcacttacaagctgattgacaggtggttctaaatttaatacgtcagcttttagggttgagctt

SEQ ID NO: 576847 - DNA, 953 bp, Homo sapiens
gccgacagcgacacaaggaagtctcctgcccctcctaaagctgaagactcatgagcgacaggctattcacaaggccaaggaaggcagtgcttcgcaacagagtgtccacaggcctacatacatatagaagaacgatccgcactgtcaccactagccttccggcgtgtccgtaagacactgcagtactccagagagaactagcaccaatgtatcctcgtgcaatgagctgcttcaccaggaggaaatcgacagcttgaccacgtatgctatcatccaagtttccgctgaccactgagtctgcgcactgcaagacaacatacgaacgacaacaagctacacgttgtgtacacttgtggatagtataaaggcctacacaacgcaccagattaaagcagcgctgttgaacgaagcatctcatgacagttgaatgtgcgcgcaagggtctaacatcgcctgaattcgtgcctgatggagtacgaagcacatggcatcatggttcgagctggctcctgattgaccgatgcttatgcgatgttgccaaccaataaattgggatcattctaaaactgcagtccagtctgacctaattctgaatatactctactatgattaatagccctttgtacaccaataataaatggaaacgcatacaacactctcggaagagagaacaaatgcatccagaggtgcgcgcacagaaaaggagggggtcctagggaacacatggggagcacaggtgagttccacattaacataggagctttaccaagatgagctccccaagcaaatatgcagttttcgcaccaccaatgtggggcaatagaactcccgtggccggggcttgaccccatagtatgaagtgaggagaacacgtataatacaaatattcgagaggaacaactccacaggcgtagatagacacccatagacaaacagagaaaatcacaggcaaa

SEQ ID NO: 576848 - DNA, 660 bp, Homo sapiens
ggacgcgtgggtgcgctttgcactattggggcaaaaatgtcttaagcagtggggaacctgccaccccaccctgaccctcagcctgccacagccccctacacacacacacacacacacacacacacacacacacacagggactatgcacacacggatatgggaaggcaatgctatgctgcccgtcagggcacgtgtctcttcccccaactccgttcagggtgttccaaccaggggtgtggagggccctggaggagcacccgcgtgtcactcgtgtgctgtgtgctctgtcccaccggcccccctggtggacgcccccagcagggggcgctgacgaccccgcgctgtcgctgcccagccgcggtccgggcgcgccacgcccgagggatctctggacaggacaagactccggaattcctatctccccccccaagcaacaaccagcccgcgaggaacccaacaaacccaaggtggtggacccccagtgctccgcaaatcttggacctcaccacgaagtgtcacactcaacacagacctgtcgactggatggggcagggggctgggatgtgaagggcgtgtgcattgaccgttggcacaagggtggagcccaagaacggggggacagtgagggacgagatgacccagagagaaacgcaacaccaa

SEQ ID NO: 576849 - DNA, 496 bp, Homo sapiens
tctattggaaaaccttgcgtacatgataaagcagcgggacagattttgaaccctttgtacgaaatgacatacctttagagaagcatgtggccagtttggcaaagcctggtacttttgctggcaatgatgcaattgtagcctatgcgagatatcatcagttgaatgtattgatatatcaccttaactgcccctttgtggcagattcgtggtacagagaaaagcagcgtgcgggagtacagatcgtatgtcggtatggagagcaccacgacagtgttcggaggatcctggacaactcagaggcacctgcatatctccagacggatgtgagtaaggcctctgcttactcccgtattccccgccctactggatacagatcgagagctgtatatctggcgctaaaaaccagtaatgtttttgtagaatgttggcattgagaatctgtgggcctgatttaaacatatttttcatttcttagtttaggtactccgtgaggggc

SEQ ID NO: 576850 - DNA, 487 bp, Homo sapiens
tgctcatcctgcaagccttgttgtaccctcctgggttatggtgccacccctcccctgcgctttgtaaccgtgggtgactggggaggggtccccaatgccccattccacccggcccgggaaatggccaatgccaaacagattgcttggactgtgcagattctgggggcagacttcatcctgtctttagggggcaattttttcttccctggtgtgcaagacatcaatgacaaaaggttcccggagaccttttagggcgtattttttggccgctccctttgcaaagtgccccatgacccctgtgggccaaatgcccccgtatgttaaacccccatggacatgtgttccagccccagtgttatgctttgtgggtgggtccccttttttgagtttcggggggcaatgggggagggagggagggaaagcttcctccttaatccagcctctttttgttttttatgttcaataaaaaaaaagttgccaagggtga

SEQ ID NO: 576851 - DNA, 223 bp, Homo sapiens
cgaggtcactctacaggatcttccccttgtattcccaccaccctattgattatgcagcatgctcagaaaattgtggggctctcaagataaaagacagaatgttaaactaggagttgactcagatatcctaataaagcttttcaaaggttgctttccagccagtggcagtgggtcatggctgtaatcccagcactttgggaagctggggcatggggatcgcttg

SEQ ID NO: 576852 - DNA, 227 bp, Homo sapiens
  misc_feature (220)..(220): n is a, c, g, or t
  misc_feature (225)..(225): n is a, c, g, or t
actaattttcaccagtgaagcaattgcaagcatagcccacgagggtctggattaggtcctctgcatatatgtcatgactgttagcttggtgttttagtgggacttctaacaggaagaagaggtgtatttctgatttttttttttttttacctgcttttggggctcttcctattgggttatcttgtccagcctctatatgagggcttttgctctgtcttantatanct

SEQ ID NO: 576853 - DNA, 165 bp, Homo sapiens
ggaacatccgaattattgttcctctgaccaccagggggagttatctctgatccgacctaaccattaggaaccagctttgtgtaccatttgtctgacctctgtaaaaaatgtgatcctcacagaggtggagctggatagtcagatagttactgcctacccagagca

SEQ ID NO: 576854 - DNA, 985 bp, Homo sapiens
gaacgtgcatctggccccatcggtgtgctccagagcatattcagtttgctctgagccctctgccctgcttccccttacatcaggtctcctctgacaaaattttaagtctcggtaatgcagcgagtgatttctagctcacatgagaaagcaagatggattgtcgaatgctcatagaggcatcatagatggcgggtagtgagcaatcttgagagatctatgttcaaaaagtaggcttatgaagcagcaagttcatgtaaataggtgtatgagtggagctgttgtgaatacatgtcatgaattagttgatctcacatgtgcctacaatagtgttgcatgggatattttcagtagtgaatcgatttaataggatcttggttgagtgtgccagtgacacagtgggagaagaatctggattgtcaccttatacgtcctctcttttgtcctgagaggataattaggtcaatggaattgggccaggagtgttgcggggtcaaacaaacgttggttctggtactgcattagttggcaaagacaggaagttttcgggcgcctattgggtaccctacattgattgaacgtgagatgctcctgggaaacggatcaatgactcgatcggaataaggaatgagggaagacgggggaagagcgactttctgacgatggatcgtcacttgcatgctgacatagttacagacggagcgcgacaataagccgactagaatgaaccttccatgtagtcaaccaatgaactccactcctgctgatggaggacccctagggatacagagacagaccgtagtcttacaagaacgagagagggtctgcaggccggcatggaccacgtggtgccccccagcggatgggacgggaagcgatggccttgacaactgacactcagaggtcccattcttgggcagccggggccaccaaccccggggatatcgtcagggctccgctggacacccatacaggagaggtgccacag

SEQ ID NO: 576855 - DNA, 578 bp, Homo sapiens
tctgcagctgacaaagtagatgcgggctgcctacagcaatagcagtatccagtctgatagcaggggtacatctcaggatggcttaatatagatcagaatcaagcttgcgactctgtctgggtagcactagtgtaggaggtcagatatggcgctatctctgccctcagtatcaacaatgattgctcaagacttcattcgtggctttgctaaaggacagagtcaccaagatgggaatatggctagatggaaaacgttctaagatcaataacagatgctcatcctccaggaacagcaatagtagcatatcaagataaacagcatgatccaaactctgacaactatgcaaacgacagcggaggactctgatttattgaacttgacatttaagacgacgtgatgggacgtgacgaacctgttgaactctagactgtctgattcaagaggattccaagggttgaagtactgcatgtattgagcctctgcaattctcaagccgtgactggaaacgactcatcccatacacaacagatttccatcattggcacatgggcatcacttggacacaatatacctggtca

SEQ ID NO: 576856 - DNA, 968 bp, Homo sapiens
  misc_feature (43)..(43): n is a, c, g, or t
  misc_feature (45)..(45): n is a, c, g, or t
  misc_feature (230)..(230): n is a, c, g, or t
acacgctcccccacacaaaaccaaaaaccttgttgttaaccgnanacggacctttacaggtgttcctatctgtgtatctgcccttctccttgggatactaggaataaagaagtgatcattgtctacgttgaaagcatctgccgtgtagaaacgttatccatgtccggaaagattctgtttcatctctcagattacttcattgttcagtggccggctctgaaagaaaagtntcccaaatcggtgtaccttgggcgaattgtttgacaaatggcaactgacttctttagaattttgcagttaactagatcatgcactcaaattggggggaaaaaaaccctacttgtttctcgtcacggcgtccgacagtcctgagaatatgtgatggtaaggaactaaaacccgacccgatgacctcactgacaaacaaaacacaaaacggccctccccccgcctcctagtcggagccttgccggccgccttacctttaaggaggcggtaaagcgcgaccctcccgcaccgacacccgcacccacgaccgccccctctagccaagcgccccctcaccttccaaggcagtcacacctcgatacccccacttacggaattatctcagaatcgaaaacctccggagagccaccaaaccgctcgagcactgactcccgtccctgcccttgagactgcgattgcccaccgcggcgtgaagagataactagtgccctccttctaccgagatactcgacatcgcccggcaacaccatactgttctggctacgacacacgagcgcaccaaacccgccactccgcgccctcttccgattacgttctccccagccctatataaatcctacagctgccacaactaccactccgcatctactctgtccacggtaatcatctcagccacacgcgtccgacgtactacacgtcccccacgccacttcgcgtcacccaatcatatatctctctct

SEQ ID NO: 576857 - DNA, 986 bp, Homo sapiens
  misc_feature (24)..(24): n is a, c, g, or t
  misc_feature (69)..(69): n is a, c, g, or t
  misc_feature (74)..(74): n is a, c, g, or t
  misc_feature (248)..(248): n is a, c, g, or t
gcccgaggggccgttaggcgaganagttatatctttgagaaaaggctgggttatgtgttgcgtaacttnccagnacagtgttcctatctgtgtatctgcccttctccttgggatactaggaataaagaagtgatcattgtctacgttgaaagcatctgccgtgtagaaacgttatccatgtccggaaagattctgtttcatctctcagattacttcattgttcagtggccggctctgaaagaaaagtntcccaaatcggtgtaccttgggcgaattgtttgacaaatggcaactgacttctttagaattttgcagttaactagatcatgcactcaaattggggggaaaaaaaccctacttgtttctcgtcacggcgtccgacagtcctgagaatatgtgatggtaaggaactaaaacccgacccgatgacctcactgacaaacaaaacacaaaacggccctccccccgcctcctagtcggagccttgccggccgccttacctttaaggaggcggtaaagcgcgaccctcccgcaccgacacccgcacccacgaccgccccctctagccaagcgccccctcaccttccaaggcagtcacacctcgatacccccacttacggaattatctcagaatcgaaaacctccggagagccaccaaaccgctcgagcactgactcccgtccctgcccttgagactgcgattgcccaccgcggcgtgaagagataactagtgccctccttctaccgagatactcgacatcgcccggcaacaccatactgttctggctacgacacacgagcgcaccaaacccgccactccgcgccctcttccgattacgttctccccagccctatataaatcctacagctgccacaactaccactccgcatctactctgtccacggtaatcatctcagccacacgcgtccgacgtactacacgtcccccacgccacttcgcgtcacccaatcatatatctctctct

SEQ ID NO: 576858 - DNA, 459 bp, Homo sapiens
acattactaagatagggggaagatcttagaccagggggaggacttcccagcttcagagataacagggatcgccaggctgatggaaaagaacaggatgagtgacgggaagaaggaggagctccagaagagcttaaccatcctgacggccttccaaaagaagggggccgagaaagaggagctgtaaaagggctgtctgtgatttcccagggttgggggggggtagggaggggagatgtaacctggtggttgtgagtcccttgtggaatataggggggtagggggaaaggggtattaacccacgattctgagccctgagtatgcctggacatcgatgctaacatgaccatgctggggatgtctctagcgggtcgggggatagcgggagcacttactcaggttggttggtgaattgacacctcagagggattgagtgctatagagaggagagaggagtgtata

SEQ ID NO: 576859 - DNA, 224 bp, Homo sapiens
gtagaagatatcgttagggacaccttaagaatagtctacatacttttctagggttgtcaacaggaactatttagtcacataactaactatcgaggcactggaacatacctgaactaggagttaaatctattactttatactcacttaagttcaggagtcccatctaagacacataggtaccttatctgagactcttgcactcccccacccagggcagaaatgag

SEQ ID NO: 576860 - DNA, 134 bp, Homo sapiens
tacgaactgagttagacgagggttccttctttcattattcttgtggatatagagtccgcacagatcggtattaagttctatctttagaagagtctagataagaattctagctagtgcaatcaccgctacatccg

SEQ ID NO: 576861 - DNA, 223 bp, Homo sapiens
agcctctttcctcagcaggccggagtgatctgctctcatctgcctgctgcagatgttccatgatgtctgtcataggcagagggtgtcctggtgtgagacaggctgtctcaccgaaggctcttgttcagcttctcttagttttgtctgtagaagagagtcaggctctgtagttgtcagtcagcaagcctagcttttgagagtactgcgtgtttctccagatctt

SEQ ID NO: 576862 - DNA, 808 bp, Homo sapiens
ggccgggacagggtggcgctttgacgagtttcagtagctgcagtcgggaccccccggcggcttcagagcagtggtggtgtacctggcggatgtctggaccatcatgcctactttggagagagtgggtgaggtgcctgtgaccagatagaaagctgcaagtagtgcaggtacctcccaaccgcatgaggcagaaggggacacggatgcctgtacgtgaacaggacaccttgagtgccattggagcacgcagccagacacgttcgtagacggaacgcagaaactccagaggtcagcatacagtcaggaaacggacgactgagtctcctcagttagagccccacgtccagcctctgcccgtacgaacacgtgcgtgttacattcggctatcagctccaatggcctggctgtaagagccgttggtacccatccgattggggatttgtgggagagactcgcgcgtgccagagaggggaagaggggatcgtcttagtggagcgttgagtggtggctatggcccagaatgcctagatatcgccttgggagcatttggcgtccgaggaggcggggacttatgggcgagttagttatcacacgtttgtaggtacatggaagttggcttaaccttaggaaagtccgcgttttcctctttggacacgaaagagtccgcggtggttttcggcgacaatgctgggaaagggcttttggagaaatggtggcaggggaggtggcagtggaccacagggtgaaaggtaaaatgcccaagcccaatggtgaagtggaacgtaaagcttccgattgaaaagaattg

SEQ ID NO: 576863 - DNA, 1061 bp, Homo sapiens
gctccgagcgaccaggttttgtgcgcaaaactccgctgttgtcccaatggccgtcgttaatgtcgtatcttgtgttggtaaccgtcgtgcaagaggagccgccaattggttcgccccgcttatggggagcgcccccctggttctcgcccccagttgcactggccttctggtgatcccgttttatccttttgggtgaagaagacagcagttaattggttccgtcggcaaagtttttgaatgggggaacgcggttgttatgtgtttttagattatgggttatcttatgctgttaacaaccacgtgtggtgctgtggccgcgcgtccctgtatcatgacgagtgaatcgccttcttctcgccatggatgatcacgggagacgcgcgtatgcttacaccatacggagattggttgctccacacatgtgggaaattgtcggtttggtactataagagcctttggtgagtgggttttaccacatttctatctcgtactgtattgtagttgagattgtgtttcttccacttttctctcggagaagtggttctctgtagattgaagaggtggctcactcacgaggatattagggcactcacgcgcgtgcgtcaaaaccatggctgtgaggtgagatccctgtcgcactgagaatatgcgtcttgagtggagatcccacactgggagacacacttatacagtgaataagccacgttctataaatatggtgatttattccgaaatattcgtaagcgattaccacggcacccatccacttattctgatgacccatatagtctaataactttgagaccccacaagttgtcacgagtgtggtggaatgctatgtgtttaggaaatcacgtccacgatgtggagttttttctcacagcacacctcacctgaatacctaaataatggacatacacttttttctttgaaagggtctgtataatcactttttctaggaagtatgggtatctatactaatgtttcttatatgaagaacataggggtctttgtggttctttaagaccactgtgaaataacaattggttcaccgcctggta

SEQ ID NO: 576864 - DNA, 847 bp, Homo sapiens
ggttacaggaggtctccagagccttctctctcctgtgtcaatatggcgactcttagggaaaaactcattgcgccgagtagcggaagaagaggcatcagttccaaatggataagatcactgtagtgggtgtggacaagtcggtatgggggtgtgctatcagcattctgggacagtctctggctgatgaacttgctcttgatggagtgtttcggaagataaggcttgagaaggagcatacgtgaccgcgtagtctagcaagcagtcgggagctattaattctcctgtcagaaaccgagcactcatacaattccggtgagacacctagtgacaatgaattgtagtgtcttggctggagcgcgactcatagttcctcaccgaattatgtcaggctcgtgttcaatctgggcgagggacgtgtccgtgcacgccaaggaaaggtgcggaaaaggtccgcgtgtcacctgctgaatgtccgatgaccctgtcaatgtcgtctttcataatattctatttgaattgcccgtcctatggatgctggtcataccgtatcgaagtgacctagaaattgaggttacattaaataggatgggattatagctgaactcagagtgggacatttactttgatgttatatgattgagctaggtagagactgataggtgggatttaccacaaaatgaccgggatgaatttcggggaaagtaggatgctaaatcttgtgccattgcgtgggtgaatgatgtgtggggtcaatctgttattggtgttaaactgaaatcttgggaaattttctgtccatagattaagcgtgctgaatggtagtgggatgaagggggggaaaaaaatg

SEQ ID NO: 576865 - DNA, 962 bp, Homo sapiens
gttccgtcccctccggcttgggggatccctcttcgacccggtttttgggctttccacgaggggcttttccctttggggaggcccttcgttctccctcgcccgctgtgcgtcctttggggtgcggcttaccccccgtgtgcaccctgggcaaccctggtttccgtcccctgtgttgcgccgcggacgacacctgggtgaattttcatgccctctaggagttgcaaaccccttggtgcttgtgcatatcgcttgcatttggggttgttgatctccccgtctcccccgcctccaccgacgtgtgtgcgttctcccgcccccccgccctcttatggttcatgacacccctcagggtccagaccaggaccccttgtgatcttggcccccctggatcttgagaacgaggtttcgccatctttccccggagagcaccccacattttgttctttccccgaggtggtatccacccccccgaggttgccatatccccggcgttgccaccaagtctcaccaccacccagggtgggtggaccaactggggcaccaaagagggggattcacattctcaccccaagcggcttctaacccacccgaatctgccaatgctcccttcttcacccaccccctctctgcaggtgcctgcgcggcacaacccccaccccccgattctcgccctggtgtcacactgggggccaccgcatcttgtatacccgtcgtttcccctcctgcccattctttcctcccctgcgaatggttttacactggtgcacactctggggcacagctgatgcccctggcggcccttcctggcgggacccttagaaggagaatccgacttccccccgggtgcccgttgaaaaccgttttattaactgaagttttttttcacgggccccacttttttttgtctgtcccccttttgagtgtaccccccttttataaaagaaatttttcttaagggaaca

SEQ ID NO: 576866 - DNA, 155 bp, Homo sapiens
agtagcgtacttctcaggtagttgcgtaacttctaggtcagttgcagttacttcttatgtatattctgacagtgaattctagattaccagagtggttgctcctggggatgtcttgcaggtctgtccctccggaagattgatgagaagaaacgcaa

SEQ ID NO: 576867 - DNA, 132 bp, Homo sapiens
tctcatgcgtcaattgattgtggcagtattatagaaaaataattgatttattcttgtgtttctcttttctttctttttttttagactgtgtcttgccctgttgcccagtctggagtgcagtggtgtgatctc

SEQ ID NO: 576868 - DNA, 178 bp, Homo sapiens
cctgcattctgacaggatagccgagagtgatcacagtgctcgcgtgctgaacattaccacttcatcttcgagtaggtccaaaacgacttgaaataccgcaggagtgatctgtgagacattgcggcgttgaactgacccataccaaagtgcgtcgtgacctggtaaaccctttcgggct

SEQ ID NO: 576869 - DNA, 964 bp, Homo sapiens
  misc_feature (10)..(10): n is a, c, g, or t
  misc_feature (75)..(75): n is a, c, g, or t
  misc_feature (86)..(86): n is a, c, g, or t
  misc_feature (104)..(104): n is a, c, g, or t
  misc_feature (111)..(111): n is a, c, g, or t
  misc_feature (120)..(120): n is a, c, g, or t
  misc_feature (125)..(125): n is a, c, g, or t
  misc_feature (144)..(144): n is a, c, g, or t
  misc_feature (174)..(174): n is a, c, g, or t
  misc_feature (187)..(187): n is a, c, g, or t
  misc_feature (192)..(193): n is a, c, g, or t
  misc_feature (197)..(197): n is a, c, g, or t
  misc_feature (199)..(199): n is a, c, g, or t
  misc_feature (208)..(208): n is a, c, g, or t
  misc_feature (218)..(218): n is a, c, g, or t
  misc_feature (243)..(243): n is a, c, g, or t
  misc_feature (247)..(248): n is a, c, g, or t
  misc_feature (260)..(260): n is a, c, g, or t
  misc_feature (269)..(269): n is a, c, g, or t
  misc_feature (277)..(277): n is a, c, g, or t
  misc_feature (281)..(281): n is a, c, g, or t
  misc_feature (288)..(288): n is a, c, g, or t
  misc_feature (294)..(294): n is a, c, g, or t
  misc_feature (298)..(298): n is a, c, g, or t
  misc_feature (313)..(313): n is a, c, g, or t
  misc_feature (320)..(320): n is a, c, g, or t
  misc_feature (336)..(336): n is a, c, g, or t
  misc_feature (344)..(344): n is a, c, g, or t
  misc_feature (346)..(346): n is a, c, g, or t
  misc_feature (348)..(348): n is a, c, g, or t
  misc_feature (361)..(362): n is a, c, g, or t
  misc_feature (379)..(379): n is a, c, g, or t
  misc_feature (386)..(386): n is a, c, g, or t
  misc_feature (888)..(888): n is a, c, g, or t
  misc_feature (945)..(945): n is a, c, g, or t
ggagcccctnagctcaggcggccgaggcggaggcagcggcggcgggatggcggacgccaacaaggccgaggtgcncggggccactngtggcgacagctcgcacntgcagcncgcagagcngccgngcgagccgcggcgagagcnatctcccgcggaggcggagaagcagcagcngcagcacagcagnagctnnaatngngttaaaatngagaattatnaattagcaaaagaagagaaattttntttnnaggaaaaatttntaggaagtnagaaggcnaatngattttntttttntttnaaagataagaatttnggcactngagaaaagaagggttnaaattgtnananagtttttattagnnacatttcatattatatnaaatggnaagctattaaagatctaatgagagagaaagttgtgtgaggttacatacgtggagctctttaaggatgcggaaggaaaatcaaggggttgtggtgtggttgaattcaaagatgaagaatttgtaaagaaagccctagaaactatgaacaaatatgatcttagtggaagaccccttaatattaaagaggatcctgatggagaaaatgctcgtagggcattgcagcgaacaggaggatcatttccaggaggacacgtccctgatatgggatcagggttgatgaatttaccaccttccatactcaataatccaaacattcctcctgaagtcatcagtaatttgcaggccggtagacttggttccacaatttttgttgccaatcttgacttcaaagttggttggaagaagctaaaggaagtgttcagcatagctggaactgtgaagcgggcagatattaaagaagacaaagatggcaagagcagaggaatgggcactgtcacttttnagcaagcaattgaagcagttcaagcaatttctatgttcaatgggcagtttttatttnatagactatgcatgtgaaa

SEQ ID NO: 576870 - DNA, 346 bp, Homo sapiens
  misc_feature (10)..(10): n is a, c, g, or t
  misc_feature (149)..(149): n is a, c, g, or t
  misc_feature (330)..(330): n is a, c, g, or t
  misc_feature (333)..(333): n is a, c, g, or t
  misc_feature (339)..(339): n is a, c, g, or t
  misc_feature (343)..(343): n is a, c, g, or t
acccggcctnaaattcctgcattagggacacacagtgcatgcatagtactgcagggggttcagcagggagccagaggatggctctgcccccaggccagaaatcgagacccctggttcctgccctcgtgtctgaacagctaagtgacatncttgccctgccctggttatggtgggagtgaaatgaactaagtacttgagaaggcttttctgtttgagacagagtctcaccctgttgcctaggctgaggcaggagaatcacttgaacctgggaggcgaaggttgcagtgagtcgagatcgagccattacattccatcctgggcaacaagagnaanactctnttcngaa

SEQ ID NO: 576871 - DNA, 275 bp, Homo sapiens
tggctcatctcccagtggtatgaacactcctgatctcctaagtgcaagcagtgcctgagacagtgcagcacaaggcctggaggatttgatggcacggggtcctggctctttcttctttggcatttttagctattgatgacgggaagatggggacagggtcaggagagaggtgtctctccttgtgcaacctccccctttttttttgagatggagtttcgcccttgttacacaggctggagtgcagtggcgcgaatcttgggtcactgcaacttctg

SEQ ID NO: 576872 - DNA, 290 bp, Homo sapiens
  misc_feature (79)..(79): n is a, c, g, or t
  misc_feature (168)..(168): n is a, c, g, or t
atcctcggaattgtgtggtgttatgttccatgcttgtcttatgtgcttattttaactacgtgttcgcatgttagtatcncatgggcttcgaagccactaggtttgtttcgtctaagtcccgttacttgggcttttgccacctctaggattgtgcatgtaagttaaccncaaacccctttaaagtgtgaatacggtttcatactatcaacgtgagcctttgattgcttatttgtcacatgatagccttaggacttgtttaacgccccgtgcatgcataacaccacacaatt

SEQ ID NO: 576873 - DNA, 779 bp, Homo sapiens
tggacccgcccccttatttgctccggaatctctcctccctcgccctggccctgccttctctggtgttagtgtggtgtgctgatgctgtgcctggtgtggcaactgcactgctgcctcctgctgcccctccctatccctgtgtgtgggatgttgtgctgcaccccttttatccccggagcgctagtgtgccctgcccctccgctgggtgcccacccccttctgtgctgcagttgcttagagtgctatcttggtgtgatgtgatgtgtggtgcttggtcccatgctggatgcctgcactctatctgccctgctcctggtgcaaaagctggggtgtgctgagtgtagagctgatcctgtggaaatcctttgatcctgggagccctagtgtttcctctccagccaactggtggctgtcgctgccttaatggtgatgtgagcactcaggaagaggttgtgttttgggcctgaaactctcccaatgtggcatagccccttttcctggtatggtggtctcctacacccacgcagcaccacctctccggtcgctgttggctgcctctacagcctacctatactgtccctttttccccccaactgggaattgagaggtaaggtctttctctgagaaatccagcagtagagtgaagggaccacccaagaaaactaaaaaccaatgcaccttaccagtctgtctggggacatggatcccttgctgaacttccccaagccactactgggaagtgcccctcacctcagacaccgcaaactgtgatctcctat

SEQ ID NO: 576874 - DNA, 189 bp, Homo sapiens
gctgtatcacagtcaagtttaatcattcttggaattcttgtacatgaacagggtgtagtgtggattcattatttacataacattctcctctcccttttgcctgagggagaaaggggctttctctgaagccagtagagaccctcccccatccccttatctctcctagctgaaaggccacaagcatgcctg

SEQ ID NO: 576875 - DNA, 459 bp, Homo sapiens
aactctaagtcacaaataaataaataaaagatctgtgataacaagggccattcatgatgactcataatgactcataataatttggttcaggccgggcttggtggctcacgcctgtaatcccagcactttgggaggcctaggtaggaggatcgcttgagcccgggagtttgagaccagcctgggcaatataaggagaccacatctctacataaaaatttaacaattggccgggaatggtggcacttgccctgtagtcccagctactcaggagtccgaggcaggaggatcctttgagcccaggagttcaaggctgcagtgagctatgattgcaccactgcactccagactaggtgacagagcccggactgtcttgggaaaaaaacacaacaacaagacgaggatatagtaatgtctgcctagttagtaacgttatacacactctcacacttgatgtaacat

SEQ ID NO: 576876 - DNA, 1321 bp, Homo sapiens
ggtgccgcggagccccggaactccctcggactggcagcatcccggagtgcgcaggagatctcagagtgacacaccgctcgcccgacacctcactgtctcctcccaagatgccacagaagccgaagccagagactgacagcacgaagagaaaaagacgggaggagcacaccagggcctccagcggcgacgccaacaccgagatgaaagcggcaatgacaggcacagtcaaaccgtggagacacccggactaccgacaagactgacggcgaaaaacggacagcagcaccaaaccagagaagaacgccaacaaacgacagcacaagacagcgccaccgaacacgccaaacgcgtcgagaacaacagaaggaagggcacacaacaaagcaccacaccacgcagacgcgaagaagcacaaacgggcaacagagaccgagaaactacgtcggacgcgacgacgaaccaacgtgcggccgccaacacacagggccgagagggacgcaccccacacaccacacaccccatcactggagcccgagcacggcacaaccagcgccggggaacaccgcgactcgccgcgcaaacatccgacagaatggaacccaagcgccagccagacaaccggaccgaccccagcgcgaaccaccacaaaggcacaaacaacacccaccagcacgcctgcacaaaaaccacccggggcacccccacgggacaaaaaggcaacaccgcaacacaagacgcacacagaaccgcagaccagtgccaacaccaccgacacaggcagaccccaaaggacagacacgacaaagacacacacggcacagcacaccaaagtgacgcatgcacaacgaaacaccgcacaagacagaccaacacacaaggcacaccgacccaacacacaccgccgagccacacggagcacgcaccggcaccagagacaccgtcgacaagacacaacaccacacaaagcagaacaggcacaggcacccgcggaccaaacagcgagacacacagacagccaagcacagacaacggcaacaaacacaagaacggaagagggaaagagaccaacgtgacacaggaacactcacagcacgaaaccaaagacacaggacagcgcagcaacaaaggcaggccaagcagccagagggccccgacagcaccgaaggcacccgctagaacacaagtcgaatgaccacagcaaacaccgacggcaaagggcagagacgggcaggcaagcagaaccacaggagcgaacgcgaacactacgggagggcgcagaaaagtaaaagagaacgtacccgcgcctcgcttttcagcgagg

SEQ ID NO: 576877 - DNA, 641 bp, Homo sapiens
  misc_feature (207)..(207): n is a, c, g, or t
  misc_feature (210)..(211): n is a, c, g, or t
  misc_feature (261)..(261): n is a, c, g, or t
  misc_feature (557)..(557): n is a, c, g, or t
tcccctcctttttatctaaagtgtaagaccccaccaataactcctaccaaccaaatataaaaccctttcacacctttttcaaccaacatattcttccaaccctaaatactcatctttacaacaccacttctacctactaataacatctcaccacataacccacctatccaaaatgtataccaacatcttttacaggaggtgtacccnccnnacatcaccaccacccccacaataaaaaccatcaaacacctttctccctcnattaaccccttcttacctattacacaacacccaatccgacttatgcccctctacaaaccttattatcttttaccttcatcaaaaaattctccacttaatcttattttcctatatccctcaccataccatttttacatatcttacacttcctccaccccttcactccatccctccaataacaacacactttccctatttttcattttacacaaatacctcttttctccaacctttaactacaccccctacaacactccatcctttccccaacttttttacttactataatgactctntatctaaacttagttaaatatcccaacataatttctatcctctttttattttaaactcctctttcatactactctattctaaac

SEQ ID NO: 576878 - DNA, 159 bp, Homo sapiens
ttttttttttttccccgaaacccctttttgaaccttattttaaaagaaggggggggatggcgggcttaaaggccgttaattaaaaacccaaggccctttttttggtttgtttttcccccccgaattttgccataaaaaatttttttttgtccccttcca

SEQ ID NO: 576879 - DNA, 1130 bp, Homo sapiens
  misc_feature (1130)..(1130): n is a, c, g, or t
ccatttcaactaccaagaacacaggttttagtttttgttttttgagacaggtctcagtctgttgcccaggctggagtgcagtggcaagattgcagctcattgcagccttgacctcctgggctcaagcgatcctcctgcctcggcctcccaactagctgggaccacaggtatgtgccactacacccagcgaatttttaaattatttgtagagtcagggtctccctatgttgcccaggctggtcttgaactactggactcaagccatccatcccacctcggcctcccaaagtgttgggattataggcgcgagccaccactacctggcctaaaagcgtcgttctgatcagacttcacccctgaatgtttctatcatttgctttgcttgttcatgggataatgtttgacgaaaccagagttctggctcctgcgtttcaacaggcctggggatgcggatgggcagtgactctggcgctcacggcaagtctcctcctcccaggttcaagtgatcctgtgggccttagcctcccgagtagctgggattccaggcacctgccaccacgccgggctaatcatcatcatcatatatatatatcatacacaagcaacatgctctcaaaaagagatggggtccaacatgtgggccccgccagtgctcccgacaccccggaacacccggggcaaaaccccctggccgtggaactacgcaaagagccgggccccacagggcggcagtgaccaccgaggcgcacccaacatcagcagcccaagcccccaaagcgcaccaagcaacacggagaataccccaaggcgccccagcaccccagtgacccccagggcaaagacccttggccccggggcgatcccagcagacacagcaacacaccgacaacgggaaaactccgggaccaagcgcgacccaaaccacggaacgaccaaagcgcacgaaccgccacatgcactctaccacatcaccgggcactaatcggactctacacacacccgtaattcttcctccttgttttctcatttgtatgcacaccacatccaccccccacacagctacccaacgaccacaacacatcgctacacacacacccgcatccaccaaaaaacaccaacaccagcacggn

SEQ ID NO: 576880 - DNA, 150 bp, Homo sapiens
cgtcattttgttcagttttctcatcattcatattcaggttctccttggcagctgtattctggagtctggatgtagctctctaaagacctttcctaaaattttgtacaaagaaaacccctttatttgggggggggggggcctttggggggg

SEQ ID NO: 576881 - DNA, 763 bp, Homo sapiens
  misc_feature (763)..(763): n is a, c, g, or t
gaatcgcgtttccggagagacctggctgctgtgtcccgcggcttgctgctccgttaggtggactccgcgggccttcggcagatgcacgtgcctggtggtagtctcctttctggactgagaacgatgataggaatggagaatgcccctcttcccattagtgcctttgcattgagttagagctttggctacacagcagctggtttgttcctgggtgagtgatcagtatggctatgtaaaaacatgggcagcgtgccgtccctggcttgcaaggggctgctcttcggacagtctagcctggcctgggtgcttaccagctgtatcatggatccaaggaatccgtttggggtttcctagcagccttctagctgatcgaagagtgagccaccttggtagtagatcctgcagtcccaagtcaagccttcggattgactgagacttcgtggcaatttatctgactgccatcagagaactccaatgccagaatctagccatgctgagctacttctataattcctgaacctacagaagactgtgtgacctgaataaagtgttgtcttcttattttgaaggacagatgccaggaaccttgcaaagacacaggtgcttttcgcgatgatatcggctgggaaagattgtctagacctttgtcagtggggggaggctgcccagagcgggcttgtgctcttgtggcacacctcgtgaaccgctaagccaaacccgtgggtttagtcctacctgcggaaggtcgatgcgcgccttggan

SEQ ID NO: 576882 - DNA, 122 bp, Homo sapiens
atttctgtcaatttctatggaatgcaaaggaggttcatgtaaatacatgttttgttgtaaagcttaagaaaaacaatctacatcttatactttagcctccatacttaaaaaaagaaaagaaa

SEQ ID NO: 576883 - DNA, 915 bp, Homo sapiens
gaagccagattacgactttgtcctcatactcttacagctgctgcaaagttgtgtgcatcgctaaagagagccccaacactatacagagagcaaacaatgcagataagaggaactgtcggcaaagcttgccactgaaacacaggtcaccctggaagttcgcagggttggctgtgggcatctgtagattactcgatctcgttagatcgcaggcatctgtgacatcttggcaagtgcctatgttatagtgccagatggcctgtaccatattatggaaaactgttaactgcttaatgggtaattgtcaaagaaagtaatgttgttaaatggggcgaaatagagaagttaaatttgaaggtgaatgtgttcaaatgaaaggttggataattgcatctgttactaacttagatttgcataggctcttaagtaactaggtatgtcattaggatattggggcaacaattagcagctctgactaaaatggtgtctctgaaggaatacatgtagattgtatctctgtcaaggaaataacacaacatataggcgttggtgtatggtataaactggtgaaatcttactgttctgacaagagatagcatgtatgactattgtccagtgtagaattgctacatgtatccagagtaaattgttgcgactgagcttaactatctaaattaaagacatgccgattaatcaagagactcgatacaagagggccggaacagataaaacacccatggtgatcgtgtgctccgccggaggagaaaaggaaactggcaatgagagagggcggcatgaggggcaagtgacggggtgtcgcaaaggaccgcaaagttttccatgggtccaatgggggtacccctagagcccgcgtttgcgcggagaaggcaagagattcatttgggactgggagttcaa

SEQ ID NO: 576884 - DNA, 219 bp, Homo sapiens
tccctcattgctcagtgtttgagcccagccagagccaagggggcatctttgcgtgtccctccgcagctaggtcacgcctggcccatgacaggctggaggaagtggtcaccgcagggctcactctagaggacattcatgagaccgggtgcggtggctcacgcctgtaatcctagcactttggaggctgaggtggggagatcacctaggaagccatcacga

SEQ ID NO: 576885 - DNA, 452 bp, Homo sapiens
gagcagcgcctcggactttggcgcatgtgctgctgggctggctggatagttcaagctggagcaccccactattcgtttgcaactgttgctcaacgacagcaatgccgacttgtttcgcgaaacggtcaacatcgccttgcgctttggcgtgcctagagactccagcctggtggccctgccggtgtacccgatcaccatcgcattgcctgcgccagccccgactacctggcgcgccacggtactccgcatacgcccgaagatttggcccaccacagcacgctgcgctatatgcgccggggccaggccaatagcacctggtatttccgccagggggcgttgcttcaagaagtcgaggtgagcggtgactacctcagcgatgacggcgagattgtccgccgctggacgttggcggggcatggcattgcctataaggccaaccgcgtccgtagcgg

SEQ ID NO: 576886 - DNA, 405 bp, Homo sapiens
gaatgaagacgcggacttcgtactgagtgttcagactcttctaagtggtggacaccaccaagagtgtgcagcgcacacagattctattgtgagagaaccaaagaacaaaacttccgtagcatggaaagggacccccagcaggttgccctgccggctgggttgggcagcttttattctcttattattatccggccatgttctgttgattggtccatattacagagtgctgattggtccattttacagagtgctgattggtccattttacaaaactctagctagtcacagagcgctgattggtgcatttttacagagcactgattggtgcattttacaatccccttgctcagaccgaaaagttctccaagtccctacccgacccagaaggtccaggtatgccgggca

SEQ ID NO: 576887 - DNA, 527 bp, Homo sapiens
  misc_feature (35)..(35): n is a, c, g, or t
  misc_feature (46)..(46): n is a, c, g, or t
  misc_feature (77)..(77): n is a, c, g, or t
  misc_feature (89)..(89): n is a, c, g, or t
  misc_feature (95)..(95): n is a, c, g, or t
  misc_feature (146)..(146): n is a, c, g, or t
  misc_feature (152)..(152): n is a, c, g, or t
  misc_feature (158)..(158): n is a, c, g, or t
  misc_feature (175)..(175): n is a, c, g, or t
  misc_feature (205)..(205): n is a, c, g, or t
  misc_feature (338)..(338): n is a, c, g, or t
  misc_feature (395)..(395): n is a, c, g, or t
tgccttgtgtgcgactgagatgcaggatttccttnacgcttccccnatgtgtcttagggactctggcttctcttttngcaagggcttcngaatcngtctgtgtccctgttagcacaatgtgaggaggtagagaaacagtccacctntgtgtntaccangacccctttcctcacantgacctgtgttccttccctgttctcttttntattaaaaataagaacctgggcagagtgcggcagctcatgcctgtaatcccagcacttagggaggccgaggagggcagatcacgaggtcaggagatcgaaaccatcctggctaacacggtgaaaccccgtttntactaaaaaatacaaaaaattagctgggcgcagaggcacgggcctgtagtcccagcnactcaggaggcggaggcaggagaatggcgtcaacccgggaggcggaggttgcagtgagccaggattgtgcgactgcactccagcctgggtgacagggtgaaacgccatctcaaaaaataaaaattaaaaaat

SEQ ID NO: 576888 - DNA, 786 bp, Homo sapiens
gcttcccttgaagaggaaaatttaaaatcactctttcgtctgggtgcggtggctcatgcctgtaatcccagcacttcgggaggccgaggttgggggatcatctgaggtcaggagtttgagaccagcctggccaacatggtgagaccccatctctactaaaaatacaaaaaaattagctgggcatggtggcgagtgcctgtagtcccagctactcaggaggctgaggcaagagaatcgcttgaacccaagaggcggagactgcagtgagccaagatcatgccattgcactccagcctgggcgacagagtgagaccctgtttcataaataacataaaatcactctttttactttatatattttttgagacaggatcttgtggtacgcaggctggagtgcagtggtgtgtgatcacagctcattgtagcctcgactcgcctgggctcaggcagtctgcctgcctcagcctcgtgagtagctaggactacaggtgtaagccagcatgcctggcccttaatgttgtttaatgagcatgtacagtagtcccgcttgatccatggtttcacattaccacaatttcaattacctgtttcaactgcagtcagttacttttcttaagatatctgagggttataggctcattgccttataccccagcactttgagaggccaaggccagcagatccttgagccaggagtcaagaccagtgtgggcaacatggtgaaatctgtctctacagaaaatacaaaaattagcgaatgtggtggcttgtgcctgtagtcccaga

SEQ ID NO: 576889 - DNA, 378 bp, Homo sapiens
gctgacttcaggagtcttaccacgggtgctctgtggcgctcttcgtttcccctagggatggggctccctgagagctgggctgcagtgattgttattgctcttctgggtctagccacccagttgggctaccaggcctgggatgctgctggggaatgtctgcggagagtcctgtgctgtgatccgtcttcgggtctcccagccatgggttccagcacctgctctgctggaggtggcgggggagtgaagtggactctgggggggtccttggttgtagttttgttgagtgcactggctttctcgaatgctggttatgctgcagtgaagttgtcacgtggacagactcgggacctgtggacagccaggagattgcggtgtttg

SEQ ID NO: 576890 - DNA, 122 bp, Homo sapiens
gcattgtggttagtctcgcagttcattcattgcccccacaatcctaggcctacccgccgcagatactgatcattctatttccccctctattgatccccacctccaagatatctcatcaacaa

SEQ ID NO: 576891 - DNA, 171 bp, Homo sapiens
agacgacagaaggggaacttcagcatgaaaatattgtagcactctatgatgttcaggaattacacaactctgtctttttggtgatggagtattgcaatggtggagacctcgcagattatttgcaagcgaaagggactctcagtgaagacacgatcagagtgtttctgcatc

SEQ ID NO: 576892 - DNA, 364 bp, Homo sapiens
  misc_feature (334)..(334): n is a, c, g, or t
tcaggggatacaagtgagtagtgagagaacatggctccaggaaagcacagaggaggagagtggagatcaggccatctccaggcttatgctccaggcaaatatcctgcagatctgtgaccatcatccaggcctggttcctggcgaaccaggttatctcttcatcctttacagcaactagcaaactgcctgctccctgaatacaggctgaatgaccagaggttcagctcaactttcccacccggcgtccaccctcagggcctggctggtggtcctgagttgcccagcaatcccagttaccctctcacaatttggaaagagagtgttcacacaaaangggaacatgttttactctttgcacgaaact

SEQ ID NO: 576893 - DNA, 358 bp, Homo sapiens
atttcggtgtaaaatacttaaatttagcttgtccttcggggtttgccccgccccatccagccagaccccacgctgaccatgcgtcaggggcctaaaggtggagttcttagctatccttggctttcagagccagcctggctttgccccctcccccatgggctgtgtcctaaggcccatttgagaagctgaggctagttccagaaaacctctcttgacccctgcctgttggcaggcccactccccagccccagccccttccatggtactgtagcaggggaattccctccccctcccttgtgccttctttgtatataggctttctcacggcgaccaataaacagctcccagtttgtatgca

SEQ ID NO: 576894 - DNA, 118 bp, Homo sapiens
ggtgatacgtccacctcgcctttctgtgccctataaactttactcttctgtgaaatggggggattttctgggaccatccccatggcagtggtgtttgagttttttgatgtgtccccat

SEQ ID NO: 576895 - DNA, 431 bp, Homo sapiens
  misc_feature (92)..(92): n is a, c, g, or t
catttggcagcagatgtggaagatcaaggaatgcctctccctcaccctacagccagctcaaaggcccagaagactgcagacacggagggagnacactgaatgtagaatagcaggctccacccccaatctacagccagaccccacgctgaccatgcgtcaggggcctaaaggtggagttcttagctatccttggctttcagagccagcctggctttgccccctcccccatgggctgtgtcctaaggcccatttgagaagctgaggctagttccagaaaacctctcttgacccctgcctgttggcaggcccactccccagccccagccccttccatggtactgtagcaggggaattccctccccctcccttgtgccttctttgtatataggctttctcacggcgaccaataaacagctcccagtttgtatgca

SEQ ID NO: 576896 - DNA, 218 bp, Homo sapiens
aaggtaagctgtcactgtcctattaaaataattactgtcaagtcaatggcaccaactctgatgctctgcctgtgtatcagtaacagtccaccactcatgtctccaaatttctatggcgtcattgacggtttaatagagcatcagatcagagtgtgctaaagagcattactgtgctgacttgccataaatctcattcaaaagcaaagaatcttgactgc

SEQ ID NO: 576897 - DNA, 164 bp, Homo sapiens
aggagactttgttaggagaaaattgaaagtaacttacagtctcgaatgtaattgcgaatcttcacctcagagtggagttgaaacttgctatagcctaagcggctgtttactgcttttcattagacaattgctcacatatctttgggcgaggaggagaagcagca

SEQ ID NO: 576898 - DNA, 104 bp, Homo sapiens
gtgagtagtagatgctgatagtaggatatataatagttaatacgatggtatgtagggttgtacggagaactgctattatcatcctatgctggtattgaggagta

SEQ ID NO: 576899 - DNA, 118 bp, Homo sapiens
cgtgtgtactggtcggctgtgggaggtggtggatcttcactgactgcctgagcttgtcatgcgggcaggtagtgtgttgtgatctggtgatctgtggctctgtagcaagtggtacatt

SEQ ID NO: 576900 - DNA, 1439 bp, Homo sapiens
gaagaggtttcactgtgatgtaggtccgtaccgacctctcattgacataaggaggtcggtgagcctacggtctcaggcctccagtacacatggccatcagcctgtagcacctaacgtgctgactctcggatatgggcagcgcgaactagtcttaacgcggtggtctcgggtgcgtagataacgcgtcggcggtctagtaggacaacttcagaaggcccatttccagtacggtcctcttgcgacttggagcatcagaaaccttcgttgcatgaagacggcccatgagtcggaacgaagctggagctgacaagatcatattatgttttgctcaagctgcttagttgatcgaggtaccagctacatggatggcgttcacatcgggctttcgtccagtgggctccttgttttgcatcggtgaggttagcggcgctgttggaagtcgtttcattgaccttatctgcgcgccgtaagccttggttcctcattgaaagctcgtggaaggagctgggctcgccttcggaggtgatcgttagacctcggtagggtccttgtgttagccaatgtgacggggcagtcatcgaactgtggtacgcgagggaaggcaactaagttaccaggacacaatggaagacgttacgttaaacggcatcaaagcaaccaatggagaagcttacttgatcaaagaaccccccctttgttattgcatatggccgaattggacggaatagcgcatcagttagggccaatatgcaataagcccgcgaagtacacctatttgttccctgcaagacttctggattggcatgtccaccagttaataatcattatgtgcatcttgtctggacaatactttcacagggatactcgacaaaccctgatatattagcgagtcatttccacatcgttagagtggaatagaacgaaattcattgaggaagaccgtggcttgcgtacagcgtttcccagttcaccaaggaaaccccgaaggtggatgccactttaaaccgtagaccgtctataggcacagggactatgaaccagagcaaccaaaaagtgacggatatttcctttaattcaactgtttcttttatggggcggacttctccctttgagatatgcgagattctccatgggatattacgttccccatggaagaaaacttcccaattcgaacctgctacattcctaaagcttggcagatggaaaacaccaaataagcttgtccccgagacaacgttgacagcaaggaagtgggggacaaaacccagtgtccctatcaccaaaggagaacgtattccctatggcaagagtggtacccaatcatttagtaaagggaacatattatggagggttgacacatacaagttatgcatcaatatcccaggggtatctgtgttgacagaaagttcagagtagaccgttacgcgacactcggcaac

SEQ ID NO: 576901 - DNA, 400 bp, Homo sapiens
ctctttgagtgtaccttggggacagagagataataaacaagataaatagtaaaataaattgatagtttgacaatgataaacgacgagaaaaataaagtcaaggaaatggtataggaggtatttggggttttgtaagagatagggtcaaagaacaaacactggtggtcaggtcatttaaggtcttgtagatcattttagggacatctgctctgagtgagatggagacccattgggggattttgagcaaagatgtaaaatgacctaacaacgtttttacacaatcattgtggctgctgtttacaaaatactatggtaggggtgaaagtggaagtaaagagaccaattagagggatgttgcagtcattccgccaagagaggatggtggaatgacaaggcaaaa

SEQ ID NO: 576902 - DNA, 162 bp, Homo sapiens
cgccattgcagtatgatattacggtgtagagtgaagtcatatatagctcttactattttgagatatgttccttcaataccttgttattgcgagtttttaacatgaagggatgttgaattttattgaaggccttttctctgtcttatcgaggcaatcaagctt

SEQ ID NO: 576903 - DNA, 937 bp, Homo sapiens
ctgtctacgctgtttacgcgtgcccttcgcttatttgttttactgtctcatccgcattctagattgcctttggtccgacttttcgtaacgtgttaccgtactgcttgtatctcatagtacctggtgcgtgcttcgaggcccctcttacttggcagtccaatcctcgttcagttcttgggtcagtgtcgcggcccatgccgaccttgttacctttcccgtctgtttgcctgtacctcacttatgttttctgtacatcactttcctgtttctgtgccatgagtattattcttgccacgtggcagccccagagtgtgcctctgaacctattctggttcttagggttgcctgattcatatacttgatttttgctcaagttatactctgttagatttacgctttttcttttcgtttaactattctattcatagctttttttttcttttttcagagacagtctcactctgttgcccaggctggagtacaatggtcacgatcatagatcactacaaccttgaactccccggctcaagctagcctccagcctcagcctctgagtagcaaggactgttgccatcatgcctgggtaatttttgtatttttttgtagagataagggtctcactttgttgcccagggtggagagcaatggctattcagaagtatgatcattgcacagtacagcctggaactcctagcctcaagggatctttcctccttggcctccacaaagtcctgagattttaggtgtgagctaccacagcgcggccctattcatagcttttactttcgtttgtaattgtgcatttgaacagtgcgttacttgaatgactgactttcacactagtctggaagttcctttatggcagacaccttgttttcctagggttagcacactgaaacatcacaaagaaacatgcataatctcagtgggggcgggg

SEQ ID NO: 576904 - DNA, 158 bp, Homo sapiens
gttacttgatcaattttctaaaataaggtttttggacaatgacagttagataagggaagaacacatggcggaatgaagtcctaattattatacgtgcatatttttttgacagtagggagaccccttttacagataagttacacacaaagaaaaggcaa

SEQ ID NO: 576905 - DNA, 213 bp, Homo sapiens
ctctctacctcatgggttcaccatggaattccgggacaatccagtactcagtcccatcacggatgccccacccagccacggaaacgacagggtttatatatgtggggtccgggtattcggcatagatgcctccggggtagttagccagtctttctgtggccattattccacagcggaggggaccattggcgtagatttctgccatcatcttcg

SEQ ID NO: 576906 - DNA, 331 bp, Homo sapiens
  misc_feature (1)..(1): n is a, c, g, or t
naaatgagaattggggggcgggggcctttcctgtgtcttgggggggtgaggggttcaacatcgttaaggccctccccaaacgcaaaccccctttttttaaagcccattgggcatttcccttaattcctttatgccaacttggggtttcatgggttgttttttcccccaaatttccccttagggtctttaaacccccgggttaaaattgatattatgaaaaattttttaacccaaggattttataaggttgggggctttgttttcctggaggggttgccccagggaaaccccagttttgtcctttttttttaaaaaagtccccccttgttta

SEQ ID NO: 576907 - DNA, 124 bp, Homo sapiens
ggatctagaaaatagcctgaaaaaggcaaatctaagagttattgatcttaaagaggaggtccaagggtaggggaaggtagaaagtttattcaaagggtagtaccaagaccctcccaaccttggg

SEQ ID NO: 576908 - DNA, 290 bp, Homo sapiens
aaacataatttcatcaagaagctgtgatggatatacagatctgttcactctataggaagtaactctaacatgatcatggagatggttagatctgggggcagacaccctacctaattaccatggcaaaggctcccagatgtatgggtggtgttgcaacatctactttaacagactctgcagcatgggtgttgcataggtggtgacgagcctgtctgctctcagtcgcattctgaaggtactggatgcctccacagcgttcccagattttttcaacctgttttggccagatc

SEQ ID NO: 576909 - DNA, 599 bp, Homo sapiens
gataaggccaaaaacaaccagtggaacacacgagagaagacccttctcgaccacggggaagcatctgccacaaatgtgatcgggaataagtatgcctgctcctttgcatatcattctaggagcacggtgaacaaatgaatcgctactagcacctaatgggaacatggtgtgaggaagaggtcagtaacaggttactatcaaacaagggagttccctacgatgtacgttgtctaaaatgctctacgcttggctgtaatctcgtctcaaaaacacagggttttggtaacagtgtggtcccaacaggaggacacattcatgaacttcgcatcaaaagacaattctttatacaacagtggctaaaaatgggacttcttttcacattcttataaatatgaagctcaccctgtgtgcttacaattttttcaattgtgtattttccaagtgtggcatatgtgtacacttttcgggggatatgcttagtaaatgctacgtgtggattttctggaggttcgataacttggctgtgcagtagattttctttaaacagaatgggcagttacatgccataccttcaaaagtattttcctgtaaaaaaaaac

SEQ ID NO: 576910 - DNA, 835 bp, Homo sapiens
  misc_feature (15)..(15): n is a, c, g, or t
  misc_feature (235)..(235): n is a, c, g, or t
  misc_feature (245)..(245): n is a, c, g, or t
  misc_feature (258)..(258): n is a, c, g, or t
  misc_feature (268)..(268): n is a, c, g, or t
  misc_feature (303)..(303): n is a, c, g, or t
  misc_feature (340)..(341): n is a, c, g, or t
  misc_feature (525)..(525): n is a, c, g, or t
  misc_feature (600)..(600): n is a, c, g, or t
  misc_feature (636)..(637): n is a, c, g, or t
  misc_feature (657)..(657): n is a, c, g, or t
  misc_feature (701)..(701): n is a, c, g, or t
gaaacggagggcaanaaacaaccttacggctaggtaagcgaggccgggtgttcaagactcaaaagcttattaccacctgcttgagcaggtggctccaaaaggagatgaagaaggtgtcctgctgtgttattgacatgtcaggactgcgggagaaggatgacatccagagggcagaatgcatgctgcagcaggcggagaggctgggctgccggcagtttgtcacagccacagatgnttgtccgagnggaaccccaagtntgaacttggncttttaattggcaagcccctctttaacagaatacncgctgccctgcgacaaaccagaaagaaccaggacatnntgactgggggtgctccttgaagcgtgagaacgagacgaagaagcggacatttaggaaactggatagagactcccctgggtgttaacgcctcgagctcaatcactttgtaccagtggacttatacagatgccccctggtcagtcgttccagctcctatgaaaagatcaaacgttccctgttgacntggaacagaggtaaactaaaccggcgataccccagaactggggagcgcaactatgaagaaagctttgagaatttngtaactacgccggtagcaattggcggaagacatcannagcgaagttctcccctggtntggcatccggctggagcaagatcctcagatgaagcgagaaccgnactcctcagcactggccttgaatttggcgagctaatgcagacaggtatacactggagatatcctccgaagaaactggtggtgggccagaaggtccatgatgaccttattgtcaactgggtgatgaacattgagg

SEQ ID NO: 576911 - DNA, 1107 bp, Homo sapiens
tttattactcaagagcgatcttgattgttcgttacatgaacacacggaaattgtataaaccattatagatgttgcaagaccgatgcagttttgccttttctcttttccactaagagtttttgttagttggtagtacgtgccctggcttgtaacacagatggacatcactgaaaggatgaaatcaagtaggcttgtttcaaagagactcctgtgaatcaactatgaatatgaacgtatctcccagaacacatgttgacgtgtttcacggagactctgaaacagggcacccattttttgtttccttcctcaaaaatagtctccttgaaatgtgagcaaagaactatgatgatgcagtccaggtatctaagtagcgtcagatcacgcaagcaccgtgtgagaatggtacttataccagcacaaaggttcaaatacaagtaacctgggcaatgccaacagaagacacttgtaagatcatttgcagaccgtttctggtggcaggaaccgtgagggcaaaagacaaactggtgaaacaatgttccgaaattagatcttttgtgatgttcatagccagatattcagtatttcggtatggtttacaatggggggaaaatgtcggttaagggtaatcatactgagtagataagagtagcgaattaaaccaaagggaaacttttaatacagtcatttgtaagcccgtggtttatggctagttcccttttgctcaaggaaaacatagtactacttcagggtcatgaaaacctatgatccactgtcgaatcttcccggagacgggttacaagtcacaggagtgaatcctaccggaaaataactaggcgccagaaaatggagccggaagactggaaacggtcgctacccaactcgacaaaaaacgcgtaaggggccacaaggaaaaccccggcagaccgaattccacagaccccagagagtccaaacaaaaaagacgccgcccatagataaccctagggagaccgaatacacgaaccactttcacaaaacacccaacacacacaatagagacacgaaggaaacaaagtcacagcagaacacgggacagcacccatagagatgacaaaccaaatcctacaa

SEQ ID NO: 576912 - DNA, 210 bp, Homo sapiens
aaaatccccgttttttgggggcccccccccccccttccccggggtttttttgtttttggggggttttttttttttgggttttaatttggatggttccctggggttttgataagttgggtcccctgggccgtttttggcccccttgggggtttgggggccttttgggccccccctttttttttttttgttggtgggccctgccaaagccca

SEQ ID NO: 576913 - DNA, 494 bp, Homo sapiens
ccggctattggtcaatctgcgcgcgtatttgatgctcaacttgcgcgagcgcgtgagactgcttgcgtggcacaacatatggcgagcctctggtcggagcgttttgccggggacatgtcgacacagaagcgcctgactgatcactttgcgcggctgcttgagcgcccgtttgtcgggccgctcaacgaggaacgggtggctcaggctcgcgaagcactgaggggcgagtcattggccgacgtggtgtatcgggtactgcgcgaacaagctcgcgacctggaacccttgcgcttggccgagggcaatgtatttgctggtatcgccccctccgtaccgggtttctataccaaaaggtatctgcagtactttgagacgcaggccccacggttggttgacaccattgcccgggataactgggtgctcggtgagggtgccgacctgggccatcaagatttgagtcggctgatggcgcaattgcaacagcgctttttcag

SEQ ID NO: 576914 - DNA, 823 bp, Homo sapiens
agcctgccataaattcttatatgacgaggattgaatgccctcgccccccccaaggaaggttctaagctcacaaacacgggggcccacacacgggagggttccgagaggggatccccttctggagagcctgctggagaatcaagaatgggatgggagttcgagatcgaagagaaaaggtcacacatgtgcacaaggtggtaatcacatcgggcgcaccccacacccacagagggccacgagtcaccccctgggagttcccggcccctcggcttatacggggccacgaggaatcgcggctggagcctcgctattaaaaatgtggaattgtaccacactcttccctcgtagaccgcgccgccccacgagacagaagagtttcgagatgttgttttcccacactgatttacactcatggcgccacgagtgagacctctttcttcttgaggaggggttttgagacttgtgagagagctatgtggccccgccccgatatagattttcacggaggctgagtattaactccactctgtcacggaggacatggaatgttggctcgtccctgataaaacccgtaacacttgtgcctcggcccagggagactttcgacgagaaagcactaaccagacttgttcatcacatgaaaggacgagccacaggaggcactgaggtgtttaaccaagtgacccttctccttccctccaccacacccacttacggggctggggctttttttgcaccccccgcacctttgtccccaaacctcatttccctttttttttaccccggattggttttttccaaaaatagaaaagcttgaatccca

SEQ ID NO: 576915 - DNA, 243 bp, Homo sapiens
ccggtgaaacgggaggacaatccatccagcccacagaggcaatccaagctgtctagaattcagggatcaaacgagggctacggaaaggagagacgacctgacctaggagggccatgatattctatagaaccggacaaagttggtttccaaggaaacttgattccttggaacccggaaagttggttcttttcatatgcaattccaaaccctgagctccttcccaaagcctgcctggccgccagc

SEQ ID NO: 576916 - DNA, 959 bp, Homo sapiens
ctatcacctcaaaacctgtcctctaaggcaacggatagatagtcctaccttattaggatacgttgctccatttcgagatcaacatagattgtcgataccttaactctgatttgcccaggtatatacaagaagttacaagtggctgcttcacaactgcccagataagcgtatacagcttagatggagaacaactctatatcctcgtttcccggagtcagcattctaccaggacttgtgtatcagagccacagaatcaccactgagcctcatgctacatgaaatgtacaatagggagcccagatcatgtgaggacatgttcattgctttttcctgaggggaaggactgtgacctgccataaagactgaccttgaagttcagcctgggtgttacaggatatacatcactcagttactattgattcaaagttgcggtagtgaatccaggaagccagtaactgactaggagtagtctggtatcagatacagcttccctcactgtgctacagaacgcaagatagggaataggtggtctgaacgtggtgtctcactctggaagaagtcacgcgaatgtaagatgatgaatagagacaatgtaatactgttggtccaaaagcatttaaaatcaactagatctagggattatgctggccttaggtagtctggcttgtcacatctcttcgcctatacagtcgatccatgttaccacatagtgagtctcttaagtttaggattcagtaacagtcaagtgtttactatgtgcaaacaggtattgaagttcttatgaccacagatcatcagtactgttgtcatcatgtatatgctagaatatctgaaataggtccactcgttatgcatatgttaaaaatcgactgtgtgaaatagaaatgagtgctatcggctcttgatatctgcagtgtccgttatgagtgccaaaaatataccccggagcgagctacaca

SEQ ID NO: 576917 - DNA, 341 bp, Homo sapiens
ctccccccctttgacgtggggggtggcattgccctcaacgaccactttgtcaagctcatttcttggtatgacaacgaatttggcttcaacaccagggtggtggccctcatggcccacatggcctccaaggagtaagacccctgggcccccagccccagcaagagcccaaaaggaaaaaaaagaccctccctgttggggggtccctgccccactcagtccccccccccattgaatttcccctcctcccagttgccatgtagacccctttaaaagggggggggcctagggagccgccccttttcttgtcccctcaataaagtaccctgtgctcaccccgttta

SEQ ID NO: 576918 - DNA, 253 bp, Homo sapiens
  misc_feature (184)..(184): n is a, c, g, or t
  misc_feature (217)..(217): n is a, c, g, or t
tcaaagtatccctggcccgacacacttggctgacttatgttttgtgggcattttggcaggaattttgtcttttcaaagactcatcctcaaaacaagacttgaccctgtgtccttgccccagtcctaggaactgtggcccccaaaaatgttcattttaaaaacggatttcatgaaaccctcttgnacttataaaaaagccctgggtagccaagtgatnttcccattcccaaagttagtaaacctttgttctcca

SEQ ID NO: 576919 - DNA, 280 bp, Homo sapiens
aaatacaaaaaattagccaggcgaggtggcgggcacctgtaatcccagctactcagaaggccgaggcaggagagtctcttgaacccaggcggcggaggttgcagtgagctaggatcatgccactgcactatagcctgggcaacagagggagacttcgtctcaaaaatcaaacaaacaaacaaaacaaaataagggttaatgggctcttgcatgagtccttaagagcctctctattgagtaaggaggaataaactatctaaataaggcattttcatgacat

SEQ ID NO: 576920 - DNA, 146 bp, Homo sapiens
aatcatatactgtggctgtattgagatctgcggcatggatgatgactcctagaggtttttcagcctcttcttctggcagtccatccttcatctctgcccttgaggagttcatattttagtgggtttcagacacagacatccgcact

SEQ ID NO: 576921 - DNA, 179 bp, Homo sapiens
actagtaagaagtcacagcgagtaatacgggtttgcttcaatgtggcgtttggggacatggctgggtccttcacctacagcctgccgcccaggttcctgctgcaccacccgcagccccgtgggttgcccatgcttctgtcatctgcctcatcaatgctattgaaacttctaaaactagg

SEQ ID NO: 576922 - DNA, 203 bp, Homo sapiens
tcacatttgtggttttatcatgtttctttttaattggatgggtaggggtgactgttttaattgggctgagaggcaaacctgaggacaagtaactcaacttaacctaaagtcagacttcaggattcaaaaaccctgaaagcgtcctagactgggctcatggaaagggaaaactgactccaatttgaccagttagtttctattgt

SEQ ID NO: 576923 - DNA, 836 bp, Homo sapiens
gcttaagaagctggatctcctgccgggcgtggtggctcatgcctgtaatcccaccactttttttttaaggcaggcggatcacctgaggtcaggagtttaagaccagcctgaccaacatggagaaacctcgtctctactaaaaatacaaaaattagccaggcatggtggcacacgcctatagtcccagctactcaggaggctgaggcaggagaatcacttgaacccaggaggcagaggttgcagtgagctgagatcacgtcattgcactccatcctgagccacaagagcaaaactccgtctcaaaaaaaaaaaaagaagaagggtggatctccaaccaggccagagaaagattctcacagaaggtttggaactctagaattaaatgggttgggtaataaattggcttctggttcaaaaaaaaaaaacaaaacacacaaacaaaaacacaacaaaacaaacaaacaaaaaacacaaaaaaaaaaaaaaaaaaacaaacaacaaccaaaaacaaaaaaaaaaaaaaaaggggggcgcgccagtaaatagaccaaagggagagaaaagataacaaccccaattttagtaaaagggggctcaaaagaagaatgataaagaaaaacacaacgcacccataaacaaaaccctgacgaaaaacaacaatgaggaaaattagaaaacacataacgagaggagaaaacatgccgccaacacacacgaacaattaccacacgcgcgagagaaaatacacagagagatataagggggaacacacagagtattagcgcgagaaaaaatgtacgagaaaaaaagagaacacacgcgggacgagcaatagg

SEQ ID NO: 576924 - DNA, 246 bp, Homo sapiens
agctgagaaccccgggaacaagtcaggacaggaatgagcttctgcaaaagtacaagagcctctggatgttcgaaatccccaaggagtagagtgaggctgacttccttagaaagagggggaagccaatggcctgtctccccactaccatccccaaacgctccttggggcgtggttcctgtggaccccagctcagctcgtcaagctgcaggggcggggctcctgtgcttgtactgctgtgatgggggt

SEQ ID NO: 576925 - DNA, 1071 bp, Homo sapiens
gtcctcgcgcgctgatgtgtgcacggcatgcgaaggatgcagtcaagctctctggtaccttggaagcaggcctgccgtcttcatgtgcactctcctcagtcaagtcagaccccagctatgcaggttggctggacaatgacgctggggactctcgcagacggcaaaacgaagggctgtgtactaattggataggctggggcaggccgggtgaatgaggttagttacgagcctattgccctgctacatcatacgagccaagtagcatagagttccgaccagtgtccagctgtgtgcacgaactagtgcacatgaaacctggtaaagcaagacgtcactgcagaatgccatggagactagtgctgggcaagatattgcctgactaccaacaaacgagggaggaacagtaggtcagaccagagttgggcgactggcgctctgacgggagaaaaggatgcctagagctaactagggaaacggcttggatgtacattgtggacgcatcgggtggtacactattcctatgacgaggggagctgtgatagtagcgcgttgcaacgctatcccatgtgaggttgagtagtagaccaatgtaataggccgtcaagtactggcgttggttgagttttgctacaccgggacgtgtgagttagtcccacgaggtacggcatgagcttcgggagtccggttcttcttcgttaatgagcccattggtcgccttggctgtgtttcccgctcaaagacattggggagggcgattgcgcgccgtatgattctcggcgagttatgagtgccataggggtggagagaaggagttccaatgcaacctgggggaatcgcttccttatgtttcccccatcggagttgaacacaggagtgcttagtgagctatggtggatacagcacctttacaaataccgaaggggtggaaatccttcggggagaagaaaactgaatacgggcgccttctttgggacataagaggacgtcgtgctcggggaacacgctattccccggtgaccctaaaagttggtcagaaatgattcagggaattaacggatttgatgaatcccc

SEQ ID NO: 576926 - DNA, 1318 bp, Homo sapiens
  misc_feature (115)..(115): n is a, c, g, or t
agcggagttgctgctgtctccctcccagagtgacatggtgttcggggcttgtcctgtcctttcattcacttcccctccttccagccggtgggtggaaccgagagagcctctccanggagcagcgtacgcagtccagaaggctgcagtatttcctccaagaaaaaaaaaaaacaggggctggcttcaacccctggttggcaagcaaaggtcccgattccctctggctgggctatctcgaatagcaaggcgattttggcagcaacggctggtgccgtgggaactggacctgaagaactcaaattgcggggcgggggagattattccttatccctccttccattttacccaagacaaggagctggcttttgggtccctcttttggggccaaggtcccaagggtggagggattacaatggagaaggaccttggcctttcttggaaaacccgggagggcaaggcccttcaatcaggaccaccagggtctggctggccaaccattggatgttgggacggggctcaagccttccaggaattggtgaggacattaccttggtcacggtcggcttaacgccacatcaagtctagtggtacatgggttatatagcaatccgtggaacgtggggtggaacacaaacgcacgcgaacacacacttttttttaatacagtgggccatactaacccggttatttacctactagtcaattaaaattatttcctcaaaagaatattcaccacaatatccctggggaagaagtgtgcaccgatttttcaccgaccttttcgcaacagagcgagcaaattgtggaacaccatgtagggcggttgtaactcaccccttattccccagatgtgtgccccacgtgacacacaagcgtgacacagggaaaaaatccacgagacccgattggtgcgtgatgggaccaccaagagatgtagatgccccagacaatcaactatggggggcaccatacaagggcgggtatctatgggagcaaaagtgcgggtcggatcaaaaccgcctgctggtggtttagcaaggaggagaagcggagttatttataagcgtacacacaaacgacaatgggtttggtatggtgaggcgaccacaatgagtgtcgcgaagagtgaagtttttactaaaaacaacagtcgtgtgtcatacaagtggaatcgacacacaacaagagtataatcagatggatcacacaagactggttacaaatgacgaattcatgcatgctagtgtcgttctcctctttctctttctttctcctttctctgtttcctatctgtgtgcagaaagaacgaaggagcgct

SEQ ID NO: 576927 - DNA, 812 bp, Homo sapiens
ggctgctcccaaatggaggaggctgtcctgcgagcacaaggtaacgaaggaagctggtcctggtgcttggaactaacgtattgaactggctccccaacggcagtgtagtcgagacgacaactggcgtgagattgacctgtcgagaatgagttgaccaaccgtgagctttgcaagggcgcaacggatacccagacatcacggtcaaaatacatcctgatactcggttgccgagtgtgtccagttagactccgagggccatctgagttcacgtcgtcatgagagaagggtcagaagcgctgcttaggagctgaaagacctcatgtagggtactggggaacgtattgccgccttggtgaagtgcgcacccactattcgtgtgggtgttgtgggtcttcccaagggttgggcaagcagcgaagcctggatctaatgaggcctgcaagcgctacagcggcgcatgacgaatcggtggcgagctgttcctggcaattaccacaatgtcatgcgagagcagggtctaacgctggacgaaggttcagtccggtctctgtggatgctgcccaggctagttgctcgcgcaggagccccaaactcacgaggtgggcagcgaatcctggcggtaaccgtgcaggtccagcgtgcagagagctggccagaacacactgtgacacccaggtggagatcgcatcctgctagtgctggcaatcctggcaggagatttccacagtatctatggcggtctctgggttccagaacaactgatgacacgtttctgacggcggatggtaccaccgtttgggggaaggaagaaa

SEQ ID NO: 576928 - DNA, 445 bp, Homo sapiens
ggtcacgtaagagtctgggaggtttacgcactgctcaggaaacagtaaagacttttgatcttgatggattctcgctctgtcacccaggctggagttcagtggtatgacatctgctccctgaaacctctgtctcccaggttcaagcagttctcctgcctcagcctcccaagtagcctggactacagacatgagccaccatgcccggctaatttttgtattttcagcagagagagggttttgccatgttggccaggctggtctcaaactcctgatctcaggtgatcggcccgccttggcctcccaaagtgctgggattacaggcgtgaggcactgtgccgggccatgatttatttgttttaaatgaagtgtctggctactttacccagggtatactgaagagtatgcgtttcttagaaaatagctcaaggggtatagacgcatgaaa

SEQ ID NO: 576929 - DNA, 1044 bp, Homo sapiens
gtagcttttctgtaggtcctacttaagggtggccccgtcctgtggggatctctgggatgtttgaggctatagctctgttctaatccaagcacgcggggaaatatgcggcggcgtcgaggtggaagcccaatatctgtaggtgtcagcctatgatgttcatcggggctcggaatcaacgccgttgagttacgggaatgtctatggaggtgagggtaagcgagttagaatcagcggccatggcggcatagaggctactccgcggtttcgcgggaataagtgtacacccgggggaggtaggtccggttgcggaagcccgcaatcggtcgattcctgcctggtaagcctctgtgtgaagccgaaggtgtagaagtgtggagcctgggccccggtggacaggagggccgggggtcataaggcaccgagggcaaggacgcgaggataggagcgcgctgatgggatgcctgttagagtgttaggtgtagaggtgcctattagtaggtagccgtagagcagagagcgccagcaggtcgcgtatggagctagcgcaaagccttgcagtgtagaaagagtgttcggtttggggcgagcctcggagcagaaccgcaagcctccgagcagtacatgcgtaagaacttcagccagtcaaagcgaaacgtagctagacgtcaagttgatccaataacttgaccaacggaacaagttaccctagggatgaacagcgcaatcgctattgctagagtccatatcaacaatagggtttacgagcctcgagtgttggatcaggacatcccaatggtgcagccgctattaaaggttcgtttgttcaacgattaaagtcctacgtgagtctgagttcagaccggagtaatccaggtcggtttctatctacgttcaaattcctgcctgtacgaaaggacaagagaaataaggcctacttcagcaaagcgccttcgccccgtaaatgatatcatctcaatacctaccgtatatacccacacccacccaagatgggggggagggggggtgtgggggggggggggggtg

SEQ ID NO: 576930 - DNA, 294 bp, Homo sapiens
aggacgggcatgaggagtcgagaaagcctgggcgactggtgaaacctgtctctacaaaaaatacgacagtgctgggattacaggcgtgagccaccacgcccggccctaactttatagttttataaccattaattatactaatgcgaatttggcagaaccatagaatttagtcttggatgggtgacgggccatcatggtcactagccagccttccacccaacatggagataagctctccggaagcatccttcgcagatggtcatccgacctttctattgtgaacctaattggagt

SEQ ID NO: 576931 - DNA, 923 bp, Homo sapiens
  misc_feature (923)..(923): n is a, c, g, or t
aattaaggctaggtacgaggcgggtggtgaatcggccgaggcagatgcctcaccattccgtgtcatcacccatgtctgccacccactgattgggcgatagtgggcccatggggtggaagcccccagatgactgagcagttctacaagaaatggccagcacgagcggggactagcagggtcctgattttgtgtctgtgcctcttcagtctctctggactctgatctccttctcccttcccatctccaggccttctgtctgtcccagataaagggcgctgtttctcccatcctccctacccgcatcctcgtccaccaaatcgctcccaacttgttgagagccgaaaggctggcgcgttctgacttgcaggtaagcgcatacacggtaggaggcctagcttgggaccgatgtattttaaacgcagagtggacagcagagagtcgaattctccctttgcgtcgggagtgggcatgtggggtggctaacttgtcttcggccaaccaggggcctgtgtgcccaggcgactcaccagctccgcctctggtgagttggctgccgacggtgggagtcagccaagatttacagggatgccagcgatggctcttttcacaagctaccagtcccactgtgggtggagaactaactggtctttctcctcaggatccggcggaggcatgtccctgagcccaggagccaaatgtgagggggggggacacaccggctatgatagggcgcacgtggccaatgaccgttcccgcgcgtacccctgttttcctggtcacgggtgggagaattggcggacccccagaaggggcgccagaaaataccgatgggcccagttcacctctatgttgtccaccacacccaatgaaggccccctgtgggaagacgcacagacaggactgctttaccaaggggggccccn

SEQ ID NO: 576932 - DNA, 339 bp, Homo sapiens
tgctgagtaagattccagaccgaataacacaattgttttttaagacggagtctcactctgtatacccaggctggaatgcaggggcgtaatctcagctcactcactgcaacctccacctcccaggttcaagcgactctcctgcctcagcttcctgagtagctgtgaccacaggcacacaacaccatgcatggctaattttggtattttaagtacagatggggtttcaacatgttggccaggctggtctcgaactcctgacctcagtgtaactgcctgccttggcctcccaaaagtgctggaattacaggcgtgtgttaccagtgctctgccaaaaaacaa

SEQ ID NO: 576933 - DNA, 1726 bp, Homo sapiens
tagtgacaatttttaactatgaacatgtttgtttaaaaagcaggctggtacctggtcctggaattcccggtgatatctgaaaaaaaaaaaaaaaaaaaaaaaaaaaaaaaaaaaaaaaaaaaaaaaaaaaaaaaaaggggggggccctccctttttcaaacccacaatatagtttcgccccaaattctttgagaggagaattttggtggcaagcggcgttcgcccgcgtggggcccccgggggttttgtggccagaggcctcataagaccttggtgtcgtgtggtacgccgcggccccttgtggccctatggggattgtgccgccaacaatatctgttttttacccccgcggggaagaggcgcggggccacaaagatcctcctatttttttctataaacgaggagcatctcggtgagatacttcgaccagaaggaagacacattatctcgcggtgcacaagagaggggcgcactctcatctaaatgtgtgagaggagacaccacccccgtgtggatatcccccgagacacccccccctgtttattttttcattgaaacacacattgtgggggcgccacgatcacacctttttgaaaaaaaatatctctctctcctccctctataaagagagtgcccctcacaaaaagaaaacactcctctcacaagacgagagggggaggagagaaatatctcttctccccccccagatgggagaagagtgttttgttgtgttgtattcttgcaaaaccccgcaaagtgtgtgtctcttcagagaagagagattctttccctaaaaagatgtgtgtgtcacccccaaggacgccctctttagagaggagctagtgacacaataataatagagagtgaccaaacaagtgatgtgttgtttctagcccggcgaccacatgatgttggttatcacacagaaagagaggttcgtgctctctcaacaaaagaagtgtggtgtgttgtttggcgcgcagcacacatgtttttaaacagatgtgctccctaaaaaaagaaggtattttatgattacacacaccacaacaagtagacggggggacccccccacagtgatgagtttttctccccccctgtgttatttaataaacaccccacagccccgcagggaagtgaaactatctcatatatgatcaaaatcagaaatagtggcgttgccctccaaggagatggaaacattcactttacaaacgacctactacatacaatcggccggcggaaaatataaatataaaggtagggtagggtgagacccctatccttaacaatcaaaccagatggatttctatgtagcgaacttcttattagatgccaggagaaaatatgttatattctacccacaccgagactgattgttgttcgtttgtagaaaaagacaaccagccacaaaaaaaaagagtgtgttgttgttgtcccaccaccatcgatggtgcagaggtcccccccaccgagacggcggagcccccaccaaattcttttgtttttgttgggtggaatacgaaacacacaatgcaactggtactgcaacatgtgtctgaattgtaacatctcgatgtggcggaccacataatacaacacattttgtgtttgcacgacggcacacaaactgagtttggtgttgtataatagcagacctcaatgcattggttctgtcaacacaacacacttgtgtttttttggtgtagaaaagaaactcctgggc

SEQ ID NO: 576934 - DNA, 103 bp, Homo sapiens
accatactactgctacattaacatgcgattttaagaccctcattttttcctgagaactctttggtttccttctaagtaggttcggataggcagtgtatcaata

SEQ ID NO: 576935 - DNA, 881 bp, Homo sapiens
  misc_feature (103)..(103): n is a, c, g, or t
  misc_feature (612)..(612): n is a, c, g, or t
attgacgggcaccggctggcgcgcctggaggccgagggcgctaggcgcctcacgctgctgcgctcactcagcctgcaggacacgagctggcggcactcgcgcnggggctgctgggccgcctgcccgctctagacgcgctgcacctgcgcggcaacccttggggctgcgggtgcgcgctgcgcccgctctgcgcctggctgcgccggcacccgctgcccgcgtcagaggccgagacggtgctctgcgtgtggccgggacgcctgacgctcagccccctgactgccttttccgacgccgcctttagccattgcgcgcagccgctcgccctgcgggacctggccgtggtttacacgctcgggccggcctccttcctcgtcagcctggcttcctgcctggcgctgggctctgggctcaccgcctgccgtgcgcgccgccgccgcctccgcaccgccgccctccgcccgccgagaccgccagacccgaaccccgatcccgacccccacggctgtgcctcgcccgcggacccggggagccccgccgctgccgcccaagcctgagcggccgcggccgcctggagcgctcgaagcttcccccatgcctttgccctccctntacactgtctgccggcgtcaacaagcgacacagaccgaaatataaatatgaaaaacttgagttttctgttctgttattttctaagtttttaaaccttttcatttgctattaaaattgtgctttccattaattaaattctttggaaccaaacttggatttacctctttccactggtggcccacccaacttcttccaccccatgttttccttaacccatggcaggtctttccttccctggccgcccgtagttagacgcatgggatggcccg

SEQ ID NO: 576936 - DNA, 669 bp, Homo sapiens
  misc_feature (103)..(103): n is a, c, g, or t
attgacgggcaccggctggcgcgcctggaggccgagggcgctaggcgcctcacgctgctgcgctcactcagcctgcaggacacgagctggcggcactcgcgcnggggctgctgggccgcctgcccgctctagacgcgctgcacctgcgcggcaacccttggggctgcgggtgcgcgctgcgcccgctctgcgcctggctgcgccggcacccgctgcccgcgtcagaggccgagacggtgctctgcgtgtggccgggacgcctgacgctcagccccctgactgccttttccgacgccgcctttagccattgcgcgcagccgctcgccctgcgggacctggccgtggtttacacgctcgggccggcctccttcctcgtcagcctggcttcctgcctggcgctgggctctgggctcaccgcctgccgtgcgcgccgccgccgcctccgcaccgccgccctccgcccgccgagaccgccagacccgaaccccgatcccgacccccacggctgtgcctcgcccgcggacccggggagccccgccgctgccgcccaagcctgagcggccgcggccgcctggagcgctcgaagcttcccccatgccttgacgatcatttacactcgatgtctgtgtatgcgcgacacacagcgaggtccgacatgccattgtgttt

SEQ ID NO: 576937 - DNA, 787 bp, Homo sapiens
  misc_feature (518)..(518): n is a, c, g, or t
ggccctgggcctcacatatttgtcccttctgctcatccctgctgcaggtgcctcctcctggcccccgcactccactcccagccatggctccccttccccagtgaaacatgcccgagacaagtggacaacagaggccgagacggtgctctgcgtgtggccgggacgcctgacgctcagccccctgactgccttttccgacgccgcctttagccattgcgcgcagccgctcgccctgcgggacctggccgtggtttacacgctcgggccggcctccttcctcgtcagcctggcttcctgcctggcgctgggctctgggctcaccgcctgccgtgcgcgccgccgccgcctccgcaccgccgccctccgcccgccgagaccgccagacccgaaccccgatcccgacccccacggctgtgcctcgcccgcggacccggggagccccgccgctgccgcccaagcctgagcggccgcggccgcctggagcgctcgaagcttcccccatgcctttgccctccctntacactgtctgccggcgtcaacaagcgacacagaccgaaatataaatatgaaaaacttgagttttctgttctgttattttctaagtttttaaaccttttcatttgctattaaaattgtgctttccattaattaaattctttggaaccaaacttggatttacctctttccactggtggcccacccaacttcttccaccccatgttttccttaacccatggcaggtctttccttccctggccgcccgtagttagacgcatgggatggcccg

SEQ ID NO: 576938 - DNA, 136 bp, Homo sapiens
ccctcacttaagagttgtgactccgaattcagaaatctcatgttttagaaaaacaattctaactatgttgcaagactgacagttgatgtttatttgccacagatcaaaggttcacaaagtatatcaaatttacatc

SEQ ID NO: 576939 - DNA, 299 bp, Homo sapiens
  misc_feature (145)..(145): n is a, c, g, or t
  misc_feature (184)..(184): n is a, c, g, or t
  misc_feature (213)..(213): n is a, c, g, or t
  misc_feature (239)..(239): n is a, c, g, or t
  misc_feature (244)..(244): n is a, c, g, or t
  misc_feature (278)..(279): n is a, c, g, or t
ggtgcagctgctttgaaaaatgacttggcagcacctcaaaatgttaaacagagttaccacatgacccagtaatttcacacttaaggatatactcaagagaaatgaaaactaaaaacatacggctacccaaaaacttacataagantgttcacagcaacattattcataataaccaaaatatggnaacaaccacaatgtccatcaattgataantgggtaaagtctggcaaactcacagnatggnatattatttggtggtaaaaaggagtaaagaactnntatgtactacaacatgggtg

SEQ ID NO: 576940 - DNA, 120 bp, Homo sapiens
caaagcgagatctgccgggggacggggccccccatgctgtcggggcccagtgctgctgtcctgcaaagagcgcacaatgaagtacatgcagcgccgatgagtgtccatggccaagcgcca

SEQ ID NO: 576941 - DNA, 462 bp, Homo sapiens
  misc_feature (169)..(169): n is a, c, g, or t
  misc_feature (171)..(171): n is a, c, g, or t
  misc_feature (174)..(174): n is a, c, g, or t
  misc_feature (184)..(184): n is a, c, g, or t
  misc_feature (192)..(192): n is a, c, g, or t
ctcatgcctgcacccctgctgctcttcctgttccttgtcagtgtcagccgttgttttgaaagagacacaatgggaccccagtctattgcttcttaagctggggcagagtttatgttttgtctgaatggctgcctccttattcttcagagggcccaataaaatatgttananacnacacgggtgngtaaaatngctgagggaagaaacacaattattgggcaatgtttcttgggagtttcaggatgataaagcagagtttggaaataagactgtgtgaactatcgagtagctgtatcagtttgtggaattaatttactgaggaggttagctgccagttttccgcacacacacacacacaaaaagcccaaattagttccattattttttaacatgtgctaagtgcccatagcatgttggtgccttcacatgatatcagaatgcactatggagggaactgaactt

SEQ ID NO: 576942 - DNA, 197 bp, Homo sapiens
atcgccatgcacgcattgtgccttcacagcagatgctcgcagcagctagttaatcagccccagactcattcctgtcaattccagccccatcccttccattatccccatcaaggcacatcacttttcagttcacatttcaatcatctcatcagcaacacactccccaatgcacgggtgttgcatgttcacatcaaatc

SEQ ID NO: 576943 - DNA, 783 bp, Homo sapiens
  misc_feature (599)..(599): n is a, c, g, or t
acctattctctacaaaccacaaagacattggaacactatacctattattcggcgcatgagtctggagatcctaggcacagctctaagcctccttattcgagtccgagctgggccatgcacctaggcaactcttcatagagttaatctgaccactatctactaagcgtatataccgtacaacatgccctccatgacattcttgtacatcaactctattcttacatacgataactacccaatctaattaatactgagaaggctattgcgactagagctcgaatctagctttcctcgcatacagtgagactgccgggtggcactccactgaagtgacttgtgtcccgggttttcccacaccggactaatttaaaaaaccaataggccaactttcaataaaagggggcccctttttccaattcggaaaccccttccttatacaccttcacgcgtcatctccttacctccgtggcttctgcactctgctatatgtggattcgcgcaggagcatcgagaacataggttagaacaagtcatactccgtccctgttacgcgagggaacttactcgcctaaaccatgggaatgcggcatccggtacgntacctaacacccagtactttataccttttgaaaagcgcttacgacaacgcggtagttcaataccaatcctaatccctataagaagggggcccaattcacatctttatcaattctaacataaaacataacgttttaaattcaaaattaactttaaaatgtccccccaccccttgaccctaattaa

SEQ ID NO: 576944 - DNA, 118 bp, Homo sapiens
tttgattcaacacaccacaatactatggctgatcagtctagagctaatgtgatcgtggggttgtaaacacaccacaatactatgtttcgttctgtcctctgtgatcgtggggttgtaa

SEQ ID NO: 576945 - DNA, 744 bp, Homo sapiens
actcgcccggctgggagagctgggtgtggggaacatggccagggctaccgaggctacctagctgctgcccctgcttctaggcgctggctcgcggcctgcctggggccctggctgcccaagaggtgcagcagtactccccactgcacgactgtccccgtgggagcctccgtcaacatacacctgctaccaccagcgggggcctgcgtgggatactacctagaggcagctacgggccacagccccaagaacatcatattactaacgaggacggggtggtgcccactaacggacagacggttaccggggccgcatacgacttctcagggtacccaggacaacctgactatcaccatgcaccgcctgcagctagtcggacactggcacctacacctgccaggccatacacggaggtcaatgtactacggctccggcaccctggtcctggtgacagaggaacagtacccaaggatggcacagatagctcggacgccccaccaagggcctctgccctaccctgccccaccgacaggctccgccctaccctgacccccgcagacagacctctgccctacccttgacccgccaggcagcctctgccctccctgcggccctggcgggtgatctccttcctcctcggggctgggcctgagggtggagtgtagtactggcgaggaccagataagaactgggctcggggcgataaaatcggggcattttgttacgagcctttgaccagcgtgaaag

SEQ ID NO: 576946 - DNA, 727 bp, Homo sapiens
gccaacttacacttaggagatttcaacttaacttgaccgctctgagctaaacctaggccccaaacccactccagcttactaccagacaagcgcttagccaagaccatttacccagaataatagtataggcgatagaaattgaagacctggcgcaatagatatagtaccggcgagggaaagatgaagaaattatagccaagcataatatagcaagggactaaccccgtataccttcgtgcataagtgaattaactagaatataactgtttgcaaggagagccaaagcgtacagacccccgagaagccagacgagctacctaagaacagcgtaaagagagcacacccgtctatgtagcaaaataggtgggaagatttataggtagaggcgacaaacctaccgagcctggtgatacgctggttagtccatggatacgaatcttagttcaagcgtttagaattgtggcccacagaatcctctaagtcccctgtgtgaattctaactgtgtagtccaaagacggaacagctctctggacacataggaaaaaaccttgttcgagagacgtaatcaaatttaacgacccatagttaggcctaaaagcagccaccaatttacgaaagcgttcaagctcaagacccacctacgctagatgaaatcccataacatataacctgaactcctcgacatccgaatttggaccaattctatcaggcctatagaatgaacta

SEQ ID NO: 576947 - DNA, 141 bp, Homo sapiens
  misc_feature (32)..(32): n is a, c, g, or t
  misc_feature (40)..(40): n is a, c, g, or t
  misc_feature (68)..(68): n is a, c, g, or t
  misc_feature (104)..(104): n is a, c, g, or t
  misc_feature (117)..(117): n is a, c, g, or t
tgctgcccggacgcggagcgagaggctgaaanagtcgganacactatccgcttccatccgtcgcgcanaccctgccggagccgctgccgctatggatgatcganaggatctggtgtnccaggcgaagctggccgagcaggc

SEQ ID NO: 576948 - DNA, 188 bp, Homo sapiens
tggatgcctgaggtcgacctctacacggactccccgggacgtgggacgacgaacagaccgacacgaccgactgactgacctacagcacgtacctctgacactggacccaccacgtgtttgcacactactttgcaactttatttgcttgttttggaacgtgtactcactacaacccacgacacacacgt

SEQ ID NO: 576949 - DNA, 276 bp, Homo sapiens
gactgattagactctaaacggaactgaattaataggaaataacacggtactatagttgtcctatggtgcccctatgggtgatgggttccaagaaccccctaggatactaaagtccatgatgttcaagtcccttatagaaaatggtgtagtatttgcatataacctgtgcacatcctaccatacactttaaatcatctctagattacctataatagctaatacaatgtaaatgcttggtaaatagttgttatactatattgtgtctaaatgcaatca

SEQ ID NO: 576950 - DNA, 310 bp, Homo sapiens
ggtcgaccgagttcctctgaccgcccaagggaggcatcaggcctggcgcacgaatgcgtcggagccggctgcctgccacaggctgcttccacttttctgttcggagccggctgcctgccacaggctgcttccacttctctgagcaggtgtccatcttttgtgcagccccgtccccaccccaggcacagggactgtggaaggaaggccctccccaaacccctggtctttcctccagcctccttcaaacaccagggccaggaggagggcacccaccaccacctgtgcccactcacacgcgcttctttcagaa

SEQ ID NO: 576951 - DNA, 1244 bp, Homo sapiens
tatagtgtgaacgatctaataatactctgctgctggtggcccatatcgttatctatgtcactcagtataatgtgggaacttggcgattatcgtcattactggtaaatgcttgttcgttcattctgtctggtctgttcaatgtgttaattaatgatcgaccggcgtattctttcgtggtaattacttattttagataacacgaccttatggtcgatgtgataatactattgtctgtgatgtgcttcctgaatcgtgctttaatccttgggtgtgtctatattcgtcctcgtgcgtgttctctatgtctgtgtatgaaagtgtttgtgtatttggtatcagggatattggttgtctacgattctttgtctttgtgaattttctctccctatggtattatttgcatctgctctattgtattctccgtttactctgtgcgtgctcttggactctctcgctaccttgtctctttctttttatacgcgttttacacatcgttttctccaccgtttgtagctatgtacgtctttatacgtggcccgcgtctctgttgattcctctgaggtttgcaaccgcgtgctcatgctttgccccggttcttccagtatattccgttaaatccgtggcgtctactctttcgtatgtctagtatgttaggctctcgtctccgtccccctaccgttggtctagttgcctacctcgtctagattgtacatctgcgtctctctctacctacctcttaccctcatacctatgtagatatttgcttacagtgtggtaggaaaataagtataccttaatacttccaaggccctgctttttgttcttaaatagttactttaaaataggaaatttgtttgtattttttatttacatttgatatttttgtacatattgttagggtcagccatgttcttaatgatctcggatgacctatagccagccttcggagcgttctctgtcctacttctgactttacttgtggtgtgaccatgttcattataatctcaaaggagataaattaaaccttgtaaaaaaagcataaaatgactaacagaaaacaatcttattccgagcattccagtaacttttttgtgtatgtacttagctgtactataagtagattggtttgtatgagatggttaaaaaggcctaaagataaaaggtttcatttatataatcattttttagtcatatgaagttgctgtttattttttttggcttaatatgatggatgtgtgaaacaa

SEQ ID NO: 576952 - DNA, 248 bp, Homo sapiens
acagagactccaccgtgcccgccactgtcacacccacatgcgtcgcgcatcgcagggctcgtacctagtggcacggtggtatacctatgctgtggcaaggtggcaaggtctggctgttgatgacgctgcacttgcgctcggcccaggagcgccggaaggcattgagactgcaggggtctgtcacgaagctcacgtccccgcacagcgggctctccttccacgagttcaggaactccagctcgctggat

SEQ ID NO: 576953 - DNA, 857 bp, Homo sapiens
  misc_feature (541)..(541): n is a, c, g, or t
  misc_feature (619)..(619): n is a, c, g, or t
gccaatccctggagagcaagtaccaaaaggagcagctactacatccatgatgtagttagacatgccacataagtcttggcactctaaaaaagggcttatggcagcagccaagaatcatcagacgggagggtaaagggcaaaactctgcctgcagaagcaatgctggtgcttccagaaatggggtggggagcctgacaaatccagagtatacgcttccagagaacaaggagccaacttaccatttattcacaaaatcttgaaattccagactgaacactccactgggcagttttggaggaggctgcaaacacatgttgagataagaaaaatgcctggctccttgctccagccatctcctctccccatcccacccctcccaccagccagtgctacttttttttaaagtcttctctgcagtccaaaggcagtactactctcatccagtcaaggaaaggcacaggtagaaggccagtgctgcctgttgggtaaccatgttggaaccactgatctcaaatagcacatttagaattgggaccagtcnagtccactcacttgtcgggtgattttgaactaatcactattcctctatgagcctcagttactcttctatgactgagangttgggcctaatgatctcagggaccctttcaagctctgacactctacaatggtaaatcttggagtgcggcatgggaacgtaaccagcaatttactggcagcaacagctaggggcacgtgcaaaccaccaggcatagcccaggtctgacagcacctgcagaagcaaaccggtttttaaaaatcccttttctgagccctagagaagcagtgaaaagttaataaaacattaactggcaaaa

SEQ ID NO: 576954 - DNA, 335 bp, Homo sapiens
ttctagaggatccctgcaagaggcgttagtgcagaggcggggttacagtttttcttgttttttttttaaaaaagaggggggttggagtgtaccaatccggatccaaaacggaaagggaagacagttcccccctaaaatacttagaggggtttctcagagtcctttcccataaagggaatataatggaaccacatctcagtaaggtgagatgagatggctaaaatacttacagaacataaaaaaacagctaaaacaaagctcagtaaactctctcaccctcctatggatcccggtgggtggcggctcttttttcccataaacgcctcggcggggat

SEQ ID NO: 576955 - DNA, 356 bp, Homo sapiens
atatagcagtgtgagaacagaataatacagaaaattggtagagaggagtgagggattgctagaaagatacctgaaaatgtggaaacagcagtggaactgggaaatagacagaggttgggagagtgtggagggctccgaagataggaagataaggggaagtttggaatttcttagagatttgttaaattgttttgaccaaaatactgatagtgatgtggaccatgaagtccaggctgagggggtctcagatggagattagggacttattgggacctggagtgaaggtcccttttgttaggacattgtggttggagaacttgtgcccctgccctaggaatctgtggaactttgaactt

SEQ ID NO: 576956 - DNA, 694 bp, Homo sapiens
  misc_feature (5)..(5): n is a, c, g, or t
  misc_feature (24)..(24): n is a, c, g, or t
  misc_feature (40)..(40): n is a, c, g, or t
  misc_feature (45)..(45): n is a, c, g, or t
  misc_feature (124)..(124): n is a, c, g, or t
  misc_feature (274)..(274): n is a, c, g, or t
  misc_feature (287)..(287): n is a, c, g, or t
cccgnctgagcttcccaaagtgcngggttataagcgtgancactncacccagccccacggcttcttactgcactcagaataaaatccaaatgaattagtatagcctacagagtgtcaataatcngggcctaatcacccattgcatcatcctttactgtgctccacccatgctggcgtcctttctgtttattgagtgcagcaagctttaacctgttcgggtctttcatttgcagtttaccctgaatattccctttctcttacctcacctttgatnggcgttttccccnttgcagacctgcactctggcatcctctcctgagcaagccttctttgattgctgcctcccaaacctgtttctccccatttctctagctcattggcctgtgttacttgcttcatagtgctcactactatctgaaatcatttcattacttgatttatgtttgtactgtctatttctgtctttagaattaaaactccttgagggcaaggactttgcttctctggttcatggtgggatcctcatcacccagcacaagcccaacacttaggagaggctcagctagtttgaaccaatggaaaatgccattcctgaggtgcaccacatcgtttcttttgtgttggtgtgcatgctgaccttcagtttgtctcctcttcccacaccctgtcatgtgctcctaaaactcccccttta

SEQ ID NO: 576957 - DNA, 355 bp, Homo sapiens
gttctcatttttcttccctgagtaggaaggggttaattacaataagtctacagagatattgtgaagcattttacaaaagatcattcagataaagcgcttaacacaatctgtgaaacatagtcagtgttcaataaatgttatttattgtttttgttattagtattgttgcatcatcatcatttttattgagtctattaaacagcctcaagcaagcaaaggagacacactttgtcaggctgaattttaatttcaatgtcacaggggcacagcattaagcaagctactgacatcatcaacatcaggcagtagtttctaagtgttgaaataatttcaaaaatggatgagggccaatgca

SEQ ID NO: 576958 - DNA, 1408 bp, Homo sapiens
aggcatcggagctccgggccactcagacatcatgagttggtcacttgcacccccggaatttaattctctacttctatgctctttaataactctcttcaaccatgtgtcagcgatcatgttggctacccagcagcacaactagctgcatcttcagcatgcaaagcattccggtcagtatattggtcccaactcacctgtggccattggccagcattatcctggtctaccttaatcaacaccaaacgataagcaccaagcgactctacagatcattgtggcaagcaccatctgtacagtcaacgctctgcacacacgcaaaaacatcagcaagtcaacaccagcgtgactaacaagccaattcccgaacatccacattcattaagtccgtgcatgcacatccatcaacaaaccaacatcattgcatcagcacgcatggctcacgcttgcaacgtcccaggcacacactggtaacgcaagcaagagttatgcaacatcatgcacagccatccggacaatgatacacccacacagtgcacgtctcacagggtaattaccgacctcttatctggcgacgcgaacacattcatcttcaacgtctccaccccatacaagttctacacacgccgcacgccgcacacacctcggacgaccccgtaggaaagaaactacgccacccatggcacgtcaaggccccacccaacgcgcctcgacccattgccccaccaaaaatgcccaccacaaaagacagcatagaacacataggggaggaaaagaacacaaccggaacaagagaacatctactggcacacacctatggcaggggcaactgcaacatgcaaccaaccaggaacacgaaacaacacagaaaaacacaacagccgccccacccacacactaagacgacgtgccacagcgcaaacagaccaaccgataaaccaggaacacacaccaccgaacgaaacatgcaaaaccaccagaaagcagcaaacctcacagagcagacccaagcacacaaaggacaactatcagacacctaggaacgaattcaacatagaacaaacacccagcacagacagccacagcacacacactgaacacagcgcagtagccactactcatgccacacgggagatgaacacatcacgacagcacacaaccagagacaacaccggttaaagagacaacggcccaccacgcagcggccacgagtgggcacaaacaccaacaaccacacaagacaaacagcgacgaccaaggcggcaagtaccagcctgacgcgaccatctaagaggggcaacagatcgaaccgaccaggaagcacaccaaaacagactgaacaacatcaaacaagacaagcaacagacaagcaatagagaagaccacacacaaccaacgacaggcagacaca

SEQ ID NO: 576959 - DNA, 107 bp, Homo sapiens
cagcttgttccactggggacctctgccgtgggccacttacagcttcctttcagtcgccttcgcttacttcttctttgtccgcaaaatggaagtgattcgccccagct

SEQ ID NO: 576960 - DNA, 952 bp, Homo sapiens
  misc_feature (388)..(388): n is a, c, g, or t
  misc_feature (408)..(408): n is a, c, g, or t
  misc_feature (454)..(454): n is a, c, g, or t
  misc_feature (473)..(473): n is a, c, g, or t
  misc_feature (477)..(477): n is a, c, g, or t
  misc_feature (480)..(480): n is a, c, g, or t
  misc_feature (487)..(487): n is a, c, g, or t
  misc_feature (521)..(521): n is a, c, g, or t
  misc_feature (523)..(523): n is a, c, g, or t
  misc_feature (527)..(527): n is a, c, g, or t
  misc_feature (538)..(538): n is a, c, g, or t
  misc_feature (589)..(589): n is a, c, g, or t
  misc_feature (606)..(606): n is a, c, g, or t
  misc_feature (668)..(668): n is a, c, g, or t
  misc_feature (675)..(676): n is a, c, g, or t
  misc_feature (684)..(684): n is a, c, g, or t
gaggttacagtagggtaccttggctttccagcccactagtaggttgcgtcttctcatccaggagctcacgcgtgcccacaacggagatttctgggtagtttcgcaccctatctaaggttgattcgacccgaactcctaattcccgcaatctctggattgcaaacggctgttcgaaattggaacgtctgggaagtgcattcacaggcagatattatccgtggtcagttgggaggagggaagagtcgcaaaatctgacagctctgtgctgacctctaacgacacactgatccatcactgcaggcggtcatcttctgcaacaccaagaatgaaaggtggtactgggctgacggagacaaactgacgggaagccaacttcactgtatcctcnatgcatggagacatgccccnagaaagagcgggagtccatcatgaaggagttccggtcgggcgccanccgagtgcttatttctacnagangtntgggccngggggttggatgtccctcaggtgtccctcatcantnactnatgatctccgntaataacagagaattgtacatacacagaattgggagatcaggtcgatacgnccggaagggtgtggccnttaactttgtaaagaatgacgacatccgcatcctcagagatatcgagcagtactattccacntcagatnngatgagangccgatgaacgcttgctgatcttatctgaagcagcagatcagtgggatgagggagactgttcacctgctgtgtactcctgtttggaagtatttagatccagattctacttaatggggtttatatggactttcttctcataaatggcctgccgtctcccttcctttgaagaggatatggggattctgctctcttttcttatttacatgtaaataatacattgttctaagtctttttcattaaaaatttaaacttttcccataaactcta

SEQ ID NO: 576961 - DNA, 898 bp, Homo sapiens
  misc_feature (514)..(514): n is a, c, g, or t
gtaatatataacctaccaaccgaaaaaagctcaggatctgatggattcacaactgaattctaccagacgtacaaagaaaagctggtaccattcctactgaaaccctttcaaaaaattgaggaggatggactcttccccagttcattctatgaggccagcatcatcctgatactgaaaactgtcagagacataagaacaaaagaaaacttcaggccaatatccttgatgaacgctgatgcaaaaatcatcaaaatacatggaaaccaaatccaataacatgtcaaaaagctaatctaccacagtcaagtaggtttcatccctgggaggcaaaggtgtggtcaacatatgcaattcaataaatgtgattcatcacataaacagaattaaagacaaaaacacatttatctcaatagatgcagaaaaggctttcgataaaactcaataccccttcatgttaaaaactctgaataaactaggtatggaaggaaaacctcaaaataatagcatctatganaaaccatagcaaatcatactgaatgggcaaaagctggtagcatttccttgaaaaattggcacagggaaaggatgtcctctctcaacatcctattcaacatggtatgggaagtcatagtagagcatcagggaagagaggatcccaaataggaagagagggaagtcaggtatccctgttggtaggatgatctgtagaaacccctagttaagccaaagtctttaatgtacaattcgcaattcgggtcaactcatggggaattcgtttttccacagagaggggcaagagggcctcatgcgaaaaacagcaaagacggggggattgttggaagggaaaaaaaggggggggatggggggtcttttccgtaccctgcgtcaaacattcatc

SEQ ID NO: 576962 - DNA, 104 bp, Homo sapiens
ggaggaagctcgaggtctcctgggcaagaattatacctggggagggctgagagaggagaggaggcagatctcgggctgtggtcaggttgtgatgggcctgaacc

SEQ ID NO: 576963 - DNA, 549 bp, Homo sapiens
cgtgattcgccgcattctcgtgggacaatttttgtctctagggcccgcacatagttccggcggccactttgttcctggtgacacccaggccgcttgcttgggagcctcttcgaagtgcgggattgcccaccgcgcgagtgggggaatctcttccggcggttcggtcggcccccctctgtgtgtgaatagttaaatatgagcacttccgcacagggagacgtttgtggcactctactcagaggtggctgtcgcgccccactagtagcgtctatgacaccaacagtcgccttttctccggcagtctgttttactcgctaaccctaattttcttctcacgccgtacacctgtcgcctggggagtatacaaaccggcgaactacaaagcttcttagaactttcttggaggacacgaaaacaaccgattactgagccgccatgtcttccttaaaatgttaattctcgcctcttcataattattcgggaaaaatggacgccctcgtttgttccccttatcagctcgccccccttcccccttttggccccaaaaca

SEQ ID NO: 576964 - DNA, 599 bp, Homo sapiens
  misc_feature (21)..(21): n is a, c, g, or t
  misc_feature (74)..(74): n is a, c, g, or t
  misc_feature (84)..(84): n is a, c, g, or t
  misc_feature (95)..(95): n is a, c, g, or t
  misc_feature (129)..(131): n is a, c, g, or t
  misc_feature (135)..(137): n is a, c, g, or t
  misc_feature (140)..(140): n is a, c, g, or t
  misc_feature (142)..(142): n is a, c, g, or t
  misc_feature (148)..(148): n is a, c, g, or t
  misc_feature (152)..(152): n is a, c, g, or t
  misc_feature (166)..(166): n is a, c, g, or t
  misc_feature (169)..(170): n is a, c, g, or t
  misc_feature (174)..(174): n is a, c, g, or t
  misc_feature (176)..(176): n is a, c, g, or t
  misc_feature (191)..(191): n is a, c, g, or t
  misc_feature (203)..(203): n is a, c, g, or t
  misc_feature (207)..(207): n is a, c, g, or t
  misc_feature (220)..(220): n is a, c, g, or t
  misc_feature (230)..(231): n is a, c, g, or t
  misc_feature (242)..(242): n is a, c, g, or t
  misc_feature (252)..(252): n is a, c, g, or t
  misc_feature (259)..(259): n is a, c, g, or t
  misc_feature (262)..(262): n is a, c, g, or t
  misc_feature (277)..(277): n is a, c, g, or t
  misc_feature (281)..(281): n is a, c, g, or t
  misc_feature (303)..(303): n is a, c, g, or t
  misc_feature (315)..(317): n is a, c, g, or t
  misc_feature (319)..(320): n is a, c, g, or t
  misc_feature (326)..(326): n is a, c, g, or t
  misc_feature (336)..(336): n is a, c, g, or t
  misc_feature (355)..(355): n is a, c, g, or t
  misc_feature (365)..(365): n is a, c, g, or t
  misc_feature (367)..(367): n is a, c, g, or t
  misc_feature (372)..(372): n is a, c, g, or t
  misc_feature (374)..(374): n is a, c, g, or t
  misc_feature (378)..(378): n is a, c, g, or t
  misc_feature (380)..(380): n is a, c, g, or t
  misc_feature (382)..(382): n is a, c, g, or t
  misc_feature (384)..(384): n is a, c, g, or t
  misc_feature (386)..(387): n is a, c, g, or t
  misc_feature (390)..(392): n is a, c, g, or t
  misc_feature (398)..(399): n is a, c, g, or t
  misc_feature (406)..(406): n is a, c, g, or t
  misc_feature (411)..(411): n is a, c, g, or t
  misc_feature (434)..(434): n is a, c, g, or t
  misc_feature (439)..(439): n is a, c, g, or t
  misc_feature (455)..(455): n is a, c, g, or t
  misc_feature (466)..(466): n is a, c, g, or t
  misc_feature (476)..(476): n is a, c, g, or t
  misc_feature (487)..(487): n is a, c, g, or t
  misc_feature (520)..(520): n is a, c, g, or t
  misc_feature (527)..(527): n is a, c, g, or t
  misc_feature (533)..(533): n is a, c, g, or t
  misc_feature (535)..(535): n is a, c, g, or t
  misc_feature (539)..(539): n is a, c, g, or t
tggaaaaattccaaaatatanagacgcttcttttctcataaaaataaattattttttataataaaaaaaaaacnaaaaacaagnttaaacaaggnttaaaagcaacaagcccgtaggaaaatctttaannnattnnncangncccggntganaataacacgtgganaanntcantnccgtgtacacacgcnttcagccatgtntaanccgattgcctcancttccccccnnggccgcgcgcnggggcttggngaggggnagngggagaagcagagantttnttatttatttgtttaaatagtngttttttttttnnntnntattangggggggggnccatttgtttgtggggttngtttggttananatttngntatntntntntnnttnnntttttnnttttttnttttnttttttgttttgttaagttttcnagtgntaaattttttttgggncggggggggtnggggggaggnggggggttggnttctttttggagttttagttctggttggtttgnggatgtntgttgngnttgngttagagtggggggagggggtgagttgggggtgggggagctggttgataaagttcgggag

SEQ ID NO: 576965 - DNA, 433 bp, Homo sapiens
  misc_feature (302)..(302): n is a, c, g, or t
  misc_feature (305)..(305): n is a, c, g, or t
  misc_feature (369)..(369): n is a, c, g, or t
  misc_feature (383)..(383): n is a, c, g, or t
  misc_feature (394)..(394): n is a, c, g, or t
  misc_feature (409)..(409): n is a, c, g, or t
  misc_feature (422)..(422): n is a, c, g, or t
ggcacgagctaataaagcattcttttttttcttggagacggaatctcattctgtcatccaggctggagtgcagtggcgccatctcagctcactgcagcctctgcctcccgggttcaagcaattctactgcctcagcctcctgagtagctgggattataggcgcctaccaccacgcccggctaattttttgtatttttagtagagacagggtttttaacatgttgaccagcttggtcttgaactcatgacctcaggtgatccacccgcctcggcctcctgaagtgctgggattcaggcgtganacncggcgcccagcccactaataaggacattccttttctttaatttgctatcttgttcttcatcaanctgttccctagccnttcttattaantttgtggcagacaantcccaagttggcnttcagttcaca

SEQ ID NO: 576966 - DNA, 139 bp, Homo sapiens
ggtattctgagctcgaattcatcgatgggatagtccggcacactacttccggccacggccggacacgtaccaaatcaagtctatatgaaaagtgcatatgctatctgctgcacgcgtccggccactacgtgtccggcca

SEQ ID NO: 576967 - DNA, 644 bp, Homo sapiens
  misc_feature (560)..(560): n is a, c, g, or t
tactgctcgaagcagtcatgtacgagaacgcggtactccacattccatcgcataacggggttccagcccgcaaactgctcagcttgttgcctgagcgaacgccataccttgctcatgtggcctcatgaatttcagaatcaaggagatgatgagttaatgtggcacgtagttccacaacagtatagcttaaggttccttaagcattaggtaagaatagcttaccaaaaggaggaacctacccaagccttacgctgatgagtaattttgaagcattaaggatgtgaggtgccgcagcgctgttggcgctgatggaaaattgacccaccctgccgattgaaatttgacccagggcggattgctgattttgttaccagcaactgtggataagtctaccagcgcagttgctgttgcccccactccttcgctagcccagttcagttgtttaagacctgccacacgcagccatgtagcaggccgtcgtcgccatgaaatcagaacggctcatcgtcctccggttcttggccgcccttacgctttcgctcccgtgatttgatcttggnctgggccgccaagctactgtgttgcaggcgataggactcgttaccggttcgacgatgtggagtggtggtcagccgatcagcagg

SEQ ID NO: 576968 - DNA, 182 bp, Homo sapiens
aatttttttttcccccggggggaataaaaaaaaaacccccccctttttttaaaggggggaattctggcccccgggggggcccgatcccccggcttttttaaaaaattaactaaggggtttcccccgtttttttttttaagcggggtggtttataacccggccccgcttcccaatttgaatta

SEQ ID NO: 576969 - DNA, 102 bp, Homo sapiens
tagtcggacgagtataacaggcaaaggaagctaaagatgaccagaatctgaagtgaaacggactgggtgggaataccagctctgccggtccgacttaacttg

SEQ ID NO: 576970 - DNA, 149 bp, Homo sapiens
  misc_feature (1)..(1): n is a, c, g, or t
nctgttgactcttgctgatggagcttctctgaagggcaaattcaaagtacaagctgggtgctgcagcactggtttgcgaactcgtggctgtggttatgaaggagcctcggcagctatgcctttagcccctggtgaagcagtgtcagtca

SEQ ID NO: 576971 - DNA, 194 bp, Homo sapiens
gaggagcaatgatcttgatcttcattgtgctgggtgccagtgacagtgacctatcttctgcatactgtcggcaatgccagtgatacatggatggtgcctgccagacagcactgtgtatggcgtacaggtctattgcggatgtccacgtcacacttcatgatggagttgaaggtagttacgtggatgccacagga

SEQ ID NO: 576972 - DNA, 150 bp, Homo sapiens
cgtcagaccggccagtgtggcagactatgaagaaactgtaaagaaagcaagagaagcatggaacatctgggcagatttcctgctccaaaacgaggagaaatagtaagacagattggcagatgccttgcggggccagcaagatcccaagta

SEQ ID NO: 576973 - DNA, 170 bp, Homo sapiens
ggacagttacacatacctaaatagtagggtatgccttccagtatttcataactgatctgcatcagttgtaaaggggaactggtatattcacagactgtagactttcagacagtcagtctcatgaagcttacaacagtagattatccatgaacgatattctgtcttcagca

SEQ ID NO: 576974 - DNA, 787 bp, Homo sapiens
tgattttttttttttggatacttgcctaacatggctttgtgctggtaaaaatagttaacaggggaaataacttgagatagtgggctagctttggtttaatggtcttatgaaattttcatggaacaatccaaggcataattggttaaagaacacgtgtattcaacatccattgtaatgtggacataaaagttttaatgaatggcacttttcaactacactttctctaacagctttccatgtaaattaagtctgggtcctgaaacttctctaagaggaaatggtcacatttttggaaatttatcccttaattccctcttggcagctaaaggggctcttaccaagttttaaacacaaaattatatcataacaaaatttactactaattataactacggtttccagtgtcccatgatccccatctcttacctccccaccctgaaaaaaattgagttcctattttttttctggagacaggggggcgatccgcattagacaaacactgtcgtgtgtcccatttaacacatcttgggcatatggcattatctacacttagcgaagcccacaaagtgtcctgtggcccaatcagtgacatggcggtagcattaaccggtaacgttatggggcttccaaattcaccttatagggttttttaaagaatttcctggaatactcttaatagccatggtgttcacatttagatcccttagtcctcgtctattttggcaagtttgcccaagattaccttcgtgattaagcctctggcttgtaaccaaccattctatttgcg

SEQ ID NO: 576975 - DNA, 658 bp, Homo sapiens
  misc_feature (53)..(53): n is a, c, g, or t
  misc_feature (92)..(92): n is a, c, g, or t
  misc_feature (95)..(96): n is a, c, g, or t
  misc_feature (114)..(114): n is a, c, g, or t
  misc_feature (122)..(122): n is a, c, g, or t
  misc_feature (128)..(128): n is a, c, g, or t
  misc_feature (134)..(135): n is a, c, g, or t
  misc_feature (158)..(158): n is a, c, g, or t
  misc_feature (169)..(169): n is a, c, g, or t
  misc_feature (187)..(187): n is a, c, g, or t
  misc_feature (198)..(198): n is a, c, g, or t
  misc_feature (220)..(220): n is a, c, g, or t
  misc_feature (230)..(230): n is a, c, g, or t
  misc_feature (234)..(234): n is a, c, g, or t
  misc_feature (243)..(243): n is a, c, g, or t
  misc_feature (256)..(256): n is a, c, g, or t
  misc_feature (268)..(268): n is a, c, g, or t
  misc_feature (314)..(315): n is a, c, g, or t
  misc_feature (318)..(320): n is a, c, g, or t
  misc_feature (396)..(396): n is a, c, g, or t
  misc_feature (418)..(418): n is a, c, g, or t
  misc_feature (544)..(544): n is a, c, g, or t
  misc_feature (552)..(552): n is a, c, g, or t
  misc_feature (565)..(565): n is a, c, g, or t
  misc_feature (584)..(584): n is a, c, g, or t
  misc_feature (586)..(586): n is a, c, g, or t
  misc_feature (590)..(590): n is a, c, g, or t
  misc_feature (592)..(592): n is a, c, g, or t
  misc_feature (649)..(649): n is a, c, g, or t
ggcccggcgcggggcggggggggggggccgagcggccagcggcgggggaccanggcccaggaggcgcagcgcggggcccaggcagagggganggnngagggggggcgcagggcngggggggnggggcngggggnngggagagcccggggaggggcacnccgcgcccccnggggccagcggggcccgngggagggaggnagggagcggaggggccgggggngggggggggnggangcggggggnccaggggggaacnagagggaggggngaggggggggggcacagcgggagggggggctcgcgcggcgtcagcnncgnnngagaaggccaggctcctgccaagtgcaaactcagccccacggagcccggaggccggacggcacgggtgggtgcgtntgggtagagcccccgaggggcnggcccgctgggcggaaggctgcgcccggcccggtgcggggggatggagcgagcagaggtggcacgaggcgtctgcgggcgtgaatgaaccagttgttgacttgcaggatggtgagccccgtgttcngcgccacngttttcttctgcncccccgaggggtacgggtncnaaangngctggaacaaccaggctcgcatgaagttggtggccaccttgggggaagaaccccctnttcttgttt

SEQ ID NO: 576976 - DNA, 200 bp, Homo sapiens
catggcggcgactactgccaaccccgcaaatgacatcagatgtaccatcactgtggtccagcacattgcctcatggaaactcatggacctggaaattcaaggctggacggagccacttgtccagaaggcgctcttacagcgtgcgaccagtggactggaacttttgaatgaatgactggacgaacgggacacagctaaac

SEQ ID NO: 576977 - DNA, 294 bp, Homo sapiens
ctagcaagcggcagtagcctggacgggccctagatctcccggtcttcgaggcgggaggttttgcaccaccccagcccgtagcagccccccggtgactccccatcttcaaacgcattctctattctgagtaacaaagtgactggccgggacagatcaggctggattccagcggggagccacgtctctagcacagtggtctctgcatggacccgagggctgtgagaacttgggggacagtaatcaagtaatccccttatccataatgcataaacccactctcatgacatcacgcac

SEQ ID NO: 576978 - DNA, 335 bp, Homo sapiens
ggcgggatcccggcgtgggcatacttggcacgtgcgctatcaggagcagctccttcctgtacgtctccaagagcttatgcgaaacctcatagaaatgggttagtaggccacgatgtggaacagcagggggtcgtttactcatcctccccactaatggtagttttctagattcacaacattcccttgagtaattgaagacagacttttccacttttcaccatgtattataggtcaacccactccaaggatggcctgctagtacctacacacagacttctccagattcctcgataatattccacgacacaccattttcttcatatttccttcgaagg

SEQ ID NO: 576979 - DNA, 156 bp, Homo sapiens
gctcgacgtcgacagcatctgtcaccccattgtacgccagggttgattcggctgatctggctggctaggcgggtgtccccttccttcctcaccgctccatgtgcgtccctcccgaagctgcggctcggtcgaagaggacgaccatccccggtcgac

SEQ ID NO: 576980 - DNA, 738 bp, Homo sapiens
  misc_feature (738)..(738): n is a, c, g, or t
tgaggtgtcagtgttcccctgctggggggtgcctcccagttaggctgctcaggggtcagaggtcaggtgtcagggacccacttgaggaggcagtctgcccgttctcagatctccagctgcgtgctgggagaaccactgctctcttcaaagctgtcagacagggacatttcagtctgcagaggttcctgctgtctttttgtttgtctgtgccctgcccccagaggtggagcctacagaggcaggcaggcctccttgagctgtggtgggctccgcccagttcgagcttccctgctgctttgtttacctaagcaagcctgggcaatggcgggcgcccctcccccagcctcgctgccgccttgcagtttgatctcagactgctgtgctagcaatcagcgagactccgtgggcgtaggaccctccaacccaggtgcgggatattatctcgtggtgcgccgttttttaagcccgttggaaaagcgcagtattcaggtgggagtgaccctattttccaggtgccgtctgtcacccctttctttgactcggaaagggaactccctgaccccttgcgcttcccaagtgagggcaatgcctcgcctgttcggccgcgcacggtgcgcgcacccactgactgtgccactgtctggcctccctagagagatgacccggtctccgatggaatggggaatcccggtctgggcgccacgggggggtgcacggggggtcctttggcattggccn

SEQ ID NO: 576981 - DNA, 263 bp, Homo sapiens
  misc_feature (28)..(28): n is a, c, g, or t
tgatctagaggatccctgagagacgttngaatcgggatgaatcttatcatgatgctaagtgaataagccagacacaaaaaatcaagatgtatcattctacctgtatgaggtactttaagtagtcaattcatagagacagaataagattgtggctgccagagaatgagggatgggggaaacgggaaattgtttaatggataccagcatttcagtttggccaagatgtaaaagtttgggagatcccattgcaacacggtctctca

SEQ ID NO: 576982 - DNA, 325 bp, Homo sapiens
acaagttcgatctaaggatccccgattctctgtggagagggtgatgctctcttgtggggtgacgctctctcgtgtggggtgacgctctctctgtgagggtgacgctctctctgtggggtgacgctctctctgtggggtgacgctctctctgtgagggtgacgctcgctcttgtggggtgacgctctctctgtggggtacgctcggggggcaggataagctgcgagcagtgtggcgctcttatacgcgccgaagatgacggtctagggtgtgtggtgtactgctgcggaggctgatggagtggaggaagccaaggtggagttgcat

SEQ ID NO: 576983 - DNA, 126 bp, Homo sapiens
cgtgatgattggtgcctgtttcctcattgtaagtctattctctgctaatcttggtgtatcagatggcttctctagaatcattctgataatacttctaattaattatatcattttatgattttcaaa

SEQ ID NO: 576984 - DNA, 334 bp, Homo sapiens
gtaccaacatggtgaaacccatctccactaaaaatacaaaaattagctgggcagtggtgggcacctgtaatcccgctacttgggaggctgaggcgggagaatggggtgaacctgggaggctgagcttgcagtgagccaagatggcgccactgcactccagcctgggggacagagcgagactccgtctcaaaaaaaaaaaaaaaaaaagaaagaaaccaaggtgtggacagtagatgggggagtattttatgggtttcccctcttctttatctggattggttaacaatttctttaaacaaacacgtatccctggtgtcatcaagacaatggtatg

SEQ ID NO: 576985 - DNA, 129 bp, Homo sapiens
ccgagatggtgccactgcactccagcctgggtgacagagcgagactccgtctcaaaaaaaaaaaagaaagggtgtctcctcatcacttatggtctcccaaagattcttatggttaccctttcccgggct

SEQ ID NO: 576986 - DNA, 427 bp, Homo sapiens
acaacacgcaccccacacagacacagagggaaggggttgggattgggacaaggttccaacaagggggggtatggcagccctctctccaaaaaaacagcttctcctactcccataagccccctttttttcccctttcccagtaagggaaacatagcgtgtttatattttatggccaaactattttgaattttgttgtccggccctcagtgccctgccctctcccttaccaggaccacagctctgttccttcggcctctggtcctctctggtcccctcctgggtttcttacgtagttgatttttcctctttagtctcccccgacctgcgcccagccccgtggcccctgcccctctcctactctctgtggcagtttcatatttgctaagacgaatttgctcattaaacattttgttgtattttactttaa

SEQ ID NO: 576987 - DNA, 1219 bp, Homo sapiens
tccggactagtgcggggacacccattaatgacgcagatgagaccctggaccttctccagcactgacctgcatggaaacaacctcttcctgtgtgtgcatgtgcatgagctgtggccacgcgctggggctggagcactccatgcaaccccaatgcccatcatagtgctgccgttctaccagtggaatggacgtttgacaccttcaatgctgccctgcaggacgatactcctgtgtgcatccatgcagctctactggtaaccccatgacggtcatgccacatgcctacccatgccatctcccacactagtgacgccacgtgctggacaggccggccatgaccaccggcctgccccgtgccatccccaagacaagacaccacccaggctgggaatgcccagaacatggcccccaagcagcccgcgcgcaaccacccaccgaccaaagcacacacgagacacaaacaagacagcggccccgacccaagaacaggaccccaaaacgactcataggagacaccagcagagccacaccagcggcaccacaagctggagcaccaatgaataaccatgagcgacacactcggtaccgctttgtactcaacgtgacaccacctagcgaaccacaggcagcattacacaaggaactaaaccaatctgttcacttggttacaaaacctaaacaccccaaagagcccataaataatgcaactaatcttgggcgacattgccaccatgtcccaccggtgcatccctccttccacactcgcttggacccgatgtgcatgccgcaccaacaaccacttggtcaagtacaaaatgtactcacttccaaccaaacatcaatctttgaccacgcgtatcaactggacatcctactcgcgcaaacacgacgaaatcctattgcatccctcggtgcatcacctataccacacggcagagcggcaccgcgaaccggcaaccagggagcaagccacacgaaaacgacacgagacaacgcccaacgaggccaaccacatgacagacgcccacaccgacccacggcacacgcgccgccacgcgccgacgcaccggcacagggcacgcaccaacaagcgaaccaacccccgcgggagacacccggatacccaaggacccactgccggcctcagacgcacccgcaccgcccgccgaaacgctgacaagcacgccccgcccccacacaggagcccgcacaggaaaca

SEQ ID NO: 576988 - DNA, 102 bp, Homo sapiens
gcagatgaacgatggtggctggaaggagaggggacaggaggacgaggctgccttctctgctccaagggaaggcacttgcagttggggatggcctggtgatgg

SEQ ID NO: 576989 - DNA, 267 bp, Homo sapiens
ttttttttgtttgttttaagttgcccggggggatttttgacttggggcccttttttccagccagcccctgccttttttgtaatattaagggccttgagttggaatggggaagggggccaagggtcattttttggggtgggggcaaaaatcaaatcagcccagggatttggttgggtttttttttttaatagggaattcctaattttttcccccaaaggggtccccctttaaatgttttaaaatttttgttttggggtttaaccccca

SEQ ID NO: 576990 - DNA, 417 bp, Homo sapiens
  misc_feature (16)..(16): n is a, c, g, or t
tctttaaaaacctagnatttctccatgccatttattccatccaggccaattgttgagtggcccactgtgtgttctgatgaagccaggaggccccgtgtgatgccaccaggtgagccaagaccagataaagtccctaccagtccaggaaggtgctatgtttagaaagccaagatggcccgtaatcccagccaatttgggaaggccaaggccaggtggatcatctgaggtcaggagttcgagaccagcctggccaacatggtgaaaccctgtctctactaaaaatacaaaaactagctgggtgtggtgccaggtgcctgtaatcccagctactttggaagctgaggcaggagattcacttgaacccagtaggcagaagatgcagtgagccgagattgcaccactgcactccagcctggg

SEQ ID NO: 576991 - DNA, 354 bp, Homo sapiens
atggaaacatgagattgagatttaaaatctataaaaaaaaaaaatttcatgctctcctctatagcggtatcagatatttagtcacagaatgggattttatgtaaattgctttatgtttggggagttggagcacggtatcttttcatcaattataaggaaaggttgaaacttctgagtacctttatagggggttctcttactatttggctcttgctagaactggtccaacccagattggtcagagatctcatattggagccacatacaggcaattcacatatttctttccctttgaaggatagacattggatgggataagggacaaggcctgttgggttcacggccttggactgg

SEQ ID NO: 576992 - DNA, 1031 bp, Homo sapiens
ttagttcttccgccgctccgccgtcgcgttgctctggccgtgtgagtccggccccgtgcctcgtgggcctgtatctggacgtcgcgaggcctgagccccccgaccccggctggtcccgctgccagtctgccgaggtctcgtggtgccttcccgcgggagctgaaggcggggtgggtcgggtcatgtcgcattgtggaggacatcgcacgccttggctggagtcatggaacgagaggctccggacgagtgtgcaaaagctgggtttttggtgtgagtaccagacgctaccactgagaccggtgtaactccatcacaatcgttcgaggcagaccgccaggacatcatcgtgcgttcactgtgctgggcatggtggccataaggagtcctagcagtgaggcctgacgatggcctacgatgcaaagcagtggatactgagactaagaaagtaccccgagtatggagacaatggccatcgtacatcaaacctggtaaaggaatgtggataaagtatcatgggtaacccactaacatatcgtactcactgagactgcgcgtggcccggaggagcacccagtgctgctgaccgaggcccccctgaatcccaagggcaacagagagaagatgactcagattatgttgagaccttcaacaccccggcatgtacgtggccatccaggcgtgctgtcctctacgcctctgggccgcacactggcattgtcatgtggcctctggagacggggtcacccacacggtgcccatctacgagggtacgccctccccaggccaatcctgtgtttggagcttggtgtctggactgaacgatactctgaagatcttcaatgagcgaggtacaggttcacccaccgaggcgagcggaactcggggcgactctaggaaggtgtgtcgtgccggttagggggtgccggcggtctcctttttgggaaggaagcgcggagccggacaccatgagcgtcgggcgagcggtcaccttctgtgattgggccagacctactcttgtgtccctaacgggg

SEQ ID NO: 576993 - DNA, 307 bp, Homo sapiens
ccccttgaaatgcgcagaaattatttgggctatttgaaatgggcacagaaacttagtagtccacatctcaaaaactgaaaagaggaagaaggatcaaggcatgttatgagcaaattaaatcttcatcttgcacatatcacaattcaagagataaagtccatagttggttattctaaaaatagtaatattaaaatattatttagagatattgtaatcatcacctgaaaacactataataaaagcagaaagctgagtagttgcctctggaaaaatttcaactattgtttttcatacattatacatttca

SEQ ID NO: 576994 - DNA, 327 bp, Homo sapiens
tactttcacagggaacaggcatgtgaagacacagaaagaggtcggaagccaaggagagtagccttactagtaactagaccctgtaaggcatattcatcttggacttccgagcctccagcaagtgtgagcaaaataaatttctggttaagccacccagtaagtccatggatattcatgtatgacatggcctcgactgactaagtacaagagtgccatatagttctcctgatctcaaaagtggaatatttatgggggcatttggaagcaagaactcattacgataacacagagatattataatggatgattaagatcaaactccagtcc

SEQ ID NO: 576995 - DNA, 236 bp, Homo sapiens
ctcgacattgatcgcccctccacatcgggatcctttgactacaagaagcctcctcctgccacgggcacagacactgtcatagcacactgggtggttcagccactctcagcaatgatccagaagtcatcaggcatccctgtcaagccagtaaatgggcgcaagactagcttagatgtttacaacagtgcagagccaggattcctggctcctggagcccgtactaacatccagtaccg

SEQ ID NO: 576996 - DNA, 119 bp, Homo sapiens
cacctgtggtcccagctactcgggaggctgaggtgggaagatcagtggagcctgggaggtcgaggctgcagtgagtggagatggcaccacttgccctccagcccgagcaacagggttaa

SEQ ID NO: 576997 - DNA, 110 bp, Homo sapiens
  misc_feature (74)..(74): n is a, c, g, or t
ggcggccctggccagaagcggaggaggtggcacccgggaccgagctggggtcttggaggaagagaggatggcgnagttcggtgcctgactcggtgtgttcctgcgactgc

SEQ ID NO: 576998 - DNA, 322 bp, Homo sapiens
gcgtataaatattagacaaatggctactagaataaacagcatagagaagaccttaaatgacctgatggagctgaaaaccatggcatgagaactacatgatgcatgcacaagcttcagtagccgatttgatcaagtggaagaaaggatattagtgattgaagatcaaatgaatgaaatgaagcgagaagagaagtttagagaaaaaagagtaaaaagaaatgaacaaaacctccaatttatttggaactatgtgaaaagaccaaatctatgtctgattggtgtacctgaaagtgacagggagaatggagcgattagggttagt

SEQ ID NO: 576999 - DNA, 155 bp, Homo sapiens
gcatgactattaaccatatactcccccaaaatcagaatatacacacccgaccacaccgctaacaatcaatactaaacccccataaatagtttatgctgtaatagtttatgctgtaatagtttatgctgtaatagtttatgctgaaatagtttatg

SEQ ID NO: 577000 - DNA, 589 bp, Homo sapiens
gtatccaatagatatattaaaaactttcaaaacccaataagaaaagcaacctgatttttaaaatgagtaagactcatacagtgaaactatgaaacattttttaaagaaagaagatataaataagtggaaagatgtcatatgttcatgaattggaaaacttagtcttgttaaggtggcaataatccctaaattgatgtacaaattcaacaaattcaagtgcgtatcagattcccagctgtgtttttgtagaaattgaccagctaaaatttatgtgtaaatgccagagactcagggcagacagaacagtcttgaagaaagaagacttatacttcccaatttcaaaatgtactacaaaaccacagtagtaatcctgaccatgtggggctggcccagggacaggcatggagatcagtggaatggaggtgatagtccagaagtgaacccttccatttatgggcaagtgatggtcaacaaagatgtcaagatatccatgggggaagaatagtcttcaacaaaggtgctaggaccactggatatccacatgcaaaagaaggaattacagccagctgtggtggcacatgcctgtaac

SEQ ID NO: 577001 - DNA, 412 bp, Homo sapiens
cacccgtccccaaaagggggccccttgggtgggcctggccctgctttttacgccaatttttttccaggtccatgttttcccaaataccgttggtttgaatttttttaaaggcaaaaccgtggtctttattttaaaaaacagtggttatcacactgcggttggtcattttttttccacatccctttaggccaatgggtttggcaaaaatcaggcagaagtggggacctttttagaaatcattgtcagccttggtaattgaaggtacacccccttgggttgggggttctttccccaatgccccaagttgtccctgggatttaacccctccaatgctgggggtgagctgtaattttttgaatgccccctcctgtgtaacggctacaaaataaaacttggttttgaatttttttta

SEQ ID NO: 577002 - DNA, 120 bp, Homo sapiens
tcaggcattgagaagcagctgggcaatatagagagaccctcccccacaaaaaaattttaaaaattagccaggtgtggtggtatgtgcctgcaatcccagctgttcaggaggttggggcag

SEQ ID NO: 577003 - DNA, 222 bp, Homo sapiens
ttatgcacgtcactgggatgaggacgtcacttacaagaggggtagtaaaatacacaggaaccaacagcagtgagtcagactcaactaaatcgattcaaagcttcacgtcaacaattttcataaacacatggtataccaccaatacaacccaaggtgagaacatttctttctaacatagtagatatcacatgttccataatcacttgggttgtccccaaaggt

SEQ ID NO: 577004 - DNA, 152 bp, Homo sapiens
taacatccaacctctattctggaccctgctcatcttcttatagcccttgctaatctagaattcctatttaactattgtctatttccagtcatagtactgtaccttgtaactcaggtatacttaattatcaaccaatgtatatactatatata

SEQ ID NO: 577005 - DNA, 888 bp, Homo sapiens
  misc_feature (8)..(8): n is a, c, g, or t
  misc_feature (21)..(21): n is a, c, g, or t
  misc_feature (42)..(42): n is a, c, g, or t
  misc_feature (116)..(116): n is a, c, g, or t
  misc_feature (123)..(123): n is a, c, g, or t
  misc_feature (185)..(185): n is a, c, g, or t
  misc_feature (219)..(219): n is a, c, g, or t
  misc_feature (270)..(270): n is a, c, g, or t
  misc_feature (275)..(275): n is a, c, g, or t
  misc_feature (297)..(297): n is a, c, g, or t
  misc_feature (335)..(335): n is a, c, g, or t
  misc_feature (342)..(342): n is a, c, g, or t
  misc_feature (349)..(349): n is a, c, g, or t
  misc_feature (392)..(392): n is a, c, g, or t
  misc_feature (420)..(420): n is a, c, g, or t
  misc_feature (500)..(500): n is a, c, g, or t
  misc_feature (552)..(552): n is a, c, g, or t
  misc_feature (742)..(742): n is a, c, g, or t
  misc_feature (755)..(755): n is a, c, g, or t
  misc_feature (758)..(758): n is a, c, g, or t
  misc_feature (801)..(801): n is a, c, g, or t
  misc_feature (807)..(807): n is a, c, g, or t
  misc_feature (873)..(873): n is a, c, g, or t
ggaggggngagagcggagganggggaggaacagggggaccanggagggggcgaccagcagggcggcggcggcgggggcgacggaggcacggggcccaggggaagccagccccagangcaggcncgcagggccaggggagggggcaccaggcggccccccggagcgacgcgccccaggaggacgcncacgggaacggccaggacgaccaggaggcgggcnggggacgggaaggggccaaggaaggcgaccaacgcaccccagaggaaagcnaggcncggcgggggcggagcggggacngcagggaccgcgcgggggacgggcgacggcgggggggngcgggcngagcggngcgcggggagcgcgcacacgcagcagcggcacagacgggacgnggggagcgcggccggggacacggacganacggaccgcgacgggcggggggggggggaggagcggcgcaacgcgcaccgagggccacgacgcgcccggggaagaagggnaggacggggaggaggcagagaccgacaaaaagaggcgggcgcgggacgacgngcggggccggggggccgaccaggagggggacgcgagggccacgcgagaggagcggacagccggccggcaccccgaggagggcccgcacaggcgggacagggggagggcggaaacccgggaggaccgggacagaaacaaagagggcgagggccagggggaggaggacagcgcggagcgggacgcagccganccggggggagganganccggcgggggggcagacggagaggcagcagggccgggacggcngggagnggaacaaggaggggcaacgggaaggggaaggaagggggccacggggggcggcccccggcccaagancaaccccggggggaa

SEQ ID NO: 577006 - DNA, 303 bp, Homo sapiens
  misc_feature (16)..(16): n is a, c, g, or t
  misc_feature (42)..(42): n is a, c, g, or t
  misc_feature (60)..(60): n is a, c, g, or t
  misc_feature (62)..(62): n is a, c, g, or t
  misc_feature (76)..(76): n is a, c, g, or t
  misc_feature (112)..(112): n is a, c, g, or t
  misc_feature (126)..(127): n is a, c, g, or t
  misc_feature (157)..(157): n is a, c, g, or t
  misc_feature (169)..(169): n is a, c, g, or t
  misc_feature (209)..(209): n is a, c, g, or t
  misc_feature (277)..(277): n is a, c, g, or t
cacacacacacttagncttgtaatttcagggcagaaattctnaacactattttgcatctntnttctttttctaagncatgataatatagatgttctggtctatcataaaagnatgtttatgtacanntcagtcattcggtatgtgggctttgtaaantaaagtataggnaaaacatttctgttatacatagatatataattcccccccngtaaaacttagtttgcacaaatgggcacaatattttttgagactgtttttattgagacccctaggctnccacagaacctaaagaaatatgctgg

SEQ ID NO: 577007 - DNA, 1311 bp, Homo sapiens
ggagagaactagtctggttttttgtggttttttagaatatggtggaacttatactggttaaaatcactggccattgaaatggatcactagctaagggtcactaaatttacaaacttagggaaattatatataggaagtacggcaaaaacgacaagtaaaaagagctgaagttcgcccatattctggcggtcaggaagtctcttgcactcctaagcttacatatgtggtccttctgggcctttcaaaatattctggctaattaattacctggtgatattcctccctgtatggagtactatccctatgtggtgcaccccgaggggccaagaaccttaccaggagccttactacgcttcagatggccatctattttggtgatagccatttcagaacaggtttcccaatggatacgcctggcgtagaacagaacagaggagatacgcttggcctggtgctaacatatatatattactaccctggtggtaccgcctggtactttgtctaaggccagggaggctacctctcatatttatggggaaaatctactgtctctgtattgcaagcttggtgtggacactcaatacaaggcgagcggtaaaatgcggggcccttgtgagacattattctttcccaatacgtgtagggtaacccgaggtgcctcgcgtgaaaagtgaatatcccgtattacagcgcccatgaatatacagcgtggtcttattcaagacctgcgattctctcttatcattatacgccgcggactccttactatcagcgctatatattctgcgtggccattttttatagacccccatttaattttgtgccacaagtaactcaacttccgtagagcgccttataaatgtcgccaccccatgacagacttggggatttctcacccaattctgggtcgttggccatccacggttcctgtggtgtggccccttataagttcctttataggccagacaaacaccgatgttggtaactctaatttcccccagttggggggtcaccttccacagtgtggttccaaacagtgtgctaaaaccttttcacagtcttcctcgggaagaggcaaaacttccacgactgaaaaggtgggggcccttggtggtgggggaaaaaatcttcccataattccaacaaggtgttaaaaacacgttgtgctcccaagcggtgaaggatttagggactgagcaacttacccaaggcccatcctcattcattctattttcacacccccgccttggggagcacaacaccttcttatacttcattccccaccattttgtgtcgtttttgggcaacccc

SEQ ID NO: 577008 - DNA, 920 bp, Homo sapiens
tcgtcgttatctgcgccatcagttgctttggccttccagcagcatctgctcaagctgctcctgggcttccagccatgccatttcgcactcttccaggccggatttggcgctggcttgctgttgcaggcaggcggtcaactccgctttacggctctggtcatacagttcgctgtcgccgagtttctcttccgcctgcgccagttgcgcgttcagcttctccatctctttttccagacgggcaatctctttacgcagtggctgggtttgcgcacgcagctcagctttcccgacgcttctgatctttacgtgcctgggcgctgttcgcattctctttggcgcttcgtcggtctggttttcctgcttttgtacgtcgctcaaccactgttgataatcttccagatcgccgtcgaacggttcgactttacgatcgtgaaccaggtagagatcgtcagtggtggaacgcagcaaatgacggtcgtgcgaaacgacaaccagcgcgccttcaaactcgattaatgcttcggtgagtgcctgacgcatgtcgaggtcaaggtggttagtcggttcgtcgaacaagcagcagattcggccgctgcagacaattaatgccagcaccaggccgggctttttcccccaccggagaagcgggcgcgtatacttcggttactttatcgccctgaaaaccaaacgccgcgaaggtagtcaacgccattttctgttcccaactcctgacggaggctaaacgtgcacgattgttgaataagtgatcggtcggccgcaaggatttccaagttaatgtgggcgaaatagcccagttgatccttttgcagaccaattcaccgctgaattggggacaattaccggtaaaattgaataaggtcatacccgcgcatgaggggtaaaaaacatacagcggaccg

SEQ ID NO: 577009 - DNA, 370 bp, Homo sapiens
ccccgaagtatccggcctatccaaaaaaaatttaggaaaacaatcccatttataacagcaataacaaaaatatgtggatataaagttaaccaaggatatgaaaggtctgtatactaaaaagtataaaacactgataaaagaaactaaaaaaaaacacaaatagatggaaagatgttctgtgctaatgaacttggagaattaatgttaaaatgtccatattacccaaagcaatatacaaatacaatgcgacccctatcaaaattccaatgtcatttttcacaaaaacagtacaacaatccttaaattcatatggaataaaagacctcaaagaacaaaagcaatattaaacaaaaaagaataaagctgaaga

SEQ ID NO: 577010 - DNA, 133 bp, Homo sapiens
ttggggggccccccggctttccatttttccatggggttttcccccccccccgggggctttttcctggggtttcggcctgccaattcccccccctgccccctcttttcccataaaatggccttagggctgggga

SEQ ID NO: 577011 - DNA, 404 bp, Homo sapiens
tttttttccggaccccttggggtttttccgttttcccccccgttttttttccccttttccttttacatttttccctttcccccccccccggggccccccccgggttcttccttcccctttcccttcccccccctttgggttccctttcccggggggccttttgattttccattggggttcccgggtttcccattttgggttttttttttgggttgggttccccttccccggggttgttttttccccccccggggcctttttttttgaacttttttcccggccttttttttagtgcctttcccccctttttttttgcccttttttcccccccttttcccgcccccgggggccattggggttttttcgggggtggattttaattaattttttttttttttttttta

SEQ ID NO: 577012 - DNA, 1473 bp, Homo sapiens
  misc_feature (984)..(984): n is a, c, g, or t
  misc_feature (1108)..(1108): n is a, c, g, or t
ggtgcctagctacggtggtccgatcgaccctcgccgtccgtggtgtgtttgtgtgtatcactcacttctgcctccggtgtagtggtggggtaaaaaccaccatcgtgcccgacgctctttgagtaccgttggtgttggtcgtgtattccgtctggtagcccccgcttctggtcccaccatcagggaggggggggcgacccacgcccccagcgcccccgttgtaaggtaaatatagttggtgtcgcttccctcctttgtgggagagctcctttcaactaattgtgggtgccacccccgcccgcaaatgagcgtctcgttcgtctgtccgactaaaggatgtccccctgtattttttgtgaactcccctcccccgcgtagtgttaatattccgccggagtgtcccccccccgtgaaaatgtggggaggcatacacccgcgtgtttttccgcggcgagcggcccctcttgtgggtggttttcccgcagtggggggccccccccccccccccctcggggttttctctcgtccttggtggacacaccacacggtccccccacacgtccttggtccacactcccctccccggaaaacacatccgcgggctttctctcgggccgcgagagccacagcgagaggtttccctcgtgcccccccttctcaacgcgtgtggtgtcctcggctcccccgcgcgttggtcgcggtcgcccccgcgcctatcacacacttgctctcgcggggagcttcctctctcgcgcgcgcacacgcgcacgatgtttctcatcacgcgcgcgctgtgcgcacacgcgggagacctcgtcgcgccacgctctcgcggtgcacacaccgtcggcgtctcacacgcgctgggcgccacacgctcgtgtggcgccccgcagcaatatggtgtgttgctcgttgctcgccgcgctctgtgagagccacccccacgcttttgtcctcgctataggtagagagagagagatnttccgccgagagcgctatatccctcgagaggcgccgcccccgctgtatcccctcctgagaaactctgagagagtgagcacctctttttctccacaccgctctccaccgcactcacacccccccntcgccacagaagagacccaccgctctcttgtggcccacacaccacagtctctccgctcagagcgcacaccctctccacaggtctctcacacagtggaccacaccacacacacaccacggccccaccacaccccaccccacaactccgctaaccacgcctggaacccgcgccacaacactcaccgcctggaaacccactggagaaatccccacctttcctggccccacggttcacacatggaaaggaggtggaatggttaggtcctgctgggatgggccctcccagccccaacctcctgctcccgggcccagacccgactctgactctcctcttggggctgctgcccatttaaaccctactactaa

SEQ ID NO: 577013 - DNA, 332 bp, Homo sapiens
  misc_feature (85)..(86): n is a, c, g, or t
  misc_feature (130)..(130): n is a, c, g, or t
  misc_feature (134)..(134): n is a, c, g, or t
  misc_feature (220)..(221): n is a, c, g, or t
  misc_feature (275)..(275): n is a, c, g, or t
  misc_feature (279)..(279): n is a, c, g, or t
  misc_feature (284)..(284): n is a, c, g, or t
caatgtcccttgggccagaatggacctgccctttttgctccaaacttgggggtaaatagggacccctccttttaggcaaagcctnnctttccttccattggtgggtggatgggtggggggcattccaaancctntaaggtagccagttttgttgcccattcccccagtttattaaacccttgatatgccccctaggcctagtggtgatcccagtgctttnntgggggatgaaaaaaaggccttttatagcctgggcataagtgaaatcaccaaancctntgggnggatgtgtaaaaggcccttcaaaatgcataaacctgttccaatgttta

SEQ ID NO: 577014 - DNA, 167 bp, Homo sapiens
atacttacatacacgtcaaacgttagatggtgatcaggttcggatctgtgtccccaaccaaatctgaaccccaactgtcatcctcatgtgtggggggaggatccagatggagaggtgactggacccacagagagtagatttccccctatgctgttctcactgatagt

SEQ ID NO: 577015 - DNA, 133 bp, Homo sapiens
agttccgggtcccccactacactggaatctcccctcctcacagttgccagtgtagacccctttgaagaggggaggggcctagggagccgcacctttgtcattgtaccatcaataaagtaccctgtgctcaacc

SEQ ID NO: 577016 - DNA, 526 bp, Homo sapiens
gggccgggcgcggtggctcacgcctgtagtcccagcactttgggaggctgaggcaggtggatcacctgaggtcaggagttcaagaccagcctggccaacacggtgaaaccccatctctactaaaaaaaaaaaaaaaaaaaaaaaaaaaaaatttttgggcggcttgggcccttgaaaaagttttctataaacaattctcggttggggcgcgcggcgggcgcccagttaggagtacaggtagaacattgggtcaattagggcgtgggttctcctataggagagagactccgggggtcatatagaattaggggggcttgggagatcttctctcacacaatataaaaaaaaagcggcgcgcgggggggaacaccgcgagaggcgggtcttgtgagaaaaacatctccagaatgggggcggcttctagagaggggctcaatctaaaccgggggcttcttatctcacaccggggaggtccacagcggagagcgtctcagattctctaaaatttagcgcccggcttctgggt

SEQ ID NO: 577017 - DNA, 198 bp, Homo sapiens
tcgagctcggctaccccagggtagactaacagagtcaacgtcctccctctgtgagtggagtggaaaggtcgtgataggacaacaatcctgttctagtccacttccccttccccaaaatactattccgcacttgacttgagcttggacatgaaacagtcatgttcaatgttcttcatacttctataccaaaggaacttg

SEQ ID NO: 577018 - DNA, 799 bp, Homo sapiens
ggtggggcgagaatctcaggtaccccgggcctagggccgttgggcccatcgggcagagtatccctgtccggttgagcctcatgattgcggaggtgcattctgtggacgcagatcaaacaagttctgtgcgaaagccctctggaggcttctgtctatttcgaggtcaccccagtcgccggccctctggacgtgcccctgacgccatggtggttcccccccaggtggtcacccgtgctgatgaccagcgctgaagcgaaggctggccttccaggagccattagatcgtgatccccagggcctctttagggctgtcaaagagtgaggaacctggctcacagtccagccaccagctccacgcacagccgaggagggcgcggaagccatcacgtacccgggccacagagccgtgccgtgagccctgctgaagagtgcctagcgtggcccagtttgtgctcacacccagcacggaggtgtagcagcccccgctatcaccgcgatgccagggacttcggtgcagatcaagagcctgggcagccagcttgctactgaggccaggctgataggagctcaggagggcgagggagtcggacgagaggaggcaaggcccacggtgggcttggcaccctcacagacacgcggggctggccccctgtgctcaccgtctgggctttgtctccgagcctttgctcccagcgcaccactgagcatgagctgacgggctgccatggagcggctctgattggaggcttgaggcctgtggctggtcgggtggagctgctgatattcctcagatctgtga

SEQ ID NO: 577019 - DNA, 228 bp, Homo sapiens
  misc_feature (38)..(38): n is a, c, g, or t
acaggaacctgtggagagcgaaggcagccagcaggttnggggtggcgggcccaagctcagtgtggcttcctctgaggcctcacccagttcatgggcactctggagccagagaagggagttgagccttctacaaacacccctggcctggcaccagcattgggatatgtgctgcttcctgacagcgggtgggaccttggcgaggtgctttgttggtctgtaattcctgct

SEQ ID NO: 577020 - DNA, 1259 bp, Homo sapiens
gctctcgcaggaggcctgcctgggcttcattgctgtgctcagggtacatgggcgagctacccggtaccaagaggacacgctccggctgcgagctcaccgaccatgagtctttgacgggtccccgtgatacagccgagccctctgacacggaactgagtggcattatgtcgctgattcctgcagaggcaggctgtagccgacgaagccatccatcagctgcttcgctggcagtctgccgaagagcgactgcctcactcggccattcgtactgcactgacagaacggactctagcaatagcgcctgagatatacgggtcccggcaggttaccctcccgcgaagcatgggtggcagggtggtacggcccataccagacgttgaagcagcgagctcacggattttgccagcgaagtagtctgatttcgcgctgagatgacaggtgacgaagttcactcctgctggatgctccactgtgaggccctctgctgatgcactcagggcttgctgcagccatggtcccaggcagctctgtgactgcctaaagggtcacgcgttcctgtcttgagaagacgctcgggaggggatgggacgagcgctgtgggaacgacactcacgtagcatggacgtatgcccgttttccatttatgctttaaagtagccattgccccaagactcgtgtggcgccacaaggaggggatgtctggggaccgcgtgatgggggacctctagattttatagaccggcaataagctcaagcaggggcggccacgaggtagggtaccctccatgtccccgggaggaacaggtgcccctttgaaattagtacggcctcgagattgccgtcacgttggccccctttccccaagggtaccctctcgtacaagtggttacctcccaggcttcacagggctcacaggggagcttcttgccatgacacaattctgggctacccatgaggtctggcgtacccttcgtaaaggttcccctttcaagggcagaagggaaatctccaagggcccctcctttgtggttctaaaacaatttggacacggaacgcaccctgggctccccttacaagtgggtttcccgttgtaagaagatattgaccttttcgtttgccatattggaaccttttgggttccgccaccagcgttttggagtcacgcaccttggggttttaaaacaaaaaacggctccgggaccccattcgacattggaaccgggaaatcttggttggggcctccatattctcacacttta

SEQ ID NO: 577021 - DNA, 838 bp, Homo sapiens
  misc_feature (158)..(158): n is a, c, g, or t
agcgggggggccagtgcctgctcgggaaccgtggcggctggccggaggcggggatcccgcggctgcggcgacggtggcctgcggtggagccactggggcgggcttggcttggtgtgacggctggcttgcggctggctggtggcaggccatgcgactangtgtacaggcggtcctcactcttggccgggtactattggtcggccagcctagcactccatatgagctcggctatgctcattggctttagctcaggcactacctcagacaagacttctagagtgcacccagttgggccctccgttgatacactgccaagctactgaggcgcgatcgtcgtccctggcctgtcgatccgttcgagtcgaccttgtgcactttgagcttcataggtgaagccctcaagtgcacgagatcgaacggcgcgttcgatgccgagtcgaattgcacccgagttcccctcacgcagtgatggtcttagatcggcaagatggtggcgcgataccgccgatcagactgcatgcttgtggacaccatgtcggtagtaggtgtgttgcaggacgcgagagtgggagattgttggtaagacttcgggaaggggtccagttggatgtttgtagacaccacaatggagaggtgattgggaagcagggttgacacagtgtacgtgggtgggtaaggcgggcagtggttgctgcttgggggaagcaggaaagcatcgcgagaggagaggagaaggagggatggagcgtttagatatggtgccaggtgggtaggtcgttgttgggaggaggggatgttgagaggggaggagactagtagaggggtagatgacgtaggc

SEQ ID NO: 577022 - DNA, 588 bp, Homo sapiens
aaattttattatcaatctttaaaattttaatcttgaccataagatacagcttccataagccttttttaacctttataacctttattaaggggtcggttaacacttcaagaaaacctttttaatctgatgcaggggcccgtatgctggtattgcatcagtgtgcctttgacatcaattattaacttgcagagaaactgaacttattttgtctctcaaaatcagcccttacaatctcacatgcctacctcttctggggtagttcctgagccttgaggagttgaatagcttttacttctggccttatgtctcaggaatgcagtttattttgattggcatcttctaccaggcctgaagatgaggttttaattgctgtcagggcttaagatttagcagaccttggtgtccttgttagacccaggagtcaaaggcctgtaacttaatgtcacaggtactttcaaagcacctacagaaatatacatggatgtaataaccttaattttaaaaaattatctcagatactttttcctgaggcaatcaaaaattattattacccgccttacattgttttaaaaacccaaaaaatctgtt

SEQ ID NO: 577023 - DNA, 1467 bp, Homo sapiens
  misc_feature (1231)..(1231): n is a, c, g, or t
  misc_feature (1234)..(1234): n is a, c, g, or t
gatcgtttgcgcgaaagtgtttctgacaggcgtctaaccgaccaaggccctgctggtgaacaccatagtaagagagagtgattatcttcgcggcgacactcaccaggtggtttccctcctgagaacctcatagttatttctccccttggggggcagcgctccttaaaagggaagctcatctctgtcccacgatggttttttataaaacacgagggggataaaaaacatttgattcgcggggcgacaaagaaattttcttctggcgccacaggacacgcccactcatgtgggggcaccccaaaaagtgttgctacaacccggcgggggaaaccccaacgcccccctgtgagtttccccttgtgatggggtaatggtacccccttgggtggcacacgaacccttatggagttgtaccacccaggggagggcgtgtgggcccccaacataagggaaaaggaggcgcaactttcactcgggaagtgtaaaacctctgtttgttgtaggaagaaaaatttcactgcagaaggacaacggacaacggaagtggagtatcccccaaatgtgtttggttttaaatgacgccaccttttgaggggctttcgaaattttgcccaccccacgggaccccgagttccacacactcggcacagtgcctctcggtggcgccttgggggagacacacacagagagttgcaacagactggagatagagagctttctctgaagatatccgccctacacacacgacttcccacagacacacatcgtcacattgtggggcatatgcgcacagagaatatatccccacagtgggtttgtatatttatccgtggggttttcgtgggagacagagaagcgcgtcgctataaacagagacatatacctataacatatatgtctcgtgtgggtatatatatagggggagatttgagaccacatcggttatactcttctgcacaaacaccacagcgagacacatcttataagagacacattttatacatatatgtatataggggccacatagagaggagagatatatgtggagaaaactacacagagaatataaaggagaatactgccctcttaaaggagaggcttaccacaattcactgtgccgcgggttccgcgtgggcgtatcatccacgccctcgtaaattcccacgccacactcttgggagagggctgagagggcgcggtggaatacaccctataaggtgtcacggagagnttntcgagagagaccacagccctagccacaacactggtgaaaacctcgcctttatctataaaaaacacaaaaattagccacaggcgtggtggcgggtgcctgtaaatcccggctaactcacggagaggctgaaggcacaggaagaattcgcttgaacctgggaggctgaggttgtcagtgagccgagattgcgcccttgtaatccagcctgggcgatgagccaaactccatttcca

SEQ ID NO: 577024 - DNA, 1098 bp, Homo sapiens
tcttaggtgtgttcgttcctctcttgtgttccctctctctttctctctgcgtctctgctcccccgccttgtcgtcgtctccgctcgttgtttctggatgctcgctgctgctctacccgctgttctacccctggtggctatgtcgctcccctgcttcggcatttatgctcccgtttccttctccatcctgtgccgttggcttttccactcgtcctttccgcgcgccgtgaccgcctgtctgcttcgggctgccggcagcctcagtttcttcttgcctgttttgttctcctgaggatctccacatcatgtctctgttgtgcctttttccctggtgagcaacagttagggaaggtttccaaagcctctgatacatgtgcttccgtgatcaggagtgcgctccaaaccagatacgcccgcttgccccgttgaggccagtgagctcagcctcccaggctttgaagccacatttcagtcaagagataagtcgcctgagagctcgcaggttcattacaagaaggcgcaagcactggtttctctcctctagaaaagtaggtttcttggcttgatgtagactggcttgcctttggatttctctacttcgaagggacatgtacgtaaaacccaactagggcttggctgttcaaaggagacaggatggatggatggatgggatggatggatgtatcggatgaatagatagatcgcgtgtttgcatgtaaacttgcagaggcatacacacaagacccaaagctgattggaacacaattaacttgtgggtgtctggagggggtactgtcgcaacgctttgggcatgcctttgagacagcggtacaagagttctgtgcctgtgtgtccagccctggagccagccagtgcatttattttcagctcttagaagcaactcctgtggcccaggaatgcgtgacccctgcagatgggtccacgcatctctctacacttccttctctccgtgggatactggactcgtgcctctgcgcccaattctcttctcacgcatatccaatgagctttaatttcactttctggatcacggtacgtccataaagccaggtattacacttaaatcgagattcttttt

SEQ ID NO: 577025 - DNA, 115 bp, Homo sapiens
ccgcgtgtcacgcggaagcgtctgcctaatatcggagcggcttgagcgtcgaggttaggtgtacagcgcggacgtttaaagcagttggtcagtcattgtcgcctgcacattgctc

SEQ ID NO: 577026 - DNA, 295 bp, Homo sapiens
cgacttctgtacttagtttccttgatacgaaatgaaagaaacaactttatattaatagatgagcttgctggctcttcctgctgtcatacacgataattctgtaaaattacaaataatgctagatcacaaccctaatctcctggtaatctctttcatggttttcatttgttcacgtctttgagattatgaggaaagcaaaatccctgttactgaaatatcaatactttcctcaaaatccctgttagtaaaatatcagtacttttctgaaaggttgtagggaaggaaggttgctagg

SEQ ID NO: 577027 - DNA, 298 bp, Homo sapiens
tgggaaggggggccccattttgtggccaaaattagagaacgggggaaaaatcggggccaacggaaatttcggcttcgggggccaaaggaattttttggcttaagcccccgggggggccgggtttaagggtttttgccacaaaaccgggcaaattttagtttttccggaaaaaagggggtttgcccaattgggccgggggggcctaaaactctggccctagggggaccccccccccttggcctccaaaggggtggggtttacagagggggccccccccccccggtttaaattttttaaa

SEQ ID NO: 577028 - DNA, 768 bp, Homo sapiens
gctgggattacaggcaactgccaccatgcccggctaattttgtattttagtagagatggggtttcaccatgtggccaggctggtctcgaactcgtgaccgcaggtgatcctcccgcctcggcctcccaaagtgctgggattacaggcatgagccaccgcgcctggcctctgcttactttttatatagcaaaatgattcctcttggcaagatgtttcttatattattccaaagttatttcataccattattatgtaaatatgaagagtttttttctgtttataattgtttataaaacaatgacttttaaagatttagtgcttaacattttcccaacgtgggtgggaagcattattgtttaaggaattggaagtagggtacccttggtatggcggtgggtcgctttggcattttccctgagtgttattacagtgaccgggtctctttgcgtaaacgagaatcaactaggtatttaagaactggattattttaaccaatttatttggtttccacttagcagtgtaactttggactaggaatttggttgtaactttttataacagtgtgttaaacagagaaagggtccatgaaggaaagtgtatgagtcgcatttgtaaaaatgagactttttcagtggaactctaaaccttgtgatgactactaacaaatgtaaaattatgagtgattaagaaaacattgcttagtggttatcactttaagtttggacacctagattatagtcttagtaatagcatccactggaaaaggtg

SEQ ID NO: 577029 - DNA, 1091 bp, Homo sapiens
ggagaactagtctcgagttttttttatgtttttttgggacaggaagtaaaattatgggggagtataaaaaggggggcagcacttgggaagccctcatgagtgcagggcccgccatttgtccagagggccacgacgggggatgtactggaccccgacagccatcgtgggagtgagccgctttttcagccaccagtggtctgtcaaattcactcagcattgtgaactgggtgaagccccacttcttggaggagtggtggactcttcgtggcggccaggaaacgttgaactgggccctgcgcagggcctcaattcacatgtgcatccgtggtccggcagactgggagcggagtggacatgattaacttggggccacagtggtgaacccagtggccacagagtgcccgtggggcatttccaaaggcacctcgacattgccgtgatagggacgcacgtgtaggcccaacaggaacgagcgaacaaaccaattctgggtgcgaaatgccgagaaatgaccgcgtggacaaggggcgatggaagaccggaaccgcggggaatagtgcgagagccacatatgtgtggggcacaccaacgtgatgtaagccagtgagtcacgtgataagtggggagcaaccagaaagtatgcggggaacaggacgcagacaaaagacctaccaaggacgggacaaggccatgtatgcgggcaaaacggcaccagagaacggtatcatacccaacccgagggggaagcaaagggaggtaccaaatctacgaaaaaaatcgtagcggtgggcaacgcccgtccagaaatagacaaggacggagcggcataaggggggtgaaggacacaagaccgaccattcaacaatgtatagcaaacaacaaaagcacacggataacaatcacacattccgtgagaggaaccccagcaacggtccggcgagggccccaatccacagcacgagaaactatggacgaggactaactagggcaggaggcggacccacagggcacacacccacccatggtaacaggggtagcccccggacggcgacaaaggggagagaacatgtgcgaacaaacgaacggtggaa

SEQ ID NO: 577030 - DNA, 1049 bp, Homo sapiens
  misc_feature (17)..(17): n is a, c, g, or t
  misc_feature (87)..(87): n is a, c, g, or t
  misc_feature (135)..(135): n is a, c, g, or t
  misc_feature (144)..(144): n is a, c, g, or t
  misc_feature (152)..(153): n is a, c, g, or t
  misc_feature (158)..(158): n is a, c, g, or t
  misc_feature (161)..(161): n is a, c, g, or t
  misc_feature (167)..(167): n is a, c, g, or t
  misc_feature (169)..(169): n is a, c, g, or t
  misc_feature (185)..(185): n is a, c, g, or t
  misc_feature (225)..(225): n is a, c, g, or t
  misc_feature (229)..(229): n is a, c, g, or t
  misc_feature (248)..(248): n is a, c, g, or t
  misc_feature (347)..(347): n is a, c, g, or t
  misc_feature (353)..(353): n is a, c, g, or t
  misc_feature (359)..(359): n is a, c, g, or t
  misc_feature (363)..(363): n is a, c, g, or t
  misc_feature (397)..(398): n is a, c, g, or t
  misc_feature (410)..(410): n is a, c, g, or t
  misc_feature (413)..(413): n is a, c, g, or t
  misc_feature (438)..(439): n is a, c, g, or t
  misc_feature (445)..(445): n is a, c, g, or t
  misc_feature (472)..(473): n is a, c, g, or t
  misc_feature (483)..(483): n is a, c, g, or t
  misc_feature (489)..(489): n is a, c, g, or t
  misc_feature (495)..(495): n is a, c, g, or t
  misc_feature (509)..(509): n is a, c, g, or t
  misc_feature (561)..(561): n is a, c, g, or t
  misc_feature (824)..(824): n is a, c, g, or t
  misc_feature (831)..(831): n is a, c, g, or t
  misc_feature (836)..(836): n is a, c, g, or t
tatggggaaggaagccnatccctttctgctagtataaacgaggccctgaacaacaatgggatcctgtaaagtgttggaaagttctcnactgttaacccagtctatgttggcaatgtggcctggcccacattctgnccttgaggnccctgcannacccnaanaaaacncnaagcatccgaggacanttctactatatctcagatgacacgcctcaccaaagctatnatanccttaattacaccctgagnaaagagttcggcctccgccttgattccagatggagctttcctttatccctgatgtattggattggcttcctgctggaaatagtgagcttcctactcagnccaatntacacntatngaccgcccttcaacggccacatagtcacattgtnnaatagcgtattnacnttctcttataagaaggctcagcgannatttgngcgtataagccactctacagctgcggnngcgaagccangcaganaacggnggagtgggttggtncccttgtggaccggcacaaggagaacctgaagtccaagactcagtgatttanggatgacagagatgtgcatgtgggtattgttaggagatgtcatcaagctccaccctcctggcctcatacagaaagtgacaagggcacaagctcaggtcctgctgcctccctttcatacaatggccaacttattgtattcctcatgtcatcaaaacctgcgcagtcattggcccaacaagaaggtttctgtcctaatcatataccagaggaaagaccatgtggtttgctgttaccaaatctcagtagctgattctgaacaattnagggacnctttnaacttgagggtcgttttgactactagagctccaattctactcttaaatgagaaaggatttcctttctttttaatcttccattccttcacatagtccgcataccaccgactcatcacactgtccgactcgctccatcacccccccaacacccccccccccaccccccccccccccccccccccccccacacctacacacccctcaacccccccc

SEQ ID NO: 577031 - DNA, 121 bp, Homo sapiens
tgagcaccaggatgtcagctgccaattgtgttttcctgcagcacttccataaacacatcctggtgtcatcacagccaaggtttctaggttgctataccaatggcttattaaagtgaaaatg

SEQ ID NO: 577032 - DNA, 140 bp, Homo sapiens
tgtaacatctatgaacaatcgctatatccttttcctttcttcctaggtagtataatactatcctagtattgcatcagtataggagatatcagacagtgtgcctagttgatcaattagctgcataacagattactccataa

SEQ ID NO: 577033 - DNA, 464 bp, Homo sapiens
gacgctatatcatgcaaaacaaataaattaaacctaatggtacttctggctgaggctccagaggtccccaggagggagggtgtttgcgtggagggggccttggttccacagaatggtggcttatggacgcttttaagacactaaagaaacccacatggtaaaaggctgggtgcggtggctcacgcctgtgatcccagcactctgagaggctgaggcgggcggatcacaaagtcaggagttcgagaccagcctggccaacatggtgaaaccccgtctctactaaaagcacaaaaactagccaggcgtgatgtctggcacctgtaatcccagccactcaggaggctgaagtagaagaatcgcatgaacccagggagcggaggttgcagtgagccaagatcacgccactgtactccagcctgggtgacagattgagactctgtctcaaagacacaaacaacaaacag

SEQ ID NO: 577034 - DNA, 143 bp, Homo sapiens
attatcatcatcagcatcagcagcagcagcagcatcatgttatatatggcagggaatgtaactgcacgttatggcagtgattattactctaaaaacagaatagggtagtgaggaggctggtaactctggcataatcaattgag

SEQ ID NO: 577035 - DNA, 627 bp, Homo sapiens
  misc_feature (147)..(147): n is a, c, g, or t
  misc_feature (164)..(164): n is a, c, g, or t
tctggagatcccactctgcatctggcaggatacacacaccaagaaccagggaggttgggccccatgaacattcccttatatcagatcccaagcgcaccattgctcaggattatggagtcttaaaggctgatgaaggtatctctttcnggggcctttttattatngatgataaaggtatccttcgacagataacaataaacgatcttcccgttggccgctctgtggatgagattatacggactagtcccaggccttcccagttccactgacaaacatggtgaagtgtgtccagctggctggaaacctggcagtgataccatcaagcctgatgtcaataagagcaaagagtatttctctaagcagaagtgagcactggaccatttttctgccaggcagcattgagcagccagaagaaactcttgtactctactcgtgcttaaacacatgatgtggtgtgattccagataagcctttcctacagggctggggatggatagcctttcttccactattggtaatggtctgagctgtgttttgggcagaccaatcttctatcagtcacagaaaacaacctgttaattcttttttcttctttttttaagtatctattaaacgtgaattctgaaa

SEQ ID NO: 577036 - DNA, 873 bp, Homo sapiens
  misc_feature (26)..(26): n is a, c, g, or t
  misc_feature (67)..(67): n is a, c, g, or t
  misc_feature (123)..(123): n is a, c, g, or t
  misc_feature (179)..(179): n is a, c, g, or t
  misc_feature (183)..(184): n is a, c, g, or t
  misc_feature (219)..(219): n is a, c, g, or t
  misc_feature (239)..(239): n is a, c, g, or t
  misc_feature (249)..(249): n is a, c, g, or t
  misc_feature (252)..(252): n is a, c, g, or t
  misc_feature (258)..(258): n is a, c, g, or t
  misc_feature (295)..(295): n is a, c, g, or t
  misc_feature (310)..(314): n is a, c, g, or t
  misc_feature (317)..(317): n is a, c, g, or t
  misc_feature (320)..(320): n is a, c, g, or t
  misc_feature (323)..(323): n is a, c, g, or t
  misc_feature (374)..(374): n is a, c, g, or t
  misc_feature (397)..(397): n is a, c, g, or t
  misc_feature (399)..(399): n is a, c, g, or t
  misc_feature (411)..(411): n is a, c, g, or t
  misc_feature (491)..(491): n is a, c, g, or t
  misc_feature (551)..(551): n is a, c, g, or t
  misc_feature (574)..(574): n is a, c, g, or t
  misc_feature (578)..(580): n is a, c, g, or t
  misc_feature (585)..(585): n is a, c, g, or t
  misc_feature (587)..(587): n is a, c, g, or t
  misc_feature (590)..(592): n is a, c, g, or t
  misc_feature (596)..(596): n is a, c, g, or t
  misc_feature (610)..(610): n is a, c, g, or t
  misc_feature (626)..(626): n is a, c, g, or t
  misc_feature (628)..(628): n is a, c, g, or t
  misc_feature (635)..(635): n is a, c, g, or t
  misc_feature (650)..(650): n is a, c, g, or t
  misc_feature (680)..(680): n is a, c, g, or t
  misc_feature (689)..(690): n is a, c, g, or t
  misc_feature (706)..(706): n is a, c, g, or t
  misc_feature (731)..(731): n is a, c, g, or t
  misc_feature (735)..(736): n is a, c, g, or t
  misc_feature (739)..(739): n is a, c, g, or t
  misc_feature (825)..(825): n is a, c, g, or t
gggagagttaagtaggcaagaatgancagccacggattgttgaactgttaccagcaccatgcttttnagcgaagcgagtttcagcgtgagttggaaacattttttacagcaaaaccattaccncgaagtcctcgtccgcctaaaccacctttatagccagtctcaagctaacacccaanttannttgcaacacacctgggtataaaaacacagttttanaacaaattaagaaaaaatgnaaaactgaanacncacttnatgccctctaatagatgtgatgtaaccctctcttctntagtatgtcttgccnnnnnccngtnagntctaaatgggcttttcaaaatgttaattttccattttggctaaatgggtgnatctttgcccacattctgggcangngagaacgaacanaggtaaatgcgtgaaaaaagccctctattgtatgtcctggtagagttgtcttaaaagaaccctaaaaagctggggaccangtaaaaatccacagaaaattcaactctttgccttttaaagaactttttgaaaaactgttntaaaaaaaaaaaaaaaaaaaaancccnnnggggncnggnnncctnaaatttcttaaaancaaaatgtaaaaagtnanattttgngtggtttctcagttnacaaatgggggagtttccaaaggggtgggnaaagggaannaggggggtggtcaganatgggtttctcttttttggcttttntttnnctngtttttcgtcttccacgtcctgcagcgcttctttattctgctcttcaccgtcaccctgcatgtctgaagtccatagtgtcagattntcacgtaacaactgcatgataaagtgtagagtccttatagctttcttc

SEQ ID NO: 577037 - DNA, 110 bp, Homo sapiens
gcggccgcctactactactactactgctcgaattcaagcttctaacgatgtacggggacatgattctccagtatatttgtaaaaaataaaaaaaaactaaacccaaaaaa

SEQ ID NO: 577038 - DNA, 336 bp, Homo sapiens
tagcaaattaggattttcggcgggtttcctctcttaaactcattctttcctccaaaggattggttggccatctccgggttcattcaggtgcttaaaaaaacctcaaagggccggggaaggtgaggaggccaaagtctgggtctgtgtaggagttgtcacagctattggtgtaagaaggtctggcaaccaggccttgggtggtgggttctgccaagagattggttcttgaacacctgggttgaaatccggtgccctgtaaaaggtttatgatggttcaactggatgtctggtaaaacacattggtaaacttccaataaatattggattaaaaaaaga

SEQ ID NO: 577039 - DNA, 184 bp, Homo sapiens
gcaggacaagtagagggggaaagggagaaaaattgggtagaatagggacagtatgtatcaacagtataaagcatcccacttagagtcactttaatgtcaatatatttttcaaaaagtatatagtaattgttttttctatttttttgagccagagtctggctctgtccgcccaggctaggaagtg

SEQ ID NO: 577040 - DNA, 373 bp, Homo sapiens
  misc_feature (27)..(27): n is a, c, g, or t
tgagaatagagtctcactccgtcaccnaagctggggtgcagtggtgcaatcttggctcactgcaacctctgcttccccaggttcaagcaattctcctgcctcagcctcccaagtagctcggattacaagcgtgtaccaccacgcctggctaatttttggatttttagtagagatggggttttacccaggttggccaggctagtctaagaggtggctgatatacccatcttccagaagtccagaagtgggagctgaggatcgttgatagtcagtgacttgcagagctggtcaccaccgacctggtgatcagattcggatgctctgaccacagcaccacatctgcctcccacacattttccatttctctatacag

SEQ ID NO: 577041 - DNA, 148 bp, Homo sapiens
tagaggatcctatcggcagaagatcactccagaagatcactctacattattggtgcagacttaaccttaacctgctatagatagcctttccactcctcaaactctaacatatcagtcttgacgtttttttccctcttaatcatttttc

SEQ ID NO: 577042 - DNA, 1171 bp, Homo sapiens
ttgtatagtgcctacgttgttgtgagtcttctgtcgtccatgtctgattggccttctgtcgttatatagctgatttagctgttttcggttttaacgcgggtgtgatcatatgtcagtcttgctcaattcggctgttctttttgcatctcgtctttctcagtcggggttaccacctgtgatcgtctctttctgtctactttgtctgattgtcatcgtgatgtccaagactccgttattcttgtttgtatctgttggaagcttacggttatttgcgcgcgttggtgaccttatgtcttttttgttcttccggatgtttagatgattcatgcacctccttcggttcctccatttgtgggtgctagtgtactactcttggtgtgaggcactatcagctttctctctgcgctttggtatgtttattttgttgttttttgaactactgacttctattgctttgttgtacggttccatcgacttggatgtgtcaggtgtagttagagttcttatgcgcctcatgctatgtattttcttcttcccttttccgggtttcgtggggaattatttcagcgcgccgtctagcgttctcttgagcgtgaccttgggtcatttcatgctgcgccaacactctatcttcctcctactgacaatctctgaagtcttctagatacagtggacgtgcgttctccccatgattgtcccggctcagtctggcactcttgacctcaggtgatctgtctctgccactgtgcctctcccatgatgctgggatgtattatcgcgtgacgacctacagttgctccgtccttctatactcgcaacactgttaaagtagcttggagtatggcacattccatggtgtgcgttttgtagcatccatttgtaaacaataacaaataaggaagctccaggcaccattggctcacgcacgtaaccccagcagtttgggaggcgagagcaggcagatcacctgaggtcaagagttgagaccagcctgaccaacatggagaaacccgtctctattaaaaacacaaaattagccgggcatggtggcacacgcctgtaatctcagctactcgagaggctgaggcaggagaatcgcttgaacctgggagcgaaggtcgcagtaagctgagacttaatgccaattaaccccccgcctggcaaacagaca

SEQ ID NO: 577043 - DNA, 407 bp, Homo sapiens
attaacctctaggtagcacacaaacagggtggatggaatactactcggccataaacagaatgaattaatggcatttgcagcaacctggatgagattggagacttattctaagtgaagtaactcaagaatggaaaaccaaacgctgtatgttcttactcataagtggaagctaagctatgaggatgcaaaggcataagaatgacataatggacttcggggactcgggggaaagggtgagaaggaggtgagggataaaagactacaaattgagtgcagtatacactgcttgggtgatgggtgcaccaaaatctcacaaatcaccactaaagaagctactcgtaaccagacaccacctgttccccagtaacctatggaaaaaaatttttaaataaattataacaatgcca

SEQ ID NO: 577044 - DNA, 456 bp, Homo sapiens
  misc_feature (11)..(11): n is a, c, g, or t
  misc_feature (198)..(198): n is a, c, g, or t
  misc_feature (454)..(454): n is a, c, g, or t
agttttcaaantcggcctccgcctggaaaaaagtttgctgttgaacctcctctgcgattttttaaaatcccagttaatcctttaaataaaatcccaattttcctagtattttaaaaatttaattatatttattttattttatgttatttttaagatgaggtcttgctgtgtttgttgcccagagctggagtgcagtgngttgagcatagctcactgcagattcaaactccggggctcaagcaatcctcctgcctcagtcttctgagtagctgggactacaggcatacactaccatgcctgtctatcaaaaaaaaatttttttatacaaggggtcttgctgtgtcacccaggctggtcttaaaatcctggcttcaagcagtcttcccacttcagcctcttgagtagctgggattacaaggtgtgagccactgtgcctggctaaaaaaaaaaaganag

SEQ ID NO: 577045 - DNA, 283 bp, Homo sapiens
tcgaatcgacggtttctctgctgactgcagaccaggtctcggcctcctcggactcctgctcagtaccctatgacgggcgcacgtggcagggggctggaggtggagcgctcgccgtcgccgccgctagcgctgagctgcagcaattccaccaggtcgctgttgtctcccctcgtgcaccagagcttccagtttgacgaggacgacggtgacggggaggatgaggaagacgtggctgatgaggaagacgtgaatgacagatgcccatgatacagaggccaaagtg

SEQ ID NO: 577046 - DNA, 409 bp, Homo sapiens
tagctttaacgatttcgtaggaaacgggaatatcttcatataaaatctagacagaagcattctcagaaacttctttgtgatatctgctttcaagtcacagagtttaacattcccttttatagagcaggtttgaaacactctttttgtagtatctggaagtggacatttggagcgttttgatgcctattgtgaaaaaggaaatatcttcccataaaaactagacagaagcattctcagaaacttgtttgtgatgtatgtactcaacaaacagagttgaacctatctattggtagagcagttttgaaacactctttttgtggaatctgcaattgcttatttggatagcttagaggatttcattggaaacgggaatacatatagtacagcagcattctcatcttctttttgg

SEQ ID NO: 577047 - DNA, 475 bp, Homo sapiens
tttttcgtgtcaaatataatacgcattgttctgagaccaggctggcgggcgagggggagctgaccgaagagagtcgggcaaggagaaagataaagagagccttctaaatcattgtctgatgactgattttcacatatctatgcacacacacatctatgcacttacacacacgcactctcacaaaaatacacacactgaaaaaatggttcaaccccctgagtcaatacatgttacaatcacctgccagtaattacagctgtgattctttctgggtacgtctctaagagttttgcacaccttgattgtacaatattttcacattattatttaaatagttctttcaagttggttgatgaccattgctagacagccatttaagtcttgccatagattttcaagtcgatttaggtcagaactgtaactaggccactcaggaacatttcaatgtcgtcttgataagtaactccgacgacgc

SEQ ID NO: 577048 - DNA, 124 bp, Homo sapiens
tgatccggtcacgggtgagggagtgtgagacatagcaggacgcttcagcccgagggttctggtgatggcgtgagcgcttggctttggatcgtgcagtgtgtgtcggctggcttggtgtggtgct

SEQ ID NO: 577049 - DNA, 254 bp, Homo sapiens
tccctgaaagcagcctgctgagagtggcaatttaaaaactacaattctggcacgatgtttcacgcctgttatcggagcactatgataggccaaggcaggcagatcacttgaggtcaggagttgagaccagtctggccaacatagcaaaatcctgtctctaataaaaatacaaaaactagccaggcatggagttaggtgcctgtaatcccagttactcaggaggctgaggcaggagaattgcttgaatccagtag

SEQ ID NO: 577050 - DNA, 476 bp, Homo sapiens
atgattagtgcaacagactgaaggaagaaaacaacatggtcatctcaatagattgtggacggctggaagtggaggctcacgcctgtaatcctaatactcctaccaacagtgtataagcattcctttttctctgtaacttcaccagaatctgtttttttgtttgtttgtttgtttgtttgtttttgactttgtaatagccatgggctgggctcagtgactcacacctgtaatcccagcactttgggaggccggggagggtggatcacttgaagtcaggagttggagaccagcctggccaacatggtgaaaccctgtctctactaaaaatacagaaaattagccagatgtggtggtgtgcgcctgtagtcccagctactcgggtggctgaggcactagaatcacttgagcctaggaggcagaggtggcagtgagccgagatcacaccactgcactgcagcctgggcgacaaagactgt

SEQ ID NO: 577051 - DNA, 373 bp, Homo sapiens
tggcccaggtgatgcttaaaccccccgtgttttgcaacacaacctcgggtggaacctcagcagaaaggatggaaaaatgtggggaggaaaacccttggggggttggaagtgtgtgtgcgccaggaacacaaggctgtgccctttattgggactgtgaaaaaaaaacgctgcgtgggcccgtggtggtgacgtggaacaccagggaaaggagaacaccgtgggcgtggaggcgagagaaacacggggtttgtgccccagccacagtgtgcgggagagggggcaagagcgggtgtggctctccagaaaagtgtgtggacagcgcgaggtctccccacaagaaagagagagagacctcgagggggccagtgtccct

SEQ ID NO: 577052 - DNA, 214 bp, Homo sapiens
agatatttcagtataaaaaatgatgacatttaactttggtaacaaccaacaacaaaaacctaccattgctgggcataattagtcatgcttgtaatcccaacaacttgggaggctgaggagggaggaccacttaagctcaggaatttgaggctgcagtgaaccgtgattgcatctctgcactccagcctgggtgacatagggagaccccaactga

SEQ ID NO: 577053 - DNA, 131 bp, Homo sapiens
cccctgcagacagacaacagcatgaggtgcaaaataaaaaaatctactattaaatcccttcgtaggaatgctttacactttccacagaacagaaactaaaaataacctgttatacaattaagtctacaaat

SEQ ID NO: 577054 - DNA, 510 bp, Homo sapiens
  misc_feature (442)..(442): n is a, c, g, or t
aatggtattttcaacaaatacagcagtggattaaaagacatccgtcatcgatttcaggtcgtgcaggtcggagcagtatatacaagttcgcccttcatttttttgttgaaaatatcgtgttaaatcctgaaaacgcaaaactcacagagttgcaactggccgaaggttaaatgatggtcgacatgatattgatactaaaattattgagctcaaaatgaaccaactggagaaatgacgagtttcattatggcattgctgtttaaacaattcgactatgttctgagcgtgtagatgatcgagcgtgattcaatttgccataaatagtatgattaaattggattaacgataatgtggcagcggttaaatcaccctaattggcactggaaaacgttcaaatggttaggcctccggggtgggataagcactttccagaaaattaccntgggggggtggggtttccatttttttagaaggttccatccggtttttccagtaatattttggaaaccc

SEQ ID NO: 577055 - DNA, 1019 bp, Homo sapiens
gaagatggcgcgcgctcgtattctggatttgcaattagaatttgatgacagaggcatgtgctttatggagaatatcactctatcctgcattgaattccgcgttgatcctcaggaaccaggatgagatagatgtctaacggttgtgcctccggacagcgagcataggattaaatatctagggcaagaacgtgctgtcactgggaaaccgactataatgtgtcctagaaatagcaaccctggtttgtccggtttctgctggggaatcgcaccagagctatccaatggtcacgttctcaaacaataatcgaaatcgaagcaagtgagataacgtgtgattccagtaagtctagtgctgttggaatgaaggatgcatatcggagtggagattcatcacgacatttccgaaacgttgaacactggattgaggacttgggattgatccgacgtggtgtaggggcgctcagaccgagttcctcgtccgtcgagaatacggaggtacgatccgatgaaagaccaccactagttctcatgagcgatgcatggtgttcagatgtggaccgtcgattgaagcaagaaaattctatctgacgtgagaactgtgcgatcaacgggtggatattggtgatcagaatagtcgtatgtggattcattagactgatgcggcatatggatgattgatcctctggtgttcttagagaatgactacgtactctgattgtgtgctactagattcgggtatcatgaagcgtataggcttggacctaacagtagattgggtttcatgtgctaatgcatccaaattgctgggatggtacttccatgtatttctaaatccgaaggttcagtcctgtcgaatgtccctgggacccttgatgaaacttttgttgtacgcgtttccgagtacaagacaagatattgtaccaggaggagaacgattggcagccgcggggtggaaattggcagacagagtgaaaacgattgcgtggggggcttgccgtccccgagatgtaagaaacgag

SEQ ID NO: 577056 - DNA, 321 bp, Homo sapiens
acgatcggtggacatcggtttgggcgttcggcgtgtgcagtatgggcgctcggcgtgtgcagtgtggttttcggcgtgtgcagtctggacattcggccacgccgaacgtccacacacttcttgaagtcaaaccataatcgccgatcttcacgagggcgtaatcgccgatcttcacgcgtgaagatcggcgatattggtatggatactcggcgtgtgcagtttggatgttcggcgtgtgcagttgggggcttcggcgtgtgcagtatggacactcggcgtgtgcagtgtgggccttcggcgtgtgcaattttggttactcgg

SEQ ID NO: 577057 - DNA, 173 bp, Homo sapiens
ggggtcaccggccggtgtgtttctctacatatgtaggcagatgacgagtgtttctgggtgcacggtgatcagtgcatgtgtcgctggtattctgagcatgttagtctacgtggtgtgcatccagcatgcttcctgtggattctcagtgtctgtccatcacgagagaggctgca

SEQ ID NO: 577058 - DNA, 130 bp, Homo sapiens
gcaccacatggtatgccatgtcctgccgggcaagcaagcactggtgaggctcgacgaaatgcatgaacatgctgagcttctgcgtctgtcagtgtacaaggacagtgctcatgtgggccaggcccagtgc

SEQ ID NO: 577059 - DNA, 261 bp, Homo sapiens
gtaatgaggacagaggacgaaaaaaataaccgtccaacgactgcctcaaacgaacgcggacgccgcgaactgccatgaacagcaatcggtcaatatccaacacagccaacctaccctgtgcatgtctcctgggaatccagtataccctcagaccttgcatcttcctcaggctccaccctatacgcgatgctccacgctgcctactcaagagctctatctgtccgagctttgtgcacccatggggctagcacaagtccccac

SEQ ID NO: 577060 - DNA, 268 bp, Homo sapiens
atgggtggtagtgacaactggctgcatatgtgttctatgccccgagtgagggcaacgtgctgacttagatggtcacttgttatcagcccaggcagttgacatactgggtttctatttgaaaacagagggagtaaccacgcagtgagcatcgcgcccctgcgggcggggcgcagggctctagcgtccttggtctactctgggccattcacgggttcacactactcacccggaccgtaagagagatgagtgccccccccttatgcctata

SEQ ID NO: 577061 - DNA, 567 bp, Homo sapiens
  misc_feature (37)..(37): n is a, c, g, or t
  misc_feature (545)..(546): n is a, c, g, or t
aatagcattacaataattttatcaatgaaatattcanctacactgtcagccatattacaaataaagtgagttagaaaatgataaatataacaagatgacaagtttttgcaggaggaaaatgtatacataataagattaaaattatctaaataagtgtcacatgtgtacattgagctatgtaaataggacaaaagccatgatgaaaaaatatattttacataaataatatcacaacataaaaattttagaaaaattttatttaaaaaaatttttttcatgcttttataaaatttcttacattaatcttatattatttttattatgttatcacagaagaagaaacaaccagtccatatcagtgatgaatctgtaaagaggctcgattccttcaacactgggtggataaataaggctctgggcatcaagctagtgagatgaaacactgaacaccagttacattaaatatggctacaggcaactgcaatcacacgcaatacctagatgccccaagtattacctggaatagcagtacaatgactctcatnntaagattaaaaatcatatttt

SEQ ID NO: 577062 - DNA, 138 bp, Homo sapiens
attaaaaaaaatttaaaaaaaaaaagaaaattttatggtctatcccaaagggcccgaatgacttttttgggccttttttttaaagagctgcttggttatcccaaaatgaaaattccaaataaactttgaagaaaagga

SEQ ID NO: 577063 - DNA, 882 bp, Homo sapiens
  misc_feature (882)..(882): n is a, c, g, or t
ggccttctctcttcctcggcgctgcctacggaggtggcagccatctccttctcggcatcatggccgccctcagaccccttgtgaagcccaagatcgtcaaaaagagaaccaagaagttcatccggcaccagtcagaccgatatgtcaaaattaagcgtaactggcggaaacccagaggcattgacaacagggttcgtagaagattcaagggccagatcttgatgcccaacattggttatggaagcaacaaaaaaacaaagcacatgctgcccagtggcttccggaagttcctggtccacaacgtcaaggagctggaagtgctgctgatgtgcaacaaatcttactgtgccgagatcgctcacaatgtttcctccaagaaccgcaaagccatcgtggaaagagctgcccaactggccatcagagtcaccaaccccaatgccaggctgcgcagtgaagaaaatgagtaggcagctcatgtgcacgttttctgtttaaataaatgtaaaaactgccactctggcatcttccttcaaaaaaaaaaaggaaacttgaatagggcaggagacaaagagagacacttacaccacacaaagaagaggcagcagctcggcacaaaaagaaccgccaccagtagcgagggcaccgcccatagtgactgcccaccgaagcatggattccccaaacaagacgtgcgccccccgacaaggagtagcccacaataaagagccataccaagcacagcgactcgaccgcggagcacatcacgacggaacgacgggggcgaaacagccctggactggagggccatccgtcggaggagcgaacacgatacacacgagcggggagaaagcaactggcgagagagtcacccaacaagattan

SEQ ID NO: 577064 - DNA, 653 bp, Homo sapiens
cgccgcgaacgcagaggagaggaagcaacccaacgaatcccaacccagcccagaataaacacgcgacgcaattccccaacccaattcctgctccttgcttcttcctcacgccgcacgggataatcttcctcctcccctccccaaatccgctttattagcccgcgccccgatcgaaaatccatccgccctcgattccccccgccccaagcactccgcttcttcgagctcacgattccttcgttcgttcaggagccccccgaatgcgccgactccatcccgccgggaccagattctgacgccaaattcgctcgcgctcttccgccccgccgattcgggttcgtctccggccgggatcctcgctcgcccccggccgccgtccaatttggtgtggatagttgagaggctctgagcttctcgattcgagctcgtcggaggggagagcgtctcggattctggcgaccatgtccctgtcggcgatttccctgtacaccgccccgccgggcgccgcctactcctcttcctcctccgagttcgacctgggctcgcgcggctcgacgccgtgcagcaccgcggcgccgccccgccggccgctcccaccgccgtccgccggcgccggcgcctggggcctctcctgctcttctcctcccccggcc

SEQ ID NO: 577065 - DNA, 804 bp, Homo sapiens
  misc_feature (48)..(48): n is a, c, g, or t
  misc_feature (50)..(50): n is a, c, g, or t
  misc_feature (804)..(804): n is a, c, g, or t
aaaaaaaaaaaaaaagaggttttttttggcccccccccgcccccgccncntttttttaattaaaatgaggggtggcgggggaaacccccgggggtgcatcacacaggggtggttaaaaattttaaagggcccagttttttttgatgcccaacattggttatggaagcaacaaaaaaacaaagcacatgctgcccagtggcttccggaagttcctggtccacaacgtcaaggagctggaagtgctgctgatgtgcaacaaatcttactgtgccgagatcgctcacaatgtttcctccaagaaccgcaaagccatcgtggaaagagctgcccaactggccatcagagtcaccaaccccaatgccaggctgcgcagtgaagaaaatgagtaggcagctcatgtgcacgttttctgtttaaataaatgtaaaaactgccactctggcatcttccttcaaaaaaaaaaaggaaacttgaatagggcaggagacaaagagagacacttacaccacacaaagaagaggcagcagctcggcacaaaaagaaccgccaccagtagcgagggcaccgcccatagtgactgcccaccgaagcatggattccccaaacaagacgtgcgccccccgacaaggagtagcccacaataaagagccataccaagcacagcgactcgaccgcggagcacatcacgacggaacgacgggggcgaaacagccctggactggagggccatccgtcggaggagcgaacacgatacacacgagcggggagaaagcaactggcgagagagtcacccaacaagattan

SEQ ID NO: 577066 - DNA, 843 bp, Homo sapiens
  misc_feature (843)..(843): n is a, c, g, or t
ggccttctctcttcctcggcgctgcctacggaggtggcagccatctccttctcggcatcatggccgccctcagaccccttgtgaagcccaagatcgtcaaaaagagcaaaattaagcgtaactggcggaaacccagaggcattgacaacagggttcgtagaagattcaagggccagatcttgatgcccaacattggttatggaagcaacaaaaaaacaaagcacatgctgcccagtggcttccggaagttcctggtccacaacgtcaaggagctggaagtgctgctgatgtgcaacaaatcttactgtgccgagatcgctcacaatgtttcctccaagaaccgcaaagccatcgtggaaagagctgcccaactggccatcagagtcaccaaccccaatgccaggctgcgcagtgaagaaaatgagtaggcagctcatgtgcacgttttctgtttaaataaatgtaaaaactgccactctggcatcttccttcaaaaaaaaaaaggaaacttgaatagggcaggagacaaagagagacacttacaccacacaaagaagaggcagcagctcggcacaaaaagaaccgccaccagtagcgagggcaccgcccatagtgactgcccaccgaagcatggattccccaaacaagacgtgcgccccccgacaaggagtagcccacaataaagagccataccaagcacagcgactcgaccgcggagcacatcacgacggaacgacgggggcgaaacagccctggactggagggccatccgtcggaggagcgaacacgatacacacgagcggggagaaagcaactggcgagagagtcacccaacaagattan

SEQ ID NO: 577067 - DNA, 746 bp, Homo sapiens
gcctgaggtctctaaggctgcgcccgcccccgccgggcttctaagctgtccagagcggggagcctcagacccagccgagccccacttctgggcttagagcttgacccaacacgttcgcaccgtagcgagcgaggtccacatttagccatgccgcaggcaaaagaaggattcggcttcggtcctggcccagtctgccatcccggggcgcctgccttgtaccgggtcccgcggagggcggccttggcgcctgcctccctggagcctgcagtcctgcagtgggtgagtgaaagcgagagaagaggagctcaggtcctcagcctccaaactcgtcttcttggagagcttcagtgaaggagatggccttgaagtcctgggtacaaatcctgactctccctactcctttacatcttagctgctggaccttggcgagaaagtcccctgacctctctcagtgtcttcatttctgaagacggggaaggtcgtatgtgaggcgcaaagcctcctctagcagttgggcgttgcgagggtcagaggggacaatgactgtgggagtctggagagggtgtgagctcatttaatgccagagtttctttcctgcctcctggacttcggtgctattttgggcgagccaactgccctctagatacacctgcatctacggtccggaaggaagacatttttagaatagagcctctaagaggaacagaagaagaccatattgccaggtccgcacaatcagtgatccc

SEQ ID NO: 577068 - DNA, 856 bp, Homo sapiens
agcggagcaccctgccagccgcccccatctgtgtctgtcggaacccacacacaaatctgcactccaattgctgacagagccctgacgaagcctactttccccagagatggccaataagggttcttcctatggcatgagccgcgagcgtgcaggtcccagaatcgaaaagaagtaatcgaccgagtgagctggcagggagcaggcgtggtgcaagatgggatctactagtgcactttagtggctccatggatgtgggccggacccagaccagtggagcgcttggggcattttcacgtctggcttgaagaaatggcgtgattctgacccacacgctggtgaacacggacttgtcaccccgtcgcataggattctctacatgtccggtgaagaggtgcctcgagaacgcgcgaccacatcgcaatgggtcttgcagacgtcgagaatggcacgcttgtggtctcaggatttcacgtgaaacggcggcgtgaggcactatggggtcgatcaaagactgaccatgttccagacgggcttgacctcgtttgaaggcgtcacgacattgggagcagttgcatgcagggaccactgatgcgcttgtgggtccagcccttggcatggtggaacaaggagaatgattgggcactatccgctgcgacgatcgcctcgcatgggtgtccatgcataccaaaggcagctaggaagcagtgctcagggtgaagtgccctaggagaggcctaactgccggcaggcgaaagacatgtccattgcgccgttccatatggggccgcccacccagagggggccggtcccaggctcggagtgaactggtttacggacgacctcgcgggaattcatc

SEQ ID NO: 577069 - DNA, 816 bp, Homo sapiens
cgagactgtttctacaccattcgtctgtggcgcgggcccaatgattagttgaccctggttcactagctgcttgcttacgcagatcctggtcatgactagtgctctgccagttctcaccacatacaaaaatgactctgtgacaagccgagcgttctgtatcaactgccagaatggaggttcctaagatcacttacggggtctcttctcaacagggcagtcctcgtcggagactcggaatttcaagatgaacaaccccgtctccatgagtgaaaaatgacaaaacatcatcaagaaaatcaaagattcatacctgtcaaagacagggctgttcccaattgaatttacactcaggttctctctttgagggtcacggagaaattgcttgataatcatactccaaaaagaaactgggaactggacgcgaaggaagatgtgattgaagttttatcaggaacaaacggggggtcattcacacagtttaagatattcttttaattatttctctttttccctcaatcccttttttactttttaaaaaataaggttccttttgtacatgtgggtgtccaaagagcggcacttgaacatctgggcacccccattctctttgaaagcatctgggtaatttgaattctatgtgctcatttatcattactgcttggtttacattgcggctgatttggagatccaagcctcagtccccttcatataccctcttccttttaaaaattacgtgttacacagacaggtcaccttttcagggacatggcattttaccgctgtggtgaaaataaatcgacatgcaggtcacaaggc

SEQ ID NO: 577070 - DNA, 123 bp, Homo sapiens
tgttctgggacgatgctgacgactccactggtcgagggaccacattttatcaggaatacgagacgttctatggtgaacacagactgctagtccagcaggccgagatcttgagattagcaaaga

SEQ ID NO: 577071 - DNA, 934 bp, Homo sapiens
ggagagaactagtctcgagttttttattttttttcttggactttttaaatgaagtaagcctttatttcctgtgtttggcaaataacacgggctaagtcggtggcttttgggtgatcaggtcaaagagacgaaatcccatatcctcgtccgactcctccgactcttccttgtggcttcaaccttagctggggctgcagcagaatcgaggagcagcttgtggtggcagcagccacaggggcagcagccaccaagggcacgatggatcacccaaggaaggccttgaccttttcagcaaggtggagaaggtgtaactccgtctccacagacaatggccagagactcgtttgtacccgttgatgattagaagggggtactggactgcaacagttggggtacgccaatctggacagacagacttgcggcacttcttggctggacaccccatccaaggaatgtgaacaattgccagagttcccttctgtgatactcaagccctctcaagcggttcgtcaaatcgctcgcattggtcacccaccctgttaggatagaccagcccaaatggaagaaggcggcacaatgttgacaatgtccaacagtcgtcgactcccactgggccaccacaatcagcgacacgcaggccttcgatcacaacgtacgcatctcaccacaagggaataaaacatgggaaagccccctaggaaaataacgacggcaaacaccaaacatcgctgcacaaagaggcaacacggccgccaacaccacaacattggcgacgcaagacagaatcaccatggcgcatcggccaccaaccaaacccacatgccccaaatcggcaacaacaccgtcatgacaacgaacgcgcactggaagaacaaccccaacaccccgaccataagcacactacccacaaagaaagcacacagagcccaacaag

SEQ ID NO: 577072 - DNA, 360 bp, Homo sapiens
  misc_feature (36)..(36): n is a, c, g, or t
tccctaagaaaaaaaaatcctaagaaggtgattttncccccaggtcaaaagggaaggaacattggaaagtcctcagaatactggctgtgcccccacattggaccagtgagtgttgagggcctagggttctgtcgtcatagtcacccactgtagctttagatttttttcctgagagagggtctctctctttttttctgcttttgaggtttaaaccatggccagagacagggtctcgatctgtccctcaagctggagtgcagtggcgtgatcttggctgactgcaaactccacctcctaggctcaagccattctcctgccttagcctcccgagtagctgggattataggcgcgcaccaccac

SEQ ID NO: 577073 - DNA, 309 bp, Homo sapiens
  misc_feature (133)..(133): n is a, c, g, or t
gaaggggccgagctcccgaggacgcctggccggggctccggaagcgcaagttcacgccaaccgcacgctgagggttcaggtcaatgaccgttctcacgccatagagcgcagtctggatcaccaggaggggccncctggagtggacatatcctggtggtctgcggagctgtagttctaatgaaaggagctgtgcccaccctgttctcttggcttcaccccacaattgcagggccgcttcttgggcctggacccccatggggaggaagagtccccctcactacaaataaagaaagctggcgtgaccctggg

SEQ ID NO: 577074 - DNA, 245 bp, Homo sapiens
tgaggatcctccccgattagcccgacagcatcagtgtttatcaaaatacaataagaaaaaagtagaggttgtctttttcgatggcaaatcttgaccctatgcaggctgagtggagagaaagctacatcacacacagagtgtgggtgtgctccctgagtgggctgttggtctagtgtggacctgcctgtctgggctaagtctgggtggggtacctgactgctcgatattctgtaaatcagtggtca

SEQ ID NO: 577075 - DNA, 230 bp, Homo sapiens
gggtgcccagccccccccccaaaaaaaaaacattttttgccctttttccaaggtttttattttttcccccgggcccaaaaaaaacagaacccaactggaaaccccctgggtaaaagtttgggaggggtgggcccccactgttaaccccccgccctgcagccgggggcctaaaaaggggggtggagcaaaaaacccgccccccaaagtgtttatttcccctgtttttttta

SEQ ID NO: 577076 - DNA, 291 bp, Homo sapiens
tgatatttagaagtgtgatgttggtacctggtgcagaccatgcaaaagttctgaaaagctcctttatgccatctgctgaggtggccacactatcatttattcctggattggctagaactgtggtgaccacacagctatgaaacaacatttcagctagtttgacagttgaccttttgcacgtttatctttaagcaatgcagctatcgtccattgcatctactcggtcattctcccccatttccatcctattcaccccttagcccattgagcactaaaggcaaatcagggcac

SEQ ID NO: 577077 - DNA, 119 bp, Homo sapiens
ggtcaggaggaaggtgcccaggaaccgcgggtcgctgagatgtagaagaatcgcatgtggacagacgattgccgcaaggagtgcttctgcgatatcgcacagaggtctggtgccggatt

SEQ ID NO: 577078 - DNA, 406 bp, Homo sapiens
gtagtcttgtggtggcccacattctgctgcagttgtaaacatccccagatctctgtggtttagaaaagctggccaggcatgatggctgatacctgtagtcccagcactttgggaggccgaggcgggcggatcacctggggtcaggagttcgagaccagcctggcaacgtatgaaaccctgttctactaaaaatataaaaattggctgcgtgtggtggcacacgcctgtgatcctagctgcttgggaggctgaggcaggagaatcgcttgagcccgggaggtcaaggttgcagtgagccgagattgcaccattgcactccagctttggcaacaagagtgaaactccatctcagaaagacaaagaagaactacggctgtcatacttggagtctcacatctgtaatccc

SEQ ID NO: 577079 - DNA, 594 bp, Homo sapiens
  misc_feature (103)..(103): n is a, c, g, or t
aaaaaaacaatccccccaaactctaaccttaacatcaagaaaaatatcccccctgcaagctagcaattgtccagaataaacccgggaaacccattaaaaaaancatacccccccgtattcaccttaagatatttttgtctttactggtgaaaaggatttggtattgatttaatttccgtgctcctgattgtatatatttcaagcatttgtggaaataagagtttgcagtcagttagatcaaattgcattagtatatttaaaattgtatttgatacattgatgtagaagtttttaatcttgcttcatactggttgttctgttttgttgtttttaattaggaaaaggcaaactgtacctacaagctaatccagcctgcttcttgtttttatcttttcctttttaatttttttagagacaggatctccctctgtcacccagggtggagtacagtgactacagtgatcatacctcactgtagctttgaacttctgggcataagggatcctcccacctcagcctcctgagtagctaggattagaggtacaagccactgtgtccagttacttttagatttttaaacagttgaaaaaaaaa

SEQ ID NO: 577080 - DNA, 221 bp, Homo sapiens
tgtatatcttaaatgcctatcttatgaagcgagggaaggctggaaccagagtgttgcattgcgaatataacagagggtgcatccattcttcgacaggaaaaaaatttgctgtatattgatgcgccagtcactgtttgtggggacattcattggactattctttgatttgatgaagctctttgaagtcggtggatctcctgccaacactcgctacctcttct

SEQ ID NO: 577081 - DNA, 303 bp, Homo sapiens
ctagaggatcccacgggctgcatatggcaggatagatttatgaacagaaaaagggagtgaggtccagaaaacggaagtgaggtgcagaaacagctggaatgattatggctcagcatttccgttattgaacacttgaatagtcagcctcctgtaattggcagatgcgctatgattggcacaagagtagattacagtctgtttacacatccagttgggttacagttcactatataggaagaaacctttaggctgaacttaaaatatgtaaggaggtgactttgacttaacaatggtcagtgttag

SEQ ID NO: 577082 - DNA, 309 bp, Homo sapiens
gacaataaagaagggtcccaggttgtaagagcccaagttgagaacaataatgaacaattattgtatgaacaattgttagagacagctaatcacaaacaacctgcgggctcaatgacctcattccacacgtagcacccttcagcaggaccctataaaactttcctccagcccttgcctctttgtaggtagccccttctctgctgagctgcccactgcaacatattttcacaatttctctaataaatctgcccttctttacctacaactatcttggtaaatggctttaccacctgctaaactgaccctagg

SEQ ID NO: 577083 - DNA, 331 bp, Homo sapiens
gggaaaaaaaccccccccccctgtttttaaccccccccaaaaacccttttttttttttgggggttttttttaaaaaccctttcccccgggggtttttttaaaaaattttttttttgggggcttttttttaaattttttggggtttttttttttttttttcccaaaaattttttttttttttttttaactttttttttttttttttttttttttttttttaaaaatttttaaattttttttttcccccccctttttttttttaaacccccccttttttttttcccccaaaaaaaaaaaaaaaaaaaatcaattttttttttttcccccccca

SEQ ID NO: 577084 - DNA, 362 bp, Homo sapiens
  misc_feature (166)..(166): n is a, c, g, or t
ggacccggaggtggtgggggtagaaaagagatcttctgtgatatgtgatgggaggtgtcagatcaacttcactgtggggtggacttcactggtccaatggagaacccttctcaactgaattcctaaaataactgagttcaacaggggtcaatgagtacctgatggnactgtggagtgtgggccgcgtggttccaggactattgactccagacaaagctgttcccctggattttggattttgggggccaggttccccctggactggcaggtcttcgcattgaattttgccttgaatttcaaccccagtaacccctactgtgcaggcatccagggcatagtggatgcctatccacaaacacctg

SEQ ID NO: 577085 - DNA, 394 bp, Homo sapiens
cagctcggggcttgggtcagatgaaatcatagggtgtcgaagctgtcctctttctctgagtcgcttctgggtggggacacagaagccgttggctggtcccggtggagccatcggtcatcagacatgcaaaatcctgagaagatatctcagaaggccaatcctaggttctacgaaagtaacattatctgcaggggtaactgaggaagttgcatatcttgtggcttctggaataacgcctcacaattgtttttgtctacaccttagcagaatttaggctcctctcctcctcctagcctggtggtctctcagtattacaagggtggttgagtttcggggaagggttattataatttaaactatcaactaaatgactcccacatgtagcttggcttaa

SEQ ID NO: 577086 - DNA, 341 bp, Homo sapiens
  misc_feature (293)..(293): n is a, c, g, or t
  misc_feature (325)..(325): n is a, c, g, or t
  misc_feature (334)..(334): n is a, c, g, or t
aaagaaagcaagaagtttggtaagcttaggcatgtcagttcattatcttcctattaaaaatggctttatttataacaaataattctaagacttcttaagcaaggtggaggtagatccagcagaatttatgaaaaaagaggtctaaaacgttggcttgatttatagccgtttcatagaacaaatatgtatatctgtaaattttctttaattaaaattctgcagtatgtgactgtgacagcgattgtgtattcatgctgtaatcaaatatatatattcataaggaacagcagttngtgagaaaatgaagtgcagtccaagtagaganagtactagnctgagag

SEQ ID NO: 577087 - DNA, 108 bp, Homo sapiens
gtgcctagaggatcccgcatttcgtcccatcaggaaggctaaaatttaaaagtcgaacataccaagtggtgacaatggacatggagcaaccagaaccctcacgcactg

SEQ ID NO: 577088 - DNA, 451 bp, Homo sapiens
agtatttaacgagtaaatgctctataaattagactttagaaatgactataaagaatctcttcctgccaccaagatgcaaaaggaaaggcagaggaggaggtggctctggccttggtgtcatgaagaaacaggaggcaagaaagtggtgatcctgtttgcgcgtggtggctcacgtctgtactcccagcacattgggaggccgagacaagcggatcacctgagatcaggagtttgagaccagcctgggcaacatagcaagagcccatatctaccaaaaaaatttttttttaaattagctaaatctggtggcacaaacctgtagttccatctacttggaaggctgaggagggaggcttgcttgagcccagaagttcaaggcatgcagtcagctatgatcaccactgcagtccgcatggataacacgaggcaacgaacctgtctcatttaaatt

SEQ ID NO: 577089 - DNA, 594 bp, Homo sapiens
  misc_feature (280)..(280): n is a, c, g, or t
cggttcctatcgtgtgacactcagctgtgcatactctgtagaatactcacgataactgtgccaggataataaatcaattctgaactatatatccctcaaattatacacataattgcccatggcacatgtaccacagggacatgataacacagccgagtcactatatgccttctggctagtgcaataccaataagacgctcagtgaggaccactggaatgaacgcaggaacaacggctcatgaagctgactctctgataacccgagctgactaaaggggtnttatgccttatgacgttgagacaataatggttgtggagaatagccgcaaagagggacattgagagataacctgtgatccatagtgagacataccgtgaggttcccaaatattttagcgcaaactcggtaagagtgtgactatacactatatcactatgatctccactgtagaggtgaaggagaaagaggcctatatgtaccgttacctgagagttcttacagcgggaactctggggataatacgcgaatcatggcgtatagcacgaggggcattacaaggctaagacatgagacacttattggagcgacgattt

SEQ ID NO: 577090 - DNA, 440 bp, Homo sapiens
ccacgcagaaaaaaaatggtggtggttcttccttattgagtcttacttcaggggaatcggtgcattcctatgtcacggccatatttatccttatgctcagggtctgtattgggggcgaccttgaaggttggacaatcccccttgggccttttaaagtagagggcagagtgtggtgcacaggtctggacccaacggtgttttatctgggccttttgggctgtggatctgtggtcccgtgcagggatttttgggtctctggttcaggtctttttatgagggcgggaatggattctgtaatgatgtgaaaacataagtatttggcaagccaacaatttggcacactgcagagcctacggctcttcgttcttctaggctaaacttctccgatgatcgacttatggatcacagccccagacccatggcttgcgggaagatgacgc

SEQ ID NO: 577091 - DNA, 1031 bp, Homo sapiens
  misc_feature (697)..(697): n is a, c, g, or t
ggggttcgctggctgctggcccgggctccggcccccgtagtgagcagcaccccccgggaatatgacattttctgctcccaccgagttggcacggcctgcttcctgaagtctcctgggtgtgtcttagctgccatgtcccgagcgactctcctgagatgcactagctctccatccaggtggtcaccagcaggaaggatcagtgggatgaatagcagaagcgatcgacaaggatgaggctgactatgaggtcaatgctggagacccttcccgaccgtgttcaaacacttcagactactgccagagtgactatgagcgtggacgacccaagaagtcatactctgtcgcgagaccattggtaaacaaatctgtatcgcaatcaacgcaacgggcagaagccatcctgtcagaaagcatggatacaacaatgaacgacaaattgcccacaatgaaaattcggggctcgcatccctaggacatactgtggagatggaatcagggctgagcgcacgtatctgcagatgcagtaaaatcaacacgcggacatcaagagtggatagccgaaaccaatcactaacgtatacacgtgaggtcatgtgtaccgaggtgggggcaaacgcccttgcgctagtaaatagcggtctcctgtgcataagtttgcatactctggggaaaacacatccgttggtacactccattntgtgcccccacgtgttaaccccaatagacacaagggtgcgcacttgtggtcccacctagagcaaaaatctgatcctagtacattagactatggttagaaggaacaacgaccgaagctcccccttgtaggggtataacgcgaatccccattggggtcagtaataggcggcaaaaacggcgagaaaagatttgagaaggagttcctaatagtaaaatcatatcgatgagaacatccacgagaagatttaacaccaaaaggtgaacacctgtgaaagaaggcaaccaatcccgcaaaaatgatagggtggagaacgtaatgaaacaaaatcttacca

SEQ ID NO: 577092 - DNA, 711 bp, Homo sapiens
  misc_feature (388)..(388): n is a, c, g, or t
cagactgcaatttcttgactaaagcttttaatgccaggttaaacaggagaaactttttccactagaagaaaatccttgctatctattttttccaatagaagaaaatccttgctattatatttaatttggatggaataaacaaatttatggcagtagcttaaaaaaaatttttttttaaaacagtctcactctgtcgcccaggtggagtgaagcagtgtgatctcagctcacgtgaactcaaactcccggagtagctgggattacagacatgcaccaaccaccctcagctaatttggtacttaagtagagacggggttctcgccatgtggcccaggctggtctttaactcctgccttacgtgatccgcccccctggccttccaaagtgntggggattacaggtgtgagccactgcacctggctggtagtagcttaaaattttccttgagaaaattcctgactttaaaaataaccttatataagtacaagtgattgtgacaaatgacgtaaaaatggcattccatgatggtttgaaaaaagccttagttagaatttcagaattcgactaaatgatttccacaaaggaaattcaaggtttaatttctatgattgggaaacattttggaagtttttaattcaatttccggtgagtttggcacaaaactggcatgacaaagggaggattcagggtgcgcagtgaagaatttgacgt

SEQ ID NO: 577093 - DNA, 305 bp, Homo sapiens
tgtaccaggagttgacgacagctgagcacatggcgagacacatcacattgttcttttcttttcttttcttttcttcttgagtggagtcttgatctgtcaccgagactggagtgcaatggtgtgatctcggctcaccacaacctccacctcccgggttcaagcaattctcctgcctcagcctcccgagtagccgggactacaggtgcccgccaccatgcctggctaatttctgtatttttagcagagatggcatttcaccgttttagccaggatggtctcgatctgctgacttcatgatccgcccg

SEQ ID NO: 577094 - DNA, 280 bp, Homo sapiens
gacgtgctatcttagaactgctaacacttcgcaggagaacagttccgtcttataactaataagatctgcaagtatgctcagtgccctcactgggccgttcctacgcttcacaagctgacctgtaactggacactctaaactgctttacagttaggggagttcatgactgacgccgacgacatcagtgagaatctcatgagctatgcgatcgacatacgggccccatgcacttactgggtcttaccgctgcgcttgtgactcatccctatgagtattggtg

SEQ ID NO: 577095 - DNA, 105 bp, Homo sapiens
gtggcttgtatattgtcttaaaaattgctttttattagttggataaatctgatttctgcctcacctttgaaaactcatatggctcttggttgagatatcaacctt

SEQ ID NO: 577096 - DNA, 118 bp, Homo sapiens
ccggtccccacctgtgtctcatctctacctgtgtgctccacctgtgtgctcagatatgttaaagccacttgcgtagtctatttatgttgtcagctggatgttttttacaactacaggt

SEQ ID NO: 577097 - DNA, 221 bp, Homo sapiens
agagtatatatggggggagagaggaaggcagaggtgggagggcagagacacaaacacatacacacacacacacacacacacacagagagagagactacggacgacacgaccagtaccacgacgacacgaccacgtgacggggggtcacagacgactgatttgacttcttacccatgggaccacagactacgacgtactacacttacgtgggggcccctact

SEQ ID NO: 577098 - DNA, 1278 bp, Homo sapiens
ggttcccaggatgctggggagttctgcaccccgagaggccgagggccgccctgtaggagccatgtggtgagaaggcgtcccgcgctaccagtcgcttccatgcgcctggtcctagcccgcgcccgtgtcgggacgtcgtgcttgcccataccaaggtaccaggtgctgtcgtgagatgttccgtgagcatggtacaccgatcgtgggccatgcttcctactaaactgttccgatactgcctctaccatttgctcaaggtccagccagtgggcagtgcaggacgactgaatgacgctaggccagttttggtacggtacgcggcgagatgtttgcgccctaagaatccataattccgatggtagcccaggactcctccttacacgcattcccggtcggggaagccgtcattgggtcgccccgaacctttcgatggaagtggcatcccaggggaggtcattacttaccacgactcagccaaatcggattggcacgttcatttggatgcaagggaagggcatgaccaagaaagcaggtcccctcccatgtcttagccggcccctctggcccgtcccgttgcagacgattgcgcaagaattcgttctaggcgccaagaacgcgttgggtgggaatgcacaggtcaagggggatgcaaagcccatcattggggctttccgtggtccatcgccactgaggccccccttggcattggtgtggggtggcctggggccgggacccatggcttgacctcggggctttgggtacccgcggcggcctttcgaaccggttgggatttggagagtcacccgggatccttctggaggcctggggcctggccgcttgccccccagggcacttcgccggctctgcgggcacggaaaaggtgcaacccaacttttcgttccagtggacgagttgggcaggaaaaggggcccttcttcacgagttccaaacttttggatccccttgtggcctctcttgcttggggccgccaggccaaggccgcctggtggttctccccccagggcccatgcatttttggccggaataagccacaggcaatgactaggcccggcgcgttcgtatgccgtgttccccaggtggttcctggaggtgggcggtgtgccccagggaatcttggtttgtacgcgggattccgaagagccctgggaagggactggagaagacaagtctgggcaccaggagttagaggcggtgtgccgggaagtagtggcgccatcgcgttggatcgcgttagaaacgggttgcgctgactgggcc

SEQ ID NO: 577099 - DNA, 882 bp, Homo sapiens
agcggggaggccaaggtgggtggatcacctgaggccaggagttcgagaccagcctaaccaatatggtgaaacccatctctattaaaaatataaaaatggttgggcgcggtggctcacacctgtaatcccagcactttgggaggtcaaggtgggctgatcacgaggtcaggagatcgagaccatcctggctggcacggtgaaaccctgtctctactaaaaatacaaaaaattagctaggcctggtggcatgcacctgtggtcccagctactggggaggctgaggcaggagagtcgtttgaacccgggaggcggaggttgcagtgggctgagatggcgccactgtactccagcctgggtgacaagggcaagactccgtctcaaacaataacaacaacaacaacaacgacaacaacaaatatatatatatatatatataaattagctgggcatggtggcggcgcctgtagtcccagctacttgggaagctgagataagagaatttgttaaacccgggaggcagaggttgcagtgagccgagatcacaccagtgactccagcctgggtgacagagtgagactctgtctcaaaaagaaaagaaattttgaaaataaatcgtgggtatttgaaaatgctgtgaattgacataatacttcattttgccagtcatgtgataaagtattatttaccagtgtaagagcgaaaaaagcaaagaactgtctgtaggaacactgagggtatggacgctctccttcgtgctctcaaactcaaactccagtcttcgggcagtatgatcgggtaataccgctcgtgggttttactcacgagttaccttacacttcttctcctgtctgagatgttggatcatctgttaatctgtaggta

SEQ ID NO: 577100 - DNA, 479 bp, Homo sapiens
ggacctgccgctctatcctgagccaagcataccttgcagtgacacccaaagtgctggaattacatgggtgagctaccgtgtccagcctcaatttaaaaataaagagcataattgcatgtttgtaacacaaagaataaatgcttgaggggatggataccccctttaccctgtgattattacacattgcatgaccatcaaaacatctcatgtaatccataaataatacacctactatgtacccacaaaaattaaaaaacaacaacaaaaaaccccacaccactacctcactgatgccataatgtttaaccatgcctttcacttaaagaattacaggtatgagccactgcacccatcctagattgcttataacacaaagggtaagtgcttgaagggatggataccccattttctatgatgtgattattacacattgcatgactatcaaaacatctcatgtaatccataaataatacacctac

SEQ ID NO: 577101 - DNA, 102 bp, Homo sapiens
tacctgggcgtttggagaaaacagtaatactaggaatattgtcagcatggcaatgcccaagtgcttcccgggtctctcccccgctgacttggaaaccagaga

SEQ ID NO: 577102 - DNA, 260 bp, Homo sapiens
ccaatggtgataagagcttcaaaagtgttatgtgccaattgctacagaggattctgttcttagatgcatcagcttgtaactcagttacttaaggatatgttagctgtatctcagtttgcatgtggtcagtaaatttagagatgctccttggtcacaatcatgttactttgtatcatggcagtagggtaacattattatttgtttttgtaaatgtttttcttagacagagtcctccctcttttacccgggactcgccttta

SEQ ID NO: 577103 - DNA, 1259 bp, Homo sapiens
gatgtgcccccgtgtgacctcaggcgccgtaagaccctgctgtccaccaaatagggttcttgaaaatttttctggaggggagtggaggtgttcccaggggaattttccagaagtgtttctcgctttgctcttttggaaggatatcttcttttcaaacgaatttaatctccacaaaggggttctgcagcacaaccgatagtggtgtgaaagggctgaagggccctggattttttgggcccccacaagtggagaggtcccctctattgacaattctgtcgcgccctaccttattggggaaatattcggaatttttgcgccatctttaaagtttttgaaattaggagaaaaagaaatagttggggggaagaatttgggaaccgaattttttggtgggccccccccaagagtttaatcacccgggacactgcccatataggggtttcccaaaaaaaggtgtcctgttcccgtttcaattaggccaccgcggggccacataaatcacatggttgaggaagaagtttattttgttgtaagaccacatatccccaacactttgggaaacgcgggtcactgtccaacatagcccacgggagatagaaaagatatcctggttaaattttttaattccccactatgtatatttcttaaaatgcgttaaagttcttccacgctaattttttaattatattaatggtacactctatattgttggggtgccacactcaattaaaatttatttcccgccccccctccccacaacttcttatgggatttagataagattttataacaccagagctcttatatttaccccccaaaaacgcatttttaattccctctccgcattatacctcttgatagaaaagaaacttttataagataataggctctctcccccgatctattgttgttcacaagattccacaaagaagattccaaggaggaccacgaaaagtggagagccatataaaacacataaccccaattagttaaggtggtgtatattagaacaccgccaccgcccacgccacatatttagtgttcccacgcccaaatatatccatatttataccaccccgagatgttttcttaatatgaactttatgtggcgttttgtaatgtttgcgcttgtttttaaatttgcacgcctttgcgcttgaggttttgaaagtaaatttaaagaggctaataatgtattggggaaatttatatatctgttcattttgaagtaacaccattaaaataatgtagagccacca

SEQ ID NO: 577104 - DNA, 770 bp, Homo sapiens
  misc_feature (7)..(7): n is a, c, g, or t
  misc_feature (93)..(93): n is a, c, g, or t
  misc_feature (114)..(114): n is a, c, g, or t
  misc_feature (126)..(126): n is a, c, g, or t
  misc_feature (129)..(130): n is a, c, g, or t
  misc_feature (135)..(135): n is a, c, g, or t
  misc_feature (159)..(161): n is a, c, g, or t
  misc_feature (169)..(169): n is a, c, g, or t
  misc_feature (173)..(173): n is a, c, g, or t
  misc_feature (178)..(178): n is a, c, g, or t
  misc_feature (183)..(183): n is a, c, g, or t
  misc_feature (185)..(185): n is a, c, g, or t
  misc_feature (189)..(192): n is a, c, g, or t
  misc_feature (201)..(202): n is a, c, g, or t
  misc_feature (205)..(207): n is a, c, g, or t
  misc_feature (211)..(211): n is a, c, g, or t
  misc_feature (219)..(220): n is a, c, g, or t
  misc_feature (225)..(225): n is a, c, g, or t
  misc_feature (231)..(231): n is a, c, g, or t
  misc_feature (246)..(246): n is a, c, g, or t
  misc_feature (272)..(272): n is a, c, g, or t
  misc_feature (274)..(274): n is a, c, g, or t
  misc_feature (288)..(288): n is a, c, g, or t
  misc_feature (311)..(311): n is a, c, g, or t
  misc_feature (328)..(328): n is a, c, g, or t
  misc_feature (333)..(333): n is a, c, g, or t
  misc_feature (354)..(354): n is a, c, g, or t
  misc_feature (366)..(366): n is a, c, g, or t
  misc_feature (411)..(411): n is a, c, g, or t
  misc_feature (428)..(428): n is a, c, g, or t
  misc_feature (456)..(456): n is a, c, g, or t
  misc_feature (496)..(496): n is a, c, g, or t
  misc_feature (509)..(509): n is a, c, g, or t
  misc_feature (518)..(518): n is a, c, g, or t
  misc_feature (531)..(531): n is a, c, g, or t
  misc_feature (534)..(534): n is a, c, g, or t
  misc_feature (539)..(539): n is a, c, g, or t
  misc_feature (545)..(545): n is a, c, g, or t
  misc_feature (552)..(552): n is a, c, g, or t
  misc_feature (554)..(554): n is a, c, g, or t
  misc_feature (557)..(557): n is a, c, g, or t
  misc_feature (575)..(575): n is a, c, g, or t
  misc_feature (597)..(597): n is a, c, g, or t
  misc_feature (628)..(629): n is a, c, g, or t
  misc_feature (662)..(662): n is a, c, g, or t
  misc_feature (673)..(673): n is a, c, g, or t
  misc_feature (688)..(688): n is a, c, g, or t
  misc_feature (694)..(694): n is a, c, g, or t
  misc_feature (705)..(705): n is a, c, g, or t
  misc_feature (748)..(748): n is a, c, g, or t
gagcttnaggtcacaacagtaactatcagttcaactacaaccaaggtttccgaaagaaaatggcttctccacccaagcagagttgtatataanattccaaataagaacctaggnatcaccctaganggnnttctnacttcacactgttggggggatttnnnaagttggntttngggtngagtntntttnnnnggcacattnngannnaganattttttnngggtnacgatnagactgttacatttngcaatcaacagcatggggtgcaaaananaaaatcttcatttnaaccctttgttgggatgctttanactttccacagaacagnaactnaaataacctgttatacaattngtcacaaatacngtcctcgggttttttgcccatacgcatagggtatttgtctgaganatgtcttctttgtagcngctaggccctgccaccactgtgcttggntgggattcacaaatctgttgtgacctgtggcttccctgtnacttctctggctntcctctccngctaagctttgtntcntaatnaaaatnttctgcnantgncatagctaatgctgctgntgggaccgccatagacaacttngtttcgtggttttgcaaagtattggcctccnncgccataagggccagagcttctgcctccaaaanttcctcccttnatgggtccaaaattngaagantgattgttgtnattcccaaaatcattgtagcttccacaactccaaattgcttcnatcattaccaaatccattatag

SEQ ID NO: 577105 - DNA, 202 bp, Homo sapiens
  misc_feature (21)..(21): n is a, c, g, or t
  misc_feature (55)..(55): n is a, c, g, or t
  misc_feature (95)..(95): n is a, c, g, or t
  misc_feature (110)..(110): n is a, c, g, or t
  misc_feature (149)..(149): n is a, c, g, or t
  misc_feature (180)..(180): n is a, c, g, or t
cctttctttcttttctcttanctttcttttcctttctctctttctctgtttctcnctttctctttctctctctcttactttctttctttcttttnccatggcagtgagcnctaaatatgatatggtgtcactttcttgattagtgctanggtagttttacctgccatttcttttgtattntcaattgcaaattgtcaggttt

SEQ ID NO: 577106 - DNA, 101 bp, Homo sapiens
tcttcagtgtatactgagtgactcttctgtatagcataacttgacacaacactgtgaatcaactatactttaattttaaaaagtaataaattaggagattc

SEQ ID NO: 577107 - DNA, 897 bp, Homo sapiens
  misc_feature (897)..(897): n is a, c, g, or t
agcggacgggcctctggctccggagctgcgggcacgccagctggagctgggcgccgagcacgcgttgctagctggacgctgtctggccaggtgttctcctggggcgggggctaggctagtggacagctgggccagtgggaccctggcaggcagagctggagccacggctgttggaggcgttgcagggcctagatcatggctgaggtggccgcgggagggctggcattctgtgtgtgtgagtgagactggggatatttatatctggggctggaatgaatcaggggcagctggcacctgcccaccaggtaacctggcagaggatggagagactgtcgcacagggaaggcacatgaactgaatgaatgatggttctcaggtgaagagaacgggtggggctgaggatggagcgccctgcccccttcatagctgtccagcccttcccggcagttactggatctccgccatgtggctcacgatgcagtcaaggcaagctgtggatcccggtcgacacagctgtggtgacacgaacagggtgagctctacatctggggcgtggggtactatatggactagctgggccacgcaggacgacgcaccagcttggatcggtctcgccgtgtggaactacttgtagatagcaactccaagtaaaggctgtcacctgtgggccgtggaacacctacgtgtatgctgtggcagaaagggaagagctgacatgtggaagatgggcattacaggttttcaggagaacctgctgaagcttgcttttcatcgttacccagaatgttgggatcattcccccagcggacccgaatttattgcaggacgcaacagcacagacaccaaaggtggcactccgtgactgtcactataggcggtactcaggcttccatcacn

SEQ ID NO: 577108 - DNA, 418 bp, Homo sapiens
  misc_feature (297)..(297): n is a, c, g, or t
  misc_feature (323)..(323): n is a, c, g, or t
  misc_feature (399)..(399): n is a, c, g, or t
  misc_feature (408)..(408): n is a, c, g, or t
cctgtttctcccctgtggtatcccattaaaactcttgttgaaactacagttaacctcctgacaatccagatgatgctcctgctacagcggcacgatggataccaacccgtctctcaagaataccccaaaaattaagtttttctttttccaaggtgcccacgccacccctatgtcacgcctgaagtagttattgagaaagtcgtccctttccccttttctataaccaaatagacaggaatgggaagattctcctcggggcctggaaagcttgcgtggatgaatgaactcctcctcctncagggcccagtcccaagggtacaaanttgtcaccagcaggcaagataggcagagggcagggaagaggagctgggttggggaaggacacgtgaccccttggangattcaagngggggagggt

SEQ ID NO: 577109 - DNA, 397 bp, Homo sapiens
cgcgggcaaaaagtcattggggaaccccaaaaaacccccccaaagaagccaaaggccagttttaacatcccaattttaagggttttaggaactatttttggggggaggccacagatcatgtagaaaaagtcaattattgtttgtggagtttttcagctaaaggggggggggactattaaaaaccatttgtttttattcaaaagggaaaaaaaaataggtggccctggggttggggaacttaaaagccccttacagccctggggaagggttttttgttttaaggagggagttttagcatttaagttaaacaggtggtgccttaaaaaaggagcctggtacaaagaattttttggggagccctttttataagaaataaaaaaccagatatggggaatga

SEQ ID NO: 577110 - DNA, 104 bp, Homo sapiens
tctacaggatctataagcgagtcgggtatatatcctaaactaggtagaagtatgcattgtcacttacatgtcacttttctaaccaagcatagggctggaaaaag

SEQ ID NO: 577111 - DNA, 275 bp, Homo sapiens
gatgtataaagtcatcgctgagtaggacacgtgcttgcctcagtgtgatagcttttgtcgcgtgtatcttgagaacatgactccagtaaggctcatggctgccaggcccattcctgcaacgcttggggcgattaataacgtcactgagttggtcactgcgggcgagtccatagcgcagtccatgcagaaagtgctcgcagatacgcactggccaggcttgtacaagcacttgctgtcctatcagctcgaccgcccggaggatgattttgctgaag

SEQ ID NO: 577112 - DNA, 779 bp, Homo sapiens
  misc_feature (779)..(779): n is a, c, g, or t
ccggctctagcagtgccggcttctctgtccaagtgcccaccctggagctgggaggaggagtctgcgtaatgtgcgtgtgaagagactgggggagctggccgtgggctcacggtgttttgaccctgtcggtcgtgcgtgagaggaaagggaaggaggagtgtccctgaatagctggtcgccgaaatgttccggtgtggaggcctggcggctgggtgctttgaatgcatgaatgctggtgcccttggtgcggaccgtgtgctgtccgaatgccctgaggcagaggaacctggctcccatggcaacttgttccagcgatggcatgttcctctagaactccatgatgacaatgacaaatggctagctctggtgcatcagtggtggcaaacatctgataattcttgtgttagtccttattgtgggcttatcaacagtaggatgcttggtgcctatgcctacaagactatgaagagaggatgacaaaacagatacaatgaaagaatttcatgggttacgggctgacaccatgaacatgaaacacgacaaacaggcctgcgttatctgcttcagaaaggagcaggacacgttcctcaatgacaaaggctgccaatgtcactgtacctttccgtgcctaaatttggttggcaggcacatgctgctttttgctgcaggcaggatccatcctggtgctcgtggatcctgggtgccagggtactgattgtatctgaacgatcctgagctgccgtacattgcgactcctcatttcacacaagaactgtagn

SEQ ID NO: 577113 - DNA, 501 bp, Homo sapiens
tatgcagccagaaatgccaaaaccaagaatctcactgcgaacatattgtcatccctgtagaaacgtatggctggatgctatcacttcagggctgcgcggaccaacgggtctacagtttgacaaggctacttcttgggcctggtcttaacgctctctttctcctgctgctcatcccaccgcttacggaactcgtcgtccagggcaaagatagcggcgtcaaactcttcgcggcatatcaccgatgggtagcggtcgaggtattcggtgatcgctgatggtgcgatcggggccggcgcgcccatcatgccgacatactgccgtgaccgaccgatatgcccgtaggcctccaggatctccgcgaccacatcgtcgatctcaggcggatcctgggcacccagcccgaggcgctcatgcttccagcgctttttctcgttctctggcccggcccaatccctaccccagcgatatgccgctactgcttttccgcggtggcctgggcct

SEQ ID NO: 577114 - DNA, 393 bp, Homo sapiens
ccccttccatggaaaagctggaaaaaaactctggaacccatatccaggcttgggaggggtgctgcccacagttctggcctcccccatccctagggtaaaaaaccatgagtcctggaggaggagagggcccctcccaaaggactggagacaaaaccctttgcttccttggggccctccaagactccctgggggcccactgtgttgctccccccgggcccctctttcccttttagacctgagcttgcccccccagctagccctaagcaacatctccctgggggcgcccgttaattactgagaaatgtgaaacgggccattttgaaactgagggggtagaaaacttgatctgggggggtttggtttgttttttttttttaaaccccagccacgtga

SEQ ID NO: 577115 - DNA, 184 bp, Homo sapiens
  misc_feature (1)..(1): n is a, c, g, or t
ngtttatcgatgccacatgtcgtccagcctgagcctgctcaccagcatggtggatgacatgtggcattacgctggggaccagtccactgattttaactggtacacccgccgagccatgctggttgaggtcaacgactcaaagatttagaaagtataactaagcggctagtgggattgataaaca

SEQ ID NO: 577116 - DNA, 417 bp, Homo sapiens
gcattccatgctcccagacaggaccacgggaatatggcaacctatgtcgcagggttgtgcgtgggtattatctgtggttgtatcgagttggtatttagtctaaggcaaacacatcttgctagtgcaataacatcacttggtttggctctgacagagactgacatggtccaggcttattctggctccatcagattacagagcactgatgctagtaacatgccagtgaactattctactctttttatatgaaatgtaccacttggtaggggttctggtgatggtggtacctcttattaccttatgtaaaacacttgaaacagcctcatcaatatggccgtcactctgtataacactcccagtatatcttctcactgtctgtttacttaaaatctagtggagtgacataattaatacgca

SEQ ID NO: 577117 - DNA, 128 bp, Homo sapiens
ttagcagatctcagcatacagtattagatgaaataatgtaactgtttttgtatcggtatgtgtggacatgcttctggctggtggatgaaggtgctagaaaactgtcctgtctttacttaccctcaata

SEQ ID NO: 577118 - DNA, 181 bp, Homo sapiens
tatttgtgatggtttgaagtagctataatggaagctttcagtcatttttgttttcctaattagaatgtttcattttttaatataggaatgaaggttacttttatttttttcataaactttttttgagacgaagtctcgctcctgcactccagcctaggtgacagagtgagactccatctca

SEQ ID NO: 577119 - DNA, 182 bp, Homo sapiens
ttagtaatccaccattgagtataccactttctatacccatcactggccagggggaaggattgccctgtagacgaaattaggcccatttgtgaagttgggattgagtgtcattttcctcgcgttgagttattgaacgccttataatttggcagggtggacagggaactggcagttctacctga

SEQ ID NO: 577120 - DNA, 375 bp, Homo sapiens
  misc_feature (250)..(250): n is a, c, g, or t
tgccccagggaccccagcccagcctgttgccatgtccctttcagcaaacaagttccaggtcctcctggcaaaattgaagcaggcccagacccttatgagccccctgggttgaggaaaagggtgttccaggcctgtgtggaccccccctgcccgtatggagtccccccctttgaactgcttttcgggaggcacccctggttttaggattttaaggccctggcccggattttggcctcccagattccccaangcccccccttcttttttgagaacttggcccagggctcctgaggccctttcccaccattcccttcccttcccttgaaaggcaattgttggctgttttcataaccaggaaaaataacccgaagttta

SEQ ID NO: 577121 - DNA, 1758 bp, Homo sapiens
  misc_feature (303)..(303): n is a, c, g, or t
  misc_feature (337)..(337): n is a, c, g, or t
ggcgagacatgacgaactattcttcattgcaatcaggactgatcgcacgatctccagaaaatgtcgtacagttagctgctggaacggtgatcgtcacctagatacacggaattgctgcaacacgtgtactcaccacgtgcataccttggtcacgcgcagcgttcctggcgcggacagatgacacgctgtataggacgcatagctggacaggtagtgcgggacatctctacacaatcttccctcgagcgagaaccgtgtcacagcgccatcaggggacgaaagaccgccaacgagttgttgagncctctgagcctaatgttgattggcccccaatgantctataaatggactctagccacggacccttttcatttcacaaaagagtcgaagggagctcgcttgtacgcgttgagaacgaaaatctcccgtgggtctctccgacggcgcagcccatctcgagcgggccaaattatcgcgtagaggtagtgagaacgagttggacaagaagacgcgctcgattggtgggaacaccctgtcattatgcatagcatgcgcaggaagatgctagggtttgatcgttagttgcaggggaaactcgcttgcattgctaaacaagacgagagtcgggctttgggcagggaaggccaatctctgggcttggtggactcccctttgcggcagggaaagagctttcgagacaggattgcgaaatacgcaaaaggggccaatcgttgtacattttaaccccaaaggcattcccacggtccaaagaaggattggttaaactaaccaactttaaagaactctgctggtatatcgaagcaagcatcgtttcgcgttccctgtgtgggattccaaactagcaaagggctaagccggaattatgcccataacggcaaacggtcctcgtgaaagggcattgcacggggtttgcggctagataggtccaaggggtggcgtaacgccaacaccccgtgtttggacttggaagcgttgggcgccttcggtcatgaattacggcgcctggggagacttggccgaacgggaccctataccgggagtacgaacactggaacgttaagttgtttgaggaacagaggatctagcgagattttggcgccgcgaaaggtctcttaggaggcacccgcgggcgaattttcggcaactcccaacgaaacgaaaaccaccggaggtatatgcgccaacccgcgttatatgagcccacagcaagaaaaaatgcttagccgcatatcccgccgtggggtcaccatttggggtggcgataatattgtcaacacaatagcaggggccgattcgccaagatactggttggaacttggaacgaatacccatacacagtaggggattcctcaatgagggacactttacaacccaaggtggcggacgcagaacaaagagttggatcggccttccttctcccatggacacagaaatcgcacggtcccgacaaggaattcgggacactcctccgctttgtaaatcggggcaaaacgggacagcggaatggctgaaaacgcgacaaacaacagaccggaacatgaaacgtggctccctcaccggcataaacccccagggacagactggttggggagaaacaaatgggggagagtcacggtccaactccacacaaagggcatgccgccactagtgcccacgtaacgacaccacgagcatcagaggaccacacagacgccgtgagcaccaggtgcgtggcacaacaacacacccacaaagaga

SEQ ID NO: 577122 - DNA, 361 bp, Homo sapiens
ttccggcgatggtatgctggaagccttcaagcaggtgagtctgaccaagaaggtgaccgtggaagtggccaagcaatatggctcgtttgacgaagaagatcctgatgctgcgttggaaatcgatgacgatggcctggtcgaaatttcacagtggcgtcatgcgattgtgaatttcccgcatcccttgctgaaagaaggtctcatcatcgatgataccccgggactgaatgcgatcggaaccgagccggagctgacgctgaacctgattccgaatgcacatgccgtgctgtttatccttgccgcatataccgtcgtgagcatgagcgatattgatgtctggcgcaaccacgtcggcagcgga

SEQ ID NO: 577123 - DNA, 1066 bp, Homo sapiens
  misc_feature (440)..(440): n is a, c, g, or t
cggaacaaatcttaatcattagtgcaagcccaattacacctggaagtgtggaaggatgcagtatgcttactgctgcgcctgtattggcagccgggccgctcgacggtcgatgctaggctcgagccttcatgagagtagaccgtcacgaaaagtagtgacgaaacagatagctctctggctgtatcgaagacactctagtagattatgccaattcaggagcagcgacgtgagaagacacaaggtggaatctaaggtatggcggctatctggtcatataggatgtgtgattgccacattgctatgtcattcagatggactcgctcggagttggatggcgatgtaaggccatctctagagggctccaaacaatttgccgaccattcgctgtcatccatctgatcgcacacggtcctccatctctgaaatcacgagagctcagngattaattgggaactccgtagaaaggagtgcgtgacgtctcgaagaattcaggctttaaatgggaggtactttagcgcttgcctcatttaacgattgttggtacagataacgttgcccctatgcgctgttcagcacgtacacgaaaatttagccttaaaaacactagtccttgtctttgccaaaattcccttcacgtcaggtgtccactcctcgtcattcgaaagtacatgtgacccgttaacgcgactaaacattttccagctacgaggacaacggaaatcaaatgctagggtaattcaaaaaccttccttagagataaaatagacatttacgtctcgtatctgtcagcgcatcagacgatcactgtatgtcacagtctcataccatcaccaagagaagacctcgtatgggctcttccctggtcttaatctgaaaggcccaaaggcatgctattgccagtcacaatcatcacggaaggtagggcataaacccgacgaattcctcgtaacaaaggaaagcctggtcttcgggaggccttgaccgagttgtcaaggagaaccaccgaattagaggacacttttccccggaaataacggattttttgtgcacagggtcggctcacaga

SEQ ID NO: 577124 - DNA, 663 bp, Homo sapiens
ctgcagcgaatacggcacgcggagcacgagtcgtgcgagaatacacagtttgagtgtatatttgatgtgggctcttttaaaaaagtgtaatggggtagctaatgtgtgtatatgtgtttatatagtagtgtttataattaataggagtttaataggagattgtgaattttaaacactttaatataaatgtaatattgggggatatatttgagaccttaatatatagtgagtcaaatgtgaaatgtgtttgagggatatattttctctggtttttataaatcaatttttatacccaatattataacacccttatttgccacgcccgtctgtgtgcgttggcctctatgacacaggagtgcgctcgtgggttatacctaaacggtgtctctggtcacatcttggtgtgggccctcggttgactcttgccacggcagctctctacacgtgatcacgttggccacactctagagactcgtgtttgccgcggctatgaccttatacggtgcactttccttgaagtgcgcacgttgcagcgatcccagagccgttataacgcgaactcggccctaagttgtgacctgtttttctgtaaacgcttcgaataagaggtgccctcgcaaagagttgaaagataccattaggtgggcgctggcctgatcgcat

SEQ ID NO: 577125 - DNA, 819 bp, Homo sapiens
gagcgagctcagtgacaagaagcggccagagacggtcgccaaccagattcaatgatgatgcctcctgacatactggatgagagatccatgcagtctaatggagcccgcctacgtccgctgcatcaaacccaatgatgccaaacattggccggccgctttgacgaggtgctgatccgccaccaggtgaatgtacctggggctgttggaaaacctgctgcgtgcgcagagccggctttgcctatctgcctgcaaatactgaatgctttcctgcaaccggtacaatgtcacttgtgcccatgcagacgtggaccacagtgtgtgcaagtgacaggacgaagagatggggtgcgctgtgcttgagtcacgacacactgaggactacaacgcccacgaagagtacaatgatgtgtcgcatggaccaagatcttcacttaccgacattcccacaatgaccctgataaagacaacagaggactgaccatggaaggtccggcggcaggagcccaggaccagaaaaggatccaaagcctgactggacgtggcgtattcgcttggccggcagagaattactcgaggggtgacagagatcagaccagtctagcaactcccaggtcgtgggtggccgtgtggcaaccacctggtgccctgcagtgaagggcaggcggcaagaaggaagtgtgcgggtacaaacacattccggggggggatcatcagcaggctacaacactgcggcacggtcgcctgtctgcccgcgaaactgcatagttaaggtctcaatgtgcgacacctatattgggtcaagttatgtcgcacttaccg

SEQ ID NO: 577126 - DNA, 205 bp, Homo sapiens
cctcacaacctggaaggcagaagaactgcccgaggcagaagcaggaagcagtatgttaagtggtggagagtgctatggagaaatataaagtcggagagagagagagcacaatgacaaggtcaggttgaatgagtaggggtgttcacacatcctcttgtgtgctaggtagtggcgtgcatctgatctgagaggcagaagcaggaag

SEQ ID NO: 577127 - DNA, 893 bp, Homo sapiens
  misc_feature (21)..(22): n is a, c, g, or t
  misc_feature (24)..(24): n is a, c, g, or t
  misc_feature (47)..(47): n is a, c, g, or t
  misc_feature (52)..(52): n is a, c, g, or t
  misc_feature (54)..(54): n is a, c, g, or t
  misc_feature (67)..(67): n is a, c, g, or t
  misc_feature (86)..(86): n is a, c, g, or t
  misc_feature (88)..(88): n is a, c, g, or t
  misc_feature (102)..(102): n is a, c, g, or t
  misc_feature (116)..(116): n is a, c, g, or t
  misc_feature (121)..(121): n is a, c, g, or t
  misc_feature (146)..(146): n is a, c, g, or t
  misc_feature (157)..(157): n is a, c, g, or t
  misc_feature (159)..(160): n is a, c, g, or t
  misc_feature (162)..(162): n is a, c, g, or t
  misc_feature (175)..(175): n is a, c, g, or t
  misc_feature (222)..(222): n is a, c, g, or t
  misc_feature (227)..(227): n is a, c, g, or t
  misc_feature (232)..(232): n is a, c, g, or t
  misc_feature (240)..(240): n is a, c, g, or t
  misc_feature (251)..(251): n is a, c, g, or t
  misc_feature (255)..(255): n is a, c, g, or t
  misc_feature (258)..(259): n is a, c, g, or t
  misc_feature (261)..(261): n is a, c, g, or t
  misc_feature (263)..(263): n is a, c, g, or t
  misc_feature (266)..(266): n is a, c, g, or t
  misc_feature (296)..(296): n is a, c, g, or t
  misc_feature (304)..(304): n is a, c, g, or t
  misc_feature (316)..(316): n is a, c, g, or t
  misc_feature (340)..(340): n is a, c, g, or t
  misc_feature (344)..(344): n is a, c, g, or t
  misc_feature (363)..(363): n is a, c, g, or t
  misc_feature (370)..(370): n is a, c, g, or t
  misc_feature (385)..(385): n is a, c, g, or t
  misc_feature (401)..(401): n is a, c, g, or t
  misc_feature (406)..(406): n is a, c, g, or t
  misc_feature (448)..(448): n is a, c, g, or t
  misc_feature (460)..(460): n is a, c, g, or t
  misc_feature (524)..(524): n is a, c, g, or t
  misc_feature (631)..(631): n is a, c, g, or t
  misc_feature (661)..(661): n is a, c, g, or t
  misc_feature (664)..(664): n is a, c, g, or t
  misc_feature (752)..(752): n is a, c, g, or t
  misc_feature (783)..(783): n is a, c, g, or t
  misc_feature (802)..(802): n is a, c, g, or t
  misc_feature (830)..(830): n is a, c, g, or t
  misc_feature (868)..(868): n is a, c, g, or t
tgatgatttggaaattattannanaaagcaatttaaaaaaacaagtntggcnangaaagacccagcnaagccacttaggcaaaagncnatctttgatgtcanagtttccaagaagnatcanaagagtcaaacagttaaacatttcnctgggcttttntnncnatttcccagaaangttgtagagagaagcccaccaacttacttaaacaaaccagaaaaacngaggnggggngaaaaacngacatttccanattncannananaanggggaaagattcagaaatgactgagaaganacaggganatgaaattcaangcaaatatgggcaaatcttaaaanaganaggcatcttacaaaaaaanccccgtnggtacattacaattntccagccagtaattcnaaaangccagagggcctatgaggcaatatcaaaaaaaccagggaacngacatacaaagncaaatataaagagaggaacattcagtcatccacagataaaaggctatcgggacataagcctganacaagcaagacgccattcactgcgatttcgccggttttgcccttgccacgttctgcttcaaaaatgatgcttttggtagcatcagttccttgatacaactgaatttnccctgtcttccacttttcatcctcactcgnggncttctcccatgccagggcattgttactgtttttcacaaacactcgaagtttcccgactttgtctccggccagccggtaatcaaagagnaacagaagttgctttggggtgcaggtcaggnaggagaagttcaatcggcnatgtcttcttgtgactgccaagccggantgccatatagagcaatagcatatctcgatagcaggatncagtcaaatcatctctctatctgtt

SEQ ID NO: 577128 - DNA, 375 bp, Homo sapiens
  misc_feature (3)..(3): n is a, c, g, or t
  misc_feature (25)..(25): n is a, c, g, or t
  misc_feature (58)..(58): n is a, c, g, or t
  misc_feature (62)..(62): n is a, c, g, or t
  misc_feature (109)..(109): n is a, c, g, or t
  misc_feature (122)..(123): n is a, c, g, or t
  misc_feature (126)..(126): n is a, c, g, or t
  misc_feature (130)..(131): n is a, c, g, or t
  misc_feature (153)..(154): n is a, c, g, or t
  misc_feature (207)..(207): n is a, c, g, or t
  misc_feature (240)..(240): n is a, c, g, or t
  misc_feature (320)..(320): n is a, c, g, or t
  misc_feature (330)..(330): n is a, c, g, or t
aanatgcagtctggagtaaacaacnccaaagaaatggaagatggagtttgataccagnattngatgggaaaatcctttgatgggttgggcatcaacggctgatcccttntccaacatggttnnaancttnngtactaaagaagatgcagtttnntttgcagaaaaaaatggatggagctatgacattgaagagaggaaggttccaantttcaagtccaagtcttatggtgcaaacttttnttggaacaaaagaacaagagtatccacaaaataggttggcactgactatatctctgcttgactgtgaataaagtcagctntgcagtattnatagtccatgtataataaatacatctcttaatctcctaataaatt

SEQ ID NO: 577129 - DNA, 167 bp, Homo sapiens
aagctctactttactcctctctctactctgctcgatctctatagtggaggcgagcaggacaggttgacagcatccctccttggcagggaccatctccacctggagcctccatagacctaaccatctttcttcacctgcaggtctcctctatctatgggacctattca

SEQ ID NO: 577130 - DNA, 125 bp, Homo sapiens
tcggtacctgtttgtcctagctagtcaggagtgctgagatcactaagaatgctgagtcctgggaggcggtaggttagcagtgactctgaccatcatgccactggatatccagcctggtggccaca

SEQ ID NO: 577131 - DNA, 169 bp, Homo sapiens
cggcctttacgaatgctaaaatccgacaagcgttgaatttggcgacaaatcgttctgaattgaactcacaagtgctatctggtacgtcaacagcagcaaattcctttacaccaaagggcttgagtcaagctaacggggaggtattttgcaacgtattgtccaagctatg

SEQ ID NO: 577132 - DNA, 137 bp, Homo sapiens
gcgagaactagactcgagggagctgtaacgctgtccgctcaccatctgttatctatgcgaggcccatggaacagacgctgagatgaagagcaagagcatactctctggatctacattaccggactcttacactgcgg

SEQ ID NO: 577133 - DNA, 646 bp, Homo sapiens
gataattcttctgcctgagcctcctgactagctggtatttcaggctgccagtcaactatgtcacttgcttaatctgttcattacaaatagtgcttgtttgaactgttctttccagagagtgatgctgtctgataattttaaatataaattatggaggaacaggggtcatcatgtgatcggatacttgtgggtctgatataatgattctatttaattaatatttgtcttgtgggagccataagcgtaataggcataagtgagagcacagcacttgtaagtcagagtggttcattacagggtgagacagtgcaacaacattatggagtccaaacatggtcctttcatgtaatgttccttgcggaggcagggactatggtcttatcttgttcaccattatgtcagtactcagagtcacacactgcttgactgcctagtagcgtgttccataagagtagtcgaatgaatggatgagttgtctcattgaagcacttttagtagctcatattgtcttgtactgtggatagtcaagatccaattatatttcatttgaaggttaacaagctttggaaattaggcagtttttttgattaaggtaatctttaataaagcgtgaattttttaaaaggtatggatctatgtatacaca

SEQ ID NO: 577134 - DNA, 824 bp, Homo sapiens
gtcgatttcgagctcgaggtttcccccgcgcaggtgacttctcatcgcttgttcttttgcatttttcctcccaccgccgttgccgccctccccgtcctggccgtccgccctccgccctctgcagggacatctctacaccgttcccatccgggaacagggcaacatctacaagcccaaaaacaaggccatggcaagacgagctgagcgagaagcaaagtgtacgacgcgcacacccagggagatcgacctggtcaaaccggaccttaaaaacctcaacgatgacgtggtcaaagatgtgatttgaagatgtgattggcagaaccagaaggggacacacagtttgtgacggcattttggaaggccagtttcaccaccttcactgtgacgaaatactggtttaacgcttgtgtctgccctcttgtggcatccggatggcactcatctggggcatttacttcgccattctctctttcctgcacaatctgggcaagttgtaccatgcattaaggagcttcctgatggagattcaggtgcaatcagccggtctattccaatctacgtccacacccggtgtgtgaaccaactctttgaagctgtgggacaaatatacagcaagtccgaatcaacttgcagaaagaaatattaatgacatttcaagatagaagttactgatttttttcctttaaattcctgggcaattcaagttccaggtggttatacaagacactttgaatggatttctgggggaacaaagacaccttcagatcaaaaattagtgcttggggactactattgggggcgagttacccctaatttcccccttg

SEQ ID NO: 577135 - DNA, 584 bp, Homo sapiens
cgacgctcgccgcgatcctgtggactgctgggcagcagccagcgcctggctgagcaataccgcgttcaatggccactggcgcctgctgcaggactgggtcgagaacctccgcgagttgcgcgccctgatcggcagcctcggtcaggccgcgccgcgccaatccaccagcgaactgcgcagcgccctggatgcgttgctggaagactggcgcccgctggtccaggccggtgacgacgatgaagacattcgcaaagccgcgccggaacagttcatcgaagagctgcaagacgtgcgctggggcctgttctcactcaatctctcgcgctggctgctggcccgtacctggacggccgagcgtaacgtgcgcggcaaccgtcagggcgctgcgcaaatcactaactggctgccacgcctgttggccgacgacgccgtcgccctgcaactgcagcgctaccagcaacagccggaagacctggccgagcaactgccgcgtatcgaacgcattcaggcctggctgcaccatgcgcgccatgtggtggacattcctgagctggaccgtttgtacggcgaactgaacaagctgg

SEQ ID NO: 577136 - DNA, 714 bp, Homo sapiens
ggaggtaaacggtagaagaaaacaaggaatcaaaacacaataatgtcttgattgctgggagagtgaaaaccctctgccttcagaagaatcactggctctttggataggaactggacggtaggccatattttactcctggatctttcatgctcgtaagacttatacgtgtaatttacaacttttgtaattcggtcagagtcatgatgacagcacaggtaggaagccttagaaatgtcatgctggtattgggtctacaaccggaaaatgtactgaaggtacactaaagcagaatgagatacaatcttgcttgacggtgtgggagatcaattcttccacatgaagtgcaaaatttagaaaagcactaagttgaagtgagaaacagaattaggtgataagaaagtgagacgaacatctgttgagtacagagagaaataggaatcgtcttgtggataggaaatacttattctctcctcttgtaaatattctacttgttaaaaatgttcagatggaaagggtactcacatttttgaaatagctcgtgtgtatgaaggaatgtgattattttgaatttaaatatatgtaagaaatacttacaggtaaatgtgtatttctaaagaactatttaaaacacaatgttatatgttcttataaatacagttaatatcgttcattaattagggaaagataaatctgtgaagtacctaattgaagtaa

SEQ ID NO: 577137 - DNA, 234 bp, Homo sapiens
ttcggtcactactagcaggatcccctcccccagtgttcaagcgattctctgtcctcgatctcccgagtagctgggactacaggcttgcgccaccacgtccgactgatttttgtatttttagtggagatggggtttcaccacattggctaggctggtcttgaactgatgacctcaggtggtccatctgcctcggcctcccaaagtgctgggattacaggctctttgaatccagga

SEQ ID NO: 577138 - DNA, 413 bp, Homo sapiens
  misc_feature (413)..(413): n is a, c, g, or t
gcagaagggtaaggatgaacctctccctcctttgccgctttagctttagctggcaaacaaacctgctctgtaacctcttctgttacttcgttatactccccttcctcctcatcatcagtgtgggttccaaggtggaatgaaccagagtccacccttgtcccattgttaccttgatgcctccgagctccccttcttactgaccatggggactgctttaagagtactcgggtgtcctccagcttagttccacgttctccaactgtcgctctggtgatccttcgacctggattcgagcccccacgtatgggcgctgcttgccgagaccagcttggtcagggagacactaacccagtggtgctagaggaattaaagacacacgcacagatatagaggtgtggagtgggtcagggtcn

SEQ ID NO: 577139 - DNA, 1170 bp, Homo sapiens
tatttaaaatttattggtaatcggggctccgcgcaaaaggaagggggtggaggggtggggatacatgtgcaggggacacaggaacacgatgacatgtggccagggccacaacttcttctgctcggtggggaagagggatgaaaagacaagaccagggcttggagctggggtgagaaagagggagggggggacacttggcttgcatttcccccgcccccaggaagcaccttcttaggccctgtggaccccttcgttcaccctgtgtgccccttaagacttccatctcttatctctgtgagcttgtggcccatccgggcctctatcctccgtggatcccctttgacatttttcccctgtgaacaagatttctcaaggatacgagacagatgttcagggccttagacccaaaaccccacataccaccttattgaaggtgtacaacctttttgcgcgggcccatgggttcgtggagccctcctaaaaccttaaccggagtttcccttctttggggacaggtctagatcccccatccattcctttacatcacacatccccccgtgggaaaaaaaacacaaaaacggagaaaagaaaagagcaccaaaatccccacggggggaagggggcggcggaaacaccagcagggggagaacaacgagcctcggacaagggaccacaacaaaaaagaacagaaaaagaggaaaaaaagagccacaacagaacccacgtgaaacaacaaagagggcaagagggagcaaaaagagcaggaacaggaacataaacggaaacagacagaagacacaaagctccccgcacaccccactggccagtgggacagggagagcacaacaacaacaccaccggagcagaaaaacgagtagagagagagaaaaaaaagaacagagcaagagatcaccaacaaggcgaaaacccgacggaacccccgacagaaaacaaacccaccatccacagaaggaccagaagaaaaaaaacaaagaacgggaaaacaagggcacaagagaataaacgaataaaaacacccacgcacaaaaagaaaacaaaagacaaaaagaaccacaacaccacgaacaaacaaaaatgagcaaagaccacacgaacaaaagagaaccaagagcagacaaggacagaaaacaaccaaagaacacagagatc

SEQ ID NO: 577140 - DNA, 774 bp, Homo sapiens
attgctggagctgctgccgtgaggggctctgctggaagagtgcctgagcctgcagggcgccgcctggagctggggacagtggcactgtttcccagagccacaggcagctgcctcgtgtggccgtgggaggacgaggtgcgctggagtgactggctgctgcctgtgtgcctgctgaccttgcctgcttgcttctgcctgctgcctgctgcgtggctactgcctgccttgcctgcttgccctgtgtggcctggggctgcgtgccctgagtgtctgatgtgccctgtggacgctgagccttagaggaccttgcttaccagatgtggactgatgttctgttgggcattgcttggacattgcttcgctggctgactcgtcccactgtcgtcagcgagggctgtgccgccgcatccacggcgaagtgcctgccgatgatgccggctgcatctacagcatggatcgacctgtgcttggatggccttcgtgaggattggtggcgtggtgcctgtgtggcccaggatggatggaggcaggtcacccaaatggtcgagggcctgagttggggacttccccaggggactgttcaaggacgctccctgcacacgatgaactgtgcctcgcctcttttagacaagtctgctcccctcgagggccagaaggcaaggcctggcctaccgaaagcgccccggttctgttatcggaccggaagactacattcccttgttgcggtgaagggctcagctctgagggctgaccattgcgggccagagggaccca

SEQ ID NO: 577141 - DNA, 330 bp, Homo sapiens
tgggggacggagttaagctctggttcgctcaggctaaagtgcaagggcgcaatctcgctcatggcaacctcggcctccgggattcaagtgattctccggtctcagcctcccaaagggctgcgcccagccaggtgataattttggaggggagaaataactcaggggatagatctggaacattggtatggaggaatggggatttaaaatagtaagcagtagcaaataaccatagggtcttatacagtaagatcttggataaagattatgtaaaagcggtgaataggataattgggaagccaaagaatttagaagcaggagagccagcggggg

SEQ ID NO: 577142 - DNA, 218 bp, Homo sapiens
acgactcttactagtgtggttcaatctgtggcagccgcgtggcggttcatacgtcctacaagtataccctagaatgccacaacagttgaagtcactcactaaaaaatgattcagattgcttgcttcagacactagaatctgatgggttgcctaccccaaagtattgggattgctggcgtgagcaactgcacctggccttcttacacctatcttagtga

SEQ ID NO: 577143 - DNA, 608 bp, Homo sapiens
tcaggattcctgttactgtttgaatcgtcgtagtacaagcctgtcttacagtaggctgtgacactcgatgctctggaaggtttgcagattgagtcctcgaagctagcagaccacgagtcccatggtagggacgagagcaagctccacagcgcgctgccttacagagctgtacaacacgtcagccgcacacagggtcgtgctgtctctcagtcctgaaccccagccgaggccgcccgcacacccgaccagcaaggcaagtaacctctgaactcgctatccgaaccatccagaaggaacaagactccaagactgtgtccacaccatttacagtaagtgtgctcaagcatctcatcactggctattgttgtcccgctgtgcatttcagttcttcttgcaacgatcagttgagtaccaaggaaaccactatcccgaattacgagtgacccacaatacaccacacctccttttcactggccacgcgagaaatgcccttccctctaaacaccactttccgggtagcattacacatgacagctgccactgggctccacaactctcgcatgaacacgttgagtcaacagcgagcccttgtagcacgaaatctcctc

SEQ ID NO: 577144 - DNA, 391 bp, Homo sapiens
  misc_feature (1)..(1): n is a, c, g, or t
  misc_feature (67)..(67): n is a, c, g, or t
  misc_feature (176)..(176): n is a, c, g, or t
  misc_feature (188)..(188): n is a, c, g, or t
  misc_feature (211)..(211): n is a, c, g, or t
  misc_feature (224)..(224): n is a, c, g, or t
  misc_feature (229)..(229): n is a, c, g, or t
  misc_feature (232)..(233): n is a, c, g, or t
  misc_feature (247)..(247): n is a, c, g, or t
  misc_feature (252)..(252): n is a, c, g, or t
  misc_feature (259)..(259): n is a, c, g, or t
  misc_feature (263)..(263): n is a, c, g, or t
  misc_feature (284)..(284): n is a, c, g, or t
  misc_feature (316)..(316): n is a, c, g, or t
  misc_feature (319)..(319): n is a, c, g, or t
  misc_feature (326)..(326): n is a, c, g, or t
  misc_feature (336)..(336): n is a, c, g, or t
  misc_feature (338)..(338): n is a, c, g, or t
  misc_feature (387)..(387): n is a, c, g, or t
nggcaagacaaagtatatggaaaacatttacttctgtctttggtattagaactctacacaaatctgnagcatttaaattttccaaaacaaagtattaaacgtggacaaagatgtaattggtaatgtcacaaaaaggggctccaatatcctctgctaggaaacccccaggcccatgnaatgcaacaggnagactaaacaccatttataaggngagggtctattgngtaanatnnacaatacatgctanaatancatccanaggngtgtttctgcttgtgtgaggntgctccctccataacaaagttggggtgggggnganagacaanacattcccgngncagagtcgcagataagactttacaggaaagaatccattccaagagtacncttt

SEQ ID NO: 577145 - DNA, 1230 bp, Homo sapiens
ggtgcggtgtccaagcgtgaacgcagtgacatgcctcctggccctgcgggggcgtatgggcccactcgactacaacacggaacttgacgccgatggcagtgattgtcgagctacacgcatgttggccattacggattggaatcctgatctacgcggcactgtcacgcataagtgatacgctggaatgcgtgttagccgcagggctgccctacaaagtcgattgacttcatacgtgctcggcattcgtcgcgtgtcgcgctagatgttacagggcttggtaaacccgatgctggacggaccgttgcaggcatgctctcggggacgaatgcctggtacgcgatgggaggggccaatccactggatggaagggaaccgatgcccgcgaacgtgcgcataccgttgcgtgagcgaagcttcctagtggcttaccaacgaactagagcacctgtcatgcgaggttggcccccgcaccttggaattcggagagcgcaagcgtaggtaacgcgtggcttgcagcgacgccaacaagaaagggaggacattgcggttcggaatggctcgaagacgccgaaacgcgtctatactggtagatcgggttatcaaccgctaagcggtcacccattgctggacgcaccatcgctgggcgccatttcttgtggaatacgcccatggcaccaccatacccacgcgaagcttcgtgcggaaccgggcacattaacaattggacatccctgggccatgcaaaaagggaaaccagacagaaaggacccagacacagacagaaagattgggagcaccagaaggcgcttcaataaacggaaaggagaaagagaaagacaattgaacagagagaacgcataggccagggacgggacacgacgcgaatggggaaagaggatagacgactaccagcagttaaaacaccaaaaagaacggaccgaccaggacgagcaggattacgagaacacggttacgcgaaagtcaggacaggaaatgtaagagcagcattaggcgtcatcaggaacagagaaaaccgttatggtataatgtcaacggcgagacatacaagacggggagcaccaagaaggcacatagggcagcacggggaaggacggaacggaacatttcacagggtataggcaaaacagcggacaccgaaaaagccaacgaaagaaaaccaaaacatttacaggggacatagccacaatttccacgaaggcagggcacaga

SEQ ID NO: 577146 - DNA, 454 bp, Homo sapiens
cagtaaatcatagcagctgggagaaagtagtgtggtatcctgcagtggttctgttcaccaccacatgggcagagcatgagcaactttcctttcctgggccctcgttctgctcagatacaaagtgaaggcttacttgggctcctgtgcaactttaaaagtgaaacttaactgaaattgggcaggtgggctgcacttcttctaaaaagtaagaggcccactttttagaaaatattaaaccttggattacacctcagtttggcagttacatgacacattatttctaaagagccatctaattttatgccatctaatgtttatattgataactgatgaaaatacaggagcttattatgccactgaaactacgatgaagtggctcaaatttattctctcactgtaggttggatttgaggggataaggataagagagaaaatactattggtgctcaggtta

SEQ ID NO: 577147 - DNA, 253 bp, Homo sapiens
  misc_feature (233)..(234): n is a, c, g, or t
aacggaatgtgttacccatatacagcctggccctgttccagtcgttccttccgttctgccgaggatatccaacggctgtgtcatagctgtgacctgctgtaaagagaacagatgtgatataggctcctagagacatcttccacagtttacagtatgagcacggtgtctcttgacacaggccaaacttgttgacagcagacggtaaacacgcttggtcggtaaacggtgttccnnaccacaggatgagcaaact

SEQ ID NO: 577148 - DNA, 1041 bp, Homo sapiens
acaaggtctccttataacctaaattgtgattaatgttgctatgatatatttgactgtaagatagctgtcgagatatttggggtggggacagtgagttggatggggaaatgggtgggagggtggtgttgggaagaaaaatggtcagtttggctcggggagaaatcgtggtaacataaaagcagttcagtgggccagaggttatatttcctattgcgtctgaagactgcactggtttgctgcgaaaggcgtcattggcctgaatgagcatggaagatcaagacaaggccttgtcgatgccagctgccagtaaccaccttagaactaccagtacgagcgaccatcgagaaccctttgacgagccatcccaggtctaaatgccacgaagtttcttttctatacagtcacaactgcagtaggcagtgaggaagccagagaaatgcgatagcggcatttctctaaagcgggttattaaggatatatacacgttacactttttgctgctcttcattcctcttccaagccaagtcaatcacgccaggttcctagcagagtcagccacatgaacaagatctacagtcgattttcttgattgtgagcacgtggagctttttgttccttccgacgttgaccggcaatgcggcgggacagggtgactgaaacaccagggatttccggggggctaaaattgcctgtctggggtgctttgatcctggtcacgctgggggaggtcccagcctgtggtgaaggtcaagcttagaaaaactcttttcacacgaccgttggggaacctgtaccctatatattctggtctaccacagaactccttccttaactggttattttcacgcgcttgttaggtcaaaaatgatgcgcttaacttagacattggggtacgtgtatcttatgcccaacacacttcgggctttttcaccacacacccttttcccactgtgcctgactattacaccacacagagctgcatcgagtgcatcatgacacaatctccagtagtctactgtgacacgcagcatatcataggaa

SEQ ID NO: 577149 - DNA, 362 bp, Homo sapiens
  misc_feature (25)..(25): n is a, c, g, or t
tagtagagatggggtttcaccgtgntagccaggatggtctcgatctcctgacctcattgatccgcctggcttatcctcccaaagtgctgggattacaggcgtgagccaccacgccgggcctgtcatatatttctaagttctgaaagaaaatttattccaagtgtaattcacttataaatctacaattccatgaattctcagtgtgattcactgaagtatgtcttaatgtttgtaaatgattgcaaacttggaaggaagcatttcttggaagtaattagaatattatagtgtgtataatgtgggtggactttcttaaagcagaagcttccatttaaaacatatttgaatattactaaggattt

SEQ ID NO: 577150 - DNA, 82 bp, Homo sapiens
gccgaggacacggccgtatattcctgtgcgagagatactctggaccggggaggccagggcttttgactactggggccaggga

SEQ ID NO: 577151 - DNA, 186 bp, Homo sapiens
gatgcccctcccggttatttggatgagagaaccaaggtgctgcaagaggacaagcagacccgggagcagctgcatagcatcagcgactctgtgtagtttcttgcaggaatataggtgcatatgatgagcaattactctactccccccacccctgtcccacctaatcatgtccttgctggacggggg

SEQ ID NO: 577152 - DNA, 157 bp, Homo sapiens
ctacctccacaaacagatgctactccataaacagtgtatagccagtggaatgtgtggtatgtgctgtgtgctgtgtgatgtttgtggtatgtatgatgtatggaagaagtgtggcatgtagtgtgttatgtggtgtatgtggtactgtttgtggagg

SEQ ID NO: 577153 - DNA, 459 bp, Homo sapiens
aggtattggtaactggactctcacacgctatggctatgcgctcgtatgcacagccttcaccaggcagtctttctcagactcagtcccatcacagggaatgaattgtacaaatatccttttgctccgtcaagcggtcagctccagtgtctcaagcacaaattctagttcttcctgcccggtgaactctcctataatgcctccagggtctcaggagagccacattcactgtccccagcttcctcaaccagctcttcatcagaattcaccctcgcctgtacctagtcgtacccccacccctcaccatactcccccaagcataggggctcagcagccaccagcaacaacaattccagcccctgttcctacacctcctgccatgccacctgggccacagtcccaggctctacatccccctccaaggcagacacctacaccaccaacaacacaacatgtaaaaat

SEQ ID NO: 577154 - DNA, 1551 bp, Homo sapiens
  misc_feature (212)..(212): n is a, c, g, or t
  misc_feature (628)..(628): n is a, c, g, or t
  misc_feature (666)..(666): n is a, c, g, or t
tggactttttaatttattgtttaatgtgttttccaggtctcctcactttaggaggcacattttacattcaagtgctttggtctccctcctcacatgtgcgtgaaagcaagagtgtgttccctttattgtggtgaaaagcgacacaacgtgccgtgcgtgccttatctccacagcttatataatgtggacatctcaggttgtgactctcttanaatctcagaggactcatgtgtgtgtgtgcaccaatatacttgtgtgtggccccaaccaaaatttctcaacaagtgaccgtgcgtgagagaactcatctcttttgtgtgcctgtggccccatatgaggtgaggtctcacgtgaaagtgaacacgtctctatcacgtgagaactctgtggttctctctttctgtgggcacactctcaaacctctcagaggtctcagggagagagaaaaagtgcgctgtgagagagaaagtgggctgtgagcgccgagggggggacaccagatgtctcgctgcctctccttgtgggtgatatatattctcccctctgcgcgccgagggggccccgcggaagatctcctctcccgctcgggggtaaagatgtgagagtctccccaactctgcgggtctcnccccaagtggggggggcgagagtgggggggtatagccncttttataaaccaagagccccgaaggtgtgtagaaccccccccgggggtgtctccaccaccccgaggaaactctctctctctcatctaaccgacgtggtggtggccgcccccaccaacactgctggtggggggcaatctccccgggatccaacgggcctctcctactcgaggggaggctgttggggggggggcccccacgtgttttataccccgaggaggagaaaactgtggccctgttgtggcagacacgcccctatttgtatgttggcccgccttttgtttttaggcccccaaagaggcctcattgagggacagccagcggggaggcactttcattaaattcgctacggagggagtgggccgggggacgacacaacaaggcagggggttcataatgcggaaaacatctggggcgccaccagatgtgggcgtgcccaattaatggcttttggtttctcccctttgtggaaccccccaaagtgtttttcttctttgtgcttgcacccacaaaggtggtgtgtgggtacaacgatcttcattgagcggcgggggtgtcctcccccccatataagtaatggggagacaggcatccgaggcacaaaataaaataatcttgtcgccgtacaaataaaaggcacccagcgcgttgaaaccacgcggtcagtaaagtaagaaatgactgtcggacagacagaacaacacccgactgggtgaagagtcgatcgtgcgacagagaagagccagcgagagtacgagcagcagacacacgcacagacagcagcagacagagggagagcagacacaacacacacaatgttgtgatcgacaccaaacaaagcagaagcagcgacgcacagcacaacaccatgttccacagacgagag

SEQ ID NO: 577155 - DNA, 251 bp, Homo sapiens
  misc_feature (95)..(95): n is a, c, g, or t
  misc_feature (212)..(212): n is a, c, g, or t
gggcaagagtgatgcatattttatgggtggttttggaaacaaggaagaatgaaaagtccttaaccgtgaactcttcctttattccatcttttacnccacatatgcaatgacttttaattttaacttttgtagttaaatcctttgccccccaacatgaaatatagttgcaaatatggaaaccgacttggaaggacaggtcctgaatgcctttntccagtgaacatgttaactacaaaaaattctcagcaaaa

SEQ ID NO: 577156 - DNA, 278 bp, Homo sapiens
  misc_feature (54)..(54): n is a, c, g, or t
gtcccaagtttccttctcatcaaatccgacaagagagaagaaacatgggtgtgncttgccacagcggcctggtctccatggacctccccgctccctccaagcccgcgatggctgcagtcttgtactagactccgtccaggctgttctcatctcagctattgccccttcctttcactttcacacctcatctcactcctgttgtcactttccccgaaacgcataagctctccccagctcctgctgtgtaggctgcgccgaaaccccacacaaaaaaaaaa

SEQ ID NO: 577157 - DNA, 545 bp, Homo sapiens
tatgtcgatggtctatttctgggacttctaattctgtttctttggtctatgtgccctgtcctttcaccaataccacattatctggaagctggagctttctattacatcttgaaatcaggtggaatgaatgctccaattttgttccttttcaaaattgttttggctattctagttccttggcctttccaattaaatttcagacatagaatgtcaatgtaaacaaaaaatcctgttagaatttggattgtgacatatgggaagagagaaagaattaacatctgtactgtgttaagtcttcccatacaacagcacagtgtatctccccattcattcgggtcttctttggtttctttagtcatcgcatcctagttttcagcatacagatcctgactgtattttgtaagatttatacctaagtatggccaggcgcggtggctcatgcctgtaatcccagcactttgggaggccaaggcgggtggatcacgaggtcaggagatcgagaccatcctggctaaaatggtgaacctcgtctctactaaaaatac

SEQ ID NO: 577158 - DNA, 208 bp, Homo sapiens
  misc_feature (17)..(17): n is a, c, g, or t
  misc_feature (119)..(119): n is a, c, g, or t
  misc_feature (200)..(200): n is a, c, g, or t
ccaggctggtctcaaantcctggcctcaaggagtcctcccacctcaacatccctaggtgttgggattataggcatgaaccactgcacctggccagaaacccttatttaaactctatacnaatagaagcattcttcagaacccacctagtgaatctgctttgcttttactatatgcttagtccttcactgtacttatgttngctgtggg

SEQ ID NO: 577159 - DNA, 462 bp, Homo sapiens
atggactctcatcgcaaatggaatgaatactccagagatccttgcaaaagctagttgctacaattaaaagcagaatttgcatccagctttgggaacaactaaagaggaaagaagcaacccaaattctccctaaatttcatttaagttgcattaacccttctctagccattctggatgggacacatcatacagctacacactccccaacattagggagggtttattcaagggcagaccaactagtgcaaattaccatgcaaaggtacaccctgaggacccaggtgcccaacagcccctgcgcaggcagacaaggctaataaagtcttagttcctgcagaccactgcagctgctttggcagaagatgaaggtcaaggttagttgtggagcgagacggcattccggcagagacagtggcatgttccaagcctgggggcaggaatgagcagaccctaactcaggga

SEQ ID NO: 577160 - DNA, 103 bp, Homo sapiens
caataaacaagtccccctttctcaaggaaatacccttttcttgctccactaaccgtggcatgagggtggctctgggtctcaattggctttagggttgatcgag

SEQ ID NO: 577161 - DNA, 145 bp, Homo sapiens
atgatctagccgatcttagctctggaaaaggggaactatactgaggtatgcacggagttggggagttaagagggcagacagagagaaggggtgacaggccaatttgcggctcaggaagaggcccagtaaagagggcctgggatgc

SEQ ID NO: 577162 - DNA, 188 bp, Homo sapiens
tatgtgccccctcgactccttcacataatcctgccacaccacggaaattctggggatactccccagatggtcccatcctggccacgctccatccccccattcaccgatccccgaaccaaaccactgttaccactcccccaacctccatccctcctggccgatacacacctcagtctatactcgcacgc

SEQ ID NO: 577163 - DNA, 127 bp, Homo sapiens
tactagctctacaagtggaacccctgtcaagtgaaagcctggagtaagtgactatgcctgcattctaggcatagattccgccatagaattaagcataacctccctgagctctcaggtgtcttcatcc

SEQ ID NO: 577164 - DNA, 120 bp, Homo sapiens
caatcaccaccaccaccatcactaccaccagcaccactacaactacaatcaccaccaccaccaccaccaccacaactacaatcaacacacacaccatcactaccaccagcaccactacaa

SEQ ID NO: 577165 - DNA, 1400 bp, Homo sapiens
  misc_feature (204)..(204): n is a, c, g, or t
  misc_feature (444)..(444): n is a, c, g, or t
  misc_feature (626)..(626): n is a, c, g, or t
ttcccttattaccttcatttgtgttttttttaaaattgcgttgatgttttattgaaatttgtgctccatttttttaggtatttaaattattggcaaaaaaaccatttctccacttattgccaaagttctcttttatagaacgttcagtgaaaattcaacttcttcattacctctcatgtggttctcttcttttaatttgaccanaaaccttctccattttttcttcttaaattacaagagccgaatcttgttgtttcttgaagccaaaccttttctcccccgggagaacacacacacaagagcccttctcagagttgtgacaagcacacggctgtgacacctgtgagaagttattcccaaccagagtgtttgtcccagagaggcacacagagtgtgtctgttggccacacacacgagagagcacaccagagagtgtctcccggngagcccacacctgtgtcccccgccaagacaagaggcccccaacagctgtgacaggtgtgtgtgtggagagaggagagccccctgtgagaggtctcagagggggcccccgttgtctcgggttctcaaggggggtgtggccaggcgtgtgtctcccacgccaccctgtgggggtatatgtgagncggtctcagaggaggcctatctccaatgtgggagcgtgttggggagagagcgagcccaccagcttctcaccttctctgtgacccagagagagtggggcagacctcattcacagagtgtcgccctgtgagtggtgtcgtgacactctgtgggtgcacacaaacacgccccgggtgtggttatctcccgaagtggtgttggcccacatatttctctctccccccagaagaggggcgagaaacacacccccaaagagaaccgctttttcccaaagcacaccgtggcgcgcgcggccccaaacgttttgtgtccgtcgccgagcccgaggacaagcgtcccagccctttttcccaggcgtgtttgccgaggcgacacgaggcgtttcctctggtgggccacttcccatcgggttgtgtctctatcatccgtggtttacacacaccgtgtggcgtgtgctttcttttaacgtttttccttttaaacccctctcatttattggggctcacagtgaaatttggaattcaaacacaaattctgtggggtatgcgggtggtttctccacagtgcagacccatcttgtgttgggacctcttctctttttgtggacgaacacttatagccacatgttccaacactgtgtgcttcagtacaccccaccattttggtgcgcgatatacaccattttctcgtgtcacacattctcgcgcaacatcgtctttccacagattcccactctctataaaagatcatgatgagtcttaattcacaattgtgtc

SEQ ID NO: 577166 - DNA, 922 bp, Homo sapiens
agggtctcactctcacccaggctggaatgcagtggtgtgattgtagcacactttggccaccaactcctgggctcaagtgatcctcctgctttggcctcctctgagaagctgggattactggtgcacaccaccacacctggctaattttttatttttttttatttttggaaatagggtatggctatgttgccttgggcccgtcatgaactcctagcctcaggtgaccctcccacctcaggcctcccaaagggttgggattacaggagtgagctactgcactgggccaacatgttaatttttttttttttttttggaaatggagtctcccagggcgggaatgcaagggtgcgatctcgacttcactgcaatcttcacctcccgggttcgagcgattctcccacctcagctccgtgagtagcggggattacgggcaccggcatcacgctcggtaattttgggatttggagcagagagggacgtttcaccaggtgggccaggtgatctggactcccattccccccaaatttcccaaagtggcggggattacgggcataagccaaagccacctcacccagcaacatggttacatcttaatctgggatggctcatggagggcctcggtgggagaaataacactcttcaagtgctaaatctgggagatccgtgtgaatcacataattctttagaccaactggggtcaaaatcctcctttccctttcggggttattccatccatcttattagaagggaggcgctacgtggtggtggctgtaccctggccatttttatcacgggaggggggagcgcgggattacagggggttcacacccggactggacacggcaaacaggggggcgcggacatgtgcctcgcgaccaatcttgcgtgtcgcgctaaacagggggccctcacaaaagcgggc

SEQ ID NO: 577167 - DNA, 150 bp, Homo sapiens
aaaagaagaatacagacaaaagaatacaataatcttttatccacagagcatatgtggcacctctgatggatgcctgaaactgcgataggactgagcctctggagtgtaccatgtatttttcctatacaccaatgggcacacattatggag

SEQ ID NO: 577168 - DNA, 338 bp, Homo sapiens
  misc_feature (3)..(3): n is a, c, g, or t
  misc_feature (26)..(26): n is a, c, g, or t
  misc_feature (274)..(275): n is a, c, g, or t
gtnttcttatgcggataaaatttctnaggtaagaaaagttagctctgagcagccctccgcctgatactaatactttaccaatggagattttccttttcttttctgtttttgagacagggtctcactttgtttcccaggctggagtgcagtggtgccatcatggatcactgcagcctccatttccctggctcaagccatcctcccacctcagcctcccgagtagctgggactacaaggtgtgcaccaccacgactggctaatttttaattttttnntagagacgggggtttccctatgttgcccaggctggcttgaattcctgggcttcaagtgatcct

SEQ ID NO: 577169 - DNA, 414 bp, Homo sapiens
ggacgagggggaaaacccttggggctgtgtgagcggatcaaccgagacaatcagtacatcttcgaatccatatttcaagccgtggtagaagtgagacttatctagcagaacctttccaaaagtattatattgagattcataacaacaccaagaattgattttgtagccaacattcattcaatactgttatatcagaggagtaggagagaggaaacatttgacttatctggaaaagcaaaatgtacttaagaataagaataacatggtccattcacctttatgttatagatatgtctttgtgtaaatcatttgttttgagttttcaaagaatagcccattgttcattcttgtgctgtacaatgaccactgttattgttactttgacttttcagagcacacccttcctctggtttt

SEQ ID NO: 577170 - DNA, 300 bp, Homo sapiens
  misc_feature (42)..(42): n is a, c, g, or t
  misc_feature (77)..(77): n is a, c, g, or t
  misc_feature (88)..(88): n is a, c, g, or t
  misc_feature (109)..(109): n is a, c, g, or t
  misc_feature (138)..(138): n is a, c, g, or t
  misc_feature (284)..(284): n is a, c, g, or t
catcacactgaaggaggcaaatgaattctgcagcgcacaagnaagggaaagttgcccttgtaaatgaagatgatgancttgtggccancatgcccggacagacctgaanagaatcgggatacccactagctccaaagntgccagaaacactgctgtgtggggcgccattggcactcatgaggatgacaatataggctggattgctcgcccagctgtgtggatgtagtggttttggactcttcccaggaaatccatcttccagatcaatatgatcagtacatcgncaatacccttctccgt

SEQ ID NO: 577171 - DNA, 313 bp, Homo sapiens
  misc_feature (87)..(87): n is a, c, g, or t
  misc_feature (268)..(268): n is a, c, g, or t
  misc_feature (289)..(289): n is a, c, g, or t
  misc_feature (300)..(300): n is a, c, g, or t
tggtcagatccagatgaacaaccagacaaaaataggagtagagccgggtgcagtgcttcatgcctgtgatcccagcactttgggaancggaggcgggaggatggcttgagcccaggggttcaagaccagccttggtaatttagggggaccctttctctacaaaaatatgaaatcactacctgggcatggtggtgcatgcctgtggtcccagctgcttgggagactgaggtaggaggattacttgagcccaggaggtcgaggctgtganccgtggtggtgctactgtganccagcctgggnaaaaccctgtatc

SEQ ID NO: 577172 - DNA, 163 bp, Homo sapiens
tatcttgcccttgatatcagtgagccatcagaaggccaggaagcagccaggcatggtggcttatacctgtaatcccagctactcaggaggctgaagctggaggatcatttgtagtcaggagtttgagaccagcctgggcaacatagcaagatctcatccctac

SEQ ID NO: 577173 - DNA, 236 bp, Homo sapiens
acctgaaatgataaaatatgaattataagtgcaccatgaaatgttaagcttgcacattgtaaaccacagaaaaatcactttaaaagtatacaaatagatataataaagacatagatacatcaaaatggagtataaaaaaggccaaataacctgaaataggtaggaaagagaaaatgggaataaaaaatggaggacaaacagaaaactaatcataaaatgtacctaaatccaaatac

SEQ ID NO: 577174 - DNA, 190 bp, Homo sapiens
ataatcccagaggaggattcgttaacagaatatcaggatcgtgggagctgtagtatgatatgaaccattaccttagactacatttttcttctcacccaaaaaacactctacaagacatcctatttgcatttaggagatccccctgcttgatgtccacaatttaagaggggatccatctagcatgtcgacc

SEQ ID NO: 577175 - DNA, 203 bp, Homo sapiens
atctagacatcccgttattgagtggcatgtgaaaggacatttaaaatatcctatttaggctgggtgcagtggctcatgcttgtaatcccagcactttgggaggccaaggcccctttttttttttaaaaaaacagagtttcgctctgtgttgcccagtgcaggatgggcaagggtagagatctctggctcacgtgcaatttccc

SEQ ID NO: 577176 - DNA, 986 bp, Homo sapiens
gccagagctggaggtgggtgcccggcactgagggtcctgcggaccaatggctctgccctgcaccttagggactcgcggatgctgctgagccctgccaggggccttgtggctcgggtggcagcgcggatgacagcgtgggctccagctctgtcaccgcttgtcctgctgctgctgctgctcctactgtctggccactggcctagcatctggtcctgtgcgccgcctcagtccgtgactcagggggtctactaccacccggcccgcctaggtgccgctgctgtggggccgcacgcggtcgacctgctctgttggccagaccccaccaggtcgctggctgctagtgcccgagctgatgctggggtccacagacaatgaccttgatgcgacaggaggatgagcatggacacatgactatgaccatcgtcgctggatgtgtggcctgcaggcgtgaccctggggaaggcgagcagcacatgtggagaggcgtccagcccagagcaggtccccgtgcgggctgaggaagccagagacacgtgacacggaggtcgatctggtcctcggctccccaggaccagcgagcgcaaggggcagtgctgaggcccctgctgagtgacctgcacgtcctttgctggcagcggcatcctggggatgacagcgccagggcagctggggggccagggcctccatgtcaccgcactgtagaggccggtcttggtgtccccatcccttgtcacaggccgggtcactccccggtgctctgcttcccaagaatgccatgggttggaacttggacccccagcccagatgacatgctcagactgtcagccgctaccagttcccaatgttcccgggttgttcccccggcttagccagcgggaaagggcccccccaaaacacagggatcaggcaaccatttgaaataagacttccttcaggcgtgtacacaaagagcacaagacatgaaatacaggaaaagacaacaaaac

SEQ ID NO: 577177 - DNA, 283 bp, Homo sapiens
ttgatcgacaagctcaggatagatgtgaacacctatcaccaaaaagacatacaaatatagcttgactggatagtctagaaaagatagaaacacagcataaaataaaacatagtaatcaaaacggtaaccatggactcacaaaattacaagtatccttatctgtgtgacaaccctacccaaaatgagggcacatgcagaaaagaagctccaaccacaacaaacacagtcacttactgaatgttgacatagtataccagacacgggatatttatcgtgtgttata

SEQ ID NO: 577178 - DNA, 479 bp, Homo sapiens
taaagatgggtcagatggacacgaagaggcgaggcagtatgctattcctagcatggaatctaccctcaatcagtcggcaatagataggagacacttaatatcagatcctcaccaccgagtccgctataccacaacccaagaaccagcacaagtcaggagttgtacagcgtgtagcctgaggccaagaaggcaccgggcagcgggccagtgtctgagcggaatggaccacattctaaataagcagtggggtcctaccctattggaactccagtcagttcccgggctctccaagcctactgccctctacaggtgtggcagccgagtcctagacacttggaatccccaaagagcaaactagtgaacacagcacttgtaggccagcagctaggacatagatatcgtaaacagattgagcaaatagcagcttcagaatggagccatactgccaccaacctagtgcttaaaggaccatctagacc

SEQ ID NO: 577179 - DNA, 156 bp, Homo sapiens
  misc_feature (41)..(41): n is a, c, g, or t
  misc_feature (54)..(54): n is a, c, g, or t
  misc_feature (93)..(94): n is a, c, g, or t
  misc_feature (114)..(114): n is a, c, g, or t
  misc_feature (117)..(117): n is a, c, g, or t
  misc_feature (132)..(132): n is a, c, g, or t
  misc_feature (140)..(140): n is a, c, g, or t
acgggggtgggccgcccggggccggcgtggaaggagggaanaatgcccaagaangggcccagggtggggctggggctggagacgacgaggagnnggattaagtccacctgtccntcntgggctgctggattntctcgttntcctgccaaataaaca

SEQ ID NO: 577180 - DNA, 359 bp, Homo sapiens
ttatatatttaataacaccagctcaaagtttagccatgttatgtgcggcatcttatttcttcaataacagtttatttaggtcatagaatcatcctagagtatcacatagttcaatttttcagtcagtgaagaccgggagggaatgtctgttgctttggctagcctgtcctgtggcgatccacaggtctagccaactattgaaataggagtggagggtataatttgcctcgtgatgtttgcgcagtcactgtttatactttacaggttatattctaagctatgtgagattgcttttgggaagatcactagatttatggaggaattagtcactaattactcgtagaagatactgtcatata

SEQ ID NO: 577181 - DNA, 171 bp, Homo sapiens
ccctcgccgcgcgaagaggcgggagagacatgtgagtggctctgagctcagcgcgccagttttttgagagcagatgctgatctaacgtggaaaagccagtctcctctctgtagagacatgtgtgatataagttgtgatcgttggcggaaatttggatttagataatggcct

SEQ ID NO: 577182 - DNA, 153 bp, Homo sapiens
  misc_feature (142)..(142): n is a, c, g, or t
catccagtagcattttgttactctgaaggtctgagacttttgagcccttaactccaagttggtagtatcttcagtttttgctttctctaaagtccttcagtgagtccctctttagaaaagagaaaactctgccctgactcantaaggatcata

SEQ ID NO: 577183 - DNA, 184 bp, Homo sapiens
ggggggaaagggggggggaaaaaaagaaaaaaaaaaaggaaaaacctttacccccggtgggggggggggggttttccccccccccaaaaaaaaaggggccctttattttaaggggaaggggggttccccccccctttccccctttaccaaaaaaaaaaaaaaaaaatttggttttttttttcca

SEQ ID NO: 577184 - DNA, 768 bp, Homo sapiens
  misc_feature (389)..(389): n is a, c, g, or t
gctggggagtggagaggcaggaacgcagcgatctatgaagactggcccattagcagaggcagtccaaccagcatgatggaagcatcagcgccgtcccttcctggtccaaagtgaaccaggttctcatccgcatgtataaggccgagtgccgggagaagttgcgctgtgatccagcacattcaagttacgggagccatgcgtgccacatcgcatcgctgtaccacgtcgggctgaggaggggccaagccagaagagccgacccgaggccacagttgcctgtgcctgccttcgcccgaccggagcgatggggtactaccgtgagcgccgcccgcggcacgtccaggatcggcatgagcagagcggccacaaggggtaggcgtgctaggtcnacggacgtggcatcgcaggggcgcagcgagacgagactagggcgataggagcaggtaccaagaccgagaggaatacaggtgagcagaagcgatatggcagcccttgcaggcagggctccgcagatgctgtcataacacgagagccgcaggagaggaagcaggcgtagcaggggaaactttcgcgtgcggacgtcacgacttccacaaccctgcctccctggtggacacttgggggatcgtacatacccctcgcctggttagcgagcccccagaatgggggcctcggcgagggactcatggacgcccgttcaccttggcgaggaaaccctgagggggaaacagggagagaggacgaacaatatgggggaggggaatgggg

SEQ ID NO: 577185 - DNA, 139 bp, Homo sapiens
atgaagaattgagtacacacttggtccatggtgacctccaaaagaaaaatacataataccgtaatagatggaggcattgacattcatatgaaatgagttccgtgaaacaatctttgacctatgagaaataaaaaaaaaa

SEQ ID NO: 577186 - DNA, 808 bp, Homo sapiens
tgaggagattcctagtgaagatgatgagctggtataagagaacaagcagtaaccatgaaggggccctgctgagaggaagctggagatggatgactatcccaccttcatggcaaatcgctatgcctactttacagtctacaggaaccgctcacttcacaaatggcacgattacgaccaatgctgtcttctaggaaaactggcgaagggttttggcgcctttgaacgctcaatcttgactcacatcgaccatattctgatggacaaagagagattacttcgaacgacacagaccaagctcttcgactatcgagttcttggcaaacctgagccagcatctaagactcgtcccagacagtttgcaggggaaccgaacatccttactgatgcccctgctaatgctcatctgaaggacttgaatgaggaactctttgatgattatgacttttaccaccagctccttccagaactcatataacggaagaccaactccttggatcccaacgatcacgtggtcatgggaaggccgtgccttgctatccagaagttacgaagcacagtccacactaaagtgcataggaaagccagcaaaagcgggacacttcggttacatgtgcttaacaggctactgactttcatggcacctatagaccatactacaatgaatgacgatgccaggacagaactgttccgctctctttttggtcagctgcacactcccgacgaaggccacggtgattgacaatccccacctcctacacccactgggcgcctaggctggtgtggccgatgctccagatggacgaaaccc

SEQ ID NO: 577187 - DNA, 330 bp, Homo sapiens
  misc_feature (171)..(171): n is a, c, g, or t
tttttagcaggcgagggacagtgggcaggtgacatggctcaggcaggtaggcagagagtaagcaggaagatgtagttgggggctgcctgtgaggttgtggcatcctccagcgctgctgctggggctcggtctgtggcttagaactcggtgtccaccacgcggaaagctggnctggctgagtcaggcatcgacgaagaacgaagggtgggctccttttgtagctgaatctcctttagtgcaaatatggaagtagtgtcaggaagtttgtggatccgctcccccagactgaggaagaatggatgtctgcgtaaaagtgggctgcgtaaaagt

SEQ ID NO: 577188 - DNA, 113 bp, Homo sapiens
acaaacaccacccaacacccaccacccccccccgacccgaagcaaagttcacctatatggccctcgggttttagcgaacgaacgagcgccgcgagtattgagcggggaagcgg

SEQ ID NO: 577189 - DNA, 534 bp, Homo sapiens
gcttgtctttgcggaatcaccaatggcggctgggaccctggtacacgtagtcctgaaaactggagggtccttcgaaggcgtctcatcgcgtgcttgcagtagcagcggggctcaggtccgcgtgctctccgaacgcaccccacgttccagtttaggccaagaccaaccgcacccctgaatttctccgtgaatttcctgccggcgaaggtcccaggcgatttgagggtgatgatggattctgtgtgtttgagagcaacgccaattgccgtactatgtgagcaatgaggagctgcaggggaagtactcgcagaggcagaagcccgaggtggtgcagtgggtgagctagttgattccgatatagtgcccccagccagtacctgggtgtgccccaacttgggcagtcatgcagccgacaaggaaacaggccacgtgagaatgcaacaggacggaagtgaggcgaagttctggggctgcgtggatgcttacttgacagacgaggacttatctggatgggcgaacgagtgacattggctg

SEQ ID NO: 577190 - DNA, 673 bp, Homo sapiens
  misc_feature (46)..(46): n is a, c, g, or t
  misc_feature (61)..(61): n is a, c, g, or t
  misc_feature (64)..(64): n is a, c, g, or t
  misc_feature (69)..(69): n is a, c, g, or t
  misc_feature (77)..(78): n is a, c, g, or t
  misc_feature (115)..(115): n is a, c, g, or t
  misc_feature (130)..(130): n is a, c, g, or t
  misc_feature (132)..(132): n is a, c, g, or t
  misc_feature (134)..(134): n is a, c, g, or t
  misc_feature (150)..(150): n is a, c, g, or t
  misc_feature (152)..(152): n is a, c, g, or t
  misc_feature (166)..(167): n is a, c, g, or t
  misc_feature (169)..(169): n is a, c, g, or t
  misc_feature (176)..(176): n is a, c, g, or t
  misc_feature (181)..(181): n is a, c, g, or t
  misc_feature (184)..(184): n is a, c, g, or t
  misc_feature (189)..(189): n is a, c, g, or t
  misc_feature (192)..(192): n is a, c, g, or t
  misc_feature (195)..(195): n is a, c, g, or t
  misc_feature (198)..(202): n is a, c, g, or t
  misc_feature (211)..(211): n is a, c, g, or t
  misc_feature (229)..(229): n is a, c, g, or t
  misc_feature (241)..(241): n is a, c, g, or t
  misc_feature (269)..(269): n is a, c, g, or t
  misc_feature (283)..(283): n is a, c, g, or t
  misc_feature (300)..(301): n is a, c, g, or t
  misc_feature (311)..(311): n is a, c, g, or t
  misc_feature (315)..(315): n is a, c, g, or t
  misc_feature (322)..(322): n is a, c, g, or t
  misc_feature (324)..(324): n is a, c, g, or t
  misc_feature (327)..(327): n is a, c, g, or t
  misc_feature (352)..(352): n is a, c, g, or t
  misc_feature (354)..(354): n is a, c, g, or t
  misc_feature (379)..(379): n is a, c, g, or t
  misc_feature (415)..(415): n is a, c, g, or t
  misc_feature (467)..(467): n is a, c, g, or t
  misc_feature (469)..(471): n is a, c, g, or t
  misc_feature (474)..(474): n is a, c, g, or t
  misc_feature (485)..(485): n is a, c, g, or t
  misc_feature (487)..(487): n is a, c, g, or t
  misc_feature (489)..(489): n is a, c, g, or t
  misc_feature (492)..(492): n is a, c, g, or t
  misc_feature (497)..(497): n is a, c, g, or t
  misc_feature (503)..(504): n is a, c, g, or t
  misc_feature (509)..(510): n is a, c, g, or t
  misc_feature (512)..(513): n is a, c, g, or t
  misc_feature (519)..(519): n is a, c, g, or t
  misc_feature (543)..(543): n is a, c, g, or t
  misc_feature (549)..(549): n is a, c, g, or t
  misc_feature (656)..(656): n is a, c, g, or t
tggagtggtgcgacttatcgagtacaaaaatcagccgccgtacgtnaggtaggtgaactanaanatctncaacatcnngaatataatttataacattttacattttcagttaatnataaatagacttttntnantacagattttgttttngnttttgttttcttanntnctggagngccgnagntcagntcngcnctnnnnnttattttgntcccaaagcctcccccanatcatcactccntgcgcctcctcttaaggctagaggctgngtcgtgtgcctcanaattgtcgaccatgtcnngccatcagcnaggngcgattncncanaaggcgaccaatgagcgtgaaattntntaaaccaaaaggacgaagaaaaaanacatttcaaaataaaaaaaaaaaaaagaaaaacccnaccatattttgccacatgtgagagtccggtcaagcagtatttacaaaaaggntnnnggnacaacactctnananatnctctntgtttnntgggnntnntgtttnaaaaaaaaaggttcaaacttattntcacancatcatcacaaaatagaggatcaccattggtttgcttggcttttctttttttttttttcccccaagtgaggacctaactccaaataatacaatagaatatgcaaatnatcttcacatcaagagt

SEQ ID NO: 577191 - DNA, 1062 bp, Homo sapiens
ggagaacttgaagccaagaggatttaaaaccgctgctctaaagaaaagaaaactggaggctgggcgcagtggctcacgcctataatcccagaggctgaggcaggcggatcacctgaggtcgggagttcgggatcagcctgaccaacatggagaaaccctactggaaatacagagttagccaggcatggtggtgcatgcctgtggtcccagctgctcaggagcctggcaacaagagcaaaactccagctcaaaaaaaaaaagaaagaaaagaaagctggagctggtgggcttaggccatcacccttcccttggctggaactactgggacagaccctttggagatgtgcctgtggtgctgtggagatgtgtgtagcggctctcagctcatcggtcgagactcgatgctgtgtgccagcacaacccccacaccccgcctgaccgcaacatcgcaaccctccgcccgcaaccagcccccaccccctcacccggagacacatccgcatacactaatgccgctcccgccctccaacactgaactgacacgacagcgcacacatcacaaacaccaaggccccccgccccaagccctcccacccaccgcccccccacactcaaccacgggcaacaagagacctcccgccacggcagtccccacacccgccctcacccacggcacccacaccacggaccaccagggaccccaaccacacccttgccagccccccacccaacacacgcgccgccccgcctccccccaagacgcccctgcgccccatagcaccccaccccacagggacaccccaccaccccccccgcgccacacccaccccccccccgacaccacaccacagccccaccccgcgctcccccaccacgcccacccaccacgcccggcccacaacgccgcacccccaccaccagactcgcaaccgcaaaaacgaacccacaaacagccacgcaaccaccgacaccgcacaccccccacacccccgcacaccaccactccgcgccgcaccaccacaaaccgacacacaacaccaccccacccccaccgcacaccac

SEQ ID NO: 577192 - DNA, 736 bp, Homo sapiens
agcggaagtggcgtccccaggagctgggagcgggtgaccggcggcggggaagcggcctgggttggccctcagaattgcggggtctgggggcatctcgccgggcaaacccttggcccgcctacaaggacttcctcccggccagagcaatggccgggtgagaacagcaagcagttttggaagaggagcgctaagtctgccggggagcattcagtcctgtagtatggatgcacagcatcctcctcttgaccctagcggcatcacctaaaaatgtcattagacgaacgatcaaagagtcggcacagtgcctctgaagaataggaaggcctccagtttacatgagtttgcacggaataccagtgatgcttgggacattggcgcatgatgaggaagaggactgtttcctcaccttcttgtccgaaagctctgagactcaaaagtggctttggcaactgcgagcccaagttctagaaaagccagcagcaaggctgaggagtaaaaccaggaactggtccctagtcaacggacatcggacgtccctgctcatactatcaatggtcataagagtccagcagtgatgcccagctgtccagaaactctagtgatacatgcctgaggaacccactctcacaagactagcaatcactccgctctccggcccatcatccccctcgttgcccggatctcggatcagaacgcttctggggcccccccaatgactgtccgggagaaaacccgc

SEQ ID NO: 577193 - DNA, 760 bp, Homo sapiens
  misc_feature (651)..(651): n is a, c, g, or t
gaaatcacacgtcgccgaaggccgtgtctagaataggcagcagcggccggcgtcaactgaagtcacggaatcttggcaatcgactcgttcggttcgctcaagggatcgcgagacgtgcagtctcgccagtgatttgaattgacatgctgatagcgtcataacataacagacttcgagcaccacaggccgaacacttccgatcacatagtcttggtcgggaccacagtcggcgtaactctgggaaaacgcacaggcctggatataatagcctgatcagggcgggacgtaaagccatcgttccgcgacattgcgatccacagcgcgagaagcacaccaagcaacgacctactccacgaccttacacacaggacagagggcctcccgtgcaaactacacacaccctagtgcgaagcgccgcaaagagtacaaagcacgggcgcaaacccacaacgtgccgagaccaggaaaaccgcgaacccaacggcgctgcgaccaccggtggggtacccgtggaacgagccaagcaagttctcgacacaaggcgacaccccgagtaaaaaggaaggtacctaatcaacggagcacacggcttcaacgacgcacgtagtcgcaaccacgaagagccgcaaccagctcgaaggagaacgagcntcccgagcacctcggcgagtgcacggacagcgcccacaccgactctggggacacgggaccaaaaggcgggaacaaacccggcgccgggcgcaaaccgaaggaagtacag

SEQ ID NO: 577194 - DNA, 352 bp, Homo sapiens
  misc_feature (219)..(219): n is a, c, g, or t
  misc_feature (241)..(241): n is a, c, g, or t
  misc_feature (259)..(259): n is a, c, g, or t
  misc_feature (302)..(302): n is a, c, g, or t
  misc_feature (316)..(316): n is a, c, g, or t
acaggacacgatctgttgatgcggatgacgtggaaggggtggagccgcacccggatatggaagccatcttcgccacaacgtttttaccatgtactctatggcacaaattcgggcagcctccaggggcttcagagagacagctgcgtcatattcatctgcacaccatgtgggccacaaacgcggaaactcatccactctttgcactttttcacgccccanggtcaaacaatgcgaagtcttnggcattcagggacaccgntcggcagaagcgacgacttcggtgtacggctcgtttcttacanactaccggtaacanacgagaagcggcgaacgggtaccgacgctcgaactt

SEQ ID NO: 577195 - DNA, 920 bp, Homo sapiens
  misc_feature (697)..(697): n is a, c, g, or t
agcgggtcgggctcccgcgccatggggcggctggtgcgctgtggcgctctgctggggatgcgttgctggtcgacttcctgtggtcgagcaggcgttcgtggccacgtcagtcaaatcagagcattgaaatgcactcgcaggtagaagatacgaatcatgctgaggaacctttcctagcactctggcgaccgtggattaacatgggaagttgatacgctggactcatgaattgatgattgatcagtacgttctcctagagatggatctggactcctgatgtaagttgctggtgtcctcaaatcattctccccggacatctcgactaggtcttgtggcgacacagattaatgaccgtaggatggaactactgtaagtgagtggattcgtaaaaatgagagatacaaactcaatggggcactggcgataattaagtagattctagatcgatggtgtctatgaggtaatgtgccttcaatgtctagagtcctagctagtgggacatcaggtgagctatgtcactaggaccagaacgagtgaggatgagatttattcatctgtagggttgatatataacacacaccagtagattgagaggaatatatcacgctggagaattattttagagagatatgaatgaatggcaggaaaatttcttctggttgcatactgtagaaacagtacaaacgatgtagacttncttaccaagtagtgaatggacatcacagactagtcaggaaccggtcacattgctgatggccacaaatggaccgaactgaattctctgatcgctttctgtgaaagtatattagaagacatgacttgaaacttgacactggggccaaatgtgggtttactcacgagtgccaggatgaaagttaaaggtggtaggagaagggatttcgattccaggcagatgggga

SEQ ID NO: 577196 - DNA, 884 bp, Homo sapiens
catgagcatacttactattctataccctagtaggatcacatattcccctgacaacatcgcactgatttacactcaccaacaccctaggctcactaaacattactactactcactctcacatgcccaagaactatcaaactcctgagccaaacaaacttaatatgactagcttacacaatagctaattataggtaaagatacactcttatacaggacataccacatatatgacgtcccgtaaagccacaatgtcgaagacaccccatcgcatggggatcaaatagatactatgccagaaggactacattaaaaccaaggcggcatagtgtgtaataatacagccatcacacatcaataactcaaaccccactgacaaaaacacactagccataaccccatatccattgatacatactcaaccactatagagagcataaattaataacaaagctccaaatcatgcctacgaacgaaaacagaacataagaatcagcatcactatgcataacatctaaccacatcacaagaccacaattagacccctcgatagataaacaagaacatgcatgcatcccaaaaacaccactgaagagcattcaagcgggcagccagatccagtaccttcaatacatccggcgccgcggaaccttaaagaatacatcgagttaacgtaattacatgccataagccacaactcgagagacataaggaacagcagatcaacaagacggaatgaagatccgtctacataaagagaagctacagcgaatcttaattccgcaggaacataaatattgtgaggactatatagccatgacttagctaagaaatgacatgaagcccaagatgaagctatgggagagtcactggggaagtaaccagta

SEQ ID NO: 577197 - DNA, 152 bp, Homo sapiens
caggatggagggagggcggcctgggccttataggagacaccagggtacctatatgcacctcatgccccacccccaccaggaaggtaagtgtaccagaggaggagctggacgcaatgctgcaagatggcaagggaccatcaacttcaccgtct

SEQ ID NO: 577198 - DNA, 395 bp, Homo sapiens
ctttgcaccccctcccacgcgctccagggggtctctctgggatgcgccgccgtccccaccaattctctcggcggcgcatctttctggccctccacaacacagtttgtgtgttgacgcgcccaccggcgttctccccgggagcttctctcaccgtgccgctatttgttgggccgtcgcacactacttctcctctccccttgtctttgcgcttctgactcgccgccccgcacctaaatattttctccctttacaccaccccacacacactccctttggctttgtaaacccccccccttaattattgcgcgccttttttataaaatttgtttttacagcaattttctttaatttctcccctttttttgtatatagggccgccataacaaaacaaaaaa

SEQ ID NO: 577199 - DNA, 151 bp, Homo sapiens
actcatttcaaaatgaaaacctatctgccaaaagcataaaaaatctttctaaatatcagggaaaagcagtttgatcatagaacgctatatacatactataaatctaacctacttaaacaacgtaccttaatataaatatacgataaaattc

SEQ ID NO: 577200 - DNA, 1588 bp, Homo sapiens
  misc_feature (1210)..(1210): n is a, c, g, or t
gggaggtcaggtggcgtttgctgtggtggctaggccctgcgtgtcgcatggatgacctcctgcgctgtgcccccgctgatgcctcctgtccctgtgccctgtgctgcttgctgtgtctctgcctgcagtgctggcatgcatggggtggcccccggggccgccgggctggtgtggcggtgcgggccttgcttgcttcggccggccggggccgccttgccttacctgacatttttagcacggctggaccccggagggcatccgcgcgggccggtggcgaacccgcggaagccttccggcgagacataaccggcttctttacgaaacgttcctgcaagaaatcaacttctaaccctagaatgggctctcactacttgcactggaattggtctcttacacatttgcttgacaccaactcttttcaggaaaacacctaccccttttttaacgccttcgcttcgggaatggctacacatccttgcggagcgtggatttcccctttgggctacaccttcactttctggcacacacgtcaaaggccttttgcgtggaattctcacctttattctggcgcggcttaacagccacaagttgtgcatagtcccttttttatctccactcggtttaaacacaccaaaaggtctatacattctaactctcctggtcggaacactcctgggcggcgttggggatccacattttcctcgaaaacttgatggtcggggccacaaaaaccgctaatgaactatccagagtcgccaattttcccctcaataacccaaggaacaggcttactcttcccctcaagcgcgagcaacgacgagccccttcttcaaatacttggcccacgcttaaacgcacttcataaccccccgatggcaaagtctgtggcttgcgacaccttgtcttcgacgcacatgcacgaactccccaacgttttccccgactggcaacataaccacagccgggggtttgccccacaggtctttctcgtctggaaacaacaacctctggtctttaatctggcaaaccttctatctggacttcctggaaacacataatttcgccgagtgtcccaattgtcaaccaggacacagtggtaaccttctccttccccggagtgtgctcccaacaatggactgtggacacttatcacagtacaattttctctccctttatatcccccccttattgaactggccaccacaagtgncccacaccggcctagtgaccaaaaacacgggggtgaacggcacattttccactgctcattatacccgtcagagtattaacgttacatacccgtgacactataattctctccgacggcaaaactttatttcactaatcgtaccagccttgggcgcgcttcacataactatccttatgcgatacacggggtcccccatctctgtataggctcgctatgtgtaggtgccgactgccgccgtaatcgttctttcccaacagcttgtaagagaggtgtctctccgacaagtgctcatttattgctcgctgtgctcattaacctctgtggtgaccgacgacggcacaatctgtcgattgtccctccaccgtgctactgcgactt

SEQ ID NO: 577201 - DNA, 687 bp, Homo sapiens
gcgtcttgctctttcgccctcttttgccatctgctgtgggatggtgtagcaagagggccttcatgagacactaaagcaccttgatatcagacttcccagcctccagaactgggagaagtaaatttctttctttaataaattagcccgtctgtggtattttgttatagcaacacaaagtggactcagataggggctccagaaacacccccacaatgtgtaaggtaagacttatttgggaaaatattctatctcaccatggtaggctgaataatgacctccttcctccaccctgcctgcccctccccgccccagacatatctatgtcctaatccttagaacttgtgactgttaccttatatggcaaatggagactttgcagatgtgatgaaagatctttccatggagacattatcctgggatatctgagaggacccgataaaaccataagggtccttataacagggatggcaggagattagagtcagtagtagatatggagtcagatatggaatgataaagcaagactggtagacatacaaggatgaggccatgagcccaggaatgcagatgacctctagaagctggaaaaggcaaggaaagggattcttccttgaagtctccagaaggaatggatccctgctagcccttttggttttggactctcggcactgtaaaacaataaatttt

SEQ ID NO: 577202 - DNA, 315 bp, Homo sapiens
gtctacacctgtgcgaggccaacgctgtgggacgggcctggaagacacgcctcacgcgattctcccacatcctgccaccctgtgggacgacacttctacaggaatcgtaaactcatgtgacccagccgggacggaccacgactgaagaaactttcctgacctaaaactccgctgctgtccacacactagacccctggaacggagaccactcacctctcctgagggtcagcactcttcacctgcaaggacggtgtgggacgctcactcgctgtgaccccacagtactactcctactctcgcgcgtctctactcctg

SEQ ID NO: 577203 - DNA, 233 bp, Homo sapiens
ggccgggtgttggtgctaatagatgcacacgtacgctgccttcagactaacacatcagatgaggtgtgctgactctctcacctggattccacgctgcatcgcctgggtgctcccgcatctggaccggttagtgatgcgcaccttctggacgcaggtcactcctgctcgtgtgtcctggacgagagagctgcgcgccggctccctacagcaccccgggaacccccccccgcact

SEQ ID NO: 577204 - DNA, 852 bp, Homo sapiens
  misc_feature (34)..(34): n is a, c, g, or t
  misc_feature (112)..(112): n is a, c, g, or t
  misc_feature (126)..(127): n is a, c, g, or t
  misc_feature (137)..(137): n is a, c, g, or t
  misc_feature (140)..(140): n is a, c, g, or t
  misc_feature (154)..(154): n is a, c, g, or t
  misc_feature (195)..(196): n is a, c, g, or t
  misc_feature (198)..(199): n is a, c, g, or t
  misc_feature (201)..(201): n is a, c, g, or t
  misc_feature (204)..(204): n is a, c, g, or t
  misc_feature (211)..(211): n is a, c, g, or t
  misc_feature (216)..(216): n is a, c, g, or t
  misc_feature (218)..(222): n is a, c, g, or t
  misc_feature (224)..(224): n is a, c, g, or t
  misc_feature (235)..(235): n is a, c, g, or t
  misc_feature (239)..(240): n is a, c, g, or t
  misc_feature (246)..(246): n is a, c, g, or t
  misc_feature (250)..(250): n is a, c, g, or t
  misc_feature (261)..(262): n is a, c, g, or t
  misc_feature (269)..(269): n is a, c, g, or t
  misc_feature (274)..(274): n is a, c, g, or t
  misc_feature (276)..(276): n is a, c, g, or t
  misc_feature (278)..(278): n is a, c, g, or t
  misc_feature (281)..(281): n is a, c, g, or t
  misc_feature (300)..(300): n is a, c, g, or t
  misc_feature (302)..(302): n is a, c, g, or t
  misc_feature (304)..(305): n is a, c, g, or t
  misc_feature (307)..(307): n is a, c, g, or t
  misc_feature (326)..(328): n is a, c, g, or t
  misc_feature (330)..(330): n is a, c, g, or t
  misc_feature (332)..(332): n is a, c, g, or t
  misc_feature (353)..(353): n is a, c, g, or t
  misc_feature (370)..(371): n is a, c, g, or t
  misc_feature (388)..(388): n is a, c, g, or t
  misc_feature (393)..(393): n is a, c, g, or t
  misc_feature (403)..(403): n is a, c, g, or t
  misc_feature (405)..(406): n is a, c, g, or t
  misc_feature (408)..(408): n is a, c, g, or t
  misc_feature (413)..(413): n is a, c, g, or t
  misc_feature (418)..(418): n is a, c, g, or t
  misc_feature (434)..(434): n is a, c, g, or t
  misc_feature (480)..(480): n is a, c, g, or t
  misc_feature (507)..(507): n is a, c, g, or t
  misc_feature (509)..(509): n is a, c, g, or t
  misc_feature (530)..(530): n is a, c, g, or t
  misc_feature (617)..(617): n is a, c, g, or t
  misc_feature (658)..(658): n is a, c, g, or t
  misc_feature (806)..(806): n is a, c, g, or t
ttcttcaattatattattgtttttttctcatgtncatttacataaaactaccgctctaggttttggtgtgttttgtgtcagctactttagtgaataaacgaaacataaaggnactcagctacttgnnttcatgagantcngctttcaaaaaaancatatatatcatctcatagaatacttatgtcaaacccaggnnanncngtnactaagncacanannnnncncttttaaaganaagnngggggnaganaggtggggggnngggggtnggggntntngcnactgggccggggggccagngngnntntgcgcactgggaatttttnnntntntttacactttctcctgttctntttggtccacattccanntttttattttttttttnttacnttgttatctntnntncttanctttntttcaaaggtgaaagntacaagatggtaattgacataaaaaggttttaaaattcttcccacncaaaataaaataaaaataatataatcncnatcaaattataaagaaattcnatcaaaatgttgaccacataaagaagtcagaccatttgccttcgccgactgcctcagagggcagagcatgtgtcacctacaaggggngaggggggtagagtccctactctcccccggcctgtggtgtnagggtggacaggagccctttggcttccctggggttttgcttcctcacatagggaattgatggaggtgggctagatggctttaagagacttctcaactaaaagaatcaaagtcagcttgagagcccatctctgaacagacatatagggnggcaaaagaaatggattaaaaaaaggcggatgacgtctttctcacc

SEQ ID NO: 577205 - DNA, 900 bp, Homo sapiens
attaaaaggactatttctctaaaactcaaaaaaaaaaaaaaaatctcaagatagtaaaagcccctagtgtgatcaaattatcggtaaggccattggggggtggattcttccagaaaacagcagttggatacctaagcagcgttattggatggggctattcaatctatgtttagttgggccccttaagatactagtggcagctagatttcatttaggggaaatcaccagtaatttgactggaccaattggattttagagagaaggtaaccaaaccaaatatttatctggggcaaagtcataatattctccacttgaatggcgctcatgaaaaataggccacaaacaagagttctggggccacagctcaagcccagagggtccctgggggatgggagggctctctctccccaccccttgattctagagaacgtgggttttctcccagtactccgagcaattcatttctgacaagcagttgagccacttttttccaaatgtcccctgcagatgttcaaactcctccatttctctttccccttccaccttgcagttttggctggactctccactggtcatggagtgtacagcattaggcacattatgcttctgcgattctgaagacggtcccggtcatggatagactctgggtcccttaggaaaatattttcttccaaattccagaggaagtttagttattccccttttgcaaatgtctacgcggtcgcgactttggcttacaccctgggacacacaaatcttgcgaatgtgttccttggcaccagctctatttggggggtaacatcacgctcgacgtggagactcgtgtggaaatgcagaacgtgggcaagaggtcaatcttgcgagaacgactagagaaagagacagaagtgtcccacgaga

SEQ ID NO: 577206 - DNA, 244 bp, Homo sapiens
  misc_feature (108)..(108): n is a, c, g, or t
  misc_feature (118)..(118): n is a, c, g, or t
  misc_feature (139)..(139): n is a, c, g, or t
tgccaaagcgtataccaagtagccgggaccacaggcgcgcacaccatgcccagccaatttttttgtatttttatgtaaagacggggtttcaccatgcctggccaggcntggtcctganactccctagaccttgcgatcnctgcccacctcatgcctcccagatgtgcctgcgactacatggcgtgatgccaccactgccgtggcttattttttatttttctttttttctaagagacattggtct

SEQ ID NO: 577207 - DNA, 578 bp, Homo sapiens
tacctgaacgaagctggcgtataagacatgtaggctctaccagatatcgaaaagaagaaccatctcacgtagaatacgaggctaggacagtagttcatgaataatcgaataggcccttacatctactgccgttgccatcccacaggcatacttcaagcacagttacgtactttgcaatatgcatgtgcatactatacagtggctacacattgctcaaatgcactctggcgacgaacaattgtaacacccttgactaacacccatacatagagcgtcctaaacagtaggacctaagtggtcacgcacataccatacagcacagcgttcatttacttaagaaacgatcctaaatagggcacgcgcacacaatccacaccgcacaatacacaactgaaccgctgtgcccagaacgaccaacctataaccgcactacacctaactaaaacagtcaactctacacaacaagaggacacgtaggcatagaaccactacccagtacaacacgtcacacgaatgacactttccccacgccagagcatagcgcccctgagcaaggcatcacgacagaacgatccaga

SEQ ID NO: 577208 - DNA, 1137 bp, Homo sapiens
  misc_feature (1137)..(1137): n is a, c, g, or t
gcaggagagcttgcgaggatgagggcgcagagcccatgggctacagcgcggaggtgtactagatgagggctatccggggatgatcgacaatgggaggagaagcgcatcactggagggcagaggaagaacgagcgtgtgcgagatggtagttgctgagcgctggagacagtggagtcgtgtgcccaggaccgcgtagaatgatggaataagaggaggccataatgagttcatccactaggagaacatgaggccaaggcctgtggtagcaagtactagaggatcggctgcggcagatccggcctagtggcagagtccaaggcagacggcatcggacgagttcgaggcccttgataactagctcagtgtcaggacacgataggggcagcagtggggtaggggtcatttagggcaggggcagcctgtacatgaccccggccacagagtctttggttgttctttgtcagatggacttcacggaggttcataggagatcttcccctgtcagggagtccacaatgttagcgctttatagcaaagaagggcaatggatatacctctcgaaactaggaataatccatttgcttgggggctggcgggaaaccaaggggtatggacggactactggatttgttgtgtaatccccacaggtgtgctgcatttaggtggaccagaggcaaggggccgggattttctccactagaatttagtgtggtccgaaagtgcgatcgacttctctgatagtaagtgtggctgggggacgtcgagggaattggactgtgagattaatggaggaaaaagagtggtcgctatgttaaagaagttgcttgaggtttaacagaaaagagttttcaattgggtgggggaccgtggtggtttgaattaccaaacgggaggttgacaggcgcactcccattagacatcgcgggaataaagggtgggggcacagcggggagattccccaatttctgtggtgggccaatgtaacattgtggttaccgggggttactaggcggaaaaatgtggaggcattcgaaacatttgaatggtgagaggtgtgaaatttgttcctaatgggaagggtatttgccattctagggtgaattacttgtgaacaatgtgttaagaggggggagatgn

SEQ ID NO: 577209 - DNA, 246 bp, Homo sapiens
tgtgctgcaaatatgggatcagaagaggaatattcgggctctaatgggtatcagatctgccatcttgcatcagcggggccatggttcttgtgaggtgtctaagctggtgcctatgtgctatatccccagcatccttctgacagcctccagccgggacaggattcgtggggcctcctgtggacatagcatctgtagctccccaggtcttatgcgaagtagctggctccccgtcagggacccaagtgt

SEQ ID NO: 577210 - DNA, 171 bp, Homo sapiens
  misc_feature (13)..(13): n is a, c, g, or t
cgtctaatcgccntaacctgcccagtagacccatctgactctgcccagacacacccatcttcccgtggggtccctggacatccctcctacaggagttcaggcctctacccgcgcccctcccatgaccagctgtccattgtgtcgaacttgctcaagggccgtcctgcctgt

SEQ ID NO: 577211 - DNA, 151 bp, Homo sapiens
ctgttagcctcagcagttatgtgtactaaaaaacaaacaaacaaacaaacaaacaaaaaacaaaatcaagtctcttcctcggtagagaattacaccatttttcttcatctctggcgtatttagtaactttgacatgggcacacttatggag

SEQ ID NO: 577212 - DNA, 440 bp, Homo sapiens
ccctagattccatctcctctttcctactcgatatattgccccatgtattcttcccttttttgcccctcataccaatttaaatcttttttcattggatcattcccacccatttaacaaacgtttgttatttttcccatcttaaaaaacgaaacattgaccgggcatggtggctcacacctgtaatcccagcactttgggcggccgaggtgggcggatcacctgaggtcgggaattcaagactagcctgaccaacatggagaaaccccgtctccactaaaaatacaaaattagccgggcatggtggcgcatgcctgtaatcccagctactcgggaggctgaggcaggagaatcacttgaacctgggagacggaggttgtggtgagccgagatcgcaccattgcactccagcctgagcaacaaagagtgaaaaactccatctc

SEQ ID NO: 577213 - DNA, 108 bp, Homo sapiens
ctgattgcgaaccgcctgcagaggaacagctgtgcaacgactcacgtacttcgctggctgaggccattgccatgaacctggcagctggaccagcactgatgaggacct

SEQ ID NO: 577214 - DNA, 411 bp, Homo sapiens
gctcggcacccggtagcaaagccaagactagaacccaagtctctagaccgtacatggttcacagagcagctcactttggccttccggggcggttttaggactcaactgaaagaccgtgcatccacttacatctccacttacaatgccatttcctgagaatcctgtcctcctttgttttagctgaccagacatatctgtcctaatagaatggtgttggatggatgtttgagacagagcagccataaataatctggggcgtttggcctgttaactctccttccatcctgaatggtgtaataggtttaagataactacctctaaaattaactatcacttttgtgaggaaggtgaactgataaatcttgccttgaaactattacccatctgagtgatgctctgggactttctttc

SEQ ID NO: 577215 - DNA, 385 bp, Homo sapiens
gcagagccgctactactactaaattctccgccgatcgacccggcaccggtcacgttgggtagacagatatcgaagtccccctgcccaatatgcaacagctgaccactggtgttcttgaaggtattggccaccagggtcaggtcgttgttggcggtctccaccaccccattctggttatcaaacaggttgcctatctggaacagggtcttgccgtcacgccccagcgcacgcagtttgccgctctggttattgatgctattggcccgtacgctcagcgtcgtatcgctttcaataatgccggactggttgctgagcccaccgatcaccccaaggtcaatctggccacccgcaatctggccgtcgttgctgttatcaaagttctgcg

SEQ ID NO: 577216 - DNA, 301 bp, Homo sapiens
agatctcagctctacaaaaaatttaaacatgagcacgagtcaggcgcagtggctcacatctgtaatcccagcactttgggaggcgacgcgggccgattgcttgaggtcaggcgtatgagagcaacctggtcaacatggtgaaaacccatccctattacaaatataaaaataagccgggcatggtgcatacaactgtaatcccagtactttgcgaggctgaggcgggtggatcacgggctcaggagatccagaccatcctggctaacacggtgaaaccccgactctactaaaaatacaaaaa

SEQ ID NO: 577217 - DNA, 450 bp, Homo sapiens
  misc_feature (25)..(25): n is a, c, g, or t
  misc_feature (34)..(34): n is a, c, g, or t
  misc_feature (75)..(75): n is a, c, g, or t
  misc_feature (87)..(87): n is a, c, g, or t
  misc_feature (196)..(196): n is a, c, g, or t
  misc_feature (421)..(421): n is a, c, g, or t
aaaaaagacaaagatgttttccccnagaaatganaacgcgctgtgctgggccctgaaagccgtgaaagggcccanacgctcccctgnaagtggcccaaagtccccagtgagccccaggggcttgggttgagggtggggggtctggtagaacactgcaacccgcttaacaaataatccctcctttggccgggtgcgngggcacgcctgtaatcccagcactttgggaagcccaggtgggcggatcacgaggtcaggagatcgagaccatcttggctaacatggtgaaaccctgtctctactaaaaatataaaaaattagccaggcgtggtggtgggcacctgtagtcccagcaactcgggaggctgaggcaggagaatggcgtgaacttgggaaggtggagcttgcggtgagccaaagaacngccactgcactctaccctgggcgacagag

SEQ ID NO: 577218 - DNA, 1027 bp, Homo sapiens
gggttgaggcacaacgggtatttcatgtctcagggcagtcaggtttgtgcagttacagcttttctgttggtatgcataattacatacattggcagctgcaaagcagcatcgtgacacagcagcatggacggtctggcacagcaacaaatcggcacaggacacaggtaagtatgcacctcctgatacatggcagagaccattaagcaagcactggcagtaggtgtataggtgcccagcctattccatgctgcatttcattagacacgtattccagcatatgtgagccgtaacagcactacatagccttggaccctgcatctcatgtgaccatcagcttataggatatacaagggtgtgatccaagctatccaagacacatcagcatgcacggctcaaccatccagggccatcatctggcaatcttgccacagtcgctcatcatcctgcaggcagatggtcccagcacagtacagtccatctcgctctagggacccttggtgcaaacttagccactgcatcaacacagggcaccttcacgggcgccatcttacgtatcgttcggatggcatataaaggtagattcctcctgcaagtataggccgaaggtagcaatgttggaggtaataaaaccgtactgcaaggggcaggcccacggtatccgacaggggacgagaacaagagtacacggaagtacccgggcctcctcaaatctccaacgacgtgccaggaggaagacacaggttcacttcaaagagagagacggggaaatccaagggccgcacacaatcagaacccaagaccaccagaaggggacacgcgcacctgcacgcacggagcacaacgaactggctacggggccacccgacgcccaacagcccacacagtccccgggaacgtgagaccccgcccaccgcacgacagcaacccgcccataaacgaaccacacgcagggggattcatcataacgggggcacacccgcgcggaacaacagcggcggaggacccagagaacacaggaacctgacca

SEQ ID NO: 577219 - DNA, 131 bp, Homo sapiens
tgtgaacgagacgacctatttctatgtcatttttaatgtatctatatgtacattttaaagttcttattttagtatacatataaatatccagtattctgacatgtaagaaaatgttacgcgctcacacttat

SEQ ID NO: 577220 - DNA, 119 bp, Homo sapiens
cttagaggatcccattataaagttcctgtttacccttatccttctcctggctctgtatttaaagtatgctgtcagttctttatccctcactttctatcccttacgagtcgagaacatag

SEQ ID NO: 577221 - DNA, 1367 bp, Homo sapiens
gagttttttttatttatatttttaagttcatgtctttaattaactcatacagttactggtctcctgggttggtgcgaaccagtaagtcagacaactatttggccacaataaatggtgctggtgcaaagtggatcttgccataaaacaccccagcaccactattcatcaaaagcgcgctcgcagtttctacgctctcgcctggcctggcccgctacccttgcttggctccagcgcatatacgcatcgccctcttccctcgaaggaatcgaggggagaacctcgtgaccacacagccgtgggtgcgtggagaacggcgaagacaagaaggcggagagggggcctcaggggagaaaacagaggctgcacgtgggatgggaaaagtagagaaagattgtcagaggctgatggaagacgcaaccaaggacgcacaacttatccgcctagagtgaccctggggtcgtgagaccaaagttatacacatgcgggggggcgagacatcgccaaacaggaggggatacatatgaggagaaccattgagaggggggaaaaggacaatacataagcaaccaagcggtgggtgcccagagacactcatgaacccccgtggtgttgaagaaccagagggtgaacagccccaatggactcatatgggaacaccacaacacacggggcaaaaatattcttttcacaagggaaatctgaaacaaagcgacgcagcgtggaagcgaacaaaggggtaattgagggactttataatcccacacattccaaggcatattatcagagtagaaagcatacacgcgggatgatattggtacaatattttatttcccgccgatttatgagaagatggagaggacatggggaatttataaataattgcccccaacggagcaagcgttgcaactagggtggcgcacaaagcgtagacacccgttggtggggaccccccacagtagagaactaggggcataaaaaacgcaaaacagtgaatagcaaccaacaagaaaaaggaggaaagaaaggaaaagacacaagagggaaacccaaagaaaccagcgggatggaaaagcacaaaacgaaacacacaagcgcgacacaccacccatgagtcgcgaaacggcacgaaacacagtgaacaaacccgtgagagatcaagaaacaaaaagagacagaacatgctggcacccagtagggccccgcgaataaacaggcagccacaaaaaaggtatgatggccccacaaaatgaaacgaaagaaacacgcggcaaccaacaatacagatacaaaaacagaaaaggccgtagaccacaaacagacagcgaaaacacggaacactcagacaagaatcagctaacagcagacaa

SEQ ID NO: 577222 - DNA, 290 bp, Homo sapiens
gaacgcggggcagagagaaacggaacacggcaggagtttcacaaatgttcttctatacaatgtctggaatctatgaataacatcggtttctaagttatgaattgattttcaactactgggtttaggccaggcaggcgcaggcctggtttcgggcctagcgccaggctgcctgcctgtctttggttttacttccttgttgttttttcttaaaacaggtactgagtataaaacactatgagagggtctctcttccctcatagccacaactcattctttagcttccggtcgaa

SEQ ID NO: 577223 - DNA, 207 bp, Homo sapiens
  misc_feature (177)..(177): n is a, c, g, or t
ggctctgttcacaaagacctgcgtgctctgctcactactaatcctttcctagtacgctgcggagcacagacgggcgctgcgagagacggcctgcacaaagacaaataagaccaaggcggcaggaacaggagaggaggacaaacaagcgggcagaggctgctggaaattgtcttccanctgatgcatggggcttaaagcctaggagac

SEQ ID NO: 577224 - DNA, 93 bp, Homo sapiens
tatgggactatcgtcgaccacggcgtcgacagaaggcggagagagctggggctcagacattggtgtgcaccttaataaaccctgctgtctgcc

SEQ ID NO: 577225 - DNA, 183 bp, Homo sapiens
tagagactggaattaacttttatgcaaggtgtgagaccatgatacaattctatcataatatattctcaaatcattacccagtattagaataccataaatggaacaatccctacttgtggtgtgaattgaaaacgttaccctgttactagataaaattacactccatttctgtgcccatttcaa

SEQ ID NO: 577226 - DNA, 154 bp, Homo sapiens
tcacagaaagattcatccgctcccagacatgggtaccctcggcttcacgcctcggaagcgcacgagcaggcatcgtgggaaggtgaagagcttccctaagggatgaccccatccaaagccgggtccaccctcacaagccttccctggagtacaa

SEQ ID NO: 577227 - DNA, 370 bp, Homo sapiens
aaagggggccttttttttaaaaggggggggggtttccccaaaaaaatttttttggggggggcttttgaacaaatttttttagaaaaacggggaattataaaggggttttttttctttttttcccccccttttgggaacggggggggccccccagattagggcccctgggtttttttttgaaaccccgggccccccccggggggggggttttccccccctgggagccccagagaaaacaaaaatttttttgggaaaaaaaaaaaatttcttagtaaaacgttgaggggatttttttcccgaagggggggtttttaaaggggcttttccccctttttttaaacccccccccccattaaaaggggccaaggga

SEQ ID NO: 577228 - DNA, 233 bp, Homo sapiens
ctagaggatccccgcgctcacaacaggcacgggtacttctttcaattaaaaatgtaaaaactggatatttaaaataccactataccaagggaggataagctggaattttaaacttagatttaatagctctagtttggcagtttgggaaaatagcaggtttaaaacaaaattattatatgagctataaaaaagggtctttaaagagtaagtcttacacataaggggtcatttgg

SEQ ID NO: 577229 - DNA, 272 bp, Homo sapiens
  misc_feature (48)..(48): n is a, c, g, or t
gtccgtctgagcagctgggactaccggtgtgtacacccacggcttggnttattttgtatttttaatagagacgagttttcaccatgttggccaggctggtctcgaacgcctgacctcaatgtaatccacccgtctcagcctcccaaagttctgggattacaagcgtgagccaccatgcccggcctgatttttttcttttttaactttcgaggcggtatcaaagctgtggaaagagggcgggtacaagggatttttttcccagctggctcaga

SEQ ID NO: 577230 - DNA, 202 bp, Homo sapiens
cttttggggtctttgctgaaatttcccaggtaggacaaacaaccactataggggggagcggaaaggcccagcgccaagcgctaatggaaatacagggtctgctgttgcaggcttcaggagtaaggctgtagctcactgctgtgacagctcttgaggttcctagccttgatacacctagcttattctgacgccttttgctgaa

SEQ ID NO: 577231 - DNA, 569 bp, Homo sapiens
ccaaattggttgccttggtggcccttgggccttaaataaggggcattcggggccttacaggcttcaacagggcaaaacgggcccccaggccggggaggagcagttgaagatttggaggggttcctttgacatccccccgcccccgatggacgaaaagcacccttttttcaattccattagcaaggagggtcggttcgcaggctttaagcccggggatttcccccccttggaaagccttaaggacaccattgcccgggccctgcccttttggaaagaggaatttgttccccagatcaaggccggcaagggagttttcttttcagcccccgggaacagccttgggggcattttcaagcccctggaagggatttcaaaccaggggtttatggagtttaacctgcccccggggttccccatttttttttagtttaacaaggagtttaagccccccaagcccatccagtttttgggtttttaggaaacggtggggaaggccatggaggttttggtttcccagggcaaggccaatttaggggtgggtttgggcaataaaggcccctcccccccca

SEQ ID NO: 577232 - DNA, 955 bp, Homo sapiens
aagcctattttctttgcgtttagatacattgcctttagcctagtgctggcgtcgagacttgaggccgttgcagactttggcgcggctcgcgcctcctgcttcaagagcccagcgtgtgagagctggcctgcggcacgcggcctaatgccagtcacaactgtggagagactatgaggccctgaactttggtgttatcaatgaaaagggaatggttattcataggtcgcagcgcgaatggctggcctcacgcctgtaaatcccagcactttgggacggccgagacagtaacagtttggaggatcaagatgttgacctaatcttgaggatatttgcaagtgagtctatcagtactaatacccagattgtgtatattaatagatatatgctgctatcaaaataacgagcaggtttaaaaagattaaatgccacatgtgccgcttggtaagaagattgcagtttctctagccaggcttaagtacggaaatgatatcagatcccttcattccatcatcaatcctcccatagctagaatccgtaatattggaattatggctcatattgatgcaggcaaaactaccaccacgagaaagaatattgtagctatgccggatatacaagatcactgggagatgttgatgatgggatgagcagtgacgatttcatggtccaagcagcgagaaacgagattctatttcaatcagctgctgttccttttgatggggacgtttagaagtcagctaatgaaaacccaggtccagcgggtcattaccctgggggttagcggggccaaagtgtggtgtggccggggcaatgaacctcgagtgggttaggccgaaacacatttttgtggataaaaactatctaccatgctttccacagcgccagggacgaaagttgacatcaacaacccccgttctctatgtcaatagggcattcacacctcacacaagaccct

SEQ ID NO: 577233 - DNA, 262 bp, Homo sapiens
cggaacatgtatatgcgcctggaagctctgccaagagattgcgcatagattctacttgtctgctggctaggacatctgtgctgagggagcttactacattggaacttttaaccagagtatagagtaagcataggtcctgtttcaagagtccagctgacgaagcatgcacatttctgaccatgggcaagctatggacaattcaatcacatgtgatgcgtccctctgaggtgaatgcagttctggaatagcttgctatccctat

SEQ ID NO: 577234 - DNA, 127 bp, Homo sapiens
tcactaacagctataccatctctggccgtcgtttacactaacagctataccatcactgccgtcgttttacactaacagctataaccatgcactgccccgtcgttttacactaacagctataaccatt

SEQ ID NO: 577235 - DNA, 271 bp, Homo sapiens
gccttatgccgggaccgcagaggccatccaaggccctggggtgccaagcactgcgtgaaaggaagtggtcgaagctcacgtggaccagaaaaaaccaaggtggtcacgaccccgagcttcatgtgcgagacgggactccactacaattcatgatggggatccggagccatggtgaagaaagtgtctggaactcctgggaaaggggacgcgcttggacgtggccatttagggcaagaattggctctaccttgtgagaagtgggggttcaacg

SEQ ID NO: 577236 - DNA, 288 bp, Homo sapiens
catcttcatgctacagtcgaaagcacatatatccacaatgatttttaaagcttttgtgatattttagcattttgaaagactttcacaggtgagagtagaaggtagatttggaatcatgcattttagcaatgtggacttgttcgaaacatggaagcaagggccttcagctgtagcccacttcttgatccagatgctgttgcctcgtgacagcgtgtttctcgtggatgtcaagaggcagctgccgtggtgcccagtcttgcttctcgcacgtggtaggcatgacagatt

SEQ ID NO: 577237 - DNA, 742 bp, Homo sapiens
  misc_feature (32)..(32): n is a, c, g, or t
  misc_feature (71)..(71): n is a, c, g, or t
  misc_feature (90)..(90): n is a, c, g, or t
  misc_feature (95)..(95): n is a, c, g, or t
  misc_feature (119)..(119): n is a, c, g, or t
  misc_feature (166)..(168): n is a, c, g, or t
  misc_feature (171)..(172): n is a, c, g, or t
  misc_feature (175)..(176): n is a, c, g, or t
  misc_feature (184)..(184): n is a, c, g, or t
  misc_feature (204)..(204): n is a, c, g, or t
  misc_feature (220)..(220): n is a, c, g, or t
  misc_feature (235)..(235): n is a, c, g, or t
  misc_feature (246)..(246): n is a, c, g, or t
  misc_feature (248)..(248): n is a, c, g, or t
  misc_feature (272)..(272): n is a, c, g, or t
  misc_feature (276)..(278): n is a, c, g, or t
  misc_feature (280)..(281): n is a, c, g, or t
  misc_feature (283)..(283): n is a, c, g, or t
  misc_feature (286)..(287): n is a, c, g, or t
  misc_feature (296)..(296): n is a, c, g, or t
  misc_feature (298)..(300): n is a, c, g, or t
  misc_feature (302)..(302): n is a, c, g, or t
  misc_feature (306)..(306): n is a, c, g, or t
  misc_feature (308)..(308): n is a, c, g, or t
  misc_feature (329)..(329): n is a, c, g, or t
  misc_feature (340)..(340): n is a, c, g, or t
  misc_feature (393)..(394): n is a, c, g, or t
  misc_feature (407)..(407): n is a, c, g, or t
  misc_feature (425)..(425): n is a, c, g, or t
  misc_feature (432)..(432): n is a, c, g, or t
  misc_feature (435)..(435): n is a, c, g, or t
  misc_feature (450)..(450): n is a, c, g, or t
  misc_feature (501)..(501): n is a, c, g, or t
  misc_feature (726)..(726): n is a, c, g, or t
tatttaaggaacaaatttgacaaaatacatantttatacataaaatagatctctaataataaatatatatnatttgaaaaaatgaaaggngaagnagaaactgctatacaagtatattncactaatatttattttatagcattaaaggattcgggggaggggactnnnatnnggnntcgaaaanacaccattatcggcggcggngtaattgcgacattcntgaaaagcatgtganacgggtataancntcaactcgtgtgcttaattcaganttcnnntnngngcnnctcaaactngnnncngccnanagcatctggccagagactacnaaggaaagggncatttacagagcactataaacatgtctttggacagtaaaacagtatttattcnnctacactcttgantttccaatcatatcttcntcaaggnagntgtttctttggcccnatttgtgcactaaacataaaatttcaaaacacaacttttaacagtgtgatntgaaatgcagtggcagtccctgcttttcgcctgctggcttctttgaaagaaactgcttggctaagggactcagtagagggctgagatctgcctgagtataaagtgctacctgagctatatttacttcttccatcccttggtacaatcaacagcaaatagacaaaatgaagttaccttcctgagatacatggcttactttgtactctgccttttaggagatgaggnagacatatacatagat

SEQ ID NO: 577238 - DNA, 766 bp, Homo sapiens
gcgggagaccggggttcgatgtggcccgaacggggtcactgtagttggaaggaatccagaggtagtgcccgagatggtctcagcacatcgaagtatggagattgtagcatggtagtggtatagcatggaattgttactaattggactggcattactgttgcatgatggcaagcttatataactgatgaattcatgacagaatgggagtgtgttcatcatttttgataagaggagattagatgatggctaaatggtgacacgggtgaaggggtctcgtatctagtaaggagttgccgtgaagcaacatctgtgagtcagagtgcacgacatctatgacgggtgaatagtgagtacgtgaccgtgcgacaatctctcacgaggcgggtggaatggcagcagggtaggccaatttctcgcataagtacatcgaggtctaggggtaggctattaaggggcacactaattggctccaatggtttttcaacttccattggtggccaccgggtttactgggaattaaatggtacccaaataattgtattacattttttctggaaccaagtgcttactttaaatgcaggtatatcgggagaaaaataattgattgggtaaagtgtgcaatggcacgcatggggaaaactggggcacattaaaggaatctgtggaggcaccggggatggggtataaattggttgtgatagggaataagggggtcacgttgggtggccctttattggacccggttgtcgttccggaatctattgaa

SEQ ID NO: 577239 - DNA, 320 bp, Homo sapiens
aaagagctgtggctgtaggtgtatagtaatactgcaggtgacctttattggttgtatagttatagtgccccgtaaattaagccttgagttcggttatcctgcagatggtgctgaagggctggcaggtctcacagggctggctacagattgaattgtaaggacttcctaagtaaatatggattttattctcctcagtagttatcacacttgagctattgctgtttgaacgttgaaactgccatgatgactgccggactgaggagactctgaatatcgcatgctatggaactgatttctgtaggttctgggccatcacgctt

SEQ ID NO: 577240 - DNA, 117 bp, Homo sapiens
ggggatgggataaccccatctctacgaaaaatacaagaggtagctgggtatggtggggagcgcctgtggtcacagctacttgggaggctgagctgggaggattgcttgaacctggga

SEQ ID NO: 577241 - DNA, 312 bp, Homo sapiens
gccaagttttacaacaagaaatagtgcaaacaggataactgatgccatcctatcaacgcttgggcctcctccggcccaaccgcagcgcggcggtgaggctacgcgcccccgcccttccccagctacccagctccgggctgctttcccaaggtgtggcaacccagcgccgcgccctgctatggccccttctcgggccctctcctcccgaaaagaacagaaaataaaccccaggaaaggcaccggctgaatgcggggcgtcagcccagtcccattcccaccaacatacaatgcaggccccctctccaggaggtt

SEQ ID NO: 577242 - DNA, 376 bp, Homo sapiens
cccccccccccccccccaaagccttaaagaacccaccactaaaatcaaaattcctagccgcatacaaagcaacaaatcccataatagtcgccaagagaaagctgcgacgcaagcccacatacaccattgaaggtaaagaggataagtaaaggagagtcttagccggaacgccgaccatacctacgtagtccttctccgacccaaatatctacgatataccgaacgaaactactacacgggaaacctataatattccgtcgagtagcactttgctcctggtcgctcgcaagagtttctagcccgatgtagtaggtgacgcagctgctgaaggcgactcccttaccggcgtcgcactgccccgtaaccgcctatgttc

SEQ ID NO: 577243 - DNA, 118 bp, Homo sapiens
taacatgtgtcgtgcacattttctacatgtgtatattcttcacaatatttcaaataaatgaagcaagcaactatgtgttagcagatagaaaaatgataaagtaatagatctaatacct

SEQ ID NO: 577244 - DNA, 1044 bp, Homo sapiens
  misc_feature (999)..(999): n is a, c, g, or t
ggtgcccttacacaagccgggattgggatcccggaggaatagagtttaccggtaatacaaggattattctttcctgggagaaaattgccctccctacccagcctgggttagatatttaccgcgtattctccccaatgcgggagaggctaatctgcgtcaatcgtttcacattccctgaggcacagcgagtcttgcttcctcctagcgctgctgtatagtcccaaactgattagcaagtgttacacaaagcatgtattcccaaggacgtaagacatatggtgtaacaaatgtaagagtaatttacgcctttgttctcgcttctgcaagtacacttcatgcaacacgtaactcccaacacaaactgcttaaaaggtgattgatccctttgttcggggctcagactttctggaccctagtccgactgagccggtgatcaccttaataataaaggctctcctgaactctgctcggtctctcccgtctatgatttgtcccgcaacaccagttgcctgcggaacacctctacctagagagctaacactcatccccggtcagtaaatccaaaatcttaacccgttgcctcctcatgaccaagaaccatgtccctggccgtaatataagcctctgatgaagtatatagagcatacctatctagttagcatcagcatagtggccctctaccatggttacatctaatcagtgatcagatcgctataattctaccaccggaagagtttcaccgtttcttctgtccagtcacgagaaggctcgagcgcccgtgtaatcccagcaatcattagggatggtcagatcgcgggatggagtcactaagacggatcaagagttcgagagccagccgtcacgacaaccaagagtaaaaccgtgcgtctcctagctaaaagaagtaacggaaagtagtgtatgccgggacgtggttgggcagacgccttgtgtgaatattcccagcatactcgggagggtagaggcagggagaatcantcttcgacacctgggacgataaaccaaggttggcagttcacccta

SEQ ID NO: 577245 - DNA, 122 bp, Homo sapiens
atgaatcagctcggtaccccaagtgtatctgtctaacgtgaagagagaaaccgtgaccagcaaaccgcagaagcgctacaagcatttacccaacgttattgtgaggcgtggcagcagcagcg

SEQ ID NO: 577246 - DNA, 120 bp, Homo sapiens
agctaaaacacgggtgagaggcagtcagtcaccttatcccatttcaaacatgttactaagaaactgcctagtcatattacttatgttgctctgtcacttatggttttgcactgtgtggca

SEQ ID NO: 577247 - DNA, 390 bp, Homo sapiens
  misc_feature (42)..(43): n is a, c, g, or t
  misc_feature (297)..(297): n is a, c, g, or t
  misc_feature (311)..(311): n is a, c, g, or t
  misc_feature (315)..(315): n is a, c, g, or t
  misc_feature (390)..(390): n is a, c, g, or t
ctatcgtttatgcctggataaatgacgaaaaaacgcaacgannggaaggggataaaaacgatccatatgttcttttcgcaaaaggtttggaacgcggccagcctccagattgctttgttgcgttgctccaagcgtctgaagagctagatctgtaataatgggtgaaacaacgttgactagtctctcccgtccacatataagttgtagcgatcgccacgcaaaaaaccgattagagtcattttgcattctcttgccaggtcgatagccagactagagggtgctcctactgcggctatnactcttataccggnctgncaagccttttgtacgagcttaaaacttgctcgaccactcaccaataaaacatgcttcgttgagtggtctttgcan

SEQ ID NO: 577248 - DNA, 129 bp, Homo sapiens
aaaatcatcagtcggtccgcgcagctcgtgcggcagaggctgggcgcacagttgcatcatgatgatgcggtgtgccagtattcgtcccccgcttctgcgccgacaccccttccttttcttcatccagca

SEQ ID NO: 577249 - DNA, 1806 bp, Homo sapiens
  misc_feature (282)..(282): n is a, c, g, or t
  misc_feature (1432)..(1432): n is a, c, g, or t
ggctgcatacctacacatcacgcacactctgaaggcatgcgaagcttactgcgtacctgactgctaacccacggctgacactagtgctgagcattattacgacactgcactgcattggtactcacactgcactactagattagctgcaccaacactgtcgagacgctcacgaggctaaggcattcattcgcagctagagcactgcgcgcgcatatcgcactacgcgtcacgactagtcactctcacgtcgcactcacgagttactacgtcactgcctgtaancagctaagatacacgccgcttagggcacacttatgagtatttacacacgtacgcagcagcgcctaggtggctgtcacatcagccacaccgactcgcgccacacacagagagtcacacacactccatgctcgcaggcactgcgctcgacatcacgcgcaagctgcctacagccctgccacccagcatgcgactgcactcgaatcggcgtactcccttagatcgaggacagcttctcatttatttacactacggccattctctccacggcccacttaccgtgcgcaacaccgacttccacactatcacgtacttcaaccctaggcctctcccaccgcacgcctaaccccaacaaccgctccccacctggcacctcacaccaccgaccacgcggccaccaccaccacacgtctgctgccgcacccacacaccgaccaccccacacaccccactctttccacccaaacctgggcttaccccaccacgcggcccaatttatatccggctggacacacaggcgacatcacttcacgcgcacacacgcctcccacactccccacacgtcaacgcttctccaacacgacggcgatattccacgcccttcccccaagcaaggcaacttcggaacctcccccttatcgacattcctctggacactctggcgggtctcccccaaaccacacattcctactcacggcgcgcacatcggcgggcactcacagacaccctcaacaacggacaaatcttccaacactaccctcacgttctggcgccactcaggcgtcatctccccggcaacctgccgttcgcaaccctcgcacaagcgccgcaccacccctttctcaacacccaccacaaccgccgacacggctgtcacccccaggatgcgcaaaccccgcagcgcatctggctccacccccacacgtcaaacccgcgcgacgcacaacgcgcgcaccccacgcacacccaacggccaaacgttaacacgaggaccggtcctccattggagcaaagcgaaacagattctcatgacgagggcgccacacccacagcccgagagcgcataacacatcacgttggcgtcacacccacgcgactgcagcacacaacacacaaacacacgactcttcggcacacactcctacccacccantctctccacgcgcacagatctctcagggaaccaaaccattcaagccccacacacctcccgaccaaccactctactctacgagcgctacatccacatcttccacaaagccacgcacccattatctaaactagtcactctctaacctacgataacaagatctcacctatcaattcattacacaccactacaaacaacaacaaccaaattatacaagacccacgaacacaactctctcaccactacactcaaccaactacccttcgcgctcaacacaccaccacaacctatatttacgctgcacctcactcacctggtacaatcaatacaccacaccatctatatactcaccctcctatgcaacatactcatatacc

SEQ ID NO: 577250 - DNA, 782 bp, Homo sapiens
  misc_feature (18)..(18): n is a, c, g, or t
  misc_feature (63)..(63): n is a, c, g, or t
  misc_feature (85)..(85): n is a, c, g, or t
  misc_feature (90)..(90): n is a, c, g, or t
  misc_feature (113)..(113): n is a, c, g, or t
  misc_feature (116)..(116): n is a, c, g, or t
  misc_feature (124)..(124): n is a, c, g, or t
  misc_feature (131)..(131): n is a, c, g, or t
  misc_feature (148)..(148): n is a, c, g, or t
  misc_feature (167)..(169): n is a, c, g, or t
  misc_feature (174)..(175): n is a, c, g, or t
  misc_feature (192)..(192): n is a, c, g, or t
  misc_feature (214)..(214): n is a, c, g, or t
  misc_feature (704)..(704): n is a, c, g, or t
  misc_feature (758)..(758): n is a, c, g, or t
ttggggaatttctttgtnctagggtgccccattcttatgcctttccggcccttttggaacccntttcctgcgtcctttgcctggntggcntccttgagcattggcgggacttntgntgcaggtntggcacntgatacagcaccttgtnggagggtggagtctgtgtnnngaggnnggtacactggggtcatngctggtgagactagtgtttttnttgtttttttttttgagtccttggggaacagggccgaaggaagtgagaatccactggggttgggacaggggtggctggagagtcctttagggccacctggggcggtggtggaagagtccactgggtctgggctggaggagaggaaacctagggaggacacctaggtacactcaccgcttgggcccagccagcataaggtccccacaggctccggaaaaagtttcccagttccttgttggtctgggggctcggtcccttcgcctgggacgtggtagggtgccagctgtagtcacgttgggcaatgtgccacatatggacatccacgggcacagcctgggggcttgtctagggccatcaggcagatgcagtcagccaccttggtgcccactccaggcaggatgcagagggccttgtgggcctcctcatatgaggactctcgtagctgctgcagccaggctagcccgccctgttcttccaggatggctcgggnactggcactcacgtaacgggcacgatagcccaggcccagcttcctgagatgagnctccacctactggccagccagggc

SEQ ID NO: 577251 - DNA, 102 bp, Homo sapiens
tctacacggatcccaatctcgatgctcccagccttctatctgacgccccagtctagcaggatgcatttagagcggtcgtcggccaagctccccgagaactag

SEQ ID NO: 577252 - DNA, 539 bp, Homo sapiens
  misc_feature (326)..(326): n is a, c, g, or t
ctgtgggctcgactcagggtatggtcttgccatgtgagtgtcttcatcgaagatttgcatcccagcctctgagacggagtaccaggtgcaaggtggactctctctggatgttgtagtcaggacagggtatgaccatcttccagctgttttccggcgaagatcaacctctgtctgatcatgaggaatgccttccttatcttgtgatctttgccttgactgttctcaatggtgtcactcggctccacctcgagagtgatggtcttatcagtcagtgtcttcacgccgatctgcatcccacctctgatacggagcaccatgtgcgaggntagactctctctggatgttgtagtcagacagggtgcgcccatcttccagctgctttccggcaaagatcaacctctgctggtcaggaggaatgccttccttgtcctggatctttgctttgacgttctcgatggttgtcctgggatcctcttcagtcgtgctgctctcgtgcgtgcttgtctatgcccgtatttgcatcacgtctctgatgcgaa

SEQ ID NO: 577253 - DNA, 326 bp, Homo sapiens
tgtttacgggaaaaaaagtttattaggggtaacgggataaaatctattcccgatatctgaggttacaaactttagggcccttgaaatatgcaggatccttggatgtaactgggataaaccccattttttgagctctcttaattgcttttgggatttctttctggtttttcccacaaaaacctgtaatgggccttccataaatgcatcccagtaaatggagaaacaaacggggacaaaagctggacattcttataatctacatgctttccacacaagataccttttttaaaagggtctttataaggattttccattgaaatgggcag

SEQ ID NO: 577254 - DNA, 774 bp, Homo sapiens
  misc_feature (165)..(165): n is a, c, g, or t
  misc_feature (385)..(385): n is a, c, g, or t
cccccccccccgggtggtaggcccccccccccgttttttttttagaagaggtcccctgccggtggtttatctccccgggtgcccccccgggccccaagtgtggttggggtttgccccgggccccccccaaagttttttttgggattgggggcttttcccttaaanaatgtctgtttgggggcaattccctctttttttaaggccattggtaggggtgccccttctcccggttgtgggaggaggccgggggctttgcgccttatccccccctttcctcccttctggggacccttttttttttttaaaaccccagggggcgggaagcgcccccttggccccctttgtggttcccgcccaatttttttatgggtaggacccggggccncgccccaaaaggggggtgggttttcccggaatttttttccccgcgccccgcccccccaaacccttttttaaaaaacacccccccccaggttttttgttggggggggccccccccaaggttttgggggtcccggttttttattgggcccccggggtttttgggccccaggccccttttttcccctttttaaaaaaccccgggggcccccccggccgccccgtttttgggacccggggggggggggggaccccccttttttttttcccaaaggggggcccccttttttggggggggtttgggggggggggttttccccttttttttttggggccttttttgggggtttttttcccttgcccccccccggttttttaaaaaaagggggggga

SEQ ID NO: 577255 - DNA, 610 bp, Homo sapiens
actcatatgtgtttagtagagatatttctaattgctgggcctcccaaactagaaacagttatacaaaaggtagtacaccgagttgtatgaattcttgtagatgctaaagttctggttgcctgggattcctggtcatcatgcatctctcatgcccgctccttctcaagccgtgcacgtaaatagcactacgaactctggaggcaatatgaggttagcattgtgtgaacgtcttggcgtctgtggatcttgatgcagacaaaaaaggaaaggaagacctccagacgaatagctttccagttcttcttacccagggcttagaaagtaacgattttgaaatgctaaataaagtacttcaaactaggaatgtaaaccttataaagaagactgtattaaggatgcccctgcatactattattccgttgttacaagagcttacaaagaggttacaaggacatcctaatagtgctgtgctaatggttcagtggctaaaatgtgtgttaacagttcatgcatcatacctgtccacgttgcctgacctggtaccccagctggggacactctaccagttaatggaaagcagagtcaaaacttttcagaaactttcacacct

SEQ ID NO: 577256 - DNA, 192 bp, Homo sapiens
  misc_feature (32)..(32): n is a, c, g, or t
cgcttatgaggcacagagcttcaatgtctccncgaaagggctgactgctggtggtcagcaaacacacacacacacacacacacacacacacacacacacacgagtccatcacttttaagtgtgaaccagggtgcagttacattatcacctaaaagcacaccatccatgcctgcaagagacctcgttaagctt

SEQ ID NO: 577257 - DNA, 168 bp, Homo sapiens
ccttggcatgtgcagttgggggtccctggttcttgctctgccagcaggagttaaggcagtgggctggataggggtccgtggtgcacgggcatcagccagtgcagttcagccagcgacggcaacgccgaaacttaaaccgattaccgccccgagtaatgcaggacggct

SEQ ID NO: 577258 - DNA, 238 bp, Homo sapiens
  misc_feature (85)..(85): n is a, c, g, or t
  misc_feature (149)..(149): n is a, c, g, or t
  misc_feature (232)..(232): n is a, c, g, or t
tgaaaaactttcccacgggtcctaaaaattgcctcccattttataaatttgaggtgttgccatgggaattcctaaggctgacccnccatgatgtaaaagttccacaatatggttccaaatgtaacagtgccagaaattgaatatggagnccatgccataaccttccccttagaaaaatggcaggtgttgtaatttccaaatttttgtgccaattagattaaatcataatgcnacagtc

SEQ ID NO: 577259 - DNA, 279 bp, Homo sapiens
agctcacaaagatattgcattatttgactaatgctaatattcctgcctaatctgtattaaaatatttgactgtaaaatattttggccaggtgtagtggctcacaccatgataatcccaacactttgggagaccaaggcaggaggatcgcttgagcccaggagttggagaccagactgaccaacatgatgagacctcgtctcgtcagaaaacaaaaatggaaaatttttcaataaacaggccgccgcatggtggctcacacgctgtaatcccagcacttt

SEQ ID NO: 577260 - DNA, 374 bp, Homo sapiens
cttatttccggtgtccttagccttcatcactcattatctgtaatcactccctaggtgacaccatctagtgtcattcattagtttatataccatttaaaagctggtagctctaaaacccatgtccccatcctatactactcccctgaactcaaaatctatatatctgtttatttgatatccccacttgagtgcctaataagtcccattaattcatcatgttccaaactgaattcagatttttctaccccacccctatctcccttcactgactctctttttggactcagcccgcctgcacccaagtgaaataaacagccatgttgctcacacaaagcctgtttggtggtctcttcataaggacaccggaaatcagg

SEQ ID NO: 577261 - DNA, 455 bp, Homo sapiens
  misc_feature (19)..(19): n is a, c, g, or t
  misc_feature (39)..(39): n is a, c, g, or t
  misc_feature (93)..(93): n is a, c, g, or t
  misc_feature (170)..(170): n is a, c, g, or t
  misc_feature (187)..(187): n is a, c, g, or t
  misc_feature (434)..(434): n is a, c, g, or t
caaggggcattgaaaaaancttgaaaaaattctgatttnagagaaaaggagaaacccttttttagtggcttaaaggattccaattgtcaattnttaccagatggggtaaaacttccttgccccctgggggaccccccttcttctgggggaagactgggaagaggcaaaanctttcagccttctaaangaagggtagctcagccaggcacaagtgtctcacgcctgtaatcccagcactttgggaggccaaggcaggcagatcatgaggtcaggagttccagaccagcctgaccaacatggtacaaccccatctctactaaaaatacaaaaattagccggacatggtggtgggagcctgttgtcccagctacttgggaggctgaggcaggagaatcgcttgaccttgggaggtggaggttgcagtgagccgagantcgtgctattgcactccagcc

SEQ ID NO: 577262 - DNA, 385 bp, Homo sapiens
  misc_feature (309)..(309): n is a, c, g, or t
tcggtgtgacgtaatggccaactttccactttctactaccgagcctatgactcgaccctgtcgctgtgcctggcggccgaggcctgctggcaggaagaacgggcccagtgggacaagcacttcattcaaacccagcattggacccatcaacatcgcggcttcagcgccggcgaagcgctcaagcaaaatctactgagcatgagtaacgcctacgtcacccacaacgaacgtttgctggagatcactaaaaccgtgtcgctgcgccatctgcacagccaagacccgatggccacgcgcgacatgccctgngccgcgcttaaagccgacctggtaaaaaccggcaccttgacctttgaactgaccctcaagctgtttgacgacgact

SEQ ID NO: 577263 - DNA, 775 bp, Homo sapiens
cacagtgcacatctgtaatcccagcactttgggaggcagaggtgggtggatcacctgaggtcaggagttcgagatcagtatggccaacatggggaaaccccgtctctattcaaaatacaaaacttagcggggcgtggtggcgggtgcctgtaatcccagctactgaggaggctaaggcagaagaaccatttgaatcagagaggcggaggttgcagtgagccgagattgtgccaccgcactccagcctgggtgagagagtaagattctgtctcaaaaaaagaaattgtcacagtgggtttttaacaaaaatagagccaactatatgctatctattttacaaaactccacgtttacaaagacagacacaggttagaagtcacggtatgggaaaaacataccatgccaacactaatcaaaagaacagctagcagtagctatgtcaattaccgacaaagcagttttcaacaatacggaaaccattaaaaaccacttcagaaccaaagattaagagttgcagttacaccaaaatatgtgaaagcaaaaatttgaactccaaagagtaacagacaaatccactattattactgggagacctcacacctcttactaggtagcctgacacaccccagcaagttagaaatccaataacatagtcgagcttgaacaggcatcaacatcaacattggatctgacattattagtatatttccatccaacaacagcacaataacatactcttttcaaattcacaaggaaccattcccaagtaagacag

SEQ ID NO: 577264 - DNA, 404 bp, Homo sapiens
tgtaaccatcggtatactcgcatcaggagtatcaatcacgctgagctcaccatagtctaatagaaaacaaccgaaaccaaatatttcaggcacggcatataacaatttaacggggtctctattttaccctcctacaagcctcagagtacttcgagtctcccttcaccatttccgagggcttctacggctcaacatttttggtagccacgggctcccagggactccacgtcatatatgggctcaacttccctcactatcggctccatcggccacctaatattccactttacatccaaacatcacttgggcttcgaagccgccgccggatacgggcttttggtagatgtggttggacttccggtatggttgcaaaaaaaaaaacaaaaggggggcccccctagagt

SEQ ID NO: 577265 - DNA, 183 bp, Homo sapiens
accgctctagcgcgcgtaggcttatgcctactcgtaatgctgataggcacgcccataggacgtctgctcattcaacgtacaaccagagtgcctatcacgggcgagatgctaatcggcgttcattgcagtgtccaacgcacctggacgtgctctattggcttgactcctattctgctgctcact

SEQ ID NO: 577266 - DNA, 363 bp, Homo sapiens
agggttgtaccccacaaaacgaagaaggaagcaggaacacaaagcccaggcaggtttggcggcaagttcttgctctgcccccatctacagcgtgggggattgccaggcgaggcaggcaccccttcaccaagcccagggctcatttgataggggttcagacctgcagaggctctccaggggcctgaagaagttcttgccaggtctccacccaaccctcgctttgcctaaaaaggaccccacttgtcgccggccttggctctgccttgcacttggaaattgggctcttgccagtttctgccatggtttaagttttggtttaggacctttgtcctggaaaattgtcgggagtcgccctttgtcgtc

SEQ ID NO: 577267 - DNA, 1192 bp, Homo sapiens
  misc_feature (984)..(984): n is a, c, g, or t
  misc_feature (1151)..(1151): n is a, c, g, or t
ccaacattgggcggggctggcgcgtgccggtggaagcgtgatgaaggcctacgagtgcggcgcggcctgaaggggcacgcgggggacctgcaaatgctagtgaggtggcggggcaggcggcgcggtgggggctgggcctgagccctggaggccacgatgagctggacacatgcacccactgcgctggtggccaatgcatggtgtgcctatgaactggtaatgtgccctgcaaatgaggctggtgacagacttgcgtgctaagtgaacttcctcgaagttacgtgaacctggagtccctcctccgtttccagtgctgttgtgctgaagtgcctgcaacctggccttctccaggggctgtgcttcagttgaagctccaagggagagctgacgaacatggacatattcaaggccctgagaagccaagttacttcagtgacctagtgaacttccgtccaaccattcgatatgcttttgctcgtcagggtggccatgtagcgtttccatgtgcaagtgtgctatcatgcgctccatctgtggggccccacaactgtgacaagcccccgtgcccgtcctggggttgacaagcggtctggatcgtctggccgccagacacaggtgtgtgagctttaccaggtcaaggttcgcgtggtgagacgacgcctattgagtgcgtcgcggcatacgtgtgaggcgaccctagagttcttgcacccgttgcacgcttggagctacttggctctgtgacgcgctgttcatcttgctcgaaggttgaccacatacgcgttcaggtgttcgtggcttgtgacggccatggctaggcttcgtgtagcgaccgctcgcgcaggcggggccgcacttatcgtttcgcaattcaccgaagaaccatatgtgcactagtcactagtcgttgacaagctgcgacagttattccaactcgacagacacctattggggtggaccctaaagctatcatggaaggatgtnggcgattccgtcaggatcgcacacgagttgcgttatggaccagccaagcgcagtcgcaagggcacgggacagcgtgggcacagaaagcgtagggacgtccgcttagtaagctccagcgggagccatccttcaacactggccctagtcggcagtagcatctgtgcgcnaccacatctcgcgcggacgcgtccagtggtttcgccattgc

SEQ ID NO: 577268 - DNA, 261 bp, Homo sapiens
  misc_feature (8)..(8): n is a, c, g, or t
tgctcggnacccctttagttgcacccatatttgggcattcccgtcaatttgtaaaactgaatatgggttatccaatctactttaattcacaacgtagtgtgaatgagctaggtattcaatatcacgatattcgtgaaagtgtatgtgaacatttccagcaattgcttgatgatgggattgtgaaaaaatatatttaacaataaaaagcctattcaaccacatcggtttgaataggcttttttcttatactttcaagtatta

SEQ ID NO: 577269 - DNA, 164 bp, Homo sapiens
ctgtccgtgggacgaccaaaactgacttggaactggacaaacgacgacaaacttacttttctgaacgacctggacttaaacttgacgccacctgtacttgttgttggactacgctgacgactactactttacttacaccttacccactatactcgacatgtcac

SEQ ID NO: 577270 - DNA, 409 bp, Homo sapiens
tctagaggatctcgaacagcttaatagtggtataggccttatatttaacttttgtttattttttgtttgagaacaaagccacactcggtctccttggctggagtgtggtggcacagtctcagctcacgtgcaaccatctgcctcccagttcaagcaattcttctgcctcagcctcccaagtagctgggattacaggcacccgccaccacgcccagctaattttggtatttttgtagagatggggttcacgatgttggccaggctggtctcaaacttctgacctcaagtgatctgcccaccttggcctcccaaaggtgctgggattacaggtgtgtaagccacgtgcgcccggtcctttttaacctttacaacattgtttttagaatttccaccttaaaggtatcaaaat

SEQ ID NO: 577271 - DNA, 252 bp, Homo sapiens
ggtcgactctcgatctcctgacctcatgatccaccagcctcggcctcccaaagtgctgggattacaggcgtgacactagtgcctggcctaaacattgtcttcttttccccggtcccccagcccttggaaacctctattctattttctgtctctatgaatttgcctattctgggtaccttttctttttcctttggtgtctggcttattttacttggtataatgttttcaaggtcccttcatattgtagcctgt

SEQ ID NO: 577272 - DNA, 124 bp, Homo sapiens
ttatctgtccacaacccaatgcatttgtacataatcttcttcatagtaatatccatcataatcggaggcttaggacactgactcagtcccctaataatcggatgcccccgcatatggcgttacc

SEQ ID NO: 577273 - DNA, 798 bp, Homo sapiens
  misc_feature (28)..(30): n is a, c, g, or t
  misc_feature (208)..(208): n is a, c, g, or t
acgcacgccccgagacaatggactggannnaagaggaatgtgtgaatgttgtctgacagatgaagtgaggagtccggctccttcacagggaagtgaaggcgcaggggctcccctgctacagaacatgtactgaatgcttcccgatgccaggccctttgctgagagtctcacatgcatcatcttcctggcagtcctggagacgggtggnactggtctctccattttacgtgtgaggaaatgggttcagtgacaacaccaggccaccctagtaagtggtgcctccagaacttgaactgaagttcaagttgtctgactccagcacttgtgctcttaagctctgtgcagtagggatggaggaagtcctccctggggaagtgaggcagctcctcagctgctctgtggctctgttaggggacccgagccgtctggcagatgaatgcagatttaagccctcaacttcccccgttcacttgccaagtgtaagcgggcggtacctctcacatgcacagttcaccgtatctgtgctcacctactatgggtcaggcttgctgttatgtgctgttaacacaaaggaaacccattgtccagcctttgagaattttgtaatgtggttgttttcatctgcaacagtgcctttaatttctcttgctttctctctcacaacctcagtcccccaagttctccagccccttgccactacactagtcttatgaacattggggccatggaagcagaagtgtgattcgtcattgaatcttgtttagaacctattcattgcttgaattccttcacggggca

SEQ ID NO: 577274 - DNA, 386 bp, Homo sapiens
cttcggcaacttcgcggcccgcgacggcagcctgtggaggtaccgcgccggcctggccgcctcactcgcgggcccgcactccatggtgggccgggccgtggtcttccacgctggcgaggacgacctgcgccgcggaggcaaccaggccagcgtggataacgggaacgcggtccggcggctggcctgctgcgtggcgggcgagtgcgggcccgggctctgggagcaccaggcgcgggagcactaaaagcgcaagaagcggtggcgcgagagcgagtgcaaggccgcctgagcgcggcctgtacccggcggcggccagggacctgctaggcccctctctgccttagagcttctgctctgctccaacagacaccttacactctgaggtc

SEQ ID NO: 577275 - DNA, 842 bp, Homo sapiens
gggaggcaaaatctgtcatcaaatggagtattattggggcgacttcaattggccacgggacaagtttctaaaggaacagataaaactgatgaaggctggtacctttgagataatgataaaattcaacaggttgaaccgtctaacaacagatttaatgtaatggtggaagcattgagcaaatccaggcagaactcatggaaatcagtgaagataaaattaaaatcagaaggtctccaagcaaacccctacctgaagttgactgatgagtataaaattgatgtaaaaaacagatctgtttatattaaaggcttcccaattgatgcaatcttgatgacataaaagaatggttagaagataaaggtcacagtactaaatattcagatgagaagaacatggcataaagcatttaagggatcaatttggtgggtgtggatagcatgtgaatctgctaagaaattgtgtagagacccctggcagaagtacaaagaaacagacctgtaaatactttcaaggaccgattacttgtgcaaaaaaaatgagaaagaaaacacaataaggtggaagctaaataaggagctaaacaggagcaagaagcaaaaccaaagttagaagaagatgctgaaatgaatctctagagaaaagatgcgtgcgtgcgcactccgggggtagatgacagactggagaagtttcacatacttctccaacccgggcccaacgggcagcccgcagagggccaaggggaccctttagaaagccgacctggaacccagctactggccccaccgccacagcccgcgcccaacgcgcgcccgcgaacaccccaccacagcgcgccccgggag

SEQ ID NO: 577276 - DNA, 222 bp, Homo sapiens
cacgagggctcagaccccatgtgacataactggggccagtgcactgccatgaagaactacgagattaacctgtatattaacttgtcttctatagaaaatatttcatgttccattcttctgcaatggttaattcacacagaagaccaatgtttatcactcacagaggattttaccgcttaacagccatcttgccccaattatgaatttgttctcagttctcag

SEQ ID NO: 577277 - DNA, 245 bp, Homo sapiens
gaccaagtagaggagtattatatgtggcaggataagggatcggtgtacttgctatatggacaaaatgttaggaagtggaagaaagctggaggcttcgtctggcagctgcgagccgtcacaggagaataggaaggaaggcagtgagtgtgcaaaggagcatggcttattttgaggtcctgaaggccagtgagtgtgcaaaggagcatggcttattttgaggtcctgctgattgcaggccaacaaaa

SEQ ID NO: 577278 - DNA, 365 bp, Homo sapiens
cagatcacacttgctgcacccgagccacaccaggctcttgctactgcccttcctcctacactgctttaagtcttcgtcaaaacttaaaccttcagagtgagacccttcctggccatcctggctacaattccaatcctcctcatccttggaccaaatcaccatcccccaggagccacgcacttcgctgctaatgctggtctcatgtctagaacgttagctaccccagggcaatggttttcatctatgttgttacttctctagtcctagtgtctagaacaatgcctaacacatatctgacagtcagtaacaaacagtgtattgaattaatgactatcagaacagaaactgtattacacatggtccag

SEQ ID NO: 577279 - DNA, 292 bp, Homo sapiens
ccggtacctacaccatagaatgtgtataatctgtattttttaagtagtaaaattaaaatatttttaaaagataaaaaacaggctgggtgtggtggctcatgcctgtaatcccagcactttaggaggccaagccaggtgaatcacttgaggtcaggagtttgagaccagcctgggcaacatggtgaaaccccgtctgtactaaaaaacaacaaattagccgggggtggtggcgggcacctgtagtcccagctactcgggaagctgaggcaggagaatggcataaacctgggag

SEQ ID NO: 577280 - DNA, 271 bp, Homo sapiens
  misc_feature (102)..(102): n is a, c, g, or t
  misc_feature (104)..(104): n is a, c, g, or t
  misc_feature (151)..(151): n is a, c, g, or t
  misc_feature (157)..(157): n is a, c, g, or t
  misc_feature (188)..(188): n is a, c, g, or t
  misc_feature (217)..(217): n is a, c, g, or t
  misc_feature (255)..(255): n is a, c, g, or t
tggcaggagcgcggtgcagcgccagctgcagggctacagtgtggagtaccagctgctgaacggcggtgactgcatcggctcaacatccccaaccctgcccangnctcgttggtggtggaagacctcctgcccaaccactcctacgtgttcngcgtgnggcccaagagccaggaaggctgggggccgangatcgtgagggtgtcatcaccatttgaantcccaaggtgcacccgcaagatcccacttgtgtccccntgccaaggctccgcct

SEQ ID NO: 577281 - DNA, 534 bp, Homo sapiens
gatctagaggaccccgcggggattgggtgctgaaacaaagagagcccagttagaagtgcccctgcacgagctgtgtgtgctcgatggtaccagataacgtaggatagggagagtgagcgatgattgatgcaaaaataaaactccagatgagagctggcaaagagcttagccatcttctagaccacgcttctagccagaacaccccctatactgacgaggccttggtgaatatccagagagggtgcatggcccatcctatccacacggagcactcacgccccaccattgtccaccagtgaacagctcagatccctaagaaagagctttctgttgagtaatatctggtactcacaatgcgggcttgaattctttaattccagatctaagatcctgcaaagcttgggaaacttctgagagctgctgcctggcacacctctggataggtgtgtaagcctccagaaatgacatgcagagattcaagacatccagaagacagggatggacacgcaaatcttgactgcacaaaatcccggg

SEQ ID NO: 577282 - DNA, 264 bp, Homo sapiens
  misc_feature (254)..(254): n is a, c, g, or t
aagctgtcctaccacatgtgtaaagaggaaggaatcttacagattacacatgctgtcgtggacgatctccgtgtccagttcattcttttttctggagacggagtctcgctctgtcgcccagggtggaatgcagtggcacgatctcagctcactgcctcctctgtctcccgggttcaagcgattctactgcacgcagcctcctgagtagctgggattacaggcgcccgccaccacgcctgggcaacagagtgagnacctgtcttt

SEQ ID NO: 577283 - DNA, 300 bp, Homo sapiens
  misc_feature (165)..(165): n is a, c, g, or t
  misc_feature (170)..(170): n is a, c, g, or t
  misc_feature (202)..(202): n is a, c, g, or t
  misc_feature (211)..(211): n is a, c, g, or t
  misc_feature (235)..(235): n is a, c, g, or t
  misc_feature (257)..(257): n is a, c, g, or t
  misc_feature (262)..(262): n is a, c, g, or t
  misc_feature (289)..(289): n is a, c, g, or t
gtgggggaggttgttccccttaggaaatttttataaaccctctccagcctctcccaaaggaagggttggcagcaaagggaaatgatgccctttccccccttcctgtgagtgaaaaaaggaagcagccccagggaccaattttcccaattgacctcttttttcctntttcnccatgtgaggcagggagccctgagcccttcanctgcctgcncaacccctgacattgggtggtggngactcaatttgccaaatggggngcagntggttttttcccaattacagcaagacngtcagcctcca

SEQ ID NO: 577284 - DNA, 185 bp, Homo sapiens
ggagccttaacctcgggagccttaacctcgggagccttaacctcggagccttaaacctacggcagaggacatggcaggcccaggagtatgagtttcttctcagtgccatgtgaagccactgaaagagtttaactgagaacaagggacataagtcaggctcctattttacggagggtgggcttctg

SEQ ID NO: 577285 - DNA, 450 bp, Homo sapiens
  misc_feature (98)..(98): n is a, c, g, or t
  misc_feature (397)..(397): n is a, c, g, or t
  misc_feature (415)..(415): n is a, c, g, or t
  misc_feature (428)..(428): n is a, c, g, or t
  misc_feature (441)..(441): n is a, c, g, or t
gatgaggttctcactgttgtccaggctggtctcaaactccttggctgaagtgatcctgtcgtctcggcttccgcaagtgctgggattacaggcgtganagccaccatgcctggcttccattgtctttgtgtgtgtgtgtgtgtgatggggttttgctcttgttgcccaggctggagtgcaatagcgcaatctcagctcactgcaacctctgcctccagagttcaagcaattctccttcctcagcctcccaagtagctgggactacaggcacccaccacctccattgtctttttacttgcccaagttaaaatcctgtggactgtgtactgggatctgggcctggcggttgttcatatttattggatcttgagtccagggcagtgtttttaaagtgatntgagttagtagtggaaanttgaaaagggtantttaacaaccaantacaggttt

SEQ ID NO: 577286 - DNA, 215 bp, Homo sapiens
agataggccattagagagtgggtgactacaaaatcactctcaagctcatggataaccagaataaaaaccaagtgaccaccttagaggtcagcgtgtgtgactgtgcaggggccgccggcgtctgtaggaaggcacagcctgtcgaagcaggattgcaacttcctgccattctggggcttctctggaggactacttgcttagctaattctgatgct

SEQ ID NO: 577287 - DNA, 1003 bp, Homo sapiens
  misc_feature (1003)..(1003): n is a, c, g, or t
gccccgagagcacagagcctcgccatttgccgatccgcacgaccgtccacacccgccgaccagctacaccatggatgatgatatcgccgcgactcgatcagtcgacaacgagatccggcatgtgcaaggccggcgttacgcgggacgacgatgcctccccgggccagtcttcccctccatcgtggggcgccccaggcaccaggacgtgatggtgggcatgggtcagaaggattcctatgtgggacgagaggaccaaagcaagagaggcatcctcaccctgaagtaccccatcgagcacggcatcgtcaccaactgggacgacatggagaaaatctggcaccacaccttctacaatgagctgcgatgtggactcccgaggagcaccccgagctgactgaaccgaggacccccctgaaccccaaggacaaccgcgagaagatgacccagatacatgttatgagaccttcaagactcccagacatgtaacagtagctatccaggctgagctatccctgtacgcctctggacggaccacatggcatcgtagataggactccggtagacgagggtcacccaaaatagtgacccaatctaacgacgggtattgacatacccgcacatgcaatcctagcgtctaggaacctgactggaccgagacctgacttgactacctcattgaagatactacaccgaggcgcgggtacagattccaccacccagggccgagccgggcaactcgtggcgtgaacatttaagggagaagcctgtgactacgatgcccatggacttcgacgacacagaaatggcaagaggatgcttccagatccatacctgaaaagaggcatagaagcttgccatgacggccagggcacacaaccaatgacaatgagcggaatccagatgccgggaggacacttcccagactatacatacaggagcatggagatcactgtgacatcaacgaagctaccttcaatccatcttgcagtgtagccgtgcacan

SEQ ID NO: 577288 - DNA, 230 bp, Homo sapiens
ctcgtgccgctcaggccgcggcccagaccaactccaacgcggcaggcaaacagctgcgcaaggagtccagaagaccgcaggacccctttgccccccaagcgttggggttggttacaaggaaaggggggaggaagccgcccttggcgttttaggaaagagggattagaacggggttggaggaggccctcttcaccaccttaagggtggggggaaattatttattagaggcc

SEQ ID NO: 577289 - DNA, 246 bp, Homo sapiens
gatggatctggtgaagaatcatctgatgtatgctgtgagagaggaggtggagattcctgaaggagcagattccgagaatctggttggagaaggacctcccagcttagagcgttaagaacacccttgtttgaggacccttggcaagcccagagcaagcttggagaggttccagtccgtgtctgagcccgtgaggagccagcttcccgattccacacacgtgcccgaggcccctggtggtctctgcgg

SEQ ID NO: 577290 - DNA, 353 bp, Homo sapiens
acgatgcctgcagctggactctctcctgtctctaggcaggatgagacgaacaggtcttggaggagctgggttttcttggtgctctagcctgtctccacctggacagcagaccactggttcgagattactcgcaggttgtctgggcactgtggaatctgcagagcgcggtgcatgtcaagtgcgccagggatgaaccctcctatctcatctacacacccgcagtgcccaagtcccagcgtgtgactgcacagtgctcccaacttccaaccgccatccaactgtggcatagtcaggggcccagacgccacagggcggctgctccagccgagtcgtccggggccccagcggcgtct

SEQ ID NO: 577291 - DNA, 786 bp, Homo sapiens
  misc_feature (241)..(241): n is a, c, g, or t
  misc_feature (276)..(276): n is a, c, g, or t
gagactgaggcaggggaattgcttgaaccagggaggtggaggttgcagtgagctgagatggcaccactgcactccagcttggggacagagcaagaatccatctcaaaaaaaaaaaaaagttgcttcctgcttgcctatcagagtaattcagtccaaaagtcattacgtggggctgagcaaggcaggcatctggggaaggtgggggcgagagaaaggctggcaaggtagtagcccagcaggngatactggagcccaaatgcagtgagggcctctggnggtagggacttgtgcacagcagcagcctagcaggggatgaggagggcatcctattagggtgaaggaaatggtggcacaggtttttggaatgggaacaaaaggtgagccttacccaggagggaggaaatggtgcagtgtaagttgcttgagcccaagaagggtaggttgggggaaagggggaagagaagaccatgcatgtgggatggtggcagtggcactctggcattaggtggcagagctcagagagtagagtgtgtgcgccgaatggtgacagcaagaggattttgattacatagtgagagaaggggtgatgattataaaaagtaaatttattaaggacaagtgggaaccagacttctcactgttcagcaagagtattaaacccatgtaaagaggggaaatgaaaataaaccctgtagtattggaattgaatgttaggtagcagattatatggagattaatataaaagtcatacacacatacaacaactaaatccgtatgtatatacac

SEQ ID NO: 577292 - DNA, 936 bp, Homo sapiens
ccaccgtgattctgaggcctccccagccatgtggaactgtaagtccaattaaacctctttttctttccagtctcgggtatgtctttatcagcagcgtgaaaacggactaatatactaaataggtagcagtagagtggagcactgctgaaaagacacccgaaaatgtggaagcgactttggaagtgggtaacaggcagagggttggaacagtttggagggctcagaagaagacaggaaaatgtgggaaagttggaacttcctagaaccttattgaatggctttgccaaaatgctgataacaatatgaacagtaaggtccaggctgaggtggtctcagatggagatgaggaacttgctgggaactggagcaaaggtgactcttgttatgcttgaggcaaaagagactggtgacatttgcccccgcgcccagagattgtggaatttgaacgttgacagtcatgatttagggtatctggtggaagagatttctaagcagaaaggagcgcaagaggtgacttggatactataaaaggcattcagtttataagggaaaagataaaagttcagaaaatggcaggccgatgatgcagtcgagaagaaaaaccatttttgaggaaaattcacgccagtgcgaaaattgcagaagtagcagaagctaatgtaatcccagaacatagggaaatatctgcggcagtcagagaccttcaagaggcccccccatcacagcagacgccagagaacaaggtcacgggcaggcgggccatgcgggtgacagaactgggctgatcacgccccgctgtgaaggcaggaaacggggggctcagtgaccagcggcaacaggacccagcgaaagaaatggggaccccacaggacgacggcagatgacaccacaactgcgagctgacccgcgacaacacagggtacgcgactggcgacc

SEQ ID NO: 577293 - DNA, 416 bp, Homo sapiens
agagttgagagacatactttttccacccagaatccttgaagagtgaatgaatataccacatggaccgcattagcccagcacatgagcaggtgtactatattccttaggtcaacagcaagttcaaatgtaagtcttcaccacaaaggccatggaatgagccctttgtacggacaaagatgatgagagtctaattaagtcaagcactcgctgctgggcaatggacctgtggcgacagatcccactgtcaacacagtacgtgataccctgttaaccctggtttgtgagagctccccttcaccaataaccatggcccttactgaaggatctggagccctcataaaggaatccattctggtataagaaggatctgcatatagtgaccctcagtctatagtgaacagtgatttgtgtcgccc

SEQ ID NO: 577294 - DNA, 483 bp, Homo sapiens
ggccgggcgcggtggctcacgcctgtaatcccagctctcagggaggctaagaggcgggaggatagcttgagcccaggagttcgagacctgcctgggcaatatagcgagaccccgttctccagaaaaaggaaaaaaaaaaaaacaaaggacaaaaaaaaaaaaaaaaaaaaaaaaaaacttgtgtgggggcgcgcgccggggcccgggaaaaggttttaaaacccttcgcggtgggggcgcgcgggggccccctgttgggtgcagtggaacctggggccaaaagcggtggtcccagagggagaacccggggccagagaacaagggggggggtttccccccatttaaaaaagccccgggggggagaaccccgagaggtgtgtctgggaacaaattcccagaggggaggtgtccgggagggccatacgggggatttttaacaaaggggggtgcccaagggagggcccagattccaattaacccagg

SEQ ID NO: 577295 - DNA, 176 bp, Homo sapiens
aggcattgttctggaactctggggaatggtgtaactcaacaatgtccccatcctatgaagggctacgcttttgccccaatgcccaatcaatgcggtcttggaatcttggctggtcggggacctcaacttgacttaccttcaatgaaagatccacaactgagcgtgctactcctttg

SEQ ID NO: 577296 - DNA, 542 bp, Homo sapiens
gggggtcaggtacattggcgggtgctgtggatttgagccctaccacatcagggcaatgcagaggagctggccccaggaaaggggctttattgccaccagcttcagaaaaacatggcagcgtggggaagatggtttggacatgcgcaccaaaccctgggttagagcaagggccaggaaggaatactgggcagtaatcttcggatagcctcatgccggacgatacaaaaccttcaatgtcgaaagccagatggctggtgagtgaccaaaggaacagccgagctgatgcaggagaaagaagccacaagtgagacagctgctgatagagctcttggataaaacaaaaattcaagctcacagtatgcctctgatagaaggtatttatgatgaattgcataggtgttcggggtcacagttcctaacaaattactggatgaagggggttaaaatatgcagtgtcttacagtgaagtgccgatcgtacactagtatgattgctagttaccttgagactaaaattagaattataaattagggacgttgata

SEQ ID NO: 577297 - DNA, 899 bp, Homo sapiens
cccccaccggggcccaagaatgccccccacaccgggggcggcggtcccccgaggcccccgctgcatgtaccactccttccggggcaaccactcggccgtggcccaacaaattctcggggagaaatgcgcccccggaaagccgccggaaccgcccactgatgtgcctcgtcccatgataacaaggtatcaaaacaggtcgtgtcacaccaccgaagtggctctctaacacgcaccacgcatcgcggcgcacaaagcgaaggcccacacacacgatgcctctctccttcagagaacacaattgggggacacccacgtttttcgtcgcacatatcacccaaacaataacttgtcccaacttttgacccaccaacctgggtcctccccccacttagactccccctcatcgaaaaagaagtgcagtgccgacacactagccaattgcttgtcccacccacaaacactgtctggtctcagtgtgacacccaccactctgagcgtgccgccaaccaacagaccacttttttgtgtctctgccagtccatggccagagcccccccacttcttttccgctcttttgctccctcactgtccccgcgcgtcttttccccgcagagtggcgggtctacactgcgcccatgttagttttcccccccacgaagatgatatctcaagtatgctggctcgttcccacccccccgcgtggtgccgctctcctctcccctcactgggtagagagcaccactaagtacccttttgttcccccccccaacacgcgctggtgaccccacattccctcgctattccggtgggtgtcccccctactaccagaaggaagacttaaagagtgcgttgttcaccaccccccaccttctttttatgaacagacccacaaagacaaa

SEQ ID NO: 577298 - DNA, 143 bp, Homo sapiens
cgactgcaatctgtgctcccaagatagttggaacttcagtgcacaccaccatgctcagctaattcttgtattttttgtagagatggggtttcgccatgttgcccaggctgatctccaactcctgcgctcaggtgactctcctg

SEQ ID NO: 577299 - DNA, 101 bp, Homo sapiens
gaaggcctgtgggccgttgaggtagaggggaaggaaatctcctctttggtacccaactacttagtgtcgtatagtcggctgcgcaagtacaaacactaccg

SEQ ID NO: 577300 - DNA, 495 bp, Homo sapiens
  misc_feature (1)..(1): n is a, c, g, or t
  misc_feature (12)..(12): n is a, c, g, or t
ntctagaggatncccacagaaggcctaagcacaagagctaaaactgtaaaactcttagcaggaaacaggggaaaaacttcgaggcactggatttggcaattatttattggatatgacctcaagtgcacagaaaacaacaataacaagataaagaagttggacttcatcaaaattaaaaacttttgtgtatcaaaggagactatcaacagagtagaaaggcaacaccacagaatgggataaaatatttccaaatcctatatccactaagggcttaatatccagaataaagaattcctacaactcaataaaaacaaagaaacattaaaaatgggcaaagagcttgaataaacatttccccaaaaagatacacaaatgatcaataagctcatgaaaaaaaagctcaacatcactaacccttaagaaaatgaaaatcaaaaggacagtaagataccacttcacacccataagaatggctatgattaaaaagaagacaaa

SEQ ID NO: 577301 - DNA, 81 bp, Homo sapiens
aaatcttgcaaaactgaaactctgttcattaaacaataactctctattcttccccttctgtcgtcttctaacagccgtata

SEQ ID NO: 577302 - DNA, 320 bp, Homo sapiens
aagggggagcagtatgctttacacagcgtatggttcatttcatccagaaacattctcacagacacacagaataacatttaaacagatatctgtgcaccccatggaccagtcaagttaacacataaaattaacagttacaacaatcttggagccagtcattcagcccaccacatcattctctcatggccctctgtttcttttcttgtagtatttataatttgatatttgagttgtatgcctactggactgtcagcctggatgacaagcaagaccttgtctctacctaaataatcaacccagtactttcttacccttaggca

SEQ ID NO: 577303 - DNA, 779 bp, Homo sapiens
ctattgtccccttagcgcctattttatggtgccgcctatttgcacacggcgttgtggcccacagaagcacaggggccttggtttacccgcgtcccggaatttccccgggattatctggctgggcccaccgcggttctcccgaagcaagttgtgttctctggccggtcccccttatggcccggctgggccgtccccagtgcatgccttccatcatccttgaggacccttctcgggccccggggcgagcgctcccctgttggtcccgccttcttcgaaggtgtcaaattcccccgaggccccttctcatatgcgacgccgcgatatgttctctaaagacgatccctgaggtctaccccccttggcccaggagattgttttgcccagacacccaggtcgcacgcgagacccacgaccaccctgccgcatggttgtgaacgagagcgtgctattgagatcggtcctcaccggggccatagtggccaggctcttcttccctcggcgcactttgcccaagcccgcccgttggcaggtcgaccttctgggagacccgagttcttttattgtgatatcgacactttggccctgcggtggttgcgctggagaggattcccactcgtgcagacacgcgtccccgctcggtttttggtgcaaacaattctatcttttcctggcacaaccaactcctcggtaaagatctttttccaatagaacccccgtccttgttaaacagaatcatggtccaaaatcattatttgttttcacggaaaggaaaaaattca

SEQ ID NO: 577304 - DNA, 900 bp, Homo sapiens
  misc_feature (316)..(316): n is a, c, g, or t
  misc_feature (497)..(497): n is a, c, g, or t
  misc_feature (502)..(502): n is a, c, g, or t
  misc_feature (505)..(506): n is a, c, g, or t
  misc_feature (512)..(513): n is a, c, g, or t
  misc_feature (521)..(521): n is a, c, g, or t
  misc_feature (523)..(524): n is a, c, g, or t
  misc_feature (526)..(526): n is a, c, g, or t
  misc_feature (528)..(528): n is a, c, g, or t
  misc_feature (541)..(541): n is a, c, g, or t
  misc_feature (558)..(558): n is a, c, g, or t
  misc_feature (568)..(568): n is a, c, g, or t
actgctgcggtggcaggcgtgctggacggcagtggagagccgccaggctctatcacggggctggtgtactccagcaacttccagaacgtgaagcagctgtacgcgctggtgtgcgaaacgcagcgctactccgacgtgactggatgccagtgatctccagctgccgtgcctcctcagtgctgaagaagctgacagacgcacctggccaaggtgtattggtgcggggcggggaagtgaaccccgactggtcagtggctttgtcatctggtttcagccccgatgctgtgcactgtggggactggagcaagtcgctcanctgaaatgagtatgagcagaccttccctgggttacgaattgagatgggatgaaaatgctttaacttcgagtgttttgaaggattaaataaccgaagtacaaagtagtagtagcggagacagtaaggaagtcgggcgtggcggcgcgcacctgtggtcccagctactcggaaggctgaggcnggagnatnncttgannccaggagncnnangntgcagtgagctgngattgcgcactgcactncagcctgggngaccagatctacgaacccccatttctaaacacaaaacacaaaaacccaacaccagaccgcaggaaacagggtacatgtggcaagaagctgggctgccagcgcgtctactgcgtgcaccatctgctggaaacacggcgctaaggctgggaaccgaagcacgccaagggatccgcctacatgatagatgtagtcaacatccttgcatgtggaccctgacgatacgggatacccacacctcaactctgaaacccgacttcgtcagagtgcaactctttacgccatccaaaagagccgggagtcacatccgcataaggccacacgcctaacaacac

SEQ ID NO: 577305 - DNA, 2048 bp, Homo sapiens
  misc_feature (1)..(1): n is a, c, g, or t
  misc_feature (242)..(242): n is a, c, g, or t
  misc_feature (1806)..(1806): n is a, c, g, or t
ngggtgggctgtgtggtgttttgctcacttggtggtgtgcgctgttcggtgtttcgctcgtggggtgtttgctggttgcggcgcgtggtggcggctcgttgggttgttggtgacgcactggacgtagggggtcgcgggtggtggggttctgtgcgtggttgttgtggacggtactggtgtgcggcgtttgtgggtgggctatgctgttgtggtggttgggcccgctgtgtggtgttggggtnatactcgtgtgggtgtgtgggttgttggtagtctacatgggggcgtcgtcgggttccagactgggggtggtgtgcagtcccggtgtgggggttttggtcgttccgacgggtgtgttgtgtgtgcgtggggtgtgtggtctagcacttggtggtcgtgggggtccaccgtgtgtgtgtactcgtgcggaggtggggtgtggtgtgtggtcgctcagcacgtgtggtggtggagcgggggggggtgggtgtgtcgcggctgtgttgatgggtggggtgttggtgcgatcacacgggtgggagcgactgcttgctggcttgctgggttgtgtctggaatggcgatgagagggaggtgtgtgggggtggaggttgttgtggtggtgtcctgctggtggggggggctgtcggctcgtcatcttgtggtgtcgtttgtgtttggtgacgtcgtggtgtttggctcagccgacttgtggaggcgacggtctgggtgggggctggtgaggtggtgttggtgtggggttcgccggcggtggttgtggttagtgttggtgttaggaccgtcgtgttgttgtatgtgtggtgtgtggtgctgcccctccttcggcggtctagtgtgttggtggtggtggtgcgtcgcgggcggtggggtgggtgttttatgctggtttgattgctgcggcagcctcgttgtgccggcggcggggggtggtcttcttgggtggtggaggtgtagagtgagcagtggttgtgggtggtaggagaccacgccgctgttttggtggtggggggcgcgtggttgtgttgtcttcgtcttctccaccgctgtggggtaggtgcgccacttcgtgctctctcgggggggtgagtgagtggctgctctacgacggcgccgtcaggtagatgcatgcggcgcgtcagtcagtgttgtttgtgtgcgtcgcggcagcttcgtaggtgaggggtgtgggtgttgtatgtttggtgtggttcctccttctcttctggttggtaggggatggagagtgggttgcggcagcacgcgtcgactgctcatcgcatctccgtctcgtggtgcctcctcgtagagtgacgtcggcgcggcgcctggtgtgatgatgagtggcatcacgttgttgttgtgtgggtggtgtgtgttcgccctcgctcgttgtgtgtggtgggtgggggccaccacgctgtggtggtgtgtgggcgcgacgtgaggggtgtgtgtgtgggaggtgccccgctcacgcgggacgagagaggggcgctctgtcactctctcaacagtggtgtcacagtcgggggcggcccacacgtgtgtgttgtctctctgatgatgaagagagtctgtctgagagagagagtgtatgtgtgtgttgtgtttcgtgtttcacacctctctgtgtcacactctgagagagagtggtggggacacagaggatatataagagtggtgggcgatgtgtgggagagcgtctggagatatctgaggagatgtgggtgtgtggagaggtcacacacaggcgccacactctctgcgggctgtgttcaccctgctnttagggggacgcacacacacacaggggacccctcttgcacagaagatcctctgcactctgtacacagagagccacaagtctgtggggagagaacacgcagaggggctcccttccacccgcgtgtacacctctctatcttctcccatataagtttggttataaaaaccccttttgttaacacttttctcagaacaatttaaaattatataatattttctcctaacaccaagaaataaataaat

SEQ ID NO: 577306 - DNA, 776 bp, Homo sapiens
ctcagccagcacggaggcggcgtgaagcaaagcttatagaaacctccaggatactgctgtcatggcagagaagcccaagctgactacttcttgcacggggcagaatggagtccacccggtggctcctggctgtagctggagtatagtttgaagagaaatttataaaatctgcagacgagccggtcaagttaacaaatgatggatatttgatgttccagcacgtgccaatggttgaaattgatgggatgaagctggtgcataccagagacattctcaactacatcgccaggagatacaacctctatgggaaagacataaaggacagagccttgcttgatctgtctatagaatgtatagcacatttgggtgaaatgatcctccttctgcccgtatgtgcacctgacgaaaaagatgccaagcttgccttgatcaaagagaaaataaaaaatcgctacttgcctgcctctgaaaaagcctcaaagagccatggacaagactaccttgttggcaacaagatgagcctggctgacattatctggtggaacttctatactacgtcgaggagctttgctccagaagtatctccagctgtcctcatgctgagggcctgaaaaccagagaaagctcctgtccacagtgtataaagttctacaaaccggctggccaaggaaggcttccttgatgagaaaactttataggagccaggaggatttcacggttaataacgcaggcttggaggcaagaattccatagcaaggactgaaggtttcacaata

SEQ ID NO: 577307 - DNA, 564 bp, Homo sapiens
  misc_feature (3)..(3): n is a, c, g, or t
  misc_feature (65)..(65): n is a, c, g, or t
  misc_feature (72)..(72): n is a, c, g, or t
  misc_feature (110)..(111): n is a, c, g, or t
  misc_feature (221)..(221): n is a, c, g, or t
  misc_feature (262)..(262): n is a, c, g, or t
  misc_feature (303)..(303): n is a, c, g, or t
  misc_feature (346)..(346): n is a, c, g, or t
  misc_feature (355)..(355): n is a, c, g, or t
  misc_feature (364)..(364): n is a, c, g, or t
  misc_feature (369)..(369): n is a, c, g, or t
  misc_feature (471)..(471): n is a, c, g, or t
  misc_feature (497)..(497): n is a, c, g, or t
  misc_feature (518)..(518): n is a, c, g, or t
cangctcattcagtgaaaacttgtggggtatagaaatggaatggagaatatcaaaaagctttgcngaaactntactttggactccagacttcactgtccttaggcattgnnaccatcacctggtttgcattcttcatgactggggttaacttaaaacaaaaatggtagggaagctttcctatgcttcgggtaagggacaaatttgcttttgtaggcttggnggctgagacaggcagacagggcctgattaaaggaggcattngtcaccactagccaccaagttaagttgtggcacccaaaggngacggccatggtaacgtagatcatcagctctgctaagtggttnggggggggnacatattcnttccngtctcccaatgggttcctgtggttaccgtgaatgaccactcctgctttttttttcctggggttgccgggggtaacatggcacttatactggtgggcagatgnccagatggacatcatcatccccaggntttgggaccaccgtgcttgcntcaataggtttttccctgttatgtgggccttcctgccatccattgg

SEQ ID NO: 577308 - DNA, 285 bp, Homo sapiens
tccggggccccggggcccaggttttttttttttaaaatggctttaaaccccccaaattaaagggggtttttttaaggttaggggccccccccccccccccccccaaaggggtggggttccggggttgaaggttaaccttttttttccttttatttttgaaccaaaaatttttttggggtttgaacccggcccctttgggaccaaacccgcccttttaatttggcccggccccattttgtttttgggtggccgggtttttaaaaaaaaaaaggtttttccccttta

SEQ ID NO: 577309 - DNA, 486 bp, Homo sapiens
  misc_feature (15)..(15): n is a, c, g, or t
  misc_feature (94)..(94): n is a, c, g, or t
  misc_feature (188)..(188): n is a, c, g, or t
  misc_feature (194)..(194): n is a, c, g, or t
  misc_feature (323)..(323): n is a, c, g, or t
  misc_feature (328)..(328): n is a, c, g, or t
  misc_feature (337)..(337): n is a, c, g, or t
  misc_feature (344)..(344): n is a, c, g, or t
  misc_feature (359)..(359): n is a, c, g, or t
  misc_feature (372)..(372): n is a, c, g, or t
  misc_feature (387)..(387): n is a, c, g, or t
  misc_feature (401)..(402): n is a, c, g, or t
gtgttcctgcagatntccccgctgatttttttagggcagcttgatgcgcagttgagtaacagcgaatcgctgtcagctcctgtgcatgttcagngctagtctctcgagaatggcaggtgagcccggcgcaactggctttgcccaccgaacggcttgaggggctgggtgcgccgctcaatacaatcggnccgacnggtaatctgtccttgagctggaatcatctgcactttagccgtgataaccgtatgctgctgtgccgccgggcaattacaattgcatcttgacggaaatcgcttcgcgcctgtcaccaatccggcccttangcagntactttatnaatttcnatcttcagtgagcantatgccagcttgnatctgatgaccgatnggccctatgatgcnnagcggcagcggtgacatcaccaatggacattttcagttttccggtaaagcctgggcacagcaagggcaggaagcaaaattggca

SEQ ID NO: 577310 - DNA, 342 bp, Homo sapiens
  misc_feature (26)..(26): n is a, c, g, or t
  misc_feature (35)..(35): n is a, c, g, or t
tttttcccaagccgcctttttccagntggccagantaaactccaaccccagaccagggcaggggacaggtttcaagtccttcccagcatacacacagggaacaaacacataccccaaaccggtaatgggacctgtcaccccccttgtttcctccttgggccctacagggtacacatttacctttggccccgggttttggaaaaattccgggttcctgacccaggtttagttttttccccccatttttatttcaaacattttcaaacatttaacttgtaaaatagactgggatattattacaaaaggtaattaaaaaaatgaattaaaaaattcctccagtca

SEQ ID NO: 577311 - DNA, 114 bp, Homo sapiens
acgctaagaccgaagtggcttctggaaaactgaggaagggtttaggtgcctttgaacgctcaatcttgactcagatcgaccatattctgatgcgacaaagagagattacttcga

SEQ ID NO: 577312 - DNA, 547 bp, Homo sapiens
  misc_feature (368)..(368): n is a, c, g, or t
  misc_feature (376)..(376): n is a, c, g, or t
  misc_feature (380)..(380): n is a, c, g, or t
  misc_feature (496)..(496): n is a, c, g, or t
  misc_feature (519)..(519): n is a, c, g, or t
  misc_feature (546)..(546): n is a, c, g, or t
ataatttttgacgatctgttgcaggtagttggcggcaatttgcgcactgttggagttacgcccgtcgaggatcaactgcaaaggcgcggtctggaaggtatccagtttgcgcgagaagtcagccgggaaacgcaccagtagtaacgccttttgtgtgtcgatggttgggcggatctcctgtgggcttttcagcagcagcacatgagtaaaggcgctggcgcgggcaaaacgttgggtcagctccaccgaatgctcgccgttatcttcatcgtagatggcgatggtggcgttagtcacttccagcgtggcggcgaacgggaacaggatcacctgaattagcacgggtaaatcagaatcgcgcgggtttncggttcgngcanaacgactgcaactctttgcggattaacgtccataagcgatgaaacatgctcttctccctaatccagccgacgtttggttttcagccacgtcaggccgataaacatcaccgccgagngatcaaaaacagcacgtttaccnccagcaccactggaatattcccggcgng

SEQ ID NO: 577313 - DNA, 624 bp, Homo sapiens
atacgagagttgctactgggattcccgtcgtacaccttaaagggacacagctttcacattgtccggagcccttgatgtcctggcgaaatgaaggatggaggatgtccttaagtgccttgcagtaggaacccacttatggtggacgaccaagtctctgagcgttgccacgatgggaacgagctcacagtactactataacacgtgcaacaacgatgatgcgcagtctagtatcactacagatctcaagaggacctgggagaagcttctgctggcagcctcgtgcagattgttgccattgaaaaccctggctgatgtcaggtgttatagtcctccaggagatactggccagagggctgtgctgaagttcgctgctgccactggagccactccatattgctggccgctgtcacgtccctggaactcttcagctaaccagcatccacggcagccttccgcggagccacggcgttctctgctgcgttcactgagccccagggctgaccaccagcctctcatcggaggcctcttactgttaagcctacgctaccattgcgctgtgtgacacgtgattctcctctgcgctatgtggacgttgccatcccatgcaacaacccgggagctcac

SEQ ID NO: 577314 - DNA, 845 bp, Homo sapiens
cgccttcggctgacttcgcttgaagtgtctgccgagtgtggaagcgagcctcttcttgcctggctttctcgatctcgcaccaaagccacaacagtactgtgccccccgtattgatcgtcccctactcgtcctcgctacttccgagaccttacaggacagagtctggagctccctcgcctctctgcactggccgcggaagtgaggtcactaggggcaggctcctcttggccagctgcatcgtgtgcttgcgtttctatcttgctgctttttgtcgtggttccctcctggccgtaactcgaacgtgctgtgctctggtctctcccatgtgggaagtaattccatccgatcgacctgcaagaggcgttgccttcgctagtcctggccctcctccttcccgatctccactggagacggtgtccttccaggtcgccaaatcatcttgttccagtaaagtgcatcctattttctgatatcagaagcacgaaatacaagagcctgacgtcctacccttccgggataatcactattactgtgtgttaggtgtacttgtctgccctctacagacattttgagtgttacttgatatacgataagtacaggtataatgtttgcagaacgtgacaacagccggattttcagagtaaagctgactttaggatgcagtctttcctactcctccacaggttaccgggttacacttaggtccaattacttgtatccactgttagcgctcgtgtaaactacagagaaaagacgcggccctccttgtcccctatcgttgaaggcaggcgaaattttccgtcattttgccctcattgtgccgtaatgttactttttcttcccgg

SEQ ID NO: 577315 - DNA, 149 bp, Homo sapiens
attttgaggagggaacggacactcgagacgcagacttcaatggaaccaaggccagcgaataagcaactttctacagtttagcaccacgggtggggagccaaaaaccaaaacaaacaaacaaaaaaaacccaacaacaacttagaacaaa

SEQ ID NO: 577316 - DNA, 435 bp, Homo sapiens
tttccatggaaaccttcgtgggtttcgcatgcaagcagggctccaccccgtgattcatatgcttaagatccccctctaagctggtagcatcactttgaatcacaaaggagccccataagcatcttgcccagagagtttgatccttcttgaccgggcccttctttcctgtccagtaggctatcccggaaatgggcttaaggtgttagggtccaggggtcctttgttttggagccacatggttccatggagagaagtcctcttcttcaatcattggtctccagaaatgtgcatgcagaccacctgttcccttcaagatccaaattaactttccagtcatgagtaaaaacgttagtattacaaagactgttaaacttctgtgctgctcctgtcaattgccaaaatttgtcccctgttgtaagttaaaatctagccatt

SEQ ID NO: 577317 - DNA, 195 bp, Homo sapiens
gtctttatacacctactccgaaggttcttcctctagtttctgtaggagtaggtcatactggcctgggacgaccatcgactgggagcagcgacgctcaggtttttcaaacctccgggaccacgggcgcgagcgatggtctttaggatggctattcgggtagcacatgagttttgagtgaacatattatttgtcaaa

SEQ ID NO: 577318 - DNA, 417 bp, Homo sapiens
ccgcttcgtgaactgcggctgagcccctggatcggttgccccaacttgaccgaaccttcatcagcaataacaccggcaagcgggtatgcctgacgatgctgggcaagctggatttagtggctggcatgaccctgacgccaaaggatgcgacggctttcgcgaaacgcttgaagccttggatcgctgaattgtataggggggaagatccagaggttggccgttgcctgccgctcgatgatttcttggcgtgggaggaaaacctatcttcgcgcgcccgcgattcgtattgaaacctgacgcgattgctaactgaacatgcatgaaatcgcggactccaggctccaaatcatagactgggcgtatctgtattgtggaaagcaacgcgtcaaggggagtaccaacactgggttacgtctg

SEQ ID NO: 577319 - DNA, 226 bp, Homo sapiens
ccctattggataagtagatatgctatggaacctcctaaaccaagggcggagtgtgggtcccttttcctaatgggtggaaaatacccgggtagtgatcagaaacttacgatgctatggaacttcctaaaactaggcctagtttaagaagttccattagcaccagcttccacaaattcattccagccacttttctatcattccccccagggtgtaagactaccatggg

SEQ ID NO: 577320 - DNA, 356 bp, Homo sapiens
agcaggtgagacaacactgaggacgtttggcagtagtgcgtcatggaggaggagtgttcctagtggcccccagtgcccaattcaggccctgtgcacaatgcctgagtccagccctccaggtgctcagagagaatagggccccgagatgcttgagggggaccctgtggtccagcgtggcacagccacaattctgaggaagctttggaggcctcaccccaagtgctgctggtaccgtgaccccgccttggaatgggtggggtcagccatggcaagggtgaggtgccagaggccagaccgaggctgataatgctacacaaaggagcccagacgggtggcagggcccaggacagctcaag

SEQ ID NO: 577321 - DNA, 803 bp, Homo sapiens
  misc_feature (9)..(9): n is a, c, g, or t
  misc_feature (47)..(47): n is a, c, g, or t
  misc_feature (135)..(135): n is a, c, g, or t
  misc_feature (162)..(162): n is a, c, g, or t
  misc_feature (167)..(167): n is a, c, g, or t
  misc_feature (170)..(170): n is a, c, g, or t
  misc_feature (179)..(179): n is a, c, g, or t
  misc_feature (192)..(192): n is a, c, g, or t
  misc_feature (194)..(194): n is a, c, g, or t
  misc_feature (409)..(409): n is a, c, g, or t
  misc_feature (443)..(443): n is a, c, g, or t
  misc_feature (452)..(453): n is a, c, g, or t
  misc_feature (456)..(456): n is a, c, g, or t
  misc_feature (479)..(479): n is a, c, g, or t
  misc_feature (586)..(586): n is a, c, g, or t
  misc_feature (588)..(588): n is a, c, g, or t
  misc_feature (591)..(591): n is a, c, g, or t
tgttcagtntccccgagacatgatatggattttgctggaaacgtganaaagagatcaataggagctaaggactaacacattagatgaagattcagaaggtagtgatgatgaacttggtaacctggagacgagganaaagaaaaagaggggtttgttttttcnccttnttntaaaggaangtatggatgatgnanatttgctgaagttgatgaagatggaggaacattcatggatgtgttagatgatgaaagtgagagcgttccagaacttgaagtccactccaaagtcagtactaagaaaagcaagagaaaaggtacagatgattttgactttgctggctcatttcaagggccaagaaaaaagaaaagaaacttaaatgattccagcctatttgtatctgctgaagagnttggccatctattggatgaaaatatgggatccangtttgatannatnggcatgaatgccatggctaacanagataatgcaagtctcaaacagcttagatgggaggctgaacgtgatgactggctacacaacagagatgcaaaaagtatcatcaagaaaaagaaacattttaaaaagnanagnattaaaaccactcaaaaaactaaaaaacaaaggaagatgaggttattatatgtaaatttatagagttaaaattactacattacatactaatttcttgctgttcaacccatgtttgtatgatctaagctctactgattaccatacattctcagacttttctagtggatttgtaataaactataaataaaaatagctctcatttataaagtcaa

SEQ ID NO: 577322 - DNA, 395 bp, Homo sapiens
agaaatgatatagaattgaagtagagtgtataaaaaatttgatataaggagggagagtggagtataggtatatgaatgttaaattagggaatgaaaaatatataaagtatagtttaaataaagttggttattaaaaatagggtgagaagatttgaattagaagtatagaagggtagaataaaggttggatatcttaaaaatttaagaagaagagaattattagtagaatagagaagggctgaaattttagtaacgattgaagactatgagcttgattgttagaaaaagagattatataagttgtggagtaggaatgaattatagggttcgttgccctcacgtttgtgttgtgccgcggagtagaagtatcaatactagtgggatattggctacag

SEQ ID NO: 577323 - DNA, 442 bp, Homo sapiens
acagcttcgaatacctgcaagtcgagtatgtgccagatgtcactgcagactagtccttatatgatagaaataaaataatttacatttaattttcatgtaaatgtgacagcagcagcaataacataggcattcagtaactattctttggagctaggccagatcctaaatatcctgaaagaaacatgacatgtcactatctactccttcaagacaaagataatccttatttccttctcttcacttcagtaagctggtctacaaggatggacttttatttatgcaacaatttcagtactgtccaacatatggggctttatatcctctcccggaaagtagaatctgatttggaaatctagtagtgtactgtcacgttgccacgctgttcaattaaggtacccttttcacattaataagacagggtacgaagttctctgaataccat

SEQ ID NO: 577324 - DNA, 418 bp, Homo sapiens
tgcagataagtcataatcatgtcattgcactcctgcctgggcatcagagaaagaccttgtagtcagaaaacaaacaaacaaacacgcaaacaaaagagacaagacaaaccacaaaaaaacatacagacacacagagacccccccacacacacgttggccctacaaaacaaaacactaaaaataatgttcaattagtaatactaggaatagcatagaagtactaaatactaccgtaaataggagtaatcaggttacaatattcaaaagttgccttattgattcagaaaagtgtaaaggtattaacttaccatgtagttacattaaatttgggttctataataatctaagttagccactaaacagatagaactaaaggtataacttacaaaccatcagaaatgagatagttgacagggga

SEQ ID NO: 577325 - DNA, 449 bp, Homo sapiens
ttgcgggccgcgtcgactttaaaacttggtataatgaataaaaatagtaaaagaaggtgacataaaaatgattttagataatgtgaacccaaatgatttatttccaacagaaaagaaaggacttagtgtattgggtacgatagagtattctgtacaaggttctacagaatttgaaggtgcgtttattgctacaaacgaacgcattattttaaatgtagatatgaatggggaattctattatagaagtataggttatgatgaagtagagaaaattacatacgaagacggtcgcattcatttcacatttaatattggaccaatgccgatgaaagatatacaaaaaggtgatgcagaagcgtttgtacaatttgtaaaggacaaaataaacattcaataagaagatagtgtttaagagaatttgcctttaccatgtttaggatggtcgacgc

SEQ ID NO: 577326 - DNA, 403 bp, Homo sapiens
tcagtgaggctaaatcttaacctaacgtcgttacgttgagtacttgcgcttgttacgtaaccttcatcagagtttgctgcacgatgtcggtatataggctgagcaagaggtggtgaggttgatcggggtttatcgattacagaacaggctcctctagagggatatgacgcaccgccaggtcctttgagatataaagctgtggctcatttcagtgctggcgagcagttaagtatgatttaactgttgaggttaagggctaagcatagtgtggtatctaatcccagtttgggtcttagctattgtgtgttcagatatgttcaagccacttacgtagtctattttgtgtcaactggagttttacacaactcaggtgagtattagctttattggggagggggtgatt

SEQ ID NO: 577327 - DNA, 154 bp, Homo sapiens
acctctgtaccgagttcaacatggcgtttgcagatgctcgacagcattgcactgggctgcttgtctctagtgttctgtgcaccagtagcttgtggccccagtatacactgtctcgagttccgcaacaaggtgcttactgggcctgagtgggcag

SEQ ID NO: 577328 - DNA, 1137 bp, Homo sapiens
tggtttttgggctgtaagttaattcaatgcaaaaaaatcctctccaatttatactgagggtggctgaccacgttccacgaaccaaattccgcctctaaacgtggaattcggtgtgctgacccagccccagcctcggctttctggttcggcaccagggtggcacagcacctccgtcgtgtaggtatctcgtgtcagcttctccccttcttggtgtgagttcctcgccaggttcgacctcacccttccagaacctttatagtgccgaggccgtgccagatctcgtggagcggctatacgaggcgatagggtgtggacaggacacaattctcggcgggggcagaagtgagaggtaatcacggagaatacgtggaataccctcagtgggataaggttaccagtatagaaagtgtcctccaggcaaacgtggttcctttcagcgttagccttcgggaccttgagaaggacgtgcagtggcctttcagtgacattgaaggtggggcacatttctgtgagtctgccagcctccggggtgctataggcattgtggacattccttcatgggccaccattgacatcccttcctttaaaaggggagtacaataaagggccaatccggttcttctaaggacatcaaaatctctgcggcctcaagaaatccattctagtccttaaaattgcctatacaggtgtagacgctccttggaccagaaccttgaagcatagctctgaaggttggcagagaacgcgctggaactttgggaccctgggctccaaaggctgaacccgagttatgggaccccccaaaatatctggagaagtcctggcaacaaggcatcaggctcgtgacactcccgagggcaacccacagagagctggtaagggcatagaacatgggcagatgcgggacctaggaagaacaggacaggagaacgagaccctaaaccggatgccataccgacgggaaatacagggggacagagctgcaaaacagggcgagaatatcaaaggaggagcaaggcaacaaaaggttggagaacatacatagacacggggtagaaaaaagaagaaaaaaacacaacaaaaacacaaaaaaggaacaaacacaacagaaacacaaaagaccccacggagtaagac

SEQ ID NO: 577329 - DNA, 546 bp, Homo sapiens
  misc_feature (351)..(351): n is a, c, g, or t
gcggataatcataaaagctgtctaccctacccacggttagaaacacctatacgggaagagatacaggcacacatgagagagacacagcttggagattgtgttcatgggccaacaaaatacttgtcagcatgttactctgagtacgtggaaattttttggacaatgaggttaatgtgagtcttctgacacgtgacaaactgttgtttgcgatcatcttataatcatatatgtcattttcatgcttttctgagtattcccagtttatagctgatgatagcttttaccaaaaactaatgaattgtaggaagtttatgtcgcatacataaagaaaggaaacaaacacttcttatngctcttggaagatgtatttaattcaaattttacaatttggattcagcatgaatagcaataaatggatcttcggcagagttactaatagaaaactgagctgtgccatcactggaaacatagactttaattcctgtacaactgtcaccaactttatctccgcgagggaaaagggaccgagctcgaatcggatcccgg

SEQ ID NO: 577330 - DNA, 311 bp, Homo sapiens
gcccccacccggccttttagttcaggtcccccatgggggacggcccagggtgggtgggggtgccaaagggtcccgagtgggggccgtgcctttgcccaaaccctgcacttttaaccaggccagtccggttttggggagcaggggcctccccggcaacagccccaggggccctttagggtttgaggtcccagccctgttgccaagtgcccttgtccccagctccctcctccccgggtggtgtgagtgggggggggtttgggccgagctttttttttattttgcaaatataaataaaggaaggcggttttcga

SEQ ID NO: 577331 - DNA, 327 bp, Homo sapiens
tgagcacaatcacatctttgaagcgccccggtcgctgtcttccagtagcagcacgacatcgtgaataacgtaattgcgcctcagaagttcctctcgtccaaagtggcccttgtcaggcactgatgtttgtgccctatgttacatgcggttgtatatctcctgcagacgggtcgctttctccagctgatatataacctcgtccacattgtgacagcagatcctttactaaccccagtgctgtggtcagggtctggcgctcctcctcgatcccgtgtgaattctgcatggattcgggctgattagtaaaggggtaaaattgtaaaattc

SEQ ID NO: 577332 - DNA, 276 bp, Homo sapiens
gcttcctcctttctgcttcgctctggtcgccggctatcctgtcattcgttcaccgacctatgattcagattgctgccttgagaagtcttgagatagtcgtccccagtgctcgtagcgattgagagcgggcgctctcgctccctgagtgctcctgacgggagtcgccgccgagagtgaggtccctcgggcctggactctctatcgtctgcctctaaagcagctgggcctccctgcctcgagctcgagtcagctgctcggggcggtgacagttgagcc

SEQ ID NO: 577333 - DNA, 103 bp, Homo sapiens
ggtcggtacctcagatcggctaacggcagagggagtgagcagggagaaatagcagaggggcttggagggtcacatagtattgtggtgtgttgaattcaatacg

SEQ ID NO: 577334 - DNA, 198 bp, Homo sapiens
gccttaatcctaagggatctgcttatattacacaactcgatatcaaatgtaactaatgaccacgaagtactgtctaccttaactggccgtatattacattgtttagccctcatatcatataaacttaatacttaaaaattgattaatgacactttaaacattttgtagtgtgttttacttgctcatacgcttaggatt

SEQ ID NO: 577335 - DNA, 266 bp, Homo sapiens
atccttacaaacaccatgggtgtctaatgtatacccaaacttaggggcatcagactttttttttggagacggagtctggccctggtcgcccaggcgggagttcaagggcgcaatctccacttacggcaacctcggcttcccgggttcaagcgattctccggcccgagcctcgggagtagctaagactacgggcatgtgccaccacgcccagctaattttttttcttttcttttctttttttttttgggtggtagggatgtcggtgg

SEQ ID NO: 577336 - DNA, 574 bp, Homo sapiens
  misc_feature (199)..(199): n is a, c, g, or t
  misc_feature (205)..(205): n is a, c, g, or t
  misc_feature (404)..(404): n is a, c, g, or t
  misc_feature (537)..(537): n is a, c, g, or t
gtaatctcagtactttaatgaaataacatctctacaaaaaacagaaaaaattagctgggtgtggcggcttgtgcctttagtcccagctactctgtaggctgaggcaggaggatcgaggatcacctgagcccggggaggttgaggctgcagtgagccatgatcacaccactgcactccagcctggacgacagagtgagangctgtntcaaaaacaaaaacaaaaaaccaaaaaacggacagggtataggcaattgttattcttcataataaccctgtcaagacttgacagctaagcccttcaagaggcaagttcaaaccaagactatgaaagaaaattaattaattgtgcccccaggtggaatgccagtgaataatgaatttgggtgagtagagacttgcaagtnaagaaagaatttttggtgtacaagacacaatctgaagaacagccaatctctacagagattgccaacaaactaccacctagttttcaaggcacaacagtttaacttatcccttcattactttgtgaagtaaggnaagcacttttacttccacctatgaggaactgggggtc

SEQ ID NO: 577337 - DNA, 313 bp, Homo sapiens
acgctcgctgtaatcgacaacctgagtctacgatctgtccgcactcaagacctgaccgacgcgtggaactctattgcggtgcacctggacacgctggagcgtctgaaagaattacgtcaagaaacgaaggcgtcagcggcgctaatggcggcgcgcttgccccaggcctggtcagcacaatcaaggaagaccagaactggcacgacacctgggcctacgccgtttgtacttcgtaccagctcaccaagcaagtggtactgcgtaccggcctgacattcgaaccgtcggctaccaacaaaacgggatcgctcac

SEQ ID NO: 577338 - DNA, 133 bp, Homo sapiens
atgctcaacatcccacttcgcacccttcaagtttccatcaagggctcatcgtcagttttctaggggtcagcacacatgtagccccatttcttgcccaactccagtgggcatcctctcagcagtctgaccgtgc

SEQ ID NO: 577339 - DNA, 111 bp, Homo sapiens
  misc_feature (111)..(111): n is a, c, g, or t
ggccgcgccgaagccttccgcagctgccgcttcagtccgaagagggaagggaaccaacccactttttcggcgccgcggctcttttctaaaagttgttgaaagcagctgttn

SEQ ID NO: 577340 - DNA, 912 bp, Homo sapiens
gcacctggtcatcgagcgagacagcccctcatgttcaggagcgacgcctaccttaccctgaccacttccgaactgcagcccactgtgggaaggagaactgacagcgcgaggcccgcagagctgaagggtgagctctactgcctgccctgccatgacaagatggtgcgtccccatctgcggggcctgtcgccgagcccactcgagggccgagtgtgtcaagcggcgctgggcaatgcaggtgcgcacgtggatgcacgtttgtctgtgccaatgtgtgagcaagccattcctgggtgcaccgagcactatgatgcaagaagggcctggccgtacgtgacgagagtcatctacagagccagctcgttcggggactgtctgctacgagacgtgcgagccgagtgtgatttgagacggcgaatgtggtgtcaggcgccgtcgaacagagggccttggtgtgtgagcatgcttcgtcctgctccgacctgcaacgagcgaagctctaccctgaagaacaagtctgtggagtacggacgatgaagcccgtgtgtaagaggtgctacgagaagttcccgctggagctgaagaagcggctgaagaagctgtcggagctgacgctcgccggaaggcccagtccgaggccacagtagctcaactctggctgagaggcccgtcttagcgcagggtgccttctcgggcccgtccagcgttcattctatccaacccatgcctggtgccgtatatatggggtccctaccttagtaccgacaagtccaagcgtgatgacgctcacaacagaaggttaacccatcgcatatagtgaaacacggacagtaggaactggctccacttcccttgtcccattcattctcaggcttcacagaggggtcggcccacaccattggcaggggcata

SEQ ID NO: 577341 - DNA, 320 bp, Homo sapiens
cataaggaaggtcccagcgttggggagagccccaaagttgagaacaagtaagtgaaccaattgttgtactgaagccacttgttacggaaacagctggatcatcaaacgacctgtgtgtaatatgtattctcctacaaacgtagcacccttcagcaggaccctataaaactttcctccagcccttgcctctttgcaggtagccccttctctgctgagctgcccactgcaacatattttcacaatttctctaataaatctgcccttctttacctacaactatcttggtaaatggctttaccacctgcaaaactgaccctagg

SEQ ID NO: 577342 - DNA, 407 bp, Homo sapiens
aataaataagaattttcagtggtgttaaagaaaaaaaattagaacgaactaaagaaaagaaccaacatataaaaagattcacgctcgttcaatagagagatgaaagagatatcaaaatcttgaactgttagcacgaaatgtgtccaaatagcaactgatgctgagattagaagcgcctgcacagaggctggtatgtttgccattagagcacggcgaaaaattgctaccgagaaggatttcttggaagctgttaatacggtcattaagtcttatgccaaattcagtgctactcctcgctacatgacatacaactgaaccctgtcggctttcaagtgatggctttaaactggtatcctaaccttatatagactcgttaataaccaattcataagcacacaaatggcttc

SEQ ID NO: 577343 - DNA, 242 bp, Homo sapiens
gccgcaccaggcgcactctggcgcacttctcaaaagaagacatttatgcggccaacaaacatataaaaagaagctcaacatcactgatcattagagaaatgcaaatcaaaaccacaacacaagataccacaacacacccactaggatggctaaaatttaaaaagacagataatagcaagtgctggtgaggtagtgcagaaatgggaaccttcataccctgctggtagaagtgcgcctgggtg

SEQ ID NO: 577344 - DNA, 127 bp, Homo sapiens
ctcagccaacaccatggacctcctatacctactatcaagcaggcggtggcagccaccaggcacggcggtgagtggccgctagattacctgcacgctggctctagcacctgctggacgaggaagctgc

SEQ ID NO: 577345 - DNA, 370 bp, Homo sapiens
caaaatgagcaaggtgcggtgggtcattgctgcaatctcagcactttgggaggctgaggcggacggatcacgaggtcaagagatcgagaccatcctggccaacatggtgaaacggtgccttgtctctaggtaaagatacaaaaattagccgggcatggtggaagccatctggaatctcagctacttgggaggctgaggcaggagactgcttggacccaggaagcagaagttgcagtgaaccgagctagcaccgaggccgtccagcctagagtgacagagtgagatccgtctgaaaaagaaaaaaaagaaaagaaaaggaaagaaaaagtgggagaccacttaggaggcgatggtaacgcagataagagcg

SEQ ID NO: 577346 - DNA, 1108 bp, Homo sapiens
  misc_feature (341)..(341): n is a, c, g, or t
  misc_feature (364)..(364): n is a, c, g, or t
  misc_feature (959)..(959): n is a, c, g, or t
agcgggcactccgaccgccagcgcacctagttcgcgtctgcattgctcgtgacgggtgtctagggcgccatggcgtccccgaggcaaggaagcataatgtgctgaggcctgtcgtgctgggtctgccttgtagccgagaaccgacagtaagctgtgcagtaactgggggcggcgcaggtgcatactggacggatggcgcatgcggttgcttatacgcaagcacttggcacgttagccttgacagcggtctacttgggacgtcacagcgccggaaggcccctgagcccagggcggtcgggctgactctcgaggaatgcgggcgcctcagtatggcttatcangtaaatagggttgaacacgcgangcaaaagactcgcaacggaagtggtggcaatggtttcgacggtggaacaggcttgacttgtgacaccgagaacgggcatatagtagtcggatggctcttgtggacgttgtggattgggaaaaaggggcaccttgtgacaatatcaatatggctctgcagactcacagaggttggttggaataggagttgaaggaaggtactgtgatagctgagtgtgagatgtatgtgctgtctgatgtaccacgtggctggatgtctgaggaaggatttgaaatagagtgggaaacagtgggggcaacatctataaaggtgaaatagtacttacttgcaatgactcgatttgagttttctacgtgtatacgctttgagcaagaaaaattgtataggggtttgcgaaagtttggggttgaaagtgcctacaccacctttcctgagtattagaagggctagtgggtcaaaagaaagtatacgtggtaaattaggggtaattagaggattggaggttttgcacacacataagagggattattaattttgaacaattttgacatacttttggaaggtgttggaaggacaatggtttgcgccttgtganaagagtggcttgagttgcatttaaccgagtgggggcgaggcggtcactggttgaaacccaatgttttggggcctccctatttgaaggtaacgcgggagtgcacatttgttaaattgcgttttgaggttttgagaaccttttgggtacaa

SEQ ID NO: 577347 - DNA, 127 bp, Homo sapiens
tcactggagggcaaggtagctggctggcctgaggccccagcatgttgagagggttaggaagagcagcaccagcacgaattcccttagcaccagcacgaattcccttagcaccagcacgaattccctt

SEQ ID NO: 577348 - DNA, 205 bp, Homo sapiens
  misc_feature (186)..(186): n is a, c, g, or t
cctaggggatccttattaaaaatgcacattggccaggtgtagtggctcacgtctataatcccagttctttgggcagctgaggctgaaggattgcttgagctcaggattttgagaccagcctgggcgatacagcaagattccattgcaaaaaagaaaaaaagaaaaagatttttaataaggatcccnctaggtccagctcgattct

SEQ ID NO: 577349 - DNA, 151 bp, Homo sapiens
  misc_feature (34)..(34): n is a, c, g, or t
cggcacgagggactttcctccagagcctgaaacnttcgccccgcggagacaagcttttcggccctgacttaaaacttgtgccccccatggaggaggattacccccagtttggcagccccaagtgaggggccgtggctgtggcatccagagt

SEQ ID NO: 577350 - DNA, 867 bp, Homo sapiens
  misc_feature (648)..(648): n is a, c, g, or t
agcggggcgggaccaagaggcggcggtggagcaggctgcgcgctcggcgccgacgggtgcgcgccgcggcttgggggagagttgagcgcttttcccccctctttttttttttttctcctcttcttctttaaacaaaccacaaacgggattgtgagggaagggaaggggtgttctctttaacctccttgagcccagacaccttcactcgtggtccgtcataagctggtttggctgaacacttttttttaaaaaagggaaaacagaaaagggatgttggcttggatggtgagaagatgtggaattgggactgtaagattttattccactcttccaggcccagccggccgttggcgcccgaggtctccctggtctggggacctttctccctgcctgtggacccctatactatattggcaacaagtttgtgacgggtgaagaacctgtttattattgagcatgtgacagagagccgagccaggacttagtggtgccacgccagccagttccataccctgtggttccaagccgtggaaaggttgaaagacttctcaacattttccaccaattatacttccttcctttcccttcccgagaacacattcgcggggtgcacctgtgaatgtgaaagttgtgagctcgggtttaccnattcttcgtggtgtcaccccatggaaaccattatgtggccgtgcttaaccattttacattccacgaaaactgtggacctcccgtgaaatcacagttctccaattatgctgggccaggattggaccacggctttctaattccatttctggtgatgccagattatacgaaacccagagggaactcaggtacagttccatcctcagatggcagccatgagac

SEQ ID NO: 577351 - DNA, 319 bp, Homo sapiens
  misc_feature (21)..(21): n is a, c, g, or t
  misc_feature (38)..(38): n is a, c, g, or t
  misc_feature (60)..(60): n is a, c, g, or t
  misc_feature (64)..(64): n is a, c, g, or t
  misc_feature (70)..(71): n is a, c, g, or t
  misc_feature (75)..(75): n is a, c, g, or t
  misc_feature (251)..(251): n is a, c, g, or t
gccactctccgcattctcagngtcgcacactccatcancaagaagctctcgaacgtcgcntgcncgcgtnncgtnaagcttcggcacctctcagagcggcccgcctcactcactcactcactcgagaaattctggatcctcccctcctatcttctggtctagtcatactcctattcaccagtctcaactagtcataaatgcccagctcttgtttacactgctggtttacactgtttctccaagccatcacngctgatatctcttggtgctatccccaaaccaccactcttaactcttaaagtaaataatctttgctggc

SEQ ID NO: 577352 - DNA, 154 bp, Homo sapiens
  misc_feature (7)..(7): n is a, c, g, or t
  misc_feature (12)..(12): n is a, c, g, or t
  misc_feature (26)..(26): n is a, c, g, or t
  misc_feature (149)..(149): n is a, c, g, or t
aaactgncttgntgggtttaatctgnatggctcaaatgaaaacactttgacctgtatttctaggtatggcaagaagagaaagaaaagcctaaattggaatgagatccaagtctaaacgcaagagctagaattagcccgccattaagganttctt

SEQ ID NO: 577353 - DNA, 1160 bp, Homo sapiens
  misc_feature (1)..(1): n is a, c, g, or t
nttttctgtcgtctgcgtgctcgtgcgctggcgtattgccgggtggtgtgggtgctgtgtcttggttgatgggtagtggtgcggtgtggggggtgttgggtgtttttgtctgtgtggttgagttggtattggtgcggggttgtgctggtggggggggatggggggagtggatgggtccctctgtgtatgggaagtggagtggggagtggatgctgcctgtggtgtgtggttgtagtggatggtgtggtttagtgtgtgtgggtgacgtataagagagacacacataaaccttgggaacaaagtggggcacctgaactcgagaaccaacagggtcaaaaacggggtgtaaccccccccgtgtgttcggcctctagtgcgacaccggggggcaattttccaaaaaggggctgtggaaaggggggctgtgtaggggcccggggggccccccggagtgtgcacaaactaaaggacccacatagtggggggtgcacctgtggacaaaccgtcgtggactgttgttggcccccctcaggggtgtcgattgtctgggataccccccgagtgttgtggaaagggtgtgctgtccaagaacacagggggcaccgtggcgaaggttcacgagaggggatgtgccaagggtgtgcacagcacacacaacaatgggggtggaccaccacaaagggggggcgcccccaaaaaagagggtgtagtgttgtgctggcccaacaatgtggtgtacccccgaggaagttgtggtttatcattatgaggtgtttagggatgagtttgtggggccgctgggagaatgtccgagatgggacacagaccgctgtgatgatgtgctccgcgggtctcacgaagtgtcggtgtgggggtgaacacaaaacacgaggagtgtgtcgctggccccacgtgaggagtgaccgtgtcggggagtaagagactcatgggtgtctgaaacaaccaaaaaaaaggtttccccccaaaaaaaaaattttcccccaaaaaaatttaaaaccacaaaaattttgcccccggcgaaagttccccctctttaaaaaaagttattttataaagaaaaaaaaaataaacccaaaaaaaataataaacaaaaataaaatactcgagcattattcggtcgaaaagtatgtcccactctt

SEQ ID NO: 577354 - DNA, 154 bp, Homo sapiens
  misc_feature (144)..(144): n is a, c, g, or t
gagctggagaagagaatgtgctgaggtagaagccagaaatgccagcagttggatggaggcagatttacaggaggaagagcagaaaaaaagagggagctgggcagggttaggagagagaactgtgtgcataagtgcaaatccaantacgcaatgt

SEQ ID NO: 577355 - DNA, 580 bp, Homo sapiens
  misc_feature (379)..(379): n is a, c, g, or t
  misc_feature (578)..(578): n is a, c, g, or t
taaggatccccggtcatctagatattcgtagcagtggctttctctacagatctctacttctttgatctgcccagacttcaagcggcctgaatatatttaaaggtgcacatctggggtccgggctaaagttaacaagggatcccagaaaaataaaagagaccttcaaaactcttgaaagattcaaaaagttcaatcagagactgagttgacagtggtccatgatattaagaagccacctgaacacaattctgcagattctgacggttgttggcagacagcttggttctgagacttcctagggagtcttctactgataaggacccaaagtatttgattaaccactcaggtttaagacgatgggtgtgaaccactgcgcgtnttatatcatttaattcagtgaaaggtcctattgcacgctgcagtaggccagccttttcacacagttgagcaatatgagcccggtcatattgtgtgaccttctgtttgcctagaatagcatctgcaacttgaggcgcttgcttaaggttcatctcaagtacccgcgtctgtaaaggaccttcaaatgggcgataatcctnca

SEQ ID NO: 577356 - DNA, 615 bp, Homo sapiens
  misc_feature (112)..(113): n is a, c, g, or t
  misc_feature (134)..(134): n is a, c, g, or t
  misc_feature (244)..(244): n is a, c, g, or t
  misc_feature (312)..(312): n is a, c, g, or t
  misc_feature (344)..(344): n is a, c, g, or t
  misc_feature (346)..(346): n is a, c, g, or t
tttgaaaaccatggcgtgggtaccagcggagccgcagtggaagagttgatgcctcggctattgcggtagagccttgcgacttgacggaaggtttcgatccctcggtaccccnnaggacgcctcaggaatacctnaggcgggtccagatcgagcagctcaatgtccagatgttgtggtagctcaaattgacccaagagttgaaaggagcaagtgtgatattctcttcaggatgccacccgccctnaggttattcccacacttcatggcacagcacagtggcaattttcactgttcgcaaatgtgacaacatgnagtactggaatcaacagtggtagtatgtgacnangaccgtgtactaaaaacaatcaaaaccatatcatcaatctgggaacaaatgtcgaaaccaatgaaaataacagacggggctgtttggaccagccacaaatgaaagtcctggaatagattatgtacaaataggttttcctcccttgcttagtattgtagcagaatgaatcaggcaacagtaactagtgtcttggaatatctgagtaatctggttggacacagagactttactccagaattgggaccatggctttatgcttattggcttgc

SEQ ID NO: 577357 - DNA, 248 bp, Homo sapiens
tcgtcagcggatcctgttggtcgatcactgtactcgccagaagttagaaaaacaaaatgtgtagtttttccatttaagagaatgcccacctgacatcccagcccccagcaaaacttactatagcctccactaacaaccacaccctgagctaccaaggaaactgactgtgtttacagttgaagaaaccatacagagactacactactgcatgcatccagaatcataaccaaagtacagtgatcgaccaa

SEQ ID NO: 577358 - DNA, 160 bp, Homo sapiens
taaactggagaagctataaaatgttacttactatgggctaggcgtggtcgctcatacctgtaatcctagcacttggtggagctgagtgggcagatcacttgagctcaccagttcacgaccagcctgggcaacatggcgaaatttgtctctaccaaaaaaa

SEQ ID NO: 577359 - DNA, 218 bp, Homo sapiens
  misc_feature (9)..(9): n is a, c, g, or t
  misc_feature (77)..(77): n is a, c, g, or t
cgcttgtcntggcctcggcaaaggagggggctgaaaactggaagagccccctggggaaggctctttgtggccccagntgggcaagcgggggaggggtgggctcttgttcccggccctcatcctagcgttcagcagactggccccacaccacaggtttccattttcacccttgggttaagagaaaagcagaaataaaaagtttactaatgttaaaaaaa

SEQ ID NO: 577360 - DNA, 215 bp, Homo sapiens
tggcatgcagtattcagtcaagctatagtcagcagactgcaccccaacaactcgagcagttccagtgcatattagcagacaacaacttcccagtgcaccagctcctgccttttctggtcagcctcaacaactgcctgctcagccgccacagcagtaccaggcgagcaattatcctgcacaaacttacactgcccaaacttctcagcctactaatt

SEQ ID NO: 577361 - DNA, 745 bp, Homo sapiens
agaatagttggaggatctttctccagaatccttctgttctgtagtacaagtattactcattatagactagcacgaaaaatcaagtgaaatgcgaacttaagagtttaaaaagaataaatggtgcttttctggcctattagtaataaattaaataaaaataattttaatttgtaagtaatgaatgctaatctacatgtattaattgggcttaaccagagagttttgtttacatacattaggcaaacaaacaataggaatgaggatttttaataaagaaggaagccagaaacacacacacacaagcacacacacacacacacacacacacacacacacacaccaagtaagagaatactaaaagatcagagaaaatgtaattatacttatcaaaatgtttaatgcagtggcctatgagttcagaatataaaatttattgcgatgtgttgagcaacttggagcttattttttaatccttacagataataggaacttgaaacatacttgggtgtgtataagatatatgtgatatcagaacacctcatatatatctgtaaatatatattcaaatatattactaacgcaaaaatatatttacatgtatatatcacatgatgcaattaataagtgttctcacatcaaaaaaaaaaccaccaaccaaacaaaaaaaaccaaaaaaacaacaaaaccaaaaacaacacccaaaaaacacccacaacacaacggggacaaacaacaccccccagaa

SEQ ID NO: 577362 - DNA, 1015 bp, Homo sapiens
gggaggtaagccatcccccgtggagaccttgctgctgaccatcctagtgctgggctggccccagcctcacccccaccccaggtgccctgaggccccagtgcatgctgctgcctccactatcgatgcctcctgactgcacactgaggactgggactggggttgagttctgtctggctttcgttcgccattatatggtaacgggatggctggaaaagcacacccaacgacgctattacagagactggcagtcaggagcagagcaggaggccctcatgtgcaccagggaaccaggaccacaccggccacttgcaggagggccaggagcagtcctccctctgactggctgcagatgttaatgtatcaccagccatgtccccttacgagagaggccttgcggagacgtttaaggcacctgcatggttccaaggaaactcgcattacccatctgtactatgaatgcaatgccatcttcaaaccggttttcattacatcgaacgtggtactgatacacgcctagcggcgctgccacatgcagtggagcagttggcatgactcacatgccatcgctctactacgtaattgcttatacaagacagcatacagactaagcacagcccaggagcccaccaacatcctaccacacaagcaacgacaggccagcatgccatgacacagagtggctccaaaacgcggacacaagccggcagcccgcaacgcaaggacaaaggcagaaggctaacacccccacaacacgagcaaactacacccacccaccgcccacccccaacacaccccatcaacaacacaccaccgcacacccacacgacgccacaggatcaaccccccaacaccgccgcaatcgcccccagcccagaccccacaccaacacccacgcacacacccccccccccccccgacacccgcaccaccctgcgaccccaagccccccccaacccacaccacgaccacccaccacgcccgcaacgccagcagcgaccacagacaccaccactcg

SEQ ID NO: 577363 - DNA, 1138 bp, Homo sapiens
ggcggcggccgacggcgggatgctgggagccagcgacctgcctcgccgaccgcacctcgcatgccatgaccactaccgattcttggcccgatatctccgacaccgatgcagaaggcggcggagcatgggagagaggagacggacagccaagacacagaggtatccacagcacgactaggggaagacaccctaaggacgcgccagagagggaccagggctaacgaagacggcctggagaaaaactggatgacatccatagtatagccagacaagtaaataccaagacatgtatcactagtggggagacactaaggacagaggcgcgtatacccgttggcccttccacaggtgcaaacggcaatggaccactgcaagcaggactggacgtggaagtccaaggtattgtggagcgattaattaattgtcaccgtacacccaaagaacaaaaaacgggcaaacagtagaagcgaggacgaccaagcgaaccaaaggaatagcgaaaaacgcgaagcgagagaaagcccacagaatgggagagtagatgggctaccgaagacaaggaggccaacaaggaacagcctcagatgtagagacacacgatgggaagagcgagcaacgacacagtatgggaccagaggcaaccttgcaccacagaagacgcgtacggcgagcgcgaaaggcacacacaggcaccgcacgatttacacggggacacgcacgacacgtgtcacaccagaaacgaagcggcgacacagtcatggcacaacgaagggcagtggcaacaacacagggcacaacggaaagcagcaaggagaaacaaagggcaaaagaagtatccggctgccgcagacgaggcgagccgggaaaggtatcccgatggggacataccaaagtgcggtaccagcaattgggaggcaccaccggatggaacccacgatagaataccggcgacgagcgagcacgaccacccgactcggcacagagcgacagcgttacccgagcagcacaaagacgagggacaatagttacagaccccatgaggggcaagccgcaccgccagcgggcagcacactaccagagggagcggacccgataagggaaaaccacgcgaccccgacatgtggtgagacagcaacca

SEQ ID NO: 577364 - DNA, 594 bp, Homo sapiens
ttttcctgttcaaggggacaacataactcattaaagtaacctacatgaaatcccacagtgggtttcattgtgtatttgacatttatgaacgctacaaggcttacgggaatgacatcacttgataaaggagttgtttaccaatttatttccctaagacccagcccgacataagatgttccctcacagccgtaacagaactctgtccttcataagacacttaaatctcagttactagaaagtcacgaaaacatattcctggagttctttgcttcttagtgaaaacatggttggatagacaggcctccataaacgggcttggggtgtgaaatgtcaacaggaattaggggtatgggctgacttatgaacatgggcgggcggtctatcttcgggttagatctggatttcgactgtactgccgagagaccgagcccccttattcccctgacatgatgggagagtgcgcatgtagatccaatcatttgcttactgggacgatagggcatatgatcccaccttttcaacttacctgttgataaacaggggggtgggcatatggctcatctaagcgctgctcaggcacatatgtgctagtct

SEQ ID NO: 577365 - DNA, 1179 bp, Homo sapiens
attcatggaatcacttcgctctccaagaatgccaagcctcctcaacgaccgggtgctgcgcggccaggctgaaggcggaggagaccttgcgtcgcccttcggatgtcctactttcaaattgtgatgcagaaggacggtccgtgccggtccatgcggagagatcgtggtccaccttggatgactggtaggtctgcgatggaacagagagctgcgacggcaggaggtcttcccgactgagaccatgaagctacctggaaccggcttcctgatcagctaggagcccggtgaaacaagagaccgcctgcaggctgctaggggtgccagcattggcatgattcagtggacctcgtaacgatgaagagtaagacctatcctctccatggaaggcgcgaggaacgcttgtgcactctatcgaccggacgaatcttcctataccgtgactcggatgggagcgtgcctgtccaaactggtagcctgcatcctggtgtaacaaggctcaagctgggaacactgggccgcgagatgaccccgtgacgaatgtggcatcgaacacttcctctccagaatgccaggaggcggaaggagcaagcgaaacaggatcgatccgcaaacacgcgcagaccttcgtacgccctcagtgccacagagtggtgaagttcaattaccaatccggccaccatggatggcagacggggcagcagaggtgggcgcacagagcaagggctggaacctaacggaggcccacaacaacatatctggactactaaccggacacaacacgacgaaactccaccagagggatcacgtgagaccaacagtagactcggtaccagccaggaaacagaacggaacccagcaggaagatcaaccagggcagggccaggagaacaggcacccccagagaacgcgaaagaaaagagaaaagcgaaaacagaaagaggaaagagacttggaaaacaaggagaacagaagaagacaaaataggagacaggagggagagagaaaaagagaaagacaaaagacagaggtgaaccaacaacacaagactgcaacaaagagaaacaaaacagggcacaaagaaaagagagagagaaaaaaaaaaacgacgagacggagaagaacagcagtggaagaaagagaaataaagaaaagagcacacaaacaacacacgagagcaag

SEQ ID NO: 577366 - DNA, 167 bp, Homo sapiens
tcctctacacgatcccttatatttttcttgtgaagcaggtaggtcggaaaggcacaggaagatgacaagtacataccagcttcggttgtggaagagttgtacgaagaaggcaactgaaattggaccttctggctgcctagagttcaaccctttcaggagggcaccta

SEQ ID NO: 577367 - DNA, 174 bp, Homo sapiens
ctaatagaggagtgggtatatagtcggggatgcagaagccgcagacgactccccttcctccagggagactacaggcaagagcatgtaaacccctttaccattgccccgccaaacacagcgcgccctgagagggcagggccagcagtggacaaccaagagaggctgaccggcgcc

SEQ ID NO: 577368 - DNA, 560 bp, Homo sapiens
tgccgctctgtttgccaaccgtccagtcccgcctaccagtgccgggcgctccccacccctcccccggatcacccggtgtcgacatggcaaagctagattttctcttcaagtgcatgcacgattacggcggactcgcgcggtgggcaacgacctgcctgattcccttcgccttgcacgagtgaccaacttacaacaaacactattaccatctccaccaatcggacatagaatatcccaacgactccgcaactgagcgactctcccgacggggaccagacagactcaacgactaccacagtctggggacaccggcgggccacagcacgcgagttcccacgcacaggaccaactgacacggcatcactcaccgaggaagcaccacgggacaatcatcgccagtcataacgaccatccccgcgactgagcaaatctctgcagacgacatatatacgagcgaggcatggcgaagagccatccagggagaactgcgcaacggtgcgggtgaagcagcctacggacgcggaaccaaatgtgaccctggcacgcgccacacggaccgc

SEQ ID NO: 577369 - DNA, 92 bp, Homo sapiens
tgagacagagtcttgctctgttgcccaggctggagtgcagtggcgagatctccccacaacctgtgcctcccaggttcaagcgaccctcccgc

SEQ ID NO: 577370 - DNA, 822 bp, Homo sapiens
gactacaccggtgtatcatgggagcgagcccgggtctacacgttcataaacactaaggggagtcgcgcgaagctgaacttgagcgctcgatgcggggccagatagccgccctagagcgcgcggagccgtagaaggcgtagctggatttacaacgcgatgcatctcggtaggtccaagtctactggattgaggtagaagaagtgacatgatggtgagctcgaatggcggcaggctccggaaggcccggaggatcatagggcaggcggaaacgcgtcagggacccaagctcaagagattaccagacacccgcgtcgtattgctaggcaagatagtacgttggcgaacggagttttgatacgtgtacgatggcgtacaaggcataacgtagtcggtggtcgatagacgggttgagtgccagcatagagttctctcggtatgcacacctctgcgatagtcgctcgcgcccagcaggaagacgtggctcctgatagagtgcccccattggtacaggtattatagctgggtcacagagtccgaacggtaaggggatagccacgccatgcctggtctgagaacgagggtaggggaacgacacatggctttgctgagtatgaagaggtagagatagacactgtgtgaattcgccgcacttaggtaaggccgctacaagagggcgggactccaaaattaggggaagaggcgataaagcaagaggtatcagggcaggaccaactgaacctacgggaaaattccccaagacactactaaaaactgaacttctcttcagatcccgaaatttggagctgcaattgctagttcacc

SEQ ID NO: 577371 - DNA, 426 bp, Homo sapiens
  misc_feature (6)..(6): n is a, c, g, or t
  misc_feature (14)..(14): n is a, c, g, or t
  misc_feature (65)..(65): n is a, c, g, or t
  misc_feature (76)..(76): n is a, c, g, or t
  misc_feature (157)..(157): n is a, c, g, or t
  misc_feature (168)..(168): n is a, c, g, or t
  misc_feature (184)..(184): n is a, c, g, or t
  misc_feature (192)..(192): n is a, c, g, or t
  misc_feature (226)..(226): n is a, c, g, or t
  misc_feature (237)..(237): n is a, c, g, or t
  misc_feature (255)..(255): n is a, c, g, or t
tccgcnctcacccntaaggctggccaatggtgctgcgtggcgtcagggttgtggagcctggcagnctggcccgggncgtttctgcggaatggtcctggcggacttcggcgccgaggtggtgcgcgtgaaccggctgggctccacgggcgagaatttnctggcccgagnaagcgcatcgctagcngtggaccntgaagcgctctcagggagtcacggtgttgcggcncatgtgcacangcggacgtgttgctgganccttccgctgcggtgtcatggagaaactccagcttgggccagagactctactgcaggacaatccaaagctcatctatgccaaggctgagcggatttggccaatcgggaattttctccaaagtagctggccatgacatcaactatttggctttatcaggcgttctgtcaaag

SEQ ID NO: 577372 - DNA, 429 bp, Homo sapiens
catcaggccggtagccgcccagactgcacaggctttgaacatctggaattgccaatgggacaattggaacgacttagcaacaagaagactcaaccttggacagcccagaaagtcacaccaaggaatccttaattattacattgaaaattaccccaagttcaggatttcggcacaatccctgttttgttaaattaattgacccttgaagaccagattggcttggacaagggcaaactgttctccaagagtccttaatgacgggcaggagtcccagggaagagagaccatgccatgctgaaaaagaccgaattgaagaagaaatgtagcccccagccggtacccaccaaaggagagaagaagcaatagccgaggaactctgcggggatggcgaatggttcctgcccgggcccaaggggtgcacagggcact

SEQ ID NO: 577373 - DNA, 809 bp, Homo sapiens
  misc_feature (659)..(659): n is a, c, g, or t
  misc_feature (671)..(671): n is a, c, g, or t
  misc_feature (678)..(679): n is a, c, g, or t
  misc_feature (685)..(686): n is a, c, g, or t
  misc_feature (792)..(792): n is a, c, g, or t
cggcgtctcgaggatcccgacggctcaacggaactttgagacagaatattatgaacttcaaattacttgtaactaacagagatatctgtggagctcatatcttaaccttgtatggtgttgagagcgggtacgttctgatgagactgtataaaaaaagaagaaaatgaagaataggaactaagaattgatggagcaaagagaaaatcaccaacagaaagagagtcatactcttaagtgcaacattactgaaaataagtccaggatgtggtatgtcagactactggctacagggaaggtacttgaaagtatgcccaacgtttgtagtctctgaaaatcagtttcttgggagtagtaaaagaagaggagaggagaggcactcttcagagactatggcataaacagaaagaagaaagtaagagggagaattttaagggtcctgcagaagtaaaagaaatgtacaaaatcagagatgaaccaaatcctccccctgctaccagaaaaagaaaaaaaagctattcatgaagaaaactgcacttcactatgctgacgtggatactcatgaaagagaaatcctgaagccactacagaatgcttactgcagatagctgttatggagggttttctagtttagaaatttcacaatatgtgtagaaaaaatntatgtatgcaangttcctnnaagccnnaatagaaaatgaaaataaagtctgtgaattgatgaccgttcctcctcaaaccaccataacatggaagaagattgacttagcagtatactttaattgatatttaacnatcgttttcagatataa

SEQ ID NO: 577374 - DNA, 438 bp, Homo sapiens
agtcggtaccggctgtggaagacgggggattggaaagaaagattgcttagaaaaaaaactctagtatcagattaacctttgattcttgggaagccgcagggacacccgatggtgtgcagctgcccacgacgcccctcctcagcatgaagcagcgagacggatgcgtggcctgattcctcatgattgaggaattgacgaatgggggggaagggtgttgaaacgggcccaattgtcccatagaactgatgtctatggtttcttttaaataaacatagaaattgacccttccattctttaaaacttgggaacgttacatttgtcttatctgagctccttcctcaggaaaccaaccagcagtcctcctaaatagtatcaaggaacagagactcactagatcacagcatctggacagtgagaccctagacccgtcttccacag

SEQ ID NO: 577375 - DNA, 1264 bp, Homo sapiens
  misc_feature (660)..(660): n is a, c, g, or t
  misc_feature (673)..(673): n is a, c, g, or t
agcgggctggtgggctctgccggcgccgcggcgtcctggctcccgctgggtggggcttcctgggcggaggcgccgcccctgggcggtgccggatccagtccgcttgaccttattccctagctgctgtctccggccccctgaacccgtacagggttggggaagtgggggtggctggaggaagcgcgcgcggggcaagccagtggggctgaggaggctcccgggcccggccccgcccagtctccgccccagccaggcccgaccctgccctccgaatgtcttacagctgcccgccccagagtaaggcccggtcggttcccgcgcgctcccagctccgtgcccgcgagcagagactggaagggctgtccttgctcagcggcttttggtgatctcatccgccctagaagagggccacctaaaagcggggtgcgagaggagagtgggagggcctcctcttggtgtcccaggcacctcagcccggcagaggtggcggaaaagcagacttgatgctttaacacgtccatagcaatcgctttttactggaaaggaagttctgtatttagcgctgtgtaattctgtggaaacgtgcattcttgtctttgcgggaaagctgttctctgtgggcggagaccttcagtcccaccctccccaggaggcgcctgnggacccttccaanctgcagtcaagttgaccaagaactgactgcaaggtgctggtggctctgggatgagagccttttggtacttacagggaatatgactcttcccttagatatcaaatggacccaatatctagggagcagcttcttctccatccatctgaccgttccgttgtgagaatgctggcccaataacatactctttttttttcccctaaaggaataaaaaaatctgtatttttaagatgtcaaatctccagagtttttagatgttagcaactgaatcagatgtttttaaacttcatgagctgattaaaccacacagatgagctgtcagtttacgacccctggcttggcttggaggaaagagtgaagagaaattccatggccaaatcctggggcactccaatattgggagggtaatggagaaggagtctgaaaggcagcatctaggaagtcatgaaagctagcgctgagttgtggaatccctgggcagagaaggtttcaggtaggaggcatcagctgagcggtgtgataaacttgggccagagatgtggctattggattgggtcacttgcaagtcactggagaatgtcactgatggccttg

SEQ ID NO: 577376 - DNA, 133 bp, Homo sapiens
cgtagtgtaacaagtggaggaggaggagggggtgagaacagctttcctccagccctgtgacacactccttctatgtgtgtacagtgtccataggcatcacaccttcttcattaaaaacccagtttcctggtca

SEQ ID NO: 577377 - DNA, 165 bp, Homo sapiens
tggtaccatgcgcgatgcttcatcaagagtactacaatcttcccatgcacaatgatgataatacagatcttagcagaatcttgaaaagcccagagatccaaatgatgcccttctgatgcacacactgcaatgaatgatccactcgcatgaatcacatgtttgggg

SEQ ID NO: 577378 - DNA, 406 bp, Homo sapiens
ccatatgtccaaatacagtcacattctggggtgctagaggttcacctccaccctccaaatatgtaggggccccatgtccacagttacacttttgtcaaagtaaaatgtaaattagccctagtgttgggggcggtggttcatgcctgttataccagcactttgggaggatgaggtggtgagatcacctgaggttggaagttcctgggctagcatggccaacatagatatatccagtctatactcactctcacgaacttggctgggcatggtggcgcatggttgtactcctaactgtgtggggtgaggcggtagaatggtttcttcccggcaagtgtaggtggtggtgatccgagatgaccccgtcgctgtccagcatgggcggcaagagatcaagtccgtgtcaaat

SEQ ID NO: 577379 - DNA, 381 bp, Homo sapiens
ctgcatgtgagctcaccatcttactcatatgtgtgttccaacacgtgtcacatgatcagcactttgcacagtgtgcaagacaggcatgcttcatctgcacagaaggaactgatactcacgacagcgtgtttattcacagaatacaatgcccgctattggtaaagtgtcccagatactgtgccaacgtctggatattgttatgtgttttccctagaacttcgatcccttattgagtgtctcggctcatatgttaactcagttccgatgtgacctctggccgagcccattcatagcttgtatgataggtgacacatcatgtagatttatgattgtgacagctccatgtctggtttttagatctagcagtgtgtggtaaacttg

SEQ ID NO: 577380 - DNA, 158 bp, Homo sapiens
  misc_feature (20)..(21): n is a, c, g, or t
  misc_feature (71)..(71): n is a, c, g, or t
tggggcaggcgtacgcaggnngctcttggtagtactccaggaaggcgcggcccacactctgcgccaccggnctcatggactcctgggagacaaagacgtggcaggcgaagggctcagcagggggtgtttggtgatgaagccgaaatagcagctgttgc

SEQ ID NO: 577381 - DNA, 205 bp, Homo sapiens
gggtttttaaattttgattcaaaagtagtcccagctcaaaggggttcaaactgtttacacccagaacatttgtcaggctctcggtcagctttcatggacaaagggaaaaaaacccatggagttaggcccttcctggattttttttttaagaaaaaaaaccggtatttaaaatgtaaaataaacttttaaaaagccggccctaata

SEQ ID NO: 577382 - DNA, 316 bp, Homo sapiens
acactgtcgcatatctctatataaaatatcaataattgtttaatttcaggacaaaggacatggttaaaaacgtttagttcaggttggttaaagaaagtcaacctagaactagtggatattactttatatctgacagtagatcattatttcttttcaaaaaggatatgccagtgatgattattgtcttttacagcagtatcttgtgagagtcttaaaatgtttcttcttttataattcattctacgttttaaacacatgaattataatgtatgcaaagtgtactttttcaagtcagtgtagaatattcgacagtagt

SEQ ID NO: 577383 - DNA, 642 bp, Homo sapiens
  misc_feature (515)..(515): n is a, c, g, or t
attgaggatgggaacacatccgtagtgcctgaccaggagaaggagattgagcggttgaccagcctccacaccatgctcgagggctcacacactgaaatctgtaaggatttatctgagcgaggtgacgctgcgactaaagcagccaggcagctcccaagtgacggattatcgttagttgtggcacgagctggatgaggcagattaccgctgcattcgtttgatggcaatgtagacctgcaatgcttatgctgggctatatgacatcattctgacgaacttcgagaagttcacgaagcccaggatagaatcactggctatgacctattgagagccttctttcccatagtgcgacgagtacagtatagtccttactgtttattactgctgactcgagagtctctccagacttgcttatgatgagatatggccgtaaccttgcctgtcagtcacactatcattaggcatacgactagtaacaccaacaccaacctctgcctcataggaatgaaagggangcaacgcgctacggcctcagcctaattggcttttagcatggagcgagttaatgcaggcgaccgagattccgaatgtactgggcccattaggcctgtagagccgtttaacgttgatggccggtggctt

SEQ ID NO: 577384 - DNA, 233 bp, Homo sapiens
  misc_feature (22)..(22): n is a, c, g, or t
  misc_feature (120)..(120): n is a, c, g, or t
  misc_feature (141)..(141): n is a, c, g, or t
  misc_feature (194)..(194): n is a, c, g, or t
  misc_feature (228)..(228): n is a, c, g, or t
cgaagtatctctgtttgcagangatatgattctatatctaggaaaaccccatgatctttggcccaaaagctcctagatctgataaacaactttcagctaacttttcaggagacaaaatcnattataccaaatatggtagcnttttatacaccaacggcattccaagctgagagccaaattccaggaatgcaatnctaattcaccaattgccacaggattttcctggantacgc

SEQ ID NO: 577385 - DNA, 1967 bp, Homo sapiens
ttttttgggcccctaaaagggtcaagtttccgggggaggtgtttgggaaatcccccccttaaggccctccatttaagatgccgggttatttggcccaaaaaggggcctttttccccaggtttgtttttttttttttggcccaaaaaaaaaaagggggccttggcccaaatttgggggattcaacctttccagaatatttcccaaacccttttttttttttttttttttttttttaagcaagcccccaacaccatagaaaattcttgatttgctcggaggataattggatgaaggattattttcttctttgtttatgtgcaagaaatgaaaataaggaattgctttgatcagacaacttcttatctttgtggtagaaacagaactgcccttcttggagtggctctgcctctgagatcactacaggggagacagcatgccctgttcagctggctgaatatttggcaacaatctcctgaagcagctggaattgacaagaagtactggagattagctcgggccaaacccttacatctggcctgactactgctgcagtctgcctcaacttacccctaaagctggggagatgccacccacccacatctttgctacacatgccatcatgagctagagttcaccctttctccttaaagccctatttacttttctacttcaactttaaaacaaaattaaaatgtgaggatatccctgaattttaaaaagcatgaagtaaaaatgcaaattagtatagtttgtttaatacattacatatagacctaaagaaagttcatcagggttaatcatttgtcacatcattctatacccagggctatcagctatcaattttcctttttttttttttttttttttaattcaggatccagctctgtcacccaggctggagtgcagtatcaaagtatcatttctcttacttcaaattattacattttattctgtacattgattctgaactcctaatataatatttatgtcctgtatttgcaggccattggtttttttaaagtcataaatcaaaatgatgccagaaaatcaaagatgcccaagatgttgggcttctcttttgccagccacattggtagcactctcctgccctggcctccaagctggtggggatctgtgatgtttgtgaaaatgggcttatgccaggcgcagtggctcacgcctataatcccagcactttgggaggccgaggcgggcagatcggttcaggtcaggagatcgagaccagcctggccaacatggtgaaaccccatctctactaaaaatacaaaaaattagccaggtgtggtggcacatgcctgtaatcccagctactcaggaggctgaggcaggagaatcacttgaaacctgggaggcggaggttgcagtgagcagagatcgtgccattacactccagcctggggtacagagtgagaactctgtgtccaaaaaaaaaaaagaaagaaaatgggcttgtgtggtagcaggtaagaaattgaatctctgttgtacagcagctagctgtactgcatgatcacttcccattccccagctgacagtggctgtctctggaactcctaccacagtcttcaattggtaggccagccctggtgccagtgattttatctgggcatggaaaatgccacttgcttctgtggaagagacacttaaaagatctggcagtcggccgggtgcggtggctcacgcctataatcccaacactctgggaggtcaaggcaggcggatcacgaggtcaggagatggagaccatcctggctaacacggtgaaaccctgtctctactaaaaaaaaaaataaaaaattagctgggcgaggtggcgggcgcctgtagtcccagctactctggaggctgaggcaggagaatggcgtgaacccaggaggcggagcttgcagtgatccgagatcacaccactgcactgcagtctgggcaacagagcgagactccatctc

SEQ ID NO: 577386 - DNA, 156 bp, Homo sapiens
  misc_feature (86)..(86): n is a, c, g, or t
tcaccaggctctcagcctaattacacacgaccaaagggctgtgtgcaggtcccatctccttagatgaggttaacaattcccacttnggcattttcctttcaggctatgcctaccttcacatgtggctttttttcttcttcttttctttgagacaga

SEQ ID NO: 577387 - DNA, 419 bp, Homo sapiens
  misc_feature (42)..(42): n is a, c, g, or t
  misc_feature (91)..(91): n is a, c, g, or t
  misc_feature (130)..(130): n is a, c, g, or t
  misc_feature (186)..(186): n is a, c, g, or t
  misc_feature (217)..(217): n is a, c, g, or t
  misc_feature (345)..(345): n is a, c, g, or t
  misc_feature (393)..(393): n is a, c, g, or t
gaggatcactgagggagtctgtccatacgagtcaaggaagcnaggcattgcaggactctgcttggtggggctagtacaggccccaactctncacttcgaggccttcctctagattcttgaggagtaggtntctcggaaaggatagtcactagtagaacacctcctccaccaggcaaacctcctagncaccgaccggatccaggttgtcttggaggtncccctgccagtcctacaggtagatctggctcaggctgaggttttgctgaagggactgtagtggttcctgctctaagagtagacgctccaggaggactcggtgtgacaataccagcatatggccctcgnggatcccgtctaaggtatagtagattgggtatcagtcactatggctancttctagagagtcatctgactgcaaa

SEQ ID NO: 577388 - DNA, 334 bp, Homo sapiens
tttgccatccccctccctccctggggccggccctggacccgtcaggggcctgtccccagccccaaccccactcatgccccgtggtcctcccagacaaatgaaaccccgctgggcttccgatgcccccgcttgccgggtaatggttcagctaatcccatggcgaaatgggggctccctccggaggaggagccaggcagcagggccttcttgaccaacagccaggtttgtccttccccccaggaaacacatgttcttttggggggtcatgtatagcccccagaacggaagatagggcggtatataattgtaataaaaacccgttgcccctttttta

SEQ ID NO: 577389 - DNA, 266 bp, Homo sapiens
tgtgtcacctctgaaagcaccaccctggaggccccgtgatttataaggacagtagttaatagtttctgtcatcagagaggtcagtgtgttctgttcccatattgttcagttcaataggcctattacttggaaatcaagacgcattatacctatgattacaaacatgtctggggatgatgacattgtagataactctccaaccacaaagtgcaagaaagtttcccaagctagagttttttcattaaatgtgcacatttatttgcaaa

SEQ ID NO: 577390 - DNA, 163 bp, Homo sapiens
gcttatacctgagccataagctcctcgagaaaagggtgtgatagaattcctttgcccctcagagctggaagatcatcattgataggatcctgatgttaggtatgcccatcaattacgatgaaagttctttcctggtttgaacttgcggataaaagactattac

SEQ ID NO: 577391 - DNA, 266 bp, Homo sapiens
agattacatgccttttacaacccctatactgtaccaggcaaggatagtggctattgaaagaaccaccaggacaggcttatctagagacacattttgtagagtgttaactatacaaaaaaaagacactgttcagtttaaaaacaaatcttacacagccttacatttcaatttgtttctttaaaaggagctatggtgtgacaggggacctaaatgctttatagacatgaaaaaaaataactctcttggaaccaacttatccatcatca

SEQ ID NO: 577392 - DNA, 340 bp, Homo sapiens
gtggactgtatttcagctatgtctcatgttttatatgattaaattatcattgtttgtcctttatgtattctcttctacagtacaacacattgaaactgtattaacttgttatgttgtaatatttggctgctgaatttggggctactaatattctgcagaaaattaattgaatacctattcaagagatagttgtaaagatattgtatctcctctaatatactcctaaaaaatgtatttggatagcttgtttagggaaagaaaatgctgccccgaaaattttccacttaaataggggaggggccctatcccacaaaagctccatttcatatcaagtacattt

SEQ ID NO: 577393 - DNA, 225 bp, Homo sapiens
gcttagacatgaaacaaaaaaatccattctgtgaattgaacataaaaggtatcttgcttactaaaaaagtgtacttcaatatataagtcttttgataaggaatacagcacaagactttcttcactattttgtttacacatcaggctcagtctcactgaagagaggaatgaatcatgacattaccttacccagccacaggcaggcaactaaatgtgcatggatatt

SEQ ID NO: 577394 - DNA, 371 bp, Homo sapiens
gtaggattgtaagagtcattaagaatttaaaagacattaagaacaaagtagtcttgatctgcgactacatagtattttaagaccaaaagtctatatacaatttagtatatgctactaaatagtcttttaagatactacgacatagtctgtattgaaaacatcctatgtgtcaacatgtatctgcttttgcagggtgtcagggcaggcagtggttgtagtttccacgaggttacaaccctgttcaaatttagaatcaatgtcagtagggtgtcaaggcaccattgtgacagttacaggagagaggactcatggtgaaagttaccctgggtgaagactcctgccttgagttcatcgtccaggtggcaagagag

SEQ ID NO: 577395 - DNA, 154 bp, Homo sapiens
acactcaactgcaggagcgtgttaggaggggtcggggagaaatcaggctctcgaagctcataaaattcaacgtgaggagcatgaacaagtacgcccgaagcacagtggacggtcataaaggagcggaggtgtcgcagatactccttccagggta

SEQ ID NO: 577396 - DNA, 402 bp, Homo sapiens
  misc_feature (233)..(233): n is a, c, g, or t
  misc_feature (253)..(253): n is a, c, g, or t
  misc_feature (294)..(294): n is a, c, g, or t
  misc_feature (298)..(298): n is a, c, g, or t
  misc_feature (303)..(303): n is a, c, g, or t
acagagcgatgtaagttctggaggcctcgctccgcaaccgacccgaggccacagtgcctccgagatagaccgaacttgtgagacgggctccgatctcccgagatatggaaggtactaagacgtacatcaacagcaccatgcaagagagctacgtgagccagcgctgcagtcagcccctgaaactgaacacgagttttaagattctgtaccgagacaccatccaggaactcacngctccattacttaccacagnccaggcgaaaccaggagagacccaggaggaagagactaacncagnagagnagccatttattgaaactcctcgccaggatgatgtctctcgcagattcatccccccagtcaggatgatgtccacaggtgcccagcttcactctgttgggg

SEQ ID NO: 577397 - DNA, 1157 bp, Homo sapiens
gcagtgtggagcagggggcagtgacggggcgaagtctagtcgggtgtgggagagagacagtaggttgtgacgtcggtagggtggcacgacggtaatgatctgggctacacgtcagagcagcagggttgagcggcgggttagaagaaccaatcaggtgctgggtcgtcgatgttaacagaaaggcggtggtttttccccgcgctctggggggggggtcgtctcgaagtagtgggggggcaccaccctgctggtcgtcgcggaggagaagtgtctctcgcggcgtcccctttacacgcccgggaatgagcgctctcctgtttaagagccgtgtggcgcccctgttgtgagagacacaaaaaatgcgggagacacccgggtgggaagacgctagtcgcgcctgtgccccggggtttcaccggctcttagagggacccccgcgcagataagtgcgccaccttggggaacgggcccccgcccagaaaggaggtggccccaggttcctcacaggcattccagcaattcagacctataacctgtacttccgcctgtgtcaaaccagtttccctggagatcccggtatttggcgcaaaagtaggtctcctgtgcccaaccccccaagctccaagtatccggagttcgattcctgatacccaggcccagtctatcaccaggattctctccacgccagttcaccagaagtatctttgcaccaacatcttgtgaactttgtggacacttacccccgaagtccccacgccctccccaggggccacacccccacaatggacctggaaatggccactttcgactttctttccctcttcacaagatggcacttcacgccacgaggagtatttctctcccaaaatgctccacgttcttctcccactcctctatccctcgtgcctccttactaactctggagttctcccaccctatgagacctattgtgaaagaaaagaaaataatccacgatttcacgtttcccccatgagaaacttctgaggcagccaccttatcttggctaaatagaacctcaccctgctcatgaccacgagaccactttaggataataagatgaccctaactgaaggaatcccttgtatatgaaaggagttattttagaaaagccatacccaactattttattcatcata

SEQ ID NO: 577398 - DNA, 311 bp, Homo sapiens
  misc_feature (56)..(56): n is a, c, g, or t
  misc_feature (65)..(65): n is a, c, g, or t
cgttcttcccctcccccaaatcaacaacctcaaaatgttctcttcccgtgatttgnagatccatnaaatatatgtataacacaaactttttgaaaaccacctctatgttatccacaaacgtttctttttctttaaatttccactcctcattctacaaaaaaatcattaaaatttcggttattgattgacttttatgctccttattgatccacaccccccttcactgaacccttttatgtttggttatcatcacgatatatacattttatttctcattcgagaagaatgaatgaatctcattcggtactatt

SEQ ID NO: 577399 - DNA, 253 bp, Homo sapiens
tccataatagtcaccgcaccagcagaatcaatatttaaagcattttgttaacgtaaagtgagccaagatcatgcgattgcgctccagcctgaacgacagagcgagactcttatcaccaaaaaaaaaaagaaaaaaagcagttgaggacttaaaaacgggttttaaaattttttccccaattagaattccttagcccggtgagtgagcgtagggtcattgggttaaaggcgccgccgtgaaaggcttttctcaa

SEQ ID NO: 577400 - DNA, 214 bp, Homo sapiens
ccccattttttttcctgccctaattaaaattttttggcgggaagggtattatgggttcccaaaaacaaaaagccccaccctttggcctgggctgtgctgaaaatgcttaaggaaaaaagaattttctgctaaaatttttttttgggggggagtttcctctgtgaggggcttgcagctatccctcctggggaaacaaaaacagtattttccatga

SEQ ID NO: 577401 - DNA, 856 bp, Homo sapiens
  misc_feature (419)..(419): n is a, c, g, or t
  misc_feature (559)..(559): n is a, c, g, or t
aacataatagtagctctaatgggaagatatcgcttcgatattcctgcatgtatcaccagtgtatctgcattgatcagagaaggctgctcatatttgcaaatatcaggttaccatctcaatctaaaattagtagctctaagtgtgttgcttcgtatagaggggacagtacgtgagtcactgttgagtaactaccgtctacactagtgataaacccacatccccaatagattagccagtcaatcctgtacggaaggtactgtatgatcgaccatgtttgaactcgatataaatagagatgtaaatgtctcactgaggcactgtgccctagtgtggtactcgagaaaagtggcttcgtgtaatttccagtgcaattccacgtgtcgacatggctggccccgcttctgttgatgcatcgctgnctgtgagacaggggacacgctggagtgtcagtggagagaggcaacagcatcacacacggtggcactgcttacgtccaaaaaacgttacggttgtgaatgtaatgcccttaacagcaaaattccaacactctttatcatgncctctctttgctaatacagggatctcttcttaactgtgcatacctgctagcgactgaaagacctttcactgacctattatgccgaaacaagggtaaactaactaaaacaaatgcccacttcttcaatcttcaactccttggaaggttatatcctagggtctgatcgacaagtacgttggtggtcaccaggtttaggggtgacatagtattcggacaatatgctaatggctccctacttttcaaccatgaactcccatagaacccttttccctttgcgcggttcacataccctatgtt

SEQ ID NO: 577402 - DNA, 379 bp, Homo sapiens
tcaaaataggggggttgggcgcccggggcccagttttttaaacccctggtaacccgacccggggggtctgggccccggttccccccccaggtttgggggtcccccggttttcccttttttggtttcaaaagcaaagggttattttagggccaaaaagggggccccgggaaaaaatcgggcctgggttttcccccccctttttttttcaggggcggaatttaaagggaggataaagccccggggttggggggggttttggggggggggggaaccctggggaaaggggggtgggaaccatccccccccccggccttggggaaaccccttggggggctttaagggttaggccggggaaaaattaaaaatttttttttttcca

SEQ ID NO: 577403 - DNA, 224 bp, Homo sapiens
acaatgctataagacgacagaaggaagaggtgcgcagtattttaatgaccgatatcacaagaactcactattgcaagaatggcactaaggggaaatcacccccatgattcaatcacctcccatctgggtccatctccaacattggggattacaaattcaacatgagattggaacggggacagggaaccaaaccatattacatacaaaaaagggtatatgccaag

SEQ ID NO: 577404 - DNA, 951 bp, Homo sapiens
agttttgcacagactccggataaatgtgacggctgccaatctgagtagtactcgaatgtgacgaactgctggtctaggctgttttttccattagattcagcgtgatcatattgatcagatagtataaacgtaaatagcttcaacattttgagaaaatgctggaactcgcacgatgcttgtgttcgacagtatcaaacaatgtcagtgctttatctctaataagttctcttctgtatcatggcattggtctacttgccttattcacgatatgtcaatctatgcatttgtagattgtcacatgtagatatgccagttatttggccagtcggtcatctatataggctatggacctcaacggtgcattattagaaagacatgaaattctaggtctacccacctaagtttgctatcagatatgttactctaatgcacttaacagtaagttgtagaacaatagagagctgctaagtctctacgctgcgtcgtctgtgcactgtcagagtgccatgaaatgtaacaacttaactggtgatttcctcatagcatttgtgagtagctagcttgctacctgtgatgtctgtgtgtacgaaaagacatttggtgagagtcttgtactcccttgtgtattttggacagtaccaattaattgtacatacttggtctatattacttgtaggaagatgcgttagaccaatgtacttaccgtttatgcttgctcacgaattccagttagtcacggaagctgtggaccattacagtaacctcataaggggtaggaaaacacaagctcactgcctgggcttgtgccgctgacgttgggaccaacaattaaaggtcgtcctggcccagtgaatactggtagcctggcatgtggacctttccagcaaagctccctggaccttaaacagcttgagaagaccagctccgcgatagtgccataatatttcaaaa

SEQ ID NO: 577405 - DNA, 537 bp, Homo sapiens
tgctggtaatcccagacttggggaggcgaggggggtggatcaccttgagatcagaagtccgagaccagcctgggccaacatagtgaaacccctgactctactaaaaatacaaaaataagccgggtgtgggggtgagcgcctgtaatcccagctactcaagagactgaggcaggagaatcacttgaacacgggaggtggaggttgcagtgtgccaagatcatgccactgcactccagcctgagcaagtgtgagactctgtttcaaaaaaaaaaaaattcttctggccttaacccagggctgcctgcttgccgggagggggaaagaggctgagggaaaagagggggccggggtgtgccccaagaccgggtgcctcaacttggcgggggctacctgatccctaggtatggctcccagtatcttcctggaccgggcgcgggcgctcatgcctgtcaccccagcacttgggcagcgcgaggggttgctcccctgagatcagaggtccgagaccggccgggccaatatagtgagcccccgtct

SEQ ID NO: 577406 - DNA, 410 bp, Homo sapiens
agatagtgtgttagaagtgctgtttggttcaagaagtccatctcttttcttcatgacgacgccagctaatgatttatagggggacacttgggattccatcttgagctgagttggatagctcaaataaatcacttataaggagcaaagggcctcttcagataccagcacataatactttctatacagctttccaatttgaaaaggaaattgatgaggtggtacataaggctacctttaggcattaggagttttctgtttatgaggcataaaggaggctggacggcgaggttcataccaacatcccaatggcatcatgaggtgggaggagaggcattcctctcctcccacctcaaagacacccagagcctgatcttagagaagcatcaatgcaggcgtggtggataaactgc

SEQ ID NO: 577407 - DNA, 1108 bp, Homo sapiens
  misc_feature (646)..(647): n is a, c, g, or t
  misc_feature (694)..(695): n is a, c, g, or t
  misc_feature (737)..(737): n is a, c, g, or t
  misc_feature (786)..(786): n is a, c, g, or t
  misc_feature (790)..(790): n is a, c, g, or t
  misc_feature (796)..(796): n is a, c, g, or t
  misc_feature (826)..(826): n is a, c, g, or t
  misc_feature (833)..(833): n is a, c, g, or t
  misc_feature (835)..(835): n is a, c, g, or t
gggttgtggggacgccgggagggcggcgcggtactttccagaaggttccgcaccggaagcgcctgccgaggccggaggctgggtgcaggggcggagacgcggagaacttgggatcctggtttaagggagctgggaagctgccgcaggtttgtttaaacgatatttttttggtggcggaacacgaagtaaagttttccgtcggcgcagttcctgcgtgtgctgttcaagcggcctgaagtgcgttcaggttcggccgggctgtccctcctcctggtcccgacccctcaaaccccgggccgaacaccgccctctcctgcgggacagtctttctatggccggcgcgtttcgcctagcagggtcctcagagggaccgcgttagagcctgggtttccttccagggggaccagcgctccctgggtggaccgaccccaccgcttacccattgctggacgcctgcgtgcaccgaccccaccgttacccattgctggacgcttgccctgttgccatctcctcgctagcgtgaacagtgctgcgtgcagatctctctttcattgatgtttgcgtctgtacccagaagtgggattgctggaccatctctgcccattttaaaatgggaaatgacatgatctgatttaagctatttaannaatcacttgggcctgggctcggtggctcacgcgtgtaatcacaacannttgggaagccgagacaggcggatcacctgaggtcagacgttngagaccagcctggccaacatggtgaaacccggtctctactaaaaattcnaaanttagcngggcaggtggtccagctgtaataccagtantcaggangntgagcaggcaagtgttgaaacacgaagcggaggttgccgtgagctgagatgctcactgcatcagctgggcacagagtgagatctgtccaacaacaccgacgcaaaaaacactgtggggcgcgcccccaaactcccaaccgtcgggccgggccgtgtaggacggccaccggcccagcgccgccacgggggtcccaacaaccggaccgcggacaccggcggcgaccacgccgcgaaaacacgaaagacaccgcgaacaccaacaccccccccgcg

SEQ ID NO: 577408 - DNA, 1002 bp, Homo sapiens
tataaaatttttaatataaaaggggaaataggtaggactaccgtggtaagggcaaaaagtgtggggagaaatggggtgggttggttttttccacaactgccattaatcattttataccgtatgtaaatattgggagagctagtggtagatctcgaggtgggcatgtaacataaacgcgctgtaggtaaacagtaagaagtgttaaaggagggtagataggggcgcaactagatcgagcggcggcgactagatagacgcgctatcggtctaaggcgagaaatctctccagataaatggcgcccacttgggcgcaaaaaaacgcccgtgataacgccgaggagagcaagcagccctccctaggcgagaaggaagcgacgagagtagcgatcggaaaatcaacagcggggttgtaaaagccacgtgtcaccgcttagtttccaagtgtcgccgcaaactactatcacaaaacggcgccagaaggaccgacggaagttcaacagtctgtggcaaacttaagcagagcgaaaaatggacggcataagtcaagctctgaggccactaacctctattacaactttagtgtttaacttctttacgaagcaaagtggggtttactgtctacagcggagttttggtaacccggcttcaaacacgtgcctcatttattacccaactccccttaagtggggggcgaaacatcgcgacagcgaagcaaatcggcctaacagaaattagcgcggccgataccccaaggcgtatttgaggggtatataatcacacacccctacaaaatggccccgtgactaatacatgcgggcacacaccatctgtcgagcatacatcggtcacgagccaacacaagcgcatcacacctactaaacacgacgcgacaacaacatctacgagtaacacattactaacgaaaacatcggcagcccatacgattctcgactattttgaagaaaccaacacgacgcccgcgaattgataacaaaagagacc

SEQ ID NO: 577409 - DNA, 1364 bp, Homo sapiens
aattatagatcatagtctcactctgttcctcggacgttgtgcatacaggagagtaagacctatgtacattttacctagaaatgtgtggtgcgcaacgtgatacatcattagtgttgcgagttccggtcagaaccgtgccaatgtcagtgcctgaatcagagacccgtgtgcgattctaaggcagtatatgacaagcctcttagctagatgacaatcgtcgcatctggagcatagccagaacaaatctcatcgctctgcgtatgcagaatacttagttgaatggtagccaatcacttgcattagcaatcattagcacaaatattttcttcagagaacgaccagccattttgcaatatcacttgagtattggataacaatttccatactcaaagcgcttaatgcgccttacgtctgtcatattgggaagaatcatgacacacgcagaagccttagtaacactgtcaacgagactgatggaaaactatcgtgtcagccaacaagttaaaattccctcaaatcattcgaatgaaccaattatgtaactggggacgaagaaatcctctgtgaaactggtggcgaatccgcgttccgatatcaggattgtcagcacacaatcaagtcccaggccagaaacaactttagcagtgagggaagaatccgcgcttattggtccttggtacaggctcaatgtgggagacagagtcctaacagggcacaacacaagatcaaaaatcctcaacattgaaggacgatgcagccatcttgcccgcaccgcagaacgaaaaagagccgtttgagaaaagtggtgccacgaaggtggtgggaaacaaggcccttataagcccaacaacaggccagggcactagaccagttcagaaacaattcaatggaagtcggaccccctaacgtgcgaccgaagacaagatttatccgacagttgtcaaattggcactggtcgggcacaactcacattgtaggccaacgaaatggataagaacattccagataaccggcacccacagaaaagaactttagccacacctcgtgacgaaccacaccgcttttcgcacatgagagaacccgcactggggcagagcaaaagaccaaccacagccgagaaaagcatcaagcctctaaaccagacaacccggagaagagaccaccacccaggtcacaacagccacatgaattcgaacacggggccgcacaacaccgacagaaggagaacatcgcaaccaacaaaaacagacgaacaccctaaagaggaaaacagagaacaacgaagagcgagacaccaacaacagtcgacagaaaaaaaccacaacactgacgaaccacgacgcatacaccaccacgagagcggt

SEQ ID NO: 577410 - DNA, 539 bp, Homo sapiens
  misc_feature (70)..(70): n is a, c, g, or t
  misc_feature (124)..(124): n is a, c, g, or t
  misc_feature (213)..(213): n is a, c, g, or t
  misc_feature (226)..(226): n is a, c, g, or t
  misc_feature (286)..(286): n is a, c, g, or t
  misc_feature (325)..(325): n is a, c, g, or t
  misc_feature (327)..(327): n is a, c, g, or t
gggggggccgccttaaaccggggggttaacgggaaatttaaaaagggggtttttagaattcgggcccatnggggcccgtgggggggttttttgtattataacacattttccccgggaaaatttngggttaaaaccaaaaatggggtgggtggatttccccgcaaacccaaggaagggggggggggggatgggtttattttccggggttttaangggaaaaaaaaantgccccccggggggggccccccccaagtttttttttcccttttccctagggggaaaattnccggggggggccccatgcccaaagtaacccccgggttcnangggattcccctccccgttccctttgagttggggggcccgtttggggggcccaaaatgtgaaaattttattgggtttcccccaaaaaaaacctttggccgggggccccccccctggggggcccaggggtggggctccccccccccccgggggttttttttaaaaaattttttttttttttttttaaaaaaaatttaaaagccccccccgttta

SEQ ID NO: 577411 - DNA, 101 bp, Homo sapiens
  misc_feature (1)..(1): n is a, c, g, or t
nctcttggggaactgtggtatcctagggtgggactaaacccccgggataaactcctcttggggaaccaaccacctggcctttcccgggccccaataaactc

SEQ ID NO: 577412 - DNA, 844 bp, Homo sapiens
ttctgcgcgatttttttccgttcatgtatgcccctatttccatggctggctatcaaccactaccaacctagcgtttctctaagatggatccttcttctctattggacgggatgatgactctctctgtttttttttctcctccggacataagttcttttttttttcctcacgcgcaagtttttttttggtatgccactccttctttccacgcacctctcccgccttttctacccctttccctccccccctgtgtgggggcgcatgttgcgcccccccacccgctcgggttggctctcccgcgcgcttactacctccttaggtcatccgcccttctcctttacaacacaccacctggctttattcgcgtccgctcctgggtgaggctccaccttcccctccgggcgccccccactttgttctttgatgaatgacacacccccgctgacgcccactcctattttgttgtacccacgccttcgttctctcctcccaacacattttttctgtggtctgtgttttattttttcacccccccactccaccccacgctgcgtggggctctatgtgatgtctctccccctccaccattttcgccggagtattattcggggtcgtcgcactttttgttgttgtgcaccgcgttcttcccgtggctgttttttgtcctgtttggggcggaacatttcttctctcctatgtattggtccttcaccccccctcagttttctttcctgtttcaccccgcccgaagctcttgggtgtgtggcaccccccccattggcgctttttttaagagatgggttttattttttttttttcccccttttttggtggggggttttta

SEQ ID NO: 577413 - DNA, 189 bp, Homo sapiens
  misc_feature (150)..(150): n is a, c, g, or t
cccagtgtcaggtctaggaaattaagggctattcttccccagatacattctggcttatttgagatacatgattctcttagaatcctgtcccttggttcaggaaagtagcttggaaaaggagtaggggtatagcttggtcccttttcctgncaagcgcatggggcagaatataataaatattctgagtga

SEQ ID NO: 577414 - DNA, 100 bp, Homo sapiens
tccccgcataacaaagctcatgtctagaaaataggtatcaatgccatatataaatgtataggtaatcattgtagtagggcgttaatcttacctaccagtt

SEQ ID NO: 577415 - DNA, 272 bp, Homo sapiens
acaaaaaattagctgggtgtggtgacatgggcttgtcccagctactcaggaggctgaggcaggagaattgcttgaacctgggaggcggaggttgtagtgagcctagattgtgccactgcactccagcctgggtgacagagtgggactatgtctcaaaaaaaaaaaaagggaccctttaaaaaaaacctaggcggggttgcaggggctcactctgtgttaaccccagcactttggggaggctgaggtggccaaattaggtggtggtgtcggta

SEQ ID NO: 577416 - DNA, 184 bp, Homo sapiens
cgactgttttgttttgtttttaagtttcagacaagcatgcagagtacattcagtgtgttagatatgaatccacgttctacggtgggtgggtgatcatgtagatcagtgccttgaagtccaggtcgtcacctacatacatggagaaaggctgtagcatgtggtgctccccttctgtcgtcttctc

SEQ ID NO: 577417 - DNA, 363 bp, Homo sapiens
ggtttagaaggttggaaactctttttttgtagaatctatgagaggaaactgagaccattgagtcctatggtaaaaaattgattatctctcgataaaaactagaaaaaaagctgtctgtgaaaatgccttgtgatgtgtggattcatcatctacagagttaaagcttttctttttttttttgattcagctgattggaaacattctttttgtagaatctgtgagggtacattttagagcccaatgaggcctatagcaaaatgctgaataacctgtaataaagactagaaaaaagctgtctatcaatcaaaatgctttgcaatgtatggattcatctcattgagttaaactttcctgaatatccag

SEQ ID NO: 577418 - DNA, 426 bp, Homo sapiens
  misc_feature (27)..(27): n is a, c, g, or t
  misc_feature (33)..(33): n is a, c, g, or t
  misc_feature (182)..(182): n is a, c, g, or t
  misc_feature (249)..(249): n is a, c, g, or t
  misc_feature (350)..(350): n is a, c, g, or t
cgttatcattaggaggtcacacacttntaaatnagcagatcacaagaactcactcactattgtgaggacagtaccaagaggatgatgctaagcgattcatgaaaaatccacccccatgagccaatcacctcccaccaggccccacttctaacattggggattacatttgaatatgagatttnggtggagacacacatccaaactttatcggttggtttccaaatatttggagatttactagatatgttncttttattaatttttaacttagttccattatggttcaagaagattgtcaggcctctgagcccaagccaagccatcgcatcccctgtgacttgcacttatangcccagatggcctgaagtaactgaagaatcacaaaagaagtgaaaatgccctgccccgccttaactgatgacattc

SEQ ID NO: 577419 - DNA, 269 bp, Homo sapiens
ttccccccctggggggggggaaagggggggggctttccccttccccaaaaaggggggcccccccctttggggggggcttttgggcccccgggcctttttaacgggggggtgggggttgttttaagggaaacccccccccctttttccccgggggggggggggccccggggttggggggtttttccccccccccccgtttttccggggttttttttttccccccgggtttggcccccggggcccaaaaaggttttttttttcccccccca

SEQ ID NO: 577420 - DNA, 389 bp, Homo sapiens
  misc_feature (119)..(119): n is a, c, g, or t
gaatcctataatgcttaaatattcagcaaagtgacatcacctggaaatgttgattaatactgattatgaaacctgggaattttctcagaaggaaccagatactacttatttatacatantatgccactcaatacgttcacttattgagatcattcaggcactgtgtaaggtactgaagaaatatagtgtggagtagaaagggaggcaacagatacatgttacctaaataaaaccttaggacccacatagctaagtctactttgtgggaaacccagtatagtaaccacatgctaatttaaaatatactttcaatatttataaagctaactcaagaatatcaaagggagtctcaattcaatctgtcataatttgagactttgattaccgag

SEQ ID NO: 577421 - DNA, 609 bp, Homo sapiens
  misc_feature (323)..(323): n is a, c, g, or t
  misc_feature (380)..(380): n is a, c, g, or t
  misc_feature (406)..(406): n is a, c, g, or t
  misc_feature (424)..(424): n is a, c, g, or t
  misc_feature (437)..(437): n is a, c, g, or t
  misc_feature (458)..(458): n is a, c, g, or t
  misc_feature (490)..(490): n is a, c, g, or t
  misc_feature (492)..(492): n is a, c, g, or t
  misc_feature (494)..(494): n is a, c, g, or t
  misc_feature (520)..(520): n is a, c, g, or t
  misc_feature (565)..(565): n is a, c, g, or t
agttggtctaataccttgtttagcttgaaatccttgttttcagtgtgtcgagtcaaaatgtgtttatttagcctgtcattgtgggaacccaatttctttgtcatatacctggttatgaactagtaacatgtttgggaagtcctactgatgttcctttgaaagaaaaaatctcctggttttaacaactgtgcttttgctatgtatggtatccaagttagttgaaatccacaccctgagatctgtttgagtttagggtcatttttagaaaggggcagtttaaagcacaatgtctcacatggacaaagttccaaaatgccaaattnttattttttaaaaagctagttctataaaatctggtattatgggtggggaggaaatanaattgagtcaattgaaagactatccnacttacataaacttgtcnccatagaagcttnctgcccaggatgctctatatntatatatatatatgtgtgtgtgtgtgtgtgtntntntatatatatatatatatatatatatntgtgtgtgtatatatatatgtgtatatatatatgtatatcatatntgtatatatacgcacatatatatatgtatttaaaaaaatcaaat

SEQ ID NO: 577422 - DNA, 637 bp, Homo sapiens
  misc_feature (323)..(323): n is a, c, g, or t
  misc_feature (380)..(380): n is a, c, g, or t
  misc_feature (406)..(406): n is a, c, g, or t
  misc_feature (424)..(424): n is a, c, g, or t
  misc_feature (437)..(437): n is a, c, g, or t
  misc_feature (458)..(458): n is a, c, g, or t
  misc_feature (518)..(518): n is a, c, g, or t
  misc_feature (520)..(520): n is a, c, g, or t
  misc_feature (522)..(522): n is a, c, g, or t
  misc_feature (548)..(548): n is a, c, g, or t
  misc_feature (593)..(593): n is a, c, g, or t
agttggtctaataccttgtttagcttgaaatccttgttttcagtgtgtcgagtcaaaatgtgtttatttagcctgtcattgtgggaacccaatttctttgtcatatacctggttatgaactagtaacatgtttgggaagtcctactgatgttcctttgaaagaaaaaatctcctggttttaacaactgtgcttttgctatgtatggtatccaagttagttgaaatccacaccctgagatctgtttgagtttagggtcatttttagaaaggggcagtttaaagcacaatgtctcacatggacaaagttccaaaatgccaaattnttattttttaaaaagctagttctataaaatctggtattatgggtggggaggaaatanaattgagtcaattgaaagactatccnacttacataaacttgtcnccatagaagcttnctgcccaggatgctctatatntatatatatatatatatatatatatatatatatatatatatgtgtgtgtgtgtgtgtgtntntntatatatatatatatatatatatatntgtgtgtgtatatatatatgtgtatatatatatgtatatcatatntgtatatatacgcacatatatatatgtatttaaaaaaatcaaat

SEQ ID NO: 577423 - DNA, 405 bp, Homo sapiens
ctgaccatcttatagtggcacttctggcttgtctcttccctggcacagtggctcatacctgtaatcccagcactttgggacggccaaggaaggtggatcacctgagttcaggagttccagaccagcctgaccaacatggtgaaaccccgtctctactacaaatactaaattagccaggcgtggtgctgtgtgcctgttatcccagctacttgggaggctgaggaaggagaattgcttgaaccttggaggcggaggctgcagtgagttgagatcgcgccactccgctcgagcctgggtgacagagcaagactccatctcggggggaccaaaaaggggttgcatcagagcttgactccatctcgcggggtcagaacataccggtgggtccgaacataaggggtaccg

SEQ ID NO: 577424 - DNA, 875 bp, Homo sapiens
gccctcgctgtgtcctctgaagcaatctcagttgtcattaaccacctcttctgtgtttctggtagctattaacctgtatttaatctgtacttcctatgccagcctcaagttatatttgattcttaaaattattctcttctaaccaactgaagtgtttgtcagccatgcccccacagcttgctctttagtgctccctttggcacataactttctatccagaaacacaggagcattctccgggcactcgccgcatttgccagactgataccaaccttatagcaactgcactgtacttctacgggcacacctacccaactcatgctggcgatacgcacacgcaccgcacacaaccttcaccattggccactcccacacctaactccaccgctccactccacacctgtcaccagcggacccaggaagccagcgcgcggcggcggcacgatatgccctcgcatctgcgcctggcccgctccacaccacggcgcaacgtcacaactcactggccaacactccacacagaccgcgcggacacggccacgttaaagaccaacagaacacttcccccacccggcaatacggtacaccgccaacatcacacgacatcagacaatccggacgctacgggcacctgcagccatcgccaggcacacaccgtcaactaatcccaaccagtgttctcctaacaacgccatcaccagaaccacgcccctcacccatgccaaggggacgcaaacacacgaaaaccctcccacacagacagtaacgactaacacacactccacaaacacacccaaccaccaggccaaaacgagaccccgcgcacgacacacttacaagcaaaacacgcacctaaaccgcaaagacctacaaca

SEQ ID NO: 577425 - DNA, 229 bp, Homo sapiens
taatttcctgtttttatacaattaaatatttagatttgcttaccattcccttttacttctcagcccttacttcttagtttaatttaatttgaaatttgtattcaaaattttattggttttaaacttttgattttgcacaaaaggcttttgttgttaaatttatgggatctttttgtctgaaaatgtctctattttgtccttattcttacaaaagtgctttgatacagaa

SEQ ID NO: 577426 - DNA, 658 bp, Homo sapiens
ttggccaaacttttggttttttgtcccaaagtggattgttcccgacctaatttccctagaaaaaaacctcgtttcccggtaaaggcccggtttttcttgttcttgaggaagttttctccaaagtgaaacaggggggtttaaacccctaggaacaaaggggcgcttcgggattgttatagaccctgctggacaccatcttccaaataacccaaaatgtgttccctcttttccggtgcccaaataaggaaggagacctttgtttcttccttccaattacatccaaaatatccacacacctcctaatatttggaacctttgatcctttggggtaagaatccaaaaggaattcttataaatggttggaaggccattaaggaaggccaatccaaaggttgtggaaccattggccacacttggattaccagctggtgtttccagggatacttgaagcaaagatgagtaaggggaaaaagtaaaaaccgcatatgcttatagggcatgctccaatagtgctcatgacctcaggtggcctctccacagtctaaactggagctgggatctccaaagagcctcttcgttcccaagactttaattataatctgtatatgcaggtgactccctaatccatattccagcccagtctttcttggaattaaaa

SEQ ID NO: 577427 - DNA, 274 bp, Homo sapiens
ggctcgaatttcttggcctctgccaacagagaaggttagggcgtgcgcagtaaaagcggcccggatttgaccggcatccgatatcatatcatcgagatcgtctaactgcagaacacgcactaaagcgctttgaggcgtttcccaatgctgcccattaaattgtgcgccgtaatgtacgagatcattgcgcgcccgatttaatacagacaattgagtgagtgcgttgattagaaaggtttctggctttttttcaccagcccgccagatcgctctc

SEQ ID NO: 577428 - DNA, 258 bp, Homo sapiens
tatgcatcctaaacagccttcactagctgttgtgtgaatgtttgtatttgggttgagtcagggtttcgcagatatggcactattggcatcttgggctggataattttctgttgtcaggagctgtcctgtgcagtgtaggatgtatagcagcatctctggactctgcctgtcagatgtcagtggcacctttcctcagtatgacaaccaaaaatatcttcagacgttgccaaatgtcccttgcaggggaaaaagtcaccc

SEQ ID NO: 577429 - DNA, 165 bp, Homo sapiens
  misc_feature (6)..(6): n is a, c, g, or t
  misc_feature (13)..(13): n is a, c, g, or t
  misc_feature (148)..(148): n is a, c, g, or t
taatanaactacnatatacaaatagtaagcacattgaaagccaatagagaaattggtaacattggtttttttctggaggagaattgggtgcctgaggtaaaggggtgggaaattatcaatgtatacttttaagtttttagaaattggnaaatatattacctattc

SEQ ID NO: 577430 - DNA, 262 bp, Homo sapiens
  misc_feature (3)..(3): n is a, c, g, or t
  misc_feature (23)..(23): n is a, c, g, or t
  misc_feature (26)..(26): n is a, c, g, or t
  misc_feature (32)..(33): n is a, c, g, or t
  misc_feature (41)..(41): n is a, c, g, or t
  misc_feature (44)..(44): n is a, c, g, or t
  misc_feature (53)..(53): n is a, c, g, or t
  misc_feature (74)..(75): n is a, c, g, or t
  misc_feature (77)..(77): n is a, c, g, or t
  misc_feature (83)..(83): n is a, c, g, or t
  misc_feature (86)..(86): n is a, c, g, or t
  misc_feature (105)..(106): n is a, c, g, or t
  misc_feature (111)..(112): n is a, c, g, or t
  misc_feature (137)..(137): n is a, c, g, or t
  misc_feature (142)..(142): n is a, c, g, or t
  misc_feature (214)..(214): n is a, c, g, or t
  misc_feature (246)..(246): n is a, c, g, or t
ggntgtttcctccctcccttccnaanatatgnngttccgangantaaaatatnagagcaatatttaaatcctcnngnaatggnctnatactcttgagaatgaatnnagttnnaatcaagtttacattatgttgcttntttanatagaaattattctttatcttgcaaagaattgaaaccacatgaaatgacttatgggggatggtgagctgtgntgctttgctgaccattttggatgtcattgtanataaaggtttctattt

SEQ ID NO: 577431 - DNA, 243 bp, Homo sapiens
gaaacagggtctccctttttcgcccaattggagtgcaggggcccaattatggctccctacacccccaccctattggggtcaagtaatcctttcatttgggcttcctgaggaggtgggactaaaaatgtggccccccatgcccggcccatttttttattttttttataaagccaaggcaatgtaacttttaccccaattttcttttgaaaattcttgggtccttaaagtataccttgctgccca

SEQ ID NO: 577432 - DNA, 939 bp, Homo sapiens
  misc_feature (426)..(426): n is a, c, g, or t
  misc_feature (572)..(572): n is a, c, g, or t
  misc_feature (912)..(912): n is a, c, g, or t
tgggataaaactatgcttttctgaaatcagtttggacatctgggtcctttttcctaagtcgaaagcagaaaaagttgggagcttatctccttcttcacgaggggaatatgtggtgacattgtccgtgtccccactacatccattttccctctatcatccgtgaaattctcgtagaatgggtggctctctcgtgattatacgtggtttccttaatgtagccataaataaccccaatatcacaaatattctccgtgaagagctgtgtttgggtgaaagaaatactcaaatctttcgagaagtttctccttgtgtgcctcgtgtgtgaagtgaatttttatctgtggaacaccctcaacacgtcttgggtttgagcgcacccgagcttttcgagaatatacggtatagaattctcttctcattgtgacnctctctatagggaagaacatatctcatatattctcccaaaatatagatctctgtggaaatatgtgacgtgcaggtgaacttttctcttgtctcccatgtgtgagattttctctctcctttttcaaagccgtggtggtgttttatanaaaacccttctccacatgtgtgcagaaacacgtgtgtgtctctgtgtgtgtttacccccactgggtttgaccatgtgaaacacacattatatcttttctttctctcacaattctcgtggggggctcctcaatatttctcagaatgtggccttgtggtgtgataccctcgaggatacccttttcactatattccactgtggggccggtatttgtggcaagaaaccatttttctctcggtgggaaagttctaccgtgaccatttttggggccccaccgggtttttccggggggattcctcagttgcaaagaaaacgttgtgggggcttgcgaccccttacancaactgaagggcctgtggggaaaattg

SEQ ID NO: 577433 - DNA, 1205 bp, Homo sapiens
tttctggattcattgggaggaaggggatgaaatcctgggaactcagagttaaattaagaacaaggcatcccacagaacctaatctgaacaatccccgatgattccctctgctttttgaatgcttccaagacttatcatgaaaactgtcaatggataatcatttcctgctgactttgcacgccaaggaatgctactagggattgtttccgtttttgtttgttttttctaatatttggtacttcccagaatggtgtaaatacttcttttcaatgttgtgaccaagtattgtcactcagccaacaacttttccacacctgggggttggtggctgttcttactgtccaaatgaagctaaaaagaaaggcatctttcttcccttttaaaattgtgtaaactgcaaattataatataatttgaatttatgattattttccagaagaaatcttgtaaacctgtggatactcattaattcttttgttaatatttatttccatgatagcatcattccagccagacttgctgaaaatctactggtgaggcaaatataatatatataaatatgctacatatatatttataaaatttctagtgggagttctatataaatgtttctttggtattcttcagcctgtgatttaaagttttacaaaaagcagagctttttcctaagttacttttcagttaggtaactgtgtgatccagttcttccagctgcttctataatgaggcacatattaatacagtttttatatggtatctatgaaagagttcacttcatagagaataatacttgagcaaatgtatccaagaaagcaagcaaatgaaaagaaacctatttatggaataaactccagatctgaaattcagtattttagaaaaatgccagctcttcttactgtatttattaaaacttgtaataatgtgatttttttcaaggatattagttcaaattgaaatggtttcacgccacacggaaatctttaagttatttgttgaggtaccatatatttagggtgctaggggcagtaatgttaatatgtgcaataggactactgttgatgtgtaatggtgatctctctgagtccttggcaacatccagcaaaacctactgcttattctccaaagaatatgggagctctcaatcctcggtgatatgggaacagagaactgagttattcgccctatgactgagcctttctactagg

SEQ ID NO: 577434 - DNA, 919 bp, Homo sapiens
  misc_feature (861)..(861): n is a, c, g, or t
  misc_feature (863)..(863): n is a, c, g, or t
  misc_feature (873)..(873): n is a, c, g, or t
  misc_feature (877)..(878): n is a, c, g, or t
  misc_feature (881)..(881): n is a, c, g, or t
  misc_feature (884)..(884): n is a, c, g, or t
  misc_feature (887)..(887): n is a, c, g, or t
  misc_feature (889)..(889): n is a, c, g, or t
tttctggattcattgggaggaaggggatgaaatcctgggaactcagagttaaattaagaacaaggcatcccacagaacctaatctgaacaatccccgatgattccctctgctttttgaatgcttccaagacttatcatgaaaactgtcaatggataatcatttcctgctgactttgcacgccaaggaatgctactagggattgtttccgtttttgtttgttttttctaatatttggtacttcccagaatggtgtaaatacttcttttcaatgttgtgaccaagtattgtcactcagccaacaacttttccacacctgggggttggtggctgttcttactgtccaaatgaagctaaaaagaaaggcatctttcttcccttttaaaattgtgtaaactgcaaattataatataatttgaatttatgattattttccagaagaaatcttgtaaacctgtggatactcattaattcttttgttaatatttatttccatgatagcatcattccagccagacttgctgaaaatctactggtgaggcaaatataatatatataaatatgctacatatatatttataaaatttctagtgggagttctatataaatgtttctttggtattcttcagcctgtgatttaaagttttacaaaaagcagagctttttcctaagttacttttcagttaggtaactgtgtgatccagttcttccagctgcttctataatgaggcacatattaatacagtttttatatggtatctatgaaagagttcacttcatagagaataatacttgagcaaatgtatccaagaaagcaagcaaatgaaaagaaacctatttatggaataaactccagatcggantncggtttgaanatgnnggnctntangnttttaactgtaaaggggtgaggataacaga

SEQ ID NO: 577435 - DNA, 922 bp, Homo sapiens
  misc_feature (49)..(49): n is a, c, g, or t
  misc_feature (65)..(65): n is a, c, g, or t
  misc_feature (83)..(83): n is a, c, g, or t
  misc_feature (100)..(100): n is a, c, g, or t
  misc_feature (113)..(113): n is a, c, g, or t
  misc_feature (125)..(125): n is a, c, g, or t
  misc_feature (132)..(132): n is a, c, g, or t
  misc_feature (134)..(134): n is a, c, g, or t
  misc_feature (136)..(136): n is a, c, g, or t
  misc_feature (143)..(143): n is a, c, g, or t
  misc_feature (158)..(158): n is a, c, g, or t
  misc_feature (165)..(165): n is a, c, g, or t
  misc_feature (206)..(206): n is a, c, g, or t
  misc_feature (227)..(227): n is a, c, g, or t
  misc_feature (229)..(229): n is a, c, g, or t
  misc_feature (231)..(231): n is a, c, g, or t
  misc_feature (235)..(235): n is a, c, g, or t
cgtctggatccaaatgttcagaaatgggatgtaacagtattagaacgcngctagcacaaagcgtnatttggatagaccagtgntcttacggttttggganacattggacaggnacatggtaaagnataaatngnanttgagantctgaattatttggntcctccntttctggaaattgagactcaagctttatgaatttatcaagnacttaaaaatgaagaaggtcncngnttgntcttttataagaccttattgatgctttgtgcttcaaggagatgatacctgtcatccatataagcaaacttatttggctttacagactattttgttaatattagccttactagtctgtaatggacatggtgtatttggatgagaatgttcttgtattctccatgggttaaattaccatatacttgaaagattgtgttgtctttagacagtataaatgcacgcgttataaatgtgtgtatatcccggagatctataaggctctctggagcccatcttctagatgatctgcattgcaactataattctttgtactgacagaatactatgttatggaatggtcattaacatcttctcacgtactctggaacatccaaaaccaagcaacgggatgtgactattccgaatgagtcagaatgtgccgaacttgtatgtccgctatatctacactttagtcattgattttagaaacagaactagatgggaacaatgctaggatcaatccttcgaattggatccgaagctgtgtgcagccttctgcaagatttctcttatgttatccacctgattgacctttaatatgaatgtaccttcttctcactgagtttggtgatttttggaagctagaatgatgtgtctctatctggaatatccttgccattcgtaataaatctccaaactgagatgatac

SEQ ID NO: 577436 - DNA, 621 bp, Homo sapiens
  misc_feature (608)..(608): n is a, c, g, or t
tttctggattcattgggaggaaggggatgaaatcctgggaactcagagttaaattaagaacaaggcatcccacagaacctaatctgaacaatccccgatgattccctctgctttttgaatgcttccaagacttatcatgaaaactgtcaatggataatcatttcctgctgactttgcacgccaaggaatgctactagggattgtttccgtttttgtttgttttttctaatatttggtacttcccagaatggtgtaaatacttcttttcaatgttgtgaccaagtattgtcactcagccaacaacttttccacacctgggggttggtggctgttcttactgtccaaatgaagctaaaaagaaaggcatctttcttcccttttaaaattgtgtaaactgcaaattataatataatttgaatttatgattattttccagaagaaatcttgtaaacctgtggatactcattaattcttttgttaatatttatttccatgatagcatcattccagccagacttgctgaaaatctactggtgaggcaaatataatatatataaatatgctacatatatatttataaaatttccgtgtggagaccgtgtggaggngatcctctagagt

SEQ ID NO: 577437 - DNA, 590 bp, Homo sapiens
  misc_feature (451)..(451): n is a, c, g, or t
tccccttccacactgtgggaggtttgttcttttgctctttgcaataaagcttgctgctgctcactctttgggtccagactgtctttatgagctataacactcaccgggaaggtctgcagcttcactcctgaagccaaggagaccacgaacccaccgggaggaaggaacaactacagacacgccggcttaagagctgtagcactcactgcgaaggtccgcagcttcactcttgagccagagagaccacgaacccaccagaaggaagaaactccaaacacatccgaacatcagaaggaaaaaactccagacacgccgcctttaagaactgcaacactgcgagggtccgcggcttcattcttgaagtcagtgagaccaagaacccaccaattccagacacactaccaaaagcagaagggaagctctagacaaaaatattttgcttacaaatggnacatatccaagcttttgtgaaccttggggaagaaaccaagaatatgaagccctaatggaagtgtccagaaatgggtcgcttgccgacaagggaaccacaacccgggccacgagagggccgactatccacctccctctgc

SEQ ID NO: 577438 - DNA, 234 bp, Homo sapiens
aaaaagaaaggggtttttttttccccccggggaaacccccccttttggggggggggtggggattttttcccaaacggggggtggtggcccccccataggggggggttttcccccccggggcctccccccggggtcccggggtccctttttttcccccccccccccccccccgggggtttttggcccccttgggttttggccctttttttttaaaaaaaatttttttttttttta

SEQ ID NO: 577439 - DNA, 385 bp, Homo sapiens
ggaagttgggaagtccaagatctaggggctgcatctgatgagggccttcttgctacatcatcgcatggtggaagtgcaagggcaagagagcaagtgattgaacttgcagcctcaagcccttttataatctgcattgctccattcatgaaggtggagtcctcatcactcttattaataaatgcctcgtattaggctccacctcctaacactgttgcattggggattaagtttccaatacatgaactttggggaacacattcaaaccatagcactgggtttggtattaaggttagagactgcagttttatactggccccagcattcagattattcttgtatttgggtttgagtgtgcaatattttgtcaatacactcagttgttttg

SEQ ID NO: 577440 - DNA, 230 bp, Homo sapiens
aaagaagggaggatcccggtgacaggagtcagtctggtggtcctaagctggagtgcaagggtgtgatcatagcttactggcatcctcaaactcctaggctcaagcaatgctcctacctcagcctcccaggtagctgggaccacaggcacacaacaccacactcgcctttctttctttcattttttttttttttttttttttttttttttttttttttatttttttttttt

SEQ ID NO: 577441 - DNA, 234 bp, Homo sapiens
  misc_feature (3)..(3): n is a, c, g, or t
ganggtcctctttttactgaaggggaaaaacattgaaaatatgaaactgcagaaagcaaggtgttgcatgttctacttcttatctgtgtggttgttgcccctttgggttctaacctgtcacaatttctctggtcttaaaactaggagctgatcactggctctttcacagttaaaataaacaaaccatgcccccaaatatcatctctgttctagtttccttgtttagttaatact

SEQ ID NO: 577442 - DNA, 324 bp, Homo sapiens
aaggtccctgtggaatatagacccataattgccaaaactttgaacgaggctgactgtgccactgtccccccagccattcactcctactgatgagacaagatgtggtgatgccagaaacagctttggtaattaggtataatagctcaggcatgggtcaatgtcataactgtctttatacgcttctgccctccggggaaaaaggagtccattgaagggggattggcccccagtggccggggagcatggcccttacctttgtcccttgcttcattcttgtgacaagataaaactgggcccagctgttaaataaaatataaatggcca

SEQ ID NO: 577443 - DNA, 455 bp, Homo sapiens
  misc_feature (6)..(6): n is a, c, g, or t
  misc_feature (38)..(38): n is a, c, g, or t
  misc_feature (349)..(350): n is a, c, g, or t
  misc_feature (373)..(373): n is a, c, g, or t
  misc_feature (401)..(402): n is a, c, g, or t
  misc_feature (424)..(424): n is a, c, g, or t
tctccngtgattaccttcatctggcccccaggagattngtgcctgccaccccctacgcctgtagcctgtccatgagactggcaggcccctcggtcctaaaggttctggaggtgtgagcgcaccctgcgagtacttcacaagaagggtgtaggctgaccagaagatcaccttacagaactggatgtgtctgtcgccaccgtgggtgccgcacaaagaaaagccgaggggctgtggtgcatgggctcacgcaatccagaatctccacgtttcagaaggcgagatttgggtctgtggactgtgtgtcacgccaccctcagataaaatctggagaagagatttcttttgcatnntgaaataaaacttacacgccaanaaaaaaacaaaaaagggcgcgccgctcnntagagtataccataagaggggncccaaggcttacgcggtacccagctttcttg

SEQ ID NO: 577444 - DNA, 350 bp, Homo sapiens
  misc_feature (38)..(38): n is a, c, g, or t
  misc_feature (70)..(70): n is a, c, g, or t
  misc_feature (86)..(86): n is a, c, g, or t
  misc_feature (197)..(197): n is a, c, g, or t
  misc_feature (205)..(205): n is a, c, g, or t
aagtcctgggttccaggttccccagctctgagccttgncgagacacacacaggctggtgctgtgggatgncttggtacgggtgctnacgcctgtattcccagcgctttgggaggccgaggtgggcagatcacctgaggtcaggagttcgagaccaggctgcccaacgtggtgaaaccctgtctctaccaaaaatatnaaaattanccaggcatggtggcacgtgcctgtaatcccagctacttgggaggttgaggcaggaaaattgcttgaacccaggaggtggaggtttcagtgagccaagatcgtgccactgcaccccagtttggatgaaagagtgagactccgtttc

SEQ ID NO: 577445 - DNA, 244 bp, Homo sapiens
tcctgggggcaaatgaccctcctgcctcagcctcctgagtagctgggaccacagacaagccccgctccgcctggttcattttttttctttcttcttcttcttcttttcttttgggtagaatgtggtctatgtggcccaggctagtcttgaactccgggccttaactgatcctcccaactccaaagtatggggagccactgcacccgacctctaagcagatggctaagcacctgggaaaggctaa

SEQ ID NO: 577446 - DNA, 802 bp, Homo sapiens
cagaccgcaacctcaacagcaccttcttgcgaccccgccggagagaggagaccccattctataccaacacctattctgatttttacggtcaccctgaagtttatattcttatcctaccaggcttcggaagtaatctcccatatgtgtaacttactactccggaacaagaaagaaccatttgggatacataggtagtggtctgagtctatgatcatcaagtatggtcttcctaggggttgtactcgatgtgagactacaccgatatatttagcagtaggaatagacgtagacacacgagcatgttctcacccgtccggctagcctatcaagtcgatcgtcttatacccctcatcgcggactgctcaacagtgagtttcagctagactcgccacaactccagggggaagcggagtatcgaaagtgatcttgctgcaggtgctctggagccgctaggattcatctgttctttgtcaccggtgaggtggcctggagtggctatagtgatttagccgaactcatcgactagacatcgtacgtacaacgaccaggtactatcgttgtagactcactgtccactatgtcctatcaagaggagctgtatgtggcatcataggaggcttcattcagctgatttcccctatgctcaggctacaggcctagagcaaagcttgcgccgaaaatccagtttcactatcatattcatcggcgtgcctctagctttcttcccataacactttctcggctatcggaatgccccgacgttgctcggactaacccgatggatagcacatgaaacatccta

SEQ ID NO: 577447 - DNA, 295 bp, Homo sapiens
agacactaacggacctgcacagcagctggggtagatcaattcaaagcaatatgaaaagggcatttggggagctttcaccttacatgtgttattttccaatgtgtttgggaagcctgaagtgtccttggaaagtgacatgaattgactaggcgggtactccaggatcagagtactccaggaacagaactgttctcaaactttgtttgaaggatcagtccccaggaaagcttgttaaaaatgcagattaatgggtttcatcccagaaattaggtctagctgggttaggtctacctgg

SEQ ID NO: 577448 - DNA, 1311 bp, Homo sapiens
  misc_feature (1090)..(1090): n is a, c, g, or t
ctctctcggagttgctgctccctcgctgttttcttattcgtgcgtttctgtttggggctttcttctatgatgtcttcttttctccgtgcgcctcccataacatgggggtctctctcgtgctgtgtgtgtccacgggttcttcacccccgtgggaagtcgggtttttattccaggggggcacccaagggtttattttttgcccgcccttggtgtgggcccccccatgtcgcttcatggggttgtcacccctggggagtgtgtttgccccctccctttctaatttcttcgtcgcatagccttccctgcgcaccacccaacggcttggcaaacccctggccacaggtttatccccaggaccaagcttgggttttcctggaaaggacctcatggacccaccaagtccaataccattcactgtcccctccacgtaggacctgtggggatggcccccctcccgggggaaactcttggccttggatgggccccgggcttctcccaggaccatctatccctgccttctactgggcggccttcccaaggctgtggggcaagagtctatcccctgagctgtaaccgggaagctctacatggcactgcgcccttcccagtgtcccccccacatgccacaacgtggtacacactgcgtggagcctcgagacctgccgccttctatgaggaaaacctcgcccacaaatattgaatgagcacttcacagaacaggtgtgtgtaataccacgggcgcttcgcgaagggcccccctctcaacagggcgactctctctcgggggctacacacccttggggccaaccccacgcgttcgggttctctcctctctcgagactttcacacacacgtcgagacacacccacacttctctctccacccctctttgagacgccttggggggctcggcgcactgtgtcccttctcacaacgaccccacactctcttgtgtcaaagctctacattttcctcggtatatgagcacaccgagaatttgtgcgtaacaagcacaacacagggtcgtgtgtgagccctcactgtgcgccacacacatggcgctcccacacaggagagtatagagaccccntggagccacccaagcccccacgccacgagcacccagaggaagagagagaccctcacctgctggggagttccctgccaccacactcacgtcccccacccaccacctgaatctcccctcccttcaaacgttgccactgtagagacccctctgaagaaggggaaggggcctagggaaccgccccttgtcatgtaccatccattaagtaccctgtgctcaaccca

SEQ ID NO: 577449 - DNA, 115 bp, Homo sapiens
agtctgatctcactttatcaattcttctccattcttcagtaagtcaacttcaatgtcggatggatgaaacccagacacatagcaattcaggaaatctgatatgccattcttgctg

SEQ ID NO: 577450 - DNA, 575 bp, Homo sapiens
  misc_feature (473)..(473): n is a, c, g, or t
  misc_feature (479)..(479): n is a, c, g, or t
  misc_feature (482)..(482): n is a, c, g, or t
  misc_feature (538)..(538): n is a, c, g, or t
  misc_feature (544)..(544): n is a, c, g, or t
tttcctctgctgctctactatgctctaatctgcccttgttacgatcttcaaagcagaatccaatgataatattagttctcaggttaacacacttgcctcttacccctttttgcaatactcacttcacgttcattataccatgtgcccttgcatccctcagacctcactggttctcacatctctagtttttcctaactactttttgggtgatcttgtcccatctcatggtgctaaatacttcataacttctacttttatgtcttcagccctctcctccctgctgcttctgtgagagtccatttgcgtacctaataggcccctcaaatgtcacatgtcctgacctaggctcctgagccttctctctccaagcattctttcctattgcttgctcagtagattctgtcttgcagttgctcaggccccaaactctagggacatccttgcttccttcttttctttcacacctcccttcnaatctnacntccagtctagttggcctcactatcagtatatgtatcgtcagtactccctctgcccnatttcntggaaagtggcgacggatcctcagaccaccg

SEQ ID NO: 577451 - DNA, 217 bp, Homo sapiens
  misc_feature (7)..(7): n is a, c, g, or t
  misc_feature (14)..(16): n is a, c, g, or t
  misc_feature (25)..(25): n is a, c, g, or t
  misc_feature (39)..(40): n is a, c, g, or t
  misc_feature (55)..(56): n is a, c, g, or t
  misc_feature (80)..(80): n is a, c, g, or t
  misc_feature (91)..(91): n is a, c, g, or t
  misc_feature (97)..(97): n is a, c, g, or t
  misc_feature (100)..(100): n is a, c, g, or t
  misc_feature (107)..(107): n is a, c, g, or t
  misc_feature (117)..(117): n is a, c, g, or t
  misc_feature (125)..(125): n is a, c, g, or t
  misc_feature (128)..(128): n is a, c, g, or t
  misc_feature (138)..(138): n is a, c, g, or t
  misc_feature (201)..(201): n is a, c, g, or t
  misc_feature (203)..(204): n is a, c, g, or t
  misc_feature (211)..(212): n is a, c, g, or t
cagaagncattgcnnngtcaccaanggaattggcattgnnaatatccattatttnnatgatgggctgtggcatatgaggncatataaatgngcctcnganggaatgnccttgggctnaatatggntantgtgctgtanctgtgtttgtgtctgtgtgtgacagcatgaagataatgcctgtggttatgctgaataaattcncnngatgctnnaattc

SEQ ID NO: 577452 - DNA, 320 bp, Homo sapiens
cgatgtcatggtacactggaagctaaattgggaagatgtctgttggacggtgagatgtcagtccgcatgtgaataaatctgacctagctcctcttcacatccagatacttcaccatcaaactcagccatcatctaatctgatttcgcactcacctgggagctactacaactgacatcatctgcacttagcatatcatcaaccatgtgcccatcgtgttggtggtgatggtggtggtggtggtggtgctgctgtggaccaataaattgtcgacaattaaatccttcattcccaatagtctccccaaggaggccacagtgct

SEQ ID NO: 577453 - DNA, 143 bp, Homo sapiens
gatgcttttagaaaaggaagtgctcggcaggacatggtgtcgcatgcctgtaatcccagcattgtgggagggtgaggaggagaatcacttaagcccaagaggtcgagtcaaaccaaggcaacacagggagacctgtgactacc

SEQ ID NO: 577454 - DNA, 251 bp, Homo sapiens
  misc_feature (15)..(15): n is a, c, g, or t
  misc_feature (50)..(50): n is a, c, g, or t
  misc_feature (55)..(55): n is a, c, g, or t
ccaggcgagagagtncacacaactgctgagcttgagattgggagtgaggnctatnactgcaggactgctggagggcctgggtggtgagagcttacactgctgctgctgctggtagaatggggaagagcattaatgctggaggccacaggttggactcgccctgaagttggaggcttaatccagctgaaagaagcctttgggaatggatatgagaagattggggcttggtatattggcattgggaccaggag

SEQ ID NO: 577455 - DNA, 156 bp, Homo sapiens
tagttcggtaccgacgctctctctgtgggggaacatcttgagtagtgtttagagattgaggaagcctggcagaagcgctggtccagtcttcagtggtcactggctgatacagtgagtttaagctggcctgtgtgactccaaagcctagcttctgca

SEQ ID NO: 577456 - DNA, 716 bp, Homo sapiens
tcatggaggaccttgtggaccacagtaaggacttggattttattctctgtgcagtgggaagctatggaggttcttaaacaggggactgatatggtctgattgcatttcaaaagtttactctgggcgtgtggggaataggggaccagtgcgctcaccaaagtagagtatgtggtttaaaaaaaaaatttaattgcggccggtcgtggtggctcatgcctgtaaacccaggactttgggaggccgaggtgagcggatcacgaggtcgggagattgaggtcatcctggccaacatggtgaaaccccatctctgctaaaaatacaaaaattagctgggtatggtggcacgtgcctgtggtctcagctacttgagaggctgaggcaggaggatcacttgaatcctggagttggaggttgcagtgagccgagattgcaccactgcagtccagcctggcaacagagggagacggccatcccaaaaaaaaaaatgaaaacaaaaaacttttgtggggcggccgcgggcccctgaaaaagttttaaaaccacccgcgttggggggcgggggcccaatgttagtgtcacacgtggcccaaagcggtccccaggagactccgggccgaaccgggcggggttccccccataaaaaggcgggggaccggggttctggaacaaccaaggggtcggggctacgggccttaccgggccagggacgataatgg

SEQ ID NO: 577457 - DNA, 1846 bp, Homo sapiens
ttttatttgttattattttttttttggtttttaaaattatgttaattaagcatttgtccccataaaaaaaaaatggcccctcggaaaccctcccagcaaaaaacagtgcccaaacccaaggatatagtggtggacgggaggggccccggaccccaagttatagcagcagtggaacgagtgcaacccgtgggaagatcgacaagccccagactacgaggaaaagaaggcgtggacaagtgaagtggctccagagagggcgggagagatcccgcggagccggagggcgcctataaaaaataagacggtggcgcccaatagcacaagaggactcgggataaacggccctcaaagagataagtacaccgcagggagagacacaagagcaccgatgtgagagagagactcgcagaacatcaatcacacacaagagagaaaaacagggaaaaaatgccccatcgaaaacacattcacacaagtgaccaacaagaactctcaaagaaaacaaaataacgcggaaaaactagagaacagaaaaaaaaagaggggactacacaaaaggagggcgacaagagcagagatgacgaccaaaacaagagaagactccccaatagggggaaaaagatgaggaccaaacagagaagggaaaaaaccagagcagaggagtattatcaccaaaaacataatacagagaagaagtaatagcaaacaccaaacaacagctgaagaagacatatcaacaacaaacaacgtatgggaggaagaacaaacaacccccggtggagacccgaggagcagcacaagtaaagagacaagtagaagctacaccaacgaagacaacagcggaggtgaataaaaatagcacccccaaagaagacaaccaaatcatgaaggagacaacaaagcagaactatacaacacacagaaggaagtaggagaaggcgagaagaaaaatatataccacacacacaaaagaacaaacgacgaactcacaagaggagagcaagtattaccaccaagagaaaaccaccacagccaacccgtcgggagcacaaaaacaacacaccagagggcggtgagtaagaaaaaaaccaagcactacgcacaaaaaatacacactagcaataaatcaagatcaagaacaaaaactcactacacacccgggagatagatgggccaacactaggtagacgaggaaaggagaacacaacgaatggaaaaccccccacgagatgtaaagaaagactaacaccgacccagaaacgagaacgacacaatagaaggagagaatgacaagacaaaggaggagatcaaatgaacaggaagaaccaacgaacggacagagacgagacacaactacacaacccattatgaacacgaccccgccgtagagagaaagacgtaacaagaaacaacaataaacgcagccggtgggagacacacacaaagtagaacgagttaaggggagacacacccagcaaagagcttgtagtaacgaacaaagaccccaaaaacgaaaacacacaaagagaagagaacagacacaggaaacgacaaacaagaaccgaaaaacacgaagcaaaaaccacaaaaaagaaagagggagagacgacgcaacaacacaccgaagcataaaccaaatcacgccagcagaagagagagactggccaacactgatagttaacacgaacaccacaccgacagtgaaacgtaaagacaacaaaagaagggaggacccaactgacagaaaagagagaataagaaatacataatcgcaacgaacagcggagcagtcggaagtagaatagcaacaaaccagcaggccagcagatcgagggcgagacaaatg

SEQ ID NO: 577458 - DNA, 254 bp, Homo sapiens
  misc_feature (72)..(72): n is a, c, g, or t
  misc_feature (172)..(172): n is a, c, g, or t
  misc_feature (229)..(229): n is a, c, g, or t
  misc_feature (254)..(254): n is a, c, g, or t
acatttagtaacacatatctggctacttaatccccattctgcccccgcggttacgctttcttatctattctntcaatcagcacttcacccaattcatccttaattctaataactggctattgcgccttacctcgtgttttgtctttttttcattaccaatgtgtgcatgtgnggaacaatatggcactgcaaaatgagaaaaatagtcgttatcttttgcgcgactggnaaccagaaaatccggccttctgggn

SEQ ID NO: 577459 - DNA, 175 bp, Homo sapiens
ggggcaatgatctgaagaactctggggtcttagctcctgggaggcacacatgcttggtggcaccctgcctgtcacggtgcctcccaaagctcccaatgatcaggggcctttcttttttttcttagacagggtctcactctttgccaggctgcagtggcgggatcttggcctcgtg

SEQ ID NO: 577460 - DNA, 210 bp, Homo sapiens
gttcatttctacacaatgtagcgggtagtagtaacagtcaaattgggtttgaattccagttctgtcacttcttagctttgtaatcttctgcaagttcggttgacagaaggattaaatgaaataatttacctaaagtacaaagcacaaatgttgttacagagtaagcaattgataaatattagacattagtgtggtgataaatggccctgg

SEQ ID NO: 577461 - DNA, 300 bp, Homo sapiens
catcgctctggtcctcgaagcgcacctggtagcccaccagcgagcccaggggcgtggccagctcttcggcgacccggctggccacgctgcgggcggcaatccgccggggctgggtatggccgatcaggccatgttggccacgaccgatttccaggcagatcttcggcaactgggtggtcttgcccgagccggtctcgccggcaatgatcagcacctgatgcttgagcagcgcctccttgatctcgtcgcgcttggcggcaatgggcaggctgtcgtcatagcggatctgcggcacgctct

SEQ ID NO: 577462 - DNA, 271 bp, Homo sapiens
ttagccacagccaatataaggaatgttgtggtggtggatggtagtcgcactccatttagcttgtctggcacttcatataaagacctgatgccacgtgatttggctagagcagcgcttacgggtttgtagcatcggaccagtgtcacctaaggaagtagttgcttctctcatctttggtacagttattcaggaagtgaaaccaagcacctgtggctcgagaggctgcccttggagctggcttctctgacaagattcctgctcacactgtcaa

SEQ ID NO: 577463 - DNA, 525 bp, Homo sapiens
ctttccacactcggtccctcaggtgactaggttcaagagacattgcttttggtggcccacaaacatttcctttgagggcccatagtgaatattaaagtgtgctggacatggtggctcatgcctgtaatcccagcactttcagaggctgaggtgggcagattgcttgagctgaggagtttgagaccagcctgggcaacatagcaagatcccttcccttaaaaaaaaaaaaaattgggcggggcatgggggctcaggcctgtaatcccagcaatgtaggcagccaagacaggtggatcacttgagtccaggagtccgagactagcctgagcaacagggcgaaacctggtctctactaaaaatacaggttagcgggctgtgggggaatgagcctgcggtcccagctgtccaagaggctgaggtggcagggtggcctgagcctggcagttgaagttggcagtgagctgtgatcatgccactgtattccagccggggcaacagaactgacaccctgttaaaacacacaca

SEQ ID NO: 577464 - DNA, 889 bp, Homo sapiens
agcactgcctggctccacgtgcctcctggtctcagatatgtgcgctgtccatgggttcttacagtcctgagcctccatacctctgcgtggaagccgcagagtcccagttgtgtgccaaccgtagtagcggtgcccatcactcaagcgccaacctggaccggatcactggacaagtggtttatatatcgcgatcgggcttatcgaaacgagggagtgactatgagagtcggtgtgcaggagatccaagcaaccttctgtttacttcaccaccggaacaagacgagaggacacgatgctttctcagagagttaccatgacccgacagtgaccagtgcttctataagaccaactacctgaatgtccagcgggaaaactgggaccatctccagatactgtgggaggccatagagtcattatcgctacactatgctgaatcctcagggaactaccatgaacctagcatgcattgcgttgagcagtgacacgatggaagaaggaagctggggggcgtgttcgtgatctatagctgtacaagccccagagacgaccaacggcagcagaactgggacgagatgctacggaaagctcatcgactgcattgttgcatttcgccaagtcagatgtcgtgtacaccgagtgtgaagagaaggctagagtgtgagccagttgggagcacagcagccacgaaaaaggagaaggagaccacggagtcagggggcaatcctagcaggatcacaagtcgtggatcacggcacaggagcacttgggggggccaatcctggcccttccgaagcaccgaacagtgtggtaccttcagctttatccctcaaattggcattcattaaacgctccgtgtgttggtaagaagactaaaaaagaaaggacaaaa

SEQ ID NO: 577465 - DNA, 128 bp, Homo sapiens
tagtgttggctcgaagaagatataaatacagccatttaggtacagacattaggtaacagcatttaggtaacagccatttatgggtaacagccatttaggtaacagccatttaggtgacagccatttag

SEQ ID NO: 577466 - DNA, 707 bp, Homo sapiens
agcggaggtgcgggggggccatgctggcctcggccgcgtcccgtccctctagctgggggtcactgcgagccgcctcgctcggcggccgctcggtcatcctgtgggcagacagacaagcggatgcccgctctgacgaccgccccatgagccgacgacgtgggctgggggtaaaggggagaagggcagagagaggaactcacgcaccgagacgtgaggaagaggcagacaaagttagcgccacgtggggctacgggcgggaggccggcttgggcgctagcggtgggacgggacaccgagggtctctggcatgggcgaagggaggggtgcctgggagacacagagacctgagggccaaaaggaccagagatggaggaagcacgaccagagacatcggcacagacaacaggactacacgccagcgacagtaacacacagcaacgggcgaacatcaggaggacaggaaatgtacaaggagcgtgtgctgcgggctcttccatcacctggcttcatccagcatagagctgggccaccaggcaagaaacagaaaacaggaaaacactcaggaggattcaaggggcaagagtttggtgacgtagtgacgtggtaccatagtatgataaaccagccatcattaagcttgtttcacaataagcgttactgggtcttctggaaatcatataaattggagtatgtaaaaagacgacaac

SEQ ID NO: 577467 - DNA, 705 bp, Homo sapiens
gctcacccagcacagcgagatattttctgtgtggacccaccttctgtggtaagagcacgctacggtattgtgcgctacacatctcgtcgtggtacaatccgtcagtacaacacataataaggggtgttacgcacaagatagggtgggtgactttcaccgccgccgggggcaggatgggagggcgtgcagacatcatgcggtgacggatgctgtcgtgcgcgccgtgttcacccccctccccaggtcgtagcagcagggaggagtatgaggaaaacaattaggtgtcgcccccaccaccatttctgtcgccggtttcgattgtgcagaggacacccttcggtagttgcagagcgcggcgcacatttctatgggtgctcccgcccgggagtattgtttccctgagaggccgcactatgtggacgaggggggccccgtgtccctgccgctgatgtgtctcttcccacggagaggctttgggctgcagtgccgcgccttctgggggagggctgtctccgcccggccccgcgcttgtctcccttgttgggacgtttcctctcggttctacgagtaccgccattgttggctccacttaatgggcgaattttctctccacatctcggcggccctttctctcgactcctctcatattctatggggcgcccactttggtaacacagcgggacgactccaaagcccgacattgtc

SEQ ID NO: 577468 - DNA, 446 bp, Homo sapiens
  misc_feature (3)..(3): n is a, c, g, or t
  misc_feature (41)..(41): n is a, c, g, or t
  misc_feature (94)..(94): n is a, c, g, or t
  misc_feature (109)..(109): n is a, c, g, or t
  misc_feature (143)..(143): n is a, c, g, or t
  misc_feature (162)..(162): n is a, c, g, or t
  misc_feature (173)..(173): n is a, c, g, or t
  misc_feature (193)..(193): n is a, c, g, or t
  misc_feature (197)..(197): n is a, c, g, or t
canagcgacgctatgtcgtcgattactatttgtcaaaaagntaagttgttgtggactagtgacctgcccgaaagacctggcacacttggtatantaaggtgatgaaccnctagcaagaggtgtgacactgctagagtaaaatngatatgatttctttaaaantttagttcccnccgggagcatggctctgccntaancctagcatttgggaggtggtggtgggcagatcacccaggtcaggagttcagaccagcctggccaacatggtgataactcatctctactaaaatacaaaaattagctgggcgtggtggtgggcacctgtaatccccactgctagggaggctgaggcattagaatcgcttgaacccgggaggcagaggttgcagtgagccaagatcgtgccactgcactccaacctgcgcaactgagcgagactccgtctc

SEQ ID NO: 577469 - DNA, 111 bp, Homo sapiens
tgtctccaggcataaggggggctgaggtaggggcccagtgatcaggcacctgatccctaatgtgggccttgcgttctttactcctgcgtctgggagtctccatgcagaagt

SEQ ID NO: 577470 - DNA, 550 bp, Homo sapiens
tggccggcggatttgacggcatgtacacctactttgcctacaatggtttatcctttggttcttcccatcaaaactggaaagctgttaagaacttttgtgatgccaacatcctcatgttcatacccagtgtggggcctggctacatagacaccagcattcagccctggaacaaccacaatacgcgcaacagggtcaatggcaagtactatgagacgggcctgcaagcggacctgacagtgaggcccgagatcggttccattacctccttcaatgagtggcacgagggcacccagattgagaaagccattccgaagaagacacccacccgcctgtatttggactacctggctcatcagtccaacctgtgcctggaactgacaccgccgttgggcggagcattttataaagaaaaagaacaatggcttatgtgaggggcccttaaatgggcgtgaaggcctgatgtcctgccttttttgaagaagtcccactgggggttcaactgggggtgttaccacatacttcttcccagggaaaaggtttacaaaggggt

SEQ ID NO: 577471 - DNA, 348 bp, Homo sapiens
tcctaagttttttaaacccccccccaaaattgggctttgttttgttttttcttaaaaaccccttggtaaaagactccagggacctttgtatgaaaccagaagggggggggcaaaacccccttcctgagggtagggtgtttaaccggccctagggctcggtttttaaaaacagggtagcaaccccctgcgcccagggtaaaaacccccgttggtaaggggggtttttgcccctttgcttttttttgaaaaaccctaaaagcccccccaaaactgttcccccaagggacccataaagcttggggggccttttttttttacccgtttccaataaagcgggttttctcccca

SEQ ID NO: 577472 - DNA, 109 bp, Homo sapiens
  misc_feature (50)..(50): n is a, c, g, or t
aggatcctttctgcccacgactcgcacaagtacttaaatacaaagtcatntagtatacattatactccccatcgtaattccagattggtacagtatctttttcatttcc

SEQ ID NO: 577473 - DNA, 2089 bp, Homo sapiens
gacaacatacgacttgatctcgtgcccagagcttcaaccgaatggagtacatcgtatagcagaccgcggtgcactagtccgcacttgtctgaatgcggtagagatctgatgggcttgtaagtgtcgttataaagctagtcgtgtcatactcgaagtctgacgtgccagttctcgtcgtgaccttcatgaatacccatgttgttagtgttaagtatcttgacaatgcgtaggccttacactggcaactggtagatcttctagtggttggctagagataatcgagatgccggtatctgcacagctatgtcaaaaagagctatgtcaaggagtcccactggttgtgctgtccccgttgcaaggcacgacatcaggatctcggaatcacggctcccagggagccatggccagtgccctatgtgtctgatgagcgtcccagttctgccagaatgtctctaacctgggtgatgcagtgtcattaaagtcatagatatgaaatattacttttatatagacctcttgagattgtcgtcttgtcactagtaggcactgcactgatgagcgtcacaacaggtagtgcctggaacttcagagaggtgacccaaatgcagctttacaagaaaaccagagacaagggaattcccaacattggacttaacattgatactattccagactgcatcggccataggtaggcgctacgagggggcaggcggcgactttgatgctccggcacggagcgcggtaaaagacagactcacaaacgcagaacggacagggaagcgggcaatcaaaattccgtaaatgtgaccagaaaaactgagcccggctaccgtacacgaggcccacagagagctaataagaagcgagaccgaatataacggagtaaggcacacgacaggcagcgtaacgacaaacaggtgaatgggcaccacgacaaagggacaacagatatgagaaagtatgaaaagaaaaaaacgcatatcgtaggcttcttccttagcccgacagcaaaaaagagagaaagagagacaagagaagaaaggagagaaaagagaagagaaaagaacgagagagagcagggagggaaaagaaaagagcagaaggaaggaagaagagaaaagcgaagaagagagacaaaacaagacaaaagacgagcgaaagaagaagagaaaagaaacgaaaggagaagaaagaaaagagaaaaaaaaaggaaaagaaaaaaaaaacgagagacacaaaaggacgaagcagagaaaaacagagagagaaaaaaaaggaacaaaagacaagaaaaaagagaagcaggaaagaagcaaaagacaaagcagaaagagacacaagaaaaaagaaaaagacaaaaaggagacgaacggaaacaggagaaaaagcagaaaagaaggaacacagaaaggaaaagaaggcgaagaaacacaacgagacagaatacaacgacagacgagcaaagcgccgaagagaaccaaagaagaaagcaaacaaggacgacagagagggagaaagagagaacaaaagacagacagacagcagaaagaaatagagaagagcgagaagagaacgaaacagaaaagagagcccacagacggagaacagcaaggtaaacgagaaagaacgaaagaaagcgagagcaacgaaaccgagaacagacagcgaaaaagcgcggagaaagaaacacagacacaaaagtaagaagacgaagagagaaatagaacacgaacgcagaaagaaaggagagaaagaaagaacgagaagcaaagagaagaaaggacgcagaacgacggaacgagtgaagcaaacagacgaaagaacgaaaggaaaagaagaagaagagaagaagcgaggcgaaccagcaacagagaaagaaagaaaagagaagaaggcacgaaacacaaacgcagaagaagaacaatagacagacagagaggaacaacagagagagggaacaaataagacaaaaaaacaggcgaaacaatagagggaaagagcgaccaaagacagcacggagagagcacagaggagcaaagaagacgaagcaaggaaggaagcaagcaagaaagagagagagagcaagaag

SEQ ID NO: 577474 - DNA, 287 bp, Homo sapiens
cagggcagcctgcctggaggcaacagtttactaccatcaagttcagtgctttgactttgatcaactgactgggtttatccaaagtacagtactttgaagatgtcatcccattgtcttctgacctctataattgccactgagagatctgctgtcagtctgcttatccttccacggactcaagtttcttcaatctgaagatacatgtctttctccagggacatgtggaaaaaaaaaagatgttatacaaccatcaaagtggcaaaaataaaaaaaatcaagtaatagca

SEQ ID NO: 577475 - DNA, 367 bp, Homo sapiens
ctggacaacaggagccgcgctgtgttcctggactcacgcgctacagcccggccgtgggctgcacgccgccgtcacgtgcgcctcgatgttacgccggccgccgcgccctggccgccctcagcgtccgcccctgttgcgtgctgcgcctcagcgcgggcctctcgctgcctctgctcacctcggtgtgcctgctgctgttcgccgtgcacttcgccgtgccgaggcccgtacttggcacagggaagggctggcgcgtgctgcgctcggagcctgggcgcggtggctgctggtggcgctgacggcgccacggcactggtacgcctcgccagctgggtgccgtgaccgccagtggacccgtttcgtgcgg

SEQ ID NO: 577476 - DNA, 423 bp, Homo sapiens
agagaaaattattgtaatccatagaaaaaacaactggtttatttaataatgactgtcagtgtagccctgttcctggaattgaatctcccgcaatactaaacctagtacttcttattcaagtaattactcttgagggtcaggcgcggtggtggctcacgtctgtaatcccagcactttgggaggctgaggcaggccgatcgcctgaggtcagcagtttgagaccagaatggccaacatggtgaaacaccgtctctactaaaaatagaaaaattggccgggcgtggtggcaggtgcctgtaatcccagttactccggaggctgaggcaggagaatcgcctgaacctgagaggcggaggttgcagtgagccgagattgcgccactgcactccagcctgggtgacaagagcaagattccgtctcaaa

SEQ ID NO: 577477 - DNA, 315 bp, Homo sapiens
tgtgctgcggtgctccagaggatcccgggagtagtccaacaagaagcataacttatttatgatagaaacagtacaaatatcaaaccaagctgcagttactcctttgagacaccaaaaaaagtgcttcccatatggttacattgttaaattccataatcgcatttacaatatcattactgttgttctatcagggctcggactgcctattgctctacgacacatattgcttggtgaccatgacccaattcaatgtcccttaaacttctacacctgtttcatcgacctcttcctcttcactctcctactaggacttac

SEQ ID NO: 577478 - DNA, 126 bp, Homo sapiens
ttattcgtgttgcacccccgacacctcacctttcgctgtttgttgtttcatatatttatttaaaaaaaaatttatgtgaagaagggcagcaatactaacattttctgaactatggggtgcaacacg

SEQ ID NO: 577479 - DNA, 282 bp, Homo sapiens
atgaaccataaacaatactaccaatcaatactcatcattaataatcataatggatatagcaataaaactaggaatagccccctttcacttctgagtcccagaagttacccaaggacacccctctgtacatccggacctgcttcttctacacatgtacaataaactacgcccccagtctcaatcaatataccaaactctctccactcactaatacgtaagaccttcatcctcactctctacaatcttatccactcataacagagcagatgagagtggactaaa

SEQ ID NO: 577480 - DNA, 386 bp, Homo sapiens
gcttccttggccaggggacgccagtcggaggcaagttatcgttcaaagtctacgtgctatctagcctggccagtcaatgtctaaagtcgagagtctcctgataagagcctcgagatagcctgaatgaagagcttgtagtgtgagggttgagtcttttgacacactaatctgatggagatgcctgagagagccagtgtagaggcaaatggggagatactgctcctacggggagcctggtgattggctaaattggccgcaagaatgcactgaaagctatctcaaaagacagccttcaccagtggcgacctaccagggcgtcttgtcggttctaacctatttcattgccactaaatttgggccgggggaaggcggcatggcgcctggga

SEQ ID NO: 577481 - DNA, 730 bp, Homo sapiens
  misc_feature (52)..(52): n is a, c, g, or t
  misc_feature (59)..(59): n is a, c, g, or t
  misc_feature (72)..(72): n is a, c, g, or t
  misc_feature (87)..(87): n is a, c, g, or t
  misc_feature (95)..(95): n is a, c, g, or t
  misc_feature (454)..(454): n is a, c, g, or t
  misc_feature (458)..(458): n is a, c, g, or t
  misc_feature (468)..(468): n is a, c, g, or t
  misc_feature (509)..(509): n is a, c, g, or t
  misc_feature (530)..(530): n is a, c, g, or t
  misc_feature (548)..(548): n is a, c, g, or t
  misc_feature (578)..(578): n is a, c, g, or t
  misc_feature (592)..(592): n is a, c, g, or t
  misc_feature (610)..(610): n is a, c, g, or t
  misc_feature (618)..(618): n is a, c, g, or t
  misc_feature (622)..(622): n is a, c, g, or t
  misc_feature (631)..(631): n is a, c, g, or t
  misc_feature (637)..(637): n is a, c, g, or t
  misc_feature (650)..(650): n is a, c, g, or t
  misc_feature (695)..(695): n is a, c, g, or t
  misc_feature (705)..(706): n is a, c, g, or t
  misc_feature (711)..(712): n is a, c, g, or t
  misc_feature (728)..(728): n is a, c, g, or t
tctttattttctgtggaagcgaatagcagtaatagccagaaaaatgagaaanctctganaaatatccaaaantgtatggcagaaaanagagaaanagtgttgatagagaatcagctgaaagcatgtgcctcttttatacgaaccaggcttctgcttcagtttaccccaaccctccagcaacaaatcgtttgcctttggagaggaaccttaaggacctacagcaggaaattgaagataaaatgaaagggttcagccttccacacacgacagacacacctttgcctgttgactacgcctgaggtgagtgtatcccactccgggtttatgtgaaacagaacgccactccactacgactacttttccacactggcctcctgaatacgccacttttttactaacacgcacggggccaacactcttaactcctacctgaaacggacctatgtcctccccncccncctggtgttncccttctttgaatcacctccacgcacactcacccacacggncggccctcctttgactccggncacttcccccctgccacnccgttgccggggaccccgcacggggccctnggtggttttcactngtacctttgttcacgctncctttgtntacncacccctcnccctcnccctgacaccacncactcacactcgcccacactacactttgtttttgttttcacgttncttgaactannactgnnactgacactgacactngc

SEQ ID NO: 577482 - DNA, 168 bp, Homo sapiens
tctcaacctcccacgttggctgagactacaggtgctggccactatgcccaactaatattgggaatctacgtatacgtggattccagaggggtgacagtgaaaggtgggaccatccagtggcaggaaaacaagcttaagacgcccactgattctacatcatgctcctac

SEQ ID NO: 577483 - DNA, 358 bp, Homo sapiens
aatcggttatgacgggtctaagaaatgtacaggagtgtacggaacttagtggtgtatacgtatcctcagggatccatgccaatcaagaaatgagggtgctcgggatcagaggttcagagccgggttatacatatagagcactcagggagctttggaacaataaagattggtcagccctatctcaaacgtgaatcaaaatttctggggtatgggccttcggcgtgtgcagcaacaacttcgtccatcccgacctgtccatacggatcttccatactgatctttctgcgaagtgtggttactcggcgtgtgcagcaacaagttcgtccatcaggacatgtatggattttcggcgtgtgca

SEQ ID NO: 577484 - DNA, 247 bp, Homo sapiens
gtctctacaggatcccccaccctaacagctgggaataattctacagtcctgcatcactctgcatttaggtggaaagttgaacctcagagataattattaatacctgttaaataaatttcatgacaattttcaagattctgcatttccacaactactgatcagtgactgtttagcttgcttaagtaaaggaaggcaaacattgtgggttagagaacctctccatagctctccagaaggagccgaagtg

SEQ ID NO: 577485 - DNA, 258 bp, Homo sapiens
ggtttttaaaacccccctttttttttttccccccttgcgggggatttattcccccggaagggaaaagggggggggggcgccctcccccttttgtttttttcccccccccccccctttttcggggcctttcccccaaatttttttttttccttccctccctttaaaaatgggccggggggggggaagcccaccccttgggggggtggtttttgggtttcccggggggggtttttttttttttaaacccttcccggccca

SEQ ID NO: 577486 - DNA, 675 bp, Homo sapiens
gggttattctttattttttttcggaagtcttcctaaattaatgggcactgaaatagaacagggatggagcataaacccctccaaaaacaattttgaaaaaacccaaaaagtacacaaaaaaccccgtaaatacaaaatctaaccttttcccccagacctccctagagggtaagtaacgtgactttaagggcagctatataaatagaatgtggccccacaatttccgagggttatcaattatagccaactatgaggaaaatatcaccaaggtgagcataattcacagcaatgcacacaagatcctcaaggtcaggcacagagtggggggtggtggccaggggaatgagggaggctctaagctaggggcactgctggtgggacaggatgcccttgaggactgaaccctggggagaagacaaacgtaataataaaaacaaataacaagtattaagaatgtgttgacctatagtgaagatgaatataatatgaaagttcttatatatattgggaaaaggtatttggaattgtattgttccaggtgtggggtggaaagtatgaggcaatatctgccaagatatatctctaaggtgatagcagaggcagaatatatagattagagagtctattgtgaagagagagcctgaaaaaacgggatgctggttgaacaggtgttta

SEQ ID NO: 577487 - DNA, 421 bp, Homo sapiens
ctcagcttcctgagtagctgggaccacaggtgtgtgccaccacgcctggctaattaaaaaaaaactttttttagagatagggtctcaccgtgttgttcaggctggtcttgaactctgggctcaagtgatccccccacctcggcctcccaaagtgctgggattacaggtgtgaaccaacatgtctggcccctcttttttttttttttttttgcgatggagtctcgctctttcacccaggctggagtgcaatggcgcagtctcggcgcactacaacctctgcctcccaggttcaagctatccttgtgcctcagcctcccgtgtagctggaattaataggtgtgtgccaccacgcctggctctttggttttttttttattatttttagtagagactgggcaacacagcgagatctcttgggggt

SEQ ID NO: 577488 - DNA, 833 bp, Homo sapiens
gtgataatctgtgctttgttgggctcatcttccatgcattgagcctccacgggcgcgtcgttcctgtatgcctgaatgggcaaatgtcgcaagtgctggaattaacggtcatcatgtttcacaggagaccatccaatcacaagtctaaagctaatttgccaaaggtgtgggtccgatcatctcagaacgtgccaatgacctaccgtgggaggtactattgctgcccgtctcaacatcccagttagccaggtgaacctactaaggatgcccaagcctgcgtacgtacactggcaagtcatctaaatggacatgagctccgagcagctggatgacattttgaagtaccacactgagatagtgtttgccaggacctcccctcagcagtaagctcatcattgtggaaggctgccaaagacagggtgctatcgtggctgtgactggtgacggtgtgaatgactctccagctttgaagaaagcacacattggggttgctatggggattgctggctcagatgtgtccaagcaagctgctgatcatgattcttctggatgacaactttgcctcaattgtgactggagtagagcgaaggtcgtctgagtcttgtgactaactttgagagaaatccgattgcttataccttagatccagtaatcatcccccgagatcaccccgtaacctgatagtatattattgcaaacatacccagtacactggggactgtgaccattcgtctgcattgacttgggtcacttgaaacatggttcctgcgatctccctggctttatgagcaggtgagagtgaacatcatgaagaggacaggcccagaaattcc

SEQ ID NO: 577489 - DNA, 1177 bp, Homo sapiens
gcggcttttgtctctacagtaggtccccccgtttttccccttgtcagaagttttctctgggggaatttaccgcgtgtcgtatggggtcccgggggcgtctggcccctcctgatcactcgtgtggttatcctctagggctctttctttgttatacacccgggggtctttttttttctctgcaggatcctgggggggccctttgtgggccctcctttgcgcccggggaccccttttgggcggtgtgtgtcggggccccaccccgaagtattgttgggcgccccccacgggtgtttttttgtgtcccggccgattttctgttgggggtgttcatcccacagctcgtcttttttgcccgctggggggcactcccccatgcggcctttgttgcgccacaatttcctcccacgggcacgtttcactctggtggggggccctcattagggggtggttgttttatctggccctccccccccctccccccctcttttgggggcgcgccacccccccaccccaccgctgtatttattagtgtcctctatttgctacacacgtcttctcgagaggcttctctttttgggcgcattttccccctttgcccgagtggccactgtgtccctcagttttgtcacggccccagcgcctctccgcgccccttattttgtcttgtggcacttgagccacactcttttatgcgccacacttcgcaggacacgcgtgtttgtcctccccggcccctcgtgtggggtggcccccctgttcctcttgccacaataccacgatttggggacaaatggttacaccacgcacagacatgtggttttctccagatctatctcactcttttggcgcgccccaatgtgacacaccccagagggtttggaatcacacgaccccctgtgagatcctcttggtttcacccaccacgcgtctccctggtgcgcagaatccaccccacccgggaaattgggcgtttgccaggtacaccagcccgacactggcgcctatgggtctcccctttattctcccaccccacgccccggacaccccgggtttttcccccagtgggcccactccagattataatttttctcaccccccaccccccccccccattttgtgggtgaggggattccccgtgggttttcccggccccattaaattttccctcccccctgta

SEQ ID NO: 577490 - DNA, 738 bp, Homo sapiens
gagatcacaccactgcactccagcctgggcgacagagcgagactccgtctcaaaaaaaaaaaaaaaaaaaaaaaaaaaaaccaaagcagttgtggttgggggaccccaaataaaggggggttctatttcttgtggttttgttgacccccccccactattttccccgtgtgccatttattctggggaacagcagaacaccgggttgtgggcttcaacggaattttctctttctccccccattcttattggcgggcgtgctagcgggggctcttgtgccgtgtcttctctctccgagggggcagggaatctctgtgaccgctataacaaacaacctgggggggttctcgcgcgatatccttttatacccacaactctgtgggtctccccaaggagatcccgggacaaggagaacaccagggaaatatttcaccccctgtgaagaatttttgggcgcccctttcctatatgtgcttctctcaattctctctatatgtgtcatattgtgcatcatttgcgcgcaccgcaagcactactattgccgcgacaaaaataaaacaaaaaaacacgaaggaggggtggttttataactactacctaataccaccaggaggggggtggaaacaccaaagagcgagcaaagttgtcggaaacaaacacaggttggttggggaagataaagttgggtcgtctccttccttttctatataatacagtccccccccaaagtgaaacaaaccc

SEQ ID NO: 577491 - DNA, 307 bp, Homo sapiens
  misc_feature (79)..(79): n is a, c, g, or t
  misc_feature (94)..(94): n is a, c, g, or t
  misc_feature (97)..(97): n is a, c, g, or t
  misc_feature (104)..(104): n is a, c, g, or t
agtgacatgatgagtgcatttaatctacaatctacaaaactatacaaattaccaattatacatataaaccattcctccngaagctgtttgaggnggnactgaanaaacactgaggttttttattcccaacaatggaacaaggctcacgccccagcagcacattcccaccttttagtctagcatcacaacacttcccctgggatttgtacttatttatatattatctaagtcctaggacgttggtaccctaatttttaagtcactcggatactgagttaatcactcccctaaacctattctaatccat

SEQ ID NO: 577492 - DNA, 1728 bp, Homo sapiens
  misc_feature (379)..(379): n is a, c, g, or t
ggcacgtctccggaagcgcacgtcggcggtcggttccctcgttgagcgtagtcaccgagctgctctcgcgagtctgatgagtttgcaaacatgtcgcgtttctatccacacggctgcagcgcgtagggaactatgcgtggtacctggtaagacagggaagcgcggatcagtacatgagagatcagattgtcacatgttcgcttatgcagatgaaacagaacgcgatgcatcagcgaagaccataaccaaggacgggagttcataggtgcctgactggctcgccaaatggcaatgcgacaaagtattcctcgctatgggatcccattcgcgagggcacacatgtcctgggacacgttcctatatgatgccaggctacgancctgcgcactgtgatgcgtgtgatgacctgcactgagcgctgaaggaaaggatatatgtaccgtatacggaagaccccgtgttgacgtgatacccagaggcatacaacgagtttcttcctgaactgagggggcaatgggcaagtgttctactgctttcgcttggaaaacgcgtagctaggtgcatacagtgacacccaacgtagacgcatttggacacggaaactagggctcgattgcttgccgcccgaaaacccctcccatggtctggaacgtagtgggactcctggattgctaatcctcatgggcaatagttccagggaacacacgttcgcagcattttaaccactgttttgtgacggtggccaaaagaacaacgcgggcaacacgtggtgggacgaaacaacggcactgggcgttgtaccttgggggcaacgagccacagggggaccgtgtaaccacagagcccggtgaaaagtcgcaatgaccgccagagaaccacgtaaggaacctggccgctgtgtgccacaggaaggaccttctattgccggaaaagtggttgcccaccaggaagaaccgcataaggagggcgacacacactgtggtcctttgcgtgtgacttcccaaaacgattacgaagcagtagcgggatccacccattggcagcgagacggggtggcccacaggaaagggaaaagcattgaggcccgacgacgatcgccccaggcacaacagaagctgggacaatggggaaacataacgaaagagacttgggacaccaatatggcggaaagagaagcgccgggcagcaatgggacacgttggaacaacgggacgggacagagagcacacaccggggacaaaggtagggactgggcgatataagagcacgagacgagaggagaccagcgtgatgccacacagaagattgcgagcacgcgcttcgaaaaagaccacggttgacacgcgcgagaatgcccttggtagcacacatggtgaccgtgagggagtcaaacggagagggcgcctcaccaaagactggggcgcactatgcaaagggagaatccctacgggcgccccaagtgcacatggagggcataaaacgcatggcgagcacaacaggtagcagaaatggaggaccaccaagtagacgcaagatgagccacggggagcaaacaactatcgggagaacaacaagacaactaaggcgtgcatagaaggacaccgcagagaccacatagggcgcctgacgagacgattgctgcagaaggcgcgaccacaagaggagaacgaaacaaacgagggggcgacaggagatagagccacaagaaggacgtagtacgacacgaca

SEQ ID NO: 577493 - DNA, 372 bp, Homo sapiens
aatctattttgctataaacgactaaggtgctctagtatatatctgagactgagtgatacaagaatagctaccattcactgtgtacttattagaattgaacatggaacatggaccttcatcattcttctaacggcatacaatctaataagaggagttaagaacaaattgcttcacaaattataaaaatcagtccactcacaaggttgggcatcctgtagttaataagtgctcatccatcttggctacagaaatctaaaattcccatggtttctaaggtgcttgatataaaaggggtacttttgactgtccaggaataaataattttatttcacagacagaagacttatttatgtagaatcagggctgctggat

SEQ ID NO: 577494 - DNA, 755 bp, Homo sapiens
atttttctttctcccaaagaagattcatggatagtcagactgaactgtgtgcaacaggaaaagtcaaaagggaaaaggtagctgatgaggttacatggttacatgttctacatcatgcatagtagcttgaaatctagtctggagaaaactggatcaagattctagcccactggagttgcaaggaatgagaggcaaaaattctaaagatttgggttatctctcccccccctcgcgcgggcccgcagagagagtggagagcaggaacttacagttccaacaagacatcactgatagtctggtagtcacacgacattagattcaagtagagagagcaggtctttactgtttagctgagtccagttcaatacaaacatgtacatagaaacgttagtcctttgagactgacagtgattaactgatccagttgtcgggtgggacactggatggtaggttcatctgctacgacgaaggcgacttgcagaggctcccttttagtcgcctgctgttctttttagcacactgagcctcacgtgtgaccctgactgcacgtccctttgcgtcctgattattgcgagaggccccctttgattttggggatttactttccgccactggccgtttacgaatgagacagattttggcccctggttgtgccagcccgggagaggacctcggttggccaatcctagcgttagctgttccagaacgtcatggtttggtgagcccacgcgtttggacctttctccttacttttg

SEQ ID NO: 577495 - DNA, 200 bp, Homo sapiens
cccgaatcttcgtcccatcagcagccagactgactctggacaatcatgataagtgtgacaatcatcactccctagaagtagtaccatgggtaaggaggccaccagggtcatgcttacaagccccaagtaatcgtccatcatgggagcctctatcagcattgttattcttgtccagacgggtcctgatgagagcaagatgg

SEQ ID NO: 577496 - DNA, 592 bp, Homo sapiens
atcacttcacagagttgtgcaacctgaccatgacttattcttaaaacgttcgcaccaccgccaaacgaaattccacatccattaatcattcatatctctttcccgtgcaaagcccccaggtatctagatacctactaatctgctttctgtctctatagatttgcctattctagactttcatagaaatggaatcctacaatatgtagtaggaagattttaaataatagattccattgcatcagtaggcataagactataaagattttctactcttcttgtatctattttgataagttgcatttttcaataattttgtcaatttcctctaagttgtcaatattattggcataaagttgtaaataatattttatgtttttaatttctgtataatgttttgtgatgtcctcttttacattcatgatattgatcattcatatttatcttcttttttcctggtctttttttttctttttttgagacggggtaccattctgtcacccaggctgtagtgcagttgcgcggtctcggctcactgcaatctccgccgctcagggtcaaatgattctcccacctcagcctcctgggtggctgc

SEQ ID NO: 577497 - DNA, 521 bp, Homo sapiens
cagtcaattgaatcactgggtgaaaagtatggagagggaaaggccaggagataaggactatgtgttcagcaggaggcccaccctggcagagccatggagtttgaggttcatcctccctagggtgaggaccaagtttttcttcagaacagagatcccagctgggcaacagagcaagaccctgtctctacaaaatatttaaaaattagctgtgcgtgggctgggcgctgtggctcgtgcctgtaatcccaagactttggaaggccaatcacctgaggtcaggatcacctgaaggcggatcacctgaggccaggagttcgagactagcctggccaacatgaagaaaccccatctctactaaaaatacaaaaaaattagcagggcatggtggtgggcacctgtaatcccagctactcgggaggctgaggcaggagaatcacttgaacccaggaggtggaggttgtagtgagctgagattgcaccactgcactccagcctgggcgataagagtgaaactccatctc

SEQ ID NO: 577498 - DNA, 453 bp, Homo sapiens
ttcagcgatgcatactagagtaacactcgtacacatatatctaagaaggtatataagcacagcaataatctttctaactaccggatttacatcaggtaatatattcacaggtctcctaccttgtaatcagtgacccaaataaaaattctctcatttcccagttcatctgcatgttgttattgggccactgcaataagcagcccgaccctcagtttggtctgggaacatttctgctgaggaggcaactactcttactacttgggtatattttcttccagggcttttcaggggcagttatcggtgtataatcctgacagattgctctcaagcttcaccactccacacttccaacatataatggcgtgtgccttccccatcactggttctttattgtctataaagtgaggcccaattttaaatcttatgaaattctgtgtctgtgtcagagattta

SEQ ID NO: 577499 - DNA, 284 bp, Homo sapiens
tgtcctgtgccacgaaagtgatgctggcaaaacgtggatatctaagtgcctagatgttgatctaagactctatataacacgagacagaacgagtaactcagagtgcaccatacacctaattgtcagagctagaactcaccaaatgtatcaagcatatctttgtgaccttgggttaggcaaagacctcttagatgtgacaccagtggcacaagccataaaagaaattcattgatgaattggcttcattaaaatgtaaaacttttgcatttcaaaatacgttatta

SEQ ID NO: 577500 - DNA, 346 bp, Homo sapiens
taatctagaggatcccttggcattctggactcagatgtagttttctctgcgcgtgtcgtattcctcctcccaaagcgtgcattgtgtcacagcaggtctgcctgtgccacaggagagggcagcagtcaccagtgtacctgctgctgcctgtgaatctaggatcggacagctgtggagagcatgctgtgacagccacagcctgcagcatgggctgcctcacagttctgcctgggctcactttaaagcaccttttggtttccctcctctcttgttttgatccacaacacagaagctctcgtgtcatggtcactgtggtagggggtaccgaggctcgcaaacggtaatc

SEQ ID NO: 577501 - DNA, 919 bp, Homo sapiens
taaatcacagctgttgaaggcttgagttcgagctttgtgttgctgtcttttaaatccagtttcttataacataacctaaggcctatttgcatcacaccactcacgtctttattgtgcttatggaatgctgataatctgaagctttttttcaaaggttagaagaggttctcaagagcatcttttaacaggtgtatataaggcaagtacgtatcatgaacaaagtttcggtattcgttttattataaataaaaaccttaggtgtgatcaacaatgacaaaaaagcaacacgaaaacaagcagcaggagcaaaactgaagattccctacctgagacagagaagaactaagacatatatagcagcacattgcaagatacctatatggtagaagatctcccttagattaatgtggcgtttagtacctttgttgtactggaccggaatgcagccacatttttattacaaaaataaggagctgttcgggttgtacttttagtctcaccattgcgaaaggtcactccaataaagatgatagagcataaaataaactctgtgctaaatagagctaacattctaattacaagttacttggaaacctttattctgataagggagaccctggctcctactttgccactggctgggcagaactactacagagagtgaacgcacgggcaccgctgctgacgactctccgtatcatactcagcaacttccagttgttccgggttgaagccacacgagacataaacaacacatgtgggccggccaaatttaaactgtgcggcgcgccaggaaaaggatacgtgcaggaacgcgcaggggtgtccacaaacaccggccgctgaccaggggggcgggtacagcgacacacccggcgcgagtgaggccgcccgccgacgcacgcacaaacagtcgcga

SEQ ID NO: 577502 - DNA, 267 bp, Homo sapiens
  misc_feature (58)..(58): n is a, c, g, or t
gcctttggggcccccttggggttggacaaccccccctttaaattcctttgttttttcnaccgggataatttttggccatgttcttttttttttaggttcagggcagttttgcccccccgcccccctcctggtggttccccagcccttttccctggccctgggttggaaaatttgttttccatttcccctgattgcccccttgctggccagcccaggggccttttccatgttttttccccccccgtaaataaacttccttccccccca

SEQ ID NO: 577503 - DNA, 310 bp, Homo sapiens
  misc_feature (178)..(179): n is a, c, g, or t
gaaaatgttggtgaaaagtgagtctcgaagtggtagctcacacttgtaataccagcactttcggaggctgagacggggatcgctcgaggccaggagttcaagaccagcctgggcaacataacgagacccccatctctaccaaaaatttaaaaattagccgggcatggtggcgcactgnnttgtcccagttactcctgagactaaggcaagaggatcccttgagttcaggagttcaaggctgcagtgagctatgattgagccactgcactccagcctgggtgacagagcaagactcttatctacctgtggg

SEQ ID NO: 577504 - DNA, 442 bp, Homo sapiens
gggtaccctatctttccctttctttcttctattacatctatagtatatctattcttctgaatcatctttcaattatatacatctctcaggactctctatttcactagcagaattaaatatgaatactttatagttcaaatccacatattttgaaaaatccgtaggattaaaaagctttaaaaataccagagtatttatttatcctagtgattattttttcctccattattcatttaatcaacagcgatatgctagtatttttagaagttcatattttcttccccaagttggcttcacttgtcattttttttaatcaactctgcaatttgtcagttattttccattcctgttctatcatcagagggataacgatacctttcttatctggaatcagctgtacataaatacacacatattcataattcctctttctttgaaaaga

SEQ ID NO: 577505 - DNA, 167 bp, Homo sapiens
agttcaagagcgcgtgttcaacctgatggccgattataaaatcgagcccaagttaactgacccactaacagcgtgcccgctttcaggaagtgaaaaaggcgtttgtttcagatgctaaagctaaagtagaggcaaagaataaagaaactccttctgagacagtgaat

SEQ ID NO: 577506 - DNA, 414 bp, Homo sapiens
  misc_feature (7)..(7): n is a, c, g, or t
  misc_feature (98)..(98): n is a, c, g, or t
  misc_feature (208)..(208): n is a, c, g, or t
  misc_feature (255)..(255): n is a, c, g, or t
  misc_feature (261)..(261): n is a, c, g, or t
  misc_feature (266)..(266): n is a, c, g, or t
  misc_feature (272)..(272): n is a, c, g, or t
  misc_feature (279)..(280): n is a, c, g, or t
  misc_feature (413)..(413): n is a, c, g, or t
gtttgcnaattggggggttgtcggtgttgctcggggacgtgccttacttttactctgaaattcactttaactgcttgacatataatttaatacttaanaataatatagctaagttgtttaatagtatttatagaatgctacttttctgggtagacatgtttcacaaaacagttttcaattaatgctgggcattcatttgataattgtnatcataatttgattcactgattaatggattaataatttattcaatantttggntgccntaaggncccctgnnagggataatctgatggttgctcattgtgcaatcctgcctattagtcatcctccgcccagcctctgctcgctttccccctctgttgacttacatgtttccctgtgtgtgattttggtcaacaacaaaccatcgnt

SEQ ID NO: 577507 - DNA, 255 bp, Homo sapiens
cagtggcagctgtagacagaagaacacgaggacagagttgctgcccggctctagcagcacccatctctctgcacgcacagacttaactgtgtgttgtcttctctttatctccttcggaatacaaacagaaccttgcacagtacccaggtccgccaggaactgaaatcccatattcagagcttgccagacctctcactgactgtccaatgtcacatgcgctgtcttagacccccctttccctctggctgggcgacc

SEQ ID NO: 577508 - DNA, 179 bp, Homo sapiens
cctgaagaagaccatcttcaagactgatcattgtagatggagaattcaacataaatacagcaagaaaatgtgtttgggcttatgaagagatgactgcttaccttaacatgataactttttagaacttaaactgtataggatgatggtgaaattcttaagaaataataatgaaatcaaaa

SEQ ID NO: 577509 - DNA, 1008 bp, Homo sapiens
ggagccgcccagctcaccagatgagcctagttcctggccatggattgccccggtaaccatgatgcccagtcaatcagcgccccggactgcaccagagccatggtcgcgcagaagagcactgatcgtactgtgctcactcagcagaggcacgtccttcaacttatgccatgcaaggaggcttgctgcgagcggcttcttgacagcaagacacaggcatgggagtgctggtgcgaggtcggcacctcgtatgcctatgtacacgttcaatccctatcaattgccaagaaacggacatccacaggtaaaaccgtgaaggaccctgtcgacactctcagtgatacctggccagagtctggtcctgggcttcatcatagagcaaggcccattctgagacccagataatttgtcggccgtcgcacaccaaacacgtaagctctggatagcctgctgagacacctttgctcgatgattcccgatggttaccccctcttgccaagatggtattagagagtacccctggccaattgcgtgaaacggctaggctgctgacgcggagtctgtccataaggacgagtcttgctattacacatttcacagctggccatgtcatgaaccgaaggaacccttccaggagataaccgacaggcgagctgcgtttccagtcaagcacattggttgcgccagtgggctccatagtactcgtctgcaaggggattccacggcggacatgacatgtcattctctggccaattcagcagtggcattctgccattgtctgtggctatccaagtcttagaacctcaagctgaccattatagcatttgggcacactccaggcagagggcccggaattccaaatcctggaaaggaatggcaagaaacgcctggagaaatatttggcgcatgagacaaccactgtaataataggtcccgaagcagcctctttggagctaaacttaccgggcaggattcttaattgaaacacagaggtaccggatgcggagaaaa

SEQ ID NO: 577510 - DNA, 893 bp, Homo sapiens
cgggctctgccccagctcagacactcctatgccttggtgcagctgccgggcgagtcagcggagtagcggccagcgggcgatggagacagagagacaccctgacgagaggagtgcggggtgggggaggcggggagagtgcgtggggcgtgaggctggcatgggttggctgctggaagcttggatgctgtgtcctgtgctgctcccctgctgccctgatggtgttgcagtgagtgctcgtgaagctgtgcttgcttgcacctgctggtggcccagtgctggctgggcttgggtgtggcttggtgtggtgctgcttgcctgcctgccgcctgcctgggtgtgcgtcgcttggcctctggcccctttgttctcgcgcgctccccctctgcctgcccactcccctgctgtctgcgctggcggcggctggtggcggcggcggctcctccctgcccgaggcagtcggggctcggctgcctgggggcgggaggggggcggggggagcactgccatgccgccgagagtggggggcgattggcgaagctccgggtggcttacgagtacacggaagccgaggacaagagcatccggctcggcttgtttctcatcatctccggcgtcgtgtcgctcttcatcttcggcttcttgctggctgagtcccgcgcttgcaggatctgcaagccacggaggccaattgcacggatgctgtcggtgcagcagatcggcgaggtgtcggagtgcaccttcaccttttggcgccgacttgcaggggcagcttcgcggtaccccttgcgtccaggtctacgttaagcaagtcttgagtccaagtctagggcgctggtgcacagggaagagcaccaggttccttgacgaacccgaaggtgctcctatattcctcc

SEQ ID NO: 577511 - DNA, 178 bp, Homo sapiens
agtagggctcagagctggtggctctggttctcttcacctgggtagagacttcaccgtcctggcaggagctcgggggagcccttccccaaggtgctgggattaccggtgtgagccactgtgaccagccttcactaatacctcttcatgtgtgccgagcatcccaataaagaaggaaaat

SEQ ID NO: 577512 - DNA, 108 bp, Homo sapiens
tagagctcggcctgcttttgagggttcagcagctcctgcccaagtcctacactttactgacatgacccacattcacagtactctcctgaaactttgcttgttccgctg

SEQ ID NO: 577513 - DNA, 127 bp, Homo sapiens
gtgttcgttatcggtcggctcagtgtcagtacgcgatactaacttcttggtctaggcacatgaatattgtagtggaggaagagactgatactacaggtggatgcggcaatggattattacactcatg

SEQ ID NO: 577514 - DNA, 379 bp, Homo sapiens
cttattctgaggactgtagaatgagtaggagttagatgaagaggaagtaagacgtgtttcacgagtgcaatggaagtcggcgcgtggcttttacctgttatccctgcgctttggaaggccggggtttcacgggttagccaggatggtctcgatctcctgacctcgtgatctgcctgcctcgacctccaaagtgctggaattacaggtgtgagcactgcgcctggccagtctgtgtctttagtacttacagtgtagcagttgccacagccacaaaatcacatattactgcctggtgtgatagatgcatagtaaagtatgagcaaggcacagtggtggttagtgtgtgagaacaaatgttcaactttccctttggccctaa

SEQ ID NO: 577515 - DNA, 523 bp, Homo sapiens
tttcatgtctcaagccaatttctcttcctcttcattttcgctgtgccataccgattccgcatctgttggttcaacatcgccggtaataaattctcttctcttgtcaaagagaggctggtatagcgctgcatactttctttccaagtcatgtactacttcatagaacttggtttcaatgtgagcacatctcactggaagttgtttcaaggcattaattcttctattgagggcttaggaaaactttaaatgataccgagaggggagataagtgacattgccagttcgtcacggaaaagctgccagaactggaggattctgcatcacctgatctgtgagcttttctgtgttacttgcatttttagcagcttccacggaatctgaaggaaccccatctgaaaaactgtgatctgccatctgaatgtttttatccccttaaaaacgggaagcctgaacaatccggcgcgcccggccgtgtaaccgccacagacacagcacgcggggcgggctgcccaaggggagatat

SEQ ID NO: 577516 - DNA, 548 bp, Homo sapiens
taacttcttagtctcctaaaactagacatttaaaccatcatttgtatatatgtgtgttcttttcttggtggaaaggtttatgtagacacaaattatagttatcatgataacacctgtagttatactaaactgtttcatttttattgtaaaaattttttcagtatcagacctttaaaacaaaaattatacagtagcatgagtttgtgctaaatggttttccaaaataattgaaccttcagtagggaacccatcctttaagcctatgttttcttccttgagtctcctagagcttccagttcactacacctaaacccgggcatgcaccattggaggatcaacagagtccttatcagcggcggcagttggtaatatttttgtcggtgtgcttatcagctttgactgggattagtcctgtcttacatggagtataataattccatgagaatagagatgtggcctctaattcctttataattcctaaaagtactcagaactatgttataatccacacactgtggggaccaaataaactttttttgttgaccaaa

SEQ ID NO: 577517 - DNA, 104 bp, Homo sapiens
  misc_feature (32)..(32): n is a, c, g, or t
tagaggatcccaggctgatgtggagtgagcangaaaaaaaaaataaaactctcatgattggtgtggctaattataattcagcgtcatttaagcacataaagacc

SEQ ID NO: 577518 - DNA, 476 bp, Homo sapiens
tagccactaagttgtagagcggctccaagaaatgcatgagctaggatagtgaggtaaggcatgggttagagattgtgctgcactgcacgctaactcgtgataatacttctgggtaatgttttctctgtattcttgcctgtatctttcactgtgtatagagtccagaattctcagtataagtctcccatgtgtctcccttgtagtccttcaagacctgtgtcaccccaatctgtcctggcttcctataattccccaattcccaaccaatttcatgttttgcttctggcccttctcatctgtaggaatctttgcccacctcctcatagctctggattcttgggctctaagcctgagggcccaggccctcaaggagagtccagagatacaggcacagaggccctgacctcctcacatcttggaaccgtttacatactggcactagccgaaagagttactggcaagatacatggagcctt

SEQ ID NO: 577519 - DNA, 129 bp, Homo sapiens
ttctccttgcatgtgatgatctagtaggcacgtcggtcaacaggacacatgcctcctctgactataacctcttaatagtgtgtataatgaaaactgtaaactttgttaaataaacgtgtatataccttg

SEQ ID NO: 577520 - DNA, 148 bp, Homo sapiens
  misc_feature (111)..(111): n is a, c, g, or t
gggtatggacatccaccagatccactacttcaaagttttgcttggtctctggagtgggcgggctcgggcggtcaagaaaagccttcacccagtagtctacacacccatatnttcctgggagggatgtccccagaggcccttgaaggga

SEQ ID NO: 577521 - DNA, 293 bp, Homo sapiens
  misc_feature (136)..(136): n is a, c, g, or t
  misc_feature (146)..(146): n is a, c, g, or t
  misc_feature (196)..(196): n is a, c, g, or t
  misc_feature (244)..(244): n is a, c, g, or t
  misc_feature (257)..(257): n is a, c, g, or t
  misc_feature (266)..(266): n is a, c, g, or t
  misc_feature (279)..(279): n is a, c, g, or t
  misc_feature (282)..(282): n is a, c, g, or t
  misc_feature (284)..(284): n is a, c, g, or t
  misc_feature (288)..(288): n is a, c, g, or t
gtttcagtggagcgtatgagcgtcaagtcctgctttttcagtagccccattgcggggcccccccattcatcctgtttgaaggtcctgggtttggtgtgaccccttggcggctggtgggtggggttttcaaatgggngacggcgctntccggcaaccggggatggccgtgtccgcactgaccaggcctgtggaaagnggtcggcctaaccttagaacacatttggaactgaaaacagggttttcnatttggacagaanagttagaanattttattaaagnggngnaacnttgga

SEQ ID NO: 577522 - DNA, 526 bp, Homo sapiens
  misc_feature (526)..(526): n is a, c, g, or t
tcttttttaaaaagagacaggtcttactctgttatccatgctggagtgcagtggcgccatcatagctcattgcagctttgaacaccatggctcaagtgagcctcctgcctcagcctcctgagaagttgggattatgggcgtgagccactacataccaaattttctctgtcctctcacctgtcgataggcacttaggttgattccctatctgggctactgtataattctgcagtgagcatggagcgcaggcatctctctgagatcccgatttcaattcctttggatacatacccagaatgggggactgttagatcatatggtagctccatttttaactttttcgggcacctccatgttttccataatggctgtattaatttacattcccaccaacagtgcacaagggtccctttctccacaccctcaccaactcttgctgtctccagagttttcggttaacagccatgatatctcattgtgattttgatttgcatttccctgataattagtgctgtttctagttctn

SEQ ID NO: 577523 - DNA, 110 bp, Homo sapiens
ccacaaatggaagcgccccaaatgcatcccccaccactgcaagccagccatgggcaacagagcactgaccctgtactcacaaaaaaaaaaacactaaacagggggaaaag

SEQ ID NO: 577524 - DNA, 202 bp, Homo sapiens
ttgccaaaaaaaaaaaaaaaaaaaaaaacctggccatattttaacatgggtcccatccctgctgaaaatgggattttcccccctttctgccttttgctattggaaaaatgttttttagatccaaaaccttaaaggaaaaaatgttggatttataaatgctatttttttttttacttttataataaaagggaaagccaattta

SEQ ID NO: 577525 - DNA, 422 bp, Homo sapiens
  misc_feature (377)..(377): n is a, c, g, or t
  misc_feature (393)..(393): n is a, c, g, or t
ctgagacagagtctctctctcgtcacccaggctggagtgcagtggtgggatcttggctcactgcaacctccacctcccgggttcaggcgattctcctgcctcagcctctaagtagctaggattataggcataagccaccgcacatggccacaataatgcaattctgtgggttttagtgtatttacaaaattgtatgatcatcaccatgatctaactccggcctgggtgacagagtgagaatctatttcaaaaaaaaaaaagaagctgggggagcttggattgaaagggaggaaaagatggtattacatttttctcctggtttttctagtgaagttattctccccaacctcaggaagtaccaagcttttttggtgtantcatgccagattcccncctttccatgattaaggaatatcgggaat

SEQ ID NO: 577526 - DNA, 110 bp, Homo sapiens
ctcgatcgttaccagcaagcttgcggggtaacctgatgccccctctcctccccttcctcaagcacgggacgtttatataattataggcagggatgagatgtgcacctagt

SEQ ID NO: 577527 - DNA, 817 bp, Homo sapiens
  misc_feature (283)..(283): n is a, c, g, or t
  misc_feature (643)..(643): n is a, c, g, or t
acactgataataatagggcatttttttcggcacaccctccccggtcaggtcggctcccccccctcgtttgtgccgccccctcgtcggtcggattcgagaaccctctgtacgaggcatacttgtttttgcgcccctcttcgcaactgtttaccattgggccacaacacatttgcgcgtgacattggttgctcccacaactcgcggttcggtgaaaacctctgggcctcaggagtgacacccactctcacactggccgcgtagttgtggtcgcccacgcaagganaagccccaagaccaaaatttttttctttcctccccgcaccacactagacatgtgtagacctcctctgggtggcctctcttattcaggctggcccacacagcccgattcgcctggctggccacaccccactctcaggcagcccacaaaaaaccctctctctttccgcacagaaatgttgttttttattgtcacagcacaccaggcgtacacattcaaccccataccgcctctttcacagagagttcccacagaccccaccgatatttgatttgagtgcgtttctctcacaccacacgaagcccacatgcccctcttctatctcacacacagaggggtgtgtcgagagaagaacaccccgcnctcttctatgtctcctctctgcggaagtgagaatgcgccccttagagtgggcgactatttggtgccaggcgatgcatggtctctgtaacatcaaatggtcactatggtagaggccaacccccgataacctttgtctttatgacttggacttaaaacctgcaccatgaatgcaaa

SEQ ID NO: 577528 - DNA, 175 bp, Homo sapiens
attaatagtcagtcctggttatagcagtaacatcgagtgatatagccccctctatcagttctaagtcccagagggttgcctcgaggcaccccgtctgacatccggcctgcttcttctcacatgacaaaaactagcccccatctcaatcatataccaaatctgggtaccgagctcg

SEQ ID NO: 577529 - DNA, 272 bp, Homo sapiens
aagaggtcccctaggcttcctcctacagtttgaattccgttagcttgagggtgtgtacagccaggacgggtggaggggctagagaggaggcgagccaccactgaccagtgtgaaggggtagggggtgacgctggaccggggcaggtgctgggtggcaggtgggggagtgagagccagagctctcaaccaagcctctgagaggccgcagggcttgagaatcgcagacccagaggctaatccctgctcaggccaagaggctgtagccagaaggt

SEQ ID NO: 577530 - DNA, 706 bp, Homo sapiens
tatgacactcttagatagaaactgggtaactcttcatgaacttggggttggcgaagcattctaagatatgactttaaatatctcatgcagcacaagaagacaatttggacttcattgaaatttaaagcttttgtgctttgacaggataccatcacgaacggtgaagagacaccctacagaataggagaaactatccggtgaatcataatcttatagagactccgaaataactttcaaaactggacataggatctgagttacacacttttcccaaatatatgtacatggcccataagctcatggaaaagatgcttgacatcattaatcatctagggaaatgctacgcaaaatcaaccatgagatatcacttcacacccagtaaattggcgttagaataaaccagatcgtcacaagtgttgacccagagattgtagagagagttggaagccacagatactgctggtgaaaatgtcaaaggggtgcagccactttatgcagttgcaacttctcaaactgatttatggccgagctagcctatgacctagaaattcctctcctaggtatattaccaagtgaaaggacacttatgttcacacagaaacttgtactgaatctcttcaacctagttctaattacccaatttgaacgctcactatcgtcaaagggactggattccctgcgtcactatacgctgttagcccacacc

SEQ ID NO: 577531 - DNA, 1671 bp, Homo sapiens
gcctctccttcagtagcgtaatcattcagcacccgcaccaaggacgtgtagtacgtatgtacggaccgtcacgagcactcgagtagtgcctccctctcacttattgccatagagataggaggtgatcacataagtacccccgagtggagtctactgaccatgccgtaccttgataagagccctgcaaaggccacgcaacacctctgcctaaaaacgtagcactttgtgccctcacttggtcccttgtaacctcctctcagccccgcctttcgcctaacactcgtggccacgcgtggccccaccgctcgcatcagacacaccacgcactcgtccacccccatctccagtgcgtgccgatacacacgtcccacaaccataacacccgtgaatcctctagcgcctatcaggcctgacacacggagcgccgagcgcgccagccacaccatgagggagtcccccctatctcccccctgtccccggctcagagccaagcccacacacaagaccccttccagagggacacagcgggacaaagcccaagcgaccatgccgcgacagcgagaccccgacaccgctacaactgtgagtcaacgcctcctacccttcgccaacccagagcctattaccctagccatggcgcaggcggcacgagaccatgtcgcacagcaccagccctcacaccccgaaaccctctgaacgaccaatgtaccgccgagctcccccagcccctggacaccacaatagccgaccacagcaaacccgaccccccacaaaaccgcacaacaccccacactaaagcgccacacagctcagccacccgcctaataccccacaacaaaacatcccgcaccgccaccgcaaggaccaccgcacaccgccacctcgccgatgaacaacgacggcgcagcaaccgccggcgaaccaccccaagacacccccagccgcacagcgcacatcccgaccatcccaccctggacagccacaccacctcgcaccctagcagccccctccccgacgcacacaccacacacacagcctactcccgccacaccaacaacgcccctcccctactcaacccgcctacacgcgcccaatctacgcaccccgccccccgcacctccaccccttcccccaaccactgcccccacctgccccccccttcccacactccctcccacccacaggcaacctcgtaccaagcaaccgcgcacctccggccacttgcccccgcccgccactgacacgcgcacaacccacccccacccaggacccgcaccccgaaagcagaccagcgcccgcacactcacacccccccaacaagaccccacacagcccacaaccctacaggatcccccctatcagccacccggctcgtcaccaagcggcacaccacggacaacgggcaaccaccccccagaccgagccacacaccaccggcacccaagacacacacgaagccacaccaccaacctacgccaccccacacgaccgcgccacaacgacgaccacagagcacgccacgcacccctgcacggccagccaaccaactcaccaaactcgagactcacaccacagccgcccaacaacacgtccaagtcccgcaccgagaccaccgcgaagcacgcacagcaccacccaccataccacacaccccagacaaccccactcgca

SEQ ID NO: 577532 - DNA, 115 bp, Homo sapiens
ttggccttgagttacattcatggctatctatgcatacgggtgctgctaatcttttctactgattagtagatgaatgtttactataggacggatctacaataacaactatcgtcta

SEQ ID NO: 577533 - DNA, 787 bp, Homo sapiens
ggaatgctgtggctggtttgatctcctattcagatcattacattttcctgcatgtcagcaataaggctgtttttctttcttatctatcatgtttctctggagtagcacttttaatttccttcaagaacatttcctttgcattcacaagttgggtaactggtgtaaatgatagagctttggcctgtctcagcttttgacatgccttcctcactaagtttaatcatttctagcttttgatttcaagtgagaaatgtgtgactcttcctttcacctgaacatttacagttccttgtagggttattaattagccaaatttcaatattgttgaaatctcagggaatagggaggccctaagggagggagagagatgggagggtgtcagtcagtggagcagtcagaacacacaacatttattaagttcactgtcttatatgggtgtggttcgtggcaccaaaacaattacagtagtaacaccaagattactgaccacaagccaggcatggtggtgcatgctgtggccccagccactcaggaggctgagttgggaggattgcttgaacccaggaatttgaatacaacctctgcaacatagtgagacacctgtctctaaaatttctttttttttttaatttaagaaaggaacacaaggccagggcagtggctcactcctgtaatccctcctaatggatatccctccccttgtccccattccccgagaggcctggtgtgtgatgttcccctctctgtgtcatgtattctcattgttcactcccactggtgcgtgaga

SEQ ID NO: 577534 - DNA, 183 bp, Homo sapiens
tttgaggacggcggccaggatctaatcccacagtgcctgcgggccacaaggccaagaccaggatctaggtaagtagacgatatagggaggctggtcctagaggtgcaagagggagtgccacgggacagagagggcaccggggtgactaacagtccctaccagactacacatactaacccgcac

SEQ ID NO: 577535 - DNA, 171 bp, Homo sapiens
ttcgacctcagtagcggagcagtacggagcatcagtacagcgagcaagtacagcggagcgtcacgcctgctgggggtatgttgtgttgctccgcctgctgggggtatgttgtgttgctctgttgctccgcttactgacgcttactgatgctcgcttactgatgctccgtta

SEQ ID NO: 577536 - DNA, 874 bp, Homo sapiens
ctgccggcccgggacccgctcgctgcagacttctcgggcggactgtaggacgccgccgctcggggccgcccctgtgctcgccttcagcgcccgctcagcccgccgtccgcgccccggtggcgggcccgacgcccgcattccgccctgtgtcagtgcgcagagctccctgcaccctgggtgagccttccttgtgcctgtctgtgctggtgccccgctggcccgctgcgctcggcgccctgctcgccgtggcagaggggaaggcggctggcctggctggggatgggcggcccggcttgcgccgaggggcgcctgtggaggctccgtcgcgctgctgctggcgctggtggtcgcggggatccccgcggggcgccttacaacctcgaccccgcagcgccccgtgcacttccagggccccgctgactcgttcttcggctacgcagttctggagcatttccacgacaacacgcgctgggtccttgtgggcgcaccaaaggcagattccaaatacagcccttcagtgaagtctcctggggctgtgtttaagtgccgtgttcacaccaaccctgaccggagatgcaccgaaactgtacatggctcgaggggaagaatcgggggcacgtccttgcggaaagaccttgccgggaagaccgcgatgatgagtggatgccggtgagcctggcccgacagcccaaaggcttgattgggccgtgtgttgtgccttgtgctcattcgctggaacagaacattctactatgaaaggccgaccagattcgtaaccccatggcttcaggctacatcattcccttccaagcttccaggccaaagggcagggacggctgaatccccttgcttatgacacgagtaatacgaagaa

SEQ ID NO: 577537 - DNA, 137 bp, Homo sapiens
gtaaaccaggacgacctgtaccaggccttgccaagtgggtaagattgccagcctcctggactggatgtgacgagcccagagccactgcctacaaaccaccctctccttaccctcaaggacctgtgtgattcgtgccc

SEQ ID NO: 577538 - DNA, 117 bp, Homo sapiens
gaggttctgctgattcggtatacacgactgcgtctggagacagagatcgaggctctcaaggaggagctgctcttcatgaaggacgaacacgaagaggaagtaaaagggctacaagcc

SEQ ID NO: 577539 - DNA, 352 bp, Homo sapiens
ccatagtttacatgaagattcactctggtgttgtacattgtatgggcttagacaaatgtatgatgatatctacaattatggaatcatacagaatagtttcactgccctaaaacttctctatgcttcacctgttcatccctttcttccctaatcccctggcaaccactttaaaaaaaaaattaggttcagggggtacatgtgcaggtaaactcgtgacaagggggtttgttatacagattatttagtgacccacgtactaagcctagtacccaatagttacttttctggtcctgtcccttttcccaccctccaccctcaggtaggccccagtatgttactcctttgtgtccat

SEQ ID NO: 577540 - DNA, 1178 bp, Homo sapiens
gccttaacagcaggactggatggctggaacgcggtgcccagatggtcagttctgcacctgtggcctgctgcctggaccccgtgagtgagccagctacagctgctgccgtacccttctggacaaatggccacaacactgagcaggcatctggtgtggccccatgccaggttgatgcccactgctcatgccggacactcctgcatctattaccagtctcagggcacttccagattgctgacccattcccagaggccgtggcctgctggggatggccatcacatagcatgcccactggggcattccactgacagatgcagactgggcgatcctgcattccaaagatcaggataacaacatcctgtgggtgccatccagatgccctgatagatcagtatcgaatgcccggacttctcacacagtagctgatgttcatggtacgactggctcctggagggatgctgaccccatgcccccgggcctatacctgctagtgacagaccaggggtcgcacttggctgtaccgccacggtgaccttctagcgcaccttggtaacaaaagcccggactgcacatcaacacccacggagacacccagcccacatggacaacagacagctcccatgccacagcaggcctaaacaggggacagaaggcctaggcacagactcgggcacagtgtccgcgacgccacaggcccagggtgcccctgatggtacataaccatgcatcgagagcatgacccagtggggcacagaagggcatgacagccacacagagccacaggcccacctgcaagatcacacacaacggccacagggaggacgcacaaagacacagagagaagacaggagccagcagaaggtgccacacaccggagaacgcccaaggacacccaaagacagaagcacgacaaccaaagagggacacagacaggtcacagcaagacagacgccgcgcaggccaaaccaagaggaccggaaccaccacgccgcccacaggccacgtcacacatccccgcgcaccagagagagccaagaagatagaccacacgaatagcgtacgcaaaacagcacagagtacgcgcgccaacaccaccgagaacagacgcaacacacactgagccgcaagcagagcgcaccagccacaaagcaacgtaacaagcacaacaggagccgccc

SEQ ID NO: 577541 - DNA, 1685 bp, Homo sapiens
  misc_feature (239)..(239): n is a, c, g, or t
  misc_feature (296)..(296): n is a, c, g, or t
  misc_feature (351)..(351): n is a, c, g, or t
  misc_feature (415)..(415): n is a, c, g, or t
  misc_feature (431)..(431): n is a, c, g, or t
ggctagcgtgcgctgcaaatgcgcgcggacctatcacagacgaggagagcctgttagttggactcgcgcacttgatccctggcgtggccgtgacctgaagctatgctatacatgcgcgtaagacgtcgcagtaacatgaatggcttacaatcagtgaggctgagaccaggtgacgcacctgtacgaggcaatcacagggcccctaccagtcaatatatgtgtgaaggctaagcagcaancgggagcatgtggtgcttagcgtcgtatacattgcgatggagcaggcactcttgggnacagatgtgtagatgggtttcagctcttgacgagatcatcgattctggcctcttnccatgagcgcgagacggtaggtctgaactgctcttatcgctcgcaagaacgtgttggggaagcntttacgtacgcgtcantaagtcgataagaacgggtgagagcgctcgcacgtgcgcatgtgtttatttcgtagaatgtgtgtacgtaaccatttgcgcatgcacgttgcatgtggtgaattctttgcggttgcctcgctagaggaatgggtgttcgttcgcttgcatttgttgtgcgctaaacgcttgcgaggttgtatcccaattcgattcgcggtagacacgcttggcgttgtccccacattagaaggcgccactcggcaatagagacgaattgccgccttagtcctggttcggtaagaggcgaatcaaggatgtcacggagggcagacggggacaaggagggaccggacgccataggagagaagacccattcttgttgagagagaatgccgggcccggtcaatacgcgggcgcagaacactcgtagtgactgagaattaggcacggtgggtagacccccagtgcttttaccccggtccaccatcattgaccttttgcccacctttgttgcgcctttgatttggaacgccccaaacgttggggatatgggctctttaccctggtgtggtttggggttcgcggtagggccccctttgtcaaccctggtttgaaaccgtatctgattggcttagccccccattgggggttgggagcccttgggctgggcccgcctttggaggccaccccgggcgccttggtggcagaccccaggtcgcaaccttgctcgaagtatccacggagcccctcccatgtgggaatggcgtttaatatgcccgcgcaaccacaagacgtcttagcaaagaggccttgccaccggcacttgagttgcttccgcagaaaacccggggagaaagccttgggaggtgagcccctggtagattccagaaaacagtgggccaagcatgagggctacacaaaggcgagcatagagactagaggagcccccacatagagtcgtagatggccgcagtggtgtgcctccaacatgagccccaattcacagaaagattagccccgaatttttaagagccccggtataacgggggttcacacataataacgccctgggtgcacacaggcccggcgcacacaggcgacaagaggaccgaaggagaccaaaactacgggcggggcacaaacccatagaaggagcagggcactcaccacgacaggaagagcagacagaaggtagactatcacccagtgagtatgagtaagcacccaccccaaagagctcgtgaacacatgagggggagaactccactagtt

SEQ ID NO: 577542 - DNA, 257 bp, Homo sapiens
caggcgctgttggcacacatcatcattctgaacacatcgcaaatttgccaattcactggtctggggttcaacagcagcttcaggccattcaacacttaccgcactgtgtgagaaaccacccaaatttactgagaaggggaccttggcagtgctgctctaaaacattcagagccagatgcagggccaacaatcagaatggtctacatgccccgggacggggaagctcatctcttgacaccaacaagcgccattggggt

SEQ ID NO: 577543 - DNA, 120 bp, Homo sapiens
caccgcccgcggcaccggtttgccggctttggcatccgccagggcaaataccccgctgcatagcttgctgtcctcaaatgcctggctgtcgccctcttccagctggctgcgaatctgcgg

SEQ ID NO: 577544 - DNA, 244 bp, Homo sapiens
acctttccgttaccccacccccctcagggcacacaatacagccttttggccacgctggaacttctggggaaacttttgttgggcactttggccggaggcctgggtgatgggttggggccacatccctgctttttggtcctggtcaacctttttgcctttcccgttttggacctggacctagcacccagcaccttttttttagctgagtgggtggagtggtcaataaaaccccatgtgcctgtga

SEQ ID NO: 577545 - DNA, 403 bp, Homo sapiens
tttggacccagacatccccccactggtctgctgacaagagtcaccgtcatagtctaccacgaggtggcaccggagcggcagctgtcctcacaacttcttacttcttcaccacagggatgtggcacaacatatggaggattttggctttgtgatcctcagtgtccagtgtcacccagataggccggaagctagcctttgaagccaacgaatgccataagctctttcaactatgagaccccagtctgccccaagctttaccagcactctggtccatgggccatctggagacatatctaccctttgatgccataagcactatggaatagtcagggatggtcgccacatagttaaaaagctgccatggtatgccttgcagaatggagtacctaaagctcgtgtggac

SEQ ID NO: 577546 - DNA, 132 bp, Homo sapiens
ctccccaactattgtacacttcgacaaggctgtgaacttccttcacagcccttgtccatttgtaattgtcattccttggattattcctgggttacagtctatctagactttaatgctttttttttttttttt

SEQ ID NO: 577547 - DNA, 352 bp, Homo sapiens
ctagagctcccacgctataagtaacgcttagttatcacaaggcctgcactcaacctcaaaagcgtaagggtttaggccaggcgcggtagctcatgcctgtaatcccagcactttgtgaggcagaggcgggtggatcacctgaggtcaggagttccgagaccagcctgaccaacatggcaaaaccctgtctctactaaaaatacaaaaattagctgggagtggtggcgcagacctgtagtcccagctactcggaggctgaggcaggagaatggtgtgaacccgggaggcggaccctgaagtgagccgagatggcgccattgcactccagcatgggtgatagagtgagactctg

SEQ ID NO: 577548 - DNA, 219 bp, Homo sapiens
ggctcaagtgatctccactaagctctatcgggaaccaatgaacagtgaaaaccaagaccggcactttaatacaagtacaggcggtggcttctgcctagcgataccaagaggtctccagatctatagggagtcgtcagattatacttggcgaaagaggaaacagacagagctaaaacggtttgatgatccaggtttgatagctcctagggtttcaagccg

SEQ ID NO: 577549 - DNA, 266 bp, Homo sapiens
gcacgttcatgacttggatacaccctggacggtcacacccaaacacatcacacacactcagactcatgcactcacactcgcttaccctcacatcacatgcacactcagacacatgcactgagaaacttgcttacactcacatcacacacactcggactcacatgcactcacacttgcacatcacgtgcagactcatgcgcttacacacatcacacagactcgcactcacactcggtcacatcacacagacacacgcactcaaaaaa

SEQ ID NO: 577550 - DNA, 305 bp, Homo sapiens
cgcgctgtactttcttcatgaattcccactgatcacaaaccccacaccaccgatctcactgacaccatgttcaaccatgtctctttactgttacaaattccagggaactggccttaggaaatccaagtatcagaccaaggttgtggagtattccaccacaggaaggaatgctgaacaactgatttacagacttgttgccccagctagaccaccaggtagcccattactcaaggtaaccattacaaccaaatagtgctaacctgcataccctacccctcacatgcttagccaagccccagctgcgg

SEQ ID NO: 577551 - DNA, 408 bp, Homo sapiens
ctgcaggcatggtgtagagcacggcaggacattgtgtctacctggaaacaacattgtgcctaggtcaccttcccactctttaaagcaatgagtgcaaagatgttggaggaagggggaatgtatttaacaggcagagggtatagtctgtgcaaaggcttctgggctagagagaatatacctcttatttccagaatatatttttgttccacaaagtctgattcaaattagctctaaatttttggattcataatattttttctgatttatccttggtatgttcgttctggctctgaaaatttttgctgttactgttctgtgtgtgttcttatttttttgcttttcgaccaatttttgggtcttcttgttttatattgtcgggttgtttctttcgctgttttttctcttcta

SEQ ID NO: 577552 - DNA, 689 bp, Homo sapiens
  misc_feature (70)..(70): n is a, c, g, or t
  misc_feature (72)..(74): n is a, c, g, or t
cccacaccaaaagcacccacacccctagacccattagaagaccacacccccccccccatgacgccctcgnannncccaactattaaaacacaaaggggattgtcaaagaacagtttctgctacaacggctggcagacggggccatcaacctctatgccatggaggtggttctctcaagggcctcaaaatccctgagtgagggccaccccacagcccagcatgagaaaatgctctaagacacctgcagtatccaggctacaactcaaatccaagagggcatggccaccctgcaatctaacccctgacaacaaaagctctaccacaacttcaaaagcatctccaacgcctaggaggagcggagtggtgaggtcaccagcaacccacttaacttctaaatactcccaaccaaggcctgtcccaagtatataccttccctcaaaccaaagcccaaacccctgtccttaacgccctgattaatccccaacggacctagaattcccatcactagacctactctcaagagcactgactgcctcacaaataataaaaatttctagccacgcaaaaaaaaaaaaaaaaaacccaaggggggacccaagacccaaatcaccctatacaaaatcatataacaattcaactagccccaagttgacaacatggtaaacagtaccaactaacacaaataaccg

SEQ ID NO: 577553 - DNA, 248 bp, Homo sapiens
tgcctgtcgctggagcgttgtgacaacagaggagggaaggcaagctctggagccgctccctcaggctactccaggagtctctaaaccgactcttcccctggggatttagcaggaagttgtcaagatggaacctgaagatgctacagaggaaatccgtggatttctttgagcctacgtgacgaatacacgatgtctggagactgggacgcccgttcacttcggcctccgacgtggtaggcctgacgatt

SEQ ID NO: 577554 - DNA, 201 bp, Homo sapiens
actgggcccctgatcctatgacacacttatatgattgaagatacaatttcggaaacagaagcaggttgctaattacaaggaacatcaatggatagctcccagagaaagattcatcaattttggtgtaattatgaaagtatatatataaacattagcattcccaaatctgccatgattaagattaggtcaaacttttttttt

SEQ ID NO: 577555 - DNA, 136 bp, Homo sapiens
ctcccagggtgagaactcgttcccctccaagcctttcatgaaaaagctgcttcttattaatcatacaaactctccccatgatgtgaagagtttcccaaatctttcaaaataaaaagtaatggcttagaaactgcca

SEQ ID NO: 577556 - DNA, 219 bp, Homo sapiens
gagagaattctgtttaaactaacatcataaatgaccctttttcctttagccccaaggaatttccctagcccgggccccctttcttggtcacattttccccaattttctactctttgcccaaaatcagtgcttaactctgtttcattgggtctttgtttccttttgggggcctcctgtgtcccagaaaacttacattaaatcaatattcttttttcctga

SEQ ID NO: 577557 - DNA, 383 bp, Homo sapiens
gcctcattaggccacaggtggggccaggctgtgagtacacagagcggagtgagaacttacggtgcttttccaggctcacccgtgactgcccatgcaccaagcagcacacactttcctctgaagcccataaaaacccccggactcagccagacttgggcagaagacaggacgacctgcttatggagaatagctgcccactgtgggtctctctgagctgttctgtcactcaatgaagcacctcttcagattgctcaccttccacttgtccacgcacctcattcttcctggacatgggagaagaactcaggacctgctgaatggcaggtctgaaagagctgtaacacaaacagggctgaaacacacccattgtttgccacattgca

SEQ ID NO: 577558 - DNA, 1414 bp, Homo sapiens
ggcgagaagcaactatggccctcatcacttcgctcgccgaaatccccgagcgccgtccagcggggcagagccagagccagggccgaccgcccgaaccatgagtccggcatgcgcctcttcaggccatggtaagtctgcactggcaatgcactcttgcgggacatacagtgaggacaaggtcataggttatatacgcggtctaaccaatcgagacgggacctcctgtacaggggcatccgttggcagcaaaagtcatgccgagtaggcgtgctgcaacagcaagggatatctttgccctccaggaaggcaggtctcacatttagtaagtgaagaagcaaaggtagtgtggaacgattctatctccaagacgtaaaaccatgagttttgccacgctcaatgggtctaaggacctccttagtgtcctagcgtgggcgtcccctgttccaccctcgcaatcgcaggggtccatgcaagtggtgtgcatgaaccccatgtgtcccttctttccaataggaccaggccagaaaatcgctacaccacttgtataagcgaaaaaggagtcggaacaggcacgcggcgtgccacgttcaggacagaaggaggagaccaggggatgcaagggcggaacacagcgcccttgtagaaggccaaggcgaaccttacttttggagttacaacgggttggtgcccccctttcgcgcagaatggcatggacccatgtcgcccctaatatttgccgcaccccaagggttgagccttcacccaagcaaagtgggggggtcttaccttacccggtgggtggccaaagagtccccccggcgaagcgagggtcattgacgatttccgttggaaccaccaaggtgccgcttgggaaccttcaacgacctttggcgcagacccgaaacagtttgacacggaaaaaagaggaccccaacaacggcacacgggaagttacacaagcgaacaacccccttaaaagaagcgacacatgggacacagagcttttcctccggcggcaccaagtgctggtgttgggcgcacacacgggcaaaggtcctttaggtccaatggcccaacggccgggaggaactttccccagaggggctccttagggggggaggcaacaaaggctttcaaaggtgccccgaaggataccccccaagggaccaaacaatcgtaaggcccaagggccgtttatggaaacaaacaagcgcctttagggcacaaaggcggcacacggcgaacggcgtggcccaggccattacgggaaaacacgaaaagggggaacggctttctacaggcacagaggggaaccccttgtgtgggacagggttgtttagggtggacccccgtcccattggtaaggtggcagcccctttttatgtgggcgcggcacacactataggccgggaga

SEQ ID NO: 577559 - DNA, 781 bp, Homo sapiens
ctcgccgccccgcccgtcccaggccgggaagctgggacttgagctggtctgcattcgggcaaggtgcctggcacggttgctgtccaggcttagaggacagaggaagagcccctgagtctgtgcacactctgccaccatggccctgcccacctctggagcccacaggtgcccagcccaggccccttgcttttggctagactcctgccctacggggacccccatgatggccactcaggagatgggcccaggaggacaggggagtgactccaggccatgaccggaaggggcctgtggcccctgttcccagtccccagggagacgggagggtcacacgctgttatgaggaagaggacaccgggctggccctggcccagggtggccagctctggtttcactacttggccccaagcccctgaggcaggtgcaggagccaggcacggtgagcagggcccagtgcccctcaggctctggggaaggggtacagccaggtggcccagagcaaggaggtgctgtagacaggtgtgaccacttccagtctctcccggcctgctggccttcatcctctcccagattccaagggccaccgctgggagcatggggtggacatcgtcccaccagcctcctggatccacatccgtaaagactccaaagtgaagtgaggctggcttcactccagctcacagcagaggagggggcagcctcagggcccagcaacttgctcagagcgcacaggagtgcgctggggccgggccagctggcccagggcctctgactctgcccc

SEQ ID NO: 577560 - DNA, 504 bp, Homo sapiens
gcacgagatggagtggtcttactgtaggctccctcatgcctaagacctcacctagcatctcggtaaccttttcacctgtcagtctgtccagggattaatattttcctctcttcagatttccacaaagtaagggaataacctttaccacaatctggagtcttaccatttttctgctttgctaggcatttgatggaacttaaagccttgtcaaacatttcttaagtattatagcaggcattgagagttatctttctcctgtctattgaaagggaaccctccttacaggccctgatgaacttcgtattaatatgtcgcctgtataaattgtacctgttaggttgctgagctgatgttagagtatttaattctccagcctaaggagtgcagcaggtgctcgtgggagtggtctgtgcctacctttgagcagcatgaagccacagaaccaagcctgacaccatcacaccccgtgccttagtttttaaccactgtccaataaaatggttg

SEQ ID NO: 577561 - DNA, 278 bp, Homo sapiens
  misc_feature (27)..(27): n is a, c, g, or t
  misc_feature (48)..(48): n is a, c, g, or t
  misc_feature (62)..(62): n is a, c, g, or t
  misc_feature (107)..(107): n is a, c, g, or t
  misc_feature (245)..(245): n is a, c, g, or t
aaaagttaacatcccggaacagtgcanaaggcttgggtttcagtttgntagggcccccatancaaaatgccccagaaccaggtggtttaaacagatttattttctcncatttggaggcttcccctgcatggcagccagcctttaagttggcccccaaccatccctgcctttttctattcacacccttgtgtggttccttcccccattgaataggcctgacttgtgtaacccctcccctattgaanaaatgagagtttgacttttgagggtaagtcata

SEQ ID NO: 577562 - DNA, 385 bp, Homo sapiens
aactctgtgaagaaagatgagactactgtgaacatggagtctgaggggggtgcacatgactctgctgaggacggggacctactggatgatgatgataatgaagatccgggggatgaccagatggagttgatctacgatgattaaaaagaggctgacgaaagataggatgacaccgacggcgccgatggccatgatgactctcaggcacatatcggggtgtaaacatattatacgattatttgtttatctaggcgcttgtataacatcacattttgcaccagatactttcccctagtatgttcagcacatgctcattgacctccccatacttgcacttcccatgttcattaattcatattgcccaccgcctagtcccatgatcact

SEQ ID NO: 577563 - DNA, 107 bp, Homo sapiens
tggtaacatcattagtcatttagggaaatgcaaaagaaaactactacacatagagttaaatagcaaaaatgaaaaagatacacaatatcaagtgattgttccccgct

SEQ ID NO: 577564 - DNA, 1005 bp, Homo sapiens
ccgattgcactccttgcagctcttaatgatttgaaggtagctcctgctaagtattcgcgttaggccagtgcacagaatgctacatggtaatgaggctttatgtgtatgtgctgtgaccagttcataaatccatccctactctattaactctgtaaggaaagttacaccgtaggagaccatagtacgtctgaacaaaagggtcttctagttgtacaacaatccaatgttccatgtaatcaaggttgccgcgacagtagatgctctctgctcttgaagtggctatttgctgccagtgattacgcagactgatctgagccttgtgctcatgatgcccggagagtttctatcacttatgcccgggctggaagacggctcagcagggaacaggcaaatgttctccttgacgcatgttccgagagtctgaaaacttgctgaagccgttacacaactgaggtctgtcgctcatgtgaggccacctcgaggctctcattcaccttccgagctccaacgtgaaagattctttgcgcagatacgcattgtgagccatcctattgtacaccgtgcactctcggctttcaggggaaaccacgccaaaggaaggattctgtgctggattacatcttaaccaacacacaggtaattctgcaattttggcgcaattttcacgggaagcattccttatccttctttgacgcctttctcaactgcctactgcaacagggttctcttagcttctcaaacaagggctttccgttaagggatatactttcaacgggtgtctacaacttgcccaacgtttcccctggtcgccaaacgcctttcggcgttgccccaattggtttaaacgctgtggcacaggggtggtcccccacggggggacagccgacctaagcgacttacgtgtgtaacccattcaagtttaaccgacattaattggccattatctgataagttttaaaccagcgcacaacgcggaagctctgtaaactttacaccggactctga

SEQ ID NO: 577565 - DNA, 894 bp, Homo sapiens
gaatatttaattaaatgtattaaatggcagatttgtgtttggggagtgcagcaaggtgaaaaacgaagatcttaatacatacggttagattgtgtagcagagattctgttggaaattctgacaattaatgcgataggatgtgtgccatatagtcatattatgatatggtgttagaatatttctaggctaaaataatatagtatacatatagtgtcacatttggactaggagttataagtatatatatcatcataaactagtaattctggaagtttcgttctgcggttagtaacttaaatgtgttacctggctcgtcgataataatttctataacagtctcgtcggacgtggttaatttgtaacattatttaccgtaataaaggttagtacttattaggacttgagttaggtgttcgctgccaatttcggactggtggcattaatgtgtacgttgtgctttgcacttatggtcttacatgatggaatgcagtttatcattaagatactattctcaagacattaacggttatctgctaaagatgtctcaagtctgaacttggggtctttagcatttcttccgagcatcttcccctagatccatcgaatagtagatgtcaccttatagactattcctgtatttatttctagcattatttctactattatctagttctgctccatgtgaccttatgaaaagttataccagattatccgcctttgtcataaatcagagaagagagctcttatgacggagatcctatcttagggaggaagtaaatactagggaaggaaagtggattctgctgaaagttacttgcatagttctattctcaaatagtaagtatatgacgaaagggttatatggggtgtacgggttcaagcatataagccatg

SEQ ID NO: 577566 - DNA, 328 bp, Homo sapiens
ctgcggccagtctgggcaacgaagagcagactctcaagaaagaaaaaaatttgttttttaaactgagcggggtgtacgggcatgcatctgcggacccagctactgggaaggctgaggtgagaagatcaccttagccggggaattggaggcttcagtcagctatgatggtatcactgcagtccagcctgggcaacaaagaccctgtctctaagaaaaaaaaaatttggaataggcggggtgtggcggctcacgccggtaatcccagcacggtgggaggctgaggtgggagatctctggagcccgggaattcaagaccagtctagtcggg

SEQ ID NO: 577567 - DNA, 373 bp, Homo sapiens
cagaatgcaaagggaggacatgaagtcgcagagttccggtataagacatcatccagccacttgtccagggagcacatcccaatccagttcctgaccagacagggatctgccactctttccagctgggtgacctggtatatgttaaaaagttccagaaggaaggactcactcctgcctggaaaggacctcatactgttatcctcaccatgccaaaagctctgaaagtagacagcattcctgcttggattcatcaccctcacatcaagaagaccaacaaagcccagcaagaaacatgggtccccaagcctggacaggccccttaaaactgtgtctaagtcgactgaagccattaaattaattctttacctctaaa

SEQ ID NO: 577568 - DNA, 245 bp, Homo sapiens
gtgaaaggtaacacagacaaatcaaacatgctggagtttaaattatgtccagatatcttactaaagaatacaaactctgtggaagaacggcaggatgtcaagcctcatcctaggaaggagcaagcccctctgcaagtttcaggattaaaagtacaaagagactggttaactttgttgctacaagaaaggacaagaagacagccagagagagatatgttattaagactctggaggaagcttcagtc

SEQ ID NO: 577569 - DNA, 973 bp, Homo sapiens
  misc_feature (37)..(37): n is a, c, g, or t
  misc_feature (57)..(57): n is a, c, g, or t
  misc_feature (91)..(92): n is a, c, g, or t
  misc_feature (96)..(96): n is a, c, g, or t
  misc_feature (104)..(104): n is a, c, g, or t
  misc_feature (131)..(132): n is a, c, g, or t
  misc_feature (139)..(140): n is a, c, g, or t
  misc_feature (143)..(143): n is a, c, g, or t
  misc_feature (157)..(157): n is a, c, g, or t
  misc_feature (162)..(164): n is a, c, g, or t
  misc_feature (182)..(182): n is a, c, g, or t
  misc_feature (188)..(188): n is a, c, g, or t
  misc_feature (206)..(206): n is a, c, g, or t
  misc_feature (216)..(216): n is a, c, g, or t
  misc_feature (218)..(218): n is a, c, g, or t
  misc_feature (223)..(224): n is a, c, g, or t
  misc_feature (230)..(230): n is a, c, g, or t
  misc_feature (241)..(241): n is a, c, g, or t
  misc_feature (243)..(244): n is a, c, g, or t
  misc_feature (248)..(248): n is a, c, g, or t
  misc_feature (253)..(253): n is a, c, g, or t
  misc_feature (262)..(262): n is a, c, g, or t
  misc_feature (272)..(272): n is a, c, g, or t
  misc_feature (275)..(275): n is a, c, g, or t
  misc_feature (282)..(284): n is a, c, g, or t
  misc_feature (294)..(294): n is a, c, g, or t
  misc_feature (296)..(296): n is a, c, g, or t
  misc_feature (300)..(300): n is a, c, g, or t
  misc_feature (305)..(305): n is a, c, g, or t
  misc_feature (309)..(309): n is a, c, g, or t
  misc_feature (321)..(321): n is a, c, g, or t
  misc_feature (334)..(334): n is a, c, g, or t
  misc_feature (345)..(345): n is a, c, g, or t
  misc_feature (358)..(359): n is a, c, g, or t
  misc_feature (371)..(371): n is a, c, g, or t
  misc_feature (388)..(388): n is a, c, g, or t
  misc_feature (393)..(393): n is a, c, g, or t
  misc_feature (398)..(398): n is a, c, g, or t
  misc_feature (401)..(401): n is a, c, g, or t
  misc_feature (403)..(404): n is a, c, g, or t
  misc_feature (408)..(408): n is a, c, g, or t
  misc_feature (413)..(413): n is a, c, g, or t
  misc_feature (419)..(419): n is a, c, g, or t
  misc_feature (438)..(438): n is a, c, g, or t
  misc_feature (483)..(483): n is a, c, g, or t
  misc_feature (493)..(493): n is a, c, g, or t
  misc_feature (509)..(509): n is a, c, g, or t
  misc_feature (525)..(525): n is a, c, g, or t
  misc_feature (531)..(531): n is a, c, g, or t
  misc_feature (558)..(558): n is a, c, g, or t
  misc_feature (848)..(848): n is a, c, g, or t
  misc_feature (903)..(904): n is a, c, g, or t
  misc_feature (952)..(952): n is a, c, g, or t
tagcggaggggcagtccgaggagggccgggctgtcancccagcggacatgagcgagnaggccccagccgcgaaggagccgggcgcgcaggnnggcntggaggtncgtagttcgtggtccttcgccggtgtnnccggagnncancggctgtggatggnaaaannncagagtagggaataggtnagctgnaggagcaaaaaaaaggtnttctgaaaancntaaanntctccnttaataaaatnanntcgnatttnggggccgcncggaacttgntgnaaaaagnnnaattgaggtnanagcnggctnaacncggatgtggggnacctggtgctaancaccctctgcncggccctccacgnnctggtggcggangggctgaagcctttccngaaanaactnatnanngggnaacgnaaaaanaacccctgaaaaatggtgnaggcgtcggtaaaaccagagctccaacacccgctcccttggaacnctgtataacnaagtcaaccgtataancccgctgaaaaaaacnatagangcttccatgcatttatactgggcctcntcaacaccaagcaattgaagctgtggttttccagtctccaggaagatgcagggagctggtgggagcagttgacccaggcctcccgggtctatgcctctgggggcactgagggctttcctctttcccgatgggcaccggggcgtcatgggactgcagctgaagaaggtgcacaggagagacccctgcccacagatgagatggcaccaggcaggggcctctggttgggaagactatttggagtgcctgggggcccgcagaaaatgagaatggagccctaaagtccaggagancatctagctggctgcccccgacagtgagtgtgttggctcttgtgaagcggggggnnctcccgagatgccttctcctcagagcttgaggctcagcaccaagatgngcaacccataggcagtgcggg

SEQ ID NO: 577570 - DNA, 131 bp, Homo sapiens
  misc_feature (41)..(41): n is a, c, g, or t
ctacgggctggcagctaccatgatccaagagggcctgactngggagggcttccagacagctgaaggctgcataccgtaccgtgtgggagcgcctgggtctggccttccagacccagaggcatactgcagca

SEQ ID NO: 577571 - DNA, 233 bp, Homo sapiens
ttagagctagaggatccccctatgtctcgatctgtaagcgtacactctcaggcacttggggatgccgaggctgggtggatcacaatggtcatggagatcgagaaccatcctggctaacacgggtgaaaccccgtctctactaaaaatacaaacaaattagctgggcgtagtggcaggtgccttgtagtcccagctactcaggaggctgaggcaggagaatcgcttgaacccgg

SEQ ID NO: 577572 - DNA, 246 bp, Homo sapiens
catcatcatggcagcaacagcagcaagcatcacagatctcaatcctctcagactgcttccagcaaaccaggcccagccagtcatttctcaggttttcattttccagcttggtttacacccaggtcatgcatccatcaccattatggttaagcacagttcctcactcattcaagcaggtgccatgtggcagtcagggccacaggtcatgcaggtgaaccgtcatttctaccgtcccattcagcattt

SEQ ID NO: 577573 - DNA, 353 bp, Homo sapiens
tgatataatctgatgtattcgccaatgtatagcgtgaaatgtatgcatctagagacgtaatgggtaaggtgctctaatcatgaagaagtattgaaggaagagcatcgctatagttgataaaataatgctgtgaacatgccctgtccactgagttcagcctaagaatagggtgctctgctcagagtttacctggcatgcttccggtgaatgaaatgatgcgatgccccacgggaacctgagagatacttctgggttgtgttcaatatatatttcacaggattaactgtttcaggaacagatataaagcttcgccacggaagagatggacaaagcacaaagacaacatgatacct

SEQ ID NO: 577574 - DNA, 138 bp, Homo sapiens
agatcgcgtgcgatgactttccgataacagtcgagactcattggtactggttgcttaacggatttttcatcttccggatataggcggtttgtgaaatggatcttgtgccctttctagctaatttggtctgtttgctcc

SEQ ID NO: 577575 - DNA, 824 bp, Homo sapiens
  misc_feature (328)..(328): n is a, c, g, or t
  misc_feature (445)..(445): n is a, c, g, or t
gcttaccaaagcatatccgtcctggaaggttacgccgctgatacacccagtgcacggcgcgcctggtcaggagacgctcttggcgcctggccacccggagtgagtagcgccgtacctggccagtgcgccgtgcgaacgttgtgggaagttgcatgcgcggagctctggagctgtggtgccttcctctctccgcgcgacccctttccaatgacgctctgcgataggtcaagcctcgggtgagctctcagacatagagcgctcgagcgcgtatccgcctgcgtcaagtcggtacgggggattcattggagtgtggtgtggtcctttgtcntcgagatctttgtctctcgtagatgccgggagtgtctcgcacctgtaggctcctcagtggcaccctaccataaattgtcagtcccctggggccttaatcgtgaggcgcacgaccaanaagggacttcgccatagtctctccgccgacgacatggaaggaccatggatgaaagcttctgtctctaaatgaccgtctatatgcgatgtggtcccttgtcgagctaatccgacgttgtggacccgaaggacgggttgcggccttctacgcccaattgaagctcctctgcccaagtggcggtccccgtactcattgctctcacgccccgaaagcggttgccatgttttccccccagaaggtttcccccctggggtaccgcctgtggggaaagaccacccttgggcggaaacggacgcaccccttgaggggcgttcttcttacccaagcacaattttcccttccctcttgatgccggcgcggttatcccctttggttgtgc

SEQ ID NO: 577576 - DNA, 290 bp, Homo sapiens
ggtaggcgaactgaggccaatctccccacttttagggctgtgaaactgttctgtatgatacaataatggtggatatgcgtcactatacattcgtccaaatccacagaatgtacaacaccaagagtgaaccctactgtaaactatggactctgagtgacaatgatgcatcaaataggttcatcagttgtactaaatccactgctctggtgcagaatgtcgatgctggaggagccaggcgtccatgcgaatctccctcccctccattccattttgctcacaccaccctaaca

SEQ ID NO: 577577 - DNA, 160 bp, Homo sapiens
gccgaattcagcacttttaaccccgagtctgtacacgggcaccgaaaaagcagtggcggtctgcagcgtggcgcaaacctgccttccccaccccttcaaactccccttctgacagcgactccatccagagcctagctgggactttgactatgacacagag

SEQ ID NO: 577578 - DNA, 495 bp, Homo sapiens
  misc_feature (282)..(283): n is a, c, g, or t
  misc_feature (299)..(300): n is a, c, g, or t
  misc_feature (314)..(314): n is a, c, g, or t
  misc_feature (339)..(339): n is a, c, g, or t
attctgaatggagtgtccaacaccattattgtgggtgattgagactcatccgtatgaactattcaccttcgtacctcccgtttacaactcagcattgctggaagagctgaacagccgcatggatcatttttcaattatagaaaaacaaattctaagcctgagagaaaaagtgcatgagaaagaaagggaggaatatagctgctagcagacaagacatatacttcccagctccaccactgtgactcttaattcaaagagatttttcaattttccagggggggnnttttttgtggggggcnnaaaaagaggggaanaaaatttttttttccctttgggggncccccccctttttcaattcctgtcctaggctcagaaaaagcacaatagtttctttatacatcttttcttttaaaaagctccctggaaaatattgtaaatatgctactatattgaggtttgataataaagggaaaaattttgctctttatacccaaa

SEQ ID NO: 577579 - DNA, 212 bp, Homo sapiens
tatcgccattgttgattggttgctgtcacgcccatttgtgttgagagcttctcagactatccaccttcggcgtcgcttagctgttcgtgatatgaaaccctcgcgtgcggtgggtgtcatcaaagcagtggacaagaaggctgctggagctggcaaggtcaccaagtctgcccagaaagctcagaaggctccaggagaaaaccaggctgcag

SEQ ID NO: 577580 - DNA, 398 bp, Homo sapiens
  misc_feature (141)..(141): n is a, c, g, or t
  misc_feature (145)..(145): n is a, c, g, or t
  misc_feature (169)..(169): n is a, c, g, or t
  misc_feature (175)..(175): n is a, c, g, or t
  misc_feature (187)..(187): n is a, c, g, or t
  misc_feature (194)..(194): n is a, c, g, or t
  misc_feature (237)..(237): n is a, c, g, or t
  misc_feature (270)..(270): n is a, c, g, or t
  misc_feature (274)..(275): n is a, c, g, or t
  misc_feature (290)..(290): n is a, c, g, or t
  misc_feature (294)..(294): n is a, c, g, or t
  misc_feature (296)..(296): n is a, c, g, or t
  misc_feature (302)..(303): n is a, c, g, or t
  misc_feature (305)..(307): n is a, c, g, or t
  misc_feature (315)..(316): n is a, c, g, or t
  misc_feature (318)..(318): n is a, c, g, or t
  misc_feature (323)..(323): n is a, c, g, or t
  misc_feature (327)..(328): n is a, c, g, or t
  misc_feature (331)..(331): n is a, c, g, or t
  misc_feature (336)..(336): n is a, c, g, or t
  misc_feature (338)..(338): n is a, c, g, or t
  misc_feature (343)..(343): n is a, c, g, or t
  misc_feature (348)..(348): n is a, c, g, or t
  misc_feature (351)..(351): n is a, c, g, or t
  misc_feature (365)..(365): n is a, c, g, or t
  misc_feature (368)..(368): n is a, c, g, or t
  misc_feature (373)..(373): n is a, c, g, or t
  misc_feature (378)..(378): n is a, c, g, or t
  misc_feature (381)..(381): n is a, c, g, or t
gaggtccacctctgagtgcccgccctgtcccccggggtcctgcaaggctggactgtgatcttcaatcatcctgcccatctctgtacccctatatcactcctttttttcaagaatacaatacgttgttgttaactatagtcnccangctgtacaagatccctgaacttangcctcntaactgaaattntgtattntttgacacatctgcccagtccctctcctcccagcccatggtanccagcatttgactctttacttgtataagggcancttnnataggttccacatgnaagngngatcanncnnngtttgtcnntntggcntggnntanttcantnagcanaatgngcnccgggttcacccangtnttcanaaatnacnagatttcctcctttttt

SEQ ID NO: 577581 - DNA, 1217 bp, Homo sapiens
tttgtcgtttcttgttttgttctttttctgtctgtttgttgtgttcgctgttgtggtgctttgtgttttgtggtgggtggtgagaggtgtgtgcggcgacgcgaaagtgtgagaaccgtggcttcgtcgcctgccggtgtgtgcggtgacgctagttttacgttgttctctgtgaggtctcgctgagattcgtcggggctcttgtggtgggttgttctctccgccggtgggtttttatgttctgtgcagcatctgtggcccatatttttttgccccggtcatctgtgggtgtctcccacaggtacgctggtggcccgcgccgtttgggcgttttttgtgtgccgcctctttgcgggatactatatgggggcgctctgtggccggagctctgcgggggggttctttttgggaaagttcttccgcgggtgctccccccgctcttggggggttttttgtaggggcgctgttttctcccctctgtggttgctatggccgcctgggtgaaccacctggtgggaccaccagtgtggtgcttttgggcccccgcggtgtttgttgcgaatggggccgcccccccgggttttatgttgtgctttttgtggcccctctccgccggcggtttagcaccggtggttccccctgtttttgtgtgcggaaaaatatggggtgtgtggggaggtatctcttctggggagtgttgctctcgggcggagacctctcgcccctccctgagaaaattataaaaaataacatgggtatttatattgtgttcccccaaatcacgccccgggtgtcttcttttttttgaaatatatttctccagcgcgttatacctctctctttcttttgtgttaataatataagaccgtgcggtctcgcccccccccctcttctatatgtctattattttaaaagcgctcccccctctcgcccacacgaaaagacacacacatacggttccacacacgtgatttaataatttgttgctccctcatattaggcttaacactcgtgaatataaaaatattccgtgtatataccacgccgcgcccccctttttgtagccacacatcacctttctaactccgtttttttctcccttgagtaaatctttctttctcttttatactttcttattatatgtttcctatctgttgtgtattttacaacctatatatatgtgtgtgttatcacctcaccacaacaaaaacaaaaca

SEQ ID NO: 577582 - DNA, 110 bp, Homo sapiens
cctgtatcccagcactctgagagccaaagcagaggatcacttgaggccaggagtttgacaccagcttggtcgacattgtgagatcctgtctctacaggaagaaaatattg

SEQ ID NO: 577583 - DNA, 416 bp, Homo sapiens
  misc_feature (136)..(136): n is a, c, g, or t
  misc_feature (138)..(140): n is a, c, g, or t
  misc_feature (152)..(152): n is a, c, g, or t
  misc_feature (157)..(157): n is a, c, g, or t
  misc_feature (173)..(173): n is a, c, g, or t
  misc_feature (176)..(176): n is a, c, g, or t
  misc_feature (179)..(179): n is a, c, g, or t
  misc_feature (183)..(183): n is a, c, g, or t
  misc_feature (202)..(202): n is a, c, g, or t
actatttgttggctgtttcttatgacttggagaatttctagtgcctgccaagcactagcttatgtgttctttatgacagtactattcaattctgatttagacgatgaagaacaaacacacacaagtaactgtacanannnactggtggcacnatcancggggcagagccagantcnaanctcngcagctaggttggaacacncagtgactgaataaccttgggcaagttacttgacctttctgtgcctcagttttcttacccgttaagtagggatgatattaataactccctcgtaaactttctgtcgaagtctacaagagactatgtaacatgtttgatatatcagtccctcgcatctagtacagtcatctgtgtactatcgactcaagctgccttcatcttctacacatccctg

SEQ ID NO: 577584 - DNA, 386 bp, Homo sapiens
  misc_feature (244)..(244): n is a, c, g, or t
  misc_feature (374)..(374): n is a, c, g, or t
tctgatctgtggaaccgctgagctgaagaaagggaacagaggaaagcctgcaggactcctggtgccactatgtgctacgtaaagtgtgcaagatacatcggatactctctggtgtgggctgctgtcttctgcatcgtagctaatgctttgctctactttcctaatggggagacaaagtatgctacggaggaccacctcagccgtttcgtgtggtattttgccggcattgtaggcggaggctgcntgatgctcctgccagcgtttgtgttcattgggatggatgaagaggactgctgtggttgctgcggctacgaaaactacggcaagcgatgctcgatgctttcttctgtactggctgctctgattggaatcgngggatcctgctt

SEQ ID NO: 577585 - DNA, 535 bp, Homo sapiens
ccatcatctccgacatcaccgatgctggctcctgccagccccatggcctcccccggcgggagcatagacgagagccctcacggacgccagggccacacggacaccgtagggccggcctcccatcccacacccgacaccaccatcacaccccgtgaaaagtgcctcagcagtagcctgcctggacaatttggatcagcaaatccaacagatgtctagggtcgcccgcctcttccccttgcccctcttcacatctcacgcatggccaaaggtccaagccaggagaatagagctcaagtgacacacttggaatgcatatgagactccaaccttgagataaccgtgcagaccatgctgagcagccacggctttcagcgtggacaaccaggtgcacattgatggaccctgttcagcccctcggtgaccagtgcccgacatgagcctgacatgaccttgacagcagcctggccagtatccaaagagctccatgtctcccaaggagcccccaggcctcccgaggcagagaaccagcagcccg

SEQ ID NO: 577586 - DNA, 821 bp, Homo sapiens
ctgtctcaaaaaaaaaaaaaagaagtgggctgggagagagctcggttcccttggagatgagtgataattctgggagccagccagttcttccttaatgcaggggcagttacctaagggtgtcctacagtggtgggcttctatagctctccactcttccggagcctgggggcccagatggcacgacactggccatgacgcagataattggggaactggtggtctggtctccgggtcctaagctcagcacttcctggtcttctctcgaaccctgggggctcactcgcttggacctgctgggtgactttgggacgcttcaactgggctgggcaatttctacatggggtcctctacaacgcagccttggcaggcctcaccacactctgtctgggtgaagaccttcactgcagctgtgcgggcagagctgatccgggccttggggctgggacagactggccgctgcccgtctccggtttcccccaggcatctaggaagacccagacaccagtgacctccagctgggggtgggaaggaaaaacactgggacactggccatctggctgccaaggcctggagggaagcccaaggctactgggaacctcaggacctggaatctgagagggtgggtggcaaaggggagcagagccatctgcactatggcataaacctgagccaagagttggggaccaggacctcttgcttttccatacttaactggtggcctcagcatggggtaagggctgggtgactgggtctagcccctgaatcccaaattctgtttaccccatcaatctgggctcactgctgtctggggacatccccat

SEQ ID NO: 577587 - DNA, 490 bp, Homo sapiens
aactgactttctgaacaggtctgtccatagtaagtgcagatttcctgcttgttggttggttgttttagagacaggatttccctctgttgcccaggctggaatgcaatgatacaatcctagctctcaaaataatcaatattctgagtattgacattggctactttaatgagttccaccaacaggatatggtgcctcaaatccaccagtacttattcaattgctagtcaggctggctcctttacctacaaggacttaaaaaaccaactcgccaggttggtagttcaaggtggcaggtgcagtgtgggctttgcaaaactcaggcagacctgggtcttccacaccagccttgcaaccgagaccatcactgcagagcctgctgagccatctgcagggtcagccagtacgcctacctcaaggggccatttgtgcattcaacctaaaactctacttttaataaggaagacggatcggaggaaagtcagtgcgtatt

SEQ ID NO: 577588 - DNA, 207 bp, Homo sapiens
gttaaaaaagaaaaaatgccgaaaaccccccagttttatttggggaaggcccctggggcttcctggtgaagcccgtagttttggaaaaccccctggggcccaaaccggggctaaagttgaacgagctgatggatatgacccccccgccccaaaatctgtttaaagttccgccttccaaaaggggccaataaaaagggccttttgtga

SEQ ID NO: 577589 - DNA, 336 bp, Homo sapiens
agagcatccccccgtgagacgactttacatttagttaaatataaacattttttattaatacataaaactgctttcaaaaaacagggaataaatgatttagtggcactggttttacttcttggaatccccaagggttaacttttcttagatggaaatcaactgtcccctagggcacttttattttaagttcgtgtcctaataaattcaaacttttaaaagtcccatcacctatggcttaaatatacaaaaaggccaaaaattattcctttttagtgggaccatattttatgctgactttttatagccaataaaccagaaatggtgtccttctgcaaa

SEQ ID NO: 577590 - DNA, 168 bp, Homo sapiens
  misc_feature (138)..(138): n is a, c, g, or t
agcttcactgtgactacattattaatttctgcgtccaggtgctatctctgaggctgagcattataagaaaatgagctctgttccttttcattgcggaacaatagcgcaggggtttatttcagagacaactttccactntactattccactgggcgcgtcgtatggaag

SEQ ID NO: 577591 - DNA, 236 bp, Homo sapiens
acttagctgaaacatgcgcataaggtaaaaacactaagaagtaactataagccaggggttggtgaactcacgcctataatcccagcacttagggaggccgaggtgggcagatcacttgaggtagggagtatgagaccagtctgaccaacatggagaaccctggtctgtactaagaatagaaaataatccgggagtgatagcacatgcctgtaatcccagagtgctggtactaaagg

SEQ ID NO: 577592 - DNA, 182 bp, Homo sapiens
ctcaaggctttatacttactcaagctgtatacttcctcaacgctttatacttcctcaacgctttatacttcgctcaacgctatatacttcctcactcaacgctttatacttcctcaaggctttatactccctcaacgcttctcatttcatttcccggtatgaagtataaagcgtgggggtac

SEQ ID NO: 577593 - DNA, 169 bp, Homo sapiens
aggtaaaggggaaaaatttgggcgccaaccccaaacctagggttttgggtttggggggtgggtaaaaattttggggcctggttttaattttttcttgggatggggtttcccttttggggtattggggttaggggaacctgggcaaaaaaaccccccttttaaaactgga

SEQ ID NO: 577594 - DNA, 446 bp, Homo sapiens
  misc_feature (391)..(391): n is a, c, g, or t
  misc_feature (401)..(401): n is a, c, g, or t
cccacgctgagggaagaatcatgggaaagagtagagacggggttccaccgtgttagccaggatggtctcgatctcctgacctcgtcatcctcccgccttggcctcccaaagtgctgggattacaggcttgagccaccgcgccccgctctttcgtgttccaaaggctttttaaataaacttccactcctgtcctgggattctgctttatgggccctcagtcgaattctttcttctgagggagggcaagggactgaagttgcttctgaccagtacagggagaaaacgaatacaggcaggggatgactttccaccagctccatttttgcagctcttgagggtgttatttaaaaatgacccggggaaggaagttcatggccacggggccaggacntttaacattncttttcgggtttaccccagggggttttcaggacaaagttttcatt

SEQ ID NO: 577595 - DNA, 670 bp, Homo sapiens
tggcgtgtagctggagagtcggaccccagagagccctgagcagcccctaccgtcgccgccggcctagttaccatcacacccctgggaggagcctgcagcgtgcctgcatgcctgtgcccatgtcaccattcacctgcaaccattgagcatgctgatggccgagacccatgctatgcctgcctgctgccccgttggtgtctctgacctcagtgcggtgtatcaatgcgcccggtaccctacccgagtacgaagaccgagggcgatgtgcatgcgagcctagagtcccggctgctgatcccatctcctattctagacgtggggagtacattggcctggacatgtccgtacctaaagcacagctgtcacttcgatcaacaccagacacggcctattcgacggaacgactgagacgtaaaacgcaccattcggttcaccaacgggtgctctccagcgtgcacacctggggaacttcgcttgcgacttactctacgcatccacaggatacgagtaccagctccatccgagcctagtcactcgctgcatgccattggctcacgcttcgttggttaacgaagcacggacatcatttgtcaccatgttagccgagtatgacagacattggtaatcaaccacatccacgtggaagagcgattaagccgattatccgccc

SEQ ID NO: 577596 - DNA, 127 bp, Homo sapiens
caagtagtggcttgaaaggcaggaggtggtgagtgaggagcacatactacagcctgttgcccaggctgtgcagcgcagctggactctgcatcccagcacctgctcctcgtacctttctacctgttta

SEQ ID NO: 577597 - DNA, 843 bp, Homo sapiens
agcggaggtacggccccggggacccgcagtggagagtgagcggggctttccccgacgggccagcccggcgcgctcgcccctggctgggccaggttactcactataaacaatatccagcacaacataagcaaagtttattccatactttgaatgccgtgaacagaagactagacaaatccaaattaaggaaggtgaaatatgaggaaaacagtatattatgggttgcagatacattcttaataaagtacttaaaaggtcaaagtagtaaacaaacgagcaacacactccagggaacggcaacagaatgtcgttacccaaaagaaaccatttttcccacagattgaatgttcattttcacatgacaaacaggcggactggacaacctaacaattccgttgcagaaacgatatgacttgcgagcattacattccacaactagacaacgtcacaacagactgtttaccgtgaaggggcattattgtccacataaccacagaaggtaccaaatgttactacattgacaacgggatggcgcaacaaaccaaccaggaattccacgaagaggtttcaccgatggggacattaacccacactattggggagcgtttcgaacgcaaccataagtctcacttaggctttcacaggattcaccctgagagtacattcacagaagtacaaccacagaagggtgcccaacaacaacttgtcttacggacgcaaggccaggaacaggaacaaaacccataaagtgggggcacacaacaacaaagttaatggtgtcaggaaacaccatatcctggggctaaccctttaacgacttgggttcatgggacaacatacaac

SEQ ID NO: 577598 - DNA, 1061 bp, Homo sapiens
  misc_feature (1)..(1): n is a, c, g, or t
  misc_feature (82)..(82): n is a, c, g, or t
  misc_feature (101)..(101): n is a, c, g, or t
  misc_feature (122)..(123): n is a, c, g, or t
  misc_feature (130)..(130): n is a, c, g, or t
  misc_feature (135)..(136): n is a, c, g, or t
  misc_feature (138)..(138): n is a, c, g, or t
  misc_feature (151)..(151): n is a, c, g, or t
  misc_feature (198)..(198): n is a, c, g, or t
  misc_feature (232)..(232): n is a, c, g, or t
  misc_feature (281)..(281): n is a, c, g, or t
  misc_feature (296)..(296): n is a, c, g, or t
  misc_feature (298)..(298): n is a, c, g, or t
  misc_feature (315)..(315): n is a, c, g, or t
  misc_feature (331)..(331): n is a, c, g, or t
  misc_feature (404)..(404): n is a, c, g, or t
  misc_feature (417)..(417): n is a, c, g, or t
  misc_feature (440)..(440): n is a, c, g, or t
  misc_feature (449)..(449): n is a, c, g, or t
  misc_feature (472)..(472): n is a, c, g, or t
  misc_feature (499)..(500): n is a, c, g, or t
  misc_feature (508)..(508): n is a, c, g, or t
  misc_feature (516)..(516): n is a, c, g, or t
  misc_feature (524)..(524): n is a, c, g, or t
  misc_feature (531)..(531): n is a, c, g, or t
  misc_feature (536)..(536): n is a, c, g, or t
  misc_feature (542)..(542): n is a, c, g, or t
  misc_feature (546)..(546): n is a, c, g, or t
  misc_feature (553)..(553): n is a, c, g, or t
  misc_feature (578)..(578): n is a, c, g, or t
  misc_feature (580)..(580): n is a, c, g, or t
  misc_feature (614)..(614): n is a, c, g, or t
  misc_feature (625)..(625): n is a, c, g, or t
  misc_feature (634)..(634): n is a, c, g, or t
  misc_feature (655)..(655): n is a, c, g, or t
  misc_feature (860)..(860): n is a, c, g, or t
  misc_feature (880)..(880): n is a, c, g, or t
  misc_feature (1009)..(1009): n is a, c, g, or t
ntgagagatgaggaaacaagctcagagcaattaagcgacttcccaaggaacagaactgctgcttggaaagaagcagagaatngcaactactgggcccaggntcctgccctggagcatgtacnnggatgcnctgannanaaccctgcacgtnagcagagcccatcacccaaccactcacctgaccccccggccacaggnctgtgccagtctacacagacacacagcagaaagnggatggccttcaggtttccatttaatggccaagccagcactgccaagangtcctcctgcctganangcccacccacgctggcncccctcagcctcactngcggcatcccagtccagtcctggtgtggggcctcatctcagctccttcagcaagctgttgaaagagcccagcngctcctggaagtngccctcgtcctcaccatcctgcngctccaggntggccagcacctggtactcagcntgcaggctggccagtgtgctgcggggnngggggtcntgagggtnggggtccnggcaggnggtcngggggnggcncagtgtntgcggcaccttctcaggggcatcangntcgggcggcggagggggtgggcggtgatctcgcnccagcgctgtncccacaggnctgggaggaggtgtacctggngatagtgctgcagcttctctggggacatctcctgggtcagctcagcctcctcctcggcgaacatcttctccgtgaccaggtcgtagagcagtgtgaccacgcgcacggcgagcacctccgtgcccttctcctgcaccagggtcctcaggacctgcagccccccgagcttcaggaactgccgctgggcataggggaagtggcgcanaggggagcacagtgcaaacnggaccttcttctttgcagtgagcggctgctccgtggccaggatgaccagcagcttctgcagggctcccccttcgatggcctccacctggaccttggggttgctggaaaggcagcgccagcacaaacgcncatactcttcacgaggggctctgtgctgttcagcccattgatcacacttgaa

SEQ ID NO: 577599 - DNA, 629 bp, Homo sapiens
agcggctgccccctcccccgcccggagccgccgaagcgcctcggtgcgttgcacctgcctggaggctgggcatgctctgcagctgctgctcggcagctggaccccacccgtgcaggcgcaggccaaccgagaccctggatctgtgcggttgccccccctgatcattgcactggcctgagccttcgcccgcccattgccacctgggcctgcggagactgggctgggggacttgcgccttcgcgcctgagtgaccacttggttcccttcgggttggcattttggcttgctcgggggctgcctaaggcccagtaagcccgcctaggacgttcgccaccggagtcggttgcgcctttcccccctgttggaagcccggcttggtcacggtcgggcgccccaaggttggccctggcggtacaagacagaactgtgaagcccagcgaagacccacccggaggcagggaaccgaacaggcccgaacagacgaacaataagggagacacacactcgtagaccaatagtattaaacaccataaggagaaccagccccgacggcccccggcgtggccagaaggagaagccgcagaccatacaacccggaagagaaccaccgcacacgagcaccgagaaat

SEQ ID NO: 577600 - DNA, 189 bp, Homo sapiens
agatactgcagaaacagatgtgagcgtacagtaacaccaaattggttgcagctcggcaggcattggccggtatttgaacatagtttgaacagttagcccttgtattggccaaaacttggtgattggcacaaaagtaggcttcagtctgtttacatcttcatttaggttaaagttcactatgtacagaga

SEQ ID NO: 577601 - DNA, 429 bp, Homo sapiens
aagcgggaatgtgctccgcctccaggtggacgcgcagatcaaccacgccgtgggccccttgctgccggctgcagctggtgccccagcccctctgtacctacgggggcctgcctcagcccatgtccgtccagccctggcccgccgcatactgcgcccgcatgagaaggctggcggtgaaccggtcccccgtctccataactcgctctgtgtaggtccacgggacagtgtgggccagtggctgcccagccgcctaggcctcagccaacgccggcccctggtcaggcccctgcagctgcctcaccccgccccttgtgctcgcctcataggtgtctacctggactccaagctctgcgggtgacagatcatgtttctgaagatggtttaagttatagcttcttaaacgaaagaataaaatactgcaaaatgtta

SEQ ID NO: 577602 - DNA, 387 bp, Homo sapiens
ccagatgtggtggctcatgcctgtaatccagtggtttgtgatgctgttgtgggcgggtcacaaggtcaggagttcgagaccagccaatacggtgaaatcctgtctcaaaaaaacaaaaacattaaggctggtgttgggccagacacggtgcctcatacctgtaatccaagcactttgggaggccgaggcggccatatcacctgaggtcaggagtccgaaaccagcttgaccaacttgtagaacccccgtctctactaaaaatacaaaataaaccgagtatggtggcgcatgcgtgtaatcccagctactcgagaggctgaggcaggagaagggctgtacccaaggaggtagaggttggagtgagccgagatcacgccattgccctcc

SEQ ID NO: 577603 - DNA, 169 bp, Homo sapiens
ggtgggtgacctagaggatccctcgtaatatgtaacaccttcatcaattatcttagatctttccaagtgactgctgcacccttctacttcagcatattctgtttcactttgcacttttatgttatggagacaatgtccttccttaaacctcttgacccagcctctgcta

SEQ ID NO: 577604 - DNA, 604 bp, Homo sapiens
  misc_feature (562)..(562): n is a, c, g, or t
  misc_feature (604)..(604): n is a, c, g, or t
cagacttctgacctgtgcagctataaatctgcattgggtcatgattggtttgtagcaatagaaaattaacacaccactgtaaacagtgggtttaataaacagaggaggtctcagtttattaaagtttttggtatcaaataacagacatatagatatactcaaaattaataaatgttgatattctggtctctgattagagaaaatatcatgatagatttttggtttagtgaatgtcgacctttgtgaatgtgtgccttaatgtatgcatgttatgtagagagacactggaaaatgcttttttagcttaaaaggcatagatttaagaagagaagcttgtgaaaccatccacatccctctgctttatcccctacccctggggggtatggatgtatgtgattatacgtatgtcattgaacatgggcaggggcattgaacgtatgtcattgaacacacacagaaacacatgcatgaccaatccagaccctaagagaggattcttggatctcatgcaagaaataattcagggtgagtccatagagtaaagtgaaagcaagtttattanggtagaggaatcccaacactttgggaggccggtgggcagtcn

SEQ ID NO: 577605 - DNA, 529 bp, Homo sapiens
atttcatgtctataatcgctcggatctttatggacgccttcaagagttgtttggtttggagccaacaataattccacctaagaaagatgatgataaaacacgggaaattggaagaacaagaaccaatcgaaaattgaaagagttaaagtaaaaacagaatcccaagaccccacatcttcatggagatcacttattccagtcataaaggtcaatgtgagcacaggacgtttggcctttggaaatcactaccagccgcaaactctgtgcatcaactttgatgatgctttcttaacttatactacaaaaccaccttcaagtcatcttgaccaattcatgcatattgtgaaaggaaagcttgaaaatgttcgagtcatgcttgttcctagtccaagatatgttggtcttcaaaatgatgaaccaccgagattaatgggagaaggttttgtggtgatgcagtcaaatgatgttgacatctactactacatggatgagccaggacttgttccggaagaaacagaagaaaaaaaaa

SEQ ID NO: 577606 - DNA, 134 bp, Homo sapiens
actctccccagcctgtgctcaggttgccctgaatgttgactctggaagagccagtggcccagaatgccgggggaggcttctgggtggcactcatggaacaccgtccctctgccagtacgggggtaccgagctcg

SEQ ID NO: 577607 - DNA, 105 bp, Homo sapiens
  misc_feature (25)..(25): n is a, c, g, or t
tcatgggtgctcatccccccagctncacatgagtctctctattatgctgacaatcaaacccagcctgtttgccagaccccagctctagtcccaccacctgctcag

SEQ ID NO: 577608 - DNA, 278 bp, Homo sapiens
ccaacccctggcaaccatcattctactctttgcttctgtaattctgactattttagattccactaaagtgagatcacgcaatatttgtccttttgtgactggctcatttcacttggcataatatatttggaattcattcatgttattggaaatggcaggatttctttcttttttaaggctgaataatatttcattgtttaacacggtttatttattcattatccatcaacagacacttcggtgtgccatatctaatgtaagatgatactgcatggtga

SEQ ID NO: 577609 - DNA, 1013 bp, Homo sapiens
gaccttctggagtctcctgccctggaagaataatgttcgaccacaacactggataagtactgttgctgaggagctgaggtccgcgactgttctgcggcaggtgctgactctgtggccaggatcaggtgaggactgtgggcctgcactcgcatgtatgtgtgggatgctcaccgagttcgactgagacagaaatatgagcgaatcgagattctaattatactcgctacacgaacgtctttgcaccatacctgatatttctggttcctttcactacacaagatcgcgcatagtcgcgcattgataggtcatgttaccaatttataccagatggtcattaagcatagggttcctcatcggctctaggagaaaggagcttgcacactggatcgcagtatccagcaagtgcgcatacgggacaccctcctctagagtcactgacccctcggggcgtaggtctataaactgcaaagaatttggggtagcttcatattgtgcataagctgctatgtcttaatggaaacttgcaccagcgccttcagctgtgaaaatggcacgcagaatcctgcaattagaggtaagtgtgtcgattgatgtaggaggaggaagggcatgtataagtctaaagggggagactgaggggcctgaaggagtggtgtaggagggcgtgttatgcagactcggaaggtattccgaagggaagcctgagagacgctccttgcgtcatggggtacaagcacaagggtggattgcaccctggttgggcgcactcacaatgaagtcgcatcattgtactttgaggatttgatacctgcgatactatgcacacctgcggttccccggatcgaagatttgacggcgtggcttacacacctgtgcccaagataggtctttcacccattgagtagggcgcttcgacttttggcaccatatgcgcgaaagcaacgtctatggaggatgttggggccattcaagagataagcaaaacgatcccaagttggtcccgattcttggat

SEQ ID NO: 577610 - DNA, 482 bp, Homo sapiens
gctttcgaattactggttgacaaagccgcatactagagtggtgttccagtggtgatgcaggtgcagctgtagagaaaagaggaggtcacaggccccgtcatcgcccctctcttccctcagaaacgttaagaaggctggtgggtcgtaatcggtgacccccaatccaacagtttgatctcaatcaagaggttaactctgcagcagaaggccaaggtgaagctggactttgtggctcctgtgggcgggagggcacaaccaccccctgtacttcatgagtgacgcttacatgggctgcgatcaggagtacaagttcagcacagaagtgaaggaggctgacagtgaaggagacagtgacagtgattaagcccccagtagacggacggtttgagcccattaactctttttttttatatatatttttggaggaataacgtgactgttaagttcattgtgatttgaataaagatgtccattggagaaca

SEQ ID NO: 577611 - DNA, 246 bp, Homo sapiens
gcctcgggagcgtgtgtcctgagttactcctacgttcaacgtgagtaggagtatgcaggatgacacgacatgtgaatatcctgactcgtgcatggtgctattccacgaagccacgagacggctagtggtacccaggggtgtgagggctccaggttgtatcaccatctccatatcattgagaccaaattggagatgagtcaaagttatagatatagcacgacagacggctcagggcatggcttagtt

SEQ ID NO: 577612 - DNA, 342 bp, Homo sapiens
  misc_feature (48)..(48): n is a, c, g, or t
gtcccgatctttgcaggtgtgatgaccaaaaaaaaaggtaaaacccgntcttactggaaagcagagaggataacaagaaaaaaaaaagataattttaaagatgatagggttttaagtcctggggaggtgacagaaaatatctgggggagccgggcacaatgactcatacctgtaatcccagcactttgggaggccgaggtgggtggatcatcaggtcgggagttcaagaccagcctggctaaggtggtggaaaccccgtctctgctaaaaatacaaaaattagccgggtgtggtgcacgcctgtaatcccagctactcaggaggctgaggcaaagaatcgtg

SEQ ID NO: 577613 - DNA, 254 bp, Homo sapiens
agacgtttggaccggggatgggggaaaagaatttaaaaggctaataattatctgttcataataagtaaaagctaccatataacattttcttttctggtcacactgagttaaatttcttctgaaaagccgcacatatggaccaaatataacaaaaattcctgaactggacaaacagcatactcgacagggttgttaacctaggtcacagttcagtattttagagaatctttcagacatctggaagcctttctatt

SEQ ID NO: 577614 - DNA, 637 bp, Homo sapiens
  misc_feature (328)..(328): n is a, c, g, or t
ggtgaaatagatatggcgaccgaggggatgtggagctggagtgggagagtgagaccagtggaccagagcgggctccggagaagccagggaaatatgaccatgcggtgtccggcggacttgtgagcggtgtcagcgactatgcagaggagaaggagatccagagttccaatctgagagggccatgtgtgtgattggagacagaaggtcccgggagcagaaagccaaacaggagcgggagaaagaactgcaaaagtcactatcaagaaggaagatctggagctaataatgatgagatggagatacctcgagcagcagcagaacgcagttntggggaacacatgggcaaacgtggtagaggcgcttatgtgccgtaacaactgattgcgtgctttcccaaaaaaaagagaaagggagaaaaaaaagtttttgggcggcatgggcccccgggaagaaggtcttaacacccatccggtggggggcgagggccccatgaacaggtgaacggccacacgcgtccagaagacgcggggagcaagaggggcgggtcccccaaaaaaaagggggggacacgcggtttgaacaacccagaggtagaggacgaggccaccggggccaaggacgataatagcggggggat

SEQ ID NO: 577615 - DNA, 197 bp, Homo sapiens
ggggggggggggggttcccccttttttttccccttttggggggggggggggggcctttttttttccccccccaaaaaaaaaaaagggaaaaaaaattttttttttcccaatttttttttggggggggggggggtttttttttaaagcccctttccggggttttgggggggaaaaaaaaccctgggccccccccccca

SEQ ID NO: 577616 - DNA, 329 bp, Homo sapiens
accatagtcagatctcagattggacaacgctcgaatagctggactagctatgaggtactggatttgagtagtacactcttgcatctcttgtacctaggtagctaagtcgcattacaaggatgtttgccctgcgtgcacactcctgctgttgtacgctttagtttttcttcagactctcttaggccagttacatcattagagttcagatctgtgtactatgcactccaaagctatgtcaccatctgcttcatattgtatccatctatagaattaactcatctcttgccatacctttgaagtctgtttccactcaatcgacaccttctaga

SEQ ID NO: 577617 - DNA, 218 bp, Homo sapiens
cggtgctcatcgtgcctggtataattattattttgtttatattaggagatgagttctccctattttgcccaggctggtctgaagtccgggactcaagcgatccaccgtgcctcagcctcccaaacgtgctcaaattataagcttagccatgtgctcagccctaaatgttatatcttaatttccttttataggctttattgatttccaccatagaggat

SEQ ID NO: 577618 - DNA, 833 bp, Homo sapiens
cacctgtgggttctgaaggctagaagcttccacgaatgagccaggaaacaagttctgattggctgggaacagagctctgctccaagattcagggctggcaggattccttctggttctggtggctcgatcttgcatgtgcttgcctctggactggtaagttattccaaacaaaccccaggtgcgtctggaggggaaatgttcgcaatataattaatattggctggcaggaattaccgttgtaaaagatatgtgcttttaagtattgtggttattgtgcgaagatgttgggactacctttgtgggcaatattcttccttcagcgggctcatgtataattttagataaaagtacaaggaaaattatgattccataatcataagtctagtttcagcaatacacgtatcttcagagaatctcagcctccctgcagcatcctcctggtgcacagaaaaactgcggaattctggcaagatactcaaaggattctgacgggtgaccatctcaggccggagatatgcccaacaactggaaaagcagagacagccatggacagatctgctgacgctaaagtttatagacagctgaggtgtcaacccatataatcaccgcagatgttattaggccatgatcattctgtagttaagcggaacctcccttctggtgtttcctctcagctgacagactatcgtggggcactttcaagggccccattgtgttcaaatcacacacaaccaaaggttaaagaaagcccgctgggtaaaatactccctttggggggtcccatgaaccgcgcaaggaataccccagaattctctctgtgtccgatatacttg

SEQ ID NO: 577619 - DNA, 1639 bp, Homo sapiens
  misc_feature (754)..(754): n is a, c, g, or t
  misc_feature (762)..(762): n is a, c, g, or t
tcctggatcctgtagaggactaataacacaagaccctcattgccatcgtttgattatccacctcatagcaaaagacatgggctttgtcggatcttatcgtccaactccgtcgtttatataatcacatgcccgtttccaatgatcctagaagctcattcgcgagtctccgtaaggtagggattggcgtcaagattgttagcgcacatccgagtagtggcacgaatcttctaagtaggctactatgatgacaggagtatcatggataacttgtcgcctatttcggtggccgcagggtgcagaatgtactatgtagccgaatctactgtaaccatgtgtagcaaaatagagaagatacatacaaattctcagggcacaatgggagcgagagtgaagacgtggtccactaggctgaagataatacagacggtacaatacctccagggctctcatataggcgctctcaattacaagatctgagtggctgggcgtcacgtctatactggccgttgggtttgcagatttacaaggtggggttctgggaagaagagccacgcaagtgcatgtcacttagagccacattcggcgggtatgaactcacagagagagtaaggcgatccggggggtcaaaagggcgcctgagcggggggaagcggcgggccaacgctacacatgatagcggcgggagattgtgcatacaccaaaacagtcctgggcatcggatttccccctcaagaggtcgtcaccgcgcgaaatnttacttgnggggccattgtgtgtgtggggcgcaagtggtcacaacgcgtaagaagcatgcaggggaatgcacactcaaacgcgttagcaacgcggggtgtaaacctccattctgagagaacaaattttctacccaaccagtgggggggaggcggcggtggcgaaccaaaggggttcccgcccctgcgggggggtgccccccaaaaagtattaccaccgcacgagatgctcgaccaacagtctcgtctcgtatgttgcaaaccaagcaggggggaggttgggacccccggaaatccaggaagagaacggccacgaaaaaaaatatagaggggcgaagggggcactatgagcacacagagcaagttaatagaaaaaccgcgactctcggtggaacgcgggggcaaacactcctgcggaacagagcaatgagggaacaccatcggagaggaaaagagggagagcccgtatatttcaacaagtgagggggcgcggagagaaggctaaagcaggggggaacaatatcacccacatatcacacaaaatctttaaaacagcggtcaacacaggggatatttagttcaacatttatataacgcgggagtccacgggggtggtaaacctaaaagcggggccaattatgatgtgggggcgctgcataaaaaaaattggggtgtaaacggaggaaaataatggtattgagagcaaactttaccgtagggaggactaatcagtcatataataagatatagagagtatataatataatgattctaaagaaaatatcatcatccaatagaggtattaagtgaggaattataattactattaagcaagaagagagagtctcaataatatgtttttatccagccataattagggagagttc

SEQ ID NO: 577620 - DNA, 373 bp, Homo sapiens
tagacaaggatttttgcaactatcacttaaagtctggtggcacattctttagttaggtccttaaggcaatatatttaatttaatttacaatttgatttgatgttaaagtttttttaaacttcacctcaaaatagatgctcaaaatattgccctcacaatagcctttgtaaaatgtattcagattttggataaaaaataatggtggcttttttttacagtagtgctcattagcaccattataattaagggtctcccaatttcccagcaaaaccacctgtttcttaggagtttcaccttaaaagatcacagtggttttacccagttgggtagcgcacaaaaaagcaatttttatcagttgcgggtgcttttttgg

SEQ ID NO: 577621 - DNA, 142 bp, Homo sapiens
cgagcactcaaccctgacccgatgcctgatgacccgacagtgagagcctagagagcctagttgcagcaggcccatgcgcaagatccttctcccagacccaggcactgcggctcgcatggacctttagagaaggagctgcatg

SEQ ID NO: 577622 - DNA, 222 bp, Homo sapiens
tgccaaagctatacccaagtagctgtgataacaggcgtgcaccgtcatgcctggttgatttttgtatttttagtagagacgaggtttcaccatgttggccaggctggtcttgaactcctgacctcaagtgatgcacccgccttggcctcccaaagggctgggattacaggcgtgagccaccgcacctggcctgctttcattgttgggtactacgctttggca

SEQ ID NO: 577623 - DNA, 325 bp, Homo sapiens
tgacatacacatcctgaaggtgctagacaaggcccgtatcagcaccggagaccagcccatctgactggctgccaggcgctatctgagcactcacttccaagagtcccacatcactgtggctggatggaatgtcctggcagacgtgaggagccctggcttgaagaacgacacactgctctctggagtggtcaagagtggtggactcgctgttgtgtgaggagcatcatgaggaccatggcgtccgactgagagttactgataacatgtgatgggcccgctggaaacctactggacattctgatatctccactggacatacaggagg

SEQ ID NO: 577624 - DNA, 128 bp, Homo sapiens
cacacctgtaatccctgcactttgagaggccaagtgagtgatcacttgagcaggagctgaaacagctggcacatgtgaaacctcttataaatcaaattgcgggtgggtgcgaaccgacccaggggcgg

SEQ ID NO: 577625 - DNA, 175 bp, Homo sapiens
atagccgtctccagaggctccccgaccctgcgaaggggccctgttccttccaggcccccaccactaggactctgaggctcttactgggccaagttcctctagagccctccacagccgcagtctccctctgacctgcacggccaagagcagaggcagcgggttgtggaaagcctct

SEQ ID NO: 577626 - DNA, 376 bp, Homo sapiens
ggtcgaccgtagaaactagtttgtgatgtgtgccttcaactcacagagtttaacctttcttttcatagagcagttgggaaacactctatttgtaaagtctgcaagtggatatttggacctctttgaggccttcgttggaaacgggatttcttcatataacgctagacagaagaattctcagtaacttctttgtgttgtgtgtattcaactcacagtgttgaacatttctttagagggagcagaggtgaaacagtcttcttgtggaatttgctagtgtagatttcaaacgcttcgaagtcagtgatagaaaaggatatatcttcgtattaaaagtagacaaaatcattctcagaaaactctttgtgatgtgtcgacg

SEQ ID NO: 577627 - DNA, 134 bp, Homo sapiens
gatcctaacaggccaattttgtgccccccacccccaccctgggacgtttagcagtgtctgcagacatttttgattgacacagctggggtgagggatgctactggcttctagtgggtagaagcgagggatgctgt

SEQ ID NO: 577628 - DNA, 102 bp, Homo sapiens
tctcctccctccagcagcttccggtaggtggaatctccacatccaggccatcttcacgttgagcaggtcctggtactcgcgcagatgtgcgggccatctcat

SEQ ID NO: 577629 - DNA, 317 bp, Homo sapiens
catctcctaaaaccatacttcatatctgaataaaggcagtaacaaggttatacttctgcttaacatgatacaactatcctgcataaaaccaaaaataactaacacttccccagaagaggatgcaaagtctggatgatgttaatgcttctccctgatatcccataacttaaaaactgatataaagttaacaatatttaaatactctaatataaagtcagtatatcatactgtacatgataaagagatatgaaagggatgaaaacaaagctgtgttgtatacacattcattataaaataaagaagacacattcatgaca

SEQ ID NO: 577630 - DNA, 792 bp, Homo sapiens
  misc_feature (186)..(187): n is a, c, g, or t
  misc_feature (193)..(193): n is a, c, g, or t
  misc_feature (197)..(197): n is a, c, g, or t
  misc_feature (199)..(199): n is a, c, g, or t
  misc_feature (205)..(205): n is a, c, g, or t
  misc_feature (207)..(207): n is a, c, g, or t
  misc_feature (224)..(224): n is a, c, g, or t
  misc_feature (240)..(241): n is a, c, g, or t
  misc_feature (244)..(245): n is a, c, g, or t
  misc_feature (250)..(251): n is a, c, g, or t
  misc_feature (277)..(277): n is a, c, g, or t
agagctgaggaaagaatccctagcttgagaatgtgtcaatagaaacttccaaaactgaaacaggaaagctcaaaaagagtggggaaaaaaagcggaacaacatattcaacttcatatttaatattttgttttgacaatagcaatttttaaattttgtagttgtgggacaactacaaaggctgtcanntacacntaangngaatantngtggtttggggaccagntggaggtggccaggtnngtnntatcnnatggttttactgcctgtgccacatanaactgtttcctcatgatgatgccattttcataagttggagttctgcgtgtggggagacacacgagccattggcatctcacttagattcttcctaattcacacaaacttaaactttagtggtgtttcgtgagcttaagagaaaatgaagaaagcatttcacatacctgttttggggtcctccccatttttcctaactctgcacagaaattagaagcagggagttctttctatatttactaacataacacacatcacttcttttaatttggcatccttcctccctttatgtaattgacgcactgaccagttctgtccttttaacgggactctctctacttaaggagctgctaatttcaaatcacctttggcgtctttctttgagcataatgtgatcctgctggaattcacggcacacctaaaccttattttggtctcaagagaaatactactaccagcaattgatcttagatgtttggatcatcagtaaaaatttccacttatgaaaacaaaaaaaa

SEQ ID NO: 577631 - DNA, 410 bp, Homo sapiens
  misc_feature (396)..(396): n is a, c, g, or t
attttaaaacttcaatttgaatcaaagcttgttgtgaatttcccaagtcttttttagcatcctgaatttttggtgcctaagcctacattaaaatttacccaacatgtaagatctttcagttttgcccttctaaaatgcatcatttgggccctggtgcagtggctcatgcctgtaatcccagcactttgggaggccgaggtgggtggatcacttgaggcccaggagttcaaaatcagcctggccaacatggggaaaccccactctactaaaaatacaaacattagccaggcatggtggtacaagcctgtaatactagctacttgggaggttgaggtgggaggttgaggctgtagtgagccatgatcatgccactgcactccagcctgggagacaganaacagaccctgtct

SEQ ID NO: 577632 - DNA, 649 bp, Homo sapiens
  misc_feature (287)..(287): n is a, c, g, or t
  misc_feature (380)..(380): n is a, c, g, or t
ggccaaccctgcccaaaggaaggggtgggttttccaggccccttttttcgtggacccccccctcaggatgggcaaaaatccccaggtggtcccagcagctcgcttttaaaaagcagtaggtaagaggcctgggcttatgtcaccaacaaaggggtcctaaaagtctggctgctgggatgccccctgccccctccggaaggctctgcagagatgactgggctgggaaacagatgcttgctggccatggagcctcattgcaagttgttcttgaacacctgaggccttcntggtgcccaccaggcactacggcttcctctccagaatgtggctttgcctgagcacagacagagtcagcatggaatgtttttggccaagggtantgggggccctttggccttttgcaggtgatccagaggaacccagagccaacttaccccaccctccccctatggaacagtcacctgtgcacaggttgtcctcaaaccctctcctcacaggaaaaggcggattgaggctgttgggtcacccttgttcgcccaaacaaagcttgtgccggatttggccctgtcaaggggactggggccttgttttcatccctccttcctagttttactgttcaagcttttgaaataaacagggcttgttccca

SEQ ID NO: 577633 - DNA, 228 bp, Homo sapiens
gttatcggatgccacggccaagattctcatttatctgggcaggggcatattccatctctgcagcaaggtaaagcccggggggctagaagttccttcacagaacctaggtgtcagccagtcagggatatggtccgggggcttcccataaagaaagctaaatcttggcttcgtgctactccggagcatgcagtttggattttgggggcatcgataaacaccgggtaccgg

SEQ ID NO: 577634 - DNA, 676 bp, Homo sapiens
agggcaaattaccttcccactggatatttatccactgggaaaagaacaacctattcgtgctgtcctccactagggatatgtgaaagaagtacgccgccgctaataggattgggcctatgacccacttctctcggaacctggtggggccagaaatccctaagaatgaatggacaataaggctttgccagcaccaggctgcaggaggatgtgcgcatgtttattataggaccactcaaactggcgcgtaccaagagcaagttacttgcatgcatcaagggactacgagatctgatacctgcctgatcaataggcactgttaaaatttgctagattcatggtaagatgtcgttagcggcaccgatcgttagccagtgtgttccagttattgccgaatctcagtgatggagagcgcccgcttatgcggagaaagaagagatgctttgcgtacgggcattctcaccttgaggtctgtaactgaagggaatgcctgcagtaagtcactttcagggcccagtgaagtcttgcgacttcaacattctcttctgacctcgcctgaggtagccactttatcttacacattggtcgggtctaggtccattatcggccggattctgcactgttcatgtgatttcagcaatgggttgctcctgtgataacaaaatcatctatccgtgcc

SEQ ID NO: 577635 - DNA, 414 bp, Homo sapiens
aatagaaatttatttctctcagttctggaggctggaagctccaagatccaggtactcgtaggcttagtgtctggtggggaccccgtctctctgccttcaaggtggtgtcttgttgctgcctcttctggaggggacaaatgctgtatcctcacttggcagaaggcggaagggcaaaacggccaaatgctgtgtgaagcctcttttagaaaggccttaagcccccattcaggagggaagagtccgcatgacccagtcacctccttaacactattgcattggagattaagtttcaacatgaattccagaaggacacaaacattcaacccgtagcactcctacttcctctatcagtagaaatttttcaagttcttaatttttatgtaataatagcttattactgtgacggaagtggcc

SEQ ID NO: 577636 - DNA, 189 bp, Homo sapiens
gggagaatggttacttggtcgattagggccttcatgggctggcagtcttacagaggctggagcggtgagaagtgagaggtcagagggaccataggtgttgggcactgtctggccaatgttgcagtttgggaaggctaaagtggggccagtgaagaaggtctggaacggggtaccgaggctcgcagttcg

SEQ ID NO: 577637 - DNA, 891 bp, Homo sapiens
taaagacatcatagtgctgttttacagtcaagggttggcagatctgtttctgtgaagggccagcacagtgaaggtttttagagtctgcagggcagcgcagtcgctgtcgtcagctcctcagcgccaccactgcagctataaatgtatgggcgatggctgggttcctaataaaatttgattcacataaggaacaggcctcatgtgatgggattaggtagggtgggtggaggcgcgtgtagctttgccccagttctggaagcgcgactgtggccaaagtgtacgttgtggaggacgcatgtaggtgaacctgaatagaagagaggcacccaaatccatcgagggcctcagggaaggcttcctggagggggtggcgccgtgaatgagcatgagctggcgaccagtagatgaaggaagcagtctgggtgagccaggagtcagggtctcacaagaacggtgctcagtgatggaacgctcttaattgtggcagcacttgttccttgttgtctgcaggagcctgatcggatcatgcaacaaatcgactttggcacgcatgcatttttggatgcccgtgtcagtaaggaacgctcttcgtgaccctccaggtcagggttcccgaagctcgaggcacagggggctattcagcgaggaatccttccctgggaataaccagggcgcacagctctcgaagggtttgtcaaggatgaaggcggtctggtgaacggccctgacactcatctccgtgtccagggggctcgggttgccacctgtggaggcaagggtctccctctaagaaatgaacagggaaaagccaaagattggcgtgaagccaaaagttagaccttagtggagattctgactttcacttcaaaggaacctctggtattatctggg

SEQ ID NO: 577638 - DNA, 149 bp, Homo sapiens
ctgagaaaaaagagagaagggagaatggtgctgggtgttagcaccccagcactggccagcacaggcgtggcatctgtgcatcagacacggggcgtggatgcacaccccaccaggagacccaggccagtgttcccaaagcctgctcacgg

SEQ ID NO: 577639 - DNA, 434 bp, Homo sapiens
ctataggatacccttcaagtcatgctctattgcccaggctgcagtgcagcagctgtgatctcgtgctcattgtcgagcagtagtcacaatcctgtctctacaaaaaatactaaacaattagctggagtgtggtggcacccacgtgtagtctcagctactctggaggctgatgtgggaggatcactttagcccataagttctagggctgcgatgagccatgaaggtgcctctgcactccctacctgggccgacagagaggagaccctgttgctcttagaataatcctgcgtctgcgggtgccgtgtcggtgccggtgccatcatccctctgttccaagacattgtcccttctcttgcagctatcatagtctcagcccgcatggcccccgaagcgatcatcttggacagagccttcctctctgtggtccggctcac

SEQ ID NO: 577640 - DNA, 323 bp, Homo sapiens
gcacgagattgggcaattctagctaatgaaaatatacttaaaagtatttcttaggccgggcatggtggctcacacctgtaatcccagcactttgggaggccgaggcgggcggatcacctgaagtcaggagtttgagaccagcctgaccaacatgatgaaacctcgattctactaaaaatacaaaaattagccaggtgtggtggcatgtgcctgtaatcccagctactcaggaggctgagacaggagaattgcttgaacctgggaagcagacgctgcagtgagctgagattgtgccattgcattccagcccgggcaacaagagc

SEQ ID NO: 577641 - DNA, 121 bp, Homo sapiens
cgctcactgaagaaatgctaaatagtgtcagagcactccgtactccgcgaatttggagtgtgcttcaagacatataggtcgttccaacagcaagccaggcacttgtcacaacaataacact

SEQ ID NO: 577642 - DNA, 155 bp, Homo sapiens
tgtacctcatcacactggtatacccttcccgtactaattaatcccctggcccaaacctgtcatactatctaccatactttgcaggcacactcatacacagcgctaagctacgcactgataattatacctagagtacggctggggatccatctaga

SEQ ID NO: 577643 - DNA, 563 bp, Homo sapiens
  misc_feature (136)..(136): n is a, c, g, or t
  misc_feature (398)..(398): n is a, c, g, or t
atagggtttaccaggcgtagacatgctcgctttcaaagttgccgttggtattgttgtcacaatagacgggaattttaatatcgtcagattcccagatcttatcaccgggtttggcattgctggtacagcaaacggntgaatcgcttctgatttttctactgcgccaccagatgtaccaaaatagcagttcagcgccattgcagacttcaacggcagaaataacaggcagatgacgagcaacaatcccttgccagcactcatttcgcctccactgcttgtaaacggcattgtccgctgcagttgagcgtcgtcatgcgtaatgcgccgtaatcatccatgtaaccgagataaaactggctgccgctataacttccggtgtttgtgttgaccgtactaanaggtgcaaccatcacggttttgaagcctgggagaacgcctttttcatttctcccagataggccatggctcagataatacgcggtaggatttttcagtgtcagttggttgccctgctggctgacctgtaactgcagttcgaccttttctcctgctttcttgcgtaa

SEQ ID NO: 577644 - DNA, 327 bp, Homo sapiens
  misc_feature (40)..(40): n is a, c, g, or t
  misc_feature (44)..(44): n is a, c, g, or t
  misc_feature (128)..(128): n is a, c, g, or t
  misc_feature (321)..(321): n is a, c, g, or t
attccggtcttgaaagcaatacccaatacatgagcagccntttntggcgaccacttcaagataccaatgtgatggttcaaaaaagctgatatttcgggtgttaaggacggatagcgaccatgtttgtnccgattacactgggctaaatgatgagcctgttgtgcattgtatggtttaattcgacttaactcgtaggaaatagttgcaggagaacgctttaagaaacgggcgacttcacgagttgaatgattaaggttgatcattgtttcaatgacagaacggtcgtgagctgataaactagaggcataagctgcaggtccnttttgg

SEQ ID NO: 577645 - DNA, 861 bp, Homo sapiens
gttttgatgaccgctgtcctgtctagcagatacttgctacggtttacagaatattcggtccctgggtcgtgtcatggaaactggaaagaaagggtcgataaggcatgaagcgcgagttcagtttccagcggtggtgctggccgcctctcccatgcaggagttaagatccccaggatgtaatatatagatcaagggctctataccccgtcaaaccagagagaaaccagagcttggaaagttgagtataaacaaagcgactctgatagacatagtctcgctatttggcaaaactgaacgtaggtggatcatggatcccggaactagtcagacttggtaatattttccagttctgagtaacaatcagggtacccgatgaccacgttaatgacgaaagcattcattcagctagtgtattcgacaactctgtgagttgtgcttacaggaagagatggttatgcacataatgtgtccatgcaaagtctcgtacaagctccctctgttaaaagacttgcctgagactcttcacaatttcttgatggctttcctgtgccccgtcatacaaaacttgcctgactgcaaaggtttgaacgaaggatgttccaagaatctttaaatgaccttgggtatccctcttgcacttattccaacaaggcttccatgtaccgaggggggggctcctcatgacatgggctcacatttggtggcagcctaaggaggtaataaacgggctcaggattcttacggcatggaaagaaagtccaccttattgctgaatgggcggccgggggggagaaccgagaaggatttgcacataagtggtttggcacacctataagccggacgtcttgctgggccaagctg

SEQ ID NO: 577646 - DNA, 399 bp, Homo sapiens
aggctaggtcactacatctctctgagacctcacatatcttatctctaggtcgaaaaataaaataacgtccccatgccaatcagtgcaaggaatctgtgagatcaaacactgaaagtgatatgtggtctcaaatgtgctgaatgaatacaggtaatacattatcatcacagggtttcccttgaccactgttacaacagttctggccccaagatttgcagagagaattaagattttatcccaaaataacctgccaactcatatacatttcccaaacatctgtagataaagcatcatggggtacctgaaccatcgagaaataccgtcttaccaacatcctactgaggactggcaacaaacaaaagggaaccaaatcaccaatagatgtgaaggcagatagag

SEQ ID NO: 577647 - DNA, 787 bp, Homo sapiens
  misc_feature (6)..(6): n is a, c, g, or t
  misc_feature (43)..(43): n is a, c, g, or t
  misc_feature (54)..(54): n is a, c, g, or t
  misc_feature (56)..(56): n is a, c, g, or t
  misc_feature (60)..(61): n is a, c, g, or t
  misc_feature (63)..(65): n is a, c, g, or t
  misc_feature (67)..(67): n is a, c, g, or t
  misc_feature (73)..(73): n is a, c, g, or t
  misc_feature (75)..(76): n is a, c, g, or t
  misc_feature (82)..(82): n is a, c, g, or t
  misc_feature (111)..(111): n is a, c, g, or t
  misc_feature (123)..(123): n is a, c, g, or t
  misc_feature (146)..(146): n is a, c, g, or t
  misc_feature (184)..(184): n is a, c, g, or t
  misc_feature (189)..(192): n is a, c, g, or t
  misc_feature (196)..(196): n is a, c, g, or t
  misc_feature (205)..(205): n is a, c, g, or t
  misc_feature (258)..(258): n is a, c, g, or t
  misc_feature (272)..(272): n is a, c, g, or t
  misc_feature (291)..(291): n is a, c, g, or t
  misc_feature (344)..(344): n is a, c, g, or t
  misc_feature (370)..(370): n is a, c, g, or t
  misc_feature (373)..(373): n is a, c, g, or t
  misc_feature (384)..(384): n is a, c, g, or t
  misc_feature (391)..(391): n is a, c, g, or t
  misc_feature (393)..(393): n is a, c, g, or t
  misc_feature (396)..(396): n is a, c, g, or t
  misc_feature (398)..(398): n is a, c, g, or t
  misc_feature (412)..(412): n is a, c, g, or t
  misc_feature (425)..(425): n is a, c, g, or t
  misc_feature (520)..(520): n is a, c, g, or t
  misc_feature (528)..(528): n is a, c, g, or t
  misc_feature (632)..(632): n is a, c, g, or t
  misc_feature (689)..(689): n is a, c, g, or t
  misc_feature (694)..(694): n is a, c, g, or t
  misc_feature (764)..(764): n is a, c, g, or t
tacttnaacaaaagcccacagagaaataaaaaggtcaaaaatnacattctaatntngggnntnnntncttttngnngttttngctgtgctgtctaaccatccttcagctgnctttcaaaaaanaacaccctaagctcatcaaaatnttcattttccatttgcttttttaaattaaaaataattnttaannnnaggnaaactttangggattcacaatcaattgcctgactcattttgatgtcatgtacagcatatggnggtcaggaaggctntttgcagcacatgtgattnggggctactgatcttcagggtttagctttcttccaaacagtgtaaaatacccncaattcctagtttgaagggacacagncgntctcctttggnaattccncnggncntttcaggcgccccngctgttcttcttngagcgacagtgcttctgtcagtttgacacagttcccctgtgttaaatatttcccatcctgtttcaacactttcattgagaggtcaagaatcagtntgagaaantcccatgtggaatcttcttctggagacgtggagattggaacagctgtcaaatcattaatcacataatcaaattctctcccttctttggcgtacctcttcagtancgggatacagtcttctattagaacctgatagcagtctcctttaagattgtctaaganatcgncacacgtttttcgcatgtatttcttacacccatcaatcaccatttggtcaatctctaccatagtgaccanctttggttttagtttgactattt

SEQ ID NO: 577648 - DNA, 107 bp, Homo sapiens
ccctcttctcctacaggacatttactgcggtacatggaatcgcgttccatcctgttcatggcacccttgcaactgtgggatctgatggtagattcagcttctgggac

SEQ ID NO: 577649 - DNA, 270 bp, Homo sapiens
gctccggagtacgcctgatcaggaagccggatctctttctgcttgtgcgatgccattgccatctggattttccggatttgccgaagaacgtgacgccagtttccagcgcgcgctggatcttggtgtcgtgcggctggtcaccatctgtacgcgcgttcgcaagtttgacggcattatcggcattgccgaacgctatgacagcgtctttgcttcggtcgggacgcacccaaacaatgctcatgaggaactcgatgtcaccgccgctgacct

SEQ ID NO: 577650 - DNA, 251 bp, Homo sapiens
ggggggggggggtgggttggtatccacctgaggtccaggagtatcgagatctagacctgatccaacatggagaaacctcatctctactaagggggagaggggggggggggcgtggtggcacatgcctgtaatgccacctactcggaagatggaggcaggagaatcgcttgaacctgggaggtggaagttgcaatgagccaagatcgcaccactgcactccagcctgggcagtaagagcgaaactccatctc

SEQ ID NO: 577651 - DNA, 1098 bp, Homo sapiens
  misc_feature (382)..(382): n is a, c, g, or t
ctacccacgagtttagttgtaagaagaggcgccccacccctgccctctttgggcccccccaagggtgtgagccacaccaaaagtggggtgtttataaacccgggtcccctcctcctcccggggtggtgtgatagcccccctctttttagtacccccccccgtgtgtcgcccacaaaaaaggggtgttttatgccccaacttagaagtcccaccctcttttggtgctccccctttgagaatttatgggggaaccccctggtatatttggaaagttggggccctcccccccccagagaggagttctcaaactcattggttctgtcctgtaacacttgtttgttaaaaccacacacgggtgtagaaaatttgtgcaccacccctntccccacccgtgtaaaagaagcgccccgggcgcccattgggacccacacacgcccaggcacccgaagaaggcaacccgccctattggggaggcgctttttaaagatgtgtgagatgtaaaaatcgcccaacacacagttacccctgacaccgagacaccccaccaaggtttcctctaaagctatcccgcagaccctcgcgcactgtataaaaattttccgcgttttgggggcgaacctctctcggagctcacgagatcccacaccctctccgagccacgtaccactggctaaaagactctcacccacgtcacaaggcgcgactatctattatccccacttgaatcccactaaccttgaccccaccggagacccaagttacccctagggataaccacgcgccacaatcctattttctagagtccacatatcacacccatagggtttacgaccctccgcatgttggaaccacggacactccccgcatggtgccaccccgcctattataaggttcgctttgttcacaccgattaaagtcctaccgctgattctgagttcagaccggagtaatcccggtcggtttctatctacttccaattcctccctgtacgaaaggacccagagaaataaggcctacttcaccaagcgccttcccccgtaaatgatatcatctccacttagtattatacccccaccccccccagaaccgggtttgtta

SEQ ID NO: 577652 - DNA, 880 bp, Homo sapiens
agggcgcggcggggagtgagggggcggcaggggagagaggagagagcgcaggggatgggccagagcggcgcagaggagcaggtaagcacgagggagcggcggggtggaggacagcggggtgtaggcgggcagacaccgacggtgaggccgcgggccgagacatcatgtttatctgatgagaggccgccggggtggagaaggcaaccccaagagtgtaaaattggtcgggcggcagggacgggtgcgactagttgcgtttcggggccctgctcgtgtgggtcgggtgagagagcgaagcggtcgtgagggagagacgcgtgagggagtggggtgggggaccgcgcaacaggcagaggcgacggaggtgagtgagggggggaaggaggaaggggctgggtgaggggctgtgggcggcgtgaccgccgccgcgcgtgcacggcgcggcgggggcggatacgcgggtctgggggttgcggtgcacgccgcgctggtatgcgagtgaggcacagaagataggaggatcagcgggcgcggccgctaccggcgacgaccatatcggtagtagcgaacccctttcctagctcgccgtccggtgaagatgtaattcgaccgcgcacgagacgacgtgggggtgggggggacttactgcacgccccacgcacgccggtagcagacagctgactccgcgccttcgtcggcctgcggctgcgagcaccctcgtgtcggtggggactaggcccattcacccctcgactgttcttatcgccctcgtccctcctcgtcccgccctaactcgtgtgttggcgctgcggtgtttgtcctcttctgatcccaaagaaaggaaaaaacaaaataagaaaaaaaccaaacggacaaaaca

SEQ ID NO: 577653 - DNA, 919 bp, Homo sapiens
gcttactagaccatgcgtatggctcgcgggcctacgtaggtaatgtgagcatggctcagtagcgtggtctgtccgtagagaagatcctgggtcagtgacataggtgctttggattcgtcaccagaatagaagacaacgcgacgaggcgcggcaagccgatgccgttgtcgtgaaggaaagtccagcagtggagcttcgtgagggtcagtgacgtgggatcgtaatcaaagcagcgacgtaccaacgcgagactcagattacttacaattgatcgctcgccggactcgtgggaagcttaggccgttgggacaagaccaggcattcatcgaagccgcctaaggtccaacccaagctcttactccccaggaattaccggggccaccattcaggggatgggaacctttcagcccctccgaaggtcctcaaactgtgggaaccagcaaggaactcttggttgaccgccttgcaagcatggtgtggaacaatctgcgagggacagaggaagccagatttggggcaaaccatgaacccccgagttatacatacaaaggaaaggctgttgggtagacttttggtaaggtctctagataatagtcacagaaaggttcccgaatattgaagggccaagttcttaaaattggcaaaaagtgaattctggattagtaacagttccattctttcccaaaatggcgcaagggccttatccccttggctgtccctccttgggactaacaaacatggtgaccagaaacacaggaccagttagcccagaaagttccttccccaggggttgggacccaaatttctggcaaagacaacatggccttttgcccggaatgtgtttggaaacctcctgtcaaagggactaacattaaaccatagcagggaagcttgcccgggttacctaaatggagcaaga

SEQ ID NO: 577654 - DNA, 266 bp, Homo sapiens
gctggaggatgcatgcaggacgccacagtgacatgggacatgagccgcgggcccagcagcacaggctgaagttagctgacgcatgctcttggcttttatcccacgggcggccagcggccggacccctgactgcagcctgtcccaagtgagactgcaactgacccattcctcctcacgttcgtcttgtcttctgtacattggcttgactctttgcatcatctgcgccgctattgacagaggctgcctgaccgagcagcgccgactca

SEQ ID NO: 577655 - DNA, 294 bp, Homo sapiens
ccccctccccgggtaccaaaattataggcgtgagccactgcactcaggctaatttcttaaaataatcatatttccttaagaagcgtcaccatataaacagcccacggttcctcttgtgtttagaaaattgtttcttgccaggcgcagaggctcacccctgtaatcccagcactttgggtggccgaggcgggtggatcacctgaggtcaggagttcaagaccagcttggccaacatggtgaaaccccatttctactaaagatgcaaaaattacccggggaggggggggtaccgag

SEQ ID NO: 577656 - DNA, 733 bp, Homo sapiens
  misc_feature (27)..(27): n is a, c, g, or t
  misc_feature (74)..(74): n is a, c, g, or t
  misc_feature (78)..(78): n is a, c, g, or t
  misc_feature (272)..(272): n is a, c, g, or t
  misc_feature (317)..(317): n is a, c, g, or t
  misc_feature (319)..(319): n is a, c, g, or t
  misc_feature (326)..(326): n is a, c, g, or t
  misc_feature (328)..(328): n is a, c, g, or t
  misc_feature (413)..(413): n is a, c, g, or t
  misc_feature (415)..(415): n is a, c, g, or t
  misc_feature (424)..(424): n is a, c, g, or t
  misc_feature (427)..(427): n is a, c, g, or t
  misc_feature (436)..(436): n is a, c, g, or t
  misc_feature (439)..(439): n is a, c, g, or t
  misc_feature (458)..(458): n is a, c, g, or t
  misc_feature (518)..(519): n is a, c, g, or t
  misc_feature (528)..(528): n is a, c, g, or t
  misc_feature (530)..(530): n is a, c, g, or t
  misc_feature (539)..(539): n is a, c, g, or t
  misc_feature (544)..(544): n is a, c, g, or t
  misc_feature (552)..(552): n is a, c, g, or t
  misc_feature (560)..(560): n is a, c, g, or t
  misc_feature (563)..(563): n is a, c, g, or t
  misc_feature (566)..(566): n is a, c, g, or t
  misc_feature (651)..(651): n is a, c, g, or t
  misc_feature (653)..(653): n is a, c, g, or t
  misc_feature (717)..(717): n is a, c, g, or t
tccctttttacatacatatataaacanttttgggcgtaggtgtcagatgggtgggggtcatatgggcagataantttngggagccaagaacacagaacgaaaagccagtcaccaaatcttacaaataatcatctaaacttctctggccattcaatttgatacattatcccaaatattccatgtcacatggtccacaaggttttcttttgggattctgaagcgatcaatagccatacttgtcattaagatgggttctgccatctccactttgnccttcaggtggggcccacacacagtagtctgggtcatcttcaggntntttgggngnaagtgttggtggaagtttgcctggaccaggtgttttctttttcttcaattcacctctgcttttctcatattcattctttgatgcngngggtcctgngcncaatggggnggntttgctacagtcttgatantctttattctgttcttcctcgctaagttgagacatgttttcctgggtttgggtttctttnncatgtgtgngntctgtgggnggccncatttccngcactgcngcntcnggctctatctctggctgtggcctactggggcttccatcctccagttttttcttttcatgctcctccttttctttctcttcttccncntcctcttcctcctcctcttctacttcaggctcatctttcattctcattagagttggagggagtnctggacgcttgggggg

SEQ ID NO: 577657 - DNA, 1229 bp, Homo sapiens
tgaagttagaaaagccctgttcaaagacacgagatggctcagtgcttcatccagaccaaagaggtcgtacactggttactcggcaaacttctggtggtggtcatgcgaggtggtttcgatgtgaatgactacttcccgtcgtgccactgaaacttcagatggtcgtgatggcttcggtggcacccgtgctggctgatgtgcatattggctggcagctgccgtgatgagctatatagtcggatattgcgtaattgactcggaagacagacttgttgccaggtggtaggccacgctatccttgattttcgggaacttacaacaagtcagttcttccaagtttaaggacccgatgaaagggagggaaatgcctggcaggctagtaatgcgtcttggtccgcctagtgcgcgtgtggatggccagagtactttttgcaaatattcgacgaataccaaaggatggtctcactggccggtttcccatgctaggccacgctagcatatgatcattggccagatgcgtccagagacgcaaattttcaaatctatgcgaaaaactagaacgcctttatgaccagtgcacgaagcgacgcatgctcaagtaagagagggtgaacggaaggtaatacgcctaccaggtgttttagcaaccagcactttgtggtgccaaactcccagacccgatagcccaacgaggtgagctgggacaaagcggcccttaagcttggcttcacaagataggcatagagcattgatgtgctcaggaccacacatcactccaatgctgattaatgagcgtctgaaacaaaactcgagggcccttggttagtttctggtagaaccttaaattttgcttagtaaaaccacgaggtttaactttgtatacagattttgttcttgggtctacctggtggggcatcagaaggtggttacaaacgccaatttcgcaaatctacacacgggggtttttcaaaactcggttacacgaacctaattgaatgtcttcattagagaacccccctgaaattggcgtggtatagaaattgacgcttagaacgttggttccacccaaggtgcttgcattcgatggccaccgccttggacactttcaaacagtgtggtccttgttggtcgatccaaattggttgtgcgtgggaggatacaaggatctcaacggacctaaacttccgtgtaacgccccatcccttgggggtacaaacttttccccaccc

SEQ ID NO: 577658 - DNA, 369 bp, Homo sapiens
ctgagtccgctaagattcatccaagtgttttcatggtcgtgagcgccgccccatgtttcccatctctcagctgctccctcgtgccctgtgtgaaatttgttactcgctaagagggggctcagatggtgcggcctgagtgtgcggccggcggcatttgggatacacccgtagggtgggcggggtgtgtcccaggcctaattccatctttccaccatgacagagatgcccttgtgaggctggcctccttggcgcctgtccccacggcccccgcagcgtgagccacgatgctccccataccccacccattcccgatacaccttacttactgtgtgttggcccagccagagtgaggaaggagtttggccctta

SEQ ID NO: 577659 - DNA, 435 bp, Homo sapiens
  misc_feature (164)..(164): n is a, c, g, or t
  misc_feature (175)..(175): n is a, c, g, or t
  misc_feature (200)..(200): n is a, c, g, or t
  misc_feature (205)..(205): n is a, c, g, or t
  misc_feature (246)..(246): n is a, c, g, or t
  misc_feature (263)..(263): n is a, c, g, or t
  misc_feature (293)..(293): n is a, c, g, or t
  misc_feature (300)..(300): n is a, c, g, or t
  misc_feature (347)..(347): n is a, c, g, or t
  misc_feature (366)..(366): n is a, c, g, or t
  misc_feature (379)..(379): n is a, c, g, or t
  misc_feature (396)..(396): n is a, c, g, or t
  misc_feature (428)..(428): n is a, c, g, or t
acgcctcaaaggcccccaaaaggattagctgaagtccttcatcctgcagaagtacatgatggtggatagcgcaaaggatcaaaagattccccggcccatggcttccaaggaggcccccaaaaagctgattcgatacattgacaaccaggtagtgagccccaaangggagcgattnaaaaatgttcggaacccttaggccnagganattaaggccacatacattaacctcaagccagccagaaagtnccgcttccatttaggcncttgccggactttgcccgagccttttaggntcagatnccaaagggatgcaggagccctatacccctacacaggggccccctaantcctgtcccccttttttantcctttggtccanagtgttaacctactttnggagctgcctccatgggcccagtaaaggtggnccaagga

SEQ ID NO: 577660 - DNA, 425 bp, Homo sapiens
  misc_feature (124)..(124): n is a, c, g, or t
  misc_feature (132)..(132): n is a, c, g, or t
  misc_feature (204)..(204): n is a, c, g, or t
  misc_feature (206)..(206): n is a, c, g, or t
  misc_feature (230)..(230): n is a, c, g, or t
  misc_feature (234)..(234): n is a, c, g, or t
  misc_feature (243)..(243): n is a, c, g, or t
  misc_feature (250)..(250): n is a, c, g, or t
  misc_feature (267)..(267): n is a, c, g, or t
  misc_feature (277)..(277): n is a, c, g, or t
  misc_feature (279)..(279): n is a, c, g, or t
  misc_feature (286)..(286): n is a, c, g, or t
  misc_feature (289)..(289): n is a, c, g, or t
  misc_feature (292)..(292): n is a, c, g, or t
  misc_feature (295)..(296): n is a, c, g, or t
  misc_feature (303)..(303): n is a, c, g, or t
  misc_feature (316)..(317): n is a, c, g, or t
  misc_feature (325)..(325): n is a, c, g, or t
  misc_feature (336)..(336): n is a, c, g, or t
  misc_feature (339)..(339): n is a, c, g, or t
  misc_feature (344)..(344): n is a, c, g, or t
  misc_feature (374)..(374): n is a, c, g, or t
  misc_feature (377)..(377): n is a, c, g, or t
  misc_feature (381)..(381): n is a, c, g, or t
  misc_feature (384)..(385): n is a, c, g, or t
  misc_feature (391)..(391): n is a, c, g, or t
  misc_feature (410)..(410): n is a, c, g, or t
  misc_feature (412)..(412): n is a, c, g, or t
agggcggtttctggtcagtaacaaccaaaatgcttcggaatttgctggctttttgtcagattgggcagagggcgataagccctgctttccgcaggcctttttaaaataaagttccggagaagcnaaaactgnttcaggaggatgatgaaattcccctgtatttaaagggtgggggagctgatgccctcctgtataaagcccccntnattttttcagttggtgggacagcntatnccatatatnagctggntgtgggttccttttccnaaaagcaggngnggcttcngtnatnccnnccatcgnttgggtcagtttnnttcagctntttatgggccngtnatttnataaaaaacccagcttttttttgggggtcnatntttnttnncttgtngtaactgccccccataaancngttttttccctga

SEQ ID NO: 577661 - DNA, 416 bp, Homo sapiens
agcgggttccgttgctggtgaggagctgcgttctattggagaagaggcgctctgattttagaattttcggcttaatctgctttgctgcaggtctgttggagtttgctggaggtccactccagaccctgtttgcctgggtatcaccagcggaggctgcagaacatttaatattgcggaatggcagatgttagctgcctgatcgtatcttctggaagcttcgtctcagaggggcacccggctgtatgagggactcaggatgcttccacaaatattagaaggagaagaggagccagtgtctgtagatatcatggtgagagaggaaagaaagggaggaaagaggtgcaagagtataaacaacaaaccagtagatctataagaacatatgagtgaaaactgataaaattccaaagagaatg

SEQ ID NO: 577662 - DNA, 1072 bp, Homo sapiens
aaacatggcaggatcgaggcagggtggtaatcggacgaggatgcaccacggcctcggaagaaggggcggaaatctccctgccatggcgatgaggcccttctttggcatcgtccccgtctcatggatgagaagggcagcgtcgtggagggcagcaacgtctccggggccctgtgcatctcccaggcctggccgggcatggccaggaccatctatggctgaccaccagcgatttgtggacgcctacttacaaggcctacccaggctattacttcactggagactgcgggcttacccgaactgagggcggctattaccagatcacagtggcggatggatgatgtcatcaacatcagttggcccacggtcttggggaaccgcgaggacttagagaggccactctccggacgcacactgctgtagcagcaagagagttgctgtcgagttggctacccccaactgaatcaagaggagaagctgccttcgccttcggttgtggtgaaaagatagtgggggtgacctcacgatgtggtggtgcacggacacctcaagtccatggatggccaccaagatcgccaaatatggctgtgcctgatgagatcctgggtggtgaaactgtcttccaaaaaaccaggtctgggaaggtcatgcggccggctcctgaggaagatcatcacctagtgaggcccaggagcctgggagacaactaccaccttggagggaccccagctatcatcgcaggagatctgagtgtctaccagaaagtgcaggacaagcaggctgtgctaagttgagcttgcaccttgtggggcgtcttggatgggaggggcaccaagcctgggttgtcttccagatgtaccctggggttgggttacctacgtcagaagaggcccaaccaaagatagcacacgcctagttaactggtaggcctttccaaacatgagccaggggaccctgtaggtgaaggaggggaacacaggatgctgaaagtagacatctcccttgcacaaggagcgaaccgcaaaagtaagtaacggtcactgaagatatatttacgcgaggaacaaaagtaggg

SEQ ID NO: 577663 - DNA, 235 bp, Homo sapiens
gtgcatagactcattagagcgctctgtccttggagtgagtctgaatgtatccttagtcatgcttgtagactataacttttatcctccagatcttaagcatactgtcgctctcgtcaacaatttaagagactattaagctgtcatcttcctaaaatctattaaggtatccactcttattaaaaaaattctccaacattgtgattttttaatgattaaagtaatcatcttcgtttag

SEQ ID NO: 577664 - DNA, 101 bp, Homo sapiens
ccggcctgacagctcctgagtagctggaattacagacatgtgccaccacgcctagatattttttttttttcctgtaaagacgggattctctccatgtttgg

SEQ ID NO: 577665 - DNA, 188 bp, Homo sapiens
gttgatgcagattgaagcggttcatccgtgcctcagcctcgcgaggtggctgggaggtggcgcgtgccaccagtgcccggctaagttgatgtattttatcgtggagacggggttttaccagtgttggccaggccgtgtcttgaactcctgtacctcggtgatctgcccgctcttggcctcccaaatgt

SEQ ID NO: 577666 - DNA, 845 bp, Homo sapiens
  misc_feature (55)..(55): n is a, c, g, or t
  misc_feature (66)..(66): n is a, c, g, or t
  misc_feature (95)..(95): n is a, c, g, or t
  misc_feature (120)..(121): n is a, c, g, or t
  misc_feature (123)..(123): n is a, c, g, or t
  misc_feature (192)..(192): n is a, c, g, or t
  misc_feature (244)..(245): n is a, c, g, or t
  misc_feature (252)..(252): n is a, c, g, or t
  misc_feature (255)..(255): n is a, c, g, or t
  misc_feature (296)..(296): n is a, c, g, or t
  misc_feature (302)..(302): n is a, c, g, or t
  misc_feature (323)..(323): n is a, c, g, or t
  misc_feature (328)..(328): n is a, c, g, or t
  misc_feature (356)..(356): n is a, c, g, or t
  misc_feature (565)..(565): n is a, c, g, or t
  misc_feature (642)..(642): n is a, c, g, or t
  misc_feature (647)..(647): n is a, c, g, or t
  misc_feature (656)..(656): n is a, c, g, or t
  misc_feature (671)..(671): n is a, c, g, or t
  misc_feature (764)..(764): n is a, c, g, or t
  misc_feature (766)..(766): n is a, c, g, or t
  misc_feature (827)..(827): n is a, c, g, or t
aatggtaaaaaaaatcaaagtcaggctactggtaacttgaggcagaactgttgtnaagtaggaggnacaaagccaataaaaacatttccctaatngtgcatggaaaataacaaaaaattnngntacccaagcgtataaaaggtaccaggatcacatgtaattgaataaaatgaaaccaaaaacccaattctnctgcaaaaaaaaaccccctggccatcaaccaggtttgtatctaaatcaatgnnctcattnctncattcccccccactacctacataatccagaatttataaatncttttnaaaagcacctatataattctntcggntccctgaataatgggtggagtaaaactntacagcggtccaccaataatctgtctgggattcatggtttgtaaaaatttgggaattgtgttttcaaaccactttctggaaatgaggataaattttccaagaacctccgggctgaattctcaaaaagtgttgaccaaaatgaggaaacgattaattaactaagaggcttgggaaaatcctaaatggtttagaggattaacaactggganagaaggatcaccagtggggacactataccccaggttaccacaggactctatataagatgttttataatgcaggagtnaacancagtcactnaatggcaggggatancgcttctcaacaagaaagggaccacattcacaggaccaggcagggaaaggtgccaaaatcattcagactttatttctttctcaatagtttttnanatttattgaaaatatggaaaatacttttctccagggagtataaaggagttaagcagaaganacaagttattttgttgat

SEQ ID NO: 577667 - DNA, 133 bp, Homo sapiens
ctcgaggccaagaattcttcatttggtaatgtagtataatccacaccagccattaaaattccaccctcaggtttcaagggcactatcccaaggaggtcatggttctcctttgccccatcgaggggtgtttcat

SEQ ID NO: 577668 - DNA, 553 bp, Homo sapiens
cccagacaatgactaatcaaagtaacctcaaaacagatgataaccatacactactattaaggacgaacactgatctcttatactagtatccttaatcattcttattgcaactaactaacctcctcggactcctgcctcactcatttacgaccaaccacccaactatctataaacctagcacatggccatccccttatgagcgggtcgcattgattataggctttcgctctgagatgttgaaatgccctagcccacttcggaccccacaaggcaaacctacaccccttatccccatactagtgattactcgtgaccatcagcctactcactcaaccaatagccctggccgtacgcctagccgcctcacattactgcaggccacctactcactgcacctaattctggaagcgccaccctagcaacttatcaaccattaccttccctctacacttatcatcttcacaattctaattctactgactatcctaaattcgctgtcgcctaatccaagcgaagatacccttcagaacctacctccaacactttttttttc

SEQ ID NO: 577669 - DNA, 837 bp, Homo sapiens
actccccctgtcttcctcagcgcctcctgttcgacagccaagaccactcagccttcagagatggaggaggaagaggcaggacgacttggaaaaaaaggcgggcaggacagttggccagagggatggagactggtggggacgcccccgcctccctgtcgccccgtttcacacactgtgacagcccatcagcctcttttgtgaactgccagaccctgggggtccccagtgatgcatagagatgcaggaaggacacagatgcatcagaaaatatgtgttgccctcaaccaggcaatgaagccggtgaaggctgggttgaggaagaaatcaggaatgtgagaagagtcgatcagtcgctcaccgcctgcccatgtgtgaagcgtccgcgcgattatccatcgaccagtgaccctgtggaaggctccgcgccttactcagtcaagtctctaccacacccttactctgtgtcagcggtggtactaggcgtctgaggaggagtccaatacctatcctcgtgaaagagtcgtggaattctagccctggattgtccaaacataacttataggtccttctctacctaggaacagtttccagtatactctttgttcgcctcagctctgtggcccaagctgcagtgccgtggtgccagtcgtagcctcatgtgggcggctcatactcccagaccccgggatcctcttaagctctcaggagctgggcttcggtgctgctcacacccgtggtgttcgttctgcgggacggagtctgtactgccggcggggactttgtgtagggggttacttctggcctatttccggaccgggttcggattaatggtgggcc

SEQ ID NO: 577670 - DNA, 292 bp, Homo sapiens
cgtggtggcgggcacctgtagtcccagctgctcgggaggctgaggtgggagtagcgggggactgcacgcagggggttgctatcaagtggtgctgcttcacttgctgtatcagccaaggtcatggtagtgctcaaggaggatcaagaaatgcggtagttcatcaaaagtattagccaccttccaactccaagtttcccccacgccatgccaccgttcctgccttgtacaagtgaagcaagcaatctctccgtggtttcgaccctaggaggtggaaggtccctggccctggctc

SEQ ID NO: 577671 - DNA, 320 bp, Homo sapiens
gctgagcatcttccaagtcctgagattcccacaactctggataaaaaggggctaaagtattatgcacatttcactccctttaatatgagggaagtaaagttacattgaggtcctatttgtctgtagttcagagattagtccattacagacccttagaccaactagggaacactaagctagcatttcaagttacctatatgcctgggctcatcagaatatagaaactagccatgtgctagctgatagccattcaatgaggctttctattaatttccttttaaaagcaatggttattattgaaactcctaaatgctaaaatc

SEQ ID NO: 577672 - DNA, 316 bp, Homo sapiens
  misc_feature (308)..(308): n is a, c, g, or t
ttttttccataccacttcacgattttggtgcaaggacctgagattttcttctttatattctgtgatgtttcccatctgctctcacagcaggagcatgaagcccagttggtacaaagcgactggagacagaagacagcccttggggagtcttcagatgagtttatataagcttcctggtagcctgacatgaatacccttttgtaacataggtggatgtggcaggctgggtttgactagagagttggatctatcttaagtccctggctcatttcacttgttgctcttgcgggataccaccacaaggaatncctggaaa

SEQ ID NO: 577673 - DNA, 141 bp, Homo sapiens
gactctagacgatgcttatgacggtgttctggaaatatttcttgattgtattttggagatagagttttgctcttgtccactcaggcggaagtgcagggggggaatctgggctcacggcaaccctccacctttggggttcaa

SEQ ID NO: 577674 - DNA, 392 bp, Homo sapiens
cagataagagaagcttccagaaggctttttttcctctgcatctgttgaagctcatatgcttcagcttaaaagcttaaaataatctttataacaattcagggcttcttttttttttttttttttttggggggcaattttgcctttttaggaaaaaccggatttcctttggttggcctggggggttttgaacccccgcccctaggggaatcgccttccttggtttcccaaaggggtgggattaccgggggggaccctttggccggccaaataaaaatttttgaagggggcctttccagtggaaaaagggaacttttggctttaatccaaaataaaaattattgtttgggtttggcccaagggtgttgcttaggaatctgggaaaaggggcaaat

SEQ ID NO: 577675 - DNA, 709 bp, Homo sapiens
ccacgctgggggcagctggcctccgtcttcgcccacgcaccagcagccgcctccatgccctaggctgggcccctgggggatctgagggcctgttgcccccagggcaagttcccagatcctatgactgtctgttcaccacgagatgggaagaggacaaaatgcggaacgatgccttctgacctaccagcctcgcaaaggtgccagatctatgggatgactcacgggtgctgcaccccaattctaaagtacattgacacctaatgcaagctctacggcaaagacctaacgtactgagctcctagtgtgtatacaagatagcctagaaccacacccagaacggagccactgttagcccgtacgagcacatgacgaacatgattccaaacttggcttattgaaattcaaattcagcgatttttccactcctgacttaggacacacattcaatgggtggaatttacaactacgtcactgagcaaacctcgcatcttatctacataatccccttgtagaagacctcaataccgcattagcaccttacacagagaccatttctatagcccttacacaactatcctccaaattgagaaagcttactatagcttgaaattttaggaattatcactcattcttgagccacaactatattcaaccatcaacgtttcgtcataacctttaacctaaagcatataccctgttggtagctcgt

SEQ ID NO: 577676 - DNA, 528 bp, Homo sapiens
agcgtggaggtgcgccggccgagaaccagagcgcaggcgtggctcagtcctggcgccgggccggccccgccccggggcgcctggagcccgccccattgtcaatgccgccgactttcacaccacgatgatcatgcgcgcataggggaggtgcactcatccggagcaggagccgacatatcggtacgagaacacagagacagcacagacagctcactgtcgagaaggaagcccggagagcaggaatcggcatgcccgatgcatatccagaacaccagagccatgacagaagcagacacggagaattgataccgacatgtagatagccaccggacatcaaagagcacccgccatgaaaaagcaacccacgcccggcgctggatgaagaagcagggcaccataccggggaaccacccgaggggaaccacccgagagccgaggagtatgccccgacccaaaggacggacgagacacatcggtgaagggcagagcatgaagaggactcacaccgaggttcaggtcggtgctccc

SEQ ID NO: 577677 - DNA, 862 bp, Homo sapiens
aaggagctcagtccttcaggcggaggagctgctcccaggtggacgactggtgtatcaggcgcctctacccactggccagagatagtgaggagctctcgactgagcgctgtgttgacccgcagcagtctccggaacgggagtctcgctcagtgcactccaacctcatacgtgcacagaactcttcgcgacaggtatgagacagtgcgtcgcgacgcttccctgtgcgtgtccaaccgcgtgagtactcatctcaagagtattggtgtgaggagatgctgcccaatttgcgaggcttgtgggagttagactgggctgagggccctgaagtccgggccggaggagcagcactcgggacacaagcacagccctgtccctgccctagcctttagcccctgtacccactcacgtggcttctcagcagggcatgacatggaactgtactgcgtagctcacccacaacttactggcttccatttgtcttcactcaacgctcagggtgggggagtgcgtgctggacaaatcacaggagagagcgtgacgttcccagctatttattcctggctgcccttggctataaggtcacagctcctgtacacccttgtcaggcagcacctttcccatgcccctgattcaaggccatggcggaggtaccaggctcacggctgataggtagccgcagacgaagccacagctccacacttgtccaggaagaactcattactcaaacaactgtccctatatgctgagttgcactgcctatttcttgcagggacccatgacctggaatcacggggcctacctactgaccacttttaccaaggccatagtaataccaccggtgcacgggatcagcttgagaccc

SEQ ID NO: 577678 - DNA, 324 bp, Homo sapiens
caacagctaaagggctaattcaaaagaaaaaacacaagaagaaatggccatttcttttccttgttcactcaatgttccttcaacaaattattctatgtgcttggaatatatgaggccctgggttgggtgtggtatgcaacagaaaaataaaacataagaacatagtatgtctcttcccacagggtcatatggtctttcgaaagtcacccttttaatttgaaaccttttgctgcttctttatttttattttttaatttaatttttttgagacagagtcttgctctgtcacccaggctagaatgcagtgacgcaatctcggctcac

SEQ ID NO: 577679 - DNA, 116 bp, Homo sapiens
ctccagctggcccccaagctccatggccccaagctcacactgccacaacatgctgcatgccagtgtgatgtgtggagaaaagaaaagaacgcaggcagaaaccaaatgacgaaacc

SEQ ID NO: 577680 - DNA, 494 bp, Homo sapiens
cccctcaatcaatctcagtggttgaactacccttgatatggttcagctctgtatccccaaccaaatctcatgtccaattgcaattcccagtgttgagggagggacctggtgggagatgattggctcatggcggctgacgtcccccttgctggtctcgtgatagtgagtgagcgctcatgggatctggttgtttagaagcatgcagcacctcctgcttcactctctctgtctctcctgctccaccatggccagaaacgtgcctgcttccccttcgccttctgccgtgattgtcagtttcttgagggctccccagccatgcttcctgtacagcctgcaaaactgtgagtcaattaaacctcttttcttcataaattccccagtttccagtagttcctcatagcagtgtggaaacagactaatggacccttctggttgaaggaatgtagccattctgcttgtttaagtatttcctttctattcagctctactgtccc

SEQ ID NO: 577681 - DNA, 793 bp, Homo sapiens
ccctggggggcccctttttttggggagttactcccctattggcccaggcctggctcccccgcaggggggttattttcgcccccgggggatttcctcccacagaggggggaatcttctctgcccccccccgagaaggagagtgttgttggttgatgggcccgcgtcgcccctcgttgggacgccgcctctgttgtcggcgatcccgcgacatccctcctctccccgcgtgagaatcccccgcgggatattttcttctatgctcccaccgcggtgctctttttattatttggggcccaggaggtttctctatttaccccacggtttggggaccctccccccgtagggggcgttggggcccttcttgtaggggagttgtttggggaccctgttttctcttgtctctccactagttttatctctgagccgtctttttattctctattgtgaagaacaactttcttccccccggactggctccccgccgaggagccactcgcccaactcccctggcgtcaccccccggcccaatgtgaaagaggtttcccgctaaccactttgcccaaatgtgaaaagtcaaattaatatatgagatgttcactggcccccctgcaccccccccacacttgtttaaaattgttttgtgaaccactatggtaagattacccccagtatggttattatgttaaatttattatttttataataataaataaaaaatgttgagtgaattataaacccactaattataattattaaaaaagggcccccccaccttttaaatttttaaaaaaaa

SEQ ID NO: 577682 - DNA, 103 bp, Homo sapiens
ctaagctacgaataccggcgagaacatctttttgagtcacgagttcttggtgcatcgacggcgacctacttcctgcctagcgcgatgctgcgagaacacatcg

SEQ ID NO: 577683 - DNA, 982 bp, Homo sapiens
  misc_feature (485)..(485): n is a, c, g, or t
  misc_feature (531)..(531): n is a, c, g, or t
  misc_feature (602)..(602): n is a, c, g, or t
  misc_feature (613)..(613): n is a, c, g, or t
  misc_feature (617)..(617): n is a, c, g, or t
  misc_feature (626)..(626): n is a, c, g, or t
  misc_feature (654)..(654): n is a, c, g, or t
  misc_feature (657)..(657): n is a, c, g, or t
  misc_feature (660)..(662): n is a, c, g, or t
  misc_feature (666)..(667): n is a, c, g, or t
  misc_feature (679)..(681): n is a, c, g, or t
  misc_feature (685)..(685): n is a, c, g, or t
  misc_feature (697)..(697): n is a, c, g, or t
  misc_feature (700)..(700): n is a, c, g, or t
  misc_feature (713)..(713): n is a, c, g, or t
  misc_feature (743)..(743): n is a, c, g, or t
  misc_feature (749)..(749): n is a, c, g, or t
  misc_feature (761)..(761): n is a, c, g, or t
  misc_feature (763)..(763): n is a, c, g, or t
  misc_feature (768)..(768): n is a, c, g, or t
  misc_feature (915)..(915): n is a, c, g, or t
  misc_feature (925)..(925): n is a, c, g, or t
  misc_feature (927)..(928): n is a, c, g, or t
ctggagggataagccagattttggatttagtaaaggggacacattaccaggtagcctgtcaaaaatactttgagatgatacacaatgtggatgattgtggcttttctttgaatcatcctaatcagttcttttgtgagagccaacgtattctaaatggtggtaaagacataaagaaggaacctatccaaccagaaactcctcaacccaaaccaagtgtccagaaaaccaaggatgcatcatctgctctggcctctttaaattcctctctggaaatggatatggaaggactagaagattactttagtgaagattcttaggcagttttataaccctttttcctcaatagcctgttccctgtttttaagattttgcctttgttgttgaaaaagggtttcactctgtcaccaaggcttagtgcagtgacacaattacagctgattgcagccttgacctccccagcccaagtgacccccctacctcagccncccaagtagttaggaccacaggtgtgcacctcatatccagataatntttttcaatttttttttgtagaggtggggggtccccctatgttgcccaggcagatcccagacccctgggcncaagcgacccncacnccccagcgncccagagtgctgggattacggttgtganccnccnnncccnncctttttttttnnnttancctttttgtttnacntctctcttcactncatcccaacccatctacaggcatgcacacntcaccnggaaaggaggtncnaggtnacaacagagactctcactatattctgctttgacagaaggaaagaggaggagtttctattaaaatctgtcacttgagtgatgtcatttaagtcctattttaggagataaaaacagctttggggactggttaaagtcccccagaaactncaataaagancnncttttgttttaactcttaatcactttgtaattttgactcaatccttttctggac

SEQ ID NO: 577684 - DNA, 153 bp, Homo sapiens
ccccagagaagcctgaggagagaaagaattggcagcaagatggcagatcacagaataccagggaacacctagttccaagaccctgtttgtacatgatggggaaatgtgatgacctgtgagtaggtgaagtgtctgtgccaaaattacatatgt

SEQ ID NO: 577685 - DNA, 257 bp, Homo sapiens
accgaggtaggtgaattgtctgagcaacctggcaaagctccgtctctactaaaaatacaaaaaattagctgggcatactggcgtgtgcctgtcgtcccagctactcgggaggctgaggcaggagaattgcttaagcccgggaagcagaggctgcagtgagctgagatcataccacttcactccagcctgggtaacagagagagacttttgtctccaaaaccagttaaacaaataaacaaaccctaacaacttaaaaa

SEQ ID NO: 577686 - DNA, 142 bp, Homo sapiens
tagtaaatgcgcaagatggtcatgcactgtgtttgcatagttcgatgagcagtggaatgacagagcgtgtacaataagcaatctagaatacaacaggcatgctcgcagatgcttgattcggaggtcagctatttccaggtga

SEQ ID NO: 577687 - DNA, 427 bp, Homo sapiens
actggtaaggcaactgcttgctgtgggtgccacaatgattaccaagtttcttcttaagtaaaagacacttgtttgatcaagactcaagtgagttttctttcccaattttgttcttttgaagcagaaggaaataccttggtctttgatatatataaggaggcaaatatgaaatacagctggtataatctttctaaatcacaagggcaatgaattattcattttctttgaaaatattcaggcctttgaaataattcattttttaaaaataacaagggcttctggaataatttctcaaaaactaggctttccatttttagtacacgatttgggtaaaccattaccacattaaaattaggtattttaggcatttttctttttacccaactaaccactttggcccctccattaaaggggtttagaaggtatg

SEQ ID NO: 577688 - DNA, 188 bp, Homo sapiens
aaacatttctaaaaagccctctgatttgacaaatatagagtcattaatggcccaagatagggcctcacaccttcacaggtgccaaaggaaaggccttcacacctcacagaggcatcatgcaaaggacagcggctttgtcttttccattttccatctttaggcctcgtgagagcacacttatgccctaa

SEQ ID NO: 577689 - DNA, 408 bp, Homo sapiens
  misc_feature (118)..(118): n is a, c, g, or t
  misc_feature (164)..(164): n is a, c, g, or t
  misc_feature (187)..(187): n is a, c, g, or t
  misc_feature (240)..(240): n is a, c, g, or t
  misc_feature (258)..(258): n is a, c, g, or t
  misc_feature (314)..(314): n is a, c, g, or t
  misc_feature (320)..(320): n is a, c, g, or t
  misc_feature (346)..(346): n is a, c, g, or t
  misc_feature (369)..(369): n is a, c, g, or t
  misc_feature (395)..(395): n is a, c, g, or t
gcaagggcaggtcgctggccagagcagccaggcagggtcctagagcttcccaaagtaggcagctgtgctgaggctggagaggggagccgggggagcccgcaaggaccaggttgggctngcagtcccaaaactgagaaggagaagggcagctcctggcgaaactngccaggcgaggccaaggcacggnctcaggagcaggagtctgtgcagcccccaggcccagcaaggccacagagcttnccccagggcaaggggccncagccgccggagccgcaacaagcaggagaagccagcctcctcctttggacgatgtnttcctncccaaggacattggacggggttgagnttgttgagatttacccagagttngaattatttttaagagtttttttttngttttttcaaagc

SEQ ID NO: 577690 - DNA, 162 bp, Homo sapiens
tgactgctgcaggtcgtctctacgacggactcccctgtgggttccgcgggactcacccacggacggacgtcttcacgctgacgaccacgacacccttgtggtcatcgcgtgcactgtccccccacgacacgtgggtcccttacttacttccacggcacggac

SEQ ID NO: 577691 - DNA, 351 bp, Homo sapiens
gagagagagagagagagagagattgccccacacataggggcccttgggctgcacctttaggtgccccgtctccgcatgtgctccactgttatactgcatttccctttgatttctatcttctatgcctccttaatcctttactgaacttcctatcatttacactcattccccctttctcgggtctaatccttcctacagtccccatccatcttgctttctgcccctctatattacattcccgctattatgacctctctacccctattttccaattctgcttcattaccgcttgatctttctgtctccccctattcagtatatttatccctcacccttcgcaccccccgccct

SEQ ID NO: 577692 - DNA, 279 bp, Homo sapiens
  misc_feature (136)..(136): n is a, c, g, or t
  misc_feature (279)..(279): n is a, c, g, or t
gaaaaggaggcaaatataaagaagaaattaaacttctgtcttacaaactgaaagaggctgagacccatgtctgaatttgcagagagaacggttgcaaaactggaaaagacaattaatgacccggagagaaaacttncccaggccacagaagagaacgtggggcttacatataaacacatgggtctcacactaaacgcgctctaactctatatatgcgaaacacaggagtcttttttccacagagactctggggcgccccggggctctctcttctctttn

SEQ ID NO: 577693 - DNA, 336 bp, Homo sapiens
cacttccagagtagcgcatcttcatcaactgaggaaaattcatttcctctttcacttcccaatcactaccaacttcaactgaagagtctcggggcttctgtgatttctgatcccatttctgcctaaccccaaattggttctggaacttttctgcagtcgaatgccttctctctctttctggttggcactcttaagcaagatctgcagggtgaactgcaacatgttccgaccatctttgtctctgcggagggtcctctgggcaaatctcattcgactccgctggtaggccgtcttctgtgtgcgcgctgtatccaccaactggaagctactttcatc

SEQ ID NO: 577694 - DNA, 1439 bp, Homo sapiens
  misc_feature (773)..(773): n is a, c, g, or t
  misc_feature (775)..(775): n is a, c, g, or t
tgatgtcgcatgcgtgcgtgtctctctgtgatgttagctactacgtgctttggttgtctctgtcctcttcttccttgtgggggcgcgtggatggaggctgattttgctccacggtggtggacgacccaccctgtggttgctccctataggaccgccggggctcgtcaccccccggggttttttactttgccccggggggcggatcatcattctcacgcccggggccctggttgcccctgtggccctttttttggcgcccacttgataggcacagggtctgccaccaagaaaaccgcggggttggctcgctcgtctccgggattctccccccgggagtttcgcttgtgaccccacggcgcgccccgccagaccccgctgggtgatgtccgccgtcgcccccagaggggttgggccgccggcgtttgtgtccaaagcgaaccattgtggaggagtctcaacaggcgccccccttcgaggaggaaggaattctctattctctcgtgtcgtccccctcgcgcgcgtactatttgaaggggaattcccaggagagattctccttgtgattttcctttccccgtggggggggcacctcttttctcccacaagagattgaacggtttttcttggaaagaattttatgcccccaagtgcgcccaagaaaagcccaagaccctccgtggccccgggctctcagccgcccaccccagaggtttctaaagagcccatattttgtttggccttattcccggggggacaatccacacaatagggcncncacacgtcgggttcttgtggctgttaaagatggctcctccaaaggagaggtggccccacaccgccacatcccactggggacacaatcaatcactgggccacaagcgtcttcccacatcggtgcccaccgtgcgcgcacagagagagcgtatacatgggggggagaacacaagagatctgcgcacaagcgcccaccacacctggtggccctctgccacaaggttgaccacggccgctcttcggcttctgttgcctggtgacgccctccacttccctcgcacacccacggggcacctcgggcacttcgttcttccgccaccctcgtgcctaaagaaagctggcttcactgatggcctggtaatcgagtgagctgcgtacacctcaagcccggggctgcacctgccacacccctgggcaaacttctgccacaaggccacccctttgaatgccacatttttaaagagcctatcaagctatcctgaccccccgacctctggaaggagactgtattccacccagtcttccctatccaggagttctactgacccacctctgtccagacacccaccacccagagtcttcccgtgcagccggactccaggctcccagctgtggcgtaccacatagggtttttataccagaaaaataaagtgaattaagcgtga

SEQ ID NO: 577695 - DNA, 617 bp, Homo sapiens
gtttcttttagcagtttcataattgaggtcttagatttaagtctttaatccatttttacttgattttgtatatggcaaaagatacgggtctgtttcattcttctgcatacaggtatctagtttttccagcaccattttttgaagagactgtccttttcccaatgtatgttcttggcacctttgttgaaaatgagctcactgtaatatatggatttgtttctgagttctctattgtgtttcattggtctatgtgtgtttttttttttttttaaaggccagtaccaggatgtttgggttactatagggcttgggtaggtgtaattggaagtcacataagggttgatccttccagtttgggtgggtattggcttaggtccttttctcttttacttttcttttcttatttattttttttggaaagcggctctctctgttgttgtgcccagggcggagttgcaggggccaaattctcagctcaggggaaccttcaaccctcccggggtcaggcaatccgggggccatcaagcctccggagtaagggggataacggggtggggtgccccagaggccacagacaaattgggagatcacaagcagagaagggggtcacacatatg

SEQ ID NO: 577696 - DNA, 111 bp, Homo sapiens
aggcagtcagcttggctggggacctgagcatcagctcccatttagaatcagactatctcccttccctgcagatgtctacaactaccaaattgctccccaacagttagctca

SEQ ID NO: 577697 - DNA, 142 bp, Homo sapiens
  misc_feature (4)..(4): n is a, c, g, or t
aagntggggggggggggggggtaaggagggggtgggttttttttaatgttttggtttttttttggccggaacggcccggtggggggttttttggaaacttccctctgggtggattaggaaattaaaatttttgaacctggga

SEQ ID NO: 577698 - DNA, 241 bp, Homo sapiens
gtcaggggaggaaggtaattatatcatggggcagtttcccccatgctgttttcatgaaagtgagtgagttttcaggagatttgatggttttataagtgttggaagttcctccttcattcactttttttttccggcccccttgtgaaaaaggtttttgtttccccttttgccatgaaagcaagtttcttgaggcctccccagccatgtggaactgtgagctaattaaaccttttttttacat

SEQ ID NO: 577699 - DNA, 430 bp, Homo sapiens
gactgggaaagcactttcagcgaattccatgacgctgatgagcaaaactctcatggctactgcttcgaaatccttgaccgtcgcgcctgattttcaggctgacgcgtaaagcaaaaaggcacctttcaggggtgccttttgacttttgtcccgcccaaaaactacaacgctttcggcagctcagattgctctttttctttatgacggttcgacggctgggtgaaataggttttatcttcccagcgcagcatcgttaaatccccgccccagcaacaaccggtgtccagggcgtagatgccttccggtgcgccttttccttccagcgatgcccagtgaccaaacgcaatgctgtaacctgcttcctgcaccggacccggaatatcaaaccagggtttgaggggtcttggtgcgttctcgggcacatctttgc

SEQ ID NO: 577700 - DNA, 237 bp, Homo sapiens
aatggctgttgccataagcgggctccgggttgatagtgttgaccagcttccgtgcttgctgaactgcatgaggctctcacgcaggttgtttgagcgtgcctccaccaggagcttctgtccttatagtagttcagcaggtggttccagagcgggtgctttgataagtgccttcgggtttgccccaatgattacgccataccttgctctggtcaggggccccgttcaagacggcctggg

SEQ ID NO: 577701 - DNA, 427 bp, Homo sapiens
tgagactgtacatacccaataacagctgtcttgtgccagttctgtggagacaccacgcggatgcagcttaccctatgctgtatctgtcagctgacgtaaacaaatatctttctgtattaagcttccctgtggaagacaaacactgtgtagtgtcacccactgctcacgtcagtctataatgtgacctacagacatcactatactgtaatatcatctgcaatacactgtgcaacatctgcctgtcttcacacacacattggcacactccatgcagggcacagtcacagactcaagtcacgaggcaaagttattctgtgcatactttcatctccattcatgctttttttatattacggcattgttcctctccaggtaaggcttacaccgggacatgatcgtgcttaattcactcaaaggaaaccaagac

SEQ ID NO: 577702 - DNA, 110 bp, Homo sapiens
ccctgcgcatggcttatcttgatcctaatattcatctgtgtttcttaagccggtagcattttaaagttggagtaggccgggtggggtggctcaggcctgtaattccagca

SEQ ID NO: 577703 - DNA, 296 bp, Homo sapiens
  misc_feature (2)..(3): n is a, c, g, or t
  misc_feature (69)..(69): n is a, c, g, or t
  misc_feature (289)..(289): n is a, c, g, or t
anncgggcgtggtggtgtgcatctttagtcccagcaacttgggaggctgaggcaggagaatcgcttgantccgggaggcagaggctgcagtgagccgagatcacgctattgcactccagcctgggtaacagagcaagactagatgaggtcttgctgtgttgcccagaactcttgggttcaagcaagccacctcaactggctaatacatatggctggtctcgaacttttgacgacctcagatgatccactcacgtcagcctcccaaagtgctgggattataggcctgagncaccacg

SEQ ID NO: 577704 - DNA, 111 bp, Homo sapiens
aaagtcattggtgacttgaagctagacagtcatcctcagacgtgtgagaccttgtccaggtagatgatgagggtgctcctatcggagaaggctttgtccagctcatacttg

SEQ ID NO: 577705 - DNA, 204 bp, Homo sapiens
  misc_feature (56)..(56): n is a, c, g, or t
  misc_feature (58)..(58): n is a, c, g, or t
  misc_feature (99)..(99): n is a, c, g, or t
  misc_feature (140)..(140): n is a, c, g, or t
  misc_feature (173)..(173): n is a, c, g, or t
tagtatatctcaaggttgactacttgatatcattaagtatttaaatcacaaaccantncatgtaattctatgctaaaaatccctaaatgccttcccatngtatatgaacaaaacagaaaaccctaatacttaaaggcttntctgaaagcttattctctaccagtctccatgtnccagtggaactgaagacaaggtagagccgag

SEQ ID NO: 577706 - DNA, 145 bp, Homo sapiens
ttatctcgcggtcacacggttcaagtcggcagacgcactggacgcatcgggactttagcgcgatggagtcgcctcttttttcagcgcacgcataaactcgtctaacgcgtcgattttgtcggggtccgggcaaaaaaacggattt

SEQ ID NO: 577707 - DNA, 416 bp, Homo sapiens
cggcaaaaaaaaagaaaaaaagaagttttccccggccccttaaaagggaaggaggaaaccggggggggccccccaaaaaaaaaaaaacaaaaccttggttgggaaaccccccccccccccccgggaaaggggggggttccctttccttaaaaaaacccaccgggggggaaaagaaaaaaaaaaaattttggccccgccaaaaataaaacagagggggggccccgtggacaaaacaaaaaagagggggggttcccccccccgggggggtaaaaaccccccccccccaaggggggggttttattttccgtcccccaaaacccctttttttttttttaaaaaccaggggggcaaggggagctttcccaaaaaaagccttttttttttttctaggctccccccacagaagtggtcgccgc

SEQ ID NO: 577708 - DNA, 391 bp, Homo sapiens
aacattgaccagacaactcaagaggctgttttaaagacaaatatatgcaaacaactgccaaatttgtatctccacccctgagctttttccatatatccttttggatgtcttaacatgtccaagactgaacctatatattttccctcatacttgttccatctgtagttttcctcatctctgttgatcagccctctaatcttccagtgtttcaggtcaaaagacttggagtcatcaaactctacatccagactctctaggcatcatgctaaagcatcttcaaaataatctgatcactacttaccatggccaccattcacttcctggtcccaggatcccaccatctcttgcctagataatgtcaatcacttcctaatagggcttctgcttcaac

SEQ ID NO: 577709 - DNA, 466 bp, Homo sapiens
  misc_feature (1)..(1): n is a, c, g, or t
  misc_feature (438)..(438): n is a, c, g, or t
  misc_feature (465)..(465): n is a, c, g, or t
ngtgagtgaggggtgtgtgtgttgtgtgtgttactgtatacgtctgtatgaagtgtgtgagggataggtgtctcactctgttgcccaggctggagtgcagtggtgcaatcacagctcactgcagccttgacttcctggcctcaggcgattctcccacctcgccctcctagtagctaggactacaggctaatttttttgtagagatagggtttcaccacattcagcccaggctggttctccaattcctgggctcaagtgattcacctgccctgacctcccaaagtgctgggattacaggcatgaaccaccatacccagcctctttctgtatttctatatttttaaaatttagttttagtggccttgcctttgtgatcctgtattttgggccactgggtgttcattttgtttctattatcgttcttcagccacatttccnacattgggttagctggtcaagcacagng

SEQ ID NO: 577710 - DNA, 268 bp, Homo sapiens
  misc_feature (8)..(8): n is a, c, g, or t
  misc_feature (188)..(188): n is a, c, g, or t
ggccccgnaaccagcaggaattgggagaaccacagcaaagacgccaggactccctggaagcctagaaatggccagaaaaactgggaaaaacacaggcacaaccacaaacaggaagaaagacaaaaaaaacaacaagggccaaaaacattggcattactgggaccactgacattaagggatgtggccanagaattctctctggaggagtggcaatgcctggacacttcacagcagaatttgtaaaggaaagagaagaaagaaaaccaca

SEQ ID NO: 577711 - DNA, 178 bp, Homo sapiens
ataccggtaccaagtgctactccacaaacagccatatccacacaccacacacatccatatcacacatccatatcatgcaccacacacatcatatccacacacatccatttccacgcacatccatatccacacatcacacacattccactggctatacactgtttgtggaggtagcact

SEQ ID NO: 577712 - DNA, 489 bp, Homo sapiens
  misc_feature (449)..(449): n is a, c, g, or t
acttgaataagataacttctgagaataaatctatgcactattttggaagaattgctctatagagtaaaaaataattctggataattgaaagttatcttgtgagtatctggacattaaggatacatttcaagactcctgttttcactaaaatccaatatttgtttaagcacttcaagttaaagaggagcaccttcccctttcaccctgactatcgttgttaattcgtttttgaagctatataagaacgtttctttaatcggttttcccttaggcatacattagctctctgttcaagacttagtagcagagagtagtaagtaaatggttattagtggttcttcatataaaacacatttgagtttcttagaagaaaactatgcataaagattactttcagatatcatgtctgtagttcgttaatagagaagtttctctgaacgtgtggaacnctgtaataagataaataaatttttaaaaagaaaaaaaaaa

SEQ ID NO: 577713 - DNA, 149 bp, Homo sapiens
aagcttgtgagtatgtgtgcagcgcggtgggcattgtatcatgttgtgccacgttgccttccccagttaaaatactgctggatagaggctatctagactttggcaaatgtcaatcagctaaaggaaatgtgctctggatccagtaatct

SEQ ID NO: 577714 - DNA, 395 bp, Homo sapiens
tagagtgcacacgagtgaaagcaatagacaggcaaaaaactaacaaaaaattttgtatttaataaatttgatagttggccaattggacctaatagacatctatagaatactccacccaacaactacagaatatgcattcttctcatctgcacatgatatatattccaagattgaacacatagtcataaagcaagtcttaatacatttcaaaaaatcagaatcataccaagcatcttctcagaccacagtggaaaaaaaaacagaaatcaacagcaagaggaattcttaaaaccacacaaatacaggaaactaatcaacttgtttctgaatgactctgaaataaacgaaaaattaaggcagaagtcaaactgttatttgaaacaaactaaaataga

SEQ ID NO: 577715 - DNA, 637 bp, Homo sapiens
gttgtttattatcaagtacaatgtactgtacgtaattgtactatacttttttgtttgttttttgagacggggtctcgctctgtctcccaggctggagtgcagtggcgggatctcggctcactgcaacctccgcctcccgggttcaagcgattctcctgcctcggcctcccgagtagctgggattactggcatgcgccaccatgcccggctaattcttgtgtttttagtggagacggggtttcaccatgttggtcaggctggtccagtactcctgacctcgtgatccgcccgcctcgccctcccaaagtgctggggattacagtcgtgagccacagtgcctggcctgtactatccttttttttttttttttttcccctgaggacagaggttgcggctctcgtaacccagggctgggattgcggggggcgcgacctctttctcattgcggcctcgcgccctccggggtccacaggtgatactttcggccgtcagccctccgtgagttacgcgtgggaattacagagtgtgtgacgccagtggcccagcctgtgtactgaatacttggggatgacttggaacacagaagttttggttggcaggtgcagggggttggttaacaccaagtattcacctagaa

SEQ ID NO: 577716 - DNA, 148 bp, Homo sapiens
aaggtctgagtgatgttctaaagaaaaatggttttacttaaaatctactctgctgaaaaggtggaacctatggaggggagcaggacgaacttactggaatttctggacagctgagcatcactgctggactttatgaccttgtagctgg

SEQ ID NO: 577717 - DNA, 855 bp, Homo sapiens
tagtggaccaagccacccaccttgactataccaaggtaatgatctatccacagttctagccttaacttcatgctgactatctcatgcactctgatacgtcaatctgtatgtcccaaataatcttaagcgtgcagcttgtggcatttaccatgcaacctccttctgccagcaggtcacacatgcgttgaatgtcagtatgaaccacatgaggcacatcatggaattgatgtgagcattaagacgttctcccacaagagcccttccctgaggcagcaggagcgtggtgtgtactggagacactgttgaacgttgatcaagacccagaccagcccaggtctccttcgtgggatgtcatgacgtttgacataccttgggaacgagcctcctccttggaagatggaagaccgtgttcgtggccgatcctggtctcatccttggcgctgtttcttaacgatgcggagtcacatttcaatggtacgaagaagtggcttcgtaaaatagaagagcagtcactgtggaattagccaaactgggagatgctcggtgcgcattggggtgctttgggcataaaagatgaatgagccaaactattctctgggaccaggattctaggccagtttgttccactgaagctatgcccaacaggaagtccacctctgcaggctggaggcgaaatggttgccaagggtctgttgggaagatcacactgggatcgatgggtgagaaagctatgaagcgggcaaattgtctaaggggaagtggtccttccggggggccaacgtgtgtgaccctttaaaaagggcctctggtgaaaggaccgcggtatcttgccaaaaagccaaagttcagtgggac

SEQ ID NO: 577718 - DNA, 454 bp, Homo sapiens
tgtcatagttgattcctagagtatcaccttatgttctgacccacactgttggatgggactgtaaactaattcaatcattgtggaagacagtgtggcgattcctcaaggatctataactagaattaccatttgagcccagccatcccattattgggtatatatccaaaggattatgaatcatgatgctttaaagacacatgcacacatgtttattgcggcactattcacaatagcaaagacttggaaccaacccaaatgtccatcaatgatagactggattaagaaaatgtggcacatatacaccatgggatactatgcagccataaaaatggatgagttcatgtcctttgtagggacacggatgaaggtggaaaccatcattctgagcaaacgatcgcaaatacagtaaaacagacaccacatgttctcactcataggtgggtcagaacataag

SEQ ID NO: 577719 - DNA, 314 bp, Homo sapiens
  misc_feature (56)..(56): n is a, c, g, or t
agtcggttctaccatttacagaataactccaaatagcttagggatcgcaatatatnttttaaatgaaatgataaagcactgtactagaaacaaaacatggtgaacttgtctttaacttttgatgtagaaaaaaagctcaactgtgattgtgccactgcactccagcctgggggactgagcaagagaccctggctcaaacaaacaaaaaacaccaggcatggtggctcatgcctgttaatccagcactttttcaaaacaaacatttacaattttatgtaaaggcatcatgttccatgatcttatgataggaagat

SEQ ID NO: 577720 - DNA, 140 bp, Homo sapiens
agcggagcctagtagtagttcagtaagcggagcggcacgcctgctgggggtatgttgtgttggaggcgaggaggtgggatagaatgacggcaggagcagcagcggagtgtccaaccaacacctactgctccgcttactga

SEQ ID NO: 577721 - DNA, 332 bp, Homo sapiens
cctatcctgtacgccaaggatggcttccacgttcccatgatccccgactacctgtcgccacagcagcagggggatctgggcctgggcaccccagaccaaaagccctaccaggacctggagagccgcacccagcagccttcgactaacccctctgtctactattaaggacatttgacaatcagtcgggcatcccaggacctgaaggccctcaataccagctaccagtcccagctcatcaaacccagccgcatgcgcaagtaccccaaccggcccagcaagacgcccccccacgaacgcccttacgcttgcccagtggagtcctgtgatcgccg

SEQ ID NO: 577722 - DNA, 188 bp, Homo sapiens
attgagagcctgaaggaggagctggcctagctgaagaagaaccacgaggaggagattaatgccctgagaggccaggtggggtggagatgtcaatgtggagatggacgctgcacctggcgtgtacctgagccgcattctgaacgagatgcgtgactcgtggaaatgtccaccggcatatggcataaaga

SEQ ID NO: 577723 - DNA, 525 bp, Homo sapiens
cgggcggaggtgcgccggtggtgtggtccgcgggtgaggggttgggagcgggtgggatgtgggggggggggcgagcgcgggggggaggcgcatggggggaggcgtggggggatggtgccgggtgtggggtggggtgggggggggggggggggggtggagcgggggtagagatagacggcgcgggggggtggcgggccgtgggaggcgtgcacgggggggcgggtgtgggttgaggtgggcatcgcggggaggcgcgggtggtcgggggaggggcgggggtgggggtggctgggtgggctggggggggcgctggggtgtggcgcggggtgcgggaaggcggtgggtgggaggtgggggtggggcgcgggtggagggggtgggcagggtgtgctcgggggggggggagcctcagctggggggggcgccgcggctcggggcgcaaaaactgctgtgctgtcgtctctcgtgctctcgtctggggtctctctaactcggcgcgtagagttctcgcggagcgcgggggct

SEQ ID NO: 577724 - DNA, 965 bp, Homo sapiens
cgtggtggcaggcgcctgtagtcccagctgcgcaggaggctgaggcaggagaatgacatgaacccgggaggaggagcttgcagcgagtcgagatcacaccactgtactccagcctgggcgacagagcgagactccgtctcaaaaaaacaaaaaaagaaaaaaagaaatctcccagggcttacgacttcctctaaaaggtctggcatttaactcagcccattcttgggagccttaacaagatttatccaaagagaaggtttcccattggcggccactcttgcataacttagcaggcactgttccacacgtgtgtggcgccctcagggcacgcccaagaaggcaccggtaatgactcgacacagaacacaatcttgcgttggggctctcacttattccctgcccgggggttccctaaaagtaggtcctcctttcccatcaaacctccatggccacccccattcgcctacacaaaagttcacctttccatggccgggctggccgtcgtggcctcaccgccttgtaatcccaagcactttgggaagggccgctggccggcagcgcttcacctttaggtcaggaggtcacagaccccgcctggacatgagggtgaacaccccatttctaattaaaaataccacagaattagccggggcacctgcgtggccagtgcccttgtaatccccgacccttggggaaggtgcagcgggacaattgcttgaacccggaaggttgaagggttgcaggacgccgagcatcgaccccatggtacccagaccgggcaaccgacgttggactcctccgagaacagcgaacacccacacacaacttgctgcgccgtccgcccgacgaaggtctaaaactataggggcgggccaatcgtgcacacggccagacgcacgaaacacggacagctaggggtcccccacaacccggaccggggtgaaccgggcgcacgcaggaggcac

SEQ ID NO: 577725 - DNA, 423 bp, Homo sapiens
  misc_feature (14)..(14): n is a, c, g, or t
  misc_feature (25)..(25): n is a, c, g, or t
  misc_feature (240)..(240): n is a, c, g, or t
ctaaacacctttcnaaaaaccacangactttgcccattgccagtgtcctgaatgtcctgtaaccccggctcctttgggaggccctaggccgagaagatcacttgggcgcaggagttggaaaccagcccgggtaacgtccagaggcgttcaaacccagagtgaccccatcttgaataaagccctgggtaaaatgaacctgacaccctattggactctattccccaggaggttaaggcattnctaagcccacaggatgaaataggaggtcagtacaagacacaggtcacaaagaccttgctgataaaacaacatgtagtaaagaagctggccaaaacccagcaaaaccgagaatgagagtgacctctgatcgtcctcactgctcattatgagaggtgaagccagctggacttatagcttttctat

SEQ ID NO: 577726 - DNA, 280 bp, Homo sapiens
  misc_feature (9)..(9): n is a, c, g, or t
  misc_feature (55)..(55): n is a, c, g, or t
  misc_feature (57)..(57): n is a, c, g, or t
  misc_feature (78)..(78): n is a, c, g, or t
  misc_feature (104)..(104): n is a, c, g, or t
  misc_feature (171)..(171): n is a, c, g, or t
ccggccccntcgaaccggctgcgagagacgacagaagggtggctgaggctggcanancagagatcaggaggggaccantctggccaacacagcgaaaccccgtntccaccaaaaatacaaaaattagttgggtgtggtggcacatgcccgtaatccagctactcgggaagnccgaggcgggagaatcacccgaacccgggagatgaaggttgctgtgggccaaggtcgcgccactgcactccagcctgggtaacagagtgacagagggagactctgtcgc

SEQ ID NO: 577727 - DNA, 778 bp, Homo sapiens
gtttgttgtttgtttgtttttctgagatgagtttcgctcttgttgcccaggctggagtgcgatggcgtgatcttggctcactgcaacctccgcctcccgggttcaagcagttctcttgcctcagcctcccgagtagctgggattactggtgtgtgccaccacacctggctagtttttttttttcttggtattttcagtagagacagggtttgggccatgtgggccagggtggtctcgagctcctgacctcaggtgatccatctgcctcggcctcccaaagtgctgagattacagacgtgagccaccacacccagcccaaagtgttttttaaagacggagtcttggctgggtgcagtggcacacgcttgtaatcccagcacttggggaggccaaggtgggtggatcacttgaggtcgggagttcgagaccagcctgaccaaggtggagaagccccgtttctactgaaaatacaaagattagctgggcatgggtggtgcatgcctgtaatctcagctactggggaggctgaggcaggagaatcacttgaactcagggaggtggaggttggtggtgagccgagatggtgccatgggccctccagtcggggcaaacaggagcgagaatctgtctcgaaaaaacaaaaaaaaaaacaaaaaagggagaccgggggcataaggcggggggggaaaaaaggtaaaaacgggcccggcgtaggggccgcaccccttctggtcaaaggggggaacccggccccaaaaggggaaaatcaaaccggggg

SEQ ID NO: 577728 - DNA, 361 bp, Homo sapiens
attatacatgtattagcttttggtgtcatcttcaaggatgaaagctcaactaaggaaatgccggcttaaatttcatggcaataaattgtagttagcctgtgctgtacttcgaggacccaattttgtcattataatcaattctgtacgtatgattttctttccctggtgtgaattattgtacaagaaacagatttgttttttggttttagggttgtttaagtagctgagataatgcgcttcagcaaaatcaggattaaatttcaacaaattgtttaattccttctgcaaggaagctggagtgagggccttagtctcatcattctttagcaaagaagcctgttgagaaagaaaaaattctgct

SEQ ID NO: 577729 - DNA, 946 bp, Homo sapiens
ggcgcagcctcttcagctagcaggcgagaaatggagtgagtcaaggtagctatctagggaagaaatgctagccatatagcagcgtttcttgcaaagacttatcctactcttatgatatcccagggacagagagtattctagtagaagtcccaactagacgacaaatacccactagggtgtagagagggtattcctagggatcaggtacagagccaactagcagaagtgagtagtgactaaggaggctataagaataggagtataacataaaggtactataacaaacaggcaagtctacctatacagactatagctaagacataacttaagcccgaggtagttacccacctatatacgtaaaacctttaggttacacatccaaataatagtacacagccaccccacaccctttcacgtttggcacaacgaggaaacacaaacgcccaagaattaggttacgcacaggaatcgtggatgaccactaacacacacccaaagcggcaaacacaactgcaggaaacctggcggtcagatgctggttttcccaactgaggccgtcagccaccagcaagaaggaactcttatgcagaccggaatagcgtttcccttaggcgggcttaccacagttaaacgcgtgcggaaacggctttaccacagcttatgggttactcgcccaattgcacatacgaccgcccgctctgtaatatggtggtgccgacaacgggcagggctctaatcaccaaaaaaaacggaggagggccccccctaccacataaccagagcgcaagatcccaaaacaaccaacccagaaaccaaaacagacaccagcactaacacacaacggacggactaacacggggcaaatatcataagagggagaggattaccctatcacgaccttaatacacagaacacacaacgaaccaccataccaaaacacacgggg

SEQ ID NO: 577730 - DNA, 302 bp, Homo sapiens
acaattcggcccgggcaatggcatctcggctcactgcaacgtctgtctcctgggttcaagcaattcccagcctcagcctcctcagtagctaggattacaggcatgcgccaccacgcccggctaattttgtatttgtcgcagagacggggtttctccacgttggtcaggctggtctccaactcctgacctcaggtgatccacccatcttggcctcccaaagtgctaggattaaaggcgtgtgccaccgcgcccggcacacaactcttgtttctgtaatatattattgtatataggacgtgtct

SEQ ID NO: 577731 - DNA, 318 bp, Homo sapiens
  misc_feature (24)..(24): n is a, c, g, or t
tttttttttgagacagagagtacncctgtcacccaggagacggatctcactctgtcacccaggagacggagtctcactctgtcacccaggctggagtgcagtggcacaatcttggttcactacaacctttgccgcccactttcaagcgattctcctgcctcagcctcctgagtagctgggattacacgcgcctgccaccgcgcatggctaatttttgtattcatagtagagacagggtttcaccatcttggccaggctggtcttgaactcctgacctcgtgatgcacctgcctcggcctcccaaagggctggtcgacg

SEQ ID NO: 577732 - DNA, 256 bp, Homo sapiens
gtcgaccatcatctttgtccatccctatctagtgctttaaaacacacacatacaggccaggcatggtggctcatgctgtaatcccagcactctggaaggccaaggcaggcggatcacctgaggtcaggagttcaagaccagacaggccaatgtggcaaaaccctgtctctactaaaaatacaaaaaaatgagctgggtgtggtgtacctgtagtcccagctagttgggaggctgaggcagaagaatcacgtcgacg

SEQ ID NO: 577733 - DNA, 172 bp, Homo sapiens
atggagaagactgtgtggatccaccagaagatggccatctacaagccaaggacagagacctggaacagatgctttcattatggcctccagaggaaaccaaccctgtctccaccttgatattgcacttccaggctccagaactgtgaggcaataaatttctcttggttaaatc

SEQ ID NO: 577734 - DNA, 109 bp, Homo sapiens
ggtggatctagcaggacacccacgctgcacgtatcaaagtcgagccgaaaaatatggcatccccatatagcagccgatgcaatttctgcgaaaaagagcaatatgaaca

SEQ ID NO: 577735 - DNA, 784 bp, Homo sapiens
  misc_feature (18)..(18): n is a, c, g, or t
  misc_feature (79)..(80): n is a, c, g, or t
gcctatggtggagaaganaacttcggttcgctcccaggaccccgggcagcggcgggtgctggaccgggctgcccgcagnntcgcatcaaccggtcagctggaggccctggagaatgacaagcttccaggatgacccccagcgcgggactcccttcagtctcgggcaagaagactgcctcagttttgatgacgtatgcggacactggaaatgaaagagaagaaaacccgaggctgatcaattttaaacattcgcttccgaaaaaatcgtttcagagccctgtgtgggccgtgagccagaactgtgagtcgttggccgacgtggccctgaacttatcctcgtacggcctggtgccgggtagcccgctatccgcaggctccctagctgcgccctttctcggtgcttgtctcgtgtgcttcaccgatcctcccttacacgctggtgtcacgcttgcgggtgcctcggtagctgcagcatgtgcagcatgatcatgagtggacaccgaacagggagaccaaggtgatctagatagtgcgactgtgtgaggcacctgggcgattcgccaagagaggacagggccagcttgtgcatctgctccggacttcagataagacagaatttcatctagccaaatgcagaggggagctcttcctggaccaagggaggacgccgctcattcacccagactaaagactgtgtcgttatctgccaggaaagaccagcctcactcctgggaactgtctggcaggtaggctgggccccccagtgctgttagcaatacaaaag

SEQ ID NO: 577736 - DNA, 200 bp, Homo sapiens
agtataatgtagctgaatgcatttgggagttgtctgccaaaagtataaaatggctagggacagatttgatgagacagatagcaagtaaagaaaaggaatgtcttattagtgggctgggcgcggtggctcacgcctgaatcccagcacttcaggaggccgaggcgggtggatcacctgaggtcatgagctcaagaccaagc

SEQ ID NO: 577737 - DNA, 126 bp, Homo sapiens
  misc_feature (125)..(126): n is a, c, g, or t
ctcgtacgaattcggcacgagggaggtacttagtagaagctggccctcggggcccactcggatcagtgcaccccacagtctgggtaccagagtaaaggttttagcccaaattgcgccctattagnn

SEQ ID NO: 577738 - DNA, 383 bp, Homo sapiens
acaggggaagtttcgacatcagggttggcacagttgagcaccacagggcaaatgtaggcattccagatcattgcagtcgcactcatcattactcaatttagcttcatcacatcagtaacactcatcccttgagcattttacattctcacattgttatgatagtcaagaaacagaaatgtttgtctgttcgtttttgtttagggtcttgctcagttacctaggctagagtgtattagtgccatcatgactcactgcaacctcaacctccagggcccaagcgccctccaccacacctggctcatttctgtacctcttgcagaagacggggctccaccatgttgcccaggattgtctcaaactcctgggctcaagcaatccacctg

SEQ ID NO: 577739 - DNA, 1009 bp, Homo sapiens
ggtcccataggcgtggctgagacacacgcctggtgtagcagtgacagacggtgggaggaagtgagcagggtaacctggcatctgtcgcaaaggaggggcccagagatagtgccgcactccttcccctagggcagctcagttcaacgggggcaggaagctcggggtctcgtggagtgccgggcagtagcacatcatctcgcactccaggcctcggggtgaggagatgggatctgcctcccgtccctctgtccctggtagggcacctggtgggccggtgcactctgggtgctgtgggagccgctgcgtggggtgcatggtgctggtcacaggtgcagtgtctggacctctgcgtcggaccctgggtggcacgagtcggcttcacttcgcgcaggatgtaaccctataaaaccttgacacaacgtggttaagatatagaaagtcacagtgtggataccattgatctgcgccttgcttccatggcgtagagggacgattggcgggtcggctggtgaggtttgcaatcatcatcacgcgtgtgacaaggttccccttctgggtcatcctaggcaggatcggaggaggtaccgagggataccaagggcccactcaaacattgggggggggaaacattctgggggttcgtggcaatggcatttgagggccacttgacaattcctgcggatccgtcggtgtatgtcccatttcatcaccgttagctaatgatgctttgagggcctgcagatgcaagcctacaagtaaacgctggacgttccactggtgggtttcccggtgcccaacgaagggtcgataaagtgtgtcaaccaagtaggtgtccctgagattgagtcctcctcttggagatccgcgaacaaggggttcatcatggatctagtggagcattgccatgtatccccacgccggagaggtgaccatggatgtttgtacactctacaatccaacatttcacaccttggcaggttcacccaaaggggtgtgtaaccaagcctcc

SEQ ID NO: 577740 - DNA, 817 bp, Homo sapiens
  misc_feature (1)..(1): n is a, c, g, or t
nccccttctccctctctttttcttcttttgttctcgttttgcatgaaaaaagtgaataaatagtagatgagaataggagtgattgcgatggggcgggggaggaagcccagcaagaagttgtccaggtggcttctcgacacactattcggggacttttctgggcctctcaaaaagatggccacccccgcgcgctttttttaatcctcccgagttggtgcgcacccctgtgctaaagatttcttgcccgggaaaaattttattactgcctcgcctttttccacaggaggtggtgtgtttgaacaacccgccggcgggtataattttgctcgcccacggcgcgtctctgttcagaagtgccagattgtcccccgtggtttcgtcgcccgcacaagaaagcgcgctgttttattttggaaaaccaaagttgctgctcttcttcctatacaacgtagtccacaagttttgaatttcttgtggggggggacacagcaccacatttggagaggttgtagatttctctaaattgtgtcccatggagggtgcgcccaaatatagtacacacctgagatgcctggagataagggtgtccttgttgtggtgttaatggtctccacgacgcctctctttggagagagattgttgcgcaatctctccgaaaaaccacgtttaatccgagaaagggtgtaacatatgtaaagggttttatatgggaaatattcccgtccaaaaatttttaaagggtataaatgcgaactctttgtttaataatgggaacaacttgttaaaataaagtgaaattttctatccccaacaatat

SEQ ID NO: 577741 - DNA, 1595 bp, Homo sapiens
  misc_feature (1294)..(1294): n is a, c, g, or t
  misc_feature (1595)..(1595): n is a, c, g, or t
tttctccgtgcgaggggctttatattcccgggtccaacacacacacacacaccggggacacgggggccttggtgccgaggagcggggcagagacaccccacaccaggacacacacacgggggacagtggggggggggcaggcccagaggagaacagggcttcttcagccagagggtgtgtgccctggggctccctgtgggtgggtcccgggggggggtctcgaggggacagaggccgggcggggggtgtgggggccaccgtgagagcacaccgcggggggacacacgagggcgcccgaggccccaggggcccgagggcgcgcggccgcggccgggagaggcacaaacacatcagcgggagtggccacggggaagaggctctcgcggagcggtggcgccacacaggtgtggggtgtggtgtgagagggcgctgtgtacacaaatcaaagaggcgctctctgcgagagaggggtgtgtgtgagagcactcaagaggagagaaacaacgggcaccggaaagaagaaaaaacacgaacaacacgcggcacacgacgagccgcgagacacaaaacaccacaggtctctccgcgagagcgctgagaggcaccctgagagagtggtgagactctgcagggagcgctctcaggggcgaccacactagggggactatacacccccacagagagacgcagacagcggagagacacccaatatctacacacaaaaggccctcggggctccaccagagcggaccaccggggggggagccacaagtgcttgcgcggaccaagggggcccactgggcgcagcgacgtcgcctggggggcagcagcagcaagcgacaagaaaagaggaaacaaacacctcacaacacaagatgtgctgatcaccccaggagggcagacacacacatgggggtctaacagagcctcaccaacagggagaaaaaaagaagagcacagaggagaagcgaagcagcccccccccacgatgatgcccaacccaccgtgccagccaaccaacaccaccgagggggcaaacgaccacgacagaacagcacgcccccaacaaggaaagcaaagggccccccccccagagaaaggagaacaacccacgcccagacaagactgcgatcccaccagcgagccactcacacaagacgggaggaaaacaccacaaccacaggagaagaaccccccagcgccaaccgacgagaccccacaaggaggagggcgcaactaggagcccaacaggtgggacccacaaacacaacagagcgagataagacagaacgcngacacacgacgaccacggagcgccccccacacacaaagaaaggcgactgaagagcaactcccacaacacacaccacccacgattcaccacccccgccaggacaaacagcacaacgagccacacaaagtagtcacaccagaggagcgagcacccaccagaagctgagccacttcatcgaaacaccaatggtcgatggcatcgcaggcccccccctcgcaaacacgcacaagcgacgccacgatcatgcgaccagggcacaaacaaacccatgtggcgcaccacacagagggcacaacacagn

SEQ ID NO: 577742 - DNA, 858 bp, Homo sapiens
ccggcgctgtggtcgacgtggcggtttacctgttctgtgtctttgtggtcccgtttggatatagtgtgtcgcttccacggtggttttcggacggttcgtttgtataattgggcgtcgccgttttcccggggctgtttcgctcgccccgtcggctgctgtgttagccgtgctggcgcgacctttgtatcctggtggggcgcagactggatgtcgccgtggtgtgtcctctcatgtatggtccggagcaccccctcaggttctgtgccttctgaaccatcgatgtttatacatatgtgcccttcgcaagtaattttttttaatactactccccgctttgatcaccacccgtgtaaaaagtagttgccctccaataaaaaacaacactacatggattttacccctctaaaataaacttgaggaataataattataggcccccacaacccactataagtagggtatatatgttcagcacacaacacattaatacaacatgatctacattggtgccacaaatgtaaggagaataatacataatcttatgtcgatgaaaaacaggtggattccacatcagatgtcttctagtgcctgcgcgccccccttatgtgtgcacccccgcagtctgatatagcagaaatagtgttagacctatctgacactgcgccctgtatatggatcagaaactagatggattagaaaaagatatcatggcaagaaacagagtggagaataccacacgagaagagcgaccacctgggttggggtaaaacacagccgattccttctacgtgcattgagcttctgttttcccccccaagtatatttctttttaaaaacaagggtggcccccacaaaaca

SEQ ID NO: 577743 - DNA, 935 bp, Homo sapiens
  misc_feature (530)..(530): n is a, c, g, or t
ggttcaatgggatggaaagtcacacccgtaaggatggcacattcgccagtgtgaaccaacgtcatgccttgacggctctggacgtgcactcctaccaccaagctcgtccaaatgacaagcccgtattgtcgccctggctcgtccaggatgatcctacaatgatgtgtggtggctagttggtacatggtgtcccttgtgagggcgtagatggcaacgacgtgggtgattcatcagaaaacctggtatggctgtgatcgacctttttgcgaccaggtctacacgttttacaatactggaatgataaaaatcatgttcgaatattgctaccattgaaaggcatttgagttgaagcttctactctgggggagcatcgtgggcgttcgaatgctcaagaaaatcgtggtcgatgtcagatggatttgtttcggtctgtgggctatcgttgtgcttggtgaccatgcaaaagatgaaacctacacatactggatatgctaagcttggagcttctactttgcatcgatgtgtgattntagtcctttgaatccgatccaaggccaattctaaagtcggccctgcgtttatgcccccttggtaatttgggaatttgccaccaccgggtcatcatagcagtgcaatgtttgcctgagctgagggaaaacgattgattctgccggactggtaaaaaacgctggaaaggatgggggcacgtaaaattctttgaaggtcggggtgatgctgtcattgtgagatagtgggttcctggcaatgcgccatgtgtgttcgagaggcattctcagaactaatccaccgtttgggatcgcttttcggctgattcgtgatattgagacagacagattgcgggtggggtgtcaatcaaagcagtggtacaatgaagggctgctggaactgggcaaggtcaccaaagttcttgccca

SEQ ID NO: 577744 - DNA, 142 bp, Homo sapiens
catcatctacatcgttccttccgcctggttctattagggttgtacggtcagccctgctcattcttcctcctctgtgggtccttcgaggcgtcatgctccgcttttgcgtcgctgggttatggtttaatccccctcccctgcc

SEQ ID NO: 577745 - DNA, 540 bp, Homo sapiens
  misc_feature (83)..(85): n is a, c, g, or t
  misc_feature (126)..(128): n is a, c, g, or t
  misc_feature (330)..(330): n is a, c, g, or t
  misc_feature (332)..(334): n is a, c, g, or t
  misc_feature (336)..(340): n is a, c, g, or t
  misc_feature (343)..(343): n is a, c, g, or t
  misc_feature (350)..(350): n is a, c, g, or t
  misc_feature (352)..(352): n is a, c, g, or t
  misc_feature (358)..(358): n is a, c, g, or t
  misc_feature (363)..(363): n is a, c, g, or t
  misc_feature (377)..(377): n is a, c, g, or t
  misc_feature (379)..(379): n is a, c, g, or t
  misc_feature (388)..(391): n is a, c, g, or t
  misc_feature (393)..(394): n is a, c, g, or t
  misc_feature (399)..(399): n is a, c, g, or t
  misc_feature (402)..(402): n is a, c, g, or t
  misc_feature (414)..(414): n is a, c, g, or t
  misc_feature (416)..(416): n is a, c, g, or t
  misc_feature (461)..(461): n is a, c, g, or t
  misc_feature (465)..(465): n is a, c, g, or t
  misc_feature (469)..(469): n is a, c, g, or t
  misc_feature (524)..(524): n is a, c, g, or t
  misc_feature (532)..(532): n is a, c, g, or t
  misc_feature (538)..(538): n is a, c, g, or t
cgcggctgtggctcagagctgcatggggagacgccgctgcaggtccggtttctcggtgtctggtcggtgccatcattttcctnnncctcccccgtcctccccaagctggccacttcccctcccccnnnccctccccaccgagggggcagggggctgggcacggagtctctatgatgatgccatgtgcggtgtctgtgccgggcggcagggactggggcggcagcgagaggaggcagtggagccaggagagcggtggtgaccgctgaccgcttgcccggctgctcctccgctccctcccgcccacctccttcctttggggctggtactcanannnannnnnaanccctccncncatccnagggncctcccagcctctnangtaaacatnnnntnnaaaantanatggtggatccntnccctcccccatccgcatcctcctcctcctgtaccctcttcctctntgtncctnaaaaagaaatcccctctttgcatctacccatccctcgctggcctgctcctgatcnccttatanaataanaa

SEQ ID NO: 577746 - DNA, 320 bp, Homo sapiens
tcggccggcgttggtgaaatacttattcaagagctcagtcatggcgcagtggctcacgcctgcaatcccagcactttgggaggccgaggcgggtggatcacgaggtcaggagatggagaccatcctgggcaacacggcgaaaccctgtctctactaaaaatacaaaaaaaattagctgggcatggtggtgggcgcctgtagtcccagctactcgggaggctgaggcaggagaatggcgtgaacccaggaggcagagcttgcagtaagtggagatcatgccactgctctccagcctgggtgacagagcaacactccgtctc

SEQ ID NO: 577747 - DNA, 903 bp, Homo sapiens
accgatctccatggcagccctccaaagatgtctctaagggctcctagagagctaagagcgtgaatgcgtgtgatagcactggtcgatgcaatatatacaggcctcctgcatagcatatgggctcctaaccaggacggtagcctgatagcatgaagggcaggcgtatgatatcaggagagagaagtacaatacccacggtcccttgcggaacagcttggtgcagatatgaggctgcgatgtcggtagtagctccttatcaattcatgcgtctaatgagagtgtaattgtctttgcagcagggactgtttggctagtacgtctcattttatcacacgtctcagtctatagccacacctaccgctctcacattaattgaaaggtgacaagctctgcgatgcatggaatcaatgaggtatacactttcctaaagcgtagcatgtcgctctagaagttcattgcagatataatcacggcagttatgtgacgtcctcaagacaactcgtagattgccaaacatacctattcattcgccccatcttccagagtattctacaatgagttgaatagtcaactcgcgtctatgtaccgtatgtgactcgcgtgggccctacataattggttgctcatgccatgagtgagactcaagaaataactcccgaggattcttccacgttggaactaaattacagaaggggttagtacgtcgtggctcaatagtgtcttaaatggttaggcaccacttggactttacacacagagcttttggaccagttggttcaacatgggcttgtattttatgtcgcacaccatgtttgagtgtgcatcctgcgggctaaaagaatttaggttttgttcccaaaatttcggttcttgcgtatgggaaagcagcattgtagaaactgg

SEQ ID NO: 577748 - DNA, 664 bp, Homo sapiens
  misc_feature (187)..(187): n is a, c, g, or t
agttctcacccctgaatgtggtcctagtcttcccccgggtttgaatgctcgtttggaaggacactctgtctcccttctgggtgggctatactctgttcaaccgccacgaatggttttgggccacacttgagaccacggcacactgagtgaccctggcacgggggcccggtggtgcatggccctggangggaggcccatgacttgacccgccatcatgtgatgcctcttgaggcgttgtgtcttcggctcttgctccagtgtagagactgccagccccttggatagagcgccagatctttgccagccaaatagccccacacatctacgccagtggccacagctagagaaagtctatcgagatcccagagccaaacactggagctcgtgtgccagaagattcgcccctggtttgggccggtccctgcgagaggccccaggccaggtgagaccgaggaggccgagactgtgagcgcccatggccttgctgtcggtgggggccgagcaggcccacggctgcggcagcccgggaacacagccccaggccggcagaggagcccactggagcaggagcctgccctgtgacgccccggcccccatccctttgggcttcacccttgtgattttgtttattttttctattaaaaaccaaaagtcacacattcca

SEQ ID NO: 577749 - DNA, 224 bp, Homo sapiens
cgtcgtgcccattcctgaagctatggcgtacgtactgttacgtccgctgcttgatgatgtgccggaggatgaactgtgcgcgtagcgcccggaagagtattgccggtatcagagcaatggcatccactgttgattgaggcgttaaccagcattccaaaactcgaagccggagctccgtctggtggcactgcgacgtcatccattccgttgcccccgttgaaaat

SEQ ID NO: 577750 - DNA, 197 bp, Homo sapiens
agaatttcatgtggctacacttgtggtgtaatttgcagagaggcctcacgagcatcttccaatacagcagttctacacgaactttgttgggtcaatgattcctttttccaccatatgcaccagatctcgagtgcatagcatcataatcgcaagcgtctgaggaacgaggcattattttctcagatatcacgatgatc

SEQ ID NO: 577751 - DNA, 1162 bp, Homo sapiens
  misc_feature (224)..(224): n is a, c, g, or t
  misc_feature (226)..(227): n is a, c, g, or t
  misc_feature (230)..(232): n is a, c, g, or t
  misc_feature (241)..(241): n is a, c, g, or t
  misc_feature (369)..(369): n is a, c, g, or t
  misc_feature (462)..(462): n is a, c, g, or t
  misc_feature (572)..(572): n is a, c, g, or t
  misc_feature (807)..(807): n is a, c, g, or t
  misc_feature (983)..(983): n is a, c, g, or t
  misc_feature (1076)..(1076): n is a, c, g, or t
  misc_feature (1091)..(1091): n is a, c, g, or t
  misc_feature (1160)..(1160): n is a, c, g, or t
gcgcagccggcgctgagcttgcagtggccgctcccctcacccgcccccttcgagtccccgggcttcctgccccacccggcccgtgggggagtatctgtcctgccagcttcgcccacgccctgactccgggaccgtccctgcgcgctcttgggcgcaccaatggcccgcggggctgcgctggcgcatggtgctcttcgagcctgctgggtgtactggtcggccgncnncgnnntggtggttncgatttatctgatgcccttcctgacaatgaaaacaagaaacccactgcaatccccaagaaacccagtgctggggatgactttgacttaggagatgctgttgttgatggagaaaacgacgacccacgancaccgaacccacccaaaccgatgccaaatccaaaccccaaccaccctagttcctccggtagcttttcagatgctgaccttgcggatggcgttncaggtggagaaggaaaaggaggcagtgatggtggaggcagccacaggaaagaacggggaagaggccgacgccccaggcgtgatccccgggattgtgggggctgtcgtggntcgccgtggcatggagccatatctagcttcattgcttaccagaaaaagaacgctatgcttcaaagaaaatgcagaacaaggggaggtggacatggagagccaccggaatgccaacgcagagccagctgttcagcgtactcttttagagaaatagaagattgtcggcagaaacagcccaggcgttggcagcagggttagaacagctgcctgaggctcctccctgaaggacacctgnctgagagcagagatggaggccttctgttcacggcggattctttgtttcaatcttgcgatgtgctttgcttgttgccgggcggatgatgttgactaacgatgaatgtttacatccaaagggggataggcacttggacccccattctccaaggcccgggggggcggtttcccatgggntgtgaaaggctggccattattaagtccctgtcactcaaatgtcaaccccaccgaggcacccccccgtcccccagaatcttggctgtttaccantcccctgtccctcgngcacgtctgaaacccctgcgtagcccccacttctttttaattaaaataaggtaagcccttcaatttgtntc

SEQ ID NO: 577752 - DNA, 329 bp, Homo sapiens
  misc_feature (16)..(16): n is a, c, g, or t
  misc_feature (61)..(61): n is a, c, g, or t
  misc_feature (67)..(67): n is a, c, g, or t
  misc_feature (96)..(96): n is a, c, g, or t
  misc_feature (101)..(101): n is a, c, g, or t
aggatttttgggctgnttccagcttggggccctcatccctgccctggcaggcctttttacnccgatntgcatttagtggggggtcagcgtgagcancagcnccgtgagtttttaggccaaaaaccttttcccctttaaaaaccttcctgggggagggtgagtgggccaggcctggagccccgtacccaccctttatacccaggggaatgggtcccaagggcccaaataacgccccccactttttggggttcccccgcgtccttagacatttgggaactgcctctgcctgggccaaagcttttcccttaaaacttttttgctgtgcttta

SEQ ID NO: 577753 - DNA, 455 bp, Homo sapiens
tgttgcaatgagctgagattgcgtgccattgcactccagcctgggtaacaagagagaaactccgtctcaaaaaaaaaaaaaatggaaaagaaaaaaaggaaatggtattacagggtgaatctagacaaatcctactttccaaagtttcaaaaattttatctgtcaatttactaccattggagctccctaattagaattaagtataatattctcttaatatttatactcttactagtgcctttgtatatttatggagcacaaatttaagtagtaaactctagcttcacagagggccatggatatatacggtggtgcactggccccagcttgtgccagctgaggagagtcaatagtgtgcttctcttcccaattctgcttcaaatttgccatttaaaagacacatggtaaactccagagaatcatgtacatagctagaaatctgcatcaaggtccgg

SEQ ID NO: 577754 - DNA, 133 bp, Homo sapiens
  misc_feature (39)..(39): n is a, c, g, or t
ggtacccactctagtcaggtgacagagtgagactctgtntccacaaaaaaaaagaaaaagtattgggaaagtattgggactcaaactatgtggggttgggaaaggagtggggatttaatttaaattggctatg

SEQ ID NO: 577755 - DNA, 442 bp, Homo sapiens
  misc_feature (224)..(224): n is a, c, g, or t
  misc_feature (226)..(227): n is a, c, g, or t
  misc_feature (230)..(232): n is a, c, g, or t
  misc_feature (241)..(241): n is a, c, g, or t
gcgcagccggcgctgagcttgcagtggccgctcccctcacccgcccccttcgagtccccgggcttcctgccccacccggcccgtgggggagtatctgtcctgccagcttcgcccacgccctgactccgggaccgtccctgcgcgctcttgggcgcaccaatggcccgcggggctgcgctggcgcatggtgctcttcgagcctgctgggtgtactggtcggccgncnncgnnntggtggttncgatttatctgatgcccttcctgacaatgaaaacaagaaacccactgcaatccccaagaaacccagtgctggggatgactttgacttaggagatgctgttgttgatggagaaaacgacgacgacgacgacgacgacgacgacgacgacgacgacgacgacgacgacgacgacgacgacgacgacgacgacgacgacgacga

SEQ ID NO: 577756 - DNA, 2024 bp, Homo sapiens
  misc_feature (1763)..(1763): n is a, c, g, or t
  misc_feature (1828)..(1828): n is a, c, g, or t
  misc_feature (2024)..(2024): n is a, c, g, or t
atttaccctatagcaccccctctaccccctctagagccaaaaaaaaaaaaaaaaaaaaaaaaaaaaaaaaaaaaaaaaaaaaaaaaaaaaaaaaaaaaaaaaggggggcgcgcgcggcgagcaaactaatctctctccccaaggaggggcgcacaaactaaagcagcgcggcccaacgattttttatgggaacagaagagggcgcgcaccacaaaaaagagagagcgagagccgtatatatatacacaacagacaagcacgccgcggggcgcgccgccgaccaacaaaaacaggcgcgactacttcgggggcaaccacccgcgcggacagccgaggaacaatattagggagaagcgacgcacacactaccctcgcgggggcggaggcgagaacaaaaagaacggagcgcgagcacacaaacaaccacaccaaacacaagagaatacaataaaagacaacgccccgagcgagagcggcacaaacatataaaagacactccataccccgcaaggccgtataccccgcccggtggggcacaacaaacacacgccaggatcaaaaatcagcccgccgaaacagccagaccgacccacatatttcgcgtggcacaacaaaagcgccgtcgcactagtcctatataaataaaaaacaccactatatctctatacacaccacggagagagggaccccattcacgtcctacaacactcacaccgcccgacacacaccaacgcagacaccgacacacacccaccccaaaccgccacacacgaacaccaccactacaaccacaaacaaaccaaccagcggcacggagaaggacgcagaccagacagcagacgacgaacgagcacacacgaaagagacagcagacgagaacaccaagagcagacaagcgacgagcagacgaggcgaggggccaatacccggcaacgaaaggcgagacagcggcagaaggagaaggactcagacgacgggacacacaacgacagacaaacacaatcacacgagatacgaaacgaagaacgaccaacagacgcagcagagcccgccgacgcaactacgcccagaacgcaccagggaacgcacaggggcgggaggaaccaagaaacacgagcgcagacaacaagcgcgaagcgcgagaggcgacagagccagacacgcgagcgacaaaccacagaaacacaacactaggagcacacaccaagaagaacagacgagaaagaacgaacagagcgcacggcgagagacaggacagtgtacagaagaaggcgaacagaaagcgagaaaacacgacaaacgaccgacgcaactgagacagagccgcgcggaaaggcagcgcagacgacaggacgagaaagcacggcactcagtacaaggagacacagcactgagagacaaacaaagaccgtacaagagaccacgacgaacacatgcgacaggacagcacaacagagcacagcgacagcgagagagagtacgcacgcaagcggacggcaggcacacacaggagcgagcagcagagaggcaggcaagaacgcacagagaacgacgacaaccacaggaacacgagaacgacgacgagccaccacgacgagcgaccgacgagcgagcgagacaaagcagagcagcgaagagaacgcagacagagaagcggacagaacgcagcagacgacgcgcacgcagcagcgcgcgaagccacgacgagaacaggatgacgagcagacgagcgacgtgcacgagagacaggctcagcagcgcgngacgccgagagcgaatgagggtagcgagaagggacggagagctcgcagcagagacgacgaccggnacgcgcacgccggcaccagcgtcgagcagcagacagtcacgcgcccgaccagacgagcgacgacgccaagcagcgagacgagcgagacgagaacgaagcgaggcgaacgacgcagcgaggcgagacgtgagcaccgaacgagagcaggtagtcgaggcgagcgcgaggcatggacacagaggcgatcgatgagagn

SEQ ID NO: 577757 - DNA, 583 bp, Homo sapiens
actgtctagaaagatagaacaggaaggccaggcgcactgcttagtgtactaaaatgagtgttggtgtgtgtacactgctaacgtcaccctcacagggatggccacggcgactgttattcgccaggctggttttctagacctgttacctggaagcatggtgagcaccatttctggacgctcaggccgtgtcgggcttcagtcatctccagcacacaggtacagcagcgctttctggtagtcgcccttagctgtcttgctggatattatagtacagggacttgccgtactttctcttgaattcagacctaattttcaacatgtccacttcactgcgggagaccatgattctgatcaggaccttatctcgcgtccccttggccttcatggagtcatacagccgatcagcaaaatacaggggcttgttctgaatgcactgaaccaggttcaggaaagcattttccaggtctcctttaacctctttcctgatgctttccaacatgtcataagggctgtaactcttgtacctatcaaatactttctggaggtggggacgctccgctcggtcatgatgctgatccacttg

SEQ ID NO: 577758 - DNA, 424 bp, Homo sapiens
  misc_feature (51)..(51): n is a, c, g, or t
  misc_feature (53)..(53): n is a, c, g, or t
  misc_feature (275)..(275): n is a, c, g, or t
  misc_feature (329)..(329): n is a, c, g, or t
  misc_feature (419)..(419): n is a, c, g, or t
actgggcatccatctctcagcacagcctcgcacaagtgccaaagagcagcntntgccaagaacagcaaccctggccacattggcacactgtgctcagactgtagcgaccacagcaaacacaagcagcccatgagcactcgtccaagtccttccaagcacatgccagtgacaccgcggcaagcctgtacccctatgcgtcccaagcacaaggtcccattagcaaggtgtcagtggacagcctgtggttaacacaacaaataaatccacacccatgncctcaaacacaaccccagagccggccccaccccacagtggtgaccaccaccaanggacaagcaagggggcaacacccaggagctaagggggactaagattgcaagccacggactcgtgccagcccaggacccaagggccagtanatgtt

SEQ ID NO: 577759 - DNA, 1763 bp, Homo sapiens
  misc_feature (385)..(385): n is a, c, g, or t
  misc_feature (387)..(387): n is a, c, g, or t
  misc_feature (459)..(459): n is a, c, g, or t
  misc_feature (497)..(497): n is a, c, g, or t
  misc_feature (530)..(530): n is a, c, g, or t
  misc_feature (612)..(612): n is a, c, g, or t
  misc_feature (626)..(626): n is a, c, g, or t
  misc_feature (640)..(640): n is a, c, g, or t
  misc_feature (656)..(656): n is a, c, g, or t
  misc_feature (663)..(663): n is a, c, g, or t
  misc_feature (679)..(679): n is a, c, g, or t
  misc_feature (684)..(684): n is a, c, g, or t
  misc_feature (714)..(714): n is a, c, g, or t
  misc_feature (718)..(718): n is a, c, g, or t
  misc_feature (744)..(744): n is a, c, g, or t
  misc_feature (799)..(799): n is a, c, g, or t
  misc_feature (876)..(876): n is a, c, g, or t
  misc_feature (884)..(884): n is a, c, g, or t
  misc_feature (946)..(946): n is a, c, g, or t
  misc_feature (1102)..(1102): n is a, c, g, or t
  misc_feature (1122)..(1122): n is a, c, g, or t
  misc_feature (1223)..(1223): n is a, c, g, or t
  misc_feature (1245)..(1245): n is a, c, g, or t
  misc_feature (1283)..(1283): n is a, c, g, or t
  misc_feature (1286)..(1286): n is a, c, g, or t
  misc_feature (1309)..(1309): n is a, c, g, or t
  misc_feature (1373)..(1373): n is a, c, g, or t
  misc_feature (1498)..(1498): n is a, c, g, or t
  misc_feature (1556)..(1556): n is a, c, g, or t
  misc_feature (1605)..(1605): n is a, c, g, or t
  misc_feature (1763)..(1763): n is a, c, g, or t
gagccgagttgggatgtgggaggactcgtgtgcggctgtccattcctgaagtatgagttgaatatgctcccgaccctcacttcgacgtgctccactcgattgtcgtggtcacgactgggctgtgtatatgctgctgtgtacacggtaatagacagacctcaggccgcgacactgtatcatctgatgacatcaactgactccgccactacgaggcctctgatgcgatgtcgatgatacacactgcgcgtgtggccctgagtccctgccgtgttctctccgtttggcgtcggcggtgatcctttcgtacgatccttagtgcggcgttgcccgatgagctcctcgaccagaacagtatgcgctggtaatgtctgtagaacaggtaatngngggacgtggagtagatcactttccgcgttcggtcgtactaccagcagcagtagtaagacggtgggatgagtngaagatggtaatcccctgagtatgtggcttacggatgnagactgcgtccagtccggcaaagttaagtcaancagtgcaacggacgactgcagtgcttagttaatgctgtagtttctgtggagcgcgctgttatgtggatcctggtcagccgtntgcgctgcttgtantgtagaaggtgtcnctttccaggtagagcncattagngttctgaccgcaatgngccgnccatatgcgtacatcttcagttgaattggnaccnagactggggacacaaaggaaggagcntccgggaaatcctaggataaaggccgccaacaaagtatggggctgatgtggattnaccacctaatgaacggggatccctcctagaaggaaatagactttgtatcggtccaccgtaccaagtaacgaacaacnggtgatgntccctcggaactgtgaacaacgcattagtgctctgaattggcgttaactatgccaatgttcncactttccaagtgagccaggctgtaatcaaagcgcgtagtgcgtccgaaaatctattgatgggccaaccttaagtccaacttttgaacacccgagttctgtgtacttccgttaggcgggtgtgtcaatgcagaagtctcttgacatgggtcccttntgttgaaagttgaactgtcnccacagccggtgtttctcagtttggacgccacaatctggtgccccatatgaaaagaatgtgaccccttttgcccccctctgaaaggcgcaagtcacatcgnggggccgtgggagggcgcgcgncttggcagtattttagcacgttgaaatttcggaaatcntgngcgtattaaggccaaactcgttnctaatgaggtccaatcaataggcaatgcgattagttgtcacctttcgacgaaatgattgacttncgacaattgaaggatccagatgccaaagggatttggcttagagttcagtatacaacggggtggcctttggacaggaagtgaggtccaacaatgaattgcagtgagacaaatttttgggtcggtgncactcgagtttaataagagagagggaggaaaaaaaaggcctctagaaaagtgattatngggaaagcggaaaagagtaaaggaaatcacaagattagagcggaaaagnaaggaagaaagggagcagaatcaagagaaattatggaacacgagacggtgagtaggagcagtagtttaaaacgcgtgagttggattaaaaatatagtaaaggagcagcaaataatcatcaaaatgtatgagtccactagggcgataggataggtcagn

SEQ ID NO: 577760 - DNA, 229 bp, Homo sapiens
  misc_feature (46)..(46): n is a, c, g, or t
  misc_feature (52)..(52): n is a, c, g, or t
  misc_feature (74)..(74): n is a, c, g, or t
  misc_feature (90)..(90): n is a, c, g, or t
  misc_feature (144)..(144): n is a, c, g, or t
  misc_feature (220)..(220): n is a, c, g, or t
aggagcggaccaaaggcaagaagaagtccaagaagcagcctccagnagcganggaggcagcgggggagccggtncagaatggcgcgccanaggaggagcagctcccgcctgagtccagctactccctcctcgctgaaaattccntatgttaaaatgaccctgtgacatccggggcagtctgcaggaggacagccaggtcacttgtggccatcgtgctggngaacaggag

SEQ ID NO: 577761 - DNA, 461 bp, Homo sapiens
tcgaggtgccggcagaatcaactcaaatacacacacgacacacacaaatacacacacacacacacacacacacacacacacacttcctttctttcctcgcaaaagaaagacagctagagtctagaagcccagaattgcccccgcgttccgaacaccagctcgaattcttatgaagtggacttgtaatatccttagtgtcgctgtagggagtcagttacagattccattattgtcgcatcagtgcagtcgcctatgcgaggtggggggcaggacatggaggaggcaggcagcaagaaaggcagggcatagcagcagcttcctattcacagatttcatcaccctgccttttcttgcaggacatcttcgtaaagggggctgtagaacatagctcaagccaggaaggggacagggggctgcagttcttgcggaggcactgaagggccctgtgaaaccctttctcc

SEQ ID NO: 577762 - DNA, 198 bp, Homo sapiens
taaatgtgtctggaagcgagagtaaaaatacggagtataagttaagcacctggaagagagagatataaagaaaatcaggaagatataagacagtctgtgcacgaagtagtggctggcaaggtcgtgtcatctgaatgtcaaagaggtggaatgaaaatatctaaatagctaccagacggggcagatgctagctgaggt

SEQ ID NO: 577763 - DNA, 803 bp, Homo sapiens
gttgcatggaggcggagtgacgcttctgcttgtagaccgagcctgccggactacaccaaggctgaggagcccatacccatgaagagccttggagccctgctctagctgctgaacgcctgcactggcggagagcagctggccctgtgccaactcctgcccgacaacattcatgtgcaggagaactgaactctcgctgcggatctatgggaagtggtacaacctgtacatcggttgcacctgcccctggctgagaaacatcatggacaggatgactgagaacacgctagcgctgtgagagggcgctacacacgcggaatcatcatgaccagcactcagaggaggagaggcgactgaaaggatagggcttgagcttactagaaagcacattctgataggaagtcactctatcacactgccaaatgggacataaccatggagtcctatgagcgccacaccacctatgatgagtatgccatagctctgacccatatattgagccggaatcatggacccaccattactgacaagctctacaggcggacgctgcagatgacggtaactctacaggacgactacaaattgtgtgcccagagtgtgaacatccctgcggactacattttcaccatgggccgccgaggtgaatgcgtccctgaagagcacgaaccatagcccatcttaacaccgagagtccggaaggctgagcttcccccagatgaggaaggatcacgacgtgagcaactggtaactgtattcaccggagatactctgcagctgggctatcacgccgatcctgcatgtgatgc

SEQ ID NO: 577764 - DNA, 1887 bp, Homo sapiens
  misc_feature (365)..(365): n is a, c, g, or t
  misc_feature (373)..(373): n is a, c, g, or t
  misc_feature (441)..(441): n is a, c, g, or t
  misc_feature (501)..(501): n is a, c, g, or t
  misc_feature (503)..(503): n is a, c, g, or t
  misc_feature (538)..(538): n is a, c, g, or t
  misc_feature (625)..(626): n is a, c, g, or t
  misc_feature (1046)..(1046): n is a, c, g, or t
gagaattattttgagcgattcccgtcgagccccagggatttaatcggggagcgctgaggagacgccgtacttcccccgccgcaggatcggtggaccgtcgggccagctcgtgggcgatgatgcgatatgagcccggcatcatcgcggcgcgccagtgcagtaggcgtgggtcgcgcatgtcgcgtctctcggtacggggccctgctcgcagctgtcctggggtcgagcgcgcggcgtggcgggcgcacctggcagcggacggcgacgcgctggagtcgtgacgcgcgataggtcgggaggtctgcctttgagtagagattgaattgtctctagagacgtcgtggtatggcaaatacctcacgatntcatacanggcatagaagtatgcacatgcatccgatcgactccgatctatgtctcaacaaaatgctaccacgatancagcgtgtacacccaggttcgcatataagagaaaaagttctcgatagcgtagcatgatgntntccgatctaacggaggggggtcgcaaagaagctgntccatttgcatgcgcaaaacccgcagcggacttgcgtgcgttcctccgtcgtctgggtgccctgacgcagagtctctgtttcgcaanngggcaagacccagatgggaatgtgagcgcggcgttgcaagatggctctcgatgtggcagagcgcagcgttggagagtcttgggtgggggcagagggggcaacgaggcaaaagggaatgtggggccatctttacccccattctcgaaaccctcccttcgcccaacgcacccttacaagaggtcccacacggcgcgaaaaacttatccatagggcgggataatccctaatacggcgaggtgtgataacaatagagattcccccaggttcatccctccaggacttgtcatcacatttcacccctttacgcgggattcttgagtacacgacatatgggacattcgcgcagtctcatgctgcacccccattagaaaaaggccgcacccctttagttcctttgcactttgccccaagaaggtcgcnctagtaatttatacgaccttcactgtatgaggacataggacaagagtcgcaaacaggattaccaaacggatatccgacgggaaacagaaacagcgtggcgacacaatccaatcgcctgaggtgtccacaacaaacacgcgccaacagcaaacgaaggcggccaagatgggccaacacccggcacaacggccacacaaggggatatacaagcaacgccacaggcataagcgatcacacaggggcgtcccaagccaaggcaacggacaaatcacccaacacatcacccccaaacattggcacacgaacacggcgcaacacacggaacaacaagcaccccaggagcagcgtctaagaggacacaaacgcacaacacgagtctcaaatcaaaacccaggaacctacaggctagagaccaaacgagcaccattgatgaacacgacaaaccacccaacactgacaccaaaggcggaacaaagcgacaaatcaccgaaacagaccaatcaacaacaaaacacccgaggcgaaacacatcaacacgaagaaggacaaacaacacggaccccacacgagccactagaaccacaaaaaacaacacgaaacaagtacttacaccaaaagtcacacactaccggacccacaaaggacagaaaaaaaaccacaagcagcagcccagacaaacaacaacacaacaccacagcacaaccaaagagagcagagaccaaaaccaacaccaaagacaacagcaagacagagaaacacaacccaaccaccacaacaaacagaagacaaagaaccacacaccagcaacacagcaaaagcacaacaaacaacaacacaagct

SEQ ID NO: 577765 - DNA, 287 bp, Homo sapiens
tttattttgtcagtgaaactggtaagcactagaatgatcagaggaaacggatcaagagaaaatctaagtgcctttatgcccatcttctcactatacagagaggtccaaacaccatgtatatggtaggtgcttaagcttggtgaatggataaactaactgggatattttaaaggatcgacaatcaaatggctagttctaagacctaaagatatctcaaaatgtgtaataattgttctaaagtctgtttttatagcaaaaaatgtacttaacagagtgtaatcctttga

SEQ ID NO: 577766 - DNA, 104 bp, Homo sapiens
ccccgattatgagtcttggtcgcattgctaattgttatagtttttgggggatcaattcctgtggtgatggagcccacaatgggctcagaggtcactgtgccatg

SEQ ID NO: 577767 - DNA, 156 bp, Homo sapiens
aatcgagctccacgattatcgaaaccattcatcaaaccctgtcacaacccttcatcaaacccttcatcaaaccctcatcaaacccttgcgtgttggagttaagccttgagcgacccaggtagacgatgtagtcctccttctttagggtttcgatga

SEQ ID NO: 577768 - DNA, 340 bp, Homo sapiens
ctaaaacttcagcagctctcgcagctcttggaataaatctgaactgtctggaaaggcaagcatggaagcctggacctcgcttccactccggtctccactggggacacgctcccctccctgcctgtccactgcagtgacacggaaccacttctgttcctcacagtgacaagcttatttctcccgtggggtctttcaccagacactgtggttgctggaagcgctcatctcattgtcacacctctggtatcttcttgatctctgcttaaatatcccctacacagaggaggcacttctgaccatcaacgcccaacacggtgcgttggacggtgcgttggcccaa

SEQ ID NO: 577769 - DNA, 466 bp, Homo sapiens
  misc_feature (17)..(17): n is a, c, g, or t
  misc_feature (53)..(53): n is a, c, g, or t
  misc_feature (74)..(74): n is a, c, g, or t
  misc_feature (77)..(77): n is a, c, g, or t
  misc_feature (217)..(217): n is a, c, g, or t
  misc_feature (358)..(358): n is a, c, g, or t
cacgaggggcggcgtanttgcgtcccacgcagaacacgcggcggatcgggaancgggcgttgctgccggcgacngcnacgctggcctgctcgacgggcggaatcacgaattcggtcatggtgtcagggggtgaacggggatcggagccgattgtaccgagccggactcgcaaatatgaagcgaatcattttggcgctgaggatcgaaaacttcgatngacgatttgcccgccagcgggccaaaccaaaataattttttggttaatcggtgcggcaaccgcttcttccgcctgccgctcgtctccacacttgccgtcacggctcgccgtgcctgctgcgttcccatgcgtttgcatggnggcccatgcaaggcgcgaagacagcgccggcataacgagacgaacgagcaagaaaggagaccccatgaccaccaggccgacccgcctatcccgcagccgccgcacctg

SEQ ID NO: 577770 - DNA, 314 bp, Homo sapiens
atcttcttcttctttctttgagatgagtctctgtctgtaccaggtgagtgaggagacttggtcataactcgctcccaggtcagcgttctctgctcagctccgagtagtggatacaggcgctgcacacgccagtaattttttgtatttttagtagagacggggttttgcatgttggcaggctaagtctcaaactcctgagctcaagtgatccacccggctcggtctttccccaaaagttgctgggattaacagtgtgttgagccactgctttggggggccctttgggggttttttttcctttggaactttcgggg

SEQ ID NO: 577771 - DNA, 428 bp, Homo sapiens
ttcaagctttctcaatccttgctccaagttgcctttcaatccaattcgaattcctacaaaataatccatcaataagcacatgtaacctatcaaaatgataaactagagagaagaactacatatttacaaatttataattaaaaaggcacaaacaaagttctaaataagagaaaagatgagataattgcctaaactcacatctctcaactaagtatttttggcaattattaagtgtgttgctgcgttcatttgaattgcagttgcagtgttttttcttccgtctttcttcaaaaacacatattttcccttgcacatctcaaaaaatttcaatcgttcattttccagaatatatggtgcagtacaccatcattcatgcagaagaaggtgatctgcagcagagagaataaggggaagaaattgggggagaa

SEQ ID NO: 577772 - DNA, 173 bp, Homo sapiens
tcgatcgagctcggaccctggtatcacgcatgggttaggaagttcaaccagtctctaggaggctccaaattttcacacattttcctgtcttcttctgagccctccaaattgttctaatctctgcctgttactcggttccaaagtcacttacacattttcaagtatcttcacat

SEQ ID NO: 577773 - DNA, 524 bp, Homo sapiens
  misc_feature (131)..(131): n is a, c, g, or t
cctccaaaagcacttcggatttttggtgaggtgtgtcccactggccacaactttgtgaatgttcttcctggggggggggacccatatttagtccttttattgcaagtatctggatctctctctcttgttgnaggtgcttaagcagaagcattacctctttggaaaagggggtagctggggaaactcaaacttttcccctgtcttgatggtcagctcccttctctgtagggaacttttgggtcccccatccccatcctgcagcttctggtactctcctagagacagaagcaggctggaggtaaggcctttgagcccacaaagccttatcaagtgtcttccatcatggattcattacagcttaatcaaaataacgccccagataccagcccctgtatggcactggcattgtccctgtgcctcacacctgcgtcttacgggggggccatcctccctcaagaggtgtatgctggctctttccgtgctcacacacggatccacatgtgggtgtggggcaccctgcgtct

SEQ ID NO: 577774 - DNA, 165 bp, Homo sapiens
  misc_feature (20)..(20): n is a, c, g, or t
  misc_feature (84)..(84): n is a, c, g, or t
tgtaaaatgtaaagttaacnaaggcagaaactggtggtgggaagtggaggaggtccttaaaaagaaagatgggactgggcctgngtgcacgcctgtaatcccagcgcttggggaggctgagacagaaggatcacttgagcccagaaatttgagttcaccctcagc

SEQ ID NO: 577775 - DNA, 281 bp, Homo sapiens
aaattcacggcccgtcgacgtgatctcgacttactgcaagccccgcgtcctgggttcaagaaattctactgcctcagcctccagagtagctgggactacaggcacctgccaccacacctggctaattttttgtatttttagtagagacggggtttcactgtgttagccaggctggtctcaatctcctgacctcgtgatccgcccgcctcagcctcccaaagtgttgggattacaggcgtgacgaccgcacccggctaaataaacatttttcaaagcctccc

SEQ ID NO: 577776 - DNA, 462 bp, Homo sapiens
  misc_feature (342)..(342): n is a, c, g, or t
  misc_feature (428)..(428): n is a, c, g, or t
  misc_feature (434)..(434): n is a, c, g, or t
agcgccttcctgcgggtctcaatgaagtcatcattgaaacgttccaccatgcctttgacgataaacttttctggcaatgggggaataatgagagtggggtgtgcttcttcaaagtttgcccttcaaccacaggaaatcttgataacgtcgcctgacttcaaattcactggaatcaaactccccacgagatgtcttggttacgatcctgtaagtgatgaaagtttcaattgtagtgacatggctctcaggtgcatcaactgtaatgaagagatcctttaaatctggtccatcttcaaacttgatctggtttatcatcgacaaaggggatgttggcatcatagngctaaatgagttcatgtccatcagggaggcatccttactgaacacctccaggtcgtcctcgtcctcgtccagatccagcacaatcngtgctnagcaggctgcaggaaccgctgccactcc

SEQ ID NO: 577777 - DNA, 1490 bp, Homo sapiens
  misc_feature (164)..(164): n is a, c, g, or t
  misc_feature (193)..(193): n is a, c, g, or t
  misc_feature (1126)..(1126): n is a, c, g, or t
  misc_feature (1140)..(1140): n is a, c, g, or t
  misc_feature (1150)..(1150): n is a, c, g, or t
  misc_feature (1158)..(1158): n is a, c, g, or t
  misc_feature (1165)..(1165): n is a, c, g, or t
  misc_feature (1172)..(1172): n is a, c, g, or t
  misc_feature (1174)..(1174): n is a, c, g, or t
  misc_feature (1184)..(1184): n is a, c, g, or t
  misc_feature (1233)..(1233): n is a, c, g, or t
  misc_feature (1235)..(1235): n is a, c, g, or t
  misc_feature (1240)..(1240): n is a, c, g, or t
  misc_feature (1255)..(1255): n is a, c, g, or t
  misc_feature (1262)..(1262): n is a, c, g, or t
  misc_feature (1268)..(1269): n is a, c, g, or t
  misc_feature (1298)..(1299): n is a, c, g, or t
  misc_feature (1343)..(1343): n is a, c, g, or t
  misc_feature (1349)..(1349): n is a, c, g, or t
  misc_feature (1376)..(1376): n is a, c, g, or t
  misc_feature (1389)..(1389): n is a, c, g, or t
gctcacactataacatgatggtcgtgatgtgtcgctgctaggcaaataaataacgaatcacgcctgttagtgtgtggtacagcacgcacagatgatccgggttttaggggcgccgaccctaagtatgaggagcctctctgaatggggatcgtcccccaccaagnggtgtggtgtaccacgcacgagaatatgnccagacggggctttgttgtgtaaataacagccctccgtcgcgcctccgcgtgttgtgcctcttatattgtacgccggggtggtctcttatataaaggtgttttctcgccaaggtctcctcttcgtgggggttgtgctcccaaatatattttggtgccaaccgtaagagggggggttgttgccaccaccacgtggaagaagagatgtcgcctgtggtggtttgattccccaccaactaggggccacaccgctgggcgccaccccgcgccctcagtgttggtgttgtaacacgcagggggtatattgtgtttgaaaaagagaaaccatcaagccctccggtgtgctccgctccaccaatgtgtttggttgggccgtttttctgttccccgagagagttgcgttgccccccgtggtgaagtcgctcccagaagattttctgcgcccaaagtgttggtgtggcaccacttggtgggggcccgtggtaataaagaggcgccccaaaaaacagtggtgtagtgggaaagttttttccctcgcgcttgtttgggttgcggcccacacaacaatcgtggtgtctcctcaagaaattggaaaatgagtaggagccgccagccgtggtgcctccctggtcttgggagagcccccctggggagagcttggccccccggaaatatgtggggcccccaaaaaaagagtacacatgggtgtaagaagagatgtttgttgcgcccaacagaattgggctttcccaaaaaaaccctggggtttccggcgtcccacacacccctttcccacaggtctatactcgcgattccaacacaagaatatttgttctcatgtttcatgggggctgtacacaggcgttcccaacacacaggccatatcgaagagtgtcccctttgtggaaaacccccagaggccacatgtgtgccanagggttccacacantggcccaagntatcacanggcccancccgccncncaagctgccnggcacacaaggagagccatgtgattgaggccctgccccagggcccaagntncaagntttcctggcccgccnagaagantccacnntttccaaagaaagtggggcttcacccaannttccaatgctgatgaatttgaagaacacatggtggctgaaaaancggctnatccccagaatggctgtggggtcaaanacacatcccccantcgtggccctttggacaaatggcgggccctgcactcatgagggcttcccaagtgctgcccccctcttaatactcccccattaattttacttcctgtcacca

SEQ ID NO: 577778 - DNA, 897 bp, Homo sapiens
  misc_feature (203)..(203): n is a, c, g, or t
tctagccaaatgctatgttgcaaaatgtggcatcgttaagtttttatgtctgtgtcttcttgtttactataccttgggtaatttgtgttaccaaaaaaaaaaaaaaaaaaaggaagtgtaatggtgtaatgtccgaccacaaaaaaagcaaatcagggtggtaagcttaaagtacaattccaaaggtcataccaacagcgggngttttttttgatactttaaaaacttttatgctacatatcatggccatttcatattggggggtttggctactcttatacaagggaatcaagcgaaaggtcatccagccactgaatggcattattatatctaaaaagtctctaagatgacagttatcactatctggtttatctccatgctgaccttttgaaagaggtcctagtatccctctagccagattgttagtttttcgtgggtactcaaccaacagttgtactaaggaaagtaaagctaggacctaaatcagaatcatagtgcctgcatattggtaacaggtcgggtgcatttgttcacaggatgagtgagaggctgagcagaatttattgacattctctgtggtgataaagaccttctttgtttaggtaagaggaattacagaaccggtgttacccaatctaagagggggtaacagaacaaacacacaggggctggttcagggtttccctagaggatatgcgaggtcaatcattacactaagtggtggaacatatttcgttggtacacgagtctctcgccccgactacaccacctgttcttagacaccacagggcgcctcacatgttgctcacaacggagagaacagtcgaagtcggagatacaactcgaacacaaacacacaacacaaccgcggcttccgcacagcacatcacaccgcgg

SEQ ID NO: 577779 - DNA, 857 bp, Homo sapiens
aggcgtgacggtacgtgtgaggtaaacagctgagggcgtggagacggtggtgatcatgccatagaccaggttgataccactgaaaactgtattaccagtcgtcgatagaatagtttggtagtggccccaatgaagaacctacagaacctgtagacacactgtcgctttggagccagcacagcgccttcgagccgagagaactggcccaggcaagccaatgtcggaggagcttcttggcatgctggactcccccatgctgggtgtgcgggacgacggtgacagctgtctttaaagagaacctcaattctgaccgtggccctatgcttgtaaacaccttggtggattattacctggaaatccagctcacagccggctattgcacaatcctgacacaccttgcaatgagccacatgacaaagcaacctcttggaacaggataaacgaagtatgttgggcaaaagccgccactcgttatatccatcctctcgtaactgaggtcaatgtcactagagactgccagccatctttggaaagcataagctctctcaagccaccttctttatgcccttctttactcaaaatgtctcaaggatggaccatctgaccgtcagtttgtcctcacaatcagggcgtcgttggtgttgagtaaccattgctagccaatgaattccacagatcactagggaaaagcagcattctccttggatctcctttctgaccatttttagaaccggtctgttcattcactggctggcctgaaagaaaacaggcccacgttgggggaaagtcaaaacttggtccattttccatgcgaatttttaacaacctcttaccataggccttaatgagagaggtcc

SEQ ID NO: 577780 - DNA, 303 bp, Homo sapiens
ccccagtttgatgtccttccaagaatgaatccttccctggtgatgtctctcgccctgtcttaccagcatccactctcccttgtcctcccaggggtgtatctgagtcagccagtggcttcttgatgatggtggtggtggttgtagtgtgacaggtcccctttaggttatttaagggtgcatgtcccctgcttgaaccctgaaggccgggtaatgagccatttccatggtgcccagctgaggaccaggtgtctctgagaatccaaacatcctggagagtatctgagaaccaaccaagtaaaagtc

SEQ ID NO: 577781 - DNA, 110 bp, Homo sapiens
  misc_feature (1)..(1): n is a, c, g, or t
nctgtgagagagctttaggacaaaaggtccttttatgttattgtttttccccccaaatagataagcatacacttatttagagtatggacaatatatttttcttctgtttc

SEQ ID NO: 577782 - DNA, 711 bp, Homo sapiens
  misc_feature (143)..(143): n is a, c, g, or t
ataccagaaggatatagtatagtatatgtaagacgacgcagaacgagtagagacagagagcttgtcatggtggtaatgaacacaatgggcatcaatacgattgatcacaagtgcaatacggggatacatcgagatatcgcagntgtcagtagacgattaactaaatgtattccatcagcagggttccgatcatcggcatgaagtagcagaatgcgcaactgtaccaggcaagcaacgaatagagcaccgtatatgaagcccgagcaagcgcaccacattggtggccaacgacgagtagatagcacccgtgtgtatgactaaaagactagttgtgtatcaaatgtaagttggggaccacaaagcagaagatcttgggacacaagtatgaatggcatgcatagatagaataacgtagcaagtcagtactatgacctaatggtaggtatgcagaagagtagtggagaacctcggacgatgaactgttttagccacttatactagcgggatagcaccaaacgagggtattatcaccctgaggacgagacatgtcgagaaggcctcatcgcaatatgccattcggcgtattgatcaaggacaagcagtctaagatattcactttgtgacttactgggaacaactatgggaatgaggggtgcctatctgatgcaatatctaatgaccatttcaatagcaagaggtcctggggacgga

SEQ ID NO: 577783 - DNA, 153 bp, Homo sapiens
ccggaacagtttacccagatcctttaacttatgagtggccgagccctagcactgaaagccaggtagtcttggaaccaaagtccgacctcctgactaataaataggggaattaaattagattagcttgacattttagccggtcggctcgtcacc

SEQ ID NO: 577784 - DNA, 405 bp, Homo sapiens
tataacctaatcgcagcgcgatatcttgtaaaacacatcctatcctatacttccaattcgcggcgtaaggctgcagcgctcgtatgagtgtttcacctaacggctgatcgatatcgtcagcaatgcggtacagctcgtccttggtttcctgttcacctttgatgttgatctggacattgcgcccagtttagtaacggcgttttgctcgttcgactggggggagtcaacaggggcgggctgtcggctgacatatagccgtgtaggttcgccatttgttccacttctgcattgcttagctttgttttctgctcggtggctgctttaggttcgaaattcttcaagctatccaaggggtctacgcgactcatgatgaaatcttctcctggtgcgataagggttagtggg

SEQ ID NO: 577785 - DNA, 290 bp, Homo sapiens
aagctactcgggacggtcccaactaggtagtaaggggctgccactgctacctcaacggactagacacccccattaggaagacgctcacatgctgtcctgctaggacgctgcaggcctggccgttctgtggccgcatccggtccatggtccctgtgtcctggctgggcgagctaggagggggctgatccatgggacaggttcagcagcgagttctgaatgtcttccaggacttcaaggaagagctcctctcgggactcatgcccgccagaagacattcacacgttggctca

SEQ ID NO: 577786 - DNA, 743 bp, Homo sapiens
  misc_feature (531)..(531): n is a, c, g, or t
gcacatctgtaatcctagctacttggcaggctgaggtgagaagatcattggagtttaggaattggaggctgcagtgagccatgagtatgccactgcactccagcctgggggacagagcaagaccctgccgtcaaaaaaaaaaaaaaaaaattcaggccagggtgtgctgtgggattaacagggttggtgagccaccggtcgttccagccgaggctttatactatagtgtttttttaacaggcggtgctcttttgggtgtgtctcagaaaggtggatatagttctcatgtggctctccgctctgtggttttaaagacacctgtgcagaggcccggaagtcacacagagggggctctccagtcccctgtgttaaatctcccagagccaatgttgtggggagagacaccaagaggccgggacagtgagaactcaccaccttgaagaggtctcagagggaaagctctcagagagacaccagagcgctgtgcgctataacacctcgtgtgcgtgtggacacacccctctgccgatnctctctccgcatgcttttataaaaaaattatgcgaccacacaatatattgtggtgcgccgcgggggagccgcgtggggggaggcgggccctcttcgaatgtggcgccgcggtgatttaaaagtctcgcccggaggagcaaagttttgttgggggggggaagaggggcccccaatgaggggcgcgggctgggtgggaaatttccgcgcggagt

SEQ ID NO: 577787 - DNA, 331 bp, Homo sapiens
gtgagacttgatgcacgatggcccttcatgcaaattgcgaaaatgaaaatcctataaatttataaatgactgatttataaggattttctagaaaatccaatactggcacaatcactgcacctatcactccatgcttgccaacttgagccaatggagctgatagacatgagcctgatccaagataaattcgcttcggtattttccaactacgacgtcaccacccagccacgtccggacggcggtatcctgttgaccctgcgcaacagcgaaggtaaacaggtcaagcgctcgatctcttatcagcagttgcacaccgccgatcaactgacct

SEQ ID NO: 577788 - DNA, 88 bp, Homo sapiens
aatctcgcgccgggccgtacccatatccgcagcaggtctccaaggtgaaaaagagcgagaataaagagagaaagaagaaaagaaaaga

SEQ ID NO: 577789 - DNA, 1020 bp, Homo sapiens
agcggagttaattagtagacatgaagaagaatctaatatacttaaagctgaattaaacaaagtaacatctttgcataaccaagcatttgaaatagaaaaaaacctaaaagaacaaataattgaactgcagagtaaattggattcagaattgagtgctcttgatagacaaaaagatgaaaaaattacccaacaagaagagaaatacgaagctattatccagaaccttgagaacagacagacaaaaatggtcagcagccaggagcaagaccagacgaaccagttacattcagacacgcttaacttgtgaaacacacgactgaacgcctattcagacctgccctaacaacgaacttctcaacacttggagagagacacgtgtcgacgaaacgacgttactctaacgacaaaagttaaaacatcttgagaactcaaactagcaccaaagtcctgccattgactctaccagaggagattcattcaagcttaggttgctgaacttcaagaaaagcttcaggaagaaaaagcataagctttctagaacaacttgaagagcaaagaacaagaagaccgaatgacagcaacatgcaacattgtccgaaccatctttcgattgcggaacaacaagaccaattttaacaactgtcttaacaaagagagaacaatgacgaacagaacacgataataaatgatcttagtgatacagctcgaaccagtacaactgcagcaacacagaaccgggatacacgactcggatcagagtcaactacgctgacgaactcgagacctcggtctagacacacgacaggcaaaaagaacacaaacgctcagacaacgaccgaacgagccccggcacagctaagccggacacagacaccaggaatccgtgaaccctacacagcacatcatggcaacccgcaacacccccagaacaccgacggcacgctagtagcacccggaacctccacccggtgaaatccagaaagacacacgctgcagcaaaaccgcccgaatgcacgcgag

SEQ ID NO: 577790 - DNA, 1726 bp, Homo sapiens
  misc_feature (223)..(223): n is a, c, g, or t
ggccggtggatttcttaatgaagtgtctccgctatgcgttcagtggaatgtctggaggggaggtgtgaatctctaggaggagggagaggggtggacgagaaatagaggggagggtgactggcggggacggggacaatcgagggtaggcgacggtgtctcgcctacgcctcgctgccgtctgggcacatggtggatgtattttagataagagctccaggcagantcatgtcattgactgactttcagctgtgcgtccttgctagtcgcacgactaggctcggcgagagcctgtaatcgtactgctcgtagtgaagtgcacagcagcagtgcggtgagtagcggggcaatcgagccgtgccagtgcgtgctgcgatgcgcagggaggagctgagccagtgacaacgcgagctgtgatgcctgtgtgggagcgtagggctgccagctgagcacgcacgatgaccccgggccaataggccaccgaatgcgataggcataggtcattgtggccatgcaagtcgtgaacacggtcccaaggacctagcttgtcactgcgaactctttgcgtgttcactggctacgcccccgttcgcatgggtggcccgtgcgcgactcgtgtctaccccacttgagtgcctgggccgcacatgcatgtggtctggactcgatactggatagtcggtaagcattagccctggaggccccccggagacatggcacggggctggccgtgccccaaaggatggatgacacgcccacggcgaccatccgcccggataaggcacccacgcacaagcgcactgacgagcccacaacgtccgaacacgacacagcatggagggacggcacacgggggacattaacccacgccgattcacgggggtagggaagcaaagaaagtaaacactaagcggaaggacgatggacccgagacagtggctatgcggcacaaaccaaatacaggggtaggagaaaccaccagatgtcccgcatctcaccacagcaggagacccagcgttgtgtgacgcgcctcgataacaccaaaacctcccgggggaaaccgcaataccgagatgtaaacaccccgggggaatgccacggattcaacgcggaccggcggccgtcagtgaacacgcccggggaagaaaaccgggagcgcagcgaaccacatccataaggagatgagcaccaacggcggcaccggttacgccacaacgatattatgagtcgcgcgcaaggcagctataccagcgcccattgcaaggtccaaacacaccaagagcgacagagatgtggagcaccgcgagcaaaaaccctggggggacacgcataaacaacgggcgaagcgttgcagcccacggagggagagcatccagaaccagggcggcaacaacagccgcagaaagtccaggcaggtagtacagacgaagcgtggcaaagttgagaacaccgacgccggcacagagacacaggggaaaacaccaacggcaacactgagagggaaaaccaatgaccaaaaggtgaaaggatgaccagagtaaagggagtagtaacagggcacacccagaagcagaaacaataagagcagaatacaacacacgagcggtagtagagagacagtagcccctactcacagaaaggaggcatacgacggaggcacacacacggaggaggaagacaccaaccaggaaccacaagacacaaacccgcgcacacagaaaggcgagcg

SEQ ID NO: 577791 - DNA, 275 bp, Homo sapiens
tagaagtgtgaaaacgtaggcttggattaaggcgacagcgatatctaggatagtcagtagaattagaattgtgaagatgataagtgtagagggaaggttactggttagatattgctagggtggcgcttccaattcggtgcactgacgtaggtggcctgcacgtactgttacgcggttaggcgtatggccaggactacttggttgacatgacgtacggctgatggtttcgactaatcactacgtactggggactaggggtgtcggtgtgccttgac

SEQ ID NO: 577792 - DNA, 184 bp, Homo sapiens
cgatgaggtgctccaggcagtcggggtgccgggtgcgcactgccacgtgcaggggggtgctcccgatcttgtcccgggcattgacccgggctccctggttaagcagcagtttgaggatgaccagatgtcctccgcggcaggcccagaacacaggtgtcctgtccagcaagtctcgcgcgtccac

SEQ ID NO: 577793 - DNA, 460 bp, Homo sapiens
  misc_feature (211)..(212): n is a, c, g, or t
aaacgggttcagaaactgccaggggcctcatacagggatatcaaaataccctttgtgctagcccaggccctggggaatcaggtgactcacacaaatgcaatagttggtcactgcatttttacctgaaccaaagctaaacccggtgttgccaccatgcaccatggcatgccagagttcaacactgttgctcttgaaaatctgggtctgaaannacgcacaagagcccctgccctgccctagctgaggcacacagggagacccagtgaggataagcccagaatgaattggaccatttgcagaagcagaagtaaaagcatgggacaagcatgataactcagaggtgacaattttaaacctgccacccctatttccaaaatttggaatcaggtaaggtaacaaggactggagacaaccaacctgtggccccacttattaaattttttaaaggggcccttaaggg

SEQ ID NO: 577794 - DNA, 150 bp, Homo sapiens
  misc_feature (7)..(7): n is a, c, g, or t
ccccagnttcaaattggcgtcagaaaatatgtcagctgccacttcgttaacaagacctctcggggggagtctgtgtccacggcgtgcaatcatcctctgcagctccatgttactgcccacttcttaccacatcgcactatgtacaaccat

SEQ ID NO: 577795 - DNA, 255 bp, Homo sapiens
ggctgctctgtgccaggtgggtacagtggatgatctggctcattgcacctgcacctccagctcagcatctctactcagcctccgagtagctggactgtaggtgcacagcaccgcctggctaattttcgaatttttttgtggagcggtgttcacatgtgccagtctgagtgcatcgtgcgatctggcttactgcagcctcgcctccgagttcagcgattctctgcctcagcctctgagtagctgggcttgcaggct

SEQ ID NO: 577796 - DNA, 739 bp, Homo sapiens
cgcagtggctcacacctgtaatcccagcactttgggaggccgaggcaggcggatcatgaggtcaggagattgaaaccagcctggctaacacagtgaaaccccatctctactaaaaatacaaaaaatgagccaggcgtggtggcggacacctgtagtcccagctactcagaaggctgaggcaggagaatggcgtgaacccaggaggcagagcttgcagtgagctgagatcgtgccactgcactccagcctgggcaacagagcaagactccatctcacaaaaaacaaagaacgacagaaagaattagcacaataaacacttgacagggacatcaatatacaacgagttaccacggaacacaaaaccttaaagccacaaaaaatatcactataacacctaaaaaggctgacaataccaagtgtgggcaaggatgcggaactcccccatatagctggtgcagtatacaatggtcctacatacattggggaaagacgatatccaagatttacttattaaagtcaaatcacacaattgtgctctatgggcgagtaatttcacaaccatttagtttataaggaagacattgaaaacattgtgccaaaaaatcagattgtacgtaaaaatgttcatagcaacttatttcaaaataggcagaaataatttagaggccaacgggtaaagcagtaaccaaatggggtataacaagaaagggagaaatatgaaaaagtaaggggatagaga

SEQ ID NO: 577797 - DNA, 970 bp, Homo sapiens
gggtcctgtaaaatatgagaacccagtgctttgaggcctgtccagcctctcgtgagcccaagagaaatgtctgtcgattctactgccaccaacgccacacatccaagtccacagtgcaattcttagccacagaccaaggcatctgagagtgttttctttgatttctgactccggcctccatggctggtgatggatggacattccctctggaccatgactgaaccagcccctcttgagtctgggtgtgagtcgcagatccctggtcagcaccctggaatccggctgcaccgggcccctcccagcccacacagtgcgttcacctcaggctcccgcacgtgcccagcaggcctgggtccaggtatcccttgagactgggagccccaggggctggaccacctctcctagagcacctccagtccccacttggggacttacctcctcccaaattatctccagcccaggatctgcacagggccctctctccccagtctccaggacgtgattagcaacttcagttcctcaagctggagaaacaagaacagaaagggaagtggcctgtccacaaattccactttcagccccaggacataaattcccccagaacaaggaagaaccaggaggaaaagccacagattcatctcacggacttgacctcaacgtggacgtgttccgggaatcctcgtactatgtaggaaggtgctcccactctgcagatgagacaccaagatccgagggctatgtggcgtcaggacacgaagtgcaagcagagtgatcccagacaactccaaccaaagcggattcgacaggtgctcaggttccggcaaatggacccaacggccaacacacaaactgggaaggaaaaagggacaagacacaaaagcacaagagaggaacaaacaagagagaaggaagcgagacacccaatggcagagaaagggcaaagggaaaaaggagaggcacacgacagatt

SEQ ID NO: 577798 - DNA, 191 bp, Homo sapiens
cttaggcatacttttaatcaagtagaacaaaaatcagacttttttgaacttcatgtatgtttactaggtctatacagacaatactttctatactcatatccatttcggtgtccgtctccagtcagactattattacatcatattagtagtaaatgtaaattaaaatttatccttcggtagttcgtacgatc

SEQ ID NO: 577799 - DNA, 1066 bp, Homo sapiens
gagatccaacaagagaagaataaaatgaagcaagctagatgatcagtgctgtaagaatgaggcacgttgaatttagacggggccgtcgttattcacgtccgtggtatcaggaaggtatagtattctagagctcacgaggacttgtagtagtaacaacaattgacctcgcctacatgtatgatgcgtcactgatgtggaagcccctttgtgcaccgagacttgcgtgcatctggtgtatggtggacaaggtggcgtttagctcagagaggtcaattcgctggtatgacttagctaagtcagtgctaaccaatacactgtctagccagcaaatcgttgagcagacacatatggttcacatgccttcaatgctcgttcttgattaaaggcaagaaatgtcaatctcaatggactggactagacttccgtctagaggatcatcgtcagtggaagcgaagatgtgagacggaaaatggagggcattgcatgttccgaattctaagtattgacagggttattttagatttggaatcgcaaagtatgatgcaatcgagaatcaatcaggttaatagagcaggtcaaatgggccagttgctccgtggagagagattgaatgcacaggaaggaaggaagtgatgatgtaggaatgcctgcagtatcatatcaataagctgtcaagtcatgacatcagagaatcatgtgaacgacagtgacgaagaagtgacgaccgttgactgctgcgcttacagacctggagatgactcaggacagggggcaaacgtcagccatctgggtgacactaacttccattccgaaacttggcggtacattacccagagatcgaggcccaaaaagaggggcccgcacaaggtccaagcacccatgggggcaccccccgcaacacgaggcacaactggtgacacaaccgccaggagaaacccgcgggcgcccacgagcccccaagaaccccggggaccgaaagaagcccccagtgaagcaccgggcagaagtagcagaatacggacacacgagcaagacagcgcgcacaggagcgaacagaaacacagcg

SEQ ID NO: 577800 - DNA, 391 bp, Homo sapiens
  misc_feature (26)..(27): n is a, c, g, or t
agaacaaagtaagaggactcacactnntcctaatttcaaaaccaaacaacaggtaatcatgatagtgtggtactggcataaagacagacatatagatcaacagaatagaattgagaatccagaaataaaccctcacattcatgggcaagtgattttcaacaaagatgccaagacaattcaactgaagtataagaatactcttttcaacaaatggcactgggacaatggataaaataatgaagttggactccctacctcatatcatatacaaaagttaaccaaaaatggaccatagacctaaacataagaagtaaaactacaaaactcttaaaagacaggagtaactctttatgaccttggatttggcaataaaatctcagatatgacacca

SEQ ID NO: 577801 - DNA, 149 bp, Homo sapiens
ttccacagctgctacgtcttctggtaggtggtgcccacgggctctaggtaataatacctactcgcagccgagtcggtgcagcacagggctggagagtagcgccagcccgttaatagagccgctgaccagatggcaccctgcgtatatgt

SEQ ID NO: 577802 - DNA, 223 bp, Homo sapiens
tttttgaaaggctgggtcccaggttgtcccggtgcggaactggaaggccccggtggcttttggccgaggctgggcttttccctggatgaggacctgggaaccgcctgggaggacagccccaaaaagggagcccgagaccaggggtgtcgccgacatgcaaatgggttgttttgggggttgggttttttttttttatcttagatattaaaagtaagaaaaatga

SEQ ID NO: 577803 - DNA, 688 bp, Homo sapiens
tccacaaagacattgtgaacactatacctattattcgtgcgcatgagctggagtcctaggcacagcgtctaagcctccttattacgagccgagctgggccagccaggcaaccttctaggtaacgaccacatctacaacgcttatcgtcacagcaccattgcattttgtatataagtcttctttcatagtaatacccaatcataatcaggaggctttggcaaactgactagttcccctaatcaatcaggtgcccccgcatatggcgtttccctcgcatacacaacataagcttctgactcttacctccctctcgtcctactccttgctcgacatctgctatagtggaggccggagcatggaacaggttgaacagtctaccctcccttagcagggaactactcgcactcctggagcctccgtagacctaactcatcttctccttacacgctagacaggtgtcctcctctatcttatgggccatcaatttcatcacaatcaattattcaatataaaagcccctgccataacccaatacctaacgcccctcttcgtctgatccgtcctaatcacagatattcctacttctcctatctctcccagtcctcactgctggcatcactatactactatcagacgaaactgcaaacactttttgaccccgcgaaagggaacccttttttccaacctc

SEQ ID NO: 577804 - DNA, 311 bp, Homo sapiens
aagtggtgtttgtatttgaagcacgaaaactgggctcctagtgagcacgttcagctttggtatctatgttttttaacattggccagcttgtgttcagattttaaaagtttaacaagaagatacttcgcattctacaataaaagagagagactgagggagatgtatgctcgagcaatgggtgtatcctcttgttcttcaccaaacaaggggaaagttttacattcctttacatccattttacaagtttgtcagacatataccgcttagggagaaaaatatcaaggcctcggttccgggcagtgatgctttga

SEQ ID NO: 577805 - DNA, 642 bp, Homo sapiens
cgtagcaactgaggtggtcctgtttgtgtaactcggaccatggtggcgctccgtgagtcgtcgtagagaaccatgaacgagaggaccatggaaagcctgcaaaaagagtgatgatcgctagtgtgactagtagctgaagagtgagcagtatcgaataagtctctcttatcgggctggactcgagagaacgagtacgtcaatcaagaacttccatattaagttgagtaaaagtgttctcgattgtacaagatttgagtaatattgtgtaccgttagctatctgtaatcatagttccgagttacatatcaatactcattctaagcgaataccggtatagggcagggaatttcagcttgaaaatggcccgtaagctctctgtcccgggacgagtacggtggacatagatataactgaccgtaactcgtggagacgacaggtcgagatgcagttccacagaatacttctggcatgcactttgggaggccacaggcggagcgtgatacacgaggtcaggagatcgagaccgtcctggctcaacaccgtgaaaccccatctctactaaaaatacacaaaattagccgggcgtggtaggtgggcacctgttagtcccagctacttcgggaggctgagtgcaggagaatg

SEQ ID NO: 577806 - DNA, 115 bp, Homo sapiens
gcgaatataatgaggatgtagtcgtggcgattatagaatgagtggcggtgaagcttcagggggtttggatgagaatgggtgttactacgagggctatgtggctgattgaagagta

SEQ ID NO: 577807 - DNA, 364 bp, Homo sapiens
ggggtttttttcccccggccaataatttccgctttaatgggggttaattttgggggggccccgggtttcccccggtttttttaaattttgggaaatatacctccccaatagggcctttaacccgggcttttggggtaagccccccgtggggtattccccaactaaatgccgggggggttttcccccccccccaaatttttggggggcccccttttgccccccccgtgttccccccagggctaacttcccgggggggggggatttcccccccggcccttttaagaatttttttccccgtttgggggttacccattgggtttccctttggcccccttttggcttttttaaaaatgggttattccta

SEQ ID NO: 577808 - DNA, 103 bp, Homo sapiens
ctctacgaggatcccctagtagtcaaagtgccagactatagtcgaggcttcaactaggttctttctttcctccgctgtattccgcctaagcccgttccctttg

SEQ ID NO: 577809 - DNA, 110 bp, Homo sapiens
gaccctcctcagttcccaaagcgctcaaatttacgcatagctacacacagccaggactgtggtactgctgtcttgagtgaatgctcacactctcaaggagtatatgtgtg

SEQ ID NO: 577810 - DNA, 552 bp, Homo sapiens
  misc_feature (1)..(1): n is a, c, g, or t
  misc_feature (96)..(96): n is a, c, g, or t
  misc_feature (109)..(109): n is a, c, g, or t
  misc_feature (130)..(130): n is a, c, g, or t
  misc_feature (142)..(142): n is a, c, g, or t
  misc_feature (149)..(151): n is a, c, g, or t
  misc_feature (157)..(159): n is a, c, g, or t
  misc_feature (171)..(171): n is a, c, g, or t
  misc_feature (188)..(188): n is a, c, g, or t
  misc_feature (192)..(192): n is a, c, g, or t
  misc_feature (219)..(219): n is a, c, g, or t
  misc_feature (276)..(276): n is a, c, g, or t
  misc_feature (280)..(280): n is a, c, g, or t
  misc_feature (306)..(306): n is a, c, g, or t
  misc_feature (356)..(356): n is a, c, g, or t
  misc_feature (359)..(359): n is a, c, g, or t
  misc_feature (361)..(361): n is a, c, g, or t
  misc_feature (370)..(370): n is a, c, g, or t
  misc_feature (372)..(372): n is a, c, g, or t
  misc_feature (546)..(546): n is a, c, g, or t
nttttctcataatctgtttctaagcatatataataacatcatatatattcttaattggagtagaaacgtttttaaaattactgtgaaaaacaagantgagattccaganaaaattgcccccctacagcanatctgcgtttangcccagnnngccgcnnnctcacacctgtnatcccagcccctttggntgtncgaggcagacagatcacgatgtcaggngatcaagaccatcctggccaacacggtgaaacaccttctctactaaaaatacaaaanattngccaggcgtggtggcggctgcctgcngtcccagctactcgggaggctgaggcaggagaatgggcatgaacccgggnaancngcagcttgncngtgcagccgagatgcacgccactacattccagccctagggctacagagcgcagactccgctctcacgaaaaaaaaagagaaatctggtttagaagataggaatgttcattgaacattgacctggaactgtcaattgggactaaagctttttctcatttctccacctaaatacanggaaac

SEQ ID NO: 577811 - DNA, 293 bp, Homo sapiens
cgagactccatatcccaaaagaaaaaaaaaaaaaagattcaaatcttaattggcataagccagtcctagtaatgtcatgccctttggccagtcgttggtcacagggtgagctaatgacccaactctgacaaattacatgtaagaggaattctgctaaaaagatattttcggccaggcgtgggggctcacacctgtaatcccatcacttggaggctgaggcaggagaaatacgtgaagccaggagtttgagaccagcctgggcaatatagcaagacccacatctctacaaagag

SEQ ID NO: 577812 - DNA, 210 bp, Homo sapiens
  misc_feature (33)..(33): n is a, c, g, or t
cggagaagagatagttgggttttggtgagggangttcaggagtaacaatctcactatgttaaccaggctggtcttgaactcttggcacccaagcgatccttttgcctggaatcccagagggggggaggtactaaacaatatttcattgtaattactttttatactttataggtcaagagctctggtttaaagacaaaatttattggaata

SEQ ID NO: 577813 - DNA, 439 bp, Homo sapiens
  misc_feature (4)..(4): n is a, c, g, or t
  misc_feature (10)..(10): n is a, c, g, or t
  misc_feature (418)..(418): n is a, c, g, or t
catngttggncaggctggtctcgaactcctgacctcaagttatctgcccgcctcagcttcctaaagtgctgggattataggcatgagcaccgtgcctctactcttttgttttattttttaatagagaggagatgtcattttgtcacccaggctggagtgcaatggccagacatagctcagtacagcctcgaacccctgggctcaagcaaccctcttgtctctgccttctgggtagctgggattataggcacttgccaccacacttgggctaatttttttgttgttgtttcaaatatttgtagagacagggtcttgctatgttgaccaagctggtatgggtactctgatcctccagccttcagcctccccaaaggcaatgaggttatagggaatggaggccaccgcacccagccaaaantaacattccggggggagcgtc

SEQ ID NO: 577814 - DNA, 854 bp, Homo sapiens
gggaagaaacatccctttgtataaaacagctgtgagaactcaatccgttcatatgacagtgatctagaatgttgacaccgaacagtctagacactagccgtgcgatctcctgggtgccctgccagtattaatgtgtcgtgcgggtattctacaagtcttctgatcactaggacctgttgctggtcgatcgtggacggtggaagctctcagtgaagtcgaatgatgggtgctccgggcaggagggtgttctaccaaggcaagcttgtccctcacgtgtcgcgagggaaccgaccctggggaatgcgcgactgctggatatgtaccatgctgttcagatgcatgctgacactataggatagatgaggcatatcggaagtgtctccagaagggagccgtgtcgcgtaactgaaggcatcagtggcattaccgctgtgggggtgaagattcatggtgaagcaagttcgtttcctagctttcgagacatcaaacgcaaagggatcctgatgactgggtaagctgttctggcagtacgcagatacacacttcgggcttgctctagttgttccctgtgaacgtcggtaccggataatggaaggggttaatgccaggggcaagaaggcaggtgaacactaacttgagaaccggatagaacccaatgaaactgggcttgacaaagggtatgaggcgacgacggagaatctcttcgggacaacgaataatagcatgtggaccctggtggtctccccaactgggcaacatccctattttggctagccatggagacgacttggaattgcacattgtatgagattatgaagatatgaagggagactattcttggactgacgatggac

SEQ ID NO: 577815 - DNA, 123 bp, Homo sapiens
  misc_feature (78)..(78): n is a, c, g, or t
ctagaggatcccgatcacgtgcattgtgtactagaaggtgagaaggagggcgggaagtcagttgagatgggcacggtngctgtgaggaggctgagaggtctgttcagcctctagtgggcttcc

SEQ ID NO: 577816 - DNA, 237 bp, Homo sapiens
acttgggttgacttctgtaaaccatgggtataaataatgcccttgtccgatgcccataaagattgaattgaattggggcgacagccacccactgacacctctcagatcaggaagctaccagttactccagcttttggccaaatccaccctaaccaggatggtcattactgccaagatcatcagagcacgtactgcatgctggacactgttctccgctccatacggaggagaaactga

SEQ ID NO: 577817 - DNA, 371 bp, Homo sapiens
ggcacgaggggtgtgtgtataccgcccgcgtgtgtgatgctgtgaaagcgctcaaggctgtacgctgtgatatccctgtggcatcagaggccgctgtatttccagctggacacgactcatttgaagacacgattagaagagatcagaatggctgtggaagaaggagctacagaaatcgacgtggtgattaacacgaagcttggtgctgacaggccacagggaagccctgtatgaagagaatcggcaggttcgcaagggctgtggggaggctcatattctatattagcgacaggagaacttggaactcttactaaaggctatggcagtatgatagccatgaaggcaggatcagagtttattaagctctctgg

SEQ ID NO: 577818 - DNA, 411 bp, Homo sapiens
acaaccgtacaagccccgtaaaagcggcatttaagctccccacaacaataaaacgatacggcgtactcaatcagtaaaaccaacaacgaaacacccactgtaaccacacaccgcacctgactcacagcaaacccaggccccacctccattcattcatcatcccgccatagcgaccccaacggaatcctcaacttgctggtttgcacccccctaccgagcgtggctgcacacgccgcgcaacattgctctggccgccagatccacggcgtttaatgacgaaattaccgaaaccaataccaagatcaatgccactccccgtcccgcctagagacaacgacgcatcccctttcgtcaccaactggatgttcccagatttcacaatcccgacatgcgcctccgccccaccatacg

SEQ ID NO: 577819 - DNA, 567 bp, Homo sapiens
cacccattctgtgtcttttagtagcattgtgtctgcaggagccctagccctggagacatagctgttcagtgcccttatctctctgtagatggatgttgatgcactggaggtctttagcctgccttgcatgctgcctgctggaggaggagagagctctgctggcatgagccacagtttcttgactggaggcatcaaccctcttggttgatggcttgttctgagccctgacatgtgcttgggcactggtgggcctgggcttctgaggtgggctcctggcctgatcagtgaccctccccgctttcctgggcctctcagttgaacaaagcagcaaaacaaaggcagttttatatgaaagattagaagcctgggataatcaggctttttaaatgatgtaattcccactgtaatagcatagggattttggaagcagctgctggtggcttgggacatcagtgggggcaagggttctctgtccctggttcaactgtgatttggcttcccgtgtcttcctggtgatgctgttaggggtctgtgggttgggtgggagagggcctctgtctgatgtac

SEQ ID NO: 577820 - DNA, 233 bp, Homo sapiens
gcaggtcagtagcaggaagaagtcaagagctcgtatgtataccaagtaactctaggatctttggtttgttttttaattttaagttccaggcacatgtggaggatgtgcaggcttgttacataggtagacatgtgctgtgatgtttggctgcacttatcaacctatcgcgtaggtattaagcccagcatgcattagccatttttcctgatgctattgaaacttctaaaactagg

SEQ ID NO: 577821 - DNA, 264 bp, Homo sapiens
ctgatgcctgacgagttgtcgggcggcatgaagcgtcgtgtcgccctggcgcgagccatcgccctcgatccgcagatcctcatgtatgacgagccgttcgtgggccaggacccgatcgccatgggcgtgctggtgcgcctgattcgcctgctcaacgatgcgttggggatcaccagtatcgtggtgtcgcacgacctggccgaaaccgcgagcattgccgactacctttatgtagtcggcgatggtcaggtgctggggcagggc

SEQ ID NO: 577822 - DNA, 1451 bp, Homo sapiens
ggttgacttggtgatggtgtacacacgggtaggtgggctacgaggcatgagactgcggagaatagggcgtgcgtcctacttcgcgatcatccgagtttccgtgcgatgaccgcgaggcgtccggcactgggggtcctctcgttctcgtattgtctcagggagagcttgaaaaggtcggccaagtccaggtgcctggtagactgcggtttggggtgagcggtcatcaatgagcgacgctgagcacgttggcgccttcgcgcgtctaaggagctaccttggcgcagaggaagtaggtatgtcttggagaaggcagagccgttggcacaagcgcggactagatgcggaagattgcgcggtcaagcgcacgcgtagatgggaagacccgccggcagcgaaagcccccctgtccatgtcgcgaaggcagcggaccatcagccgaggaggggcatcgagccgacgcatcgagataacgcgagagcgagaaacgcagccgagtatgtacccacggtgtgcaataagcgtgttgcacacgtcctcacctgggtggcaatttgtctatcgggagaacacggccatgtcgatgggctccgaagcacgcgatgctctaaaatgcccctgtcgtatctttacttgacagaaccaggacgtccctgccatgtcgcttagctaggcaagaagcctcggtgacaaagctactggcagatgctggctggtggtcagagaagctcgtggacgccgggtgccatccttggcaagttttgcaccccactgtagacgcttagcaagggcgaaacggggccccgttaaccgtgctcacgggactcgctggcccgttgggcccagcattcattcgcaatggcgcattcgaatcgaaaggcaacaggttgggaaagtgcccgttggggcgttcacttaagcaagaaaagggctttcgtcgggacggcattggggaccccccgggaggagaacggacggaaccaatttacacgaggttccccaaagggccgttcaaatggaagtaaggccgggaaggcatcgaaagcacttggcagcgggagacgggggccaccccaagacccccccaactgggggaaggggcctgtttggggaccagcgcgttcccggaccaaattccgaccggcgcccttggtttgggcacgccagacgcccttggcggtttccaatggcagcgttttgggctttcggagaccctagatgtaaacacaaatcccccagaatttcagagacggggtccatgtttccggggacatgaatttcggcgtgttggcacaacaaaccccttgttggaacctcccgggggcacagagccccttcggaaaaggatcctggtcacaagtcctactaccacgagggggaccaccaggagtgccccgcaacgatgcaaccgagaaccccacaatgtgcatagagggccagagcccaaccgtatc

SEQ ID NO: 577823 - DNA, 732 bp, Homo sapiens
taaatcgaaggtcccttacgggtcctgcttccagtgatttagccgttgaccagggaaaaaggggaaaggaaccagccggcacagggaggggtcatctccacaacatcccatttatacacagaactaaacagacaacgcacagagtcactatggcggttaaaatgtgggcagcaggggaagggggaggaccagggggggaagggggatgtggtaaaaaaaatacgggctcccccacaatgggggtgccggggggaaactgggtctgtttcagcccaagaggatttcaaaagatcaaaagcagttggggaaggccaaaaccgtcaagggatggcagggagagggaaaatccagggggtggggggtctgttgggcaacgggggtgaagggatggccctccccttgtggggatcccccaagcccctcgggtctgggcaggaagggcgcagcctgaaacccccaggggcaggtgtggggctgccaaatgctccaggcagggggccaaaagggggctcacaagggctgtgccctccagggagatgacggcatggcccccacagttctcggccagggtgcaggggtcctggacctccctcgaagaagttggctggcactccaggctggacacccggttcagctatctcctgagagggcgtccctgggagccggcgttaaactcatgtgggtctaaggggcggcaaaactcgggggcccagaagaataacccccagatcc

SEQ ID NO: 577824 - DNA, 1476 bp, Homo sapiens
gatcaaatccatgaagctgatacgacagagaatccgagcggtgtctctttcgacaagacttcagcctacctggcttgctctgtccagaattgcaggtctttgctaacagggcagtgctttcaggctacaccacggaaaacctacctatacttaagcgggcagttgcaggagatgcctctgagtcagcactcttaacagtgcactagacgctgtgactgctggcttccgctgaacggagactgagagacacagactacgccaaaactcgctcgcagatacccttcaaactccaccaagcaacgtaccagctcgatctactctcactaacgaaccccaaccacactcggaggccccaaccaccgtgctcggatgactgaacgcggcgccccacgaaacggactcctagcaccgcattgcagcatcatattcctcctccacggcacaggacgcaagccaccatcgcactgacggaccgctgacccccaccgccacttctccacgacacgcccctatccaggaaccctgccgcgacggccctcgcgcagcacaccgacgcccccctacgagtatactagcacaccctctccaccatgcaccaacgaattgacacccacgcattacccttgccacgcggactcacccacgcccacgcaccacacatgcaccgcaaccagatcgcacactacaccccccatacctacggaaccacactcctccgacgcacacaccgaacagcgcgacatccaatacctcccagtagccacacggaaccaccatacccaacgcgcgaccgccgcccgattcccctgcactgcccccgcagacgcccacccgccccgcacccctgcccacacaccccccaacagcccacaccctggccccaaccagcgaacaccctcaactcccaaaacccaccccgcccccacagcgctcacacgacacacaccgcgcgcacgcgcccaccccacacccaacaccaagccacccgcagcaccccgctggaccgcaccacttgaggagagagccccgagcccacgcccacaccacctcccccaagcctcacgacccaccggcgacaacacacccagcggccacagtgacacaacggcccgggacccgacaccgaacaccacggcacagaacagacaccaacaaggacaacacacacccacacgaacccccaccacgccaagcacacttccgcgaacgtcaacacaccacgcaacaacacacccgcagcccaccacaacccacaccacaacacagaacacgcccacccccacgcggacacagagaacgcacaacacacgagcgcaccacccgaagacccaacacacagacaaccaacgcgatcacacccctccacgcactcgccgacaccaccaccgacgcccacacaacggcgagcccgaaccacaagcaacacagccacgacacacgcacgcacacccgcccgccgagcgcacgcagagaccc

SEQ ID NO: 577825 - DNA, 293 bp, Homo sapiens
ttccatctgattcatttttcccatcctcactgctaccatcttgggccttctttatcatgtcaaggtagattgcttgagcccaggggttcgagaccagcctggccaacatggcaggactcccatctctacaaaaaatacaaaaatttgctgaatgtggtagtgcacatctgtagtcccagctactcaggaggctgaggtgggaggatagctgaagcctgggaggttaaggctgcagtgatccgagattgtgccactgccctccagcctgggcaacagagacactgtctcaaaat

SEQ ID NO: 577826 - DNA, 305 bp, Homo sapiens
  misc_feature (15)..(15): n is a, c, g, or t
  misc_feature (19)..(19): n is a, c, g, or t
  misc_feature (144)..(144): n is a, c, g, or t
  misc_feature (171)..(171): n is a, c, g, or t
  misc_feature (185)..(185): n is a, c, g, or t
  misc_feature (204)..(204): n is a, c, g, or t
  misc_feature (232)..(232): n is a, c, g, or t
  misc_feature (297)..(297): n is a, c, g, or t
agttcggcacaggcnggtngctgacccgggtgagaggttcccgcggctcagggaagatggcggccgtgcgtgctggctgctgggttgcgcgcgcagacgccgtggcgcacacgggggtgcgcggggggcaggtccgaggagctncaggtgtgactgatgggaatgaagtgnccaaggccagcagnaactcctgggggagcagcnaaccatcttctcccggatcctggacaanaagctccaagctgacattctctattaggacaacagtgtcttgtgttccgtgatgtggcccccaangttcctgt

SEQ ID NO: 577827 - DNA, 131 bp, Homo sapiens
  misc_feature (41)..(41): n is a, c, g, or t
  misc_feature (49)..(49): n is a, c, g, or t
aatcccgtaaactgttagtccaaggggaacacttggacatnggaaaaancttgtagagagagtaaaaatttaacaccctagtaggcctaaagcgccaccattaagaagcgttcaagctcaacacccatacc

SEQ ID NO: 577828 - DNA, 449 bp, Homo sapiens
aagaaagattcatgtcagacaaatcaggggatgggtaataagaggccagggagaaagaaagaataagggatgactgatgttggcctggaggtgacaagtagaagggtggaaaaacaataatgagaggtcagagaggggaggtgacagactaaatctaagatatgctgagattagagtagcaacaagatatccaattagctccgtcatgcaggcatttagaagggcagaagcaaggtcgggaaaagagacgtgtataaagaaatcccagcacttggggaggcggagggggatggatcactggaggtggggagttggagaccagccgggccagcatggcgaaaccctgtctctactaaaaatacaaaactgggccaggcatgggggcattctcctggggtccgggctactcgagaggctgaggcaggagaatcacttgaccccgggagggg

SEQ ID NO: 577829 - DNA, 174 bp, Homo sapiens
gaactgcagaataccaggcagagtgttcccatttcaatagcgaagcttgcgagcctggaggagctgaagagacaggctgagtctggatgggaagtctggctaagcaaaatctagtacaagtgctacggccataataaaagaactcaatgagaagatcaccaccaggtgattctt

SEQ ID NO: 577830 - DNA, 282 bp, Homo sapiens
  misc_feature (80)..(80): n is a, c, g, or t
  misc_feature (166)..(166): n is a, c, g, or t
  misc_feature (182)..(182): n is a, c, g, or t
  misc_feature (186)..(186): n is a, c, g, or t
  misc_feature (211)..(211): n is a, c, g, or t
  misc_feature (219)..(219): n is a, c, g, or t
  misc_feature (224)..(224): n is a, c, g, or t
ctgtctatcagtagtccatccgcaccgacgccgcctgttcccccgtagtcccctcccatccattttccttccccgtactntgcccaacgttcgcttctctcctggctatcttgcctagcaagcacaaccgtggtcgcgcaaatagtctagcaaaaaagaaaaatcnccggttattgatgtantagntttgtgtatgtcttttccccagttntagtttcnccttncacagaataatcaggaaaagtgtaaaaattcaaaagtgaaataaaaattttatcagtt

SEQ ID NO: 577831 - DNA, 163 bp, Homo sapiens
agccactggcttttcctctccacttcgagaaagtatggagttctggcctgtaaattaggtcattaaccacttcaccttgaaaggagaaaaacacgaagagcttaagcggtttatctatgctcttacagctctttagtgtcaaagcagtgggttcacctaaaaa

SEQ ID NO: 577832 - DNA, 490 bp, Homo sapiens
  misc_feature (16)..(16): n is a, c, g, or t
  misc_feature (47)..(47): n is a, c, g, or t
  misc_feature (75)..(75): n is a, c, g, or t
tttgtgcccaaaaagnactgtcccctattaaaacctgaaaaccttcncccttacccgggaacagtgtttttctanctgttttaaaaccctttaagtgaaaatttcagtggattttgagctgggtggttacaaatatgataatgcaattattaacctgattagttgcaggagccattacttgacattagggaaatggggctttactagcaaaatgttcacaaaatcctttgcttccatggtggataaaagtggaaaatgtccgggcagcccagctttgcaaaggctctcgtggctctgcaggcacctggcatgcaccctccccattgccaggatacccaagaggaaggttcagctctgctgaaggggccaccaaggaagagcccaagaggagactggtgcagttgtcagctaaacctgctcctgcaaaagtggaattgaagctgaaaaaggcagcagcgaaggataaatcttcagacaaaaaagtgcaaaa

SEQ ID NO: 577833 - DNA, 215 bp, Homo sapiens
gcaccatttaaatacagactttaaaaaactccacctttaccctgtaacactgactagatccttgcttcatgatatttctaaaactaagcatatccttcatattttcaactaggtaattttagaagtagatactttaaaaatgaaccactacttagtaattagtggttcatttaaataactcttcaggacactgaaccaagcaggtagagtccagg

SEQ ID NO: 577834 - DNA, 126 bp, Homo sapiens
ttctcctcctcctaggtggtgtttaatagaacttctatcagtcttgtggatctgaagatacagcaattgtacgttggtgcccgcaagtggaagagagagttaggctttcagttggaaccctgacaa

SEQ ID NO: 577835 - DNA, 144 bp, Homo sapiens
tatgcaagaacagttagaccagtcagctggttgctcctacattcagtggctgagcagtgggagctgcagaccagtcttccgtggccgactcagccgctccccaacctcatatagagggcacgtcccatgtgttgtatctgaagt

SEQ ID NO: 577836 - DNA, 233 bp, Homo sapiens
ctgagtagctagaactacaggcgcctgcatcatgctcgctaatttttgaattttagagagagggtttgccatgttccaagctagctaaattcctggctaagcgatccacccaccttgcctccaactgagtgctgattacggcgtgagccaccactcccggctgcatgacgatttgattccagaggcctagctctaaaatccaccctctggcagatgttgccggtaccgagctc

SEQ ID NO: 577837 - DNA, 359 bp, Homo sapiens
agacgactccaaagcatacatcaacaccaagatcaaacggacaagaatacctacaagaaacacggcaacacactcctaaaacaccaaccggacctagttctgtagaagacattaaagcaaaaatgcaagcaagtatcgaaaaaggtggtatctcttcccaaagtggaagccaaattcatcaattatgtgaagaatagcttccggatgactgaccaagaggctatacaagatctctggaagaggaggaagtctctttacgaacctcgtataaacaataagaaaaaaaataatccgtcttatcacataactgtaacagttgatatctggctgtcctatatataatgcagagtgagaactac

SEQ ID NO: 577838 - DNA, 116 bp, Homo sapiens
ggcatgagcatcttacagcaaatgggtggtgagtggtggacccacagtgctcaggagtgctgagatgggccatgtgcgcacattccatttcctgagagcccgcatagtgcttgcca

SEQ ID NO: 577839 - DNA, 104 bp, Homo sapiens
tctcctctggtatcccacctgagactatacatgtagctcaccaatgaggagaaagatgctctatcacccagtgaattcccaggactaggagctgtgtcagatgc

SEQ ID NO: 577840 - DNA, 437 bp, Homo sapiens
  misc_feature (13)..(13): n is a, c, g, or t
  misc_feature (394)..(394): n is a, c, g, or t
ttttctgtcacanagggctcaaaggtttttgtaaagaaaatagaaagctacaaagcagctgttgagtggtatgtgtctatgagtgttttcagcagggttggagacaatctacttttcattcagggctactctaaatgagatcccctgtgttctggacaggagcttagacactgggggacaggtggacaggtcactttacagtgatagatctggtgatagctatttccaaatgtcaagcagtatgccgtttttatgctctgcaggttataaaagcctgttcattgtgaaccttgtaacactgctggttatttctaattaaattatcagatgctaacatgctcccattcatgatttcatgacaatattggcttcttcctgtattggggttttagtntaacatgaataaataccaccatttgaaagctcagtttgttatt

SEQ ID NO: 577841 - DNA, 127 bp, Homo sapiens
ttcatgtcgagcgctttcatgcctatgatttgtggccatgggttctgaatccaggagtctgagagacatgtgacttgaaaagtatgaagcgcagatacattgctccagtatcatgagtaaagagggg

SEQ ID NO: 577842 - DNA, 126 bp, Homo sapiens
  misc_feature (3)..(3): n is a, c, g, or t
  misc_feature (87)..(87): n is a, c, g, or t
  misc_feature (91)..(91): n is a, c, g, or t
aangaaggagatatttatgcagtggagatagttggtggtgctacacgaatcctgcggttaaagaggagatcaggaaatttttcggtnaagnacttagtacaacattaaatgctgatgaagctgtta

SEQ ID NO: 577843 - DNA, 332 bp, Homo sapiens
tggtataggagtgtgtttactttgtaatcattcacttagctgcatacttgtgattagtacaagtttcccatatattgttcaagttaaaaagttaattaaaaacaagtttttttattttgtgggacatggtctcgctctgtcacccaggctggagtgcagcagcacagtcttggctcactgcaacctctgcctcctgggcttaaaccatcttccccacctcagcctcccaagtagctgttgaccacaggcaagcaccatcatgcctggccaattttggtatttttagtagaggtggggtctcgccatgtagcccaggctggtctcagactccg

SEQ ID NO: 577844 - DNA, 162 bp, Homo sapiens
gagaaaggactatattggggcaagagtggaggaagtagaatggtcaggacacgaatgcagtaatccagaatagaagtctgatgtggctggtggcaagtaaagcaacttaatgttttcagattcatgatatattagtattttggagggaaagccatatgagac

SEQ ID NO: 577845 - DNA, 746 bp, Homo sapiens
  misc_feature (41)..(41): n is a, c, g, or t
  misc_feature (162)..(162): n is a, c, g, or t
  misc_feature (176)..(176): n is a, c, g, or t
  misc_feature (226)..(226): n is a, c, g, or t
  misc_feature (316)..(316): n is a, c, g, or t
  misc_feature (323)..(323): n is a, c, g, or t
  misc_feature (334)..(334): n is a, c, g, or t
  misc_feature (345)..(345): n is a, c, g, or t
  misc_feature (365)..(365): n is a, c, g, or t
  misc_feature (385)..(385): n is a, c, g, or t
  misc_feature (389)..(389): n is a, c, g, or t
  misc_feature (394)..(395): n is a, c, g, or t
  misc_feature (399)..(399): n is a, c, g, or t
  misc_feature (409)..(409): n is a, c, g, or t
  misc_feature (417)..(417): n is a, c, g, or t
  misc_feature (434)..(434): n is a, c, g, or t
  misc_feature (455)..(455): n is a, c, g, or t
  misc_feature (465)..(465): n is a, c, g, or t
  misc_feature (550)..(550): n is a, c, g, or t
  misc_feature (558)..(558): n is a, c, g, or t
  misc_feature (567)..(567): n is a, c, g, or t
  misc_feature (587)..(587): n is a, c, g, or t
  misc_feature (593)..(593): n is a, c, g, or t
  misc_feature (605)..(605): n is a, c, g, or t
  misc_feature (609)..(609): n is a, c, g, or t
  misc_feature (639)..(639): n is a, c, g, or t
  misc_feature (670)..(670): n is a, c, g, or t
  misc_feature (678)..(678): n is a, c, g, or t
  misc_feature (731)..(731): n is a, c, g, or t
gtttcaatacatcattagttctgttaagacataagttactnactttcaaatccaatacttgaacagtttcctctgttcatagtttagcagggctaattagcataagatgctatttattaagaggtatatgatgctgagttttaacagttgctgaagtttggnatttttatgcagcnttttctttttgctttgataacactacagaacccttaaggacactgaaaanaagtaagtaaagttcagaaacattagctgctcaatcaaatctgctagcataacagctatagtaattaaaagcgttaaaaaaaagtgttgnaatctgnactagtatagnccgctcctgtnaggataagactgctttggancagaaagggaaaaaacagcnttgngtttnnttgngctgggaggngggaaggntgagttacctggttgcntctccctggtgattggcaggncaggtaaatnccagaacatattccaactcaacaactctaggtaactttatggaggtggaagctgggttagttcatgctaggtggctgtagcactnacctcatntataaaacncaaaacacttaaatactgtnatctangtcttaattgcnagcnatactgaggatttttttttttttttttatnttttggctatactttcattccaaaagaaganctgaattnatgcttgatttacagcaccagtttattattagtgaatgaagtatattcttggnagataaataccagat

SEQ ID NO: 577846 - DNA, 934 bp, Homo sapiens
cttccctgcatctggccttcccttttgtctcagtgggatagatggaattgtgaaatggcatctcccagaacccctgcccgtggcaagctggaatgatcgtgcctgcccagcctcgtcaccagagggactccttggtgtcctggcagtgcatgtgccagcaggtggaaaactctgtgtacctgtgcccaggtgaatgggcgcagggtccgtccgttgcccttgtccctgcgggggggacccacgtagttcctggcattcagcgacttgctcttagcattcgtcggaaggttacttcaacgtgccttgccttttcaccaggccttgccttctagtgtcatgtaggacatttgtaaggttatattgatatggtcgggtattataaaattggcacagaacactaaagaccgaaaaggcgtggcactcttgttcgtccttgaaagctttggcttgtgtgaactgcctttcccacttggtagaaagagcccagaagcagcccgtgggccatgtaggatggactctttcatccttcagatgtattgtaggctttgagtttctctgcatctgtccaccccgatgtgtatataagcccaggccctggctctggggtggtcacctcgtcagtgcctttgtgctggaggagaggaccccccccgctgtcagtgaggtctcttcctgttctgcacccctctccccatgggactttggagaaaactgaactgtacagaccctggacaagtgctgttaacagatgcaagctttcttgatcaagcttggagaccaaaaaaacaagcaaaaaggtggggggataagaaaataccttgagggccagtttcgcggtcacgttttgtacagggcccaaggaagatagaaaggaccagggggtacaagcgtagggaaacgatggatctggacgccctcgggggaagaggacaaa

SEQ ID NO: 577847 - DNA, 1026 bp, Homo sapiens
gtgaaccatgatcacgaaaaaaactctacctctctatacataatcgtccctagcaaaatctccctataagttataacattcaccaggcacagagactaatcgagtagtattatatcttctatcgaaatcacagcgtatatccgccaagctgggcgtatcatcacccgatgcaggcaaccaggcagaacgcctgaacgcaggcacatactatgctattctacaccctaagtaggcgtcccgttcccgctacgtcgatcgccactaattgtacgacgtccacgaatgacccctagggctacattaaaacattctaactaacttcaaccctcaagtgcgccagagaattgatcacagactccgtgtaggccgaacaaacttgaatgatgaagctcagctgtacacgaatagcttctcatagtgaaagatacctcttgacggactccacttaggactccctgaaagcccatgtcgaagcccgcatcgctgggtcaactagtactttgccgcagctactcttgagcactaggcggcgtagtggtataatacgcctcacgactcattctcaaggcccctgagaaaagacataatcataccccttcctgtgtactatccctatgaggcataatgatagcaagctccatctgcctacgaaaaaacagacctaaatcgctcatggcatactcttcaatcaggcaaataggcctcgtagtaacaggcattctcatccaaaccccctgaagcttacaacggggcaggcattctcaataagtcgccacgggctttacatcttcatactattctggctaagaaagtcaaataacgaacgcctcacaggcggatcatgaatccctttcaaggactgcaaactctaatccaataataagcttgtggtgacatcttaagcaagcctggtaactcggttaacccccatatatactatgtgaggaccctgtggagacacaggttcgctgtcaatataagcctagacaggccaataaagcacagccaaacccctaattccacaag

SEQ ID NO: 577848 - DNA, 668 bp, Homo sapiens
ggagtgagcccagcacagatggccacaggcaggcccccagcttcaggcccaagggcctggggcggggtggaacagtcactgggtctcagattctgagactgttgtttagcttacctttctgctaggattggcttcccgcagagggcagggcccatcctaagtcagacttccaaggtcccacaaaggtggcttgtgggaggatttggaaggagctgcattgtgggcggggagtgtgtgggtagggttcgtaccagcaacgtatgactaggaactgagcccagtgaaagggggatgtctgcctggtgtgtggctggtcagctgggacgtgtccatcatcaggggaagatcatacacaggtgcactcagactgcccagggcctctgggacacttgccttgactgtgcacacttgccttgaacgatcgcgagtcagagccagcatggtgctgtggtctctcacacaattgagccgtatgtgactctgttggctctaagactggcgcttgaagccgcctgaggcctatgcatctgagcaagtgggtctctcccttgagcagcaggagtgggtgccagacctggcccgaggattgcccaggaagcccagctatggtctagccagcataggcgttgctagttccttcttggtcagaggtagctgcagagggggga

SEQ ID NO: 577849 - DNA, 263 bp, Homo sapiens
ttggtcgctctgacggatccccggtcagcccctggttgctcctgaggttctgaaggtcggcgtttgatgatcagccgggctcccctggtgccaccctcttctcgtacttcgtactgattacgattagtcgggtgtggtggcaggcgccatgttatccgccactactcgaggaggctgtaggcatggagacctcacttgccacccagggaagtgaaaggtcgcagtgtagccaggacttgcatcactagcactccacgcctggg

SEQ ID NO: 577850 - DNA, 966 bp, Homo sapiens
  misc_feature (44)..(44): n is a, c, g, or t
  misc_feature (118)..(118): n is a, c, g, or t
  misc_feature (122)..(122): n is a, c, g, or t
  misc_feature (124)..(124): n is a, c, g, or t
  misc_feature (145)..(146): n is a, c, g, or t
  misc_feature (155)..(155): n is a, c, g, or t
  misc_feature (167)..(167): n is a, c, g, or t
  misc_feature (193)..(193): n is a, c, g, or t
  misc_feature (199)..(199): n is a, c, g, or t
  misc_feature (201)..(201): n is a, c, g, or t
  misc_feature (205)..(205): n is a, c, g, or t
  misc_feature (210)..(210): n is a, c, g, or t
  misc_feature (220)..(220): n is a, c, g, or t
  misc_feature (222)..(222): n is a, c, g, or t
  misc_feature (274)..(274): n is a, c, g, or t
  misc_feature (289)..(289): n is a, c, g, or t
  misc_feature (293)..(293): n is a, c, g, or t
  misc_feature (298)..(298): n is a, c, g, or t
  misc_feature (309)..(309): n is a, c, g, or t
  misc_feature (312)..(312): n is a, c, g, or t
  misc_feature (337)..(337): n is a, c, g, or t
  misc_feature (340)..(340): n is a, c, g, or t
  misc_feature (359)..(359): n is a, c, g, or t
  misc_feature (365)..(365): n is a, c, g, or t
  misc_feature (374)..(374): n is a, c, g, or t
  misc_feature (392)..(392): n is a, c, g, or t
  misc_feature (403)..(403): n is a, c, g, or t
  misc_feature (414)..(414): n is a, c, g, or t
  misc_feature (417)..(417): n is a, c, g, or t
  misc_feature (436)..(436): n is a, c, g, or t
  misc_feature (580)..(580): n is a, c, g, or t
  misc_feature (680)..(680): n is a, c, g, or t
  misc_feature (689)..(689): n is a, c, g, or t
  misc_feature (711)..(711): n is a, c, g, or t
  misc_feature (857)..(857): n is a, c, g, or t
  misc_feature (882)..(882): n is a, c, g, or t
  misc_feature (910)..(910): n is a, c, g, or t
tcttcacctgcctggtcatcctgtttgcctgtgaggtgccgccngcatctggggctttgtcaacaaggaccagatcgccaaggatgtgaagcagttctatgaccaggccctacagcangccntnttggatgatgacgccaacaannccaaggctntggtgaagacantccacgagacgcttaactgctgtggntccagnanactnactgntttgaccacntnagtgctcaagaacaatttgtgtccctcgggcagcaacatcatcagcaacctnttcaaggaggctccnccanaagancgatgacctcntcnccgggaactgtacctcatcggcatngcngccatcgtggtcctgtgancatgancttcgagangatcctgagcatggtctntgctgtggcanccggaacagcnccntgtactgaggccccgcagntctggccacagggacctctgcagtgccccctaagtgacccggacacttccgagggggccatcaccgcctgtgtatataacgtttccggtattactctgctacacgtagcctttttacttttggggttttgtttttgttctgaantttcctgttaccttttcagggctgacgtcacatgtaggtggcgtgtatgagtggagacgggcctgggtctttggggactggagggcaggggtccttctgncctggggtnccagggtgctctgcctgctcanccaggcctctcctgggagccactcgcccagagactcagcttggccaacttggggggctgtgtccacccagcccgcccgtcctgtgggctgcacagctcaccttgttccctcctgccccggttcgagagccgagtctgtgggcactntctgccttcatgcacctgtcctttntaacacgtcgccttcaactgtaatcacnacatcctgatccgtcatttaataaagaaggacatcaggcatgctaaaaaaaaaaaa

SEQ ID NO: 577851 - DNA, 1414 bp, Homo sapiens
caactgtaccccggctggtccgcgcgggataactatggaaagaagaagaagaggaaaagggacaagcagccgaggagagaccagaagaccaaacacaccgagttaaaacgaagcacgcagggatggtaagactacttaagagtcaaatgactagccctgacggagacagatgctccatggagaaatgcgggcacgatgactggacgaagaccgaacagagtgtagtggtagcaaaccggtgcagggatgaaaaaagagagtgcgttcgttacatacgaaggtgaatggcagctgcctcaagcccacccacgagacaatatataaaggcaaaccaagagaacgactcaccgcgcgccaagcgccaaatacttatggaagtgcgtgggcgaccttgggagaaagagcgcggaacgctgaattggggaggggagagccttttgtgggggctttgttgcccaattgggcgcgcatgggactctctggggggacaaattgctgatggacagaaggaggatcctcacacatttcttgggctggatgctgcactgtggtggctctgcaaggaatgtcgcggcctgcgggctaaaagcacaactttgtgccaaacggatgggcacgccaatcgcgcaagtgcctgcaaatgcgcccattgcggacacatcagctcagaatagaggctccaaacagctgggcgccacgtcggcaacttgtcacttgcgtggccaacaactgtcttaatggcgacggctgccaatctaaagctcttgtcacgccacttttgactttgttcacatttcatatccggccaacaagagcggggcgtcctgccaggcgccagtgaggctctgccaagggcggccgtgcgaggcagccttggagtcgcaaaagggggggcttgccactcgcggtggcaaaaaggcacagtttattttcgaaaattggctacatggcgtaaatccgaatgtccacactttgggctgtcccaaaaaatttttttccaaattggcgcggcaatctttgtggctgcggggcgaaaacactttggctttttaaggggtcgtgccacagttggcgtcaaccgggcttgctgtcaaacattgcgcaatctggtgccaaggaattttatttgagggcgagcacaattttacacaatttactggccaactgtgggcgaacagtgcgggggcataagcggggtgggattttttgtgggcgaatcttgggatgcgccagagatggggggacaatttgagtgtcggggaaaatctgtttccttttattaatttcatagagtattgccttggtcatttgtctatgagagattttcaataatagagtgcttggcgaacacacataatctggggggatggcgataaaggaaaatttaaaacatacttcattgcgggccgagact

SEQ ID NO: 577852 - DNA, 1327 bp, Homo sapiens
gagatggcggacgtgggggagataatcgagggctgtcgcctacccgtgctgcgggggaaccaggacaacgaagatgagtggcccctgggcgagatcctgtagcgtgaaggacatcagtggccggaacgctatttctacgatcctattagcattgacttgcaacaaacgtctggatgcatgggtgacagcatgagcgtgctggtagcctaaagaatgatccagttccccaaagaaagaggccaagatccccactaagacacggactgccatgggtccctgtcctggactctccagagaacgagaggtgacaggcctctggcgcaggctcgagatgggaagaccttgcgcaatcccggtccaagatcacagtccgcattcaacctgtccaaggagacgggatggccatacccggtggcagagcctgaacagtcgatctcctccagcatccatggcactgagagacacagaccatccgacgtcaagcggaaacagtgaaggatggagagctgggttaacaagcaggaaagcatccaggttgaccaagcagaaggaggaggacaccagggactacgagagtatagaaaacgcacaaaaaatgagagcaccgacacggatacggggcaagaggggcgacgacacaacgaccacagggacacggagacgctggacaaaaattcggcaaatccggtcaccggggcacaccacagaattcgaagtgaacgtccgcccagggaaacacgcatacgtgaattgggaaacatcaccctgggaagaagaacacgccaagcggccatagcacttggaccaggccctggggtgctcctagactcgagaacagaccaaacggaacgacacaagtcagatacgaggcagagggcattgaaatgtagacaagtttagaaagagtagaacattatggcagagagcatggggaggaacagggaggaacgggaacaataaaagagccaggagaggtaaagatgacatacaaaatggaataaaagacaaaagaggagaatagtaacgcgcacagaatgtgcgcacgattgagacaatacgtaaagcacaacgatagaagagaagattgacatggcgccacgtccacaaaggtaacggggaagcaggagaagcgaaacacaaaagagggatcgtaacaagaagggagcagtaatggaacccagacgggggaagcaacgaaacggagaagagtgctgcaaggagacacgggacagagagaaacccgggcaaacggggaccacaccaccactgacgtatgagaacaggagcaagaactgaacggacacaaggcagcgagcaccccagcaag

SEQ ID NO: 577853 - DNA, 387 bp, Homo sapiens
cgcacgtgaggcggcactccactctcggcgggccccgggcctctttacgcacgcacacagagctgtctccgcacagttggaggaacgtaggagggacccccacccaaggatgacacttcaggaaggggactgccgaggaagccagaatgtgtacctgacaaagggaacaggcgacagtgatgagatggccccggaggccccacagcacacccacattgatgtgcacatacaccacgagactgtcctgtgcaagatcctggttacctggtggtctgcgctgaggccccgggccaaccaggccaggggcagccggctgttgtgggcctcgtgggtgatgcagcgcgctggggatcttgagtgcgcacctaggaggatttttctacttcg

SEQ ID NO: 577854 - DNA, 354 bp, Homo sapiens
gtgcccgggcagattgttgtaaaagtaggaattccaaaggatgagaaagacagggagaaacaacagccatgatacatcggaagctgatagaagagtggcaaaagtgactttatagagacgctaagacaaactgaatcctaggccagcaagggggagagtcaagcaccagcctgagttacactccaaaatccacctctccccttccccaaaccctaacgaattggtggcaccaaatagcttcattaggggtgaaacagggatatgaaaataagactcttttcgagtacgttcgagaagtagtgggaccccagttccctccacagctttaggtgactgcctttccctcattctggc

SEQ ID NO: 577855 - DNA, 1598 bp, Homo sapiens
cgtccctgtcagtgtttgatcgtgtgtgcctgctttgttggtgttgctctccgtcttctctcttggtggtctgtttggttctgcctgtcctgttgctctctgtagtgcggctgtggtctttcttcggtgcctctctcttttttcggggggttcttcctccctatatttatgggggcttggttcgttgctttgattatgctttggggtgctccttctgtgttgtcctctcccactccagcttgagagggctcggtggttcttatttttccacggggggtgcacctactaacgggtgtcaatctatttcttggcgcccccccttttgcgttggtgtgcccgccccgtgtttgctgacagttggggggtgtcaccccactgtggttagtgttttgttgatgacaccgctctgcttcagatgtgtctcttttcgagcctaataggtcttccttctcttgtcatcaacactaatcacaactctggtgtttgtgagcaatcccccccttgggccaccaataggggtcatagtcctacgattgaggacgctaacctttttgtgtgttatttcccttgtgtcacaggatccttcctattgttcacacacccgtggttccatctggcgccagttttcatctttgtcgccttacccccaccgatagggaacttcgttggcgagtttgggcccccctctccggggggaaaactcttgttgggcggtggttaattggtctccccgcgggggcttctttccccaggagacaattccaatatccccctgcgcttcttacttgtgggcaccctctgcacacagagccttgttggggctaaagagtgctcataccccttggagacttgtttactggggtatagatcttcaccttggcaactgggccctttccccgtgtgcgcaccccactgcccacaacgtgttacacagttggtgggagccctgagactctgtcccgctgttatagaataaatcgctctgcgccagaatattcgagtcgagacacttcacacagagaaggttgtgggttgaaacgcacgggccgtttctggttagggcgccccccctcttatagaggcgcatactcctgggcgtattacacacatgggagacgcacacacagagtgtgttctttctcctctgtgtacatttcttacacacagcgtgtacacacaccccacatctcttctcacaccctgttgtgacacctggggggctgggcgcattgcgccttctcaacgagccccctttgttctaaagcgtcaatttccctggtaatgagccacccgaaatttgggtaacaagccacacagggtgtgtggagccctcacatggcgccacacacatggcgctctcacacaggaggtataagaacccctggaccacccagccccacggcaagagcaccaagaggaagagagagaccctcaactgctggggagttccctgccaacaactcagttcccccacccaccacctgaattctcccctccctcaacacgttgccactgtagaccccttgaagaggggaggggcctaggggaccgcaccttgtcatgtacccatccaatataagtaccctgtgctcaaccca

SEQ ID NO: 577856 - DNA, 1595 bp, Homo sapiens
  misc_feature (282)..(282): n is a, c, g, or t
  misc_feature (345)..(345): n is a, c, g, or t
  misc_feature (1032)..(1032): n is a, c, g, or t
  misc_feature (1102)..(1102): n is a, c, g, or t
  misc_feature (1162)..(1162): n is a, c, g, or t
  misc_feature (1277)..(1277): n is a, c, g, or t
  misc_feature (1383)..(1383): n is a, c, g, or t
ttcctccttccttagtagtacaccagtggtgttgctacgggagctccctgctgagtgctaggtggagacacctcactcttggtctcctcccacgaggggtcttttcttcctccgcgttcgccagaaaatttgtggggcgccccattcgccaactgttgtttctggtcgcacgagaatatcctgctttttcaccccctgggggggtttttcataatagggagtggttatatattctcccccaacgtctcctacttctcgcccgaagatatttggtggggggancacacgccttgatgacacacggggtaccccatccttggtgacccgcgtggttgttgtcgcccngttcgcacacgcacgtagaggggccccacttgaattgccgccccccccccccctggttgtcgcaccccccccgccgcctctcataatcaggggtgaggtataatgaggctaatttaatctttttcccgccgctttgggtaagaacagataaatgagagtggtaagaacaaagggaattataaagtaggttaagcagcctgcgcaactatgtgtcttcttagagagttgaatatttgttgggaggcgcgcccccccacaatatagtagtgtggccctgcccactatcccttctttttttcgtttttgtgtttttgttctacacatagggagattgtggtttggggtgcgaacacccatcgggagaccttttggtgctttattatatagagagtgacaacaccggcggtgatcacagcacgtctggtttttccttcgggtgcttctcaccatcttcgagatgtttgtacacaacatttttcgtcgaaaaaggttttttttgtcttcggaaaaaaaattggttgtctctctcacatggagatttaataagatttccacgcgcgcttattacaaacgcgtgtttttggccctcgcgggggaaacacccctcgctcacggagggacacacacatgcgctcgttggagaggtttcccccacacacgcttccacaggcccacaactttccttgncgcggcacacagagagagaagggtttctataagctttttgttgccgcactcccaccgccactctatgatngagatatatttcacgcgagactcgcgtgttatacttctcggtttataaagagagagcggngttttctataggagagatttcttgggttcccctctcttatagaagacacaccgctctatactctaatataatatgagagtgagctcttgggagaaagcccggtgtgttctcacangaggtgtataaaataatagcctcgtgatattctgagatagagtgcactatcctctctctaaccactctgtttatagcacttgtgattgaatagtcctctccctcgncctctgtggtgtctcattatgtatatttcactatcttctacacctcgcacaattttgggtgctcacaatttttactgtggcctcttgtgttttaactaagtgttctcgctcgttgcacaaaaagaaagaaacactttctctgcctcgaggttttaatttttgtcccaagttaattttaatctataccattaaaaccctttgctatccaacca

SEQ ID NO: 577857 - DNA, 110 bp, Homo sapiens
caggtagttgcgtttcttctcaggtagttgcgtttcttctcgggctcatcagagccgctgccaactgtcccatttcaacaaggggtcttaaaatgaacattcatagaatc

SEQ ID NO: 577858 - DNA, 1530 bp, Homo sapiens
  misc_feature (1530)..(1530): n is a, c, g, or t
agcgggccgcgcggggggcgggcggcgcggagtaggtggcgtgcggccatggccgaaggcgtccccgtgtccctggacggtacttcgtgccacgtgctgctcctgtggaggtctgtccgcgctgccttgccggaattatagtctgtcacaatgtatgcggagatcgtaggattagaggtcgaggcagcttcctggaagatgaccgaggagcacgggcaaatgggttcttgccccgcttccaacatgctccccacgagagccagatgcgcggcctacctgctcggtgatgccccgctggaccgagtctcctttgtgcgtcggcatgcgccgcaggtggcttgctgggacaggtttgtgcctttcgggcgagtcttgcgacttgacctagcttctcgaaggagtccccgcgacgttcctcatccctggtgggctgcggtgtgccttggacggaacagagccagtgtatacgcgcatggaaggatagccccgggaccgtgaacgaacgacgatcgcattcgcgttcgcacagggccatcccgtagatactggtcggcgcccgggaacaatgacgccccccaggagaccccatagctagtatcaaagcagcactagtcccggtgcggaggcacacagaccatggggcctgagtccacctagaaaagggccttgtttcccccagcaaccaggccattggcggaaaggcgcgactccagtccacaaagcctaaggccttctggatcacagagcggcgcatgtaccaggtccaatcgtggccctgggccacacgcagataacaacccaatagccctttggtagcgccccccttggagcgagacaggttccctatagcccagcctccgagaagcacccctttattgcgacagccttaacagccactagggagggtggtcccccaacaatctggggcccacttggtcgcaatttgctagcaatttggaagttcctaacccgagcaacggacttttcgcgccttccaatattccagcggcttttgcggcacacagcaccacagaggtgaggactccgccccacaacataacgctagggggaccacggcaaaactaactcagggacagcaaagagtaatttccccaaggaggtcgcgcagatacaccacccacagaatccaggattcccgcacgcagacatccacaagctttgcagaaggcagaacgccacacaggcattaggggcgtctgcccccggcgagccgactccggcagcagtgtatccgccctgtagttggtgtgtgccaccaggcgcgtactgcgatcctatagatcgctctgggccttgtcgtgtgatctgtgacgccaccggtatgtgccgccggctgcatcaccttgaggccccccttgtcgcgaatgccgcacagccggtgtgtctcccacatgggcaaacggtgggcgtgtccgctctctcgtgtgtgcccgcgttgatccgatgtgcgctgcccggcccggggacgcatcggccgtgtccccctcgggttactggccggcagaaccn

SEQ ID NO: 577859 - DNA, 742 bp, Homo sapiens
gacagagtgctgacgtccggacttcggagcgggaagtggctgctgtgcagcgattaactggacgagtcaaatatgcgtgcaggtaggacgaaacgtcgcaagacagagttctgcatttgagtcgacagttgtaacctcagttgcacacttacgatctgcctatatgcggaaggagtccagaggtccgatccaccatgtaccctttgggggagcccccaaaccgttggttcttaccccaatggggttctcttgtagcgggggcccgggaaccgatcagagcgtccatgggagactctcggcctttaggaagacaattagagtcttccctttatacaacaacccaagaggcactccgtggcgctcactcatacttttcaaaacagcggcaattaaccccgaagaaaaagggtgccccaatcttccgtagggtccacttaaggggtgaacaataagatgggggagaaatagagcgaaccaaggtggttcacattggtctgcaaagtggttacaatctttaatgttggggcaaaggggacaattttccccaagtttgagaagagtgcaggaaggtgttatacacctataggtttcgtgcgcagctttggaggggaccaagtgttgaggacgaagaacgttagttgttggttaacttagagcgtggataagtgggtataaaccgggcggagccaaaatttgtgatgagggagcggataatatccgagggaaaaaaatatgagtcgtg

SEQ ID NO: 577860 - DNA, 124 bp, Homo sapiens
tcggtaccctaatctgcatcatggtgcagttgtttgaaaagggctatggcaggatgctgctgcattgccatggaagccattgcttttgcacgtaaccaaggctttgacgtggtgctggtggaca

SEQ ID NO: 577861 - DNA, 381 bp, Homo sapiens
  misc_feature (41)..(41): n is a, c, g, or t
  misc_feature (104)..(104): n is a, c, g, or t
  misc_feature (133)..(133): n is a, c, g, or t
  misc_feature (374)..(374): n is a, c, g, or t
ccctgctctggccctaaactgcctttgggctttgtgtaatnaaatcttaagtcccttggcggttttttccttttagatttttttcccatataaaatctcctatncttgccacacatggtggccgtgcctgtanatccagcacgctgggaggctgaggcgggtggattgcttgaggcccaggagttcaagaccagcctggccaacatggtgaaaccccatctctactaaaaatacaaaaatcagtggggcctggtggcgtgcacctgtaatcccagctactcgggaagctgaggcaggagaatcgcttgaacctgggaggcagaggttgcagtgagctgagaataggccactgcacttcactccaggatgggcgnaaaagtg

SEQ ID NO: 577862 - DNA, 692 bp, Homo sapiens
agcgtgtggctgtaatcccagctactctggaggctgaggccggagaattacttgagcctgagaggcggaggttgcagtgagccaagatcgtgccattgcactccagtctaggtgacagagactccgtctcaaaaaaaaaaaaaaaaaaaatttaaatgattttgggggggtttgcctgtaactcccagcgaattggggaggctgaggcaggagaatcactttgaccccaggaggtggaggctgcattgagccgagattgcaccacttgcacttccagcccgggtgacagcaagactttgtctcaaaaaacaaaaaaaccatcctctgcaaaagccaattctcagtatctcctaaaaccttgctgtttttggctggttttacaaactctgactcagtgaataaacctctttatttttacacaagaaagagggtgatatttctgatagaatgttttctgacgaggccatttgggttacctcccttccccagaactgtactggctgagttatatggctaaattctgctgccatttttctgggatgtgtggcttaacctagaattatattttcaggcatccgtgtacaaggatttgcggagaattgtttgacgatggagtgggttttaccctttcaaagtcagcctgatcttttgggagacaacgtctgtgatacgttattcggattgagagtaga

SEQ ID NO: 577863 - DNA, 270 bp, Homo sapiens
  misc_feature (2)..(2): n is a, c, g, or t
tnatcccaacacacctttcatagcatctcagaaaaaaaaaaaaagggctttggagtggcagaagcaccaattaccggtaacaacactagcaagagggcaagaattttcttctaccaccggtaaccatttttaagataggaagatagttaccagtaataaaactatcccagggattttaccagtattgtatctactcggggaagaatcaaaggtaactttccatttatcgtggggtgggggcgataaccatcaggggtacccggagctcga

SEQ ID NO: 577864 - DNA, 185 bp, Homo sapiens
tctacaggatctcatggtcgctcactgatatgccaggggtagatgcgaatatatttgccaccgaccttccgttaacactgacgccaagccggtgaagcaaaaaccatgaaggatcaacgttgaacggagccaagcccttagtgaagaagtagaccaactcctcaaagtcataacaccacacaatt

SEQ ID NO: 577865 - DNA, 305 bp, Homo sapiens
  misc_feature (43)..(44): n is a, c, g, or t
  misc_feature (203)..(203): n is a, c, g, or t
gatctaaggatccgcggcactgcttcggatgtggctgcagccnnatccccgccctgaaggctgcgtccctccagtgcctcgcagattagtcaggatgcccacttagcactggccacggggccttgctctgtcccgggtccactctcatccccgtgtggtgatggacctctgtggacaaatgcttttattttatttattttttngagatggagtttgtctctcgtcacccaggctggagtgcagtggcgcaatcttggctcactgcaacctctgtctcccgggttcgagcgattctcctgcctcgg

SEQ ID NO: 577866 - DNA, 140 bp, Homo sapiens
acctgtagcattaaagtgctgatttttatattttaaaagacgaacgaatattgcgatatgattcaaatcgaatgtatttggatttcgtagacgatagaggcagagttaaaaattccactacactatggataaaaagtgca

SEQ ID NO: 577867 - DNA, 346 bp, Homo sapiens
  misc_feature (43)..(44): n is a, c, g, or t
  misc_feature (203)..(203): n is a, c, g, or t
gatctaaggatccgcggcactgcttcggatgtggctgcagccnnatccccgccctgaaggctgcgtccctccagtgcctcgcagattagtcaggatgcccacttagcactggccacggggccttgctctgtcccgggtccactctcatccccgtgtggtgatggacctctgtggacaaatgcttttattttatttattttttngagatggagtttgtctctcgtcacccaggctggagtgcagtgagccaagattgcgccattgcactccaacctgggcaatgagtgaaactccgtctcaaaaataaaaaataataaaataaagccgttcaataaggagaatttgg

SEQ ID NO: 577868 - DNA, 335 bp, Homo sapiens
tctgctctatgaattaactagaattaactttgcactggagagccagagctaagaggctcggaaaccagactagctaccatctgaacacgtctatgagagcacacccttctatctcgcagaatagtgggaagatttataggttgaggcgacaatacctaccgagacctggtgatagctagtcttccaaaataaactctctagtcctaactttcaaatttgcccaactgaaccctctaaatccccttggtaaatttacctgtttgtcccataaaggaacacctctttggacactaggaaaaaaccttgtatagagagtgatctattttacaaccatt

SEQ ID NO: 577869 - DNA, 579 bp, Homo sapiens
  misc_feature (149)..(149): n is a, c, g, or t
  misc_feature (154)..(154): n is a, c, g, or t
  misc_feature (169)..(169): n is a, c, g, or t
  misc_feature (199)..(199): n is a, c, g, or t
  misc_feature (253)..(253): n is a, c, g, or t
  misc_feature (273)..(273): n is a, c, g, or t
ggctcctcacgcctgttctcatgatcatctgcgtagcagaagcctatggagttccgacgagaaaggcaactggaaatccctttgagtaaacaagtccccagaagagggagagcataggtgtgaaaaataataattctaccatctaaatnccatntctcagccttagttnacacaggtcagaagatctgtcatttgattnaagtcacttccctgggactgagaaaagattgctactgtactcttgaagggtgantctactccactctgtagtanatgcctccacatggtagatcccctcaaattgggtcatgtatctctcctctgccctcaacccttgggttatatcacccatttatagctttcaaaatattggagacaccatggtttggaaggtaaaacaatagcaatgagagacacctgtttatcagtagagcaattaaaaacctagctggtgaccaaacctgcccaactctatgtatataagttttctatcactatataacaaattaccacaaatttagtggcttaaaacacataaacggtggggttatcaaatgagagagggtgatgctcagaatc

SEQ ID NO: 577870 - DNA, 211 bp, Homo sapiens
  misc_feature (34)..(34): n is a, c, g, or t
  misc_feature (39)..(39): n is a, c, g, or t
  misc_feature (55)..(55): n is a, c, g, or t
  misc_feature (78)..(78): n is a, c, g, or t
  misc_feature (86)..(86): n is a, c, g, or t
  misc_feature (93)..(93): n is a, c, g, or t
  misc_feature (115)..(115): n is a, c, g, or t
  misc_feature (124)..(124): n is a, c, g, or t
gggagtattaaacatgcatcttagtttttatttntacanaatggtccaaattttnacttacatataactttccaactntgtaagtnttttgangcaattatgtttttcatttggnttttttggngtgtcattttcttctatactgtacagctgctttgtttctttgcaatgcattgtatggctttataaatgataaagttaaagaaaactc

SEQ ID NO: 577871 - DNA, 197 bp, Homo sapiens
tccgtcacctgcgcagtagtatagctgtggtcagattcagtcccttgtccaggaacttccatgagccgtggtgctgcattaaaaaaagaagaagaagaagaagaagaagaagaagagaagtatcctgactctctgtgtggcaggggagtggtggaggggaacaagagcaataggatgattcgtcctatgtgtacagt

SEQ ID NO: 577872 - DNA, 863 bp, Homo sapiens
  misc_feature (21)..(21): n is a, c, g, or t
  misc_feature (107)..(108): n is a, c, g, or t
  misc_feature (111)..(111): n is a, c, g, or t
  misc_feature (127)..(127): n is a, c, g, or t
  misc_feature (253)..(253): n is a, c, g, or t
  misc_feature (266)..(266): n is a, c, g, or t
  misc_feature (487)..(487): n is a, c, g, or t
  misc_feature (550)..(551): n is a, c, g, or t
acagtggctgactgttcttgnggatgaaacaataaagatctatgaccctgcttgtcttactattcctgcttgagatacactaggggggggggagacagaggatattnnctnaaaaactgtctaacancaaataaattaactatggaaaacatagacattatgcttttatatgctattcagatttcaaatctttccaatttaccctggaatcaggtttgagggagctgataaagactttagcggagtcggtaancctgatacataanccatatttaaaattctaagaaataattaatgggatgatatatcttggggtatctattaaaatggctctgggtcataaaatggattaaaatatgggagatcagtagggtatacttatatagatagggatatatttcatttttaatttggcattgttgggggaaaatataatcactgggtgggataaataaactatctattgatcatttatcattttaagaangagaggggggggggagggggggggggggggggcgaagcacgaggcgaggggagcagacgagcnncctcggggcccgtggcgcaaaggggggggttttggggcgggttcctttgaggggggggaaatagaggaccccgggaacgaccccgggggccggggggtagggggggggaggggggttcacggccctaagggggggtaggggggttccccaaagtggggaagacgcgcagagaaaactggggaggaaaggcgggcacaaggcggcaggagcccggagaagggggcgtggttggggtgtgttcataagggtcccccacgggcggaaggagcaaaaaaaggcgggttaagggagagggggggacccgcggggagt

SEQ ID NO: 577873 - DNA, 293 bp, Homo sapiens
agtgtcttctcaattatttaatcagtgtatgtggttttcatagcagaggttttattttttttttcccccatccttgtggtaaaggtcaatccctaggcatataattttggtagctatggaaaatagaaatttctccctgggttccttttaaagctagttggtaacgggtatataaaaacataactgatttgggtatgtggatttggtgccctgaagacactgcccctgcccagttgcttggcggaatcctttaaacatcaggaagtgtgaggctactagcttggtccttttgg

SEQ ID NO: 577874 - DNA, 953 bp, Homo sapiens
  misc_feature (591)..(591): n is a, c, g, or t
ggaataatcctcacagtctagaggtcacatgatgaacacagatgttgatgtggaaggaggtgggtgatagaagatattggatcccgttgatgggtggtctaccaacggagataaaggagaagagctgaggaagtccttgctagcactgagtgattctccggctcttcgtggatgaccctttcaacttttaagatcgagtcagaaatttgattgcaagaagagagactgggagagtcccctgtgcttcactaatccttgtcagtgaacatgggagcagcataggaagccaaatgcagcatcgtcacgtttaaagagacagctgcctgggggtccagacgatttacaagccaaaccgggaaacgaggtgcgaaaggaagcaggtcggatatgcacgccaggagatgctggtcccctaaaatgtgcccttaggaacctaaggtggggaaccaccatagcccagtaggtaagttaacgctagagtgcatgtcctcaggtgacgatcattgcacacgtgcacaggtgtcaagcaacaaatcgttctcagagagtgtgtcctttcagaaatgaaaggttcatgtggggaaaaggggngtttcttggtagtgaacacttttcaaagtgaaaatcctgtttacccataatttgacctgtttatgaaatgaggttatcacaagttgggcagtaggtctttaggtggtggaccatcggtgtgtaggtgagatcatatatctcagaggtgtatggttggttaattggcaaacggtcttcaggtacggaggactaaggttcacggttgtaccaaatgggggtgcaagttttttacaaggtaccagaaaataatcttgtgaaggggagaagaggaacgcgaggaatagaggaaggagacaacagtgtagtgtttaaaaaagaggataataagtgggaaagtgggagaggggaaatataggagaagc

SEQ ID NO: 577875 - DNA, 253 bp, Homo sapiens
cgcgttattcttacgcagtcgcaatcctattctatagatcatactaagctataaggtttacgacctcgaattcttcgatcaggcacatcccgatcgtgcagccgctattaaaggttcgtttgttcaacgtcttgactgctacgtgcacctgcgttcagaccggagtaatccaggtcggtttctatctacttcaaattcctccctgtacgaaaggacaagagaaataaggcctacttcacaaagcgccttcccc

SEQ ID NO: 577876 - DNA, 97 bp, Homo sapiens
ccacacctttcctcccaaatcgaccccctctgccaatttcgctctttattcaaacagtgtgcgctttcgcttatgattccacgtcctaaattacgtc

SEQ ID NO: 577877 - DNA, 117 bp, Homo sapiens
ccagctcaattccacacatctagtttttcaatataaatactttttctaccttaatgataatgactccttaaagttccattttgctacatgacttaatacactagtttcgggcatggc

SEQ ID NO: 577878 - DNA, 307 bp, Homo sapiens
tcttcaagtgatgggtggtggaagcagctattcctccagtgctcctgaggggctgtgcaccttggcatcgatcgcccgcttggtccccgttgcaggctgactggaaaaagaggctggctggtagaccttaagccgtgactcctgaaggctagaaacagggaggcggggggcgtcgccagacggagaagccacaggcagcacggaaggggctgtcgggaatgtgttccgtcgttgaacttgactgagagcttcgtagtcacctggctccgtggaccacataagccacaccagcgcatcacctgaaggt

SEQ ID NO: 577879 - DNA, 211 bp, Homo sapiens
tatacctaagctgtctcttatccgagttaattcattatgcacaaggatatagaggtaagtcccaggtatataatgcttggtaatgattgagagtctttacctactggtagtatatctgcgtgcgagtggtgtcaatatccataggctatccgcatatttaggtttatggattggagaaggctgtgtgccagaaactcagagtgagtttgcg

SEQ ID NO: 577880 - DNA, 353 bp, Homo sapiens
  misc_feature (55)..(55): n is a, c, g, or t
  misc_feature (58)..(58): n is a, c, g, or t
  misc_feature (64)..(65): n is a, c, g, or t
  misc_feature (72)..(72): n is a, c, g, or t
  misc_feature (108)..(108): n is a, c, g, or t
  misc_feature (180)..(180): n is a, c, g, or t
  misc_feature (182)..(182): n is a, c, g, or t
  misc_feature (217)..(217): n is a, c, g, or t
  misc_feature (247)..(247): n is a, c, g, or t
  misc_feature (254)..(254): n is a, c, g, or t
  misc_feature (256)..(256): n is a, c, g, or t
  misc_feature (264)..(264): n is a, c, g, or t
  misc_feature (300)..(300): n is a, c, g, or t
  misc_feature (325)..(325): n is a, c, g, or t
  misc_feature (335)..(335): n is a, c, g, or t
gagagagagagagagagagagagagagagagagagagagagagagagagagaganacnctcacnnggggacngcatgcacgcaatgctagctgcccctttcccgtccngggcaccccgagtctcccccgaccccgggtcccaggtatgttcccacctccacctgccccactcaccacctntnttagttccagacacctccacgcccacctggtcctntcccatcgcccacaaaaggggggggcacgnggggcgngnttagctgnatctgggagggagcagggtgagggtgggcgacccangattccccctccccttcccaaatanagatgagggnactaaagttcgtcttcgg

SEQ ID NO: 577881 - DNA, 289 bp, Homo sapiens
gctataattgccttgggatggatctgcatggcatcctaactccaccgctatttatgatgacccatttacctcacgttagcaaaaatgtgaacgttgcgataagtcacactaatcctggactcggtggctcacgcctgtcatcctgccactttgggaggttgaggcgtgtagatcactggaggtcaggactttgcgaccatcctgggcatactggtgaaacctctttcttctatcgaagcaaggatacaattatccggggtacgacctcgaattcgttgtcatcgttcta

SEQ ID NO: 577882 - DNA, 335 bp, Homo sapiens
tacgtcgctgtgccatgtagccccacctatctggtagacactccaaacgatctcttcctttctcttaacgttttctccacacacaatactctgtctagccaaagatgatgcaggcccttgtaactgctccctagggcctctgactcttttttttttttacttttttttttttttttgggaaacataagtctcacttggtcgcccaggcgggagtgcaggggcacgactcccagctcacagcaacctcggccctccggggttcaagcaatacatccgtgcctcagcctcccaagttaccttctgtggcacgcaacatcgccgggggaccctctaaa

SEQ ID NO: 577883 - DNA, 306 bp, Homo sapiens
ggatgtctgcacccctcctggcgggcgtggcaggcacgtcgggtccgagtaccagttgcggttcacctgtgtgggcttaggtccggctggcgaggcgtgctgcactcgtgtggtggttacattcccactgacttccctgctttcttggccctgattcatcacggcagatgacctcgttgccgcgtgtcgtgttgcactggttaaagcgggcggatgcactcaagccaatggtctggaagttgcccttaaccccgcacaggtaggccgtgcatgtggctccactgttctggcacctggtacggcggg

SEQ ID NO: 577884 - DNA, 548 bp, Homo sapiens
gatgatatactgattagaaatacaagagctcggtctccatcaacccagtgtcctggattgacacatagtcgatgggccaactggtgtagcgaacatgaactacctgccattggtgctcactcctccctgatgctaactaatctccacgctctgctacaaaccggaggggtgacccctatgcctaaggtcgtgactactaaaatccttgcgcctggcctggctgcatggactgtagtgtgtgcaccatgtggccctggccatggctgcatcccaggccttcctgtggatcctgctcccaggctgtgtcactgggcagacgctcaccctctctgagcaaggacacagggagaggctgtatgtggtgtgagaagtcttcctacactgggtgcctcgtcctgtagagacagcctcagtctgcatcctgcacacagccagggtccagcctaaggcaggcagctaacagattctgcgaggcccggcaaggggcagacttgaagagtcacaagggctccacgtgacaagatcctgaatcccaccgtcctggtcag

SEQ ID NO: 577885 - DNA, 1040 bp, Homo sapiens
agcgggagaggggagttcaaggagacgggggcgacgcggctgagggcttctcgtcggggtcggggctgcagccgtcatgccggggatagtggagctgcccactctagaggagctgaaagtagatgaggtgaaaacttagttctgctgtgcttaaagctgcggcccatcactatggagctcaatgtgataagcccaacaaggaatttatgctctgccgctgggaagagaacagatccgaggcggcgtttagaggaaggcaaactggtcaacaagtgtgcttctggactctcttcagcgccacgactaaacacgtcactgctgcacgacgcctttcacacgcaactacttggactcttgcatcgactccactactggcccagcagcttatctctcgctcactgtcgcacaacagcacggcaaagcttctgacgagctgtgctcgctggcacaaactgcggctgggtgcggcctgaccctggcgagcaactgtcaaaaggtcaccaaagctgacaacagcatcgcacctttaccggagaatccctactcactcaagaccaagaccggatcccagccctgagaatcgcacggagatctgcccgcctgccacacatggcagccgcttctcatttctggaccaagtaccacgatgggtccgtggcccacactcggctcatgtgctcagacaacgcactgactcaacaccgcccactgccggcccgcttccgactgactagatggtgtcctcacccgcggactcaccaaacactaaacccacaccagctaaccttactgtgactcggacagccaatcctatacccaactaccctgccaccacaaaattcccaaagcgcacgacccacgacacaaacgccctcacagcagcgtgaacccgcccaacagggcctgcacctccacacagcgcacgccccgccaccaacccaacgacccccgcaaaaccaccgcaacacccgaccatgcggagcacgcacgacgcgcgccgcggcactcgcacccgccccaagcccaccgcgcgcccacag

SEQ ID NO: 577886 - DNA, 99 bp, Homo sapiens
gccagcaccaaccagacatctatgtacctctgtgccagcagctctcgtgggcgagggaggagtgaagctttctttggacaaggcaccagactcacagtt

SEQ ID NO: 577887 - DNA, 130 bp, Homo sapiens
tgtttatcgatgcaccagttagggtggggcagaaacaaatgacaatggtggaatgtcttcagttaaggctgttttcacttctgggacctacagtatgataggtacataatgcagggtgtatcgataaaca

SEQ ID NO: 577888 - DNA, 222 bp, Homo sapiens
gcgtccgaaagcgtgccatcaggagatgaagaatatacccatcaaggaagccccttcctaaaaagaagaaaggacggcctcctagacacatcctttcaagcgacccgcagcccccattgtattgaaaccaaaatcctgtgaaccaattcgccggaaagcccaagttgaccacctctcctaataatctaccacctttatattgatctctaccaacaaacctct

SEQ ID NO: 577889 - DNA, 260 bp, Homo sapiens
tgctggatgagtgatgacccattctataccaacacctattctgatttttctggtcaccgctgactgtttatattcttatcctaccatgtgcttcttgaataatctcccattatttgtaactttactaattcctgtgaaaaaaatgaacccattttgtgatacatattgtattgtgtcttgatgctattgcatatacaatttgtgcttcactagtgtgtttaatctgttgttgagctacacccactatcattccactgtgt

SEQ ID NO: 577890 - DNA, 238 bp, Homo sapiens
  misc_feature (227)..(227): n is a, c, g, or t
aaaaaaaaaacccccccccccccctctggggcccacgggaaggaggtggggcccctggtcctcctaccaagttccttgggaccactggatcccccgaagcagtgctaattgctggctactgtgcaaagcctgacttcatgctcaggattcaagaaaatggaaggaatgaatcttgtgagaagaagttctcctttgtttgcaagttcaaaaactagaggaagctgaanaaatggatgtc

SEQ ID NO: 577891 - DNA, 110 bp, Homo sapiens
  misc_feature (110)..(110): n is a, c, g, or t
gggcggggctccaggccactcagtgggctccctcggtcctgatgggcagaacccacccgatccctaggggtagggcaccacccctcctcggggttagagcgcagtggcan

SEQ ID NO: 577892 - DNA, 129 bp, Homo sapiens
atccccggaataactgtagctagtattttatacaataatcttgtaagaaaattcttgaattctaaatatgtagtcttatctagattaaagacatcaaaaagtttcagtaaaaagatacttactattatt

SEQ ID NO: 577893 - DNA, 190 bp, Homo sapiens
cggctaaagctttgggggggggggggggggtaaaaactatttttttggcccaggtccctttcccccccccttttttttttattaaaaaaagggggccaatttaataattccagccccgccctccaaaaggaattttttttttggggttttttagccaaaaccaaaaaaccccaattttttttacccccca

SEQ ID NO: 577894 - DNA, 266 bp, Homo sapiens
  misc_feature (246)..(246): n is a, c, g, or t
gtgagtctttcttcaactaggggaatgtttccagggcacgccaggcctcactcacgcaggcctccgcgacaactgttcagcactgactgaggatgaagtgaaatcctgaaagctgagagccagcgccctcacacgagggctgggacgtaacaaaagcccatcaagagttttgcccagggctttcttgagccttgaagcatgacgagaccaggaccctttaggattaagcaagttttatgcggtctnaaaaaactccagggcctcca

SEQ ID NO: 577895 - DNA, 271 bp, Homo sapiens
tctgaccccgtggatgcagaggttgcagtagcccagatcctgccactgaactccagctgggtacagagcgagactctgtctcaaaaaaaaaaaaaaaaaaaaaaaaaaaaaaccaaaaaaaaaaaaaaaaaaaaaaaaaaaaaacccacacaaaaaaaaaaaaattttttaattttaaaaaaaaaggttttttaaatttttggggaattggaaccttttttggttaagcccactgaaattcattttttgtttttggattttgtggccactt

SEQ ID NO: 577896 - DNA, 293 bp, Homo sapiens
cgaaagagacaagcgacgtacttttctcagaatatattttgaagatcttagtgcctcatttcggtatccttatatctgtcagtttttgagcagtcacttactctacaaggtttgattatcatcccttctgaatcttcccagcagtctcacacttcatgtacctttcagcactctcccagccttacatttagcactcactgacatagcaatcaaagcagcctgtccaacagtcatggcagtggccttcacaccataggccgtaattcggttgcacaggtctcactgtctcaccc

SEQ ID NO: 577897 - DNA, 106 bp, Homo sapiens
ttaccccatggatttgactgccatttacgaaaaccgcctgtggccttaattcctaacggcggccccggttttcccttttcggcaataaaccaggcctagttttgta

SEQ ID NO: 577898 - DNA, 466 bp, Homo sapiens
tatggtgttttgactggggatgcaaggtgggtgtttttcgtcccagttgctttagtgtctgataatcttgtgctttggtgtaacggcttggcctgggacagtggggtggaaaacgatgacctctgtaatgctgacagtttggaatttgtagtgggagaagagtctcgatcggcactgggtactgagctggatgacaggaggttatcttcactggccttctgagtatcctctttactgtcaccaagagctgctttaccagatgctgtctcctccttgcttttctctttgctctcgtacatcttacgaatcactgaggtaggggtaaaggaaggagaaagcatgcttgtgatggaggcagcaggggcaggggaagaggaattccctcgatgcacgggtgcaggtgactttggcactcgctgttgcctgtatctgaatccatctctggttctgtccagctttggtttgc

SEQ ID NO: 577899 - DNA, 668 bp, Homo sapiens
ggggtaatggctcagctaatacagtttcacatgactccaaattctgacaaagaaaaggagaaaataacacaaaaagaaaaaaaaaaaactataaaaaaaaaaaaaaaaaaaagaaaacaaaacaaaaaaaaaaaaaaagaaaaaaaacctggcggccctctttgcccaattccgtttggaactagcccagtttttgaatccagcccccattcagggcatcctgggccattaccccttaaagggggctgctttacttaaaagggccagtagtttaacaaagggaacacgggaaaacccgggtggcaccccatttaaatgctctggggcaaatccccctttgggcaaacggcctaaatgccgaatgggcccatcccgatggccttcccaaaatgtggggcacccttattggccattgaaaatgctaccggtaattatttgagaaaattggggtcaaaatttgggtaaatccacttcatttttaacccagtcggccaaactggaaaaatcctttttaattaaaagaattccccccctaagggttgaaagcatttcaccttgggaaaaaggggccccttattaaggaccgggttttgcaacggaaaaggccaaaaaccggttttaggcgtaggccccttggggggacccatccccgggtttctgggcggggg

SEQ ID NO: 577900 - DNA, 245 bp, Homo sapiens
attcattgcccccacaatcctaggcctaccgccgcagtactgatcattctatttccccctctattgatcccacctccaatatctcatcaacacccgactaatcaccaccaacaatgactatcaactacctcaaacaatgtaccatcaacacactaagggcgagctgatctctatactgtatcctaatatttagttgcacaactacctctggactctgcctactatttcaccacaactaccattca

SEQ ID NO: 577901 - DNA, 793 bp, Homo sapiens
ggtgatcaggaataagtacgaatgtgagctgcaggaagccaaacagcacctggagagtgagaacgctgctgctctatgacacgctgcaggaggagctgctttgagcggatccacgtagtgctggaggaggaccgccagagcctggtacctcagctctgaatggtgggacgatctaaacttgcacgccaagaggcagctccatggtcttgggactccctgccgaccatgctaagaggaagaattgcacctctggtttctggcccatacatcgtgtacattgcttcaagagatcgacatcctggaggactggacagccatcaaaacatggctagggcagctgtgtcccctcaagaagagaaaatcggatgtgaccttgaccctgctgttcacatgtcagtggggacccttcagagcagtctggcactgcacccaggtattctctggtcttctctcctgcagactaggcgttgactccacgaggccccttcagggatctgcgccatgccaggcttccatggtgtgtgctgctgaggtcctccctacgtccatctggctactggcctgtggagtcctcctctgccctcctcgtaggcctgcactagtctgtgtgacgtggagctgactctgagcaggcaaggatgttgtctccatccctgagtctgctgcagctcccactcctgaagactccatctcttggggctcccctgacgagagaagacaggccgatagtcataggcatattctcttgctgatgttggaatgccaggctgtgcgagctcaggggccacggagc

SEQ ID NO: 577902 - DNA, 311 bp, Homo sapiens
  misc_feature (19)..(19): n is a, c, g, or t
  misc_feature (107)..(107): n is a, c, g, or t
  misc_feature (205)..(205): n is a, c, g, or t
ggcgtctccagaggcgcanacaaagccacactgtgttgacaactcatgacacgcactggggctggtgctctcccaggccccagctcagggctccccacacccatctntgtgtctcctagggagaactgaccatcacgaccgacgtggaagatctgtccacggctctcttctatgacaccgtgcctgatacgtgggtggcccgggnctacccctccatgatgggcctggcggcctggtacgcagacctgctgctccgcatcagggaactcgaggcctggacgacagactttgccctgcccaccaccgtgtgg

SEQ ID NO: 577903 - DNA, 111 bp, Homo sapiens
gaagctgatagaaaagatagtaattctaagaagctgagacactgcacattatggagatgatatttctaagcataatatttatttattttttttttgagactccgtttcaac

SEQ ID NO: 577904 - DNA, 857 bp, Homo sapiens
  misc_feature (617)..(617): n is a, c, g, or t
  misc_feature (619)..(619): n is a, c, g, or t
ggacactctgcagttctctggattatccttatacagttccctattctatgtctctgttgccctgtgaactccacttgctttgccttctctgggattccagttttttctgctcaagataggagactgcctgtctctacttggattccctctctttgcactgtgacctggaaatttacttaaacagtaagctggagcaatcttgtggcttatttctcaggggtcacattcttcattgcctgatattcaatgtcttgagtactactgtttgatatattctttccagttttttaagttgttttttagatgttagttgggagagtaaatcaacatgttgctccatcttaaccagaagcctaaaactatggtggattttattcactgatcatatctagtttcaattttccaggacaaatgaaattctgatgtgtttatccaacaaagtatcctagatatatcgtcctattgtgctataggcactatgttgaatattaagagagacacaaagtcacttaagaagcagctcctcacatactcacggagtatgtaaccatgatcatatattcatatattacctttgttcataagcacagcagtacttccagagagtagatattggntngtaaggaaaacacagaaaaaactcgaggggggccggtaccaatcgcctatagggagcgatacaatcatggacgcggttacaagtgtgacggagacccgggttcccagtaacgctggagaatcccttagcaaggggaatacaaggcgacgatgctccaaagtggacgtaagagagcatatgcgcactagtaacgcacgtgtacgcttggaggacttataaccagagggtggcctcgggc

SEQ ID NO: 577905 - DNA, 357 bp, Homo sapiens
cttgagagataccacgtgacacagggattagatcaacacacgctggggcctgatgcaggagccgtagcggggagagcatcaggataactagctaatgcatgtggggcttaatacctaggtgatacgttgataggtgcagcaaaccaccatgggacacgtttacctatgtaacaaacccgcacatcctgcacttgtatccagaacttaaaatattttaaaaatctttagagaatacaaaaaaaaaagattcttgcaatgcatacacaataaaattgcagttcagtcaaactttggaagtctttctctaactgtctagttggtatcttcattttcagcttcttcaggatcccactccaa

SEQ ID NO: 577906 - DNA, 662 bp, Homo sapiens
  misc_feature (465)..(465): n is a, c, g, or t
cggaggtgaacgacgtgcttccccaagagccgactggccaatcacaggcacgaagatgaaggttctgtgggctgcgttgctggtcacattcctggcacgatgccatgccacacgaggagcatgcgatggagacagagccggagcccgatctgctgcctgcaaaccgagtggcaaagccgacagctctaggaactggcactgggtcgatcttgggattactcgtgcgctgggtgcacacactgtctgagcacgtgcaggaggagctgctcatctcccaggtcacccatgaactgaaggcgctgatggactgagaccatgaaggagttgaacgcctacacatcggaactggaggaacaactgacccctgtggcggaggagactcggacacggctgtccaaggagctgcacgcggtgcacgcccgggtgggcgccgacatggaggacgtgttctgccgactggtgcancaccgcagcgaggtgcatgccatgctgggtcaaagcacacaagagctgcgaacccggccttggttccctctgctcaagatgcaatagcggcctcttcgttattcccaatccagatcgattgtccttttaacaggtgggcccccttaaggggcatatggcctctccccttctattttgtcttccccttactgttcctc

SEQ ID NO: 577907 - DNA, 367 bp, Homo sapiens
cccccaccccccccccttggggccaaagaaaaaatccagttaccggccgggaagaggctcatgccccgtaagccagcactttgaaaagccgaggcgggaggatcacccttagtcagcagttcgaaaccaagcctggcagcatggccaaaacccccgttttactaaaaatacaaaaaaaaaattagccaggcctggtggtgggcgcctgtaatcccagctactcgggaagctgaggtgggagaatcacttgaacctgggaggtggaggttacagtgagccaagatcgcgccactgcactctagcctaggcagcaagagcaaaactctgtctcaaaataaataaataaataaataaataaataagctgt

SEQ ID NO: 577908 - DNA, 698 bp, Homo sapiens
gcccacctgcacccaggtgaaataagcagccttgttgctcacacaaaacctgtttggtggtctcttcacagcaacgcgaatgaaatttggtgccatcactcggatcaggggacctcccttgggagatcaatcccctgtcctcctgctctttgctccatgagaaagatccacctacgatctctgctcctcagaccaaccagcccaaggaacatctcaccaattttaaatcggatcttctcagcttagcggctgaagactgatgctgccagatgactttggaagccccctggaccatcacagatgcccagctttggataactcttacagtggaggacaggaatatcaggtctctgagcccaagctaagccatcatatcccctgtgacctgcatgtatgcatccagatggcctgaagtaactgaagaatcacaaaagaagtgaaaatggcgcgtgcctgccttaactgatgacattaccttgtgaaattccttctcctggctcatcctggctcaaaagctcccccactgagcaccttgtgacccccactcctgcctaacagagaacaatcccctttgactgtaatttcccactacctacccaaatcctataaaacggcccacccctatctccattcactgactctttttggactcagcccacctgcacccaggtgaaataaacagcttgttgctcacacag

SEQ ID NO: 577909 - DNA, 454 bp, Homo sapiens
ctgagacgatgggcgtccgtacagagacgctcctaactgcggagatgctatggcctgcgcttagaggcgctcctcacttgctagatgggatggcaggcggggcagagacgctcctcactttgcagactggtcagccaggcagaggggctgctcacgtcccagacgatgggcaggcaggcagagacactcctcacttcccagacggtgtggcggccgggcagaggctgcactctcggcactttgggaggccaaggcaggcggctgcgaggtggaggttgtagcgagccgagatcatgccactgcactccagcctgggcaccattgagcactgagtgaaccagactccgtctgcaatcccggcacctcgggaggccaaggctggcagatcactcgcggttaggagctggagaccagcccggccaacacagcgaaaccccgttcgggtaccgagctc

SEQ ID NO: 577910 - DNA, 253 bp, Homo sapiens
attattttacaagatacctatggattatcaactattagcctggaggagaatggtggcttgggagaaatcgaacaagcaaagtaagattgttagacaccactgcccgttaatgatttcctagaaaggagaagagaatagaccttcactgactatgggagctgtttagaaaataggattcggtcttcagacaggggattaaaccatactatttaactttccaaaacctgtactggaagtaagggcttgatgtgga

SEQ ID NO: 577911 - DNA, 326 bp, Homo sapiens
caccggacggtgtatgtatgtatacggagaggcctggattctgaatcaataaaccaagctcgcatacttaccacatgtgtgaccatggcaagttgctcatgccttggttgcttccattttaacatggagataataaaattatagtaagaattcaaggaaataatgtacatataaaagcataaaataggacatgacaacattgctatcactattatttaacaaatgactgaattgtcgcatttcttcaaaactcacatataggccaggcacggtggctcatgcctgtaatcctaacaatttgggaggccgaggtgggtggatcacct

SEQ ID NO: 577912 - DNA, 340 bp, Homo sapiens
  misc_feature (139)..(139): n is a, c, g, or t
ggcttccatagagggccttgttctccttggcagaagctcaagtcctgattcccgcccttccttctcgttttaggaatattgttctgagaagccacagaaaaagggtaggcatataggaaattggggtatacgttgccgnaaaagagacaaatactgtacgtacttgaaagttttacctttgatgtgtaatccttacttttgatgcggcctcccgtgatctccgcatcttaaaggcccgtgagaaactaaaggagttggatctgatgggatggttctctcagatgctccgaggcaaagcacatgatcttaatgtgtaatgcgcttgccccatggctcttgg

SEQ ID NO: 577913 - DNA, 1166 bp, Homo sapiens
gctgcgcccttgcccactccaatgccatgacccagtgcggtttgccctatggactccgagctgtcttggggacccacaggtcacctttggaatgtgctgcctggtgctgcagtccctcgctccgcgtggcggacccttggctaacccgcccgggctgcttttctccccctccggctcacctcttgctctggcgcatccgcagagccgcacgctactggccgaggtgaaccagcctggtgcggtgtgttcgctcaacggccgcacccctgcccaacgccatccgcttgcgcatagtggagctggcgcacctgggcatccgaccctgtgacatcagtcggcagctccgcgtatcccacggcctgcgctgcagcacgcactcctggcgcgctacaacgcagaccggcatccatactgcccggggccacccggggcggcagcaagccccgacgtcaaccactcccacagctggccaagcgacatccgaggactacacaagccaggcagaccctggaccatctctcgcctgtggagatccagcagaacggcatgctggcacgacggcgtactgtgacaagttacaatgtgacattcgagctgagcaccactcaggccagcatcctgacgcaccaaagacacggcagcctggcgaaggcacggaccagtacagaggcaaggacagcagccagccggcgcagcctaccgctgcccacaagcaacatctacccagaacccccacgacgaccaagaccaggcgaacggacccacggacagcaacgaaaaggagcatgaacaccccacgcgcctccggggaaacggcgagaacacgacaagcaatcccgcgctaatggcactcggccccctcggacaccacaagcaggccatccggcacgttacttggagcatacccagggctgcctaggattgcgaacctgacgggccacactacacacaccacagagcagggacacagcggcgcgggagaaaaaccgaaccgaacacaaaggaacccaccacaagtaagtgctaacaaacctcaaccacagaggcagtaacaaccacagcaagacacaccccaaatccacgcgacggcaaacacgacagaacagccgcccgaccacaaggggcacaccacacacgacaacaacgagcaccacaagcgaaagaag

SEQ ID NO: 577914 - DNA, 181 bp, Homo sapiens
tacacatgcccaagcccacagatcgcttccacactcatacctacccatacctcccaattctcactgaagtccatggcgacgcgcacccactcgagtactccctaggctcacgtggctaacagttctagctcgtgggacacttcagtgacatctgggccctgtgctgagagccccggcactt

SEQ ID NO: 577915 - DNA, 866 bp, Homo sapiens
aacaagatataattatgcgttatggagcacgcaacctcctgattggtgaacatggtcgcagctggttcatctaatatctgtgctaataactagagtttgcaaataaccaaataatcagccgggagaaaaacttcgcagtggtaggagtgaatcacaagatgtatgtactagaggtcttaatgggacgatatacaaggggtcaaagcgatgtttgaaatcaaaatgttcgccatgactgtgtcattatataaatgcaaatcaaaacacaatgaaatattatttccccctagtcataatgactattataaaaacaaaaaaaagaaaaaaaatataacagattgaaaaaggaatcttctacactgtggtgggaatgtaaaccaggtatagcaactgtagacaacattatggcgattcctcacaaaagtaaaaatagaattaccattgaaaacagcaattttactactgggtatttactcaaaggggaaaaaaaatcaatataccaaggggatacctgcctcgcatgtttatggcagtatttcacaatgcaaagattgagacaactaagtgggggttgcgcttatgaaggtgatagtaaaagactcaggttgtgaagttgggagggatttgcaaaggtcttaaaggtttgagactgtggacagtgaatggcaggtggacggtcaacagcagggatgtctgtgcgcagggatacttgatgtcagttccagcatgtggggatcagcccaggggttgaggggtgaatgaaatcggatattattagggaaaaaaagatttgggttccaaatgcgatagggaaaaaaaaattgcgggcattaatggggaaagagatattgttacacgtgttttct

SEQ ID NO: 577916 - DNA, 1616 bp, Homo sapiens
ggcgcgcgcgcgcgtgggtgcgtgtgtgtgtggtccttcaggttggcagaggctctgtgtagagactctagggaacgccaggtttcatgcgtctgggcgggaggagccaggtgcttcctgcactgtctgaaggactctcttctccttccctgccagttccccctactctagtgccaggtgccgggggtccggaagagctcccccgtccaagccatatgacggtactcattcttcaaagcatggctcctcgcatgaagccttgccctcaaagtggtttctttccaccctaggctgccagaaattgacagagagtgcagaagaggacggcatcaaggcgacctaatgacttttgggggttcaatcactagcaccagtgtcctcgcttaacaaagctcaaatatgcagtgccatctcttctttggatgcagacagaggagttgctcccatcgcagatcgctcgtggccagactcgggcccttctgctgaagatgacgccttgtgctcaggaggatctgaagtggttacgggcgactacatgccccccattatgtcccagatgcgtgtcgcaggcggagaacgactcaatgccctgcgggtcaatcactgcgataatcaagggccccagcggcgaaggggctcagaaccgtggcgcgagaacctgggggcctacaaaggggattgaaaaccctgcagacgacgagcactcgatggagggacctctcgtcctgttaccccctggtggagtgagtgttcgttaccgcatcctttcttgttaaacactagcccacaccccgcgacccgcactcgacccagacccactgtgagccaacaagtgcagtccacacagtaactcacgcgacgccagcgaccaccgctccagacacgacgagccacgacgagaccagctagcggtccgaccacagaaggcgggacccgccggggggcaggcgggcgggagagaggcgggcgggcgggcgggagcggcagcgagcaggaggagggcgccgcgcgaggacacgggcgcagcgccggaagggcggcgaggagagaggagaggcgcgagcggcgagaagcggagcacagcgcagcgcaggagcaagacggaggggccgagaggcagacaaggggagagggacggagaagagcagggggcgggcggcgggggcggcgggggaccagggcagaggcgcagtcgggagaagaagacggcgcgaagaacgcggggcgggggggagcgagccggggcgcgaggaaggccggacgagagagcgagacgcagagaggatggcggcacgggaggacggaggaacgggagaggggcagagacagggagagcggacagagggaggacggcgaaggggacgagagaaaacgggagccagcacgcgagacgccgaccgagaagcgcatgccgcaggagcgacgagaagaacgagcgagagaggggagacgggtccgagaggccgcaggtaggaagagggcacaaacgacccaacagacagaggagacgaaggaagagacggggacagcggcagaagggaacaaggcgaggggccagagaccacagggcgcgaagcacgaagaacgaacagggacgaagcacacagaagcacaag

SEQ ID NO: 577917 - DNA, 1472 bp, Homo sapiens
gctgaccagcacctatggcggtctggcaagaacaagcgcctttactgaaaggcggcacaacaagggagccaagaagaacagtgtgttgatccgatctttcgtaagcaagagcagttggctcatgatgctgcaacagccaccctggctatgcttccacatgatcaagcatacatcattgcgatagagaggacgctcgatcgacccagtgacccaaagggaaaccgatagaattgccatctgcatgggtctccacagggttccgtgatgttgtgaagatcggagctcgtgtgcctagaattggtgcaagcaaatgtagttgcacaggtttcgccactttctatgatatatagttcgagaggcttggagtatcacgttgcaccattggattgtctcgagctgggtcaaacatagcgtggcctttgacctcaaagggtttcacaatagggcgagtaggaatactttaactcgcggttgcaccaaagagaatggtagtttacccactaggggtcccatacaaaagacaatggcgccaaagcaaatgagactcggaattctagtacacccgacgctccaagccgaattgtggcacttaggtttcggaacggaatcgttaaccccggaacttgcggtgttcatcgtttgggcttgttcagttgctttgatttgccttggttgttttggggtgttttgttaacggtttacataccagacacgcaggccaaaaacgagtagtccacaggtgaaattaacgcgcggacacaaggaaccgccgtccggtttaagttcgtgccgtccgaatgtgcacgaaccccgaaaaaccgtaaggtgtggtttcccggtgcccgcaaaatgaagtttcccccgtgcgcaactagcgggcaacacgggaactgcgcaaatctggggcacacccaccttcgcagttggaaacccccgccgtgaagaaagcgggttggcccagcggtaaaccgacaacgaagttggacatcttcttgtgcaaccgatggccaacaacagtttggggggctccccacagatcgtacaaaatcgtttttgtgcaacgttttccgccgacgtgaaaacacaaggcgtccatgttcttcgggcgcacagaccagccacggtcaacctcacgtttgaagcgaaacgacacaagtgtggccttatggcccccaagaaacgttccgcttacagttgttttaacttcagccgttaccttccccaagtttgaagttgggttcctttatccgggattgcaacgtaaagacagacggctttactaaacaaacatgtggcgcttggacaacacggacacaggcgcgccccaaagaggtttctcggcgccactttttgggtgcgacacaacagggccgcttccaatgtgtgcggcaacggccgttcttccacagctgtgcgctttgcaacaacgggggcccacggtgatcaacagtatatacctctggcggagaagc

SEQ ID NO: 577918 - DNA, 155 bp, Homo sapiens
tttgtatgtgaggacacgagattggagaggccaggcagaatgatatggttggctatgtccccaccaaaatctcaacttgaatgtatctcccagaattcccaagtgtgtgggagggatttaggggggaggtaattgaatcatgggggctggtcatt

SEQ ID NO: 577919 - DNA, 306 bp, Homo sapiens
tcgcttagcatgaggaatatgtgcagattcttctttacatgggtttaatatggctatcccagagggtgccagaggggagagagggttataggtaatagtgaaaagtaaagtggaattgccctttaatttcccctctactacttttgtcaggggctggcatccccagcaactgtgagctggaatcccagggctttggaaggatcaaatgtagtttctcatacaaaaaaatactagaaatgttggtgttggaagaagagtttcacaagactaatagctacccctggttacctcccttaagcggatcag

SEQ ID NO: 577920 - DNA, 866 bp, Homo sapiens
gcctccctaaatcgccaggcgcagcctctcactgcctctagcccatgatcttgtgtctatcccatgatcttgcgtctatcgcaggtgtcttaagggttgatttcccattaaacagcagagatgtctgatggccactgaactctgttttcagatctggacaaaagcatttaccttcttcatgccagagactttcttttttttttctcttttttttttttgggcggggtctcttgtgcctcgtgttccccttgaggctagaggtgtgcgaggtggcccactctcccggcctccctgtgacgagccccctcgagtctctctcctgtaggactcatcaagagcccgaactcctctccccacctctcaagacccctcctatagagtctagcctgtgggcaccccccaccacacaagcgtttccaccccacgcacgctcccgttgtaattctttgtgtgaatttttcttctgtgtctagagagacatggagcaccttcccacgagggtcgcggggcagtgtggtgtgcgctctcatgtcgcctgtgtttcatctcccccaggcccctttgtgcggagatttcgcccaagatgtgcgcgggtggcctccctctgagaggcgccccgcgaagttctctcgcagacacccgcgcctgtggcctgtgcaccctttgcgcgaaaacatctcccatctccctcccgatttgttaacacaagtgtcgcccacaacacggcattctacggcgtggcgcccgggggtgtgggcccccgttctcctgtgtttaccccccccggagtttacctcaggggaagggccgtgggggcctgtgaaggcaactccgctttgtaccccccagtggggggccgcagggct

SEQ ID NO: 577921 - DNA, 295 bp, Homo sapiens
attattatgtaactggcttatcctaggctgggcgcttgcactaagtaaagaagccacggagtcagatctagatagcagagaagtaagtctcataactaaaacattgcaactactgttagagtccaccccatgaagctgtctcagatcgtgtatataagacatgaattctataagtatatatagttcagactaaaacaaatgtggctagctacggtaggctgtgctgtctcagtaggacatagacagactccagcttacaccctctggagaccttggacctacgtgccacatgcaa

SEQ ID NO: 577922 - DNA, 405 bp, Homo sapiens
ataccgggatttcttagtcaagcatcctctacctctcaggctgctgcaaccagctaaggaccattggtattatccatgctataattcttatggctgctgaaatgtgtggtttatgatttattaaataatctcttaggagggcattacaaaaaaacaaaaaacaaaaaacaacaactaaaacacaaaagggggagcgacgcagtatgaaaacgacaaagaggggacccaagattaacggcggaccagcccgacttcgtctacaacacgggccccactagcgacacgcacgtatatacaacagagacgcggacaccccgaacacacacacacgaggaacgcgggcacacacgacgacgacatagcaacaacaaacgacacgacaaccacacaaaccacggaggagga

SEQ ID NO: 577923 - DNA, 369 bp, Homo sapiens
cattctggcgtgtagcacattttccaactcacgcataaagttgcagcaagagtggctccaactttgcaagccattcatcagtcagtcaacatccccagggcatctcagcactttccacatttctctttcatccagcattaggtcccaaacatccatgctcaagtcacctcaaagcaaaagcaacacatgtgtatatcgcacatagtgggttgtcctttgcacacactcaaacacacattcaccacagttcatgcgcagcacagggcacgtctcatgccacgcactggcacgtctcatgctaagcaagtggcacgtctcatgcccagcactggcacgtctcatgctacagcagtggcaacgtctcatgcc

SEQ ID NO: 577924 - DNA, 192 bp, Homo sapiens
acgactaaactagcacatgataatatcaaagtaaacatgtttatcgtgatacatatatatacataaaattgaacattcgtaccttcgttttttttttttggagacagagtctcgctctttcacccaggcggaattgcagttgcgcaagctcagttctttacaacctcggcctccggggtccaaaaggggaac

SEQ ID NO: 577925 - DNA, 160 bp, Homo sapiens
tgactctagatgatcccacacctagtgaggcagagaagagttacatcagctaagtgctgaactcgtgtgatagtgtaaaaatctcctctgtgagcagacaccagacatggaaaatgagtcctgacgtgatagacatgtggtacctgagctcgaattacgt

SEQ ID NO: 577926 - DNA, 431 bp, Homo sapiens
tagaattgcatggatcactatacagtgcatgtaaattatcggcaccccggtatgtacaatgctgctgcctcagactcctgcatagttgggataatcggcgcgcctcatcaggcccctctgcgtcaagcatagccagccgagatgggatttgacctattgttgctcaggttgaactcgaaattgctggtctcaggtgaacctccgtgcctctatgtcagaacacgcagttacgagcatcataatctgattctcatggtcatacctataacctgactatgaagaaagttcttgggattctgagagtctctgtgagaactgtttcacagaaggatgtgtgtttaccaagtctacacatcaaaaagaaatagataaaataaatggaacattagaagagtctcctgataatgatggttttctgaaggctccctgca

SEQ ID NO: 577927 - DNA, 262 bp, Homo sapiens
gggcccccccccccgttttttttcccccttaaaaaaccccgggggcggtcccccccccgggttttttctttggcgggggggggggtttcattttttccccgggaaccggttttccccttgggccctttttgggggccctttaaaaaaagttttttccaaaaaaggggggggggcgggggggggttttccggggttttttttccccccggggccgttttttggggttttcccttttttttaaaagccgttttttttcctggga

SEQ ID NO: 577928 - DNA, 102 bp, Homo sapiens
actttttttgagacagggtctcactctgtcgcccagttgtgcaaagcagtggcccaatcatacggctcaccgcaagctctgcctccctaggtctcaaggtgc

SEQ ID NO: 577929 - DNA, 162 bp, Homo sapiens
atcctgctggttctgcctctctgggagccctgatggctgcacagtgcgaggacttcagggccccgtcactttggctgtcgtttaccccccagtttatggtggcccctgtatttgcgggctccacatctgcagattcaaccataaaaataacaatacaacaat

SEQ ID NO: 577930 - DNA, 279 bp, Homo sapiens
gcctgaacggaaattacaacaacagcagcaacgggggcagagacacagagcatcaagctcgtagagaagtggagcaccgataatctgcagatcaatgacatatatcccatgcaggataccattgcaatgaaggagaagtatgccaagtacctgcactcacagagcagggcggtatgccgccaaacgctatccgaaaagctcagagatcccatagaggagcgcctcactaactccatgatgatgcacggacagacaacaacggaaagaagctcatgactg

SEQ ID NO: 577931 - DNA, 87 bp, Homo sapiens
aaacattgccagaatgagaaggataaaatgatacccagatgaaccctggaacagtgtgctacattgcaggctgccactgtaaaccag

SEQ ID NO: 577932 - DNA, 92 bp, Homo sapiens
catgtgagacatgatggttgtatgtgagccaagattgtgccactacaatccagcctaggccacaagagcaatgactgtttctcaacaacaac

SEQ ID NO: 577933 - DNA, 417 bp, Homo sapiens
gcaacatgtgttgctcattgcacctgggctgcaggtggggctgagctccgaaaagacgagtctgcaaagggagatagggttggggccgtctttataggattcgggaaggtaatgcaaaattacagtcataggtggttgctctctggtgggcaggggcgggggtcacaaggtgctcagtgggggagcttctgagccaggaaaaggaaattcacagggttaatcactcagttaaggtggggcaggaacaaatcacaatggtggaatgtcatcagttaaggcggggcagggccttttcacttcttttgtgattcttcagttacttcaggccatctgggcgtatacgtgcaagtcacaggggatgcgatggcttggcttgggctcagaggactgacattcctgccttcttatattaataag

SEQ ID NO: 577934 - DNA, 109 bp, Homo sapiens
tttactttttttttagaatttcattttcagatgttaagccattgcaggtattaaatttgtaaataaggggatgaaaaagaagaatgcggttcagaatgagctaatttca

SEQ ID NO: 577935 - DNA, 422 bp, Homo sapiens
ttatggtgggtatttctgggctctggcctatgctgggccctaacagtcataagtagcataactgggatcctagtagtgagctattgctctctgtattgttgtttgagctatggattcagggctccgccctatcggcatgtgtccctgcccagaggatgccctgagcctagctggtggagtgtaggaaaggtgcctgtgctttactcagaagtagcccaaggcggccttctagcgcagcatgactcagtgggtttggagcgcaggcgtacaaccctgcacattatgtaaccacaccgcatgaggcatattaggtgatcacccatgtgagcttgtgcttggcttggagggactattgtctgtaaaacatacaattaccctgctaacgctgtatatatggctcgcttgtgcccagagagagagta

SEQ ID NO: 577936 - DNA, 102 bp, Homo sapiens
tccccccccccccccctttttttcgggggggggggggggggggggggggggcccgggcccccggggggggtttttggggggccccggcccccctttttcttg

SEQ ID NO: 577937 - DNA, 534 bp, Homo sapiens
  misc_feature (71)..(71): n is a, c, g, or t
ctaatctggatttttgtgttaattctgcacttccatgagggaaagatgcctaaagaatagtcattcgcgtntgttaaagggaccacagtgacttgcttgtagatgctagccctgctacctagtctgttagcatttgaagtcaccttctcatactactttaattaaaatgtgccgtatcttcaatgttgctttaactactttagaggatttcagccttgatgttttaatatcctaggcctctgctgtaataagattttagacaaatgtttggaatttaagaagcaactcatgttactaatttgtatagcccatatctgtggaatggaatataaatatcacaaagccatgtgatgagactgtgcgttgtttttcccataggataaaaccaaagaagtaatttggttcttcatactttaaggtaatccacatacataaaaaatgaaactattttataaagtctagttctctacatgcagttataaaaatcagctttttaaaaaaataaaataagccattaattactaaatcagacac

SEQ ID NO: 577938 - DNA, 387 bp, Homo sapiens
tgaagaagttattttctatattttagggaaaaataaaaagcaaactatgaaaaaaaaaaaaaacaaatccctccccacaaaaaaaaaaaaaaaaaaaaaaaaaaaaaaaaaaaaaaaaaaaaaaaaaaaaaaaaaaaaccaaaaaacaaaaaaaaaaattaacaaaaaacaaataaaaaacaaacaacaaaataaacttcccccttcaacaccacacctcttttctttcccacaaccttttttctcccctcccattcctccccatgctgccctcattcccctcaaacggctcccatccccaactcactgcccgcttataaaaccagcgccccctttaaacactgcccgtccccccaacaccttccctctccttctcccacacccccc

SEQ ID NO: 577939 - DNA, 263 bp, Homo sapiens
tcagcaggaaaatctcagtcacacataaattcagcccatgtatatgatcctgtaatagtgggaattttggaacctagagagactcaatggacctggttactagtttaaatattatcaattagtggtataacaccaggctagtctcttcactctttatagctattgcctgatatgttcaagtctacgatttatttactgaagcaaaatagtgggtggagaaggctttgaagagactgagaaggatgggcctatcgaacaggaaa

SEQ ID NO: 577940 - DNA, 118 bp, Homo sapiens
tggccccggtgaacagctggagaatgtgtacgtaatattattttaacttatgcagggtgtgagatgtaccccctgctgtaaatgcaggtctcttggtatttatagagcttgtaactgg

SEQ ID NO: 577941 - DNA, 762 bp, Homo sapiens
  misc_feature (623)..(623): n is a, c, g, or t
tcgcgcatgcgcggagggggaagcagtggcgacataggatgctattaagctagagtttctcagagaagtttctggaaagatggagccaaagggacgctggggggtggggagcgccaggaagcaagcgttgtgaaagaaagcgaaaaaacccaagcgcaccgcgacacctccaacctatacgagccacggcccaagcagagcccaaggccactagagaccctcacagccagagaaaaagcacagggaccgcggccagccgctcctaccctctgccactagctcagcccccgagactccccagcacggggagagggcagggggtagccatagagaaacctagagcgctacactggactatatatgcgaggtggaaggaaagccgaaacccgcacctattggagccgcactgtgcgcacgggccccgtacgagtgggctcagtaacagtataaggactacagcgtaggccgccaaagcatatgatatagggggcgtactttcactaatttttcctaaggttttactctcctatacgggctactgtggtaccttatcacaaccatactatcactatatggtggcctgacggctaacggctgcgagttggggaaaccagtaataaccncgggcctgaggggcgtcccgggcggcggtgctccggtatctaccagcggtagccctttaagaaaagcccccggaagggcccgtgttgattataagttggtgcgccgacaaaggccatatgaggggttacgacctgtgcc

SEQ ID NO: 577942 - DNA, 189 bp, Homo sapiens
gactgaggatcccctgcaggcgcacttcccggtcgagtcgtgcactgagaaccttggcgagtttgtcttgctgttcttggttcaatgcaaaagcactggtcacttcaacgtctaccgatttctcttgttcggcctgtacaggtcaaacagagcggcgatctccggcagaagcgggagacggtcgttttc

SEQ ID NO: 577943 - DNA, 235 bp, Homo sapiens
ccagctcaccctcccaaaatactgggattaccggtgtgagccagtgtgtccagccacactctgaggtttttcagcaccaggctgcccagggatggaacataaaaagtgtcacccagagggcccttgagccagtccaggatcccacccaatttcaaacccggggtcagaacaggtggttacacgagtccctgccaatcaagccctcttgttccaagaaagctgcataccttggaag

SEQ ID NO: 577944 - DNA, 197 bp, Homo sapiens
  misc_feature (7)..(7): n is a, c, g, or t
gaccggnttagcggctaggcgctcgattttctcagctgccaatactgtgactaccgcaaatagtaatgatacgtacacgatgtagctcttaggtttcgtcaggtactggtgacttcaggggctttgtattaattcatgttgttctcacagctacccagtaaggagagacactgtcattctctctgcgttgtgtagag

SEQ ID NO: 577945 - DNA, 304 bp, Homo sapiens
  misc_feature (28)..(28): n is a, c, g, or t
  misc_feature (45)..(45): n is a, c, g, or t
  misc_feature (49)..(49): n is a, c, g, or t
  misc_feature (120)..(120): n is a, c, g, or t
  misc_feature (174)..(174): n is a, c, g, or t
  misc_feature (217)..(217): n is a, c, g, or t
  misc_feature (256)..(256): n is a, c, g, or t
gccccctcaggcacggatcatagctgantcgtttttttgtaggtnatgnctttggttttgtctgttcggtggcaaagataaactaagtttgagagatgaatcaaaggaaaaaaatatttncaaagccatgtgaaattgctccattttttgcttttggggggggtcaagtttggntgcttgctgttccggttggggggaaagttggtgggtggaaggngccaggtggaatggagggagtttacaggaagcaacaggncaacgtcgaaccgaattctgtctgggcaccaacgtcaaggggccacat

SEQ ID NO: 577946 - DNA, 415 bp, Homo sapiens
ggcaaatttatttgttattttatttatttgagacaagagtttcgctcgttgcccaggctggagtgcaatggcaagatcttggctcactagaacctccacctcctgggttcgaagcaattctcctgtcttgtttccttttagtattgaataatattccgttatctggatgtaccaccaactgaaggctgtcttgatagcttctaaatgttggcaattatgaattaggctgcaataaacatccgggtacagggttttgtgtggatatcagttttcagtttggctgggcacagtggctcacgcccgtaaatcccagcactttgggaggccaaggtgggcggatcatttgaagtcagccagaccagcctgggcaacatggtgagaccccgtttctactaaaaacaaaaatcggctgggc

SEQ ID NO: 577947 - DNA, 305 bp, Homo sapiens
cgcgagcgccccaagtagctggtattacaggcgcacaccaccacacccagctaatttttatattttgagtagagacggtgactctccgtgttggtcagtctggtctcgaactcccagcctcaggtgatctgcccacctatgcctcccagagtgctgtgattacaggcgcgagccaccacacccagcctatgtgaccttgattttacaagacgcctcatttaatgctagggctgacgcatttaatagtgttaacattgaactcagggccagctgttgtaagtagactgtgctgccatcatctgggt

SEQ ID NO: 577948 - DNA, 794 bp, Homo sapiens
  misc_feature (155)..(155): n is a, c, g, or t
ggagcccctcccgtgttccagctccgtctgccctggtgcctatatatacacatgcgtctatccatactgtgacttttagtctgtgatattgtctcgctgcaaactcactgtttctcagacaggccacaggcacatcctgacgtccgtatcacgancgcacccaaagcacctctcagatccagctttcccaaagtgccttggcaatccgcccctttcaggtcgaatatgcatcacctgtttactaccgctcctctcgatatgcataccacaggaagattatctttaagtctagatgtgatcatttattgtcttttaccattggagacagtgacaacaggtcatggagcttccacgcctagggcacttgatggacgaggactgatcctctccttctcgccggggttggcgttgtgggcttggtggcaccgcatccgaacagggagaatgccttccttcagtaaagtgctaggcatcatagttcttaaagatcagccaaaagcgtgatgccatgggtcacgcgccgtcatccgcgtgccaatggtctgttcactgctaggggctggcgggcggctacctgcatccccctgtgacgtgattcccgcgctccctgtgggaccttgccctgtggccttgactggaatgggggggcccctcgagtccccaggcccggggacacggttgccctggcggtctgaccaaacgtcggaagtcactccgttgctccacgtttgcccctgttcgctgtcctttggtactcccgaagttccgggtcccattgttgatcgatggggttc

SEQ ID NO: 577949 - DNA, 102 bp, Homo sapiens
ttgtgaagcagaattccacaaccgttggattgtccccactcaatagggcaacgtggcgtctgtccacgtgggtgtgtccacgtggcggcacgtggcgtctgt

SEQ ID NO: 577950 - DNA, 143 bp, Homo sapiens
  misc_feature (90)..(90): n is a, c, g, or t
  misc_feature (100)..(100): n is a, c, g, or t
aacgcatgatttgtcgtgtggtttgctctcagatgcttctctccacttcttctgcctctaaaccagaaagaccttaattattctccaggnccagttcaanggttatcttcctgggtgaaacttttccagctgccggtcgaacg

SEQ ID NO: 577951 - DNA, 941 bp, Homo sapiens
  misc_feature (43)..(43): n is a, c, g, or t
  misc_feature (72)..(72): n is a, c, g, or t
  misc_feature (74)..(74): n is a, c, g, or t
  misc_feature (78)..(78): n is a, c, g, or t
  misc_feature (82)..(82): n is a, c, g, or t
  misc_feature (95)..(95): n is a, c, g, or t
  misc_feature (146)..(146): n is a, c, g, or t
  misc_feature (181)..(181): n is a, c, g, or t
  misc_feature (191)..(191): n is a, c, g, or t
  misc_feature (218)..(218): n is a, c, g, or t
  misc_feature (252)..(252): n is a, c, g, or t
  misc_feature (263)..(263): n is a, c, g, or t
  misc_feature (265)..(266): n is a, c, g, or t
  misc_feature (311)..(311): n is a, c, g, or t
  misc_feature (324)..(324): n is a, c, g, or t
  misc_feature (328)..(328): n is a, c, g, or t
  misc_feature (364)..(364): n is a, c, g, or t
  misc_feature (370)..(370): n is a, c, g, or t
  misc_feature (388)..(388): n is a, c, g, or t
  misc_feature (412)..(412): n is a, c, g, or t
  misc_feature (434)..(434): n is a, c, g, or t
  misc_feature (466)..(466): n is a, c, g, or t
  misc_feature (475)..(475): n is a, c, g, or t
  misc_feature (540)..(540): n is a, c, g, or t
  misc_feature (552)..(552): n is a, c, g, or t
  misc_feature (596)..(596): n is a, c, g, or t
  misc_feature (601)..(601): n is a, c, g, or t
  misc_feature (612)..(613): n is a, c, g, or t
  misc_feature (628)..(628): n is a, c, g, or t
  misc_feature (660)..(660): n is a, c, g, or t
  misc_feature (827)..(827): n is a, c, g, or t
  misc_feature (855)..(855): n is a, c, g, or t
  misc_feature (927)..(927): n is a, c, g, or t
ctttttctttttcttttttctcttcctcctttccacccccagngacttgggaagggaaagaacgggaacctnanacanctantccccatatacanatactcacctccatggctcacaccagcaaattgtttgtgaaagagaaacangtccacccctccctcttaagggcccaccaggtctnggcatgggtnggagggccctgggctgggtctcttaanagatgtaaaggtgtggggtgcaagtcatttgaanaggctggaaantnntccagggccccaccctcctcttccctctgtgccctactgcctctnctggcatacaggngcangggtcccttcgtcccctcaacacctgttacactggntggggntgcagccattaacggtcnggcctttggacacaaaatactttngctttttggtctccttacgtgntcaccaccagggaggcatcttttctgtgggcnaactccagnatctcagccgtttggccccggttttcagttagcaggcggccggtccggcgcgtcccacaggcgcncgatgccatccnttctgcaggtatataccacggcagtgcctgcctcccacagcagntgtcnatgtccgactnntgcttacactgatgnctaagagtctgcgtaccaggtcatatatggcnaaggtcccttcctggtatccaacagctgccattggcatcacactgcagaagcccaaggactccaccgagttggactcactctcctccccttctcccaggctgggctgggaggccacagtctcaggtctaaaaacacccaccaccttgccggtggtggcactgaccancttggcctggcagtccacagagccagtnaggatcaagctgccatcctggtatggcagcaacacaggtgagttggccctggtggacctcagtccctttcantacatggatgaggg

SEQ ID NO: 577952 - DNA, 579 bp, Homo sapiens
  misc_feature (317)..(317): n is a, c, g, or t
  misc_feature (324)..(324): n is a, c, g, or t
  misc_feature (337)..(337): n is a, c, g, or t
  misc_feature (339)..(339): n is a, c, g, or t
  misc_feature (455)..(455): n is a, c, g, or t
  misc_feature (491)..(491): n is a, c, g, or t
  misc_feature (553)..(553): n is a, c, g, or t
  misc_feature (576)..(576): n is a, c, g, or t
aatgaactgctgacttttctaaagttctttaactgatcaattctgtatagagggatatttatctaaccactttccgtattttacaagtgctctttctaaaaaggaataactattatagctctatttccccaatctctataggctcatgagagattgcttgtgtaaatataaaagcaccatatgtgttcttaactcctatggctgcttgaagctcatgatgagtctttttgcagttttaattgttaagtacagaacaaacaattgtttggtgatggcctggttgaaagagagcatataaatatatcccagtggaactnaccaaanaagaccacacctnanaaattattgcattttctcattatgtgaggggttgatttgctttggttttaatgcagctcttttaatataaagatcttgatacagtgaaatctcttatttcaagtgtaagtatcttnaccacccttccctgccatggattccactgttcaagnagttcaacattacatgcatcgatgcagaggactgttttagaaagactggcatcctgtataanatttgtcaatgagccattcctgnttt

SEQ ID NO: 577953 - DNA, 1597 bp, Homo sapiens
  misc_feature (1)..(1): n is a, c, g, or t
  misc_feature (270)..(270): n is a, c, g, or t
  misc_feature (1001)..(1001): n is a, c, g, or t
  misc_feature (1019)..(1019): n is a, c, g, or t
ngtaagtggagcgggtatttatccagcgctgttgatgtggtgaccacgaggagaggtgttgtgcacatcttgacaccttgatgattgtgaacatcgcgaagaccgccaccacaacgatggtggggatatatacagacgtcggcgtgtggttgccacaaatagaagccgcgccgggtgctcgcctgttaaacacggggccccacgagatgtggttgttgtgaggtcctccccgcgaagaagaaaggtgtgatattgttactcccacaatcngcgggtgaaagggggagttttaagacttttttaaaaccgctgttgcccaacaagaggaaccacacatcttcacgacacgagcccttaattatggagaagtgtttgacaccacaaagcccggtgttgaaccatttggccgcaaaagtggtgcaaccccagacaccccccacgggcgttggggagacacagaatggccccgcggcgccaaatgatttttgtttggccccccacgatgttcgacccacgagttctgcgccaacagagggtgtcccgccgggagggcaaatttgtgtcgtgtgtgtgaacaggcgcgtggtggggtgttaaaattccgccaacagaccgtggccgcacgacagacgttttctttgcccccggggtggtgaaagacgacccaggcccgcgctccccacgagaacgccgcaatttaaggagaagcgttggccgttttccaaggggggaattttgtgttccacgaattcccccgggcactcccccacgcgaaaaatgcgcacgcgcttgtgaaaattttataagggccttggagacccacctggggcacccccagcgttggaggagaaagtgtttggtctcccgaaggggtgaaattaagatttttcttctaaagcacacatggtggtctgaaaatgaattgtggaggagagaagccactatagagaggagagtttataaaaggcacattaagcccccacggggcacttggtaatatnctgcacacattatgagtntatcaccacatcggtatatatagcgccactcgagagagagaagaatatatttggagatatagtggccccactctgagagggtgtctttgcacacaccacaaggctaatttcccacagtgtggtgaatccacacaaacccactccacagcccacacaagtttctctcctcgcgtgtcactgtttgtgccctctgagttaacagagagagaagctcgcacacaacttttcacaacactccacaaatattgggcgcgagaagaaaggagggcacacttaggtgagcctagcacaccacggctgtggagaacccaaaatcccacaagataattcaccacaccctcggcaccacgcttatttttctgtcttatactcacacttgtatgagtccacgagagaagcccaagcttcttagtagaacaccttgccactcgtgcacgatagtaatgttcttctataaagtagaatgttgagggcttcttgaaaatttctgctggtgctaacacaaacacttcggaagaaagggtgggaaagttactggagatagtccacccaagggacacaggaaacgggagatttga

SEQ ID NO: 577954 - DNA, 195 bp, Homo sapiens
gggggggggggccccccccccccccccccgggggggggccttcccccccaagggggcccctggggggtgggggggggggggcgtttttttttacccctttcccggggggcccccgggttccccccccccctttttggggttttttttggttgggggtcccccccccttttttttaaacccccccgcccccgggga

SEQ ID NO: 577955 - DNA, 116 bp, Homo sapiens
ctgcgtccatcagtagtaaaacagttaatttttaaccctttgcaggaattgctgatgggagaagactgcgagtcttctcccatcagataaccaacaaggtcaatatatagaatccg

SEQ ID NO: 577956 - DNA, 262 bp, Homo sapiens
cggccgcgacactgagaagaccaagttgaacaacttatcctggttggccttaatacagttgttattgccgtgttcttcctggcttttaagaatcggctgtttcaaccccagtgtggcccttacaggcagcattaagatggggaacttctttgcttccggcttctaccgccttcaaccccattcttggacccttggttctcatcccttttccccagcttcgctcccgggaggagggacccaagggccccctctgctcctgtgg

SEQ ID NO: 577957 - DNA, 165 bp, Homo sapiens
  misc_feature (17)..(17): n is a, c, g, or t
  misc_feature (50)..(50): n is a, c, g, or t
  misc_feature (90)..(90): n is a, c, g, or t
caacagccggtcccggncagtatccatcagctcttctatacgtccaacancatcatcctgcagtctgccctagtgtccggcctacgtgtncggccacgtggccggacacgtatatatgtgttacctacccttgtcggtccggcccggccactacgtgtccggcca

SEQ ID NO: 577958 - DNA, 333 bp, Homo sapiens
ttttcccttttttgaaccgggaaaaaaaattttttttggttcgggaaaaaggggggggatttccattgtccctacccccaggggcccgtttcccttgaaaagggaccgggggggcctcaaattttcaaaaccctggggggaggggaaaattggtttttttttaattggcaaattttccaggggggggggggggggtttttttttttttgggaggggtttttttgtagggcggcatattgggccgggggtttgttgggtttttagggttcccaaaattggggaaattttgggtttttgtttttttttttcaataaaggcccccggggcccccca

SEQ ID NO: 577959 - DNA, 1021 bp, Homo sapiens
gacgagtccttacgaccgacatggcctcaggacttccacgactctcgcaggttggtgtcgctccgaggtctcgcctcatggattaagggcaggagcgctctattcctaggatagcgatgtgtgaacgttggccagctgtgctggggtgcatcatatgccgctcgcattcgcacgtccagttacctctcaacttccgcgtagaacgcccacgttctcagtcgagtccactccgataggtgctgaagttggtgtcgagcctcgcagagcgtcccggtcactgcgaatggcacgtctttccaggtggtctctagggccgcacgtcgagggcatgtcttgaccgagcgtcgatggagagcatgctgggtgcggtcattcttgtaagctggaccatggtccggcttgagtagggtgctccgagcacaggaagccgacgcatggggacatttgactgctctgcacctgaggcaattcccctgctgtagcaccgtgggggtacaagttctaatacccgatttacaattacggtcgaagtacacggagtccccgtcactggacgcaatgaatgagaccttgtcttcatattgcgtgattgtctctggggactgtgatttatggtagtgattctgaaagatcacgtacctagcgtctaatataccgtgtgctccaaagattgagagacattctgcactccgatactgtgagcgacccttctttgtccgccagctccatcatcttagcatgcagattatcaatctggtgaattgtttccgacggacatggaggccacctctggtggtgaaatgacgaccggttgtaggcgcgtagacactatttcgaagcttgagtaattcaggatatggcatatgcagaggcaacgggttttatccgttaaacccggctcggatgaccggggcaggagtttccctcttaggacttttatcagattgttgtccatgtcttaaggtggcccttctcagtgggcggtaatccggccagctttggagatccgtataaaaactga

SEQ ID NO: 577960 - DNA, 239 bp, Homo sapiens
ggcctcccaaagtgctgggattacaggcgtgaactaccgcacccggcccatctctggaactttttcatcttccgaaatggaacctctgctcccgttaaacggtaactccccatttcttcctgttctaggcctcggcagccactattctactttgttttttgagatggagtctcactctgtcaccgtggctggagtgcagtgacgtgatctcagctcactgcacacttccgcctctcagg

SEQ ID NO: 577961 - DNA, 398 bp, Homo sapiens
gaccctcctcctcagcagacgcagctcctaaagcattttacagcatttccatcatcagttagcaggcttggtaaaggttgtgctttttttatttctaattcatctgcagccaactatttctacttttttttcttggagaatcgtaacaattagaaaaaactcagacaaactatgtagcctagaaagaacaaaaaaatggacaggtatgtcgcgtatgcataaaatataggtagatactagtcttttcatccagccacgtccataaagtatacacaaatgtgcacatgcttccagagatggcactcatgtgcacactgagcgaagtgtaacacccaacagaaagcagcgcactgcaatcataactgcagacagggagctgcgtctgcggaggaggggtc

SEQ ID NO: 577962 - DNA, 202 bp, Homo sapiens
  misc_feature (40)..(40): n is a, c, g, or t
  misc_feature (53)..(53): n is a, c, g, or t
  misc_feature (56)..(56): n is a, c, g, or t
  misc_feature (64)..(64): n is a, c, g, or t
  misc_feature (94)..(94): n is a, c, g, or t
  misc_feature (99)..(99): n is a, c, g, or t
  misc_feature (105)..(105): n is a, c, g, or t
aggtggatctagaggatccctccctattagacattaggangatgtgtaacatnagntatatttntgatatctagatggcagaaaaacacctctnaaatntattantggaagggatagaatagagtgttaactaacaattttttaaaaagaaattcacacatatgatatataaactgaattttttgaagtgatgtctaatagg

SEQ ID NO: 577963 - DNA, 890 bp, Homo sapiens
aactgtgttatcacaaggcttaacacttattatccttgactggtgagtggttttctttttccccgttagtgagtggctggtaattctggaatactgtcatctaaaatggctcgtggctaaaatctaccttcattttctgtttgaaatctaaactatattgaagtcataaaatagaacaagaaatacagcatctgttacccagcatgttttagctgtattacacacaataacagaaaagtaaagcagatgcttaagttgataaaagaagaacactcattataacttctattttaaaaagcatatgaaaggttcatattctctcatattttcaaggccttttgcttttcttgttaaaaataagatttgagaggaatttctggttaaactttgggtttactcatcacaagcttttcagagtaagaaaacaggcaatcgaaaaagctgtacttgtattatttacattataacaaggagcttttttttctttctgggaagctatagtgtagaaattgatgtaaaaaatacttagttgtattctttacacacagttgagaaatattattaaaataatgcaccaatattttataatggtattattaaaataatgcccatttgctggacacggtggctcatgcctgtaatgccagcattttggaaggccaaggttggtggatcagttgagcctgggagtttgagaccagcctgggcaacgtggcaaaacctcatgtatggcttcttggtaaccaagtgtctttgccaactttttcaatgcagaacttttgaggcgcattacttcccatgagctcagcaaatcctcgtagaggtaaacggcaggttcgagtgacgaactgcaatagtcgcattcttagctcaatgtctgtctctttcac

SEQ ID NO: 577964 - DNA, 690 bp, Homo sapiens
ccggtgctgctgggagaggctgagactccgtggccacactcttgtcctgcgtgaccaggtatcccgtggattgctgagctccttgctactctgggtctgagccctctggcacctttggcaccagtgaatcccagtctcaataatacctatgagttcatgagcacattcttcttagaagctcacgtctctgctacttcccaggattctgatctatcatctggggaggagatgaggttgattgcacctgctggaagtcctagacccagagatccaggagctttatgaggaagatgaggcttcggtgaggactgcaagcacgctggagtcctctctacagtgccagaacgctgctggagcatcgtactctatcttcactggcgaacgggctatgctagtgtgtggcacggagtgtggttggactgaatagaatgtaagacgatttcacggccagaccagcaagtgcatcacaggttgtaggcagacgacggacgtagttccatgtgagatctagtatgacaggaggcgtgggaagctgggtgcacccaaggcccgggctttcccggggcccgttatcgtcttctggcccccttggttaccttggaccgcggaatatcgcttatggcccgtgacttggcaacggcattgctacgctacgtggagccgcctgggcgctcgtgagaggtacccctg

SEQ ID NO: 577965 - DNA, 310 bp, Homo sapiens
ggatcaaatgatcactgcatagcctcctgagtagctgggactacaggtgcgtgccacatgcctggataattttttgtattttatagtagagatggggtttcatcgtgttaaccaggatggtctgaatctcctgacctggtgatctacccacctcagcctccctagttttttaacagataatttctatctctttatcattatcttctatatggtaagacattgttcttctactttcttttatttctttagacatgctttcttttagtattttgaacatatttaaaatagctgatttaaagtctctgtttag

SEQ ID NO: 577966 - DNA, 234 bp, Homo sapiens
ggtcactctaaggacccagtagtcggacggacgatcagcattgtgccaggatgagtgtatgtccttaatcaatctttcattcatcagtaacatttactgaactcctatgagcaggtactgtagccttttttatccttcctgagagaaatcaaggggacttatcagtgggtttcaggcaatgataaggaaatgtcaatttatggtctgagttttcctagtcagctttaagggtaa

SEQ ID NO: 577967 - DNA, 132 bp, Homo sapiens
gcctcctgcgccaactttatatgtacctggctatacctcggctggggcttgaactaagtaaagcagccaaggcgtacagatctagatagcagagaagtacagtctcatatctaaaacattgcaactactgta

SEQ ID NO: 577968 - DNA, 250 bp, Homo sapiens
ctgacggaaagacggtattcgccatgcgacgtgttcgacgtggtctacgagcagaaggtgatggacggcaaggtcgtcggcaccggcaacatcctgtccgcccgctttaccaaccgcggcaaaacctacaccgccgtgctttataccaacaagcagggcaacagtacctactacaccgcagacggcaacagcctgcgcaaggccttcatccgtaccccggtcgacttcgctcgcatcagctcgcgctttt

SEQ ID NO: 577969 - DNA, 320 bp, Homo sapiens
catcacaccacggagcctcaggtcacccttgatgtggcagttttaggaactggccttaggaaatctaactatgaaaccaaggttatggagtatcccccctcaggaaggaacactgaacaactgattgacagtttttttgccgccagccagaccaccaagtggcccattaaccaagagaaccagcgcaaccagatacgttgacccgcatttcctacctttcatgtgctttgcccagcccagcctgcataccttactcatgatgtcaattcccaagtttcgctaataaaaacatttttgcaagccttttcagggagccaaca

SEQ ID NO: 577970 - DNA, 275 bp, Homo sapiens
gggacccattcaccatttattgtaacaaaaagggggtagggacaggagctctaggactggcccgggggtgttctaaaggccacctggggttggaaaacaatggcctggacccttcactggggggcaggctgtgttccaagtccaccaaatacctcaagaagttaaccagttccgttccagcctttttgatcaggggggtcagctgctcctttgacttttaaaagaaaaacttggcctcggcctgaaactttgggtttttgaccttctccatcccc

SEQ ID NO: 577971 - DNA, 378 bp, Homo sapiens
cagagcttccagtttatccattttaatggattaccagcgtgctaatctgtctgcagctccttcaagcactccagttcctggtcattaaggtcaggtgtgctgggatgcttcaaatatctgtgtctttcaattttgcaatatccaaagacaagtttgtacggtgtccttctagatgcttttttattctttcccaaattttgatcttattaagagctattaacagtttccacaaatccttatgtttagctcctacaaagggccataccatttgaggttgaggtgccactacatcgccatggttcctgataataggaacccttgccgtatttcttatcatttctaccatctgacaattttgttcagaccatctgaacatag

SEQ ID NO: 577972 - DNA, 465 bp, Homo sapiens
caatactaacagcgagaaggtgaaggcacagacgagttagtactgggaacgccggaaggtgggagggcatatcataacatttctagttaatcaaaccaccggtggacaccttctttggcccatcagcaaggactagcgtctggtccgtcttggtgacagtgacatagaaggtgagggccccaccggtgctcttgggacgaagatccatgctaaattccccatcctgcagcaatgagtcccggatcaccgaacatttctggccccgttgtgtcagcccattcacgtaaaagcttgagcgttctttgccaacgagaacaaccacctcagctggcgtgatgtcgacgaacgtcctcccggagacggcggcccagacggagggcgagtccttgtagcccatgatggccgcgtcctgagaggtcccggtccgccatgaggttgtcgatgtaggcgttcccaggcggccat

SEQ ID NO: 577973 - DNA, 85 bp, Homo sapiens
cccggggcccccccgcccccccttttttgcccccagggtctttgcggggcatgttgggaaaggacgggcttttggcggaagggga

SEQ ID NO: 577974 - DNA, 349 bp, Homo sapiens
attcgcggccgcgtcgacatttgcaactgaatagagcaaatgctttatactttatattttgaagtcaggtgctgagcagagcacccaagcaactgccagagtgaggacagcttcaaaaggtagccacagtgtgacttctaagctgaatataatcaaacgaactccctttcatcctgttttcttccaaactctcagaactactatcgttccacacacaaaacagccagggttgaaaactggagcacagaattagcataaagctaactttaaataagcagttttctgctgaggtggaaggatatacctaagtaatttcgtcgacgcggccgcgaatttggtagtagtagta

SEQ ID NO: 577975 - DNA, 311 bp, Homo sapiens
  misc_feature (227)..(227): n is a, c, g, or t
cgaggtgagatctgaacgtacgcaacaatcctctgaagcaggcgcaaagcgcagggctcagcttcgagtcgcgccacagcctgcatgacctgatcccagaggcggagcagcagctcagggttctccagagtacgaagatttgcggtcggcacggtcagaatgatggggtgcgtggccagctctatccagggcactggattctcctggatacgcctctgacactcatncagggtggactcccctaggaagagagaccatggagcttgaaatcctttcccaaatcccttaaattacaacatacaacttagact

SEQ ID NO: 577976 - DNA, 395 bp, Homo sapiens
gggggtgtcggtaaagtcctacagattatagagtccgaattgtaccagaggagaagaggtttggacgtgggcaataaccaagagtagactcctcagtaggaatcgaggagacagaggacgtaagggtcaaagttttacagaattagactagtgaagagtggaagtctctgcacacacaacaaaaagaaatcgggtcaggacttaaagacgacatcgttgatattccatcttttaatccggtcagtgtaattaccgacggtagtcctacttccaaaatttggtccgcctaaggcctaggacgaattcctagttagtcaatttcaccttcgttaatcagagatagtaaggtcaatttcaacttgtacgaaatattagttttatagaccctcgttata

SEQ ID NO: 577977 - DNA, 964 bp, Homo sapiens
cggacgcgtgtgtaccgcctgtgaggaggtccctgagggatagggcaagttctggggtgacatcctggatttgcaactatagagagctctaccatacgcccatacgtggtgctcagctccacacctgaagagttgatggttgggccctgctgttttctgaagtgcgatagcatcctacgaagccggttgctcaaggtgcttgtagggagttcgggctcgagaatgctgtgatcttatcttggtgggtctaaggaacggtccatccccttttgatcgagcgagcaccctcgagatgtgtggttctcctagatccttggtgtgctatatccacgtcgttacattctcttcgtatcgactcaccagcaaaatcatgcgtccacacgtaagtacgaggagaaggcaggtactaattcgcactaacaatgtagttgtgccaggtccttctaaaccgagagaaagaagcgtttaccatcgaaatttatgttctttccatgaagttagtgccagcctagtaacctatctctacacagagccagaggggaggactgagccactgttccaatgcattagtcttccaccgacgattttagcgtaaaactccgtacagaattgttctttgtttcccagccgaaaacttgcaccttccgcctgcgttccacggggttgtgcgcacaccgagggaccggctatggaagtttcatcgtaagaacctcctcattcccgcttgttgtaagcgcagaagcaagccgatgcgtggaactcgaaaaggatattagcgcggggattaccgggacacagcacagaaggttccccgttgggaacattgcggttgtacaacggggacaaggtccttcaccctggaattaatcctgagggcaccgtacgatttcgcagggtgatgggatgttcgatggtgggggttatggacccatttcggtggtgccccaattttgcaggtagtttc

SEQ ID NO: 577978 - DNA, 296 bp, Homo sapiens
tgcatgtacatggcaggaggacgacgaggactccaaacaatacatctatccacttccttgtataggaagaagcgctctcgcgatacccttgttccgtaaaactgttggttccagttaggccattccatgaacccgagggccatgaagaaccgctctcgcatagccttgctccgtaagcgtcggttccagttataccgttccaggaacccgagggccgggaagaaccgctctcgcatacccttgctccgtaagcgtcggttccagttataccgttccatgaactcgagggccaggaa

SEQ ID NO: 577979 - DNA, 307 bp, Homo sapiens
gtactaatgtgcctctgtttcgtttccttccctccctcccttcctcctgtgcttccttccttccttccttccttccttccttccttccttccttccttccttcctccctaccttccttaccttccttcccttccattccctacctatctatactcttcttactatcttttgactcactctgtcaccaaggcgggagtgccagtggtgcgaactcactgcaacctcagactacccgggatcgggtaaaaactagtgcctcggccttctgagtagctgggataacaagtgtgtgccaacactgcctgga

SEQ ID NO: 577980 - DNA, 1166 bp, Homo sapiens
  misc_feature (1166)..(1166): n is a, c, g, or t
cacatcacacacacacatcacaacaccctgataagggctataccttgatcttaaggcactcatgctgctaatgtacaaacagcgttctggaataccacaccggccctagcgtgttcagaaaatcggacgcgacccgcagagtcggcacctagtggcccaaggggctccgatcgcattcccatgaccacttcctgacttagtccatctcacgtgacgacatggtgcacgcattgttcaccactggcagagtacggtgacccaacaggggacgcgtcgcgtacgtagaccgccaatacgagtccgaggacccctaatggaaacagaaacgtcatacacgtaggcctacataacattaacctcactgtacaattcacgcgtcctatactcaagaacggagtctctccgggaggtctctaatgctacctgcgctctatgtggatctcgatctaaactaaaaacaaggaaatgtgacgacatagtacgcctgcaatatacatacatataactaccaatacgtcatgacatcactggaaacactcctggaccaggataaggacactggagatcaaaggcaccctgagaaaccccagaggcgtcgtcacgtgagctttccacagttttgagtttgggggaccatacaggtacgtcatggacggacgccgtgtcacagggacatgctaacgttgagaacgcacaagtcctgggtctctcgtatggcgtgggccatactattctgtatcaacctggacaccaaactatgtcttctaattgatgatcatccggtgtctatttatctgagggtgttaaggaaccacaccgggcaggtcaaccaccaataaaaataacggcacacaagcgcaaggataacaaagtatagcgtcgcactctgtcggggggcacccctttggacaagaatgggttagattttacaccaaacttccaacccgtggcgcccagtgaaaacaagttacacggttgacaaacaggttacttatctaccaaagttccaagcggatgaagcacgggtatacgcagtatccaacgttagcgttgccagagcaacacactatcgtccatcccaatggcagaagctcgaaagggggatacagaacagggggatgcccaagtgagtggtccggccgcctccttactcgggagattcaccn

SEQ ID NO: 577981 - DNA, 145 bp, Homo sapiens
  misc_feature (32)..(32): n is a, c, g, or t
  misc_feature (132)..(132): n is a, c, g, or t
ggtgatctagaggatccctgatgctgcacaantctgcagtactgtttatccgaatcctgctactgatgtactgaatgtaagcaaagtttccggcaatgcttcctacactatttacagtgtatccggacagcnttgttgcgaaacg

SEQ ID NO: 577982 - DNA, 979 bp, Homo sapiens
  misc_feature (8)..(8): n is a, c, g, or t
  misc_feature (506)..(506): n is a, c, g, or t
gctcttcncggctccagctccgccgccagctccagcctttgctccccctcccaaagtcccctccccggagcggagcgcacctagggtccctcttccgtccccccagcccagctacccgttcagaccagcagcctcggggggcacccccccgacagcctgcctccctcccgctcagccctgccagggttccccagccatgaatctcttccgattcctgggagacctctcccaacctcctcgccatcatcttgctactgctcaagaatctggaagtcccgctcgtgcgccggaatttcagggaagagccaggtcctgtttgcctgtggtgttcactgcccgatatctggacctcttcaccaactacatctcacgtctacaacacgtgtatgacaggtggtctacatagcctgctccttcaccacggtctggctcgactttatacgccaagttcacaagctacttacgatgggaaccatgacacgttcagagtggagttcctggtcgtncccacagccattctggcgttcctggtcaatcatgacttcacccctctggagatcctctgggaccttctccatctacctggagtcagtggccatcttgccgcagcctgttcatggtagagcaagaccggcgaggcggagaccatcaccagccactacttgtatgcgctaggcgtttaccgaacagctctatctcttcaactggatctggcgctacccatttcgcagggcttcttcgacctcatcgccatgtggcaggcctggtccagacagtcctctactgcgatttcttctacctctatatacctagactcctcaaggggaggaagttgagttttgccggcatagccccggtcctctccatctctctcctcgggagcacggagaaggcagacggacgccgcagaagatgtaagcaggtttcccatccagggtgacttttcaaacacccactctggtgctccatccgcttctga

SEQ ID NO: 577983 - DNA, 678 bp, Homo sapiens
  misc_feature (8)..(8): n is a, c, g, or t
  misc_feature (326)..(326): n is a, c, g, or t
  misc_feature (339)..(339): n is a, c, g, or t
  misc_feature (341)..(341): n is a, c, g, or t
  misc_feature (412)..(412): n is a, c, g, or t
  misc_feature (476)..(476): n is a, c, g, or t
  misc_feature (478)..(478): n is a, c, g, or t
  misc_feature (497)..(497): n is a, c, g, or t
  misc_feature (504)..(504): n is a, c, g, or t
  misc_feature (506)..(507): n is a, c, g, or t
  misc_feature (509)..(509): n is a, c, g, or t
  misc_feature (518)..(519): n is a, c, g, or t
  misc_feature (532)..(532): n is a, c, g, or t
  misc_feature (535)..(535): n is a, c, g, or t
  misc_feature (540)..(540): n is a, c, g, or t
  misc_feature (558)..(558): n is a, c, g, or t
  misc_feature (561)..(562): n is a, c, g, or t
gctcttcncggctccagctccgccgccagctccagcctttgctccccctcccaaagtcccctccccggagcggagcgcacctagggtccctcttccgtccccccagcccagctacccgttcagaccagcagcctcggggggcacccccccgacagcctgcctccctcccgctcagccctgccagggttccccagccatgaatctcttccgattcctgggagacctctcccaacctcctcgccatcatcttgctactgctcaagaatctggaagtcccgctcgtgcgccggtgagaggcccaccagggctggcgaaggagagagatngcgggcgggggtngngggacgtcgcaggactcaggaagggcttgggggcactaggggcaccggttccacccccactgcttgctggngatctctacttctaggttactgcgtctccaggggatacagctcccttccccagactggcggggngngcatacagcttcactgtgnactggcntnnangcccccaanntcagccacccacnagncccantctgggcagcccgagggntcnntggcaccgcggtcacagggcacccgtggcacgcgcgcgcaggcgcgctgtgagtctggtgacgctggaccggggcggccacgaagggacacgggagggaaggtgaccggattgggg

SEQ ID NO: 577984 - DNA, 347 bp, Homo sapiens
gcagacgcacgagcctcatccccatttatccctttttttcatatagtcaaggttcatttagattgcacggtttacattttcttggcttacatgtcttccctccggcccccaccagtgagatttattggagcatacatatactggacaaattaaattggcatatatttatggtatataacatgatgtttggatgtatgcatacatggtgcaaggattactacaatcaagctaattaacgtggctcacgccggtaatcccagcacttggggaggccaagtggggtggattacctgaggtcaggagttcaagaccagccgggccaacagggtgaaaccccgttctctact

SEQ ID NO: 577985 - DNA, 130 bp, Homo sapiens
catccttacacttacactgttgcctttttacttttagcccttctcagttcagcacgtgatttactttgcattgcctgaggcaccctaggttgcacacactttttcacatcgttgcttccatgcattcggg

SEQ ID NO: 577986 - DNA, 717 bp, Homo sapiens
atttgaaaactgagtgagatgacattagaaccagagatggagcatctcgtgtgtcgccagaatgttactcagggtccatgaatgctgtgatgctgggaacttacggagagattcagccacgagttgagagtgataaaaatggctaaaatgggaaatggtgagcactcttatgattagtgagatctggtcaatacagacccattgaggatgggtaaaagaatactagcagtaaaataattacatataatatagtaagaatattctttagagggcagcgttactgagtgatcaaagcatagtagaaatcactttggttaaaagtgactcaaattattcactcttaggtaatctaccaacttcctgatgtttttctttaatatttggaactgttcaagacagaatggagcctacatatatggtgttccactaggtatgttccaaaatgtcatatcatggagaatggagacaccttccaggtgtctgtataaacccatcttctctgtgtacttctggcatcttattttggtaggatcatttggcagggggtaaagtacctgtacttttggcaccattgaaaccagctctggcccacttgtttgaatagctatcagactcaggtctctatatgctttatatacagttgagagaaccagtgtaaatgctcttgaaattgtatctttccatgcttcagaccagatgcattaacaaacatggatt

SEQ ID NO: 577987 - DNA, 203 bp, Homo sapiens
  misc_feature (85)..(85): n is a, c, g, or t
  misc_feature (194)..(194): n is a, c, g, or t
ccctggagtagtcaacaaacacactccaaatcaggatttccacccaaggtcttcctgctactaaaggggagcatctaacatttgncccagagtcagaagacctggtttctgcttcttgagttgtcagctgactccatctgggagagcagattgacaccttctttccagctctggtctggggtttctccatctancaaaaacaa

SEQ ID NO: 577988 - DNA, 588 bp, Homo sapiens
  misc_feature (322)..(322): n is a, c, g, or t
  misc_feature (385)..(385): n is a, c, g, or t
  misc_feature (425)..(425): n is a, c, g, or t
  misc_feature (558)..(558): n is a, c, g, or t
  misc_feature (584)..(584): n is a, c, g, or t
aattcgcggccgcgtcgacaatcctaaatgcaatcttttggaagtctgctattaaaaagcctttaaggatttactaacttcgagtctaagtgcaaggggacgaaagcttaagcctgtcagacattccttttcttggacaaaaagatcaaagtttcctacaaattgctaagctttgcacaagggagaagcctacatgtactagtgcatggaatcagtttcatcttatttcatggggactcttctcccactggaaagaaacagaatgaggaatgaatctaatggtctctcatcagaagtggtaaactggtctctatatcacgantcagacgttttttaagcagacgtggagcagacgaaccagcttccgtagccacagaccactacnggtatctaagctaaagcaagatgaacaatatccggatcantgaactgtactaaagggcagggtcaccactacaaaaaggagttgtctaaagcagaattcaatacgcgggtagagtccactaagggttgtccatgagccaacgctagaacgcgctcaactatagcgactgaggnactagcacgaggccttcttgggggcngttc

SEQ ID NO: 577989 - DNA, 506 bp, Homo sapiens
  misc_feature (17)..(17): n is a, c, g, or t
  misc_feature (297)..(297): n is a, c, g, or t
  misc_feature (346)..(346): n is a, c, g, or t
ctatgctggagcgcgcnatagatcatagctcactgcagcctccaactctcgggctcaagtgatccttccacctctgcctcgcctgtaggtgggactacaggtgcaggccactgtgcttggctcattttaaaactttgtagtgatggggtctcactgtgttgcccaggctgttcttgaatgcctgggttcaagtgatcctcccaccttagcctcccaaagtgctgggattacaggcatgagccatcgcacccagcctacctgctctgttctagctccctgcttccttcacgggcctgngcactggtaggtgctgcagggaaatggtctgtgaaaggacctcatatgncaaacgatcttacagacagaagcgtggtctttttttttttttctttttttgagatggagtccattctgtcaccggggcggagtgcagtagatgatctcggctcactcttgctctgcctcttgggttcagcgattctctggctcagctccctagtagctgg

SEQ ID NO: 577990 - DNA, 120 bp, Homo sapiens
acaagtcttgcatccttcctccagaccacgtcacgctctttgtatcactcgcagctcaagtacaactggctgtcctttgaccactgtgacttcctcttccagctgtttttacaaaaccgc

SEQ ID NO: 577991 - DNA, 214 bp, Homo sapiens
  misc_feature (213)..(213): n is a, c, g, or t
atacgaatcgagccggtcccaatttatgcagcttgcggggtgctggcgcgcgcttctgctcggacgcgtggacacgggggttgcacagggtggcgtcaaatttctcggccggccgatgatgccgctaaaaatcagctcaggctgttttggcaaccgtagacgcacgctgttgcgcagcgtcgggttcatctcgacgatcatttgggccgcgtng

SEQ ID NO: 577992 - DNA, 420 bp, Homo sapiens
aaaagccatttctaagctatatgcagtaggttgctttttttgattttctttaaggcggagttcactctgtgttggcccaggatagagtgcaagggtgcgatctgggctcaccgaaacctcggcctccggggttcaattgattctcttgcctcagcttcccaagtagctggattacaggcatgcgccaccatgcccagctaatttggtattttaagtagagacagggtttctccatgtgggtcaggcgggactcaaactcttaacctcaggtgatctgtctgcctcggcctcccaaagtgtggggataacaggcgtgagccattgcgccgggcctggactgtacattcttaagggcagaggccttatctgtctaaggcaagtgggtatcctgaacagaacctgacagtaagactctgataa

SEQ ID NO: 577993 - DNA, 912 bp, Homo sapiens
ctcctccaccaggcatgcctcctcctggctccttcccacccccagtgcacctcctggagccctcccactgggataccccagccatgcccacactatgctcctggggctgcaggaatggcccacatcggcggaaccacagagcacgaatcctggtcatggacactcactacacacccattcccaccgggtgggatgcccatctaggcacatgacatcagatgccagaacgcacaaccatggcacctcatggaaaagcgacacaccacaaacgactgagaccccacaggctcatgacagggcacagcccaacgccaaagacacaacaccaagaaaaatgcccaccagcccatggaacacagccgaccgaagggagcgatgaacaccaccgaagacgcacaaccaaaacagagagacacaccaaggggccaacactacgaaccaaagcccaccaaaaaggaagagccgtgagaccacacacacagtagacagcaccaacacaggacaaacacagacacaacacagaacgcaagccaaaaacgcagaacgcacaacgagaccacacacacaaactagaaaggagagaacacagaccaacgcaaacgaaacagaaaaaaaacaaacaaccaccaaaaaacaagcaaaacgacagcaaaaaaagcaacagacagagcggacaagactgatagccgcgggcacgccgcgaacggcgaaaagacgacgaccaaacgaacgaagaacaggccacgagcgaccaccgcgcgaaagaccgagccaggcgcacgaaggaaggacaacggaacagccgacacgcaccagccgaggggacgcagaagagaacgcaaggaggagcacgagagcgcaacagggcggcgcaacgaagagccccagaaagaggagggagagagggagaag

SEQ ID NO: 577994 - DNA, 338 bp, Homo sapiens
atttttccctttcccccccccccggggccccccccgggtcctcccttccccttccccttcccccccctttgggttcccttccccggggggccttttgattttccattggggtcccccgctttcccatttttggttttttttttgcgttgcgttcccctcccccggggttgttttttccccccccggggcctttttttttaaacttttttcccggcctttttttaagtgccttccccccctttctttttgccctttttaccccccctttcccccccccccgggcccattggggttttttccggcgtggattttaataaattttttttttttttttttta

SEQ ID NO: 577995 - DNA, 1747 bp, Homo sapiens
  misc_feature (934)..(934): n is a, c, g, or t
  misc_feature (1414)..(1414): n is a, c, g, or t
gttgatatggttggtcctgctccactcttcgtctcccgcttgttgattgttatttattattttggtggtggtgttctctcatcgatgatgtgggcgagagtggttgtatatcacatcaacacccgctgggtggggtgtgttttagtcatgtggtgagaatgaagggagattagtggttttttgattctatgattaattactgtgttgtttgttcctccccccctgttgttacagcggtggtgtttagagatggtgtctgttgctcacgaacgagtggtagttccgaccccccgagcgtggtttggttttggtgtgcttcctacgtcattaggatgggtgggcccccctacatgtggtgtgtttagggatatgtaggtggggtggccctccctccttctgctgcttttagttagtttgtagaggggagaaggagtagtatttttttctgttggggtagtgtgataggatgttggtgtgggtagaactcccccccccccaacttactacagctacttactggttgttgttgcttcctgctacttacgtcatgctcccgccccttggtttaatatgatgagtcctcccccctgcttcttaatagtgtgcggccgctcgccgttcggtagttatgattgtgtggtgtgtaggaagaatcactcctctgcatcaccagcaaacaccaacacgtcgtgtgttgtatagtaatagtgtgttgttgttgacccacacccaccaccaaatatatagttgagattgtggtgtgtaatagtgtggggggtggggtggggcagagtagagaaagagaggagtagtattataggtacttccctcacactgtcgcatcgtcggtgggtgttaatccacaccgctgtgcatcagcactttgtactctcttttttatatattataaaaaagagaagtagtattgttttantataagaatagttagtggccgcaacacagcagcagagagagagccctgttgttgtggaacacacaacagaactactacccctctccttattatatatagtagtggggggtgagaagaatagtgtttcgtgaagaagagatataccacacactatattattgtcttgcgagagacaccacacacacatactcttgtttatagagagagagatagtctctctctcatagtgtgtgagagatacacacactctcaccccacactactctctcacacactacactattctacaataatatatagtaccacacacacacactctgtgtgagagagagagagatatgtgtctcgtgtgatgaaatagtgtgtgtgagagagagagagagagaaatattttgtgattgtgcgcggctctctgctatggctgtgtggtctcttttcaatcactgttctctcacacaaaactctccacacacacaccgnctcacacagcaggtgtgtgtgcacacacacttttatgaatatttgtttatgaaatcatgttttccccaacacagagtgatatatattataacacaataaataagaagagagatatttgacaccacacacacacacacaatatatatatataaacttccgacacacccgcgcgcacacacacccctcatccatatatttgttatatctcgcttgggagaggtgttagagagagagaggagagagagaggggtttgaacacacacacagtggtttcaaaggcccccccgggcgcaccccaaacaccacaaaatcccttttttcccaaaaaaaaaa

SEQ ID NO: 577996 - DNA, 215 bp, Homo sapiens
gggattacaggctgtagcactgtgcccagccccttttctcagtaatacttagagttggtgatgaatatttatccgagaaccaaagtggttattatctatgctatatacaaggggaaagaaaggtctaggaagccgataggtcactggacactacacacaggacagttgattagctggaccaggactgaacacagctgttagccgttgagaagctt

SEQ ID NO: 577997 - DNA, 144 bp, Homo sapiens
actctagaggatctcctatgagttggagagggcaggcacccaaattcccagcatttcattttttctttgcagcaccaggtctcactctgtcccccaggctggcagtgccagtggcagctcatcaacagtggcagcaatccatgg

SEQ ID NO: 577998 - DNA, 226 bp, Homo sapiens
aaaaaaacaaaaaacaaaaaacaaaccacatttttttagagacagggtcttgctatgttacccaggctgaactttttaagtagaagtatactccaacataccaatgaaaagtataatatagtaaccacgtaacccacagtaccatagtcattttttgtcattatcaagtagagtattatgtagtgtcacataattgttctatatttttatatgcactgcttcacat

SEQ ID NO: 577999 - DNA, 151 bp, Homo sapiens
  misc_feature (7)..(7): n is a, c, g, or t
  misc_feature (66)..(66): n is a, c, g, or t
  misc_feature (68)..(68): n is a, c, g, or t
  misc_feature (97)..(97): n is a, c, g, or t
  misc_feature (105)..(105): n is a, c, g, or t
  misc_feature (119)..(119): n is a, c, g, or t
  misc_feature (128)..(128): n is a, c, g, or t
  misc_feature (147)..(149): n is a, c, g, or t
ggatcanaagaccttcggcacgaggtccaaggccctttccttcatgtatccatggaggagagacananatacacatcaataccaataagataggggnatccatanaatagacattcagnaggtatggnccaccggattttatcttannncc

SEQ ID NO: 578000 - DNA, 1058 bp, Homo sapiens
attttgcggaaggttctcatgtaagttgtataatggatgacttatccaattgggaataattcctttccggccaatattggatgcccaaggttcttgtactgaggcagaaccttcaggtgctggaagggctagaaatacaaagagtgaccacggtaccaggaataagggaaacgtgctatggtaatttcagggcaacttgaatcagtagtcccaagtggccatcctcaagttctgcgggtcatatcaatgccctacttcaggaaatcttctgaatccgtgttactttaggtggacatacctttcaagacaataactaggtttgtgcagtgctttgatgaaaacctcagaatttgtggccttccagccaggcatctgtggtttcatattgtcttaagcatttgttgcatccctatggattgcagctcttctataggttcgctgttgctgaaccaagaaatagaggcattacacagatttctagagcaaacctgctcaattcatataacagagttgttacaggaagatgcaggacaggctggtatcattctcagagatacaaagtgatctttggaagttgaaagaatttcttgtgggttaagagtttgtcactgacttgtgttcctgaaccatgaagcaatgaatatgtgggcatcgagataatagtttctctgtgataaataaacacagtaacaaacttttaacaaagagaggaagatgaagttgggcttagattgggtggaaggagatgcctggtaagggatctggtcttgatcctaacatgcaatggagttatacctatgttcaaatcccattaccaatcgtgtgtggcactcaagcaagttatcttagcctctctaaaccgttagtctttctcatcgtgcatgatgagaacaactgagaggacctatctttacaagagttaaatgttaatagatgtcaactactaagaacactaatcaatgctataattgttgttttgttgtgctgacactaatcaatgctacaattgttgttttgtcgtgcttcagacctgaggttatacgacctcgatttgaccc

SEQ ID NO: 578001 - DNA, 415 bp, Homo sapiens
cggcacgcgagattctggatattaatcccctatcagatatatgagatgcgcatatcttctcttattccatatggtgactttttcactctgtggagatgtggtctttgatgtatagaagtttttaggtttgaaatagtctaatttatctgtgtttacttttgtgggctgtgcttttggtgtgcatattcaagaaatccttggcttcaacggtataagggacttttaagggattttaggtggcttagactatatttctgtgctcacctttctttattcactcattagttgatgggcatggaagttgggtccatatctttgcaattctgaattgtgctgtgatcacgtgtctttttagagtaatggtttactctcctttgggtagatacccagtagtgggaatgctggtcgtgggttt

SEQ ID NO: 578002 - DNA, 226 bp, Homo sapiens
  misc_feature (16)..(16): n is a, c, g, or t
tgcaagagtgcatggnctgaggtctgctgaccacagcctactttgagaataaggtgttgtttcagtcactatgagcccttggcaaaaatttgaacccatgcagacaaagccctccttgaccatcatttgcccatctccttctcactagtagtgcctgttgtcagcaagttggtggaaatcttttggtaccctttctcacacctttacactcatacgctgggaggct

SEQ ID NO: 578003 - DNA, 1071 bp, Homo sapiens
ctgtcctcagacaacttcgtcacattttcacggctataaggacacagaaggactcttttaattctgtatttatcattctacttctctgtatatatagtttaataacctgctagggctgtacactttgccaagcctcgcaacttctcttacactgcatctctgcactaacacttcatatacctgctctcacgagccttacaacgcctactagcacagccatcgctccacggaacttgcctcggcaccactgcacattttcaacacctctctttgcaccattgctctcaaaccacagcgcatgtctcaatccttttccttgctcacctcagtcccaagcaacacacatcatgccttcacatgtatccattcaccccacaggcctttcgctactactgctctaacccatgctctcattacactggcctaaacaggttccggcctctatggttccaacaactctgtccatctaacgcacccctctttccagcaaaggggaatctcggataaggcccttaactgacactaactggctcttgggacaacaccaaaacaccacggtatacaatgcacgtgacacacacggggccagaacgccaaagaacactcctccctaaccactcttcacggcgacctcccaagaaacgaactgacgtctcccaacatcaaggactgggcaccactcatgacgggaccttacaaacgtcttatcctttcaaaacacaaattaacaggctctacctcattaccatataataattccccattgactctcctaaagctactattctctccaatggcacggaccacgctcctgacaacccctttgaatggtacaagtcgaactggtggttctcaattttcacgtatcccccgggcccaacccgtccaatatacacctcaaacaaatatggctgaccgccctctaggaacgggccaggacaagcgcactatgccccacacaatctaaccaacagccaaaaaacccggaacaaaagaacaacgcctagcacacttaaccccacagagcaaggaacacctcatccaccaaagaacccccgggcatacagcaac

SEQ ID NO: 578004 - DNA, 155 bp, Homo sapiens
tcatatgatgctggctgtaagacttgaaccagaggacctggagctgctgatgcagcggcagggcctggtcactgaccaagtctcactagcacgtctagtggagcggcacctgcccctggcagtaccgagcagctgctcatcccctagtgcataca

SEQ ID NO: 578005 - DNA, 299 bp, Homo sapiens
ggctgggaactggggaggcatggctgagttcggcctccaaaggcggcctttcgtctttctctcccgagtctctccgagagtgcggtctctccgaaagcgcggaggcctcggggtggacagcctggaggagggggctctaaacgtggcaggccccgggcttcctccgtgttgggactccaatccgaagtggaagtggggagacctggcgtcaagccccccccccgctgtttccctaaaccaagtggccgtgggcgagtcatttgccctctttggctctttgcaacatgaaagaagccata

SEQ ID NO: 578006 - DNA, 195 bp, Homo sapiens
ggtccctgaggactgctgtaaccaggatttcatcaccaatgtggtatttcaggatgttggcaagttccttggcatctcccaagagtctgcaccgttctcttggtggcagggctcgaaaaacagaatctccatctatcagccattagcaagtctatagctctatgatttggacacactactgctgctacagagata

SEQ ID NO: 578007 - DNA, 1532 bp, Homo sapiens
ctgtgcccgtcgtggcccggtcgttgtctgtgtgtcgccgttcttgcgcctgtggcgcgtcttgtcgcttgcgcctgtcttgcgtcgcgtcttcggcttgtcgtgcgtgtctcgtcgcggcgttgttcgcgctccgctcgctgttttccgtccttccgtgcttctgttcgctgcgtttccttctttgttcgttcctcgtgtgtgtggctgtcgtgtcttctcgctccgtttcgcttcgttcttctgcgttctcggtctttcgcttgttgctcctccttgtcctctccgctgctcgctgctgcctagtatttcttgtctggtttgttttcgttttgtttctgtgtgttgtttggttttttgtggtgtggtgtgtgtgtgttgtttgtattgtttttgtggggggtatgttgtatagtggttggtgtgtggttgttactgttttttgttgttattcgttttatgtaggatacaacaactactagtttagttcagctttagctttctttatttttttttgtttttgtgtgtgttggggtgagcctatgtgttggcctatttatcttgtgtttggcctgggtttttttttttgtctggtttgtttgtttgtgcagtgttggtgggcgcttgtcgcggctgttggttcgcgtgcgtgccttgttgtggttctgggcgtgatgtgtgtcgaggtcgtatcgttgctgccagtttctggtctctggctgcgggttcgcgattgtcgctgtgttgtggcgttttggttgttttgctgggtggcgcgttgctgcgtgttcaggtggttgcctttccggctccatctgcttgctgctgggatctaggggtggccgtctcgtggttgtctgtactatctggttttttcgttcctatgtgctgcggttccagcgcctcttgtgtcctgccttgggtatggcgtattctatagggtctcggtagtgcttcggtacagggtatccagggggcgtcttgtggcagagattatgcttgcctgttttgtccccaggaaacctgtaggtgctgtgtctagccgttctgaagtggcccatgggacccgtgagcgagggcgctcgatagcgccgatacacgagacagtcaagtgccacgttcgcgtccagccgcgtaatgcggtgcaccttgtaggagtcctagggttggaccccgtggagagtaccgcatatacgtgagcacccagtagtgtggacaatggagcgctgacgagtcctgcgccgcagtacactgagcaccatgggtcccgctgcgtgtatgccacttggtagtcatatgtcaggtagcctacgctcagaccccaccgtcaagttcggtgagcgtgtacatggacgcacagtggagtctgacattctctccacatagggagcgcttagagcgtcactagccttgggaagtgagactagaagaggggagcagaaagggacctggagtagacaaaggccacacacatcattatcattactgtattaagtgtctggctgctctctggacctgcgcgctcaggagta

SEQ ID NO: 578008 - DNA, 155 bp, Homo sapiens
gttagggttctcacttgctctgggtctgcatccacaccctggtaaaagctatcctaccaattcctacaacagtgggtgtcactagtcttgacaccctaaattctcaaaggtcagcatagcggtggttttggagaccatcttttcttctgttttgc

SEQ ID NO: 578009 - DNA, 412 bp, Homo sapiens
tctagaggatcctgaagttcaccgcgtcaaacaccaaccaaccgatgaagtcgatcttcactggggatcggtgatcaagacgcaaaacattgcgggggctctcaagcccacagtgatcctggtggactattcggattttggttgaaaggcggcgacagggatccgctggtacgtctggctggaggtgcgggatctggtggggaattgtctcgacggcctgggttcggccaagcgtggaagggtctcggtgaacccttgggccagcacctgacggattggccccgtcaattgtcaaatggggcgggccacctgggttataatcgaaccctttgaaagtacgtaggggggaaaaaccccccttggagaatgcaggtttcgcacggccgtcaaagcgtgggccaaggtgcggtga

SEQ ID NO: 578010 - DNA, 416 bp, Homo sapiens
tgagacagagtcttgctctgtcacctaggctggagtgcatggtgcaattttggctcaccagcaccaccgcctcccaggttcaagcaattctcatgccaaagcctcccaagtagctgggactacaagtgcgtgccaccacacccagctaatttttatatttttagtagtgacagggttttaccatgttggccaggctggtcaggagctcctgaccttaggtgatccgcctgccttggcctcccaaagtgctgggattacaggcatgagccacagtacccagcctatatattatgattcttaatgttttttttgagacagggtcttgctctgttgcccaggctaaaatgccatgatgcaatcacagcttgctgcaaccccaaactcctaggctcaagtgatcctcctgcgtcgacgcg

SEQ ID NO: 578011 - DNA, 170 bp, Homo sapiens
gctgtatctgaaacacaactgcatacgttttctacggtgatttgtatgaaaggtaacatcaaatcaaggagatagattcagtaaagtcgcgtagtgttcagtaaggatgatatacattgaatttgtactagggacaggttgatgagcaacaatagtgggaaaacttgtaa

SEQ ID NO: 578012 - DNA, 142 bp, Homo sapiens
ctagctgcaatggtgtacctggaaatctcacaatctgctcaaacctccaaatgggtctgactttggtatttctacatgtcttcctatactcagcactagctccacctctccccagtcctgcatcaatcctgcccctctgcaa

SEQ ID NO: 578013 - DNA, 111 bp, Homo sapiens
tcgatctaaggatccgtgagcaggatgatgatgtgccccacttttccctgtgtttggacggcatagacttgtttacgtagaccagaaccatttagaagaatacttgaagct

SEQ ID NO: 578014 - DNA, 433 bp, Homo sapiens
cggggggggtcccctgggggtggccctaagcccaatcagggaattgggtccccgttttccggtttcgggccgggccctgaaaaattgccctttcccattgtgcccccgggccccagggggcccgggcggtgttaaaggggggccttttttaaaaaaaaaccgggtgccccggggagctcccccccccggggggatttttttggggaggcccaagaattgggatttaaaaacggggccttgggggcaacagcccccctccccccccaaaggggggccccccccctggcgggtttttttttttggggggggggggaaaattttcccaaagggggccccagtggccggctcccaagggccccccgtttgggttttggggccggggctgtccccccgggccccttgtttttttttttttggtaaaaggggcccttta

SEQ ID NO: 578015 - DNA, 156 bp, Homo sapiens
  misc_feature (112)..(112): n is a, c, g, or t
  misc_feature (154)..(154): n is a, c, g, or t
caaagtatcagccttctaaccttctacctaagggtacatgtactcccttttacgattgtgtttaacatttcccctaccactttgccgttacctttatcgttgtggttaacangacacagtacattcccaagttatagcaatgtaagcaggcagnac

SEQ ID NO: 578016 - DNA, 133 bp, Homo sapiens
taccactgctgcagagtacatcaatgaactcgacgatggctcagtaagcctgactggctataacgcacggtactgttcttgaaatacctaatggctatgaaattctacgtcagtttgtgacaagatgggtact

SEQ ID NO: 578017 - DNA, 187 bp, Homo sapiens
gcccaccctccctacctcagaatctcttttctgcctgctcttcacccctcctgccttaccagacttttcctgcctgcatgcctgtcctccttcttacttggccaatcttgccagcttccagaacccctcaaatgtcacctccttctgagacatcctaaccctatactctgtgtctctgaccttctca

SEQ ID NO: 578018 - DNA, 664 bp, Homo sapiens
acatatattttcatggttcctcattgaaaaaaaaaatcgcgtgatggatgtgatctgcattttataaccaatactaaggcctggcacatcaaatacaacttgcctaagctgaacagcaagtaagtatgtggaacaggtgtgtgcagtcttacagaagtgtggtcccgaatcgccccactgctgttgccaaggaaattcacaaatctttttaggaaagtattaggggaaatcagtgtgccacacggtgaaggcccccaactcacagccttagatagtctttcacaaaactaaattcgggggcgggggaacatcttgagacatccataataggtatctgcccaatgcttctctttaataacgacaagatactggctattaacaggacaggtctctgagcgatgtacagtccataacatattctcacggagtcgaagtccacaggattccccataagacagggtgagatcgtcatatccagtcgggtgagaaagacctatacaacgtgataaatgcggcttctgacatcctggatcctggtatattacacctcgacgtgcattgacatgtacaatctatgctactcgacgatagtacaggaacctaatcagctaacatgtctttggagacacggatcctgtccgcgataaaaagctaggcatgcagg

SEQ ID NO: 578019 - DNA, 362 bp, Homo sapiens
cgcggtcacagggatattcaaaccatatcattatctaggagatataactcaggtccatatcaagactccaaatctgaaagaacatgaagaaggccaacctatattcattttcctataacataacatgcatccaaaatccataaaccaaataggcctaagtataaaatataatactttcagggaagcgatctgaaacaggaaaagggagccaataatgaatatatgtaagatggtggtgtgcataaagggaacaggtaaactttgtcaaatttaggtgtgcatcaacaccatttggtaagcttaactatattaatattcaagcaactcagatgtacagaatccgcattttcagtgaagcacgc

SEQ ID NO: 578020 - DNA, 914 bp, Homo sapiens
  misc_feature (3)..(3): n is a, c, g, or t
  misc_feature (23)..(23): n is a, c, g, or t
  misc_feature (63)..(63): n is a, c, g, or t
  misc_feature (93)..(93): n is a, c, g, or t
  misc_feature (109)..(109): n is a, c, g, or t
  misc_feature (124)..(124): n is a, c, g, or t
  misc_feature (175)..(175): n is a, c, g, or t
  misc_feature (177)..(178): n is a, c, g, or t
  misc_feature (185)..(185): n is a, c, g, or t
  misc_feature (188)..(188): n is a, c, g, or t
  misc_feature (208)..(208): n is a, c, g, or t
  misc_feature (210)..(210): n is a, c, g, or t
  misc_feature (223)..(223): n is a, c, g, or t
  misc_feature (237)..(237): n is a, c, g, or t
  misc_feature (278)..(278): n is a, c, g, or t
  misc_feature (284)..(284): n is a, c, g, or t
  misc_feature (288)..(288): n is a, c, g, or t
  misc_feature (303)..(303): n is a, c, g, or t
  misc_feature (314)..(314): n is a, c, g, or t
  misc_feature (328)..(329): n is a, c, g, or t
  misc_feature (332)..(332): n is a, c, g, or t
  misc_feature (344)..(345): n is a, c, g, or t
  misc_feature (347)..(347): n is a, c, g, or t
  misc_feature (349)..(349): n is a, c, g, or t
  misc_feature (356)..(356): n is a, c, g, or t
  misc_feature (370)..(370): n is a, c, g, or t
  misc_feature (384)..(384): n is a, c, g, or t
  misc_feature (406)..(406): n is a, c, g, or t
  misc_feature (408)..(408): n is a, c, g, or t
  misc_feature (410)..(411): n is a, c, g, or t
  misc_feature (415)..(415): n is a, c, g, or t
  misc_feature (420)..(420): n is a, c, g, or t
  misc_feature (426)..(426): n is a, c, g, or t
  misc_feature (434)..(434): n is a, c, g, or t
  misc_feature (436)..(436): n is a, c, g, or t
  misc_feature (440)..(440): n is a, c, g, or t
  misc_feature (442)..(442): n is a, c, g, or t
  misc_feature (451)..(451): n is a, c, g, or t
  misc_feature (457)..(457): n is a, c, g, or t
  misc_feature (461)..(461): n is a, c, g, or t
  misc_feature (465)..(465): n is a, c, g, or t
  misc_feature (473)..(474): n is a, c, g, or t
  misc_feature (495)..(496): n is a, c, g, or t
  misc_feature (509)..(509): n is a, c, g, or t
  misc_feature (513)..(513): n is a, c, g, or t
  misc_feature (534)..(534): n is a, c, g, or t
  misc_feature (543)..(543): n is a, c, g, or t
  misc_feature (557)..(557): n is a, c, g, or t
acnacgccgccgccgccgtcacnatggcccattacaaagccgccgactcgaagcgtgacagtnccggaggtacttggagaagtcgggggtgcnggacacgctgaccaangtgttggtcagcctnatatgaagaaccagagaaacctaacagtgctttggattttttaaagcatcncnnaggagcngcnactccagaaaatccagaaananagctgcttcgccncagaactggccganatgaaagagaagtatgaagctattgtagaagaaaataaaanactganagcnaagcttgctcacgcnatgaaccaccncaggaggagaagcnngcngaataggattcnncncngtttganagacaatgaaaaanggttttgtatgacntgaatagtttgtatagtatatnancnnttcngaacngatgcnatagaacncntttnanatgtttaantcaccnatcncacnctgttaannacacatagaatcatcaataannactcaatataacnttcnttgggtcttaaagcaggagantccaaagtnaatcctgacacaanacctaaacacagccatctaactcattaccttaaaagacattctgtttattagtctgattaggaatgatggcactggttgtattttagccaagacagtttagcatggagctattccttggtgcagttcaggatatgaacacaggtacagtcattctttgaaggtgacactgttctgtatattccctataggcagctggagagatctgtgtgacacaagatgcttttgtacgggttcccatgaatcttctgctcttgtttgtgtgacatggaacaaataacttctttgccaccactttgccttagataactgtgtgtgtgtgtgccagtttgaactctgacaccacattttccttctat

SEQ ID NO: 578021 - DNA, 122 bp, Homo sapiens
cagctcggacctctcgctcacgaacagggttggtgtaaaataggcggggtagatttgccgagttccttttacttttttttaacctttccttatgagcatgcctgtgtgcggttgagcggaga

SEQ ID NO: 578022 - DNA, 117 bp, Homo sapiens
acgtgagaaacttataataaatgtcttgagtcttgaattattttaaattctgttaaaagtagcctgccaggatttcagatttggaaaatttttgcttaccaaggtttactagaattg

SEQ ID NO: 578023 - DNA, 1198 bp, Homo sapiens
atccgagcgtggactggcggtcaggatgttcagctggatggggctggcaggcgggtcgtggcgcgaacgcgctgtgcggcgtcgagacagcgtgtgtcagacggtgagcggagcgggctgcgttctggttctagcctgcgctatgggtgctgccgtctggaggaggcgtaccgcttccacgagttccacgtcggccgtgcgcttggagtgatcgctcgacgttcggagacacgaatgccctattgatccttgcttggttgggccaagtactagcactctgggcaagagccacctttcagtcgagatagccttactgggagccaggagtttcgcgcagcggcattgacggcatgtggtcgcgggaagccgcaattcaacaagaacttccattcgattcggcgctgtgaatggtatcggaagcagacttgacgggcaagcgactcgccagggggaaatggcctttttagatccggtgggaacgcgcgcgaagagagaggcgcggtgttcagcaaatgcttccagggcggcgttccggagaacgggctttatcgcgtgatatcagaatttcattgttgcgtcaagcagcgtcccccgaaatcagggttccctggagaggagcattcagcggtcgatcgacgaaggcccccggtgcatccgttcacgtgcggcgagcacagcagcgcaatctcagccggaggccttatgacctttctgccagggttcctggcgagtggatatggcctgaggagcggtggacccggcatcattcctggctcttttggacgcgtcagcaagcttggaccattctcaggatggacttctcaggaggccatcaagggccttccgggggccagggccgacagatccgggtcggcgtggacaagggcggccacatggcccgccgcgcgttggtgacggggccatcggggggccccaatgtgggccctatgagacggtgcttaacaaggccccgagaatagaggggcaacaaaatggcgccctttggtgggccgcccccttgtaaacaacaggagaaacgcgcgctactaggggatgccccgcacggccattgaaatataccagagcccgccaaaagatcggggacagcacacacaccctacatgcaagcgagcgacaagagacagtacaccaatactaaagagacgacgctgtacgcgaacaagccacactatgctca

SEQ ID NO: 578024 - DNA, 977 bp, Homo sapiens
gtgctcgctaccacacccggataatttagtattgtgagtagagatggaagtttcaccatcttggatcaggctagtcttgaactcctgaccttgtgatccacccacctcagcctacccaaagtgctgggattacaggcgtgacccatcgcacttggccaggcagttctcttagatgtaatacagcaccctcatttcttccccgctatcatatgatcctggctagatggccccagccccagaagattgtttggaatggaggtatccagtactttttctcagtcattattaaagtcaggaaatagaatcacgataggcaacgacagaaatcttggagcttgaccctcattagaagaaacttacaggttcaggagtccatctttgcaagaacctcttggtctctccagtatttttgtacaaggaggtcagggttgcgtatgcatcgagtaggctataagtccctcaccagatctttgtagaactttttataacatgcctttgaggtatccagtatctacaacatagccatctatcatgaaccactgtacctcagctgagtgcccaagggcccacccttgtgttgcacacgttggagggtgtttactgtccctcgtcaacatgtactccttccacctctccctctgtttgtactgttctgtctttgatattcacaaccttattggcctactgtcatgcttatctggtccgggtagcaccctgactgtgatgccataccggactggctgctctggtctccgcggtcagtgcccgcctgtgtctgcttccagtcgttacgttgcggcaggacgggacttcgctcagcggggaggaccgggccgtcccagtcgaggggactctgcgcttgttccccactggtctgacacctgcccacatttcacttttgcgaggattgcgggggcgccagcggagtggcccgttctcactctgcctcgtccttccactttcttctccccccaagc

SEQ ID NO: 578025 - DNA, 205 bp, Homo sapiens
cgagatccccagtaaggttcaactgtccacttcagccttccatgtgcactctggcctgtctgcacccagagtcatcagcaatgaggcagctagaagcaggaaaagcagcagacactcagagtctgcgtgtgcgctgaaacagaaattgttccgtggcagtagaaatctagcccctatctatgcctagggatcacagcagtaggga

SEQ ID NO: 578026 - DNA, 305 bp, Homo sapiens
tctaaggatctaccgctctcacccacccgctgattattgtatatatcggtagagacaggctttcgctatgttgaacaggtacggtcttgaacttctgacctcaagtgatctacctagcttggactaccaagttctgggatgacggacgtgagccaccgctccccgacgcgtaggtagtatttgagaggcgagataaaacatacgtgcacagcaaacccttcccgtgatatacggacagaccgagtgacagagtgctgtggccgttaggggcagaggccgctcacggattacgagaaggctccctg

SEQ ID NO: 578027 - DNA, 261 bp, Homo sapiens
actctagcaggatccccctgtaacggctgatgcacaagaatcacttgaaccaggaggcaaggttgcagtgagacgagatcactctgctgcactccggcctgagcaacagagtgagatgctgtctcaaaaaaaagaaaaaacaaacaaaaaaagaaattaaaaatagatgtgtttagggtgtggtttaactgtagcatataagctaatgcaagacagttaatgcatttagctggtattcttttttctttatttcggttcaag

SEQ ID NO: 578028 - DNA, 1011 bp, Homo sapiens
ggcgcatcagggaagtgaatcaggcgccgtgtagtgggttgctgggctgagccttgctgagagttagaggcagcgccagggaagaggccttttgtagttggtcgggagagggatgtcgaggaacacgagtgtcggtctggtgcccgcttccggtaaggttggactgtggcattgaatattgatgagaccacgttcgtgactcgatgaagatggccgggcgacgggccatggtcgagggccccgagcggagcggcagaaggggggatcgtccgtgcccgagcgaccactatgaacactcttgacagactggcctcttggagagcaagacgtatgaatgaagacccttcatttattaaatacccagagattttcagggtccagtagacatgagcaccggagcacgggcacacgtcgacttgggcctttgaaaggatggcttcaagtctcgttttaacagtgctacccagcgtcgtatagttacaagagggcctgtccaaaattgccttcctgaactcaagaaatctgtctggtggaatcctccgtgactggaatgatacattatttccattcacacggggcattttcgtgcacgcgcggtgttgaacaagtcagccgagttcaccctttttttgcttgcaaagttggctttgcacaaatggtaaggatgggcctgctgagaaaaagaagttaaggggcgcccaaattgcccagtggataatgtcttacatgcaaagaacgttggtgataggtccatggcaagtgagccgggaattatcttgacctcggcgatgcggcacattgcagcggtacccaacgtaccgcggatcactatattgccaccgtaaggccctttgtgggggtaagcaattgtgttcactccctcagggagcgcccctcgttgagctttcgcacttttttggtaagagacaacactatctatttaggtgccccttaaagtaaattggggtaactactagaacaatcgcttgcacatcaagttgtcaccgttac

SEQ ID NO: 578029 - DNA, 831 bp, Homo sapiens
gaactgtttccattgagacccatgcatcgtataggataagaaactgaggttcttatcatttaataggataagaaattgaggttcagagaagccaagtaacctgcctaaagatgcacagctatgagaggcaaagctggcactggcttggtaataacgatggaaacggtctgaaatgagagcaggtaccatttcttggagctcttagcagagcgcgtgaggaccctgtctaagtgccatgagaccttagcagaggctgtgggtgccccgccccattccctccactcactcttccttgcaggtcgacctgcccttctttgctgaggcctttctctgcctccagagcctgcttggtcctcaggctgtaagtgcaggcagagctaatgtctctccatagctgccctccaccagcctgctcctgagacacctgctggccagcagcctgaagcagaatcctttactcagattcagccgcacagatgctcactgcagagatctccaaggcctgtggtcatccttgagcccatctcagatttgtgtggatagggtgttagagaacatggaatcagctggatagagtggttcatgcttgtaatcccagcactttgggaggctggggtggggggatcgcttgaggccgggagtttgaggccagcctgggcaacacggtgagactctgtctctataaagaatttaaaaattagccaggcatagtgtggtctcggctgcttggaaggctgaggcgggaggattgcgtgagcccagcagttcaaggctgcagtgagctatgactgtgcccctgcacccagcctgggtgacagagaccctgtctct

SEQ ID NO: 578030 - DNA, 220 bp, Homo sapiens
tacgatgacccttggagtcgtcggatccaccaccactccgctgtacacgtgaccgcacggcgccgctgtggcctgagattgagaggcccggcaactgcaccatcttcgccccgtacaacgcggcctgggcctccttgctcgctgtgagatgacctccgtctgccccggtgactcttctggggacctgccttacttcccctactggctaggcatcaagata

SEQ ID NO: 578031 - DNA, 628 bp, Homo sapiens
  misc_feature (502)..(503): n is a, c, g, or t
  misc_feature (507)..(507): n is a, c, g, or t
agactgaagaaggctcgagattaatgcaaaagctgatctgggattgcatcttggacctcaactctcccctttttattgttaagggacactactgggacaattttttttttttttcgttttgagacagggtctcgctcagtcacccaggctggagtgcagtggtggaataataactcactgcagccttgaactcccggactcaagcaatcctcctgcctgagccttccgagtaactgggactatgggcgtgtaccacaacacctcgctattttttttttcctactttttgtagagacggggtctcactatgttgcccaggctggtttcaaactcaagtgatccttccacctcagcctctataaaatttgaataaagttgtagatgagattggtcataggattgtatagtgtatcaatattagatttgctgattttgacaaccctactgtggttatgcaaatttgtccttgttctaaggaaataaatactgaattatttaggannaaangtgcataatgaacccattttcaaatgcttatgaaaattacacatatacacatgtgtgcatatacacaggcatgcatatacaaacagagggaagagcatgcacgtgtacatgagcaaagtgc

SEQ ID NO: 578032 - DNA, 613 bp, Homo sapiens
taactggggagcattactctttatcccaatattataataatatctgctctacaattataacctaggaaaaaccaggccatacagagataggagctgaagggacacggtgagaagtgaccagaagacaagagtgtgagccctcgtgtcacacccggacagggccactaaggggcggtaacggcagtgcccaggaaggcacccgttacttagcgaccttggcctagcagtagcgccagtgcctgggaaggcacccattacccattacttagcagaccgggaacggtagtctccctttccccgtggggagttagagaagactctgctccaccacctcttgtggaaggcctgacatcagtcaagcctgccttgtagccatccggaggcctaaacgtctccctgtgatgctgtgcattcaggggatcatgctccgtggtccactttcagtgtcccactcgtgtacaccgtggctctgccttctagaatagcagtagcagaattagtgagaattttcaaagtcttggatctctcagagcaaatgcatagaagcaaataatgacgtacagctgtcccccctctctctccgccttggataccaaacagggaagggcccccc

SEQ ID NO: 578033 - DNA, 132 bp, Homo sapiens
gggcccccttcccgggaaccggcggtcggagctacgcgctcgccgcacagctttgcaacccagcacttccccctcgggcagcccccccttttaatgcagccttccccttcgctcaccccccgctgggtccca

SEQ ID NO: 578034 - DNA, 877 bp, Homo sapiens
  misc_feature (751)..(752): n is a, c, g, or t
  misc_feature (756)..(756): n is a, c, g, or t
gaactgtttccattgagacccatgcatcgtataggataagaaactgaggttcttatcatttaataggataagaaattgaggttcagagaagccaagtaacctgcctaaagatgcacagctatgagaggcaaagctggcactggcttggtaataacgatggaaacggtctgaaatgagagcaggtaccatttcttggagctcttagcagagcgcgtgaggaccctgtctaagtgccatgagaccttagcagaggctgtgggtgccccgccccattccctccactcactcttccttgcaggtcgacctgcccttctttgctgaggcctttctctgcctccagagcctgcttggtcctcaggctgtaagtgcaggcagagctaatgtctctccatagctgccctccaccagcctgctcctgagacacctgctggccagcagcctgaagcagaatcctttactcagattcagccgcacagatgctcactgcagagatctccaaggcctgtggtcatccttgagcccatctcagatttgtgtggatagggtgttagagaacatggaatcagctggatagagtggttcatgcttgtaatcccagccagcctctataaaatttgaataaagttgtagatgagattggtcataggattgtatagtgtatcaatattagatttgctgattttgacaaccctactgtggttatgcaaatttgtccttgttctaaggaaataaatactgaattatttaggannaaangtgcataatgaacccattttcaaatgcttatgaaaattacacatatacacatgtgtgcatatacacaggcatgcatatacaaacagagggaagagcatgcacgtgtacatgagcaaagtgc

SEQ ID NO: 578035 - DNA, 422 bp, Homo sapiens
  misc_feature (305)..(306): n is a, c, g, or t
  misc_feature (314)..(315): n is a, c, g, or t
  misc_feature (365)..(365): n is a, c, g, or t
  misc_feature (393)..(393): n is a, c, g, or t
  misc_feature (406)..(406): n is a, c, g, or t
ccccccgcctcgtctttattattcagagcggggcctgaggaatgaatggcgtggacaatatcacgacctgacgctgttgcctatccaataatgcagcccgtaccatttctttcaaacaacaagaaagagggggtccttgcgtgggaagaaactgtggcaagggagaaagcttcccgcggtacttatcaagaaacatcggtcttggtgtcttcaagaacacccaagggaggggctattgaggggcaccttacatttggacaagaaaatgggccccttcacttgggtaatgttgtccattcgagggnncggatccnntctctggcgtggtaggaccaagaatgaagaatgcagaggactcattgtcnatccgccgagacttatctgcactacatnccgcaagtacaanccgcttcgagaagcgc

SEQ ID NO: 578036 - DNA, 335 bp, Homo sapiens
ctttttttcccatcagtaacatatgtattctaaacttttccaaaactgaaaatcaacttatcggccacgcatggtggctcacacctatatcccagcactttgggaggcagtccgatcacaaggtcaggagttcgagaccagcctgggcaacatggcgagaccccatctctactaaaaaaaaataaattagccgggcacagtgcatatgcctgtggtcccagctacttgggaggctgaggcaggaggactgcttgagcccgggaggtggtggttgcagtgagccgagatcatgccattgcactccagcctgggtaacacagagagacttcatctcc

SEQ ID NO: 578037 - DNA, 279 bp, Homo sapiens
aaaccttgggggtttttgtttttgggggggggggggggctctcccctgggggaaaaacgggttttttttcccccttaaagggaggttttttttctttggggtttttttataaaattttatagaaaatttcccccgtgtgtgggggggggggggggcttttttcccccggggttttttttccccttccccccccctttttgggggggggggtcccccccccccccccccggggtttggggttttttttttgtgttttaaaaaacccctttttttttttta

SEQ ID NO: 578038 - DNA, 311 bp, Homo sapiens
aaaatatcgaagcaaattatttgtattttctttgttccttaagactctcataattcttaaatgattgagaatctcaaagagtatatgtttatattgattatattgatatttagtgtggtagaattatacacttgaaatttttttcaaatctatttttagtttagatttcacagccttaccactgttgatattatgggctagataatgcttgttgtgaggactgtctgtgcatgcagagagtttagcagtatcatggcctctaccactagatgtcagtagtacccatgacccagtataaacagaatatcctg

SEQ ID NO: 578039 - DNA, 201 bp, Homo sapiens
gtacggactcaggtacaagttcagccgtccggggggcaggcactgcggccgagggcaagtggtgggtgcggaagaggatcggagcctactttccctctgctcagcctgggaggagctgaggccctacttcagggaccgtgggtggcctctggcccgggcccttctagacgtgcaccagaaacaagggggggccgtggggta

SEQ ID NO: 578040 - DNA, 1384 bp, Homo sapiens
  misc_feature (438)..(438): n is a, c, g, or t
  misc_feature (738)..(738): n is a, c, g, or t
tcccttgttggcccaaaatttttttgggcgggtcaggaaaaaagcggggggtaggggtccctttctttcccatccctctacccagaaagacaccctccaagtgacagacagaaagcccaagagctgtgttgcctcagaggacctggggaggcagacaattggtgtgtagtgatcttcgtgtgtccctcgagcgaggctgcggatagggtggcaatctctcctgtgctctccaggccggcaacttgtgattgctccatgtgacgccgctgtggatacctcctgtgatttctgccggctctcactatactcagctctcggcaaattctgcccaggtgtgggctttacaatataccgggtgtgactcacgggcctgtggattattgccgcacaggtggggctctccaagaggcggcgcccctcgcgtttatctctgtggcncgagtgtgtgtgttcttctcccagaggggacgagttttttcacagtgcctctccagcgcgtgtgtgcagcgtggcgagctctacaaaatgctcttcagagaaaccctcttgaaagaggtgggtggcgccgctcacgaggtctccagtataaaccctttcggggaaccccgtgccttcaactcgtgagaagcctggtctcccggtgttgttggtgcccagcgaggagacctctcccggggtctccacattctcttctcaggctccggggtggtgtgttgagacccagggggttttttcagngaattccttctcgcgggtctcgttgctctcggggccatttggaccctccatatatttggggctctctcgcgtatgtgtgttccacctctcgaaagggaactctgtgggggccagaaaaactcgtgcgtttgccccggaagaggcggagaaatctcccacttttccaaacacttagaaccctgttgcgcgcttcccccattttgtgggcccccctttcagagggcgttacctagtgatttttcccctcctatcaatgtaggggtctcattcttccccaggggattatgggccaaaagtcctcttttccattagaaggggcccttttacagactctttcgaattttctcccagggggtacgaggcccctgttgcggcccgaggggtatccacgtctatattcacaaggacaccctcttggcgacaggtgcccttgttatagaatttgttgcgcggcccttccagaccggcttacaaattgacgacaaggagactctgttgtttcccggtcttacaaaaactttgggctctggagaaacatttccactttgggacagccccaaaaaggggggtttttggtcagaatcttgggagggagacaaaatacgttggagagttctctcaaagtgggtgtgcggccccaaaaatc

SEQ ID NO: 578041 - DNA, 101 bp, Homo sapiens
tctgacactgcttaacaccatccccagctcacgggcttctcagcactttacctaattactgacatggctcttctgaaaggtgttatctatatcttatcgta

SEQ ID NO: 578042 - DNA, 301 bp, Homo sapiens
tcagggtcggggggtatcagggattgacctctgtgtcggtaacaactccctgccggtgatggtgatgtcttgttttcggatcagggaccatcctgtgttgcgcattttgtcccagcgcacacggaaagcaggagagggtgaacagttggatgttgatgaatcagcctgcagtgtccctagtgatccggcaagagtggacagtggtgttgatctggtcctcatcacagttcctccgtcacgcacatggacttgtgatgtgaggacttgtcctgtgaagggccatgaatttgttagtcggtga

SEQ ID NO: 578043 - DNA, 3706 bp, Homo sapiens
ggcacgagggccccgtcccggcctcgcgcacctgctcaggccatgatgagcttcggcggcgcggacgcgctgctgggcgccccgttcgcgccgctgcatggcggcggcagcctccactacgcgctagcccgaaagggtggcgcaggcgggacgcgctccgccgctggctcctccagcggcttccactcgtggacacggacgtccgtgagctccgtgtccgcctcgcccagccgcttccgtggcgcaggcgccgcctcaagcaccgactcgctggacacgctgagcaacgggccggagggctgcatggtggcggtggccacctcacgcagtgagaaggagcagctgcaggcgctgaacgaccgcttcgccgggtacatcgacaaggtgcggcagctggaggcgcacaaccgcagcctggagggcgaggctgcggcgctgcggcagcagcaggcgggccgctccgctatgggcgagctgtacgagcgcgaggtccgcgagatgcgcggcgcggtgctgcgcctgggcgcggcgcgcggtcagctacgcctggagcaggagcacctgctcgaggacatcgcgcacgtgcgccagcgcctagacgacgaggcccggcagcgagaggaggccgaggcggcggcccgcgcgctggcgcgcttcgcgcaggaggccgaggcggcgcgcgtggacctgcagaagaaggcgcaggcgctgcaggaggagtgcggctacctgcggcgccaccaccaggaagaggtgggcgagctgctcggccagatccagggctccggcgccgcgcaggcgcagatgcaggccgagacgcgcgacgccctgaagtgcgacgtgacgtcggcgctgcgcgagattcgcgcgcagcttgaaggccacgcggtgcagagcacgctgcagtccgaggagtggttccgagtgaggctggaccgactgtcggaggcagccaaggtgaacacagacgctatgcgctcagcgcaggaggagataactgagtaccggcgtcagctgcaggccaggaccacagagctggaggcactgaaaagcaccaaggactcactggagaggcagcgctctgagctggaggaccgtcatcaggccgacattgcctcctaccaggaagccattcagcagctggacgctgagctgaggaacaccaagtgggagatggccgcccagctgcgagaataccaggacctgctcaatgtcaagatggctctggatatagagatagccgcttacagaaaactcctggaaggtgaagagtgtcggattggctttggcccaattcctttctcgcttccagaaggactccccaaaattccctctgtgtccactcacataaaggtgaaaagcgaagagaagatcaaagtggtggagaagtctgagaaagaaactgtgattgtggaggaacagacagaggagacccaagtgactgaagaagtgactgaagaagaggagaaagaggccaaagaggaggagggcaaggaggaagaagggggtgaagaagaggaggcagaagggggagaagaagaaacaaagtctcccccagcagaagaggctgcatccccagagaaggaagccaagtcaccagtaaaggaagaggcaaagtcaccggctgaggccaagtccccagagaaggaggaagcaaaatccccagccgaagtcaagtcccctgagaaggccaagtctccagcaaaggaagaggcaaagtcaccgcctgaggccaagtccccagagaaggaggaagcaaaatctccagctgaggtcaagtcccccgagaaggccaagtccccagcaaaggaagaggcaaagtcaccggctgaggccaagtctccagagaaggccaagtccccagtgaaggaagaagcaaagtcaccggctgaggccaagtccccagtgaaggaagaagcaaaatctccagctgaggtcaagtccccggaaaaggccaagtctccaacgaaggaggaagcaaagtcccctgagaaggccaagtcccctgagaaggccaagtccccagagaaggaagaggccaagtcccctgagaaggccaagtccccagtgaaggcagaagcaaagtcccctgagaaggccaagtccccagtgaaggcagaagcaaagtcccctgagaaggccaagtccccagtgaaggaagaagcaaagtcccctgagaaggccaagtccccagtgaaggaagaagcaaagtcccctgagaaggccaagtccccagtgaaggaagaagcaaagacccccgagaaggccaagtccccagtgaaggaagaagccaagtccccagagaaggccaagtccccagagaaggccaagactcttgatgtgaagtctccagaagccaagactccagcgaaggaggaagcaaggtcccctgcagacaaattccctgaaaaggccaaaagccctgtcaaggaggaggtcaagtccccagagaaggcgaaatctcccctgaaggaggatgccaaggcccctgagaaggagatcccaaaaaaggaagaggtgaagtccccagtgaaggaggaggagaagccccaggaggtgaaagtcaaagagcccccaaagaaggcagaggaagagaaagcccctgccacaccaaaaacagaggagaagaaggacagcaagaaagaggaggcacccaagaaggaggctccaaagcccaaggtggaggagaagaaggaacctgctgtcgaaaagcccaaagaatccaaagttgaagccaagaaggaagaggctgaagataagaaaaaagtccccaccccagagaaggaggctcctgccaaggtggaggtgaaggaagacgctaaacccaaagaaaagacagaggtggccaagaaggaaccagatgatgccaaggccaaggaacccagcaaaccagcagagaagaaggaggcagcaccggagaaaaaagacaccaaggaggagaaggccaagaagcctgaggagaaacccaagacagaggccaaagccaaggaagatgacaagaccctctcaaaagagcctagcaagcctaaggcagaaaaggctgaaaaatcctccagcacagaccaaaaagacagcaagcctccagagaaggccacagaagacaaggccgccaaggggaagtaaggcagggagaaaggaacatccggaacagccaaagaaactcagaagagtcccggagctcaaggatcagagtaacacaattttcactttttctgtctttatgtaagaagaaactgcttagatgacggggcctccttcttcaaacaggaatttctgttagcaatatgttagcaagagagggcactcccaggcccctgcccccatgccctccccaggcgatggacaattatgatagcttatgtagctgaatgtgatacatgccgaatgccacacgtaaacacttgactataaaaactgcccccctcctttccaaataagtgcatttattgcctctatgtgcaactgacagatgaccgcaataatgaatgagcagttagaaatacattatgcttgagatgtcttaacctattcccaaatgccttctgttttccaaaggagtggtcaagcccttgcccagagctctctattctggaagagcggtccaggtggggccgggcactggccactgaattatgccagggcgcactttccactggagttcactttcaattgcttctgtgcaataaaaccaagtgcttataaaatg

SEQ ID NO: 578044 - DNA, 273 bp, Homo sapiens
cggggcttgtagtgaggcatgatggcaccacttgcagtccaacctaggcaacagagtacaggccctacctcaaaaaaaaaaaaagtgtaacattaacaattagcactccgacgtgtatcctataggctaaatattctcggcagagggaagtgacccgggataagggcggtgaatgggcacagtcgaattgtgggggaaccagtctgccagggggtgtcatgggggggtaatcaaggggcgagcacaacaatcagcagggttcagtgggcaatc

SEQ ID NO: 578045 - DNA, 2288 bp, Homo sapiens
ggcacgagggccccgtcccggcctcgcgcacctgctcaggccatgatgagcttcggcggcgcggacgcgctgctgggcgccccgttcgcgccgctgcatggcggcggcagcctccactacgcgctagcccgaaagggtggcgcaggcgggacgcgctccgccgctggctcctccagcggcttccactcgtggacacggacgtccgtgagctccgtgtccgcctcgcccagccgcttccgtggcgcaggcgccgcctcaagcaccgactcgctggacacgctgagcaacgggccggagggctgcatggtggcggtggccacctcacgcagtgagaaggagcagctgcaggcgctgaacgaccgcttcgccgggtacatcgacaaggtgcggcagctggaggcgcacaaccgcagcctggagggcgaggctgcggcgctgcggcagcagcaggcgggccgctccgctatgggcgagctgtacgagcgcgaggtccgcgagatgcgcggcgcggtgctgcgcctgggcgcggcgcgcggtcagctacgcctggagcaggagcacctgctcgaggacatcgcgcacgtgcgccagcgcctagacgacgaggcccggcagcgagaggaggccgaggcggcggcccgcgcgctggcgcgcttcgcgcaggaggccgaggcggcgcgcgtggacctgcagaagaaggcgcaggcgctgcaggaggagtgcggctacctgcggcgccaccaccaggaagaggtgggcgagctgctcggccagatccagggctccggcgccgcgcaggcgcagatgcaggccgagacgcgcgacgccctgaagtgcgacgtgacgtcggcgctgcgcgagattcgcgcgcagcttgaaggccacgcggtgcagagcacgctgcagtccgaggagtggttccgagaagaaggaacctgctgtcgaaaagcccaaagaatccaaagttgaagccaagaaggaagaggctgaagataagaaaaaagtccccaccccagagaaggaggctcctgccaaggtggaggtgaaggaagacgctaaacccaaagaaaagacagaggtggccaagaaggaaccagatgatgccaaggccaaggaacccagcaaaccagcagagaagaaggaggcagcaccggagaaaaaagacaccaaggaggagaaggccaagaagcctgaggagaaacccaagacagaggccaaagccaaggaagatgacaagaccctctcaaaagagcctagcaagcctaaggcagaaaaggctgaaaaatcctccagcacagaccaaaaagacagcaagcctccagagaaggccaagtccccagagaaggccaagactcttgatgtgaagtctccagaagccaagactccagcgaaggaggaagcaaggtcccctgcagacaaattccctgaaaaggccaaaagccctgtcaaggaggaggtcaagtccccagagaaggcgaaatctcccctgaaggaggatgccaaggcccctgagaaggagatcccaaaaaaggaagaggtgaagtccccagtgaaggaggaggagaagccccaggaggtgaaagtcaaagagcccccaaagaaggcagaggaagagaaagcccctgccacaccaaaaacagaggagaagaaggacagcaagaaagaggaggcacccaagaaggaggctccaaagcccaaggtggaggagaagaaggaacctgctgtcgaaaagcccaaagaaactcagaagagtcccggagctcaaggatcagagtaacacaattttcactttttctgtctttatgtaagaagaaactgcttagatgacggggcctccttcttcaaacaggaatttctgttagcaatatgttagcaagagagggcactcccaggcccctgcccccatgccctccccaggcgatggacaattatgatagcttatgtagctgaatgtgatacatgccgaatgccacacgtaaacacttgactataaaaactgcccccctcctttccaaataagtgcatttattgcctctatgtgcaactgacagatgaccgcaataatgaatgagcagttagaaatacattatgcttgagatgtcttaacctattcccaaatgccttctgttttccaaaggagtggtcaagcccttgcccagagctctctattctggaagagcggtccaggtggggccgggcactggccactgaattatgccagggcgcactttccactggagttcactttcaattgcttctgtgcaataaaaccaagtgcttataaaatg

SEQ ID NO: 578046 - DNA, 3517 bp, Homo sapiens
ggcacgagggccccgtcccggcctcgcgcacctgctcaggccatgatgagcttcggcggcgcggacgcgctgctgggcgccccgttcgcgccgctgcatggcggcggcagcctccactacgcgctagcccgaaagggtggcgcaggcgggacgcgctccgccgctggctcctccagcggcttccactcgtggacacggacgtccgtgagctccgtgtccgcctcgcccagccgcttccgtggcgcaggcgccgcctcaagcaccgactcgctggacacgctgagcaacgggccggagggctgcatggtggcggtggccacctcacgcagtgagaaggagcagctgcaggcgctgaacgaccgcttcgccgggtacatcgacaaggtgcggcagctggaggcgcacaaccgcagcctggagggcgaggctgcggcgctgcggcagcagcaggcgggccgctccgctatgggcgagctgtacgagcgcgaggtccgcgagatgcgcggcgcggtgctgcgcctgggcgcggcgcgcggtcagctacgcctggagcaggagcacctgctcgaggacatcgcgcacgtgcgccagcgcctagacgacgaggcccggcagcgagaggaggccgaggcggcggcccgcgcgctggcgcgcttcgcgcaggaggccgaggcggcgcgcgtggacctgcagaagaaggcgcaggcgctgcaggaggagtgcggctacctgcggcgccaccaccaggaagaggtgggcgagctgctcggccagatccagggctccggcgccgcgcaggcgcagatgcaggccgagacgcgcgacgccctgaagtgcgacgtgacgtcggcgctgcgcgagattcgcgcgcagcttgaaggccacgcggtgcagagcacgctgcagtccgaggagtggttccgagtgaggctggaccgactgtcggaggcagccaaggtgaacacagacgctatgcgctcagcgcaggaggagataactgagtaccggcgtcagctgcaggccaggaccacagagctggaggcactgaaaagcaccaaggactcactggagaggcagcgctctgagctggaggaccgtcatcaggccgacattgcctcctaccaggaagccattcagcagctggacgctgagctgaggaacaccaagtgggagatggccgcccagctgcgagaataccaggacctgctcaatgtcaagatggctctggatatagagatagccgcttacagaaaactcctggaaggtgaagagtgtcggattggctttggcccaattcctttctcgcttccagaaggactccccaaaattccctctgtgtccactcacataaaggtgaaaagcgaagagaagatcaaagtggtggagaagtctgagaaagaaactgtgattgtggaggaacagacagaggagacccaagtgactgaagaagtgactgaagaagaggagaaagaggccaaagaggaggagggcaaggaggaagaagggggtgaagaagaggaggcagaagggggagaagaagaaacaaagtctcccccagcagaagaggctgcatccccagagaaggaagccaagtcaccagtaaaggaagaggcaaagtcaccggctgaggccaagtccccagagaaggaggaagcaaaatccccagccgaagtcaagtcccctgagaaggccaagtctccagcaaaggaagaggcaaagtcaccgcctgaggccaagtccccagagaaggaggaagcaaaatctccagctgaggtcaagtcccccgagaaggccaagtccccagcaaaggaagaggcaaagtcaccggctgaggccaagtctccagagaaggccaagtccccagtgaaggaagaagcaaagtcaccggctgaggccaagtccccagtgaaggaagaagcaaaatctccagctgaggtcaagtccccggaaaaggccaagtctccaacgaaggaggaagcaaagtcccctgagaaggccaagtcccctgagaaggccaagtccccagagaaggaagaggccaagtcccctgagaaggccaagtccccagtgaaggcagaagcaaagtcccctgagaaggccaagtccccagtgaaggcagaagcaaagtcccctgagaaggccaagtccccagtgaaggaagaagcaaagtcccctgagaaggccaagtccccagtgaaggaagaagcaaagtcccctgagaaggccaagtccccagtgaaggaagaagcaaagacccccgagaaggccaagtccccagtgaaggaagaagccaaggcccctgagaaggagatcccaaaaaaggaagaggtgaagtccccagtgaaggaggaggagaagccccaggaggtgaaagtcaaagagcccccaaagaaggcagaggaagagaaagcccctgccacaccaaaaacagaggagaagaaggacagcaagaaagaggaggcacccaagaaggaggctccaaagcccaaggtggaggagaagaaggaacctgctgtcgaaaagcccaaagaatccaaagttgaagccaagaaggaagaggctgaagataagaaaaaagtccccaccccagagaaggaggctcctgccaaggtggaggtgaaggaagacgctaaacccaaagaaaagacagaggtggccaagaaggaaccagatgatgccaaggccaaggaacccagcaaaccagcagagaagaaggaggcagcaccggagaaaaaagacaccaaggaggagaaggccaagaagcctgaggagaaacccaagacagaggccaaagccaaggaagatgacaagaccctctcaaaagagcctagcaagcctaaggcagaaaaggctgaaaaatcctccagcacagaccaaaaagacagcaagcctccagagaaggccacagaagacaaggccgccaaggggaagtaaggcagggagaaaggaacatccggaacagccaaagaaactcagaagagtcccggagctcaaggatcagagtaacacaattttcactttttctgtctttatgtaagaagaaactgcttagatgacggggcctccttcttcaaacaggaatttctgttagcaatatgttagcaagagagggcactcccaggcccctgcccccatgccctccccaggcgatggacaattatgatagcttatgtagctgaatgtgatacatgccgaatgccacacgtaaacacttgactataaaaactgcccccctcctttccaaataagtgcatttattgcctctatgtgcaactgacagatgaccgcaataatgaatgagcagttagaaatacattatgcttgagatgtcttaacctattcccaaatgccttctgttttccaaaggagtggtcaagcccttgcccagagctctctattctggaagagcggtccaggtggggccgggcactggccactgaattatgccagggcgcactttccactggagttcactttcaattgcttctgtgcaataaaaccaagtgcttataaaatg

SEQ ID NO: 578047 - DNA, 112 bp, Homo sapiens
tagctcggactgcaccgcgagagtcacactgcacacgccgaatgcccatgggatatcgccgatcttcacgtgcacacgccgaatacccaaaccataatcgccgaggggatcc

SEQ ID NO: 578048 - DNA, 222 bp, Homo sapiens
tttccgctcgcagctcattcacggggatttctgctgctgctgctgccgcttctcacccgcgccgctcctcgcctctcttgttagcccgagactcgcctctcagccgcccgccgcacagacgcacgagtagacagtgcagctccatcggctgatcctcgctgagctccaagtgtaggcggcaccgggcggcccacgatgccgaagaacaagaagcggaactcc

SEQ ID NO: 578049 - DNA, 825 bp, Homo sapiens
agatttaatgatgaagacaccaaaagcaatttcaacaaaagcaaaaattgacatgtgagacctaattaaactaaagagcttctggacagcgacaagatactgccaacggggctaaaccgacaatctacagaatgggaaacatatttgcaaactatgcattcaacaaaggtctaatatccacaatctatcaggaacttaactaaatttacaagcaaaaacaaacaaccccatcaaaaagctgggcaacaacgaaatgaacagacacactcaccagacagaaggcacacacatgctggccaagaagtaatatgaaacaatcctcaatgtcagaaatgatctaaatcaaaaaccacagtgagatactactctgggcacctcagtaccacatggccctactcacctcataaaaaactcacaaaaaccaacaggcaactagacgtgaacggctcagcagaaaccacaacagtgaacaaacactaatcgaacctggcacggctgacgacgctaatattacaactccaaactaaaaatcccacacccaaccagcaggggcaaaggagaacgaggatgcgcccaaaaacgaccaaacaaacaggaaacagcaacacaacccaaacacacacacaacacaaaaacggaaacacacaaagacacgataaccacacccaacataacacctcagacacacatacattaccacaaacaacacaaaaaacaagaacaaaaatagttaaaccaccttaccaataatcacaaacagaataaacatacaaaaaataaatacagccaaactacaccaaccaaccactgaccatcactttacat

SEQ ID NO: 578050 - DNA, 257 bp, Homo sapiens
agaggctgtgcctggaggggacaccaaagatgcaggagctgagcctggagaggctgccaagaagccatgagctgaggcctggtagaggtcgacttgcagaaagttcagggcctggatgagaaggctgggaggcaggagctgggtctaaagaggccatatgtaacgatagagctgtgcctgtaggcaggctgttgtagaggcagtagcctcatctagcggaggctgccgtgacagtagtgtatgggcctaaataggcc

SEQ ID NO: 578051 - DNA, 918 bp, Homo sapiens
gccacttggttacagctgactggggatttaatcatttggagccacactgaaaaaaaaaatttccccctgaaatctactcttaactgatagtcgctaacctatgcattatgtgtggtaagtatttgacaagtgtctattcagacatattacattcaattgagtttctcaaaacaaaggtccttcctgaaatggtatctatgattcagctattcaaaacctaatgagagttggtgcctatgacaattgtggggaaatctatgacagaaaatgtggttgtacctggggctgtcactgctgtacaaggacgttcggcaccaacatagactgataggacaacctcattgtgaagacctgaagcgagagaaggaatttcaacacgaatgctagtgcggaatctgggaagagcgagtaagacttaaccaagctaagagaaaaggttcaccagggaagtattggcgcggagtcatttggaacgatagcacaagaggcattggaagaccctccccttttttctctgtgaaaactgagatcaactacagggcacatgcgccaacgttcgatacgaagctgttgtggctgagacattcctgaattcattgggaagaattccaggaaccctccatgggtgttacgaataaaatccttcggaaaacaaacactttgcaagagattacccacctagggaatttggggctggcataactagaactttcaggacaatagattcctacaggtacgaagagaattcaagaatgtcccccaggacactaagtaatggtgcagtgtggaggaaacaccacatggtcggtacacgcaatttttgtttattctcccaaagaagagtctcgcaactctggttaaaactttctcactcggtatcgggttgaacatttactcaacacctcttgcggtgtacag

SEQ ID NO: 578052 - DNA, 510 bp, Homo sapiens
  misc_feature (179)..(179): n is a, c, g, or t
  misc_feature (188)..(188): n is a, c, g, or t
  misc_feature (226)..(226): n is a, c, g, or t
  misc_feature (328)..(328): n is a, c, g, or t
  misc_feature (367)..(367): n is a, c, g, or t
gaggatcccgtcagatgctcagctcacagctgacccaccagagcaggagctggcgggtgtcttctgcggcaatagactggaacgattaaggacatggtgtgatagatccatttcaaatgattccatatgattgtcagtgtgtgctgtcagactgtgatcgatttcactagatgtctcantcatcagancaggcattcgggctaagtggtaaatgtgattaggaatnagacctcctcccattctgctagcaacatacagggacacttggaaaaccatttcccttccagtcagcttggtgtccatccccagagccaatttcaatggaaangccttttcccccggccccttggggggcctggacctgatngagcgcagagcctctcagcgtaggaagctggctgcttaatcgagctggctttactctagggtaagtggctgtggacttttctgcacagtgttttcataaagataataggatcctcttgcctgaagtctttttttctttttacg

SEQ ID NO: 578053 - DNA, 127 bp, Homo sapiens
gtcccatcatagccttaggagacccaggttaggtcaggggatgtgcgcttctcttccagccataggctgctgctgagccgccaagggtcttcagttccatcatgtagatattcccagtcaggccatg

SEQ ID NO: 578054 - DNA, 222 bp, Homo sapiens
cggctgggggcggccgttgatctccagcaaggcacttcttgcggggccctcacctggtgcaagggacaaacaagctcgcttggcctctttgataagggaactaatcgtgcccccaaagtccccacctcttaataccaccacctggggggctaggattccacatatgaactttgggaggacacaaacactcaccacccccagcgcactacggaaggccactga

SEQ ID NO: 578055 - DNA, 1032 bp, Homo sapiens
cggaagtatgagatgttgcccagacccttcagcagagtcggggcttggcagcttcagattcccttcagggaaccaggtggagctggcctgaccggagaagctagttcactgggggttgggggcgcttgacctcaggagagaggagctaggggtgcgcgcctatagctcgtgcttccactgtctcgcagatcctgacacagtgacaatctacgagtgctgactgctggatgagggctgttccgtgtggacgaccatcagatgagcataagcaaaagcgataaaatagaagcgaattctctcattttggctgaggcggaggagttgaattagcgcaaacgagcgggaattgggctcttgtgcgcctgatgcctactgttctagtcggtcatgttatggagggcagatgcacggggacctgtgtgtcggtgtgaaccaaggcgactactgttcaacctgggcagcacgtacaacgcatctgcactttgagcatccaagtgcgtgcgccgatgggccttcctcgtatcgcccgcagtatccaaacgcgttggaattagcggtgtggataggggggccaactaagtctatgcctggaatgatatccatattcacaagacggtgaggatagagttttgattgtatacaactagctcttttggagggtcaaatggttggtacagtagcttaattcgtacccccgagaaggttgtcgtaagagactagaaaatatggtggacctggttggtgaaagaggacacattaagaccgtcgagtcgagaaagtggaacctgagaacgtgggcgtgtgcgctgcttctgatgcatggcgaacaggcctgaggcataaccagcattcacaaaaggatttcttgccagaatgtgaaatcctcggcagtagattgcccgcttttatcctctcctggacagatttggataaggtgcccggttgcctgacgcttgcgtggcagatacagggggagacagggggaaagggggccgcggaaaacaccccacggggagaaagagcgccccaaat

SEQ ID NO: 578056 - DNA, 222 bp, Homo sapiens
tcagctcggaccaatgatgctcacgctccatctgcatccttggtgtggaagaaaagttataccacatcgagactcaaagtcccttagacacaaaagtctataagctgcaaggtaaaagtaactatccttgaaaattatcaatcagtggtttatctgaaaacagatgaaaaattttttgtcttattcgtttttattttttgttttttataaaggggaagaaaa

SEQ ID NO: 578057 - DNA, 1077 bp, Homo sapiens
  misc_feature (17)..(17): n is a, c, g, or t
  misc_feature (70)..(70): n is a, c, g, or t
  misc_feature (117)..(117): n is a, c, g, or t
  misc_feature (128)..(128): n is a, c, g, or t
  misc_feature (200)..(200): n is a, c, g, or t
  misc_feature (295)..(295): n is a, c, g, or t
  misc_feature (319)..(319): n is a, c, g, or t
  misc_feature (330)..(330): n is a, c, g, or t
  misc_feature (333)..(333): n is a, c, g, or t
  misc_feature (335)..(335): n is a, c, g, or t
  misc_feature (338)..(338): n is a, c, g, or t
  misc_feature (347)..(347): n is a, c, g, or t
  misc_feature (365)..(365): n is a, c, g, or t
  misc_feature (379)..(379): n is a, c, g, or t
  misc_feature (405)..(405): n is a, c, g, or t
  misc_feature (421)..(421): n is a, c, g, or t
  misc_feature (442)..(442): n is a, c, g, or t
  misc_feature (449)..(449): n is a, c, g, or t
  misc_feature (451)..(451): n is a, c, g, or t
  misc_feature (453)..(453): n is a, c, g, or t
  misc_feature (461)..(461): n is a, c, g, or t
  misc_feature (475)..(475): n is a, c, g, or t
  misc_feature (513)..(513): n is a, c, g, or t
  misc_feature (533)..(533): n is a, c, g, or t
  misc_feature (538)..(538): n is a, c, g, or t
  misc_feature (540)..(540): n is a, c, g, or t
  misc_feature (550)..(550): n is a, c, g, or t
  misc_feature (554)..(554): n is a, c, g, or t
  misc_feature (557)..(557): n is a, c, g, or t
  misc_feature (602)..(602): n is a, c, g, or t
  misc_feature (614)..(614): n is a, c, g, or t
  misc_feature (621)..(621): n is a, c, g, or t
  misc_feature (631)..(631): n is a, c, g, or t
  misc_feature (637)..(637): n is a, c, g, or t
  misc_feature (649)..(649): n is a, c, g, or t
  misc_feature (660)..(660): n is a, c, g, or t
  misc_feature (666)..(666): n is a, c, g, or t
  misc_feature (669)..(669): n is a, c, g, or t
  misc_feature (688)..(688): n is a, c, g, or t
  misc_feature (708)..(708): n is a, c, g, or t
  misc_feature (717)..(717): n is a, c, g, or t
  misc_feature (732)..(732): n is a, c, g, or t
  misc_feature (763)..(763): n is a, c, g, or t
  misc_feature (770)..(770): n is a, c, g, or t
  misc_feature (774)..(774): n is a, c, g, or t
  misc_feature (786)..(786): n is a, c, g, or t
  misc_feature (806)..(806): n is a, c, g, or t
  misc_feature (813)..(813): n is a, c, g, or t
  misc_feature (818)..(818): n is a, c, g, or t
  misc_feature (822)..(822): n is a, c, g, or t
  misc_feature (832)..(832): n is a, c, g, or t
  misc_feature (834)..(834): n is a, c, g, or t
  misc_feature (930)..(930): n is a, c, g, or t
  misc_feature (933)..(933): n is a, c, g, or t
  misc_feature (939)..(939): n is a, c, g, or t
  misc_feature (947)..(947): n is a, c, g, or t
  misc_feature (970)..(970): n is a, c, g, or t
  misc_feature (974)..(974): n is a, c, g, or t
  misc_feature (985)..(985): n is a, c, g, or t
  misc_feature (1000)..(1000): n is a, c, g, or t
  misc_feature (1069)..(1069): n is a, c, g, or t
aggctggtgcggaactngccgcccccagcagcgccggcgggctaagcccagggccgggcagacaaaaaangccgcccgcgtaggaaggcacggccggcggcggcggagcgcaagatnggccgggcganggggcagcgcgctgctggctctgtgcggggcactggctgcctgcgggtggctcctgggcgccgaaacccaanaacccggggcgcccgcggcgggcaagaagcggcgccggcggctgagaaagaaagacggatctccttcaaaacaccgctacacccgaagctgcgcnaggcgctcgtgtccgtgtggctgnagtgcaccgcnatnancangaatttaanacggtgtgggcgcacttncgaagggccggganctcctgtgtcatcgaagctgtccganaaacctaggcgtccanagagcctgggtgagcctgaantttaaananantggggaanatagcatggggaangagagctgttgggacgagaaactgctcatttttcttgngcccagtcacctatagcaangaaanancaaaaaaggngaanganacaatttgtcaacctcgatccacagtaacccgcatttcacatcangcctttccctgnaacccanataggctttngagaangcagcgtctcancctgtgtgaantcaaangantggttttgtgtggtcgaancaatagcccaggggaataanatctagaancgggaacttttccanacctcggataaggataagtgtacgttgaatngagaaanaaangtgggtccaaanaaatcatctgtttgaaaaanatagaanaaaantgtnggatcaaaananaaaacttgctcctgagaccaaggctgtcattcattggattatggatattccttttgtgctttctgccaatctccatggaggagacttgtggccaantanccatangatgagangcggagtggtagtgctcacgaanacanctcctccccanatgacgccattttcnaaacttggcccgggcatactcttctttcaaccggccatgtctgacccaatcggccacatgtcgcaaaangatgatga

SEQ ID NO: 578058 - DNA, 323 bp, Homo sapiens
agacaacctccatgctatctgagaataaatgcccaactgctcttgcttgctatgcggttggtagtgaaatactagaatgagcacccattccaaagctctattaccagtggcgtagttgcatgttcgaaatgaggtctgtttaaagtggcaatctcagatgcagttgggagagtcagatcttgctccttgaatatctttcgataaacaacaaggtggtgtgatcttaatatattcgacaaaaacttcattctcgtgagctcatttaaatgtgtacaatgtacacacgggtacttagagtttctgttggatactttataaataaa

SEQ ID NO: 578059 - DNA, 572 bp, Homo sapiens
agttcgacggagactctcactgatatggtgaccgacagactgggaaaacctcaattgctattgacacaatcattaaccaaataccgcatcaatgatagactggatagaagaaaatatggcgcatgttcaccgtgaaatgctatgcggccatgagaaagggatgagttcatatcctttgcaagggacatggatgacagctggaaagcatcattctcggcaaactaacaacgggaacagaataaccaagagcactggatgttctcactctgaagtgggagctgaacaatgagaacacgtggacacggggaggggaacatcacagcagtggggcctgatggtgggtaggggtctaggggagggatagcattgggagaaatacctaatgtaggatagaagggtagagtgggtgaaggagaagcagcgagtgacacgtgtatacctgtgtaataaatctgtatgttctgcacatgtatgccagaacttaaagtgtgataaaaaaattgggaaaaagttaagtatgtcatagatacgtatgatattgtggattctagtttagttgctcatatatgggg

SEQ ID NO: 578060 - DNA, 120 bp, Homo sapiens
  misc_feature (30)..(30): n is a, c, g, or t
cccccccggagctgcggcgggcttgcagcnctcgcccgcctgtcctcccggtgtcccgcttctccgcgccccagccgccggtgccagcttttcggggccccgagtcgcaaccaacgaaga

SEQ ID NO: 578061 - DNA, 626 bp, Homo sapiens
cggcctccccgcatcacaggtccctggcagcaagcgggaaatgggggcgcacactgtgtgcttgggggtgctgcttgtttaccacacatgaccagactcccagcaggacagagctgctcagtactttacagaaaccaagctgagtcgtttgtgcatgaattaagccggtctgcttccccgtcaccttcgtaacaaaacaagcgtcccctctcccctcgcctcgagcaggtttcttcaggacaccgtggctcgggcttgctccctgtctgcctaggcacgctggtttggctgtgcctgggcaccggtctcacgtgaatgggcactgggctctttgtgaccagcatcgtgatgctcacgtgctaagccgctatgccgggtcctggagagcctgtacccgtctgagttctatgggcttgtcccgctggagcctgcagatgctagactgttggggtgtgtcccgtgatgatatgctgggccaggctgggagctagggcctttctagcagggttgggtggctcagtgagggtgtggaacgttgggggacccacggggcctggctttgggactagacatgccagccccagctgggctggatgggagcctgagtgagccccgacatacgctgg

SEQ ID NO: 578062 - DNA, 368 bp, Homo sapiens
ctagggaatgtgctttgaggtaggttctcataggtataccaccgctgggagacagttatgactttaaaacgttgtgatcggtgtgttgctgctgtcaggtctccctgtcgactcagacaccgatttggagtctcttgggcatgacagcgaagtgagtggttgtccattcgaatggagcagtttgattccaggaaaagagactgctccttgtggtcctggtgaccagggataggactccagttgagcctggtggaagaggtccttgtcctaccccaacggagagccatgcagctgagcttgggtgatgtggtccacgtggttgtttctgagtgtgtcctgaggttgcaggatggcttgcttgttccgct

SEQ ID NO: 578063 - DNA, 172 bp, Homo sapiens
cgccatcttcagctaatactctgagtaaggctacaaagtacagcgcaagtacccacgtaaaagacgttaggtcaagtgtgtcgcccatgtcaagtggcaagaaatgtggactacattttctacccctagcagactacgatagcccttattaaacttaagggtcgaaagtgga

SEQ ID NO: 578064 - DNA, 1487 bp, Homo sapiens
  misc_feature (188)..(188): n is a, c, g, or t
  misc_feature (593)..(593): n is a, c, g, or t
  misc_feature (644)..(644): n is a, c, g, or t
  misc_feature (720)..(720): n is a, c, g, or t
  misc_feature (869)..(869): n is a, c, g, or t
  misc_feature (1043)..(1043): n is a, c, g, or t
  misc_feature (1053)..(1053): n is a, c, g, or t
  misc_feature (1189)..(1189): n is a, c, g, or t
  misc_feature (1344)..(1344): n is a, c, g, or t
  misc_feature (1471)..(1471): n is a, c, g, or t
gctcaggtggcgctccctgcgcgagcccgtccgtgctggtgctgcggcgagcgcttcccttattgctcccgacggcggcacaggcatagtggctggagcaggcgtcgcgtgtcgaccctggccatgagcctgaggcatagccggtcgccgagttcggcgcgggtgtctcggcgcctgctagctcggangcttgattagtcgtatgagtgcgcgccgcccatctcgcgagtgtgggaggtgtgatgaaacccgtccgccgtcagagtggtgtggatctacacggcctggaccctgacccggtgacactacggcccgcagaacggactgtccggtgaccgtgcgttcgggttcgtgtccgcaccagagctagctgtgggcgccggtctgcggcggcagcgttgtagcaccttccacggtgctggcaagtcaggcgttagcaccccgaaagtggagctctcgccggcggggattcctgcgccttccgggttacgccctgttgcctcgcagcgaatggcgtctggcatccgcgtggaagtgagcccccctgagtgttggtagcgcgatgagaggcgggtgggcgcgtggtcttgagnacgcgcccggcgcatggcctgggccgccgagtggcgaacatgtgtgctggncgtcttaccggcaccgcccgccgcgccgtgaggatccatagccaccatgcacggccgcgtggatccagttgccggnccacggcaggagctacgtgtgaggacaggctgggcgtagcaggaaccggcacgttatggcgggacagccccttaggaccggccggttgtgccggcagcacgggtcgcacgtgagctaccgtacaggacggtgtacgagggttcttctgngcacgacacgacaatcgtctgccataacaaagggaacgacttcagaaacaggtgcttctggggtcccgcgggggacttcggatgttcttcgtagagtcctctgcgatatcggaccccttcccaaagggttccccgtactttcagccagacgacatgggtcccgcagctgccagngtgcattcgnttccggcttcgtcccacggaatccttcgggtttccgcgggtccaagatcccaggggttcttctgggtcccaatggaggtttcatcccccccagctggtgcgaggcagtgtgcatcccccacattcccggttgccgnactcgagagaaggtctcgccaggttttcctggaaaagaagagcagcggctggtcctcttacagcagactgagtgttttggcggccgcctgtatcacgcggagtctgcgtccagacacagcacctcttcccttgaaagtcactcctataactgctntataaggctcggtgagagttctgtctactagcagcacagtgacgacaatatcatcgcttctcacttctcgaggcggcagctcgctgatacgactacactatcagtcgtctgtctcacagtctgaagntctattagatttggga

SEQ ID NO: 578065 - DNA, 908 bp, Homo sapiens
gagaagaagccctgcatcacctacgggctcaggtgcatttgctacttttacatcgaggtggagtgcagacaactaaagacctccattctggggtgtacagggggctctggtgcatgaggccatgactgatctcatttagctgatgggctcttatggtggacaagagggggaacatcctgatccccggcattgaacgagagtcgtggacgacgtcacaggaagaggagcacaagctgtacgacgacaatcgacatttgacatagaggagtttgccaaggatgtggagggcgcagatcctcctgacagcagcacaatgaaagacatcctcatgcaccgatggcggtacccgtctctgtccctccatggaatcgaaggcgcctatctactgggatctggggccaagaccgtgattcccaggaaggtggtaggcaagttctaccatcaggctcgtgccgaaacatgaatcctgaagtcgtcggcagagcaggtcacaagctacctaactacagaagtttgcatgaactacgcagaccccaagtgagttcaaggtgtacatgggccacggatgggaagccctgggtctccgacttcagatcaccctcattaccatggctgggagaagagccagtgaagacaagatattggaggtagagccagacttgaccaggggaagggcggcagatattcccgtagaccttgacttttcaggagtgccaagggcaagaacggtcatgctggatgcatgtggaggatcaagcggattgacggaagcccactccacagaaatgaaaaggctcaacaggtataactacatagagggaaccaaagatgctggcgaagtacctgtatgaaggttccaagatgaagactaggcacagacctatgagtagccatactcattaaaagca

SEQ ID NO: 578066 - DNA, 1458 bp, Homo sapiens
gcctgctgcgggctccgcgccggtcgtcccgggtctatgggtccattccccacgacccacccggaccccggtggtcactcgtggtctccgtctgtgccagtggatgcggagaatcaccgcgcagcggtcctctctgcgacttctgggcgactagagaacgctggccccggacgcgtgcgctgagtgctccgtgacgtcacaacggagacggtggcggcagtgaccatcccaagtggcgccgtgctgcatcccccgggccgcactctgtgacgtgctgcgacttccgggacgaaggcgtctggattctcggccgtgatgggccaagaccttgcacctggccatgcgttccttcaaccgcccgttcattttaccagtgactcagatcccagaaaggcgacacgcagcaggagtttgctcactgggcttctgcgtaaccaggaagtgcaggatgcgtgtgttcccatcttcgtacagctctgggtcctagttcttgtccccagggtggcttgacttggtgaatagcctgggactctatccccttacgaagagggtggacggtcgtctgagggcgacgatatggccacggggccgcacaccaggtggtggaggagaggtcgcaggacggagaaggtaaatgcacaagctggggcgcggtacacgaccctttcccacaggggccccgacaggcgacgtgcaccccgtggaggcaagggcatagcgacggggaaggaagggtcgaccagagatgccaacggacgctacatttaacggacacgacgagcgttcgaggacgacgacccaaaaagggagcgggggaaaaacggacggggcaacccggtcacaagcatggagtcggcgccttcagcagagtgcggccgccgcgaaagtaggtatgccacaggagagcaccgcggtgtagagcagccgcataagtataagcgggggagagccgcgggggcgcgagagcgacaacggacgcgggaggtagtggatagaaggcgcggtgtgatgcgcgctggtaacacagaggcgcgaggcaacgcaaccgagaagttggcgcccaagagaacatagcggttgcttagccagtgggtgaacacgggcgaagtcgagagacgaaaggtgcccacaccctcggaggcggatccaaaacgagggcagacacacacttcgccggagcccggtaggaagaacacctatataggcacgtagcgccttggtgcgaaagaactttccccgcatgtggttgtgacacacacattttagtagagaccagtgccgagtagccaatgaacaagggcggtattaccaggtatgattgcccctaaaaggcggggtaagttgaggcgcacaacttggacaatgggggggcggaggcaaagaagtgtagcagtgccggcggcgacaagacaataagggacgacgtggagtaggcgacactccatgcatcgcaggaga

SEQ ID NO: 578067 - DNA, 260 bp, Homo sapiens
tatagcacaataggaagggtcccaggttgtagaagccccaagttgagaacaataatgaacaattattgtatgaacaattgttagaaacagctaatcacaaacaacctgcgggcacaatgacctcattccacacgtagacacccttcagcaggaccctataaaactttcctccagcccttgcctctttgcacggtagccccattctctgtctgagcctgcccacatgcacacatacttttcacacatcttctctaactaac

SEQ ID NO: 578068 - DNA, 376 bp, Homo sapiens
atattattgtgtgtacgccctgacttggagcagacgggcagtggagctcttgaagtggggcataggcgagagtgccccacaggccttcagcctctcctggtcaactggctccaagcagcattttaaacccacaggtgtacaacagcttctgttcccactgtctgagggacatggacagatctcgagggctcagcaggagaaggtctgaggtccaagggtggcagagggaccaggtggaggaccgccacttctccagccaatctcgggccactcagttccaggctgggcagccacagtgcccctcaaggccagtgtcccagccaggcctatgaaccacttcctcctgaggggactccccgaccttgcattggtctac

SEQ ID NO: 578069 - DNA, 85 bp, Homo sapiens
  misc_feature (38)..(38): n is a, c, g, or t
agaaagcagtttcccagaaggttcttgaagagctgagnccattcgggcccccgcttcccccaccaatgaaaattaaaagttattt

SEQ ID NO: 578070 - DNA, 411 bp, Homo sapiens
ctgttcttcattgctctctacgaagtacaaatcctaagcctgtttattttttaaaagtaccaaaggaaaatctctgatcttaaagtctttcttataagctatatagatcattaactaaccatctctaaaattatagcagacaacttggcatttgttgactttcagagctggaagggccttctagcctggactgaccttccttcctccatccctccttcccttgttcccttagcattacaatgaaaacaaatcccaggttatgcacagttcaggacagagtgaattgcttcctcctaccattatcagccatcgtgttgcccattccagaggcaatcacaccccattttttatgaatctttccaaaaagaatgtaatgcatatttctatatactgtatttttgaagcaactaa

SEQ ID NO: 578071 - DNA, 229 bp, Homo sapiens
  misc_feature (72)..(72): n is a, c, g, or t
  misc_feature (74)..(74): n is a, c, g, or t
gacttagatcctgcaggacacaggtttgatctcaacttcgttgaaaacaggatgcatgacttggcggccaancnaaagaagtttgggtttaatttctatctatacacccagtaaaatatctgtgataccactggaaaaccttaaaatacattatctatttctgtgtaaaagactgatgacatgtgaatttgcacagcatacatatgtacaggtatctcttctcaacgga

SEQ ID NO: 578072 - DNA, 106 bp, Homo sapiens
ttatagctggaggggacaggacctggggttggttggaaatgcagaatatgggaacccactcccaatctactgaatcagaatcgcattatagtggtttattccatat

SEQ ID NO: 578073 - DNA, 190 bp, Homo sapiens
ctgtactaatgatgtcctaaatagctgtacctaaatggctgtacctaattggctgtacctaaaatggctgcacctaaatggctgctacctaaatggctgttacctaaatggctgtcacctcaatggctgttacctaaatggctgctacctaaatggctgttacctaaaggggcaccgagcccgactacgc

SEQ ID NO: 578074 - DNA, 254 bp, Homo sapiens
ttgttttattggttttctgttttctattttatttatttctactctaatctttgttatttctttccttctgtttgctttatgctaaatttcttcttctgcctctagttcttaaggtggatgtctggttactgattttagatctctcttctctactcaatctaggcattcaagcaataaacattcattaagcactgctttagcggcatcacacatatttgatatagtgtatttgcattccatttaggtcagatatt

SEQ ID NO: 578075 - DNA, 749 bp, Homo sapiens
  misc_feature (1)..(1): n is a, c, g, or t
  misc_feature (72)..(72): n is a, c, g, or t
  misc_feature (80)..(80): n is a, c, g, or t
  misc_feature (83)..(83): n is a, c, g, or t
  misc_feature (102)..(102): n is a, c, g, or t
  misc_feature (118)..(119): n is a, c, g, or t
  misc_feature (132)..(133): n is a, c, g, or t
  misc_feature (136)..(136): n is a, c, g, or t
  misc_feature (170)..(170): n is a, c, g, or t
  misc_feature (172)..(172): n is a, c, g, or t
  misc_feature (310)..(311): n is a, c, g, or t
  misc_feature (317)..(317): n is a, c, g, or t
  misc_feature (329)..(329): n is a, c, g, or t
  misc_feature (339)..(340): n is a, c, g, or t
  misc_feature (343)..(343): n is a, c, g, or t
  misc_feature (347)..(347): n is a, c, g, or t
  misc_feature (364)..(364): n is a, c, g, or t
  misc_feature (371)..(371): n is a, c, g, or t
  misc_feature (393)..(393): n is a, c, g, or t
  misc_feature (422)..(422): n is a, c, g, or t
  misc_feature (427)..(427): n is a, c, g, or t
  misc_feature (541)..(541): n is a, c, g, or t
  misc_feature (546)..(546): n is a, c, g, or t
  misc_feature (566)..(566): n is a, c, g, or t
  misc_feature (586)..(586): n is a, c, g, or t
  misc_feature (609)..(609): n is a, c, g, or t
  misc_feature (629)..(629): n is a, c, g, or t
  misc_feature (640)..(640): n is a, c, g, or t
  misc_feature (647)..(647): n is a, c, g, or t
  misc_feature (655)..(655): n is a, c, g, or t
  misc_feature (667)..(667): n is a, c, g, or t
  misc_feature (747)..(747): n is a, c, g, or t
ngtcccatcgtttatattagtttagtgtgatgtctatttactagctgttacttcatgagcagcatattatgnaatcgatnacnagtaagaactattgtcccngctcttcgacggagcnnacattctaaaagnnaanatacaccttttttaaaatggcatttttgtttggngntttctgcaaagtatctagaggaaatattttgtaaagtgagctttgcggtataatcttagcccctagtcattatttagagaatagaggaggaagaaatgaggaaggattattaaaggcgagacacatgacatgaccatnngggatngggggggttttnaagggagatnnacncagnctcatcaactaaggagngatttgntgcagttaataggatgaggganatagtctgtggggtgcaagcaaaggaagnggggngccttagacactgagtggagccagaaagatcatgcggcgcgtttttccaagtacactgtgccaccaagtaaagaatggtttggtgacaagacagaaaggctaaaacaggaaggnaatcntgtgcacctgacaaataganagaataaaggatcaaaattnaaggcaggctataagagtatcangaaattcttaaaaaccaaanagtgatttggnagcacanaacttacngttaatgctacncaatgtcatgatggggcaagaacattgtggcttcctaagttagaaaatgccatatgccgaaaattttaaatggaacacanta

SEQ ID NO: 578076 - DNA, 178 bp, Homo sapiens
ccacctcagcctcctgagtagctgagatgacaagtgtgcatcacgacgcccagctaagttttaaaatttttcgtagagacagagtcttgccatgttgttcgagctggtcttgaactcctgggcagaagcaattatctcgccttgggctcccagagtgcggggattatagctatgagcc

SEQ ID NO: 578077 - DNA, 529 bp, Homo sapiens
  misc_feature (502)..(502): n is a, c, g, or t
ggtccatttaatgaattgggctggaccgcaagggaaccttgatatgatgggttaaggtcatgggggtggcttccaaaataagatgtataaaaccattccagaccattcagagaaaaccatgattccaggataaaattattacaatggtcgggtgacatttaacatgtatccgcaatcccttcctccccctttggcaagtccaccacttcaggccatacacttaaggcaaaccaggaaaattaaacctagccacatggacttggtcagatttaataacccttttaaaacctggtccaaggagcactggtgcttgagtaaaaaaccaggggaatggtcgagggtcacaaaggaattccaaattaattctggagacttggaaccaaaaaattcccatccggtgattggaattacaagggtatctggctaacaaaaaaggtgtacttccaatatatcaggtctttggataaggaatacggcacaggactttctccacctatgtgtnaccacatcaggcccagtctccctgaag

SEQ ID NO: 578078 - DNA, 489 bp, Homo sapiens
  misc_feature (25)..(25): n is a, c, g, or t
  misc_feature (71)..(71): n is a, c, g, or t
  misc_feature (79)..(80): n is a, c, g, or t
  misc_feature (82)..(82): n is a, c, g, or t
  misc_feature (101)..(101): n is a, c, g, or t
  misc_feature (103)..(104): n is a, c, g, or t
  misc_feature (112)..(112): n is a, c, g, or t
  misc_feature (121)..(121): n is a, c, g, or t
  misc_feature (141)..(141): n is a, c, g, or t
  misc_feature (144)..(144): n is a, c, g, or t
  misc_feature (146)..(146): n is a, c, g, or t
  misc_feature (150)..(150): n is a, c, g, or t
  misc_feature (170)..(170): n is a, c, g, or t
  misc_feature (172)..(172): n is a, c, g, or t
  misc_feature (480)..(480): n is a, c, g, or t
agggctcatataaatcccaataccngctgctgcctgcttacccgtatcacaaactgacctctccttagtgnttgggccnnantttcttcatttggaaggtngnnggtgtggnaagcaaccnagtcattaacttgctcgcangcntnttgngcagttagctaacaggagtntnccagtttccagggcatctcacctctcatgagcccttgcacccatccctcaggtgttcaaatctcgaacgccgccagtattgccattcgctgctctgctctagcctgctggagtacaccccatcctcaaggctctccccactagaggcctgtgcgcacagcttctttgatgaactgcgatgtctgggaacccagctgcctaacaaccgcccacttccccctctcttcaacttcagtgctggtggtgagggcatagcctgggatctggggagtggggcggggtaggggggcagccaaagattgtgaggancttggtgtt

SEQ ID NO: 578079 - DNA, 852 bp, Homo sapiens
gtgcctctcaaggcagaaccacagagatggggtacttacatccactccctcaccgcccttcaccactcactccccagcgtcctgaggtggctggccagtgaacccccagttcccacctctcaacccgcggcacttgtaggccaaggcgccaggcagcacgacagcagcagcagcagcgtcgtccttgcagtccaagggagctcccaagggaagctgttcgacccctgccggtggccgggccactctgctagagtccatccgccaagctagggggcatcggcaaggccaagctgcgcagcatgaaggagcgaaacgctgggacgcaagaagaagcagaaggagcaggagcaagctgagagccacgagccaaggtgggcactgagatgtcggatctctgtcaacaagctaggtcatagaggtgcaagggcatgctctgggcaaaggacctccggggctgcgtgaggggcccggaggagcctcttgccgagcgtgtcgagacgtcacatgcccgtcgctcttgcgcgcacaccgctagcaagccacaggcagaggaggacgaggacgacagggaatcctagggggctccatgacacggttccccggccagacccagacattgggccgttgctcgtgacatggacacaagccaggacaagctgctcagacctactttccttgggagggtggtgagcggaagccagcaactgtgtgcgagactcagctgtgaaggagcggaaggctggcttgaggccacacagctggggcgggactgtctgtctgcctgtgctccatggggggacggctccacccagcaaactccacagggggggttcctgtcacttgccttagaag

SEQ ID NO: 578080 - DNA, 218 bp, Homo sapiens
taacttttaatcaggtatttaaatgtaaaaataattaaaaatatacaggaaaatatgcttaggtaccttataattcctatcccatttaatgtaagggacttaaccttctgcaaatggtggtgtccacagctaaccaaacggctctgtgcaggaaaaggccctacagtgaaggaaaaattaaacctttgtattgtggcctattttgtgtccatttattc

SEQ ID NO: 578081 - DNA, 272 bp, Homo sapiens
catcaacaacaggggcatatgtgttaatagtattcagaacataagctgcatagctttttagaataaaaaatgatataacttcaggtacatgcttcgggacacttggttaaacaaggaatcggtgtctttgatgaccaccttaaaagggccccaaacttcacagtgtaacttggaaacggacagggtgatagctgattacctcatgacatactgccttcaaaagaacattctgacagagcattaagcaaaacagagcccacaggttcaaggtt

SEQ ID NO: 578082 - DNA, 421 bp, Homo sapiens
aggatcccgacggtccaacggaacttttcggtacaaataaatttaatgctttttttttctgattctgtgaagaaggttatgggtagttggataggaatagcattgaatctataaatggcttgggtagtatggccattttaacaatattgattcttcctatccataagtatggaatgtctttccatttgtgtcatctctgatttctttcagcagggtttagtaattgtggtggtagagatctttcatctcccgggttagctgtattcctaggtattttattcttggggtggcaattgtgaataggattgcattcttgattaggctctcagcttggatgtcgttggtgtataaaaatgctaccatattttgtatatggatttcgtctcctgaaagttccgttgaagccgtcgggtaccgagct

SEQ ID NO: 578083 - DNA, 312 bp, Homo sapiens
  misc_feature (272)..(272): n is a, c, g, or t
ctggcataaagctttgctgtttaaaactctgatgatgatctaatctttattcctttatgtctctatatgcttttttatattgtttatatatccttgatatcctctttaattttttttttgctttttacttattgtgaaatatttaattgataaataaagattgaatatattcaaggtatacatgacaacatgatgatttaatatatgtatatattctataatgattacacaatcaaaatgacacatctgtcacactcatgctgtacatagancctcagactaatcttatactgaaagtttgtaccgtttgac

SEQ ID NO: 578084 - DNA, 889 bp, Homo sapiens
ggttttgagtgtggctgtacacggaaaatcttaggattgtttaatatgcggccacatagggatgtggacggtatgtcagtcgacatgcttatagagcactttgtagtgaaagcgcagcatcacgtatgccatgcagcttaccaaaccatcgagtctggtgactatgctggagataactatgttcatcgacgtggttgcaagtagaaacaacgagtggacaacagagtacctacagatatgaatgtgagggggcatacttgccgaggaagagaacatagactgccttacagttagcacgtattcatattgtactacacacacgaccacgacgtggacctctcagcgcaatctactggtgaaaacaagatagttcggatagagaaggagacagcagaggatagattaccaacatgaacgaccaaagtgtatacagaaacaatcgagaaggtgtgataatctagagcacaaactaaatgatctcctaaaagaaaagcagtctgtggaaagaaagtgcagctcagtctaaacacaaaagtggccaaactcaccaacgagctcaaagaggagcaggaaatgaacaagtgtttgcgagccaaccaagtcctcctgcagaacaagctaaaagaggacggagagggtgctgaaggagaacctgtgaccaaaaagatctgagatcaccgagatcccaggagcagctgcgtgacgtcatgtactacctggagaacacaggagaagatcaacatctgcctggcgaagagccggaggaaatccaggagggacagatccacatcggcagggctcggctcaagcctggctcctcgggggccaggggaaattgcccccaggaagggccgcagagaggggcagtgacccaagcaaagatcctgaa

SEQ ID NO: 578085 - DNA, 218 bp, Homo sapiens
gggggccccccccccctttttttttcccccttaaaaaacccggggggggttcccccccccggttttttttttggggccggggggggttacatttttttcccgggggaccctttttccccttgggccttttttggggcccctttaaacccgttttttcccaaaaaccggggggggccgggcccggttttcccggggtttttttccccccccggccccca

SEQ ID NO: 578086 - DNA, 165 bp, Homo sapiens
  misc_feature (35)..(35): n is a, c, g, or t
cttttgggggcccctttagaccaagtttggcaaanaaaacgggggggggcggggcggggattcccggggattttgtccccccgggggcgggttttttggggggggggtttttttgggttgggggggttaactttttttaaaaaagggggttttttattttcccca

SEQ ID NO: 578087 - DNA, 131 bp, Homo sapiens
ggactcaacaaagaggccgggtacattatgggcgtgattgaccacccatagagcaggaagagggagaggacggcaggaaagttggtgggcgacgtgtagtgccggcaggtcgaacacaaacaggatgatga

SEQ ID NO: 578088 - DNA, 1422 bp, Homo sapiens
  misc_feature (744)..(744): n is a, c, g, or t
agctacctactagcagcgggagacggagcgacctgcattccgagactgggcagattcgcggaccgcactgagatgacccgcgtattatctcagtcgacttaatgtggagattcgtgttaactagactagtggacaaggacatctgagtaatcgataacgaatcaatgtactagaatcatttggagtacaaagaatgtcgtggatttggactgtggaacggcaagtagaaaccgaattatggacatctggatgagatgaaaaaggagatctgctgatgatagcgatcgttgatagatctgggtcgtcgaggattggctaggtagactgatgtgagatggttggtagtactatgcaaatacattgcacagtcttgaagtcatctagacacgacatgtatcaacgaggataagaaacatgagctgaactgtaatcgtatccaatgagacaaatggaatgtcatgtaactacacagtgtacaagagaagtggtggtgtccattggatcaagaagagactggcaggaacaactgactgtgaacgactcagcggtgtgaagtgtcaatgcaacgtacgcgagtgggctctagcatttgacgtgtgcgggtccttggtatacgtgggtggtctgggatttgtaacttacaagatagagcgggctaaccaagggtactaggaattaccgggcacaagtagcactacgtgttagttgacctacaatggtcgagcccaaatcaaggggttccgncgcagaagtttccggggaaaggaaacggatagactcgggcaaaatttcattgaaacctcgacgcacgagttggcaggaacaaaaaatggaactttggaacaggaacaggttgggtacaaataaaaatttggagttccaagaacaggccatttgcgacaaaagaccattagaaaaaagggctttggccaaagtacttaattattattcccttcgttcccaatgcactggtctttacgattaagcaaaagatgttaaacacatcgtctgaacgaaagaggccccaaagagcatttcggacacttgggcggacacacggtccatgggaagctttccaatgggtgaaagggccagtaagttcctgggaaacagggccacctggggggaccgacgaacaggggtgctttaacaaggttgaaaccgaagttctgaattgggatatttgaacccagccaagttccaaagaaattctgggttcaagaaggttacagaaccttcaaaacaagctggggaaacaatacaaacagggggcaattttgggggaaaacagaaaaacaaacaataatataataccatcatatgaacagcaaagacaaatacgacaaacataaacaagcacaagagatagtctagatagaacgatcgatatcagatcagctaatagtacaataatagatagaa

SEQ ID NO: 578089 - DNA, 153 bp, Homo sapiens
gctgctgtggtgacttagaggatccccggtcagctcctctgtcttggtgaagaaccattcctcgacatcctgcggttcttctctgccatcttctcatactgggtcacgcatctcgtacagaatgcggctcaggtccacgccaggtgcagcgtt

SEQ ID NO: 578090 - DNA, 350 bp, Homo sapiens
tactctgcgactactggatgtgcgttccgtgctgtcttgtctgcggttcggcgtgacctcctttactgcttcagtatgacccactcctgtgcaggttgttctatctgcgtgattttcgagacaatactgtcagagttcaagacacagattggaacgaactggacaggaagaggcagcgatactaagaaaagaatccccggagagggcggatcgtgatgcgtccgtgctatcgtcgagtcacaccagttccattctgatgcaaccccttgcatcctcagccatttcctagctcccgccttcctccaggaattatcgggggtgaatatgaccaaggaacaacacttccctag

SEQ ID NO: 578091 - DNA, 510 bp, Homo sapiens
gtcatagtgctcatctgggtactcggcaaggttgtaactgcggagccgaaggccgcctcctggcaggcggtaaagcagtttcacgcgaagtaggccgtcgtggtcaagtgcgtacatttttccgtcgatgatgctcttggcgtcagtgttcacgccaacagtgctgccgtcaggtagcaccggttccatgctgttgccctttactggtacgcagccggctgcttcggggttcacgttcttcttctgcagggttcgcttgccaaagcgcagcttcctgccattcgtttcgagcatcactgcagatccgttgcctgcggagatttccgtttctttgaaaaacggcagctccacttcgtcaggcccaagcggggtgtggtcatcccagacttcaatcggatcgagcactacatctgcagatctggatcgttggggagttggggagagtggcaaatccttcatcagcctggggctgacgtccgtcgggtcgaaggagagaaccgatgcgaactt

SEQ ID NO: 578092 - DNA, 365 bp, Homo sapiens
tgtgatgagcatgcatcagtatttcatgcctatttcataggcgagtaatattccactctatggataaccacatttgtttatccagtcatcaactgatggataatcttgcctagttttatacatcactgttgatagcaagtccaaattattacaatctgaacatacagttattattaataatacataaaaacaggctgggtgtgtggttcatgcctgtaatcccagcacgcgggaggccaagatgggcagatcacctgagcccaggagttcgagaccagactgggcaacatgacaaaaccccatctctacaaaaacattacccaagtgtggtggcatgtgcctgtactcccagcaactcaagaggc

SEQ ID NO: 578093 - DNA, 207 bp, Homo sapiens
caggaacacgtgagggcaacaagctgtcctcagggcccctcaactgccctcccatgtcaccaggcccttcacagctggacactgggacttgctttactcaatcgacctcacgggctatagcactacgacagagcgccatgacacaacgcgagacggcaaaaacacaatctcgaacactctgaaaacacaacatcaatacttcaaaaa

SEQ ID NO: 578094 - DNA, 326 bp, Homo sapiens
aagggggagggaactcgtgagaggtgatatgaatcatggagaccgttcccccgagctgtgagtgagttctcatgagatctgatggtattgtgcggggctaaaccccactttgctactgtacttctctgtatcttctccttcttgcaccaggtgaggaaggacatatatgcttctccttccatcatgaatgtaagtatactgaggcctctgcagccctgtagaactgtgaatcaattaaacctctatcctttataaaccacccagtctcggttattttttcttagcagcatgagaagggactaatacaggggtgcggataccagggg

SEQ ID NO: 578095 - DNA, 329 bp, Homo sapiens
gaggagaagtctcactcttgtcccccaggctggagtgcaatggcttgatctcggctcactgaaacctccacctcccgggttcaagcaattctcctgcctcagcctcccgagtagctgggattataggcacctgccaccacgcccggctaatttttcctatttttagtagagacgggattccaccatgttggctaggctggtctcgaactcctgacctcaggtagtacacccgtctcggcctcccaaagtgctgggattacaggcgtgagccactgtgcccagctcttctagttcatttttaagtgttgagtcccttctgtcgtcttctc

SEQ ID NO: 578096 - DNA, 262 bp, Homo sapiens
  misc_feature (27)..(27): n is a, c, g, or t
  misc_feature (63)..(63): n is a, c, g, or t
gtgtacatccagatgacttgaagcaantgaagatccacaaaagaagtgaaagtagccttaaantgatgacattccaccattgtgatttgttcctgccccacgctaactgataccatatattcttcccccgcccttgagaatgtactttgtacacctatcccaaacctataagaactaatgataatcctaccaccctttgctgactctctttttggactcagcccgcctgcacccaggtgaaataaacagccctgttgctcac

SEQ ID NO: 578097 - DNA, 455 bp, Homo sapiens
agatgtcaggatgatgttgtatcctaatttatactctcaagtataaatcttgtgatttacttaatctctttgattctcagtttcatgtaaaatgataacaagaatttctgctttacctgtttcagagagctatgagtgtcacgagatatatatgattatatgctctggtgtaagttatgtgtaaaatgtacaatagtgtaattgttaagtgctggtattttttatttcatatttatctctcaggcttataatgaatttctccctctttaatgccaagacaccaggggtaacattaactcacattatgcatattcagatataataaatataatatttttgcttgctattggggttttcatcatgcagttgaaattcatattatttttaattgtgaaatttctttgtgagaactgacaataaaaatcaaaataatttccccctcttcccaactgata

SEQ ID NO: 578098 - DNA, 236 bp, Homo sapiens
tcccgtcacgcccagcagaccaagactgaggcacgcagcttgtgatccccacagctcacaggtaagaggctgctcacttcctctcctaacactgtaagcagtccttgtccttgggtaccggacactatggctttggccctgtgtagggagaagcggtgccacatgagttgtcttaagaggacaatggcatgcacggtctgagatcagacgttgtgacttggccacccatgagccac

SEQ ID NO: 578099 - DNA, 774 bp, Homo sapiens
attcatgtctgcattaccaaacatttgccagcttcaaataagactcattcctacacatctgcataggtgatactcggatagctagctatcgaaacaggtcctccatatgtctgtcgcttagatttgtattctctaatcttgtctcactaaatgcagtattctgtataggatcaagcttccttattgaaaatgccactgactagtaagcaccacatgttccctccgcaaatggactgagacggtctgaccgacatgatcacgcagtgatgaacctgaagagcctctgaagaatcatgctgatttcggacaggaatgcgtctcggagacagtctgcgaccggacgggtctaggtgacacagaagccaaacaggaggaggaagtaggagggtaagtgctatccgggtccgccgttggccacagcgctccgcgatcttattactaatcgccataattgtggacgccgtaacttgtgatcccctccttgaaagcttgctctgtacgcatgcgctctatgagtggcctttcccctaggttcaagctcccctccgacgtcatgcgtcctgttgcgtctagcggttcattcgaacgtcgtattaagctgggtgctgggcacctgtgtagcactggtgtccaataccagaagtcggatgtggcggcgtctgtgcttcctttgtacctcgtgaagcctccgttggccttgggcgggacggtgtgcgcaccctgccgggagttcgtagtcctggccccgaacggtggcctggcagcgcgggacgg

SEQ ID NO: 578100 - DNA, 634 bp, Homo sapiens
  misc_feature (233)..(234): n is a, c, g, or t
  misc_feature (611)..(611): n is a, c, g, or t
gcattttgacaacccttggtcccaggttggtccaccagtagtctatatgttaccatgagacaatgtttcaatgcagttaatattgaactcaactgactttgcataaagcagattccccttcataatgtgggtaggcatcatccaatcaactgaagttctcaagagcaaagacagatttcctgaagaacgactttggtctcaagactgaaccacgaaagccatacttgaatttnnagctggcctgccctgcactgtggattatggatcaggacgtgacatccacacttacctgaatttccagcctgccaacttgccgtaaagattttggatttgccagccccctcaattttgtgggccagttccttaaaagcaatgtttctctggataatcctgagtaatacagagtacatttacaaaataaataaatgacaatctttcacaagacctacttcttgaagaaaacacaccattttcaaattatgtacccttacataatttgacatgtaatggccaattttcatatagattcaaaatctgtaacaaattacataaattgaaatttccagaagtgccccattacatagttcctagtcagtttgcctgcctcttgntttttttttttttttttcttaaa

SEQ ID NO: 578101 - DNA, 633 bp, Homo sapiens
  misc_feature (233)..(234): n is a, c, g, or t
gcattttgacaacccttggtcccaggttggtccaccagtagtctatatgttaccatgagacaatgtttcaatgcagttaatattgaactcaactgactttgcataaagcagattccccttcataatgtgggtaggcatcatccaatcaactgaagttctcaagagcaaagacagatttcctgaagaacgactttggtctcaagactgaaccacgaaagccatacttgaatttnnagctggcctgccctgcactgtggattatggatcaggacgtgacatccacacttacctgaatttccagcctgccaacttgccgtaaagattttggatttgccagccccctcaattttgtgggccagttccttaaaagcaatgtttctctggataatcctgagtaatacagagtacatttacaaaataaataaatgacaatctttcacaagacctacttcttgaagaaaacacaccattttcaaattatgtacccttacatcctcccacccgccgtccccaattttgtaataatatgtcaccattgatatgtacatctcaattagtttttgtaaaatgcatccaattttcgatctttaataagactgcgttctttttattcttgatgaatttattcctaaa

SEQ ID NO: 578102 - DNA, 252 bp, Homo sapiens
acggagactcacatgaggcacatagcgagacccatgtcttaataaaaaaagccagtgtgataggtggcacctgtagtctcagctaagctactcgggaggctggagcgggagggtcacttgagccgaagaggtcgaggctgcagtgagccatgatcctgcacctggtgacagaggtagaccctgtcttaataataatccagcctggccaatatggtcagactccgtctctactaataacacaaaaaaattagc

SEQ ID NO: 578103 - DNA, 440 bp, Homo sapiens
ctgtcgcctgtgcgtgtgggtgaggatatgctgtcgccgggtccgcgtcacgctgtctgtcgctctgggcgcggagccatgtgggtttggattgagccgggcccggacggggcgccgagtcggagggggtggcaatgagcggaggtagaagctacggggctcggtttggctgacatgggagtcggcagagccgaggaaccatgcgagggccgcggagactggtgctgggcccggaccggctctggcttcggcttcttttgcgtgcgtggttacaggcgccgctggtcacctctacattcggggtctagaaccgcgctggcgctaccgcaaggtctgtctgtgcttcctggtctacaacttctttgggggcagtgacacacgctgttgaagctgtctttgagcctgtgtacacggtgtgagagaacgtgccgctgtgttgg

SEQ ID NO: 578104 - DNA, 714 bp, Homo sapiens
  misc_feature (648)..(648): n is a, c, g, or t
tgggaggacgcggacccggccatggcgcggaagaaggtgcgtccgcggctgatcgcggagctggcccgccgtgtgcgcgccctgcgggagcaactgaacaggccgcgcgatcccagatctacgcggtggactacgagaccttgacgcggccgttctctggacgccggtatgccggtcccgggcctgggccgaatgtgcgccgcgagagccgcctcttgcagcttgctcggccgcctcccgttcttcggccttgggccgcctgtgtcacgcgcaaggtccttggctggtggcagcaacgaggagccggtgctacttggggcgcctcacgcgggttgcggcccgaatacacgggccgcagaactgtggaccacgggaaaggcctggggcaatctgaccttcacaagggaagactgagagcgagggcgcgggagatcgaacacgtcattggtacccatgaattggacggctggtgcccaagcacggaggaggaggcctttcaccgagtaacaacgccagggcgccgggaaagaacaagctgtggcctacagaagagccgtaacaccgacttcatcctccggggcccatggatttactcggcaagaaccaggagagaaaagaactgggaagacaacaaaggcacacacgagngagccccatggcctgaatgtgtgcgaagaagtgattacggcatgggaacccatgggggattacccc

SEQ ID NO: 578105 - DNA, 121 bp, Homo sapiens
  misc_feature (6)..(6): n is a, c, g, or t
  misc_feature (23)..(23): n is a, c, g, or t
  misc_feature (41)..(41): n is a, c, g, or t
  misc_feature (43)..(43): n is a, c, g, or t
  misc_feature (48)..(48): n is a, c, g, or t
  misc_feature (52)..(52): n is a, c, g, or t
  misc_feature (56)..(56): n is a, c, g, or t
  misc_feature (69)..(69): n is a, c, g, or t
  misc_feature (76)..(77): n is a, c, g, or t
  misc_feature (101)..(102): n is a, c, g, or t
  misc_feature (112)..(112): n is a, c, g, or t
tcctangctctgggtgaatagancctgatggtatactactntntgcgnaatngcanacaactgtgcatnacaaagnnaatatggcaattatggtctggggnnaaattgagtntcagaaccc

SEQ ID NO: 578106 - DNA, 417 bp, Homo sapiens
  misc_feature (84)..(84): n is a, c, g, or t
  misc_feature (92)..(92): n is a, c, g, or t
  misc_feature (94)..(94): n is a, c, g, or t
  misc_feature (97)..(97): n is a, c, g, or t
gtcaggtcggcagcaacgcagcgagccgagcgggtggcggcgccatggcgtgcgcggggctgctcaccgtgtgcctgctccggncgccggcncnagncccagcccgcaaccccgcgagagccccagctcgcgcccgagctcgtggcccgacggacaacgctcttccaggacgttccgcaaggacaaatgatgatgggaagctctcatttgaggaattccagaccttactttgccgatggggttctcagcctgggaggagctgcaggaactgtcagcggcattgatgggcatctcaccgacaatttagaaacagaaaaactgtgtgactacttctcagagcacctgggtgtataccgagcggtgctggctgcattggaatcgctgaaccgtgcagtgctcgctgcatggatgccaccc

SEQ ID NO: 578107 - DNA, 851 bp, Homo sapiens
gcagtgactatgcccgtaatcccagcacctttggaggcaaaggcagggggaggatcacttgaggccaggagttcgagaacagcctgttcaacacagcgaaaccccgtctctactaaaaacagccaaaaattagccaggcaatggtggcacgtgccagtaaccccagctactcaggaggctgaggcacaagaatcacttgaacccaagaggcagaggttgcagtgagctgtgatcgcaccactgcactccagcctgggcaacagagtgagactctgtctcaaagaaagaaattattaaaaggggacaacgttagcgtcgatagcgagtatgctcagacaggggagacagaaaaacttttaaattggggggctacgaaggtacgagaactactgtaacaaccaacacagaactttacgcttccgctaggtaaattatacttggggtggccagctcaaatcatctccgacgatttcatctatgttgagacaccgttcctgagactggtgatacaaggcgtgcggattaccactctgacgatgaattacacagagcaccattccgtgggatgtcataatacattacacccggcacctgggggctaccctggaggacgacaccagaggaatacccgcgggcatattggcgacaagcaacgttctcaatacaaaaaacccccgtgggggccaaggacgcacaaggagggttcacaaacccctcgcgtaatcccccagcacgactagcgggcaaggcggcccacagggtggaacaacggggtacttcaccaacagggctcaagcgaagaaatcggacgaacccaactcccgggggctaacaacaccaggtgaaaacat

SEQ ID NO: 578108 - DNA, 2075 bp, Homo sapiens
gtctttctgctgatacagctcagttgttactttagctctggaagctgtggaaaggtgctagtgtggcccacagaatacagccattggataaatatgaagacaatcctggaagagcttgttcagaggggtcatgaggtgactgtgttgacatcttcggcttctactcttgtcaatgccagtaaatcatctgctattaaattagaagtttatcctacatctttaactaaaaattatttggaagattctcttctgaaaattctcgatagatggatatatggtgtttcaaaaaatacattttggtcatatttttcacaattacaagaattgtgttgggcatattatgactacagtaacaagctctgtaaagatgcagttttgaataagaaacttatgatgaaactacaagagtcaagatttgatgtcattcctggagatcctgttttcccctgtggtgagctactgtcagagctacttaacataccctttgtctacaggtctcgcatctctcgtggctacacaattgagaagaatggtggaggatttctgttccctccttcctatgtacctgttgttatgtcagaattaattgatcaaatgattttcatggagaggataaaaaatatgatacatatgctttattttgacttttggtttcaaatttatgatctgaagaagtgggaccagttttatagtgaagttctaggaagacccactacattatttgagacaatggggaaagctgaaatgtggctcattcgaacctattgggattttgaatttcctcgcccattcttaccaaatgttgattttgttggaggacttcactgtaaaccagccaaacccctgcctaaggaattggaagagtttgtgcagagctctggagaaaatggtattgtggtgttttctctggggtcgatgatcagtaacatgtcagaagaaagtgccaacatgattgcatcagcccttgcccagatcccacaaaaggttctatggagatttgatggcaagaagccaaatactttaggttccaatactcgactgtacaagtggttaccccagaatgaccttcttggtcatcccaaaaccaaagcttttataactcatggtggaaccaatggcatctatgaggcgatctaccatgggatccctatggtgggcattcccttgtttgcggatcaagatgataacattgctcacatgaaagccaagggagcagccctcagtgtggacatcaggaccatgtcaagtagagatttgctcaatgcattgaagtcagtcattaatgacccagtctataaagagaatgctatgaaattatcaagaattcatcatgaccaaccaatgaagcccctggatcgagcagtcttctggattgagtttgtcatgcgccacaaaggagccaagcaccttcgagtcgcagctcacaacctcacctggatccagtaccactctttggatgtgatagcattcctgctggcctgggtggcaactgtgatatttatcatcacaaaattttgcctgttttgtttccgaaagcttgccaaaaaaggaaagaagaagaaaagagattagttatatcaaaagcctgaagtggaatgactgaaagatgggactcctcctttatttcagcatggagggtttaaatggaggatctccttttcctgtgacaaaacatctttcacaacttaccttgttaagacaattttaaaaaagatcttttcacaacttaccttgttaagacaaaatttattttccaggctatttaatacgtactttagctggaattattctatgtcaatgatttttaagctatgaaaatacaatgggggaaggatagccatttggagatataacctaatgttaagtgacgagttactggatgcagcacccgaacatggcacatgtatacatatgtagctaacccttcgttgtgcacatgtaccctaaaacttaaagtataatttaaaaaaagcaaaaaaaaaatacaactcttttttttttaaaccaggaaggaaaatgtgaacatggaacaacttctagtattggatctgaaaataaagtgtcatccaagccat

SEQ ID NO: 578109 - DNA, 320 bp, Homo sapiens
cccccccccctttccccaattgggggggggggggtgcggggggggggttttttttacccacccctttttttttcaccccccttttcccggggggccccccccccctttttttttccccctttaagaaccccgggggcgttcccccccccggtttttttttttgggccgggggggggtttttttttttccccgggacccccttttcccctttggcccttttttggggccccttttaacccgtttttttccaaaaaccgggggggggcggggcggggttttccgggttttttttcccccccgggcccccccccgggccccca

SEQ ID NO: 578110 - DNA, 320 bp, Homo sapiens
  misc_feature (126)..(126): n is a, c, g, or t
  misc_feature (131)..(131): n is a, c, g, or t
  misc_feature (195)..(195): n is a, c, g, or t
ctaggagggaaggagctgttggggcaggggtgtaaaattatttcctttttctagtttgggcacatggccaggtagttggtgaacagaagagaaccagggagggtaacagaaagaggagggacctanctgancccaagagtaggaagagatttaacacttaaaattccactcatgccgggcgtggtggcacgcgcnctgtaatcccagctacccaggaggctgaggcaggagaatcgcttgaaccggggaggtggaggttgcagtgagctgagatcacgccattgtactccagcctgggcgacagagcaagactccatttc

SEQ ID NO: 578111 - DNA, 543 bp, Homo sapiens
cttaatcatgaaacctgatttatgtttttgaaggcccacatggcttccccataatgaattttctgcaccaaaatttatttaaaagtgttattatgctagcaagtcacaaaatttagtatttgcaattacatactatctttatatttgcaaaattttgaattttggatcctgtttcatggacttgtaaattaaaaacagaatgattacgcagctcctcaccagcaacggaacaaagctggacggagaatgactttgacgagttgagagaagaaggcttcagacgatcaaactaccctgagctaaaggaggaagttcgaacccatggcaaagaagttaaaaaccttgaaaaaaaattagacgaatggctaactagaataaccaatgcagagaagtccttaaaggacctgatggagctgaaaaccgtggcacgaaaactacgtgatgaatgcacaagcctcagtaaccgattcgatcaactggaagaaagggtatcagtgatggaagatcaaatgaatgaaatgaagcgagaagagaagtttagag

SEQ ID NO: 578112 - DNA, 106 bp, Homo sapiens
aagccgagagaaactcagacattgactggcaaaaggctctcgcatgaaaaggcatttgttttttaaccttctcaggacgtagaacatttagacttaaaataaatat

SEQ ID NO: 578113 - DNA, 321 bp, Homo sapiens
ctcgacacggagtcttgctctgtcgcccaggctggagtgcagtggcgggatctcggctcactgcaagctccgcctcccgggttcacgccattctcctgcctcagcctcccaagtagctgggactacaggcggccgccactacgcccggctaattttttgtatttttagtagagatggagtttcaccgtgttagtcaggatggtctcgataccctgacctcgtgatctgcctgcttcggcctcccaaagtgctgggattacaggcgtgacgaccgcgcctggcctaataccattttttaaaatggacaattctgggtcgacg

SEQ ID NO: 578114 - DNA, 801 bp, Homo sapiens
aataactttcctttggttgcattgtaactcctggactggaacactcgtgatcgtctttggctcctgtggctgcatttaattgcagtgatcttcctgaactgatcaatggtgacagtagacagatgtcctgagactccttatttcccaggatgaactgtcatggtggacaggctctccattgttcatagaatctggtttggataccagaagcacaggtctaaaatagaattctgaactttccattatcatgaaactaatgccatagaataaattggcaaatctggttcctaaacttacctagtttttctcactaattaatgtgacaattaagggagaagaggtaaaatggcaaaatggacataataatattgccatgcttgtcttagttactgcaagatcaaagggtccacaaatccattttgaaggatataaacgatcactgagatgctaggcacaactgtttattatacttgctttgtattatctaggtgtatgttctggaaacttctcatatcatatcctgcctaagtagaaattattgtagtttatgccatttgggtttcttaggtgaatacagttaaggtgtactttacggctctaggctatcccaggcagagggatatttaacactggtctctccagttttattgtcagatatacatttggcctggtatgcataatgttcatctcttggatttaataaccaggtaatcaagttatgccacttaattctttagcaaatgacaatctgagtacaaatcatttctaaattgtttctcacattaaattaatccaaaagta

SEQ ID NO: 578115 - DNA, 104 bp, Homo sapiens
gttgagtgatccccggacgctacgtgacgctgaatgacggggctggtgagggcgcccacctgcaccatgccctgtcattgctgttgtggcctcctccacggaca

SEQ ID NO: 578116 - DNA, 130 bp, Homo sapiens
  misc_feature (86)..(86): n is a, c, g, or t
tcgagtcttgatttccttttaatcttcgcaaacggttctatccattatcaaaaatgggatatgaagtctccaattatgccagattntgcttctcctagaagcagaaggcatggcaccccacatagggcca

SEQ ID NO: 578117 - DNA, 671 bp, Homo sapiens
  misc_feature (400)..(400): n is a, c, g, or t
  misc_feature (435)..(435): n is a, c, g, or t
  misc_feature (608)..(608): n is a, c, g, or t
agcctgttcaagtatgctctcactatagttaccattcatatttgataagaaaagaacatttaataaatgtatgtgtggggctgaagttctaaaggaattgaaaagagactataaacattgaatgagggtgagggcatccctgctggggagaaacctctgtccctaagaagagtccattcatatcatgtggtttgagatgaaccaaaggtctaaccccatcaaatcacatgtgatggcaaatataaaataagcaaatggatgaaatagtcgaataaataagttacataaaatgcatgacctgatcaccccatcaagtactataaacagttcccagaaacaattacccacttcacatatccatagatctaacccttaaactctaccaatatcaactacccanaataccataattttatccaaaagtatacttacttncttatttatctacaaaaagattgaaactgttgtattcaaaacctattttactaaatattcccactaaaatctctaatataattaacagatcattctatcaaaatcatatacaaatgcttataccataactcatacctataatgccatcactttaagaagccaaaagtggccanatcatcctgaacttacgactttaatacccatcctatacaacatttatgaaactgcatctctac

SEQ ID NO: 578118 - DNA, 113 bp, Homo sapiens
gtattacatgctctcacagcaaccactgaggtaaccgaaggacgtaatagcactgcttcagagaaggtgatcttgtatgactggtgtgtcggatcaggcctgctttgatgcag

SEQ ID NO: 578119 - DNA, 296 bp, Homo sapiens
gctggtatctaagatccgtgaggtacaatgtgaacctataaaatagaaaatacagagtgtcagggtgaggaaaggatattgaggcaggagttgatggtggtgagatgattgtgcactgtgtctcgagtgtgaaaagagtgagaatattcaaaaaaaaagaagaggcggtgtggtggtcatgctgtatctcagcatttgggaggcaaggcgggtggatcacttgaggtcaggagttcaagaacagcccagccaacatggtgaaactccatctcaaaaaaacacaaataaataaaaaa

SEQ ID NO: 578120 - DNA, 118 bp, Homo sapiens
tgatctagaggatccttctgggtgatgatgtgggtataaagtacataaaatatatctaactattcataatgtggggtgggggacaattattaactcaccagcacatgcatgcaccagt

SEQ ID NO: 578121 - DNA, 215 bp, Homo sapiens
  misc_feature (68)..(68): n is a, c, g, or t
  misc_feature (131)..(131): n is a, c, g, or t
  misc_feature (153)..(153): n is a, c, g, or t
  misc_feature (172)..(172): n is a, c, g, or t
aaattccgtgacaaatttttgtcaagtcgcttccattaaaaagtactgattttaaaaactaataactnaaaactgccacacgcaaaaaagaaaaccaaagtgtccacaaaacaatcatttgttttgaaggntttacgatgcattgttatcatnaccgtctttcactaaattntacgccatgaacacatttgagaccattttccaccactgattag

SEQ ID NO: 578122 - DNA, 227 bp, Homo sapiens
gggtttgcttaggcgcagacggggaagcggaccaacatgccattggcccggagctgggtttgtcgcaaacctagtgtaaccccgcggagacccttggggaaatctggtttcgaccaggagctgaggctgatcgccgagaatggcctccggaccaaccgtaagctctggagggacaaattaaccctggccaaggatccgcaaggccgcccgggaacctcttgacgctt

SEQ ID NO: 578123 - DNA, 201 bp, Homo sapiens
aaaaattgcttcccttttataatttgaggtgtggcatgggaattttaagctgatccctcataatgtaaaagttcccaaaatggttcaaatgtaacagggcaaaattgaaaatggaggcatgcatacccttccttttaaaaaaaggcaggggttgtaatttcaaatttttgggcaattagattaaatcataatgccccagta

SEQ ID NO: 578124 - DNA, 113 bp, Homo sapiens
gtattcctcctgctgctaaggaaaaatataacaggcattcagagggggaagatcatggctgagcttggcgtggtcagtagagaagcttcagagacaaatacagaacttaggta

SEQ ID NO: 578125 - DNA, 131 bp, Homo sapiens
aaccgtttgaaaattgtgagggagccacgaaacggggagaatatttggatgtataatttcgatgtctagtttgcttgcttatcagggaatacttaagttcctttcttttctgtatattctagttggtgaaa

SEQ ID NO: 578126 - DNA, 977 bp, Homo sapiens
gggcagcggaaggcagccagtttcgcgaaggtgtcgggcgcggagccgaggaccggagcgcttccccgagcacccggagcgctccccgcgccacgatgccaagaggaaggtcagctccgccgaaggcgccgccaaggaaagaagcggcgacatcggcgcggttgtcagctaaacgctcttgcgaaagtgaaagcgagccgaaaacgggccgcagcggacggataacttctccagcaccaaaaacatgtgcacaccacaacggggcaaacagggggagcacacggggcaacaccacgcgccgagagtgggtaaaccacaagacactacaaggaagacttaccgtgcgggcaaaacggggggaaagcgaagacttggagggaagagtccacaggccttctggtttgaacgcaggcgagatgaaagaaggcaaggttttggattaaattaagctattattacagtggtctatactcaagggggtccacatggtcatacctttttgggtaccactccaagacggacatattttccaatcaacttatttgttggaacagtggcacggtttcgcaggcacgttctaagacacacatttttaaaggaaggggagggaaactcccacacctgcatacccatatttctgcacgggtgacacacgcgctgatcacacagagggggcaaccccaatgggcggcgctacacatcttgctcaccacaccagggaaacataggggcgcagacacgggaacatagcgcaggcacgactggcctccgggcgcaagacttacactccaacgagtgggggtacagaaaatcttgcacaccgacaaggcactaccgggcagcaggggccaggcccggctacaggctgacattgaatcactctctacactgtggcgcacacaacaggtctcacgaacaagttgaatgggctccggaacgtggcccgacatcgggagcgcccaaatcgaccggccaac

SEQ ID NO: 578127 - DNA, 216 bp, Homo sapiens
  misc_feature (18)..(18): n is a, c, g, or t
aaaatagaacctgatganggcacccccccccccccccccccgctttttggggtgaggggagcccctgtttttgggttggggtttttttttgtttagggccccccggcgggggttgataccgttttttcatacaggggccccgttcctttgtaatcataaaggatatcaaaaataagcaccagtaagaataaataatgttaaaaaattaaatttaac

SEQ ID NO: 578128 - DNA, 439 bp, Homo sapiens
ctcgggtgatgtgtttctcttttcctgatgggtcttatggagcatgccatgtgcaggccttctcttagagaatgttttcctaattttgtttttcagtctttgtatgccattggctggaacatgccagactcttttttaaataaatgtttagagaattttacactcagagctcctttgagagcaggcagcctgttttaaccttagataaccgtcttcctgtgcctctacctttaagttcttcttatattcacacctagcaatgagagatatgaaagaagataggttttaggtttagaaacaccttgctcatttactgacctaactgcttaatagttctatgaacttcaagctggctacttaatctttctgaacttcaatttctttatctggttaaaatggataactgtgtggtaaagtccaaataaaatcgtgaaagtta

SEQ ID NO: 578129 - DNA, 428 bp, Homo sapiens
agataaataaataatgttaattatttttccaattttggtggaaaaaaatcaaattttacgttctgcctatatgccattacaagtccaataagctcaacaaaactccaggtacattaaaaaatcctgctacaacataatcaaaatatctacaatcaaagataaacagaactcactgaaagaagaaagagaaaaaatgtgcattgcccatagaatcacagtaatatgaattgtgactgactttgtattagaaacaatggagacagataatgatgcaatgccaactttaaaggtccagagaataatggtaaaacaataatcaacctgaagaaaaatgcttacagatataagcttgcatatacagaaatgaacaacagtaagaactggtaaatgtttgggtaaataaacaagacttaaattttaaaaaaaaa

SEQ ID NO: 578130 - DNA, 715 bp, Homo sapiens
agcggagacagtcaacatcaacactcacgcgctacattctgaagaaggtacctgtaataaacaacgattctgtggagatactgaaatgcagtgaagacgatgttcccaccttcttaaaatggtgtaatataaggttcattcatggaatgttgtatgaagcagattggtattccaacaagccttctaggaatgcagatattataggggcataacatgaactggtggtaaagtaggggggcatatttcgagcaggatgatttcttcacggagctactgaatttgacacgtgcagagtccgtagcaggaaaagagagggcacgaccccgaacatctattttgagctgcagacataattgcatcacagctgagatttcatagtccccggtcctctctattcctgttgaattacatgattaccggtaactatatatatatgaatatatgaagatgtcctaattgttgcaggttggagaatttgggccaggaagaactcacgttgggcaatgagttacaaaagtgagcaaaaagcattagcagtcatcagaatttctaagtagttaaattatctgcatggtgggttcagtataaacaaacatggtactctcaaatgactgttgatgggctattaattacattagtatcctgtgaaccctggtcatagctggcaacgagaatctttgagaactggaaaaccaggtatttgtactaggacatg

SEQ ID NO: 578131 - DNA, 205 bp, Homo sapiens
  misc_feature (6)..(6): n is a, c, g, or t
  misc_feature (54)..(54): n is a, c, g, or t
  misc_feature (62)..(62): n is a, c, g, or t
aaaggntccaatttggaaattattctgaaaatggcaactaaatccacgagtgtntgtttgtntgtgtgtgtgtgtgtgtgtgtgttttaagagacagggtctctctctgttgctcaggctggagtgcagtggcacaatcataacaaactgcagcctcagcctcctggggtcaagccatcctccatcctcaaccttccaaagcgct

SEQ ID NO: 578132 - DNA, 223 bp, Homo sapiens
  misc_feature (129)..(129): n is a, c, g, or t
gcagcgctaataaaggttgctttgttacagctaacagtaaccgatcatagagtatagcagcgtataagcgaggtttttttaataacactatattcctcccggaacgaaacgacaaaaaaaagggcctcntctccacaagcgcctttcccccgtaaatgatatcatatacaattcgtattaatacccacacccacccaaaaaaaggtttgtttaaaaaaaaaaa

SEQ ID NO: 578133 - DNA, 1200 bp, Homo sapiens
ccacttacaccataacgcgtgcttacgctaatgccggtggtcttgctgacggcaacttccgcaccgtccgatttgcctgaggccaactccagcgcagtggaaactgcttcttccagaatcttgcgctgcgcttcaacttgacgagattactttcattgcaagtgccataagtgtagagagtttctctgaagtctaacagagaaccgtttttcagtgcgcatcttaactggtaacattagcctcattttttctaaggagcctgagatgactaagtcagcccgaagactggctcgacgacgttcccggtgatgacatcgaagacgaagacgatgaaattatctgggtcagtaaaagtgaaattaaacgtgatgccgaggagctaaaacgccttggcgcggaaattgtcgatctggggaaaaccgcgctggataagatcccgtcacatgcggatctgcgcgcggcctatgagctcgcccagcgtatcacacgatggaaggtcgccgaccgacagttgcagctcatcggcacgatgctgcgccagacgacgacagtacagccctattcgacacgcgcgctggatatgctgaaaaaccgtcacaaccagacggatggcagctgtaccataacactggaaaactatgcgcgaatcgtcactgaatcgatcaagcgcgacgaaaccatcgatcgaggctcctacacactctgactggaccgactgccgaatcgctcaccacactgcactacccagaatacgcaacaccgcagcacaggaccagcacgggcaatacgaccgacgcacaacccgcacgcccaaaatacaccagtactatgcacaaattagcgcagcaccgacaggctaattatccgacgacacacactatctcgttgtaccacgaacacggcggccagtaagcccacatccgtccccggcacttagtaatatgataaacaaacaagtcaacaatcccaggcccactacgtactccaagattagctcataaattagaagtatcactaagacgactcatatctatcagagatcatcttcagaactccagattcgaacgagcaacaccaacgctatcatacctaacttcaacatcgcgggcagcacagtcacgccaagtagatagggagctacgctatacacatgagagagataagcaagcagatctcatatcactcatgctcttatacacg

SEQ ID NO: 578134 - DNA, 923 bp, Homo sapiens
acatcgggggtgtgacgattggtgtaatattactgccaatcggccctctaattggcgcctgtgtcccgcgacgtgccgcatttccctgatgtgcgcgggttcacacacagggtggactctattacacgggggcccccaacacaggcgccgggtgcaaaagggcctcctctaaggggttattccctgctgtattcccccgacgacagcttgttttcttcagccagagcattgttctcgaacccttttgacccacacgcactgcgctgtggtgcctcgcccccccctgtgtggtgcgggctcattgctccccccaacagagggctgcacccccgccgtgatgttccccctagggagtgtgccacccttccctggacaccactcccccgtgttatgtcttggccactcacagggggttatcaagatcacccctggggtctcccacataggttttgaatgccttagcacccgccggggggaacccccacggttaatcgctacacaccacccgcgctgaatccgccacagtgtatcatctggggtcgtctaaatttatatacgcctctctgctccacagcccctccgagtacctgtctgaggtatcccgccctcacccacattttcgccggccataatactggtgtctcaaccaaattttctgtcagcacccccagcggattcgccccaggaacgattctcacacgctatttatttgtgcgtcacgacactttctctcactcacagatatcgcttttctagccgccgccccacgtgaatatcgtccaccttttcagagccccccgacagatccacatttgggaggttcttgaagcacccccccctgatacctggccacatttgcttaaaatatggacttaacataattctcgataatgcctcccatttttttaagagggttcccaaca

SEQ ID NO: 578135 - DNA, 83 bp, Homo sapiens
accgaggacacggccgtgtatcactgtacgtggggattttaatcacagtcgatatctatgcttttgatatctggggccaaggg

SEQ ID NO: 578136 - DNA, 196 bp, Homo sapiens
tattgaatagaaaataagtaagaatgtttctatttttattttttttggaggtggggtcttgctgtcttgcccaggctggagtgcagtggtgcaacacagttcactgcagccttgaactcctggggctccagctatcctcctgcctcagtgtcctgagtagcatcacaggtatgcatcaccatgcctgggctaatta

SEQ ID NO: 578137 - DNA, 878 bp, Homo sapiens
  misc_feature (135)..(135): n is a, c, g, or t
  misc_feature (158)..(158): n is a, c, g, or t
  misc_feature (163)..(163): n is a, c, g, or t
  misc_feature (306)..(306): n is a, c, g, or t
  misc_feature (337)..(337): n is a, c, g, or t
  misc_feature (360)..(360): n is a, c, g, or t
  misc_feature (365)..(365): n is a, c, g, or t
  misc_feature (384)..(384): n is a, c, g, or t
  misc_feature (390)..(390): n is a, c, g, or t
  misc_feature (394)..(394): n is a, c, g, or t
  misc_feature (763)..(763): n is a, c, g, or t
  misc_feature (786)..(787): n is a, c, g, or t
  misc_feature (789)..(789): n is a, c, g, or t
  misc_feature (812)..(812): n is a, c, g, or t
  misc_feature (861)..(861): n is a, c, g, or t
ctctggatcccggggacggggccagcggccaaagtgaagcctgggaatgagtggcaccgcagcatccgggccgccagccacagggaagggccaagccccatgaagccccagtcatcctgcccagccctgcccccnggccatgccgggaggggccgganccccnaggcatcgccttcacagccccctgccccccgccccctgtcccggccctgcacctggtaaaagggtcatggacccagatggggctttccctttgtagccatccaatgggcattgtgtgggtgcttggaacccgggaagactganggggacactggagtgggtgcatgtgtctgcngtctcagaggccttggtcaggangaagnaggcagacacagcttagcntggttntgcntatacaaaagagaaaaaaacaacacaaggaaaagaaacaagcagaagcctttacttgttttagcaacagaaaaaagtacttggtcacttttgtgcttgaggaggcccatttactgcctggcagggggcaggtccgtgccctcccgccgactccagcagtgtcctgaggtgcatttcctgtcgtacacacaagggccaggctccattctccctccctttccaccagtgccacagcctcgtctggaaaaaggaccaggggtccggaggaacccatttgtgctctgcttggacagcaggcctggcactgggaggtgggggtgagccctcacagccttgcccttcccaaggctggcaactgcctccattgccnagagagaggcagggacaggctanntncttccctgtggaatgccgagaanctagcacctgcatgctggatctggctgcgggagctcttttctcctggcntcagttccacaggagat

SEQ ID NO: 578138 - DNA, 1897 bp, Homo sapiens
  misc_feature (153)..(153): n is a, c, g, or t
  misc_feature (155)..(155): n is a, c, g, or t
  misc_feature (311)..(311): n is a, c, g, or t
  misc_feature (1368)..(1368): n is a, c, g, or t
  misc_feature (1713)..(1713): n is a, c, g, or t
ggcacgcaccaaccgtgaatgtcagcgtggtcatcacggtccaacttgatagcgcttctactggctgctctcgatatacgatcggaaggttgggagatccgccaatcccccattgcatacacaatcgggtcgtcgccaaggtgatctgggctntngaacgcggcgaccatgccagatgtacaatagtgcactttcgtacgatctcgccacgagtacggtggtggccaagtcatcgagagacagcaatcggcccggctagtgagatcggatattcgaaaccattgcagcacgcatcgaagtatttcggacgntgtctgtgtgctctgagcatcaccgaacagagacggaaggcacaatgcgacgctcggatgcctcgcgcgactcctccgattgggatagcttgttatgagagatggcgcaattcccggcgcctgcgtcattggtcgcttcaacaggtggtggaccgactgatctatagcaaaggtggtagatctgtcgtagaaaccagcaacaggttctagcatagcatgacctttggccgcaccaccgagttgcacttttgctatgctcaccaagtggggcgttggcggcgtcatcattcttgggggcacagggcacgctcgcggtaatttctaagtggacaaattcttcacgcccttgacctttggatgccttagaattcgaacttgaggggactacggtcttgagtcgcactaaacttctttacggccggcgagttcgcggaagcgactcaccggctgagcgccatctagagttattccgccacgcggtaggctctgcggcataaccacccattttgcgctttccaaccagaagaaccgaatccggaggtggggtatagctgtacctcttcccccctttatccctgttgacctgattatggtggcgtttggaaacaccgtttggcgccgccttaatattgggcacacgcgcacgacacacgcagtaagaattccgttcatgggatttcctcggtgggaagacccaaattgtgcggatccacttataaagggaagaagggtcggtgtggcacctccgggggactgagcatactatgggccccgattgggggggctttcacacacttcgcgtgtgtgaacccgggaagaagggtataactcaagacaggcgcgatgtcttgcgcaatgcctacggaccacaattccctaattctcgtggactacatatcgccactctagaggtccctaagggttgcccaaataggcggccctagaagcaggttcctttgaccagaggccaaacacaagacaacaagtgggtgcgccagcataccaacctttattcgcggattagcaagaaccgcttttgattaggcgccatcaagtntctctatagccgacaggagaggaacagcagctacagaggataggcgaccctctccagacgtcatagaccacatttcgcgcaatgaggggccatgttcgacttgaaacacccacggggaattacacaacgcgacaacaccagatgaactcgaaagcaaaaggtgtttgaacaccattcccgactgatgattaccccgtgttacaatcatgggtccagggaagaaataattcgcacagacgagatatcggggagctgcggtcactcaagaccgatgtcgacacaacagacgacgaacaccgaagaaggaggcaacgattacatactggctggagaaacgcatctggnagaatgacgagacgacacataccatatgtgtgcgaacaccatattagaaggaagacaaactgctctgcatcggatcgactacaccgctcaacgtcaacagagtcacgccagcagaaggagagcgcaagcaatcacgaagagactggctgcatcatcaaccaggagacagtagcagatgccgacc

SEQ ID NO: 578139 - DNA, 1103 bp, Homo sapiens
ttctttgctccttgggtcttttcggtgtatttcgttttgttatggctgttggaaggtccggtgtcttttggcttttcctcgtttctgttttgcgtgtgcgtacttcggtggctgatcccggtttcattcgtctttggtggttttcacactgtggcgaaagcactgtctcattggtttcctgtcttcttcctttcttcctccgtaggtgtattccggttggctagtgcaatcctcctcttctatgctctctagcatacctcattgtgtcttgtgatttgtcttatcctagttttggccctattatcctcactcataggtttaactcccatgggtcatgctcaggcgttgtgatggctgtttaatgattgcttggtactgatgatgcctcctgtcaaggtctgtagcgtcctcttgtgtccgtggacgtgatgtctcagtgtcgtagtttgatcccaccaattacacgctcccctctagtcagcccctctcactccctgtcatgttttccgctggtctcactgcctactccacgctccatgctggtcactcatacccctacctaggcctaccattgatggagtcagatttttgtgggacatcaggacagaacgtgtgtgacattttccgatacagcagcatggatggatcacttggagtatcctggtagtggatccctgcgggtccgtcacatcagccccatcagtcccctgacactctaggttgttaccccttctacaaatatctgatcccgttcatcgtcccagagtgcccgcatgtctacttttgtggcaacacccccagctttggctccaaaatcattccgaggtcctgaggaccagacagtgtctgttggtgactgtccctgatcttcagtgccatcgcagatccgtcctgtccttgtgaatcctgcgcatgcctggctctgccagcccatcagcttctcgggcttcggggcagaggacgatgacctgggaggccttggggtctgggctcctgactctatatataatagtggttttgaccagagaggacccagatggaggctgttcattcctgcagacaccggcagtggtaataactgatcttgtttcttttttttcctt

SEQ ID NO: 578140 - DNA, 150 bp, Homo sapiens
ggctaagtatagtgctgggcctttctgaaggtacacctgtttggcgctagatttaccttgttcgtctaccactcgacgtacgtgctagtgacggcagggatgcggtacaactagtgcgtgcagcagaatctagtatggaaagtctgtcat

SEQ ID NO: 578141 - DNA, 189 bp, Homo sapiens
gaagcactggggcgctacagtcttaactcttaatattggatcagatgtgtctacccatgcccattttcagcggctctgtaagcctaccatgtcatccaggatgccatggtgtccccagagccaaagctaagaggaaatagtcaattgtctggattgccttcttcatttaataccctccccagtgcttca

SEQ ID NO: 578142 - DNA, 587 bp, Homo sapiens
  misc_feature (8)..(8): n is a, c, g, or t
  misc_feature (17)..(17): n is a, c, g, or t
  misc_feature (25)..(27): n is a, c, g, or t
  misc_feature (55)..(55): n is a, c, g, or t
  misc_feature (65)..(65): n is a, c, g, or t
  misc_feature (82)..(82): n is a, c, g, or t
  misc_feature (97)..(97): n is a, c, g, or t
  misc_feature (102)..(103): n is a, c, g, or t
  misc_feature (110)..(110): n is a, c, g, or t
  misc_feature (124)..(124): n is a, c, g, or t
  misc_feature (129)..(130): n is a, c, g, or t
  misc_feature (133)..(133): n is a, c, g, or t
  misc_feature (137)..(137): n is a, c, g, or t
  misc_feature (144)..(144): n is a, c, g, or t
  misc_feature (162)..(162): n is a, c, g, or t
  misc_feature (182)..(182): n is a, c, g, or t
  misc_feature (185)..(186): n is a, c, g, or t
  misc_feature (189)..(189): n is a, c, g, or t
  misc_feature (192)..(192): n is a, c, g, or t
  misc_feature (200)..(201): n is a, c, g, or t
  misc_feature (204)..(204): n is a, c, g, or t
  misc_feature (208)..(208): n is a, c, g, or t
  misc_feature (210)..(210): n is a, c, g, or t
  misc_feature (264)..(264): n is a, c, g, or t
  misc_feature (291)..(291): n is a, c, g, or t
  misc_feature (329)..(329): n is a, c, g, or t
  misc_feature (361)..(361): n is a, c, g, or t
  misc_feature (398)..(398): n is a, c, g, or t
  misc_feature (443)..(443): n is a, c, g, or t
  misc_feature (453)..(453): n is a, c, g, or t
  misc_feature (473)..(473): n is a, c, g, or t
  misc_feature (476)..(476): n is a, c, g, or t
  misc_feature (562)..(562): n is a, c, g, or t
tctcaatnaaatttttnaaagggtnnnaaaaatctgtgaaaaaattttggtcaantagtttccanaaaaaaaaactgatttnaaaaaaaaaaaaatnaaaanngccaaangcaaaaaaaaaaancaaannggnccanaaaaaantctcctttccttctgaangttttacgatgcattgttanaannaancanttttttannacnaaantnaaatggccaattgaaaaaaaaagttctgagaccgttcttccaccactgattaanagtgggggggcagggattagggataanattcatttagccttctgagctttctgggcagacttggngaccttgccagccccagcagccttcttgtccnctgctttgatgacacccaccgcaactgtctgtctcanatcacgaacagcaaagcgacccaaagggggatagtctgagaagcnctcaacacanatgggcttgccaggaaccanatnaacaatggcagcctcaccagacttcaagaatttagggccatcttccagctttttaccagaacggcgatcaatcttttccttcagcncagcaaacttgcatgcaatgtgagc

SEQ ID NO: 578143 - DNA, 103 bp, Homo sapiens
cccccccccccccctttttttaaaaaaggggggtttcccttttttttttggggggggggggggggggccccggtttcctccttttaaacgggttttgggggca

SEQ ID NO: 578144 - DNA, 137 bp, Homo sapiens
cctaggttatgggtgatgtcaggtgttgggggtgggtccaggactgcagctcaaccctcagacaccgacatctgaggatgctcaagtccctgatgggcaatgggatagcgtttgcacgtaacccacgcatcacctga

SEQ ID NO: 578145 - DNA, 152 bp, Homo sapiens
gaatctgacagtgtgatatactcgcgtatacttccgggtatcacagtcccaacgggctaagggcccttcttgttaccgcggtccattttgctataatccagctcctcatcactatccacagccatgtcatccatcgtggctgggtagcactc

SEQ ID NO: 578146 - DNA, 430 bp, Homo sapiens
tgattttacgagctcatgaccttgggggagcgaatcctgccagtctctctggatctctttcttctgtaaggttctgtgccacttatctatgatttcaaaagacgaaccatattacaaacaacaaaacgtgaatggtggtgatcatactgagtatttattgaatagtgactgagaaaatgaatgcacaggagacaggaggagttacctgtgaaaattcagagctatactgaactgatcaacgttcacggaattggagaaataacaaagtgtggagattaatgggggctgagggaacaggctgtgcactggtaggacatattcaggatctcaagctacctgcctgccacttctgcatccccaccgcgtcaaactgtggttgagctttctttattaaatatgtagcagtttgcttttgaaatacaatatcttc

SEQ ID NO: 578147 - DNA, 577 bp, Homo sapiens
caagcacgtggcatgctctcagcatcactgcaatctccaccttcacggttcaagcgattctcctgcttcagcctcccaagtagctgggattaaggtgtacaccataacacctggctaatttttttttttttttggaaatggattctcgctctgtcacccaggctggagtgcagtagagcgatgccgtgcattcagcaaccactatctcgtgccagcatcagccatggtgagcattgtggctctggtgtccaatgcccaacgtgcactggtgtcctcactgactgacttctgctcctgcctgccaccaaagctttgactttaagcctgcttctcccatcgtgctcagcacgagccggagctcctgaatagccttctgctaaatttcttccttccaaagttatgggagtgggatcctgtggctcacaaataagatttctgacagataacagtttgaggggattagagacactccaatctagctctcaggaggaagcgtataccttcttttccctgggattggtcttataacattgagctgttcacgaggctgtgccccgggaagtccagggtaccgagc

SEQ ID NO: 578148 - DNA, 296 bp, Homo sapiens
ttgtgttttacttagtccaactgctttaaagatcagcatatggaaatcggaaggtggaaagctcttgctcattgcttctacagctagttcatagcagatctagtatcttagccttgtgatatttttcaatagaacaagctgagaatagtgggaacctgagattttgaaattcaaggttttttaatttgatgttttcttaattgttattgaaatattctcacctttaattagattagtatgtataatatcttaaaataaccacatagtgaacacagaacatggaaaataaagcatct

SEQ ID NO: 578149 - DNA, 111 bp, Homo sapiens
aacccaggatcttgcagaagctctttatgtcaaacttctcaagttgattgacctccaggtaatagttttcaaggttttcattgacagttggtatgtttttaagcttgttat

SEQ ID NO: 578150 - DNA, 199 bp, Homo sapiens
  misc_feature (2)..(2): n is a, c, g, or t
anttaaataggaggtcaacattattagagttgatctacattcacaaatgaactaaagattcaatgcattttttcatcagaattctagcaatacttttcatggtacctgacaagctaattgttaagccactgaagtgcaagatgtgactgggcatggtggttcatacctgtaatcccaccattttgggaggctgaggtgg

SEQ ID NO: 578151 - DNA, 117 bp, Homo sapiens
tagtcagctcgggacctctcgctcaccgaacacaggcatgctcataaggaaggttaaaaaagtaaaggaactcggcaaatcttaccccgcctattttacaccaacccctgttgcggt

SEQ ID NO: 578152 - DNA, 117 bp, Homo sapiens
accgtgggacctttattgggacacaagcggttagcacgggtaggagaaaagggaaccttgacatgctgttggtgggaatgtaaattgttgcagcctgttatggcaaaacgagtacga

SEQ ID NO: 578153 - DNA, 1057 bp, Homo sapiens
  misc_feature (550)..(550): n is a, c, g, or t
  misc_feature (1057)..(1057): n is a, c, g, or t
cccacgcgtctggtcacgtgggagtggagtgctcgtgcgctcagtgaagcatggcactctgtgcgggcataccatgcgtggccctggcctgctcaccctgtgtgaaatgtacatgtgtcctgacagctgcagtctggtggagatggcgtgggtcttgcaggaacaccatgatgagtgcctggactctgaccattggttgtcccttgtgtgcttgtgtgctttttgtcgggccctgtggtagtgagtgcttggtacaatggtttttggatctgtgttcatcccttggcaccaccaaagtggtatgcacttgaagaatgatgttagtttggactcagtggtggtgcgttatgacccctgttgattttcatacgtgcttgcatttctcaccaccttgtgtagcgtggcaactttaattggacttgtcatgcccagtgacaacttgggccaaatctacatgcgtggattatcctgatgcccttatcaccaactactatctattggcctgcttgtgcacgttaggccagactctcatacgcttgtggtccccgcnctataccatataccactgtgtttgtgcctgtattgtccaattgtgttaggtgttatcttggaacttcctacctgtcctggaaggcacatcggctctaagcctagctcactccatcgtttccaccttgcagtgatgcagcttgaccctggaacggtcagactaactcctcaagtgtgcataccagtttccaagtggttgggttgccggtcagagcttatgaggactaagcacctgcaatgcccctcttcactctacaatgtcacttgactgcttagagcccttgatactagtctaatccaccaatactatggcctccaataaatctggtgaacttcatgacgttattcacttacacccaatttccaggcaatgcactcatccgagcctttctaagacatttggcaacaacctgccaagacttgtagatccagcttagagacgggaaccataatgtgcagccatctctatacagtaccggagaatacacaggcccaataacacaaggcn

SEQ ID NO: 578154 - DNA, 503 bp, Homo sapiens
aaggacaacaccaatcaggcaacaataggcatagactaccaatacaaaaactatgtacttcggaggatcgaacagaacgatggcaataatagggacacagcaggtcaagagcggtacaggagctagatccctagctacatatcgtgactccactgtggcagttgttgtacatagatatcacaaatgtaaactcatcccagcaaactacaaagtggattgctgatgtcagaccagaaagaggacgtgatgtaatcatcatgctagtaggacatacaccagatcttgctgacaagaggcaagtgtcaattgaggagggagagaggaaagccaaagagctgaatgtaatgttaatggaaactagtgcaaaagctggatacaatgtaaagccagataggagtctccctactgtagcccaggctgaagtgcagagacaccacctcgggtacactgcaacctatgctcccgggtatcaagcagttctcctgcctcaagtctcccacata

SEQ ID NO: 578155 - DNA, 355 bp, Homo sapiens
tggcccgaggtaaaaaaaatgatgtccccccgtatgttgtaaaaaagccctttaataaaaaaggtaagaaacctagggcccaagcccccaagatttagggttttgtttctccccgggtcctgcagcccaaaagggggggtattggttttaaaaagcaggggtccaagaaaaataaagaaaagggtgcagaatatggtaaacttttggcccaaaaaaagaaggagggtaaggagaagcgccaggaacaaatttggaaaaaacgcagactttcctttttgggaggttttacttttaagtttgaatcccgtcagaaataaaattttttgagtaacaaataaataagatccggctttga

SEQ ID NO: 578156 - DNA, 1260 bp, Homo sapiens
  misc_feature (89)..(89): n is a, c, g, or t
  misc_feature (1051)..(1051): n is a, c, g, or t
gcagacatgtcaggagcctgatggtgtctggcgttcctgacacacgcccaggttggatggctccgagcaacatacaggggataacgatngggcatcacaaagaagggaccatcctgtggtccatgcttggcccatacctagctgtccattatccatgctcccaagtaaccgtctcgtgagcctttgatttgaattcactcacaggactcgacttggtctccatcctgattccccagccatgattcccgctatctacacgtcaatactccagctcactgcatgcgcaaggacggcctctccctagacttgggtagatactcggtgtagtacgtgaatcccaccttgagtgcaaggacggtaaggcctaccgcgaatgaggacccgtggagagaagtcgcctgctaggcatgataaccacctacatttgaggcggctggctctacatcccacgagacgtttgacgcgggcgtgaacctcgagtacgatgcgtcgatgtccggtctgttcgtggccattctcttgctgtaggcacccgggaccactatctggtgcgcaatgggctggattatcatgatgctggccatgcactttagacctgccttgtgcccaaagacaccatccttgggacgcgttctgctgccgaggctagtggctctctatgtgctgacttacctgcagttcatgacggtgttgggactcaagacgcgacggggcgctagagagtcacaggtcggcactctatgattcacggagtttcatcaaaggccctccatcagtccccaaccaggattctccaattctattgcccagtgaggggtcatacagacatggagaaccctaacgtcccgtacccatgacatgaccagggcccctaagaacttggtacgagagcaataagacgcgcatatccttcctccaagggacctaacgtaattgtggaggctcctgcgattttgggcagctgtccgcccgccaggaaagggcgcagatggccccataggtttaattccgtgggtacccatggttgggattgggggttgaatgtacacanagcctatgtttcttttggggccccgtgaacaacaagtctaataccacaggagaaacctcgcgggagtgtaacaagttatagaggagggtccgggagaagaaggcgtgttatattaccagtgcggccattgggtctactagagctgctgctcggcaacgccgactgttgtgtttgcacacacgggggtaggaacttggcagagtcgaccc

SEQ ID NO: 578157 - DNA, 183 bp, Homo sapiens
ggagcacaatggatacagatgatactgacaaggcaagacagagagcgcatgccataaagacaaaagggagtctgcagccatatagtccagcctttagaaaacgaggtcttccgaagagaacagagctacaccttccccgtcagaatccactgttactaccacttagattaaaatgccccaaat

SEQ ID NO: 578158 - DNA, 118 bp, Homo sapiens
acaggcaagatgggtcagataggaccctggggtaacacggagtggtacgagggctggggtccccctacagtaagtagtaaacctagagtatccgactcacacgtcatgatattcctat

SEQ ID NO: 578159 - DNA, 157 bp, Homo sapiens
gctgccctccctcccctgcttacacctcaagccctagacgcagtgcaccttgaacagagggaggggagcgacccatggctctccctcctagcccgggagaccaggggccttcctcttcctctgcttttatttcataaaaactaaacacagaaaccgc

SEQ ID NO: 578160 - DNA, 101 bp, Homo sapiens
  misc_feature (26)..(27): n is a, c, g, or t
  misc_feature (29)..(29): n is a, c, g, or t
  misc_feature (38)..(38): n is a, c, g, or t
  misc_feature (62)..(63): n is a, c, g, or t
  misc_feature (75)..(76): n is a, c, g, or t
  misc_feature (80)..(80): n is a, c, g, or t
atgtgctagagggcaaagagttgganntntatcttagnaaaatcaaggcccgcaaaggcaannaaatccttgttnngtcntcacccatgtaataaaggtgt

SEQ ID NO: 578161 - DNA, 169 bp, Homo sapiens
gaagatgagactctcgtgtgggaggccttggtgaacaggagatcttatgcctccacctactttgatccttccagcccgcatagccgtaccttccacctctcgatgccccgcagttgctgcacttttgtggaccagtatcgagagcagctgatagcccgagtacatcggt

SEQ ID NO: 578162 - DNA, 417 bp, Homo sapiens
  misc_feature (409)..(409): n is a, c, g, or t
gtctttctgtgcccgagcaaagagactggcagctttttgcccctgccttagagagatctgtggaactttgaacttgaaagagatgacttggcatacctggtagaagaaatttctaagcagcaaagcattcaagaggaagcagagcataaaagtttggaaaatttgcagcctgatgatgtgataaaaaagaaaaaccaattttctagggagatatttaagccagctgcagaaatttccataagcaaggaggagcctgatattaatcactaagacaatagggaaaatgtctccaaggtctgtcagagactttaatgacagcttctcccatcataggcgcagagcctaggagggaaaaatggtttcctgggccaagtctgtctgcagccaaccatgctaaaagggccaaggnagagctca

SEQ ID NO: 578163 - DNA, 414 bp, Homo sapiens
cacaccactgagtcaggaagcagaaagtatatgcgtccaggtgtgtaggaagaaaatagattttggaagttatgagaaatgtaagagagtgagttgaacatagtttgtgattttgagggcctctaatagtattaaagcagtggcagccgctacacgcagacatgagggctaggctaaaacagtaaggtcaagttgtttgcacagaaaggctacagggtgcggtcctggctcttgtgtaagaattctgaccgcactaaccatgcctaggaagggaaggagttgttgttttgtaagggatcgaggtttgggagattaatcggacacgaacagcagggagagcacatgtgtttttacgagaattatgccgagatagcgtacagatgaggatgaaatttgggcttgactgaagtaatg

SEQ ID NO: 578164 - DNA, 579 bp, Homo sapiens
tagatacagagaaggaactgtcaaaagaaaaaatacaggaagctttgatatcagcaatctcaagaacagaaggaaatatcgtgcaacagctggtgggggacggaccgccaagggcaaacgacacacgtcaagaggcatctacgtatccgcctgcaaagtctctgaaaaacgaacgcagtgaaaggatgcaacgtcttctaaacaacgtcgtacgcaaacgaagcatcacgaacacacatcttagaaacacgcgcactgctgacagacaacgggacatttccatcggccacgaccagcacaccagtgccacaaccgcactccacaggaacaaacaacagcttactccttccagggcgcacaattccagacaaaccagccctaattacagaggaaacaacacggcaaaacacaattacacggttccagggcaaacacagcgtgtgtacaacgcgccccagccaacacctaaacttaagcaaacgcaggcccagcaacagcggacaggctgcacagcaagggcctgttgggaaacagcaagggcccagcttggacaacaagcacaccacacggagcactgga

SEQ ID NO: 578165 - DNA, 381 bp, Homo sapiens
acgcgtccggcggtgcagacgccgcagctctacaccaccttcctgccgcctccggagggcgtgcccccgccggagctggcctgcctgcccacccccgagtccacgccggagctgccggtcaagcacctccgcgccgccggggacccctgggagtggaaccagaacaggaacaacgccaaggagggtccgggccgctcacggggcgggcacgcggcgggcgggcccgcgccccgcgtgctggtgaggccaccgccgcccggctgtcccgggcaggccgtggaagtcaccaccctggaggaactgctgcgctacctgcacggcccgcagccgcccagaaagggggccgagccccccgcccctttaacctcgcgggcgctcccg

SEQ ID NO: 578166 - DNA, 258 bp, Homo sapiens
ttaaatcgtccaacaaatacttgcgatcatttaggagcatcccattcattttttcaatagctctttcagcggcttccggcgtctcaaagtgtacaaatccatagccctggagaaccattttcatcacaaaccaccttacatgaagggatgttaccaaaagcagaaaaggtatcacacagggctttataatcaagggattggtccagattttaaaggaatatgtggcctactccactttggcgaagggagggatcacgc

SEQ ID NO: 578167 - DNA, 189 bp, Homo sapiens
caggggggcggggcccaggaggtcatctctctctccttacccgggagcctgggaattgggttccaaaggtcctgcattccggttcattaatatgtggctcagtacagggctggtcccggcagcaggatcctgccaatcaccaaccacgtccacccacagggacacaaacaagctcacccaaacaaagcc

SEQ ID NO: 578168 - DNA, 187 bp, Homo sapiens
tgtgcggtaactgtgcacgtctttctatgaggttcagctaggcatgcttgcccaaaggaagcaggaactggatgggcatagagctgaagggaaggtatgatgcagcgctgacagacctcacattacgcggctcttcagcgctgcctggctttccttttcttgaggatttgaactttatacttaagac

SEQ ID NO: 578169 - DNA, 373 bp, Homo sapiens
  misc_feature (362)..(362): n is a, c, g, or t
tccctacacaatcataacatcgcctaaatcattatttcaccagcattttcatgcttgatacctgacataaccggcacttgcccccactaactcactcccaaattcaggaccacaactctcacaaggagaagagtaattccttgaatcatagcccttccaaactcctcctccacaactgccacaggattttagctaaaattccattgtgaccataacacttccctagttcgcaccctccaagaagtttgggcaacttaaaaagtcttctattatttgtgatctttcctctaccattccaaaactgacacttttaaattttatcttataagtctttaattactcaactttttttatgatctagnatctacttgtg

SEQ ID NO: 578170 - DNA, 1064 bp, Homo sapiens
  misc_feature (967)..(970): n is a, c, g, or t
  misc_feature (983)..(983): n is a, c, g, or t
  misc_feature (989)..(989): n is a, c, g, or t
  misc_feature (991)..(991): n is a, c, g, or t
  misc_feature (994)..(994): n is a, c, g, or t
ccagaaccagaggagggtggggcacagaccatagacggacccctcgtcctcccccagcggtggtagggggacccggggggctcctccccgctctgcagcctggggacactgggctgggaccagaatccagctttcttttaaaactctcagtgtaactgtatcccgtgacatttcattttttttaaatagtgtattttttttccatttttttttttaagagaaacaaaagactcgccagtcaatgactttcaaagagaactaactttggcttattcatattctgttcaaagacagtctattttttcactgtagaaagcgtccttgtgtgatagttacgttcgcaaacgcgcacgccaggcccatggctggtaccttggctttttttttttttttttttttttttaatttttcctaccatcagaaagtgtgctttgctcacagaagaatgggatgtccttttttctttcttggctttttttttccccctttttgtttcatttttataaattaaattttcagacatatcaaatacagttctgagggtaaggtcatgggggagctcggacccagtggcgttgggtgcggttgagggggacgctgctgtaagaggagagagatgacagtggtcctcctctgagagcctgagctgtctccccgtctcccgcccccaaggagacagagaggatcctacttcttcggggacagtggctgtatggctgtgctgccccacatcagggaccctttccccctgggactatggggcagtttgggagcaaaaccagaaggacaggcccccctctacccgcctaccctgagcaagcgagttgttcctctttgtacaagggcaggtctgcggttactttcaacactgtttattccagcggaagcagccgggtggttttcccacccccgtgtatgtagatatatcgactttgtattaaaggaagatcgtctgaaaaggactccnnnnccaaggggaaaancccctngnggngggccgcacccaatgggccattaaggggaggaattctatggcctggccgcgtttaaaactaaatttggaa

SEQ ID NO: 578171 - DNA, 1392 bp, Homo sapiens
ccagaaccagaggagggtggggcacagaccatagacggacccctcgtcctcccccagcggtggtagggggacccggggggctcctccccgctctgcagcctggggacactgggctgggaccagaatccagctttcttttaaaactctcagtgtaactgtatcccgtgacatttcattttttttaaatagtgtattttttttccatttttttttttaagagaaacaaaagactcgccagtcaatgactttcaaagagaactaactttggcttattcatattctgttcaaagacagtctattttttcactgtagaaagcgtccttgtgtgatagttacgttcgcaaacgcgcacgccaggcccatggctggtaccttggctttttttttttttttttttttttttaatttttcctaccatcagaaagtgtgctttgctcacagaagaatgggatgtccttttttctttcttggctttttttttccccctttttgtttcatttttataaattaaattttcagacatatcaaatacagttctgagggtaaggtcatgggggagctcggacccagtggcgttgggtgcggttgagggggacgctgctgtaagaggagagagatgacagtggtcctcctctgagagcctgagctgtctccccgtctcccgcccccaaggagacagagaggatcctacttcttcggggacagtggctgtatggctgtgctgccccacatcagggaccctttccccctgggactatggggcagtttgggagcaaaaccagaaggacaggcccccctctacccgcctaccctgagcaagcgagttgttcctctttgtacaagggcaggtctgcggttactttcaacactgtttattccagcggaagcagccgggtggttttcccacccccgtgtatgtagatatatcgactttgtattaaaggaagatcgacaaaaaaaaaaaaaaaaaaaaaaaaaaaaaaaacctttctactcttactgcttaacacacgcaacaaccaaaaacaaacaacagaacaaaacaaaaagaacccgagccagatactccaaccctctccggtcgctggctgccgactcgcgcaccgcgcacgaccactacctcaccgccggggccggccccgcgccaaagcacacaagcgcggcggcggcacagaacagcacagccagcacgcagcaccaccacccaccacgcccgacgaccagcacagcacgccgcgcgccagagacgacgcgccaccgcgacacagcggcgcagccgcaccggcaagagccggggcgcacacgacgctcaccgagcagcccgcaggaccgacgcggggacacacggcgcgggagaggtgagcggaacaaggccgcgcccacaccagcacg

SEQ ID NO: 578172 - DNA, 270 bp, Homo sapiens
aagaaaaagccccagcgggtgcgagggggtttctctaagagctctgggcaccggggagaaagactcaacccggtccgctggctctgattcccagccagctatgttgagattcacgtatgtcactcaagaaccctaaatttacgagcccaactttatctctttaagaggatctttgaggcttttaagctcactgatgatgtgagaggagaagagaggcgccagaaaactgacaactggggactttgcagccccagaggagggtttaagggg

SEQ ID NO: 578173 - DNA, 164 bp, Homo sapiens
tccctcatagtacaccctctgaggtgattattatatatgcccacttaccaagaattttagaaaaccctacagtgcagagaaattggtaactatgcctaacagctacacagacaggatgggttagaaatagggaattttgaccccacgacctgtctatgctacaa

SEQ ID NO: 578174 - DNA, 673 bp, Homo sapiens
  misc_feature (576)..(579): n is a, c, g, or t
  misc_feature (592)..(592): n is a, c, g, or t
  misc_feature (598)..(598): n is a, c, g, or t
  misc_feature (600)..(600): n is a, c, g, or t
  misc_feature (603)..(603): n is a, c, g, or t
gatccacgacaactcgttgactttcgccagaaagtgtgctttgctcacagaagaatgggatgtccttttttctttcttggctttttttttccccctttttgtttcatttttataaattaaattttcagacatatcaaatacagttctgagggtaaggtcatgggggagctcggacccagtggcgttgggtgcggttgagggggacgctgctgtaagaggagagagatgacagtggtcctcctctgagagcctgagctgtctccccgtctcccgcccccaaggagacagagaggatcctacttcttcggggacagtggctgtatggctgtgctgccccacatcagggaccctttccccctgggactatggggcagtttgggagcaaaaccagaaggacaggcccccctctacccgcctaccctgagcaagcgagttgttcctctttgtacaagggcaggtctgcggttactttcaacactgtttattccagcggaagcagccgggtggttttcccacccccgtgtatgtagatatatcgactttgtattaaaggaagatcgtctgaaaaggactccnnnnccaaggggaaaancccctngnggngggccgcacccaatgggccattaaggggaggaattctatggcctggccgcgtttaaaactaaatttggaa

SEQ ID NO: 578175 - DNA, 971 bp, Homo sapiens
  misc_feature (874)..(877): n is a, c, g, or t
  misc_feature (890)..(890): n is a, c, g, or t
  misc_feature (896)..(896): n is a, c, g, or t
  misc_feature (898)..(898): n is a, c, g, or t
  misc_feature (901)..(901): n is a, c, g, or t
gttcgacggagactctcttaaaactcaaagaattctaaaagtaacatttctattacacatagttggtctttgcatgtgttaatgtactgagtgctcactaggtgccacgcactgccaaatactttgcatccagaatgtaggagttgctcttttaatataatgaatggtaaaatctagttaaaaaaaggaaggagaggagaattaacataccatccatccattccacttctatgtatatgcccccaataattgaaagcagggattcaagcatatacttgcacatccatgttcacagcagcattactcaccatagaccaaacaaggccagaaagtgtgctttgctcacagaagaatgggatgtccttttttctttcttggctttttttttccccctttttgtttcatttttataaattaaattttcagacatatcaaatacagttctgagggtaaggtcatgggggagctcggacccagtggcgttgggtgcggttgagggggacgctgctgtaagaggagagagatgacagtggtcctcctctgagagcctgagctgtctccccgtctcccgcccccaaggagacagagaggatcctacttcttcggggacagtggctgtatggctgtgctgccccacatcagggaccctttccccctgggactatggggcagtttgggagcaaaaccagaaggacaggcccccctctacccgcctaccctgagcaagcgagttgttcctctttgtacaagggcaggtctgcggttactttcaacactgtttattccagcggaagcagccgggtggttttcccacccccgtgtatgtagatatatcgactttgtattaaaggaagatcgtctgaaaaggactccnnnnccaaggggaaaancccctngnggngggccgcacccaatgggccattaaggggaggaattctatggcctggccgcgtttaaaactaaatttggaa

SEQ ID NO: 578176 - DNA, 151 bp, Homo sapiens
agagaatctggtaaaagctccattgatgaagcacatgaggatcctgcatgttaatgggtttaatggagacagtgagaaggcaaccaaagtgcaggacatcaaatacaacctgatagaggcgattgataccattgtggccgccatgagcacc

SEQ ID NO: 578177 - DNA, 535 bp, Homo sapiens
  misc_feature (363)..(363): n is a, c, g, or t
cgggctttgtgctgttgttgtgtttgtgttggtcggggcggtctacaaggtttttccccgccggtttccccccgtgtgtcctgtggggtaaccccgttgtgttccgccccttatcgccgtggtgaaacggccgcgcccgttagatctctggttaattccgacctcctctattatgggggctatacctctgcccccaggcccgcgagcggtccgctgcgccgccgaggtccctgttgcgcaagggatctgcgcccccattaagtttgtgttatgccctaccctctaattccgaagtttttccccgttgggccgcgttccgcgagcactaatttcccccggcgaattcggcccccactttcgcgncgcgggccccccataatatttctccctttccaactcccaccatcaccctttggcgtttgcaaacaccccccccttaaatctcggcccttttttataaaactggtttgacctatatttctctttataattctctcccatctttatttatatgaagggttctcccccaaaaaaa

SEQ ID NO: 578178 - DNA, 196 bp, Homo sapiens
ctggtccggcttgtggtttatggacatgcagcgcagtcggtctacattacgctattcccctatcatagaagagcttacctcccctttcactgatcacggcctcataatcatttggctatatctgctttctagtcctgtatgcccttttcctaccactcaccaccaacctaactcatactaacatcatcagacgcac

SEQ ID NO: 578179 - DNA, 575 bp, Homo sapiens
  misc_feature (478)..(481): n is a, c, g, or t
  misc_feature (494)..(494): n is a, c, g, or t
  misc_feature (500)..(500): n is a, c, g, or t
  misc_feature (502)..(502): n is a, c, g, or t
  misc_feature (505)..(505): n is a, c, g, or t
gcggcgcctactactactactactactgctcgaattcaagcttctaacgatgtacggggacatgggggagctcggacccagtggcgttgggtgcggttgagggggacgctgctgtaagaggagagagatgacagtggtcctcctctgagagcctgagctgtctccccgtctcccgcccccaaggagacagagaggatcctacttcttcggggacagtggctgtatggctgtgctgccccacatcagggaccctttccccctgggactatggggcagtttgggagcaaaaccagaaggacaggcccccctctacccgcctaccctgagcaagcgagttgttcctctttgtacaagggcaggtctgcggttactttcaacactgtttattccagcggaagcagccgggtggttttcccacccccgtgtatgtagatatatcgactttgtattaaaggaagatcgtctgaaaaggactccnnnnccaaggggaaaancccctngnggngggccgcacccaatgggccattaaggggaggaattctatggcctggccgcgtttaaaactaaatttggaa

SEQ ID NO: 578180 - DNA, 747 bp, Homo sapiens
  misc_feature (24)..(24): n is a, c, g, or t
  misc_feature (161)..(161): n is a, c, g, or t
  misc_feature (650)..(653): n is a, c, g, or t
  misc_feature (666)..(666): n is a, c, g, or t
  misc_feature (672)..(672): n is a, c, g, or t
  misc_feature (674)..(674): n is a, c, g, or t
  misc_feature (677)..(677): n is a, c, g, or t
ttttgaaaaaatgttggaaaaatnttttggccgtagggaccatctccactgttcattacaaaaaaccgtacaccttggagagaaattgtggcaaaaatataaagcaacatttcatcaatgtgatgtttgtaagaaaatttttaaaggcaaatcaagtctgnaaatgcattttcgaacgcattcaggtgaaaaaccatacaagtgtcaaatttgcaatcagtcttttagaattaagaaaacattaacaaaacagtggcgttgggtgcggttgagggggacgctgctgtaagaggagagagatgacagtggtcctcctctgagagcctgagctgtctccccgtctcccgcccccaaggagacagagaggatcctacttcttcggggacagtggctgtatggctgtgctgccccacatcagggaccctttccccctgggactatggggcagtttgggagcaaaaccagaaggacaggcccccctctacccgcctaccctgagcaagcgagttgttcctctttgtacaagggcaggtctgcggttactttcaacactgtttattccagcggaagcagccgggtggttttcccacccccgtgtatgtagatatatcgactttgtattaaaggaagatcgtctgaaaaggactccnnnnccaaggggaaaancccctngnggngggccgcacccaatgggccattaaggggaggaattctatggcctggccgcgtttaaaactaaatttggaa

SEQ ID NO: 578181 - DNA, 722 bp, Homo sapiens
  misc_feature (32)..(33): n is a, c, g, or t
  misc_feature (46)..(46): n is a, c, g, or t
  misc_feature (57)..(57): n is a, c, g, or t
  misc_feature (104)..(104): n is a, c, g, or t
  misc_feature (152)..(153): n is a, c, g, or t
  misc_feature (177)..(177): n is a, c, g, or t
  misc_feature (286)..(286): n is a, c, g, or t
  misc_feature (322)..(322): n is a, c, g, or t
ggatcagccttctgatttcgttcatttcactnnatactccttcagntacggcccagnggcgtcccacggggatcccggactgcagccggataagaacgcacganggcaacagcccaaaaggaactttttagacagaaacagcgaaccacgcnnagcaaaacaggacaaaacaaaaancagggaggaaagaaaggaaccgaaacaacaagccagccaccagcaccacatacaggcaggagcaggaaaagcggcggcagcggcagagagggcgcaggaagcccagcangcagaggagaaaacacacacacccacaagaagggcnccaacacgacaacagaaaacaaccaggcagggaaccagggagcacaagaaaaaagcaagcccagccagacaacagaacaggcaaaaggcacccacacccaaaaaaacaacgacacaaaagggggaacggaacaagcaaaggggaaaacaaagaagaaaaacaaaaaacggaccaaaccaaaaacaccgggaaaaagaaaaacaaaaaacaaaaacaaacaaaaaacaacaacgaaagcacaaaaaaaaaaaaccagaggagccaaaaaaagagaaacaaacacaaaagaaaaagacaacagagaaaacagaaaacaaccacaagacacgaaaaaacgagaaacgaacaaaagaaaacaaagaacacagacaaaacaaacaaaaaaaaacaaggaaaaccc

SEQ ID NO: 578182 - DNA, 198 bp, Homo sapiens
acctgttataattttgatctctaattttcgctaagtttgcttaatatgttcttgtttctaaaaaaaggtttttttttaaattatctgggcagggtggaaatcctgtagtctgtatgcctagctactcgggaggctgaggtgggaggattgcttgggccaaggagttggaggctgcagtgagctatgatcccactgtac

SEQ ID NO: 578183 - DNA, 770 bp, Homo sapiens
gcctaacgccgggatgtgtttgtgttgatgtctcatcgacaagttttccgtatgtctgacatggttccctcgcatacctgattgagtgtagtcttgcgggcatcagtgtagccatggttgcatatgatgactttccactactgggtgacccatcctcctgggatacacacatcacagtgttactcggtgggatatcatagtgctgggcaatgtagtcacagtcgttgcgggaaacgtcaagagtccttatttcgcggtgtgctgtatagtagtggtcgccgttaagccactgatcaactccttggatacagattagctggccatggttgttgccgtaatgtttgtgccactaccgatttgtagactcgctgtacgcaagagggatcctgagactcgcttcaaaaagactttagtcgtgaagcggaatgtacaatcctcgtttattagatctcgcgaaacatcgtatcgaagtctaagaatttcgcacagtattgctcgtatcctactaatatgcgacctttgtacactattggtaacccagtcttgtgtacatgtgggtcaaagcatagatggaatagtggtaaagaacactcttactttagagtctttggaactaacatccaacgctttcaagtaactggtccatggaccaaagttatttacccgttgcttgataagattgtatatttcctgattgcagtccctgacttaccctccattttgccagtggagagatgtctccttccttggctggattaatccgaggtgga

SEQ ID NO: 578184 - DNA, 262 bp, Homo sapiens
tagtagtacatctaaaggcttatttatcctctttccccaccggcgggccacctcatcggggtcggcgagcttaaactcccataccgtctccagtccagctgatgaatgactggcaggattttgtctgatagcagctccagtgagaaactgccacagctgaaataggtccaacttcctgtgaacccggccagacacagctgcaggtatacactggtttgcctttctccactgggtcactcctctcttggactgtaatccattg

SEQ ID NO: 578185 - DNA, 311 bp, Homo sapiens
  misc_feature (138)..(138): n is a, c, g, or t
  misc_feature (264)..(264): n is a, c, g, or t
gaatttccattttgccaagaattataaaaccctgaggttttaaaattcagtttcttttctggggatttaacatggaaggacttggagggcaaatggcccagtgattggaaaggggaaaaacaattcatttcatttaanattattcaataaccattgccagcatttgggattctgagtgctgtttatgaagccctttcattgatataatttcatctatctctcacaaggctgtaagcaattcctatgtccatatggcagtgaggnaatggagatttgagcaggttaagggagttttcacctggaagctcttc

SEQ ID NO: 578186 - DNA, 896 bp, Homo sapiens
ggtgctcgctcgcgccaggcgaggtctcagcgtctccctcgagaactcggtgagaatgaattggcgccgtgcgacaccaggcggatccgttctggagaatgaacccatctccagccgcagccgcagccgccggccgggccgaggagcagccggagcagccgcaccagtgggaccgaagtgagcggagccagagtttgaggcagcgcctagactggtgaatcaggggccctcacgcatgagttcctcgcctgttaatgtgaaaaagctgaaggtgtcggagctgaaagtaggagctcaagaagcgacgcctttctgtacaaggtgtctcaaggccgagctcatggagcgactccaggctgcgctggacgacgaggaggccgggggccgccccgtccatggagccccgggaacggcagcctagagctgggcggggattccgctgtgcgctcgggaagcaggcctcgaagcagtgaggccgccggccgagcggtcgactgactggaggaggacggacaggaggacgagcagccgggctgggatcgccgcttagcagcgcctgctgatagatcgtcgaagcctttaacggggtggggagggccgtggcacgaatcgtgagcctcgaatgccaggacagtgccaaggacgacctcggaccggccggaactcgggggggggatccgagtgggtgactgaagaccaaggacacccacggcgaggggcatttaaggccaggacagagccgacacgccccggggagacgcaggccaaccggagtgtcagcggtgagaaaagaccaacaacggggggacacacgaggggtggaacaagcggacagcaggtcccggggcggccacccggggaaacgcaacaccggcacaagcggaaaccggagacgc

SEQ ID NO: 578187 - DNA, 503 bp, Homo sapiens
ataccttgagaagaaaataaaatagaagggaaatcattttcaatgaacacaaaacagttatttattgaaattccaattttgttgtttccataataagcattttcttgggcccacagccacgtgtattggtttgcgttctgtgcgtggttgtgttcacccaacagccatgttgagaaactgcaccagagaccgtatggcccacagtgtccgaaatacttacttttttttagagatagggtctcttgctctgttgcccagattgaagtgtggtggtgtgatcacagcacaccacagtctccaactcccgggcccaagcgatcctccttcctcagcctcctgattagctgagaccacaggagtatgccaccatgcccaagcccactctggtatatgacagagaaaacttgccactgccttctctatactgtacagttatcctaatatggtctttcagtatccaccacagagggttggggaaaaaaaaaataccctcaccaggacga

SEQ ID NO: 578188 - DNA, 367 bp, Homo sapiens
tcgtggttgcgagcggccggggctggggcttggccagtggccgctgcagtgactgagaccctgtgggatgtggctgtctgtgccctcgcagtggatgggccgtccagtgtcatctgcggggagactgaaaagttaccagacggccagcattgccactgccagtagcatcctgcccaaggccatgggaatcattgttgtgactgccccaagggttgcgaggactgggaggtggccccctgttggccctttgtcagggcctgttgcatggttcccgcgggtcccacaatgttacctggaactattaacccccaagggccttctggcgaaggcccgcttttccgtttcccggggacgacggttgggcagg

SEQ ID NO: 578189 - DNA, 3407 bp, Homo sapiens
ttgcccaatatgggtcaggagaccctcatccatctttggcatgcacgtactggcatcatgtccaagactgctgtgtaaggggaggagataaatgaggagacacaacaactattaactcccatattctgggaagtgacgtgtatcatttctactcgttggccagaaatggtcagctggccctaaggtaatgcagaaagatttggaaaattaggggagtaaatgaaatatttggaacactttcaatccaagcagttcttaatgtttcccccactatcatgctagcccattccaccacctttgcctgaaatactgcaagtatcctaattaatcttccttatcctaatcatgctccaatatgatctattccttcttccattcttgctacctccaactttttgttttccaactatcagttcaaacggttttgttaaatatgaaacagatttgctccaaaccttcaaaagccaagttacttcccatggcctccaggcctctacacaatctgggccctgaatacttctctgacctcctttctaccacttcctgcctaggtcactttgcattagctacactggccttcaggctcttcttgagcataccaactttatttctactcaaagccttcacatttgtgtttccctctgcctagaatgctctttcctcaaattttcaaataactcatcccttcatttatgcctctgcttggctatcaccctcttagagaggctgtctttgaccactctgtataaaagagtctacttctaaccccatatcatcagctgctaatccttttccctgatttttctttcatgggacttgtctgttcccaacattttattatttatttacttgcttagttgtttattgtctgtctcccttactttaatgaaagctaaaaaaagcacaaggaccttgactttaacccttctgctgttttcccagtatcaagagcagtgcccagcacacagtaggttctctataaatatttgttcaataaataagtgaattaattagtaaattagctaaaatatgccaaaattgagatgacaggctcctggccccagttcccagctgggcactccccaggtcacaggtctggcctctccccagagctgtctggacagcctttcctgtgactccttgaggtttccttgaagcccctgagaatattttgttgagaacacctttcatattggtcctagttctagtcaattttattaatcagatcagccaacaccattcacagaagttggaaactggaacagaaccaatttatgtggcagatttttaatgaaaatataatggcaaccaagagaatctgttctagaccttcaagaccgtctctgcaaatgaagctgtgaactccatggctgagctatgtatcttggaatagggcccatgtttagacagagaggtaaggcctgaaaaagtaaaattcaatcttcactggtaatgaaatattaaattagtgtggacacagtggagagacttttactcttttgctgtcactgcttcagcaagcttggcctattaaatccaaatgaagtgtggagaccagacatactctattgttccattttattcttgcatttttctagctgcagcatgccatttggctttcccacctaaaccttcttgctcttactcttcttccctgcatgggaattgtttgtacacagattgaaatagtgcataacagccagaattttcttatattggactctctaacaataacacaaaattattattatatgttgtcccttagacaatgggttgctctgcactggcatgaagttgtggtaacatggaatgcataagcttgtggttcacactgagtgtacaagatacagtttccctgggacataaatctgctctttattgatgtatccaagctccatctcaagtaagaattgggttaagggaaaaatagacccattcattgtgtacattcacataaaaggttttaagaaatcccactctaaagaagcctattcaactttgcttaatctgatatctcataaaactatgatcactgaatccattttatttttgcctgacaaagtgatactccacctgggccacagtgcctgcctcgttgtgtctgaaaatctgtggggacattttggtcacaatgtctggaggctctattggcatttaaaaggtggggaccagggatactaaacatcatctagtatgaggaccagttcttctacatcatgaaaaattatcccacccaaaatgccagtagtatccctgttgggtacatactaattcacactaggaattctagtatacaccacttttttgttgtacagatggagaaacagtctcagatagaggaaacggtatgtgtaagtctcacaactgtgtccatggtccaagtcagtactggaactcgctctcttttttcctattctgtactcacgcttcagcactgtgttgtctctattatgcatacactagcacacttgaaaagtgaacaaaagctaagttgttcaaaagccttaaagaaaaacctccttagagcctccagagtatctacatgcttgtgggaacattgactgatgaatgaatgaaaaattgaaacaagacaggaggaaaagttcagaactagctttcacttggcaattactacatgccaggccttatgcacgtagtggctcttttactccccacaacggaccaataacagaaagattactaactccttttttcagatgaagaaattgagtcttgaagaacttgcataagattctcaaggtcacagagctcataaaaagtgatagagctgggattcaacctgattttagtgtgacttctaagcctgagcactttccttcaggcctctcaatgaccagccaaggctcttgctctcagaaatgggaaacacgatgaagaagaaaaggaagactttttttttcaacaaaatttgttgttctgttaattacatttctattgttaaaaataacagaaatcagttcaagaatgtttaagaaaaagtgagcatttttggaaggatagtggagctcatgaaatctagaagttgaacaatccagctctacaagggcatgtggcagctgcagtatgtggacacaccctccagaatagcactgttgagactgactcactcccagctcccaatcctgtctcaggtcaatgcttgagagagataataggtctgattcaacttgaatcagatattcactcctgctccaaccagttgtggctgtggagttagagtcacatagcaggaacacagttgctgataagccatttttgtggacagagtgggtatctttaagagttacctatgatcaattcttggtcacattgtgaggcagttgaagtttcttttgtgtcctttatatccccctaacaacagggaagttttatcagtaaatgcctac

SEQ ID NO: 578190 - DNA, 168 bp, Homo sapiens
agctgtctgtctcagtgatctacattctgaagttgtctgaaaatgtcttcactgattaaattcagcctaacacattttgccgggcacactgcagagacaatgctgtgagtttccaacctcagacccatctgacgggcagagaaggtctcgtttgtcctcgacttggct

SEQ ID NO: 578191 - DNA, 279 bp, Homo sapiens
accaagacctcaacccctgacccccatgcctcagtgatactcctcaatagccatcgctgtagtatatccaaaaacaaccatcattcccccttaaataaattaaaaaaactattaaaccacatataacctacccccaaaattcatgaataactaacacaccctgaccacacctgctaacaatacaatactaaaccccctataaatatgtgagagaatattgcagctgaagaaattggggatcctctcaaagtctgcaccttgcatgcatgcaatgcttgt

SEQ ID NO: 578192 - DNA, 2057 bp, Homo sapiens
cagaatgaaaagctcaacaggtataactacatagagggaaccaagatgctggccgtcgtacctgtatgaggtctcccagctgaaggactaggccaatgcccatctgtgtaggcagtcatccaagtggaagatgcactgacttctatgaagaagagaagactaggatcagcacaatacatatgtagaaatcaaaggaatagagtatacctctgtataggcgagcgagacacacgccgaacaaacgcggcaccaccacctaacgacacggcagaaaacagaaaacagacacagagcgacaaaaaggccagccaacggaacgaaagacaacgagtacaaagccaacaaccaaaacgacacgacgcaaacgcacacacaccacacaaggagaacaacaccaaaacccagagaaagacaccccgagcgccaacgagacgatcagggcacagacggacacaagtgccaggcgcccgcgcgacacaccgccgagagaggcaacacgaccagcccgcagcgaccgagcgacatgaatcaacgacaccacccggcgcagaccgcagccccgcaagccacgcccgacactcactggggaccgcagacgcagacgcacaacgagaacacacgaccacgcgaaccagaagagagagcacaccaaccagcaaccggcgaggaggtagaggggccggagcaggaaggagagagcacgacagacgacacgcggaaagcgacgagacgcacaagcaagagagacgcgcggacaagcggcagagagcgaacacagaacgaaacgaggaaagcagaggaccgacgaaagagacggacgagagcaagcaggagagcccaacagaagaacagacgagcgtagacaaacgaagagggcagcccagacgcgcgacgacggagcggaccggagacggagaacgcggcaggcaacgccagacgaagaacagacgcaccagagccgcgcacgccaccaccacacacggacagagcaccgcacaaaacaagactccaacaccgcaagcagaagaccagaagcaaagcggggacgaccaaacaggcagacaggcacgcgccgccccacacgccacgcggcaaccgggaccgactaggcacccacgcgcagacgcccccgacacaacaccacagcgccgcgaaccagccaccacgccagagaggcgcagagcgcaacagcgcacagcacacgccacagggagaagacgacaggagaacgagccaggggggaggagacgcgcacggaccagacgcggaccagcgcgaagcgccgccgcgaccaggcaaagcgcgcgagcgaccacgcacagggcgcacagcgcgggaagccgccgcagcagccagcacgagcgcgcgcgcagagcagcagcgccagggcagcaacagcgagcccgagaggcgaaccgccgccgcgaccacacgactaccactcgcaagaggaccacgacggagaccagacgcgagagcagcaaccagcaaaccgcgcgacgccacacacagacacgatgacaagccgacccgcagagcagcagccgtcgcaattgacagcgcaggaacacgacggacggccagtgcagagcagggcagcagaaccaaagaggagcagcagcaagcaggacggtcgacgcgcatcggcgcggcgatcagctgcgctgcagaagcgtcagcgtccatcgcagcgggcgtcgcgctaccgcgcaagcgcgtgcggcgacgccacagccgccaccgcgagccagagtacgcagctagcagcacgcgagatcgacgacgacgacgctcacacgacgcacgccacagcatccgacccagtcaagccagacacaagccaacacgcgcacccagcacgcagcacgcgcacgccgagcagccgctcacaccacatcacagaccacgccacgcgcacacacacagcgaccaccggcacaccagaccacgacacacaacaaacaccgacagcgcagcacgagcagcggaccagacgcagacgacccgcgccaccacccaacgcgcggccgccgcttccgctacggtgcgcacacgag

SEQ ID NO: 578193 - DNA, 189 bp, Homo sapiens
tgccaaatgcgtagtacaaaaaaaaaaaaaaaaaggaaaaaaaagaaaccctgaagatccggtgaaggtatagaaaacagaaatcacccataattcctacttgtagcaataacgcaataactacctttttttttttggggtggaaaaggggttccctctttgtggccagggtggattgcggggcgataa

SEQ ID NO: 578194 - DNA, 139 bp, Homo sapiens
atgtggtgtggtgttctagaggatcccttcttttccatgggatatttttaagctctgtattctagtactcagaagaatacttgggaaatgatgttcagtatatgtttggtgaaagaatcaatgggcacacattatggag

SEQ ID NO: 578195 - DNA, 129 bp, Homo sapiens
tggtaaacatcactgtgttactctaccatgttactgcagccgcggcactgcctgagaaccgtgcttactgtgagcggcctcggcatcagcgtgatctctaagtactgcagctgcagctgtactagcgcg

SEQ ID NO: 578196 - DNA, 118 bp, Homo sapiens
gcacgagcggagttcaggttcactgactatagcaccaaagagaatgtcctatctgtgctcagaaacctccgctatatgagtggcggaacagctactggtgatgccatttccttcactg

SEQ ID NO: 578197 - DNA, 1341 bp, Homo sapiens
  misc_feature (1340)..(1341): n is a, c, g, or t
agaacacaggtgtggtgaaaagtaacccctaaaagccaaaacatgggaaaggaatagacgacttcatatcaacattgtcgtcatcgtgacacagtgagattccgggacaagtccacacacatactggtcgcagtctgatcttataaagtgcgggaggcatcgacaaagagaaccattgataaaactgtgagaacggaggcatgctgaccatgggagacagggctccttcaagctatgccatgcgtggtcattggtagttagatactgaaagctgagcgtgaacgtgggatcatcattgcatcatctccttgagcgaagatttgagaccagcaagtactatgtgactatcatggatgccccaggacagagagactttatcaaacaacatgattaccatgggacatctcaggctggacgtagtagctagtcactgattgttgctggctgggtcgtagggtgaatttggagacgctggtatctccgagaggaattgggctgacccgagaagcatggcgcctttctggcttacatcatcgtgggtggtgaaacaagctaaatcgtcgggggtgaacaaaatggattccactgagccaccctacagccagaaagagatatgatgggaattgtcaagggaagtcagggacttatcacttaggaacaattggcgtacagaacgccgacatagataggcatttgtggcaattatctggtcggaactgggtgagcaaatggtgggagcccacaggtgcgtaaccatgcctgtgcgctgcacggtgcattggcacagtcacccgttacaggatgggcaatgctcagtgtgaaaccaagaacttgattgaaggggccttgggactgggatcctaaccacacaagcataggtccaatggacacaggcctttgagctggtcgtctctcacagggggtgcgtctagcgcacccatcgggggggcattccgcggacacggtacccccagaagggtacaccaagagagacaccggggggcgtgccacacacacggcgagctcagggggggacaccccatggatccagaagaagggtgaaacggggaacacaaaaagacgccaaaggacaccgacaggcgtagagagcaaacatccgcagggcaacagggcgaaccaggccaaacgatcgtaacgaaaaagcaggaccacaactggagaccaagacagaccacacaaggcacgaaaggacagcacgacgaccatcagcacacacagaacaaaaggcagatcggacgagtaaaaaacagacaagccgaaagtcaacaacgaccgacaagcagaaggatggcacagtacatcatcacacatcgcgacgnn

SEQ ID NO: 578198 - DNA, 417 bp, Homo sapiens
tacggtgatagctgcccagattgatacacacgagcaccctcctcttcaaaaaaaataggataatgtgattataatagtgtcttacactatcaattgctaggcatgtaatacacactcaacaaattcttaccagtaaatatagtagactatctgactaataaataaaaagtatataaacgcacacaagatagcctacaataatagaataggatacacaaaccgtacaaagtagacaaatagtaatactatcacatacaaaggaatagtagtatatataaaagaaagctattatagtagcctaaaataatatacaggacacataaacatactacaatataatattccacatagtcaaatatatacatatcacctactacatataataatactaccacctactaactataataaacacta

SEQ ID NO: 578199 - DNA, 1607 bp, Homo sapiens
gccgcttcgctctctgctcctcctgttcggacagtcagccgcatcttcttttgcgtcgccagccgagccacatcgctcagacaccatggcggcaaggtgaaggtcggagtcaacggatttggtcgtattgggcgcctggtcaccagtgtctgcttttaactctgggtacacgtgcggatattcgttgcccactcaagttgaccccttacatatgaccttcaaactaccatggttttaccattgttccaaattatgatttccaaccccatggccaaaatttcccattggcacccgttctaagggctggcacgaaccgggaatgcttttgtcattccaacatggcaacattccccattcagccaatctatcccagagaacgccgacgaatcccttcactaacaattccacaggtggggggccgattgcattggacgcctggaagtacccgttacgtggcagtctcacctggggcagttcttctcagccgaacccatgtgagcaacgggctggggcggcctccatttttgccagtgagcgtgaggcccacaaaggggttcatccattcttcctaggcccccctatccatgaattggattgcaccccccagctgctatccgtacaatagggggtgcttgaaacgcaattgcacggaacggttatgtaccaaacaggccattacaaacgactccagtcacgcacaaaattggcaatccttgtaaccaacccaaactggccatataagcaacccccctgaggccaaaatggttcatagccactggcacagtcactttctggggtaagtccgtgggcacgcggactcagctggaccgactggggtcccagtggccgactaaccatggccctaccccaagaaagaacctgttgagcatttgcccatcttccggggcacaacctgttcggcagatgtatgggacctgcggtgggcttactcccagaaacagttcattccctttccctcttattggacgacatgactcaaagtctggctggggtcacacgtgtcacatccccttgaaggcctgtcctgccgggacagtcttcacattgggactgtggtccttccccgcgatcccccatcatggcccatgagctgttcagagactgaggacccatgactctggcacgttttcacatgtacacgccagaatatgatgtacctacagctatggtggtgcatagcacagaggcttgaccgtgccccccttacagggagacttacctgcgtctacacttgtaacgcgacagtggcctactattgaacttcaacacacaacaacacaaatcaacacacataaacactactgatcacataaagccccacaaaccaaattgcaagccattctacgtgaccatactcagcacattagtctaaactacaacttattgaatccatcttactcccacaaagtctctacacaatagatacacctctatcacacaccacaaacaacccataacaaacacaaaacaatatcgaaaacctacaacatagacacacatatatctactcaccacttactactcatataagtacgaactttgtcttcactactcaaaacaatcaatcaacacacaaatcatatcta

SEQ ID NO: 578200 - DNA, 158 bp, Homo sapiens
agtctatgctttgaaccttgttgtggtggtagcagaaaaatcaacgaaggggaaatttcataggcgggggctaaaatgcaaccatacaattcatccctgtcctgatcaataattcttattatatgaaattagtaagaatattaggaaagctcaattag

SEQ ID NO: 578201 - DNA, 611 bp, Homo sapiens
acccacgctgtcgcggacgcgtgggtcgaccctacgcgtccgggagcatcccgaagggagctgctggatcgcgaggccagtacctgacccttgtcggcccgctcgcactgtgctcgcgtcgagtggagcggagagtatgatcttgatccttccacgtcttcgtcaatcaatcggtggacaagtgagctcgctgtgcgttcagccaatgttccacgtggtagccgttctcagcagacagatcatgtttcctcatgcgcaggtacatgatgctagctagtcgagcgttggtcttaccatagactcacggtacggtgtcagcattctgcctggtcagtagagtgcttgaaggactatggcacagttctgcagggacgcgcgagtggtcacagtcaacaacaattaggacgtgttcccgaacaacaaaatgtcatgcctgcgcagccatgagtccatgcggtgcagccacccgcaccggggggccctcgaacatgagggagtcaattacgggatcgtattcactgagattgattcagatgcctcactatatttatccatgtgccatcacacacgcgggtcgtgtaatttccagcgtgaatggtgccaaagccaac

SEQ ID NO: 578202 - DNA, 116 bp, Homo sapiens
  misc_feature (64)..(64): n is a, c, g, or t
  misc_feature (74)..(74): n is a, c, g, or t
aaggatggcaaaagctcctttcccgggcctggttttgcacactggatggtcctctgcagaacgntggtgcaagngtagacacggtcttctcacaggccaccttgaggttattgggg

SEQ ID NO: 578203 - DNA, 454 bp, Homo sapiens
  misc_feature (13)..(13): n is a, c, g, or t
  misc_feature (39)..(39): n is a, c, g, or t
  misc_feature (133)..(133): n is a, c, g, or t
  misc_feature (135)..(135): n is a, c, g, or t
  misc_feature (188)..(188): n is a, c, g, or t
gccaggaaggatngtaataatggcaccagttcttcctgnaacagtagtaattatgttatatgtaccactggagtgagtggtagaatcatctagttccgagcccgggattataaacgtaggtgaatggaatgantncgaatatgttgtgacatatatttaaagctttttatattactgctattctcacntgatttgtgcaacgttcagttttaaaaaaatcttcctatgccatccatgtattttattttatttattttcacaagtatttgacagtatggtagaataaaagatgattgtaagattaaaaatgtaaaaattgcttatgtattattctgaattgtgttaggttgaaaaagatgattgtggtgactattatttcttgtccactatttgttttttgttttttcaccaataatgtcttcatatttgaacctattcaataaagacatgaagc

SEQ ID NO: 578204 - DNA, 441 bp, Homo sapiens
  misc_feature (4)..(4): n is a, c, g, or t
  misc_feature (23)..(23): n is a, c, g, or t
attnccttgaaaaatttaaaaantttgcaagcacccttgtgaaatttgatgtgatacccccaaggcaccctgagcacacagtttgggaacccattgcccttggaatattaatcatagttaccctcccagagagtgaaattttggataattaaaaaaatttcttttttcttgagatggagttttggtcttgttgcccaggctagagtgcaatggcgtgatctcggctcaccgcagactccgcctcccgctttcaagctattctcccgcctcatcctcccaagtagctgggattacaggcatgcaccaccacgcccggctaattttgtatttttagtagagacggggtttctccatgttggtcaggctggtctcgaattcccgacctcaggtgatcagcccgccttggcctcccaaagtgctgggattacaggtgtgagccac

SEQ ID NO: 578205 - DNA, 211 bp, Homo sapiens
tgtgacgagacgacctgccatccactacttctgacacgactgtcttaatcttcctggttttctttatatctctctcttccaggatgcttaactgatatactgtagttttacgtattctacttgcagaaggcggcggtcagtagcaatttcctgttcaagtcgagtctttatgtcacgaaggatatggtattcgatgttctggcgtaccaag

SEQ ID NO: 578206 - DNA, 279 bp, Homo sapiens
  misc_feature (162)..(162): n is a, c, g, or t
  misc_feature (210)..(210): n is a, c, g, or t
  misc_feature (217)..(217): n is a, c, g, or t
  misc_feature (222)..(222): n is a, c, g, or t
  misc_feature (241)..(241): n is a, c, g, or t
  misc_feature (259)..(259): n is a, c, g, or t
gaattcggtacgagcaaatttgcatgaagacaaatagttatttcacaataggtgtggaaggggcttggccgtgaactgcacagctatcagttagtgtccccgaatatttaaaatgagcacgtcccagggtagaaactcactttaatgagactccttggaggnataccacctacatgtatgggctccagacaagatggagatcatggagtntgcaggnaagtngtctttaccagaggtctanggactgtgggcttttctntaccaaaacagtaagtaggt

SEQ ID NO: 578207 - DNA, 257 bp, Homo sapiens
ttgtagctgctctgtgtcgatatatgatcgatcactacgtttgattagtatcttcaattgggggccccatcattttaacagaacatgttgactaaacagaccaactctaaaggaagttgacccattcttcaacactagctcactctggtgtcaccttggttatgataccctcctctacttctatgcctttgttagtgttgtcattctctgcgtcgaatgtgtctcttatctcctttttctgccgagtccgctgcatt

SEQ ID NO: 578208 - DNA, 201 bp, Homo sapiens
ggccagagagagaagatcggggggctgaaatccatctacttcctaccgctccgcccggtgttggtggaatgagcgtagcatgtagtcttgaagagaaagagctagtgcttttggcaaggactctttcagcccccaacctgtaaacatcacccttcaagtaaccaggctaattcccaaacagtgccttgctggctttgtgac

SEQ ID NO: 578209 - DNA, 439 bp, Homo sapiens
  misc_feature (10)..(10): n is a, c, g, or t
  misc_feature (77)..(77): n is a, c, g, or t
acaatccatntgtgcaatagtagtcctgaggtgaattacattctgagcttatgaagataacaggattaagagattanagtaaagataggcataagaaactataagagtgttaattgggaacgtgataaatgtccatgaaatcttcacaatttatgttcagagattgcagtaaagacaggcataagaaattataaaagtattaattttgggaagtgataaatatccatgaaatcttcacaatttatgttcttctgcctcagctctggccgatccctccattcagggtccctgacttcctgcaaaacaatcaatgccctcactttaacagtagatacttggcgaggctgtgcatggtgaggctgtgcatgcacctttcattgcaggtcagccactaacatgataagagcttatgtctatttttccacaatttcagttcttt

SEQ ID NO: 578210 - DNA, 265 bp, Homo sapiens
cggcctcactccatgtcacaatcacatattccgactgagtgatatgcaaatataaatatgcaattatattaaataattatactacattattatataaatccataacacgaggaatacatctgctctcattcattccttcatttatccactcccttcatttattccctcattatctcaggaaatagcttcctttgtggcaggtgctattccacgactctggcgatactaccgtaaaaacaacagaataaaatcacaaacactaaaa

SEQ ID NO: 578211 - DNA, 573 bp, Homo sapiens
tgtctcatccatctgtctgtgctcgtttgcatgtacccacagctgtctccaggcatcctagatgtaagcaatgcctctggttatccttatacagagatgtcacagttcgaccccttacattactttctgctttaacaggatatacaactataccaactatcccctgcagaagctttattcatgtagcagcagaataatgtaatatgtttgcacggacacagagttatcatactttggctgaccttatgcaacataccaaaagtgtcttgtaacttccacaaacttgaattacttacggaaaaatataatgacacacttggcaggcttcttcctactgacttgggctagcctggtggggtcgttagctaacagagctaccaaccgtgtataaaaagaagcacctacagagaacattagaacgagggtatgagatttctgccagtctcatttctttaagaacacagccatatatttatggggtagactgggcaacaatactactgtagggggaaatcaagtaggaaaatcacagttgatccttcattgagaagacttaggaagcaaaattcttaa

SEQ ID NO: 578212 - DNA, 663 bp, Homo sapiens
  misc_feature (331)..(331): n is a, c, g, or t
caagttttgaagatgcccggaccaacccaaactgaggaccacacaccgcagaagaagggcaaagggccggaccgagactgaagtgaggacacaaccgtgtgaaagcccagcccctggaccacactgactgaaaaagcacccccactgagcacctggcgaccccgactcctgaccgacagagaacaaacccccgtagacggcaaaatccccagacctacccaaaggctacaaaacggccccacccccatcacccacaccgactctctggacggacacgagccacctgcacccaggtgaaagaaacagccagggggctcacacaaagcccgcnggacggcctcttgacacggacgcgcatgaaaccaactattaaaccaaggataccagaccagtgccaagccaccagggcaaaatacggtacgctgcagggctagcataaaccccaagtgcgcactatctctgagacccatgtgtcggaatcacgttgagtgataggaagatgccatccaaatccaattagggactaatatatgatgaggacaactcagggctatagggccagtccccagaggacaaaacctagacgaggactttggaggacgacaggcacagggaccgtgcagacgggtagcgacctcagagggaggctgaaccggtccactg

SEQ ID NO: 578213 - DNA, 826 bp, Homo sapiens
cgtggcacggtaggctggtagtcccagtggaccgcacacaccatagcgccaggcggactccttgatgatcctatgggaggagactggcaggcatccacgtcatgtgtgctagcaggcctcgatcatcatcacgtcctctgttgtcgtagcagtagcacccattgatgttgccgatagaacaacagattacatcgcagtgatgtacaccagctcgtgacacgatgcagtatttccgaagcacttggcatcacatccgcgtcgtacggattttagatcatatgcacacccacaccacacacactgagctgtggttgagcgtcctcttactcacatgatgtctgcagcagtctgcctcatcatctatcatgattatgaccataagcaccctgaacctcgcttggacatacaccatgctacacgcagaagcactctgtgcgggcggtcggacgccatcgtccccagagaacactgggagcacttctctcacaatgagggcgctgcagactgtgagactacacagtctgcatctagtggcccctctgtagagggatctcggccacatgatttctgcgcacacgaacagatgacgctgacatacacgtcaaaagaagatttgacgggtctctgacattaaaagtcataatatctgtcatcggctgcgggcctcactgggaagcacagatagcgcactgggagctgaggcatgcccttcctgatctgccactggtgggcgataactgtgtgccttgggggcgccccaccacaaggacttgttttggtattgtgtgcttgtataaatctcccataaatgttaagccaatgtaaa

SEQ ID NO: 578214 - DNA, 340 bp, Homo sapiens
ccccccccccctttttttttttggggggacaccttggggccaaaggggtcccccccttttcggagtggggggggatttttttcccccccgggggggggtttttcccccccgggggccccctttttcaatggccccccccccccccggggggggaaaattgggggggggccccggggggggggggtttttcccccgggggccggaggggggtttgggggccccccgcggggggccctccggggtttcccccttttttcccccctttggcccccgcgggggggcccccttttttttttttgggggggttttttttttttttaggggtctccttcccccccca

SEQ ID NO: 578215 - DNA, 179 bp, Homo sapiens
  misc_feature (36)..(36): n is a, c, g, or t
  misc_feature (38)..(38): n is a, c, g, or t
  misc_feature (67)..(67): n is a, c, g, or t
cgactcctgaggatcccctgcccttctgtgtctgtntngatgatcactggtttaaagtctgttttgntggaaataagaataggagtccctgaaagagaggggagaaagcaggcaacttggaaatcatatttcagtatatcattcaccaaaactttttcagcttcacaagagaagccgac

SEQ ID NO: 578216 - DNA, 971 bp, Homo sapiens
ccataggacccccgtgactcaaagcaagctacctgaagagtcctaaaaatagctcacacgtcttagtgaacatgcagcgacatgaaatatgagagtacaggcgaactgtcgaccgtattcgtggttgtaacagcaggaaccgctaaaatattgaaagaacatttgtgacaatgtgtagtccaatttggtaccttgacgtaggtgccatcttaaaatccacactaagtctagattgaatatgttgaagtaccaatgattcgcaacagtatgtgatgagttgatctggggtagtatgtgaaactgaatacgatgggatgtatggatggaaaagactcatgagaagatatattaaggattagtccgattttgaaaggagtaggatagggcggcttgaattggctagaagattgtgaatgttaagcttaacttggtgtcatgtagaggtctgtcgataacccatatgcgtgtacattttcttagacacctagttagattgaagcatatgtttagattcgtattgaatgcccttgataagttcgtcgcaatggggttctcggtgatttcattacttcaagtagatcagaacttcgtagaccgactgaagtttgttttttgaagtacttgtttgtgttagcgtgtcgaagatagaaaagaccacttgttaagtactaagtcatgcattatggctgtgaaagttacctctgggatgagggttgaagtagtaaaggcactgtctgggactctgttgtcagtagtgtaatgtggtgatttgcaagtcctgtactgtgaccgacggtacgcggggatctataaatgggggcagggggtttgcaaagattttggttggacctcttttaggtaaaaaaggcgttgtggtcttgaagtttttgaggataaaacacaatagtagggacgctaactcaacgaaagaaacaaaaggggttaagaatttaaacatttttacagtagag

SEQ ID NO: 578217 - DNA, 102 bp, Homo sapiens
agcatgcactgcgcgtcgtttacactaacagctataaacatgcactgcgcgtcgtttaacacgtaacagctataaccatgcactggccgtcgtataacacgt

SEQ ID NO: 578218 - DNA, 720 bp, Homo sapiens
gatgatgagtaacgccatgagctgtcggagccggcgagagacttagaccgacggaaactggacactggaccggcagcgccatgagactcctccccttcgcttgctgctgcttctcttattcgtgttcccgtggcactgctcttgattccagagggcggcccagaggcttgattagcatgtggcgacgagagatcatgtacagaggatgatagaaacacgtagaagattccagtaaattgaggatgagagatgatgaagccgaggtatgaagaagggatgaacccacagaattggtagaagataaagaggcagacgatgtgtctggtgaacactgaagacttcacctgtaggtgcagactgctcgcctatactgctttgtgacaggcacgaccgatcttcccggcgaatatcgttgtggagttcctggtaggactttaccaacaagggtacagaagatttcttcgttgaatccttagatggcctcatttccgtatcctcaaggactaccaggtgcttatatacagaaatttcaccagttcttccttctgaaaaactgtaagtgcacccccagagagaggcaagtgtggagtactctttccatatcctgcaagagccactgggggacgaccattggttgggcatgaatctgacactaacgagatttgacggacatgtatcaagatggggctctatcacaaggtcaggtttgcgacgaggagg

SEQ ID NO: 578219 - DNA, 549 bp, Homo sapiens
  misc_feature (154)..(154): n is a, c, g, or t
aggtccctttctctctagcagtgctcctctctacttctgagatctgttcccagtggacctctactctctgcttcctgtatctggcagtcatttccaggagagcagagccatccagggcagttccataattttgtgcccatttcccactcatttntgacagaacctttcattttattgacaacacatgattgtttttactgttcctccctccagcttcaacaaaggtggagggggtgggtcaatattttatataggtatttacttagcattaactcttcaaactgtcatgttattttaaactttagtttcattttttaaaaatctatgacataccctaattggaggtgacaaaaaaaaaaaaatcatggataatccagaggatggaaggcattggggctagtggctctactccccaaggttttgtaaggatggaggttttaaaaaaaatgagtctatatctgtggatggaaggaaaaaataattttaaaaaatgataactctgtcctattctttcagggtcaaattccagaaaaatcatactttggaaaa

SEQ ID NO: 578220 - DNA, 347 bp, Homo sapiens
  misc_feature (30)..(30): n is a, c, g, or t
  misc_feature (44)..(44): n is a, c, g, or t
  misc_feature (200)..(200): n is a, c, g, or t
  misc_feature (207)..(207): n is a, c, g, or t
  misc_feature (210)..(210): n is a, c, g, or t
  misc_feature (214)..(214): n is a, c, g, or t
  misc_feature (270)..(270): n is a, c, g, or t
  misc_feature (275)..(275): n is a, c, g, or t
ggtccccctttgtttccagccaccctttgnttgggtttttgagntggtggccctggcccaaaggtttggcggaggcccaggcagcagccatggcggggtgtttttacaggggaaaggggggagcctcaccccttttcctgccctacctcctaataacacttcctgccccatttggacccgtaccatggggctcaggacanagggagntancagntggcctccatggccccacagcctcctttgaggttgtgttgggtgcagaaccgccanagccncccaaaaggtgttttttttttgctccctgaaccttttaacttaataaaacgttcccgccgaaaaaaaaaaaa

SEQ ID NO: 578221 - DNA, 114 bp, Homo sapiens
ggtgtagaggatccctaaagggagtccgggtagctgaggtgaggatccctgagtctgggaggtcgaggctgcagagagctgtgatttcaccactgtactccagcctgggagaca

SEQ ID NO: 578222 - DNA, 552 bp, Homo sapiens
  misc_feature (180)..(180): n is a, c, g, or t
gacggcgtcggtgatcaggagtgagtctggacacacacatatataacaagagagtggcataagagggcataaaacacttttaatgagattcaaatgtagctttccctggtatcatggaaataaagcacacaaggcaaataaagtaatgcgaactgatggtcagaataagctgtgtagccnatgcgaagtgaggttagaggtcagtgtgtctcaccttgcaggtgagtgatcgcgtgcaggaccttttgctctccgggtcctggactccacagtgcttgttcgggtcgaacaccctccctgtaaacaccagacggagagaaaaaaaaaaaccaggtcatcacggctgatttcagaattcggtcttcgggagtaccaggaagacttctttggccaatacttggtgaatgacaggagagaagggtcttacaaagtggtgttataggacctacagtagactgttgttcgactgaaacttcccaaatactcctgagaggttttccccctgagttaaacacttcaattgtccctgtaatcttccacatgtcatctcta

SEQ ID NO: 578223 - DNA, 513 bp, Homo sapiens
  misc_feature (49)..(49): n is a, c, g, or t
  misc_feature (58)..(58): n is a, c, g, or t
  misc_feature (86)..(86): n is a, c, g, or t
  misc_feature (94)..(94): n is a, c, g, or t
  misc_feature (139)..(139): n is a, c, g, or t
  misc_feature (168)..(168): n is a, c, g, or t
  misc_feature (487)..(487): n is a, c, g, or t
gaggcaggagttgagcccatccggccaacatggtgaacccccatctccncctaaatcnaaaaattgccgggacatggtggtccgtncctgcagncccagcctcttgggaggctgaggcaggggaatcggcttgaacccngggagatggagggtcccagtgagccgagntctcggcactgcactcccagccctggtgacaagcaagactcccatcctcaaaaaacaacaaaaaaagttacccttataatcccagcaattcccatcacctaggtatacagccaagagaaataaaaacgtgtttatacaaaaacctgtacacaaatattcactgcagcattattcacaacagtcaaaaagtagaaaataatccaagtgcccatcaactgatgaatggataaacaaaatatggtacatccatcaaactgagtattatccagccatgaaaaggagtattgatgcaagtcacaacgtggatgaactctgcacntgtaatctaagcatcagaagcagacc

SEQ ID NO: 578224 - DNA, 355 bp, Homo sapiens
  misc_feature (79)..(79): n is a, c, g, or t
  misc_feature (82)..(82): n is a, c, g, or t
  misc_feature (235)..(235): n is a, c, g, or t
  misc_feature (245)..(245): n is a, c, g, or t
cccaccgggagggggagggggggattttcccaccctcctccccccggggggaaagaaattcttcccccccccccccccnganggagggggataaaggggggggccccccccccccccccccgtattggtttaaggaaaaaggggggttcccccaggtgggggggcggggtccccccccccccaggggggtaacccccccccgcccccccaaagggggggggttaagggggggggncccccccccntccgccgcccccccccccgggtgaaaagaaaatttccccccccccccccctggggggggcccccccaaaacccccgcccccggggggaaaaaaggtttttttttttttta

SEQ ID NO: 578225 - DNA, 702 bp, Homo sapiens
tgaacctgggaggcggaggttgcagtgagccgagatcgtgccattgcactctagcctgggtgacaggagtgagactccatcgcaaaaaaaaaaaaaaaaaaaaaaaaaaaaaactgtgtgggggcgcgcgccggggcccccggaaaaggtttttaaacaccttcggcggtggggggggggggccccagagggggtaagagggaacacgtggggccaaagagcggggttcccagagaggagagaaccgcggggccaaggacaaagagggcgggggattctctcccccaaattaaaaaggccccgggggggcacacacggagagggttctgggagacaaaactcccgagagagggggtccgggggggccacatcggggggcctctttctcaaaggggggggtcccaagagggagaccccgaaaatctcccaacatattataggcgcccccggaggcggggggggggaccacagaggaagcaggacacgacagggcggacaacacggaagaaacaacacagaaaagagcacgtcaacagggaggggaggcagagggcaggacactcccaaaagcgccaacgaggccagcgacagcagaaagagggcgcccgacaaagacacgcccgaccggcaaaacaaaaccagacgggacaaaggacgaccggcgaagaaacagcagaccggagaacaaaccacgaacccagg

SEQ ID NO: 578226 - DNA, 976 bp, Homo sapiens
acaggtggttgttacatgcggtattttgctccagggaatttacttgcggctgcctcgatcccctgggtgcgcgcccaaaaacaagaagtggtgtaaaatcatgaggacatttctctccgtgttccgataattcgcgatgttgttgtggccgcctcccaattgctcgaaggtgtagtaaccagccgtgcttcccggtggttcaccctttcggggcgcggctttggtggacgagcaccttgccgcccggtggccccaaattgcgcctcttattcatggggggcgccccctagttcggccccacactttggaggtgcggacaaccaatttttctctggaattagtcctggccgcaaaagaacactttctttattctgaccgcaccctatccaccgtccttgaaaatcgtgtgcgcaccaaaacaacccccggttctccccccctgataatcccggttgacctaaacatgctccaacaacaacctatgcctgcttccagaacctataaattgggctctcccctggcaagggcaaacataaccgccccccggttggcaacatcttgttttacactcgctcctcctcctatctataccccctttatacactcgctccttttataataaagatctcttcctaaccccccttgtttctcctctccacgagccacgacctgcaatattattactacccatcggaaaccacactgtgatgtcttccaaatattattatcttgttaacagtcccatagcattcaatactttttctccataaaccactcacgactatccacttcatgttattagtccacagcatatatcagcgagccacgcgtcgttttttccgcgggtcggacccttctgccttcccaacgtccccttcttcttttttatcacatttctctagaaaccacacgtggggtttcttaaaaaaaaaattttgggaacccccacaaaacaaaaaaaacagaacattaaaaa

SEQ ID NO: 578227 - DNA, 133 bp, Homo sapiens
tgtgatatatgtcgtgttgttgatgagtatatttggaccgtgtggtgatcaatatagtggggaaaatagaatgatcagtactgcggcgggtaggcctatggattgtgggtggcaatgtaatgaagcgaacagt

SEQ ID NO: 578228 - DNA, 1421 bp, Homo sapiens
gaaattggtcgtttgtctttctaattctctccacggtcagttccagatggtgccggcctgcatcgctgctgagtgtcgtccctggaacgcctctgacattctatgccttaagacgtgtctcctttccattctcccgacctgtgctggtgacgcaggcgatggatatgctcgctttcccgttgcaccgatgttttctgctgtcgctgccgtagtggtccaggcgcgctcgcgatcctcatatggaggttagctctgggaagcgtcccatgccatagggtagctcgtcgaatcgaagcagagagcccatagccctgggcgaatcattttatgacttccccaaggctgcgttagtacatattcatttgtctagcatgccacctggaaacgtaccgatctcccaacccgatgtgtgcctatgtagggattggcaacggatccaactcgcgtggcaggggtactggaaagggtgcatttcggcatcgatttctttcaccgcaagacataggcgtagccctggcgtaagactgggtctcgaatagggagccgtttggataccacattctaggcgattgttcattgttctcgaaatatatatcatcctcaaaaagattgggcaggcactggtcgagctttggaccacagattgacttcgagtttaacaaggtttgaaaagaggcctcggaagaggcacttaagcgggccagagggagtacccctgtgtggcgccgccattggattagtcttccggtggcgtctgacccagaattacaacgagggcgagaggtacacaaaggtctcttctaaagaaaccttattgggacacacttcggacaaggtttcggaatcggggaaccttgttaccggtacttggttggggaaagccaaagggtctttgggagcccatttgtgcgcgagggaaaagcaacgggaaggttaaccgaagcctgggtaagactcagggttgaaatacggaattgcttccctattgccttggggttcgccaccactttggttggacctccggttcagttgattagccccgggatggcagttactttgccttagccaccaaatccagtctaggtccgcagaaagtgggaactctagggtggcaggtatataactttttccccctttgtctgtaacaaacagacgagagaaaccaggggagtcttggcaacatcttggtgttccccctgtggcgaaggggggtggggacaagtcaagcacccttgtggggaacaccacggggcagagaacaaattctgcaatcacatttgaagttccccactgagataacgatagagcgtttaggagtggtatcacggacattataatagggaacgcggcagcgcgagagcgcctctgggtgttatataccgcgatatacgaacacggaagtgcaacagtatgtcaaaatg

SEQ ID NO: 578229 - DNA, 369 bp, Homo sapiens
tcggctttttatatacagaaggcatcatatctagtgcaagcgacgtcaaagagatcatcttgcatcagtgcaaccaggccgaggttatattgagtgaggacgttcaagtgcgagatgatgcctttgacaggcatagctttgtcgcgttcagctgcggagtctgcggcaaaagatccatcgaagcagtgctagacgtgatggccagatcgatcacccaagcacaatcaagatcagattaccaaggcctacctacaatttgggacaaaatcgatgagtgcttctttttagatctgcccgagagattgagagcaaaacaagcaaattttgactcgacaggcggtatacacgcagcggtatatttgatccgga

SEQ ID NO: 578230 - DNA, 334 bp, Homo sapiens
  misc_feature (54)..(54): n is a, c, g, or t
  misc_feature (58)..(58): n is a, c, g, or t
  misc_feature (60)..(60): n is a, c, g, or t
  misc_feature (98)..(98): n is a, c, g, or t
  misc_feature (158)..(158): n is a, c, g, or t
  misc_feature (164)..(164): n is a, c, g, or t
  misc_feature (282)..(282): n is a, c, g, or t
gatttcaagaagtccttggattatcctcgtttgggcgattcggtgcatggccanagtntnaatgccttccagagctgcagctggaggagtccagaggnctaccagaaggaccagttcttacagctccctttctctgtcagtggggacgcatcagcaantggaancattaatgaactaattcgttttgaccacatatataccaagccctagtcttagagataccctctgagacagagagccaagctaatgtggtagtgaaaatccgaggaatcacctctcaanccctcagagaatgatcacccctgaattcattgtctcaagtgaaggaagaacc

SEQ ID NO: 578231 - DNA, 316 bp, Homo sapiens
agccccccttttttaggatgggcccctgtagatcattaaagttcccccttgagagggtgagccggagccaggattggggagagcccttgtttttgggcagccctggggcatggggttgtgggaaaaaggagggggccccggcccagggcagggggcagaggcccgggccctgatttgggcttcccagagatctcccccccttagttaaggggaggggggggggaattccccaggggggccaggggcccgggatttttaaccccttttacaagggtaacgggtcagaacggtttttgggaacaaaccccgggtttta

SEQ ID NO: 578232 - DNA, 115 bp, Homo sapiens
actactattatgattgggggttggctactgactcgtacgctaataatcggagctcccgatatggcctttccacgtataaacaacataagtttctgactacttccctcgttaagct

SEQ ID NO: 578233 - DNA, 173 bp, Homo sapiens
tgaatcttgctcccaaagctccacctcactttctatttggcgtctttacgtggggtcttgatatcttttataatgctggaaatttctctctccttttcctttcacataaattagtcagtgggtatataatactaccccctttatttttttttggtctttttttggctatttcg

SEQ ID NO: 578234 - DNA, 728 bp, Homo sapiens
tggcttcactgtgtagggcgctgggcccctagtttctggagctgggaagttgggcggcgggctccgtccctgtccttcagcttccagcgttcctgggtttccttcggcggcgtggggcctcgccaaggactcgccggccctgtggggccacggctttagtggcgccttttgcgagttcacataaatacatcttaaaaccttcaagatggttctagcagatcttggaagaaaaataacatcagcattacgctcattgagcaatgccaccattatcaatgaagaggtattaaatgctatgctgaaagaagtatgtacagcattattggaagcagatgttaatattaaactagtgaagcaactcagagaaaatgttaagtctgcaattgatcttgaagagatggcatctggactgaacaaaagaaaaatgattcagcatgctgtatttaaagaacttgtaaagcttgtagaccctggagttaaagcgtggacaccgactaagggaaagcaaaatgtgatcatgttgttggattgcaagggagtggtaaaacgacaacatgttcaaagttagcatattattaccagaggaaaggttggaagacctgtttgatatgtgcagatacattcagagcaggagcctttgaacagtaaaaagaatggcacaaagaagaattcgttctatggcagtatactggaaaggcatccggcatcatggtctgaggagtggggaa

SEQ ID NO: 578235 - DNA, 121 bp, Homo sapiens
ttggcgtgtgtgtgatcagaggacatcgacagtatttgacgaaatacgaagtggcagatttacactacattgtccacgggaatgagcgtgtcagcgggtaaagaacgtctaagataggttc

SEQ ID NO: 578236 - DNA, 707 bp, Homo sapiens
gctaaaccatggtactgactgtttctgcgaagtcgggcctatgaaagcatgggccgtggagactgtattgactccttcaaaagaaaatacatctctgctggagcgtggcggcgggtctttgtaggcccccaaatagctcactgtctttctcagtctatgaagcgaggatatctctctctgcattttttttaaactaatactctattttaaataaagatgggggcttactatgctgaccaggctggtctcacactactgggctccctgcaccatgctgtctatgttgtttatttctgccctatatatacaagtctctgtcactgcgtcatcatatgcatgtaccaagcgtgactgtcctatgttattccaaggatgccctctctggcactctgtctctgcctgcgatgaggagctattagtcaacaatgcctcactgtggtgtcacacattcgtattagacctgtgagtagcgaccagggcctgcgaagcagacagctgcgcgatgaaggcgtgagctgagagcactacaggcttcgactatacaatgacaggtacaccggcagcagctacctgagcctgacggctgggcagcgagagactcgaagaagatacagatgcgggttcctccagatcggcacaccaagctgaggccgtgcacctcacaggatgataggttttgaagctttatgcccgtcgccagacttgcg

SEQ ID NO: 578237 - DNA, 533 bp, Homo sapiens
ctcctgtcgatcagcgtctccaagaacttactgcctcactgttcgtgtatctgagtggtcggtcctcttcggtgcctgtcggtctcttagatctcgtcttacatacttacatcacgccggtcatccctctgacggcgacggtcatccctatccctatcgtcccggcgacttgagtctctccagcttgaagattcctcaactggtcctcttctccagccaccttcatccctaggtcttctgaagcgatcctctcgatccacatctctctctctgtccctttctctctcagggtccttgtcattctcctcccgatcttgattatctctgtccctttctttttctctgtcccattcacgttcttctgatggccttgattctcgaggtggaccccagctctcctctctggctttttctttctctctccatccacctggcttgactaatggtctccaaggaccaggtcttgagtcatcaccccgtctgggaaaccgatcatcatcagcacgtcttgaaaggcgatcatcatccatgtc

SEQ ID NO: 578238 - DNA, 589 bp, Homo sapiens
ttcccaggagtcgggaccccaggtaaatggcttgggtgttctgaatggtattggctctaagcccgttccactggggaagtgtaccttttcgctaggacgatgatgccgtggacctcgactaaggtgtacggtttagcaggatattattctgggagaccctaatgtgtgtagatgtccagttctgagggagtccatccttggatgccaagggatgctaattggctctatctaggactctgcttgagaaagatgggagggatatgcctagatcccagtgggcgcatccggtccgtgctgcatgcagatgagatgtgagtctggaacagaccttcctggcccacttcctgatcacaaggaatcctgggcttccgtatggctattgcttcccatctgggattcctaacttaggtgtctgccctcaggggtccatatcacttcaggacaccccaagagatgtcctttagtctctgcctgaggcatagtctgcaatttgatattgaaatatatagagaagggtaaccatcaataatacatatcatgattaatgtaatcttgttgaattttatatacctcattagggtaatcaggg

SEQ ID NO: 578239 - DNA, 186 bp, Homo sapiens
taggtgatctctagcaggatccccacttgcgcttactttgtagcctacatcaccgttttgctgaacgatgtcggtctctaggctgagcaagatgcgtggtgacggttgatccgcgggatttatcgacttacagaacaggctcctctagagtgggtatgaagcaccgccttaggagcctcatgtgta

SEQ ID NO: 578240 - DNA, 127 bp, Homo sapiens
ccttggtcaagtgtaacagcggtgaacctggtgctcctggcagcaaatggagacactggtgctaagggagagcctggccctgttggtgttcaatggaccccctggccctgctggagaggaaggaaag

SEQ ID NO: 578241 - DNA, 840 bp, Homo sapiens
taaaggcccattgaaattttgggtttacaaaaaggaaaaaagggggtataaaaaaaaaaatggggggaaaaaaaaaaagggatgaattgtgccaaatgggggaaaaggggtttaggggttgcccttctattaagtgttaaaaaggagaggaattatttggacggggataggaatcaaaaaatgttgatggttgttaaggggcgcaaaattatttcatcgatgggtggtgtgaggagattatttggagacgaatggggatatatttgagcacaagataaagaagagattggatataataagggagaaaagggacgccctcccacatttgtgtaacgagcgaggtcatcgaaacatttgtgttgtagcgagcacagacataaggacaaaaaacacacctccgcgcgcgcgcccatgtactgaggtgcgcgcgagggcgcgtgtgccaaccagaggaggtgtgggcacacagcagctaacagaggcggggtggggggcccccccaaaaagaagcgtccgtcgccgacacacacaattctcgtcgtacccacccacctctacatcgcggcgcaacaaagcaagcgcaactacaaaacaatatacccgcccgacgagagggcgccacatagacagcgttgtatcataccagcggggggtatcagggcggctatcccacgcgcaacaggcagcgaggagtacacccatgggggggcagtataagaccccccccgttgcgggccaaaccacgtgcagggggctaacgagcatcaggagggccgcacacaaacgtagcggccaacaaagagcagactatggtacaccacaacctgcttagtgcgcgtt

SEQ ID NO: 578242 - DNA, 463 bp, Homo sapiens
ttctggctcggtaccctcattccgtcctcgctcttgcctccaagtgactgactatccatcctccacaccaggggcctgggtgggccgcactaccggtggcttctggctctgagtccctgtctgccactgccctggcctttgggctgtgactgggtgggtcactcacctcccccagtcgcttccttttattaaacaatacgttgttgtatatttggggtttttgtttgctttaagattttatttcaggggggcagggtggggagcagagggaaagggacaagcagactccatgctgagcgcagagccccatgcaaggcttgatcccatgaccctgagatcatggcctgagctgaaatcaagagtcagatgattaaccgacagagccacccaggcgccccccagtctcttcttccttcatctgttggatgaagataactccactttcatcatcacatttaagggg

SEQ ID NO: 578243 - DNA, 880 bp, Homo sapiens
  misc_feature (72)..(72): n is a, c, g, or t
  misc_feature (78)..(78): n is a, c, g, or t
  misc_feature (169)..(169): n is a, c, g, or t
  misc_feature (221)..(221): n is a, c, g, or t
  misc_feature (223)..(223): n is a, c, g, or t
  misc_feature (366)..(366): n is a, c, g, or t
  misc_feature (413)..(413): n is a, c, g, or t
  misc_feature (586)..(586): n is a, c, g, or t
  misc_feature (693)..(693): n is a, c, g, or t
  misc_feature (697)..(697): n is a, c, g, or t
  misc_feature (701)..(701): n is a, c, g, or t
  misc_feature (708)..(708): n is a, c, g, or t
  misc_feature (730)..(730): n is a, c, g, or t
  misc_feature (732)..(732): n is a, c, g, or t
  misc_feature (775)..(775): n is a, c, g, or t
  misc_feature (789)..(789): n is a, c, g, or t
  misc_feature (810)..(810): n is a, c, g, or t
  misc_feature (820)..(820): n is a, c, g, or t
  misc_feature (824)..(824): n is a, c, g, or t
  misc_feature (856)..(856): n is a, c, g, or t
tatatttaatataatatgtgtgattgtggttacagatacatatttggtgctttatttatccagaagcatgantaaaanagtacataaagtattgaatacaaaattctaaagataaacacaatttttcttgaatttaaaatatatgggataaatgcttacaaatggattnataaacctttcacttctacttcattctcctggctgtttttcccgaagatgantngctagtggcaacattaaaaaaaaatagctccttcaaatcctgaaactatatgaaaaaaaaagaacttttggcaaatatttattcagattgcttgtttccagtggcaaatttctcagcattcctctttgttttgtctatccctnagcctgtccatttttctagaaaggaagtaaaatgctttaaatgtatnaattattacattattgaagtgggacccaaaaatgtgaaatatttcctctggcaaagggagaagaggaagggaggaacaggggcaagggggggaggaaaaaaatacctaaggtgaaaaaacaagtaactggcaagaggctaataaaactgtatataaatgttgaagaggctganttgtagtttctctaccagaaaaataataagaggtattattaaaacgtgagtggagaataatattccaaatgtgtgtggtggtcgtggtggtggcggtggcctgtaantctntccngtgagtntccattcaaagccaggagtctntnctcagtcggaagagttgacctctttagtcttgggatgtgtaantcatgccgggaaancctttctttaaatagtcattnccctcgtttncctnaaaacctatttggtgaaaagtgtttctaacanaaacagtagccgccaaattgttat

SEQ ID NO: 578244 - DNA, 346 bp, Homo sapiens
tcttaaataacgttaattttaatatattgtgttaatttacagaatacgttaatcatttggagcacaatgtgtttaaaatatatatatattggcagatatatccgtgacttttgcctccatataaagtgagtatcagaccgaaaaatcccatattggttaggctctattagcaacctaaaacagtagggctagtgggcaaacctaaacgcatcacctagcagaattatcctcaatatatgcgtgactgactttcccccctttttataaaaacccatcagatttgttgttgtgtttgttttggaccagctattccgtatcaacaaattacagaacttcaagtcgacgc

SEQ ID NO: 578245 - DNA, 231 bp, Homo sapiens
cacgagggatgttttaaacacaccgatcttcgcacacacgttaacatgcaccgggatcagccatttacaccacctcactcacagcccagctttgacagtcaaagctccattacacacgacttcgcatggtttcaatctacagaacatatttctggccagaccagactatctatcataaatcgacatctcagggattttacagcacactcttgtctctttcgcccgagctga

SEQ ID NO: 578246 - DNA, 478 bp, Homo sapiens
ttagaggatctgagttagggtaccaggtatgggagatggatgaacaaaaataagtctgccttatgagctgaactaggtcgagagaaagataacaagtgaaataagtgaactatctaggtgtgttagatttttgagagtgttaaggagaaaacgtaaagccaggaaagggtgtgggcagcaggtgttcatgtctagaaagctcagcgtctgtcaacacgttgggtggtatccatgcctatcaggccctgggggctccagggtggagatggtcctcctcccttttccagactttcttgccccgtgggtcacatcctctttttgttctctgaactcctcaacaaggcataatcaccatgcaaacacccggggacaataatacggggggccactaaccccaatcttgaacttcagcaattcccatcacggtgctccaagccggccctgcagcagtacaggcaagacccaagaactaggtggc

SEQ ID NO: 578247 - DNA, 434 bp, Homo sapiens
tgctgctgactactttgtagaaatgtgaaacctcactatgaatgaatgtctattaatttcaaagatattgtatagatactgtccaaacagtgagggtatagaagaacattaatctctgacatacagacgggtgtgcagaactcgggccgatggttcagaggcgcctaacacatgatataaataggtaggtcactaaacaaatctgaataactggagagacctgaggtcataccaactatcttctctaagtccacagttgtactatgaaactaaacaccaataacagacggcaaggaagacaaatccacacatgtggaactccctaaacttactctatacccaaacaatgggtcaaagaccctaaaaaagaaatcatattaatatgtccggagacaagggggaaaacacaaggaggagccccacgtggggggagg

SEQ ID NO: 578248 - DNA, 100 bp, Homo sapiens
tcataccatgagtacagccaatatacatccctatctacatagactagatatcgaggagcatggagcagtaccacatccttctgtaaaagctctagggaac

SEQ ID NO: 578249 - DNA, 798 bp, Homo sapiens
tctggtagcaatgaaaattttaatatttgattaaaaatcacgtaagcatgaggttgtgggggaacacggaaaggaagggctcaaattagggggtgtagcacatttatcaggaggtaaaatctccatagtctcctacccctccgggccgggccttttactgtggtatccagcctcgtgggaagaccttgtatggacagtatctccacgggggctatcactaggtgaccaggtaggggacagagtagagcagccaatgaccttaactcaaaatcttttctctcccttcaacctgtgaaaaaagatgacggggcactatactcagattgtccccgtggcatagccacatcttgtgggccagtcacaaacaccagctctagttaagagggccgtggtttaaagatttcataaaccagttttctccatgtcccgttggttcccgtggagtcagtgatgtcggcatttgggaactgcgacctggctggagctgggattgggcccacattcaatcaatgcttctcccggtggtttcagagaaaactttcccataattaagcagctcaacgtgttcagcgatggacgccaggaataagctcctgtggcggccgtgggagctcacttagatgaaatatccctctttctcgctgcccttggccagtcactctccatctggacgatggcactgggctcccttcttgtaggctcatagggtgccgtagctgcctttgtccttgttcccggtaacgaagtctccgaatccgaccgtaagcggtgcggaagacacggggtcttcccaccgca

SEQ ID NO: 578250 - DNA, 259 bp, Homo sapiens
  misc_feature (79)..(79): n is a, c, g, or t
  misc_feature (88)..(88): n is a, c, g, or t
  misc_feature (99)..(99): n is a, c, g, or t
  misc_feature (139)..(139): n is a, c, g, or t
  misc_feature (148)..(148): n is a, c, g, or t
  misc_feature (204)..(204): n is a, c, g, or t
  misc_feature (236)..(236): n is a, c, g, or t
gcaacaagctctgcattccctggtgtgttgaacataactagctcctactccaggcaccaaatttggcgcagtagttacnctgcccagnagtgccactgnagtaactaccagtagtgccacccacagtgctggcagtgcngctggaagntgattgaactctgggaagtctgtggagcccatggattgggtagtggatctctattntctgtacgggaaaggttgactaccttcaccanaggatgtaattgctcaccaagga

SEQ ID NO: 578251 - DNA, 566 bp, Homo sapiens
  misc_feature (42)..(42): n is a, c, g, or t
ttctatctcctcaatggagaatccgccttcttggaaagaaanaaaaggggtccgggttgtccaatggtgggggaacaaaaaggaactggcccccgttcggcctatttggagtcatgcaccaaacatgatcaagggggttaccctggggttccgttacaaaatgggggtgggggatgctcccttccccccccacggtgttatccaggagaaggggttttttgttgaaatcccaaattttttgggggaaaaaaacacccgcaggggtgggatgagacccggggttggttgttcagtttttcaagccccgaaagatgaatttatccttgaagggaaaggcattggggtggttttaaattcagggggtttgattcagccagccccccccgtttaaaaccggggaatccgggaatttttgggggggatttatgtttttgaaaaagggaccggttccggcggggggtgaataagatttaagggtttccggggtccagaaaaaagaggcccgagggccctttagccccccttggggttttttaatgaggccaaaaaagcccctttgttttgga

SEQ ID NO: 578252 - DNA, 754 bp, Homo sapiens
ttacccggccggaattacgggatatcgacaagttagcttctagctctacgggaccatgcctctcaaggtgtgtggaagaccgagcggacctgtcctggtacacagatgactttcctgagaagctgaagagcttgcgccaacatatggcagcttatgaaacgtgtcattaggtggaggtctgaatgtgaggctgggacagagggagagaacaagggcctcccaggactctgatgtcagagtagtagtgttaagggtggaaggttgacctagttggatcttggcatgcacccacctaagccacttactcaagaacaagaacctagaatgaatatccaagcacctcgagctatgcgaaactctgttcttgtattcgcttatgatctctgatgggttcgttctcgaaaatgccaagtggaagactttgtggagatgctccagatttaaatccagctgaggctccctttgtaggtcagtaccatgtaacaatctggaaggaaacttcagcggcacaggaagactgctggagacgagaagcgtgttacgcccatcttgagtgtctggggaatcatgtaaatgggtacccagactcacttttagttatttacatcaatgagttctttgcagggaaccagaccagaattcggtgcaaaagccaaacatcttgggtgggatttcgataaatgcctgggacctgcagtgctgggattgtgaccagggaaagacgccgcagccgtggaacagatctgtcaagtca

SEQ ID NO: 578253 - DNA, 271 bp, Homo sapiens
tcacgcccatgtcacaagtatctgaagagaggcagtggatctttcattctctcttttttttaattgagatggagtttcgctcttgtagcccaggctggagtgcgatggcgccatctcggctcactgcaacctccgcctcccgggttcaagcgattctcctgcctcagcctcctgagtagctgagattataggtactaattttaaaattagccaggcatggtatcacacacctgtagtccaagctcctcgggaggctgaagcaggaggatcg

SEQ ID NO: 578254 - DNA, 648 bp, Homo sapiens
agggcgtacctgtttcttatggttgagactgcaggggtgaaataaactccagtctcccatagcgctccaaggcttattaggaagaggaaattcctgcttaataaattttggtcagaccggttgatctcaaaaccctgtctcctgataagatgttatcaatgacaatggtgcccgaaacttcattagcaattttaatttcgcctgggtcctgtggtcctgtgatctcgccctgcctccacttgccttgtgatattctattaccctgttaagtacttgatgtctgtcacccacacctatttgcacactccctccccttttgaaaatccctaataaaaacttgctggtttttgtggcttgtggggcatcacagatcctaccaacgtgtgatgtctcccccagatgcccagctttaaaatttctctcttttgtacactgtccctttatttctcaagccagccgacacttaggaaaatagaaaagaacctacgtgattatcggggcaggtcccccagtaagagtgagaccttgtctcaaaaacaaacagacaataattatgtttacactatactgtagtctattaagtgtgcaatagcattatgtataaaataacaatgtatataccttaattttaaaaatactttattgcta

SEQ ID NO: 578255 - DNA, 216 bp, Homo sapiens
  misc_feature (22)..(22): n is a, c, g, or t
  misc_feature (133)..(133): n is a, c, g, or t
  misc_feature (145)..(145): n is a, c, g, or t
caccacccgggatggcaggtangatggggaggaacaaagagagggagatattgagagagaggaagacgaggaagaaggcaacagaagcagaaaaagcagggactcaaggacgccaggttaaacgggctgcccnctacactcaagnggcagcaacgaaaccccctctgccgtgtgccccacgaacaagtccagaacacccaacgcaggactggggct

SEQ ID NO: 578256 - DNA, 538 bp, Homo sapiens
  misc_feature (256)..(256): n is a, c, g, or t
tggggacagggagtctcgctcggtcacccaggcgggagtgcaagggcccaatctcggttcacggtaatctcggcccccggggttcaagcgattcttccgcctcagcctcctggaggggctgggagattacagggtgcacaccacacacatctcagctggatttgggtatttttgggtaagagacggggtttcaccattatggaccagggctgggactcctggatctcaagatgatctggcccggcctacagcctcnccaaaggtggcggggattacgaggcggtgagccaccgagtacagcccttggtttaattttctaaggctctggctcggtcacccaggctagagtgcaggggcacagtcatagctcacggcagccttgaactcgggggctcaggtgatcctcccaggtcagcctctggagtagctgggactatgggctggtgccaccaaacccagctaaattttttaagtttaagtagagacgggtcttcaccaggtgggccatgcgggtctcaaatttctgacctcaagcaat

SEQ ID NO: 578257 - DNA, 636 bp, Homo sapiens
caaatggcatcttttcagtcttttttgtttgtttttttgagacaggtctcactctgtcgcccaggccggagtgcagtgatgcaacctcagctcaccacaacctctgcctcccaggctcaagtgattctcctgcctcagcctcccaagtagctgggattacagttgcacatcactactgcctaattttttttttgtatttttagtagagatggggtttcaccatgttggccaggctggtcttgaactcctgacctcaaatgatccactagcctcggcctcccaaagtgctgggattacaggcgtgagccactgtgcctggcctcatattttatttttaataaaaataataattctatctctctgcttaagtgtcttttaaaaatgtcacaaaaatcctaaaaaagatgattcataaaatagttagttgatacctctcttttgacagtgtatttctacctcatttgactgtttcttgtggatttgccttattttttcgatgagaccagaaattcccaaacatctgttttcttgcattgtcacaacagtgggaaataactccttcatattattaggtcctttaaaatggaggctcttagtttttaaaaatctttgtagcacctaatgcgcacagaggtc

SEQ ID NO: 578258 - DNA, 102 bp, Homo sapiens
ccccctcccttgtcagcagcatggtggtgggtgtctttcatcctggcatctctctgtgcacagcagcagcatttgtggccataattggcctaaattcatgaa

SEQ ID NO: 578259 - DNA, 170 bp, Homo sapiens
agatcatcattttaacttgtattcaactgagggaggtaacatgatatcctgggtgctggtggattgagactcaagcatcaattcaaaatttctgtggaaaatatgcactatttttttttttcccactctggctaaagtttagggcttgaaaggcaatttttttaggttgt

SEQ ID NO: 578260 - DNA, 454 bp, Homo sapiens
  misc_feature (15)..(15): n is a, c, g, or t
  misc_feature (20)..(20): n is a, c, g, or t
  misc_feature (56)..(56): n is a, c, g, or t
  misc_feature (61)..(61): n is a, c, g, or t
  misc_feature (254)..(254): n is a, c, g, or t
  misc_feature (257)..(257): n is a, c, g, or t
  misc_feature (343)..(343): n is a, c, g, or t
  misc_feature (345)..(345): n is a, c, g, or t
  misc_feature (405)..(405): n is a, c, g, or t
ctggaaaaaaagaangcatnaaatcccaacctgaacactgctgttcctcttttcgnccccnagctcgtgccttggccgaaagccggcgtcctccttgatctctcccgttcgtcggccgcatcctatgactggtatcaggccaaacagcctgccgctgactatgatgccgacccaagatccgggtgtgaaatccagtacgcaacatttacgaatactacaaacagcaccgttatcagacggtgatcatgggagcncanttccgcaaggtagagcagatcctggcattggccggttgcgatcgtctgaccattgcaccgaatctgctggaacaacttaagcacangnaccagccggtcgaacgtaactgacgccatccactgaagccttccaccaacctgccccgcntgctgaagccgaattccgctggcagcataaccaagacgcgatggcggtt

SEQ ID NO: 578261 - DNA, 521 bp, Homo sapiens
taatgtcagtactgtggtgggtgagtgagccccattgtgttgtggtaaatatgtagagggagtatagggctgagactagtatgttgagtcctgtcagtaggagagtgatatttgatcaggagaacgtggttactagcacagagagttctcccagtaggttcatagtggggggtacacggcgacggttacgcgacggcttgctacgacacgtcactcaaacacgctacttacgtgggaacgtcgacgtttgaccgtccttgacacgacggattactgactgcgacctgtgacgtgcgttcgtagtttgacgtttgctacggcagacatacgtaatgacggatgtacagtccgtgggccgacttatgacaatgacctgcgccggtgaacgcttcagggggtttggatgacaactggctgttactaccagggctactgtggctgacttgacacgagtatgcacatgagcgatttaagggtctgtttgtcgtaggcagactggagcttgtactaattatgcctcc

SEQ ID NO: 578262 - DNA, 178 bp, Homo sapiens
ctcccctttactgcaggcaatcccctttgttggccatcccaacgctgccaaatggatagacctcacctttcatatcgccctcctccacaatctcaatacattcctatggtactcacgtctgtgtttggatcaacacctcctcagtggggcgacattacatttgccacgcgtaacatgg

SEQ ID NO: 578263 - DNA, 113 bp, Homo sapiens
aagtcggtacctaatatcatctgctgcagaataatctacggtctttatttactaatatctattttcttggtacccagttttttaccctctgtgcctttagtagctttaagtgt

SEQ ID NO: 578264 - DNA, 363 bp, Homo sapiens
tttttcccccaactttccccccccccccaattttaaattggaattttggttccccttgacggcccccctgggtttgggccccccccctttttttgggggggtttccctagaaaaccaatcctttggccccttataggtttcctgggatttggtttggtccccccctgggcagagaaccgcgttttaagggggggtttccccgggagccccccccccccgggggggggggggaaaaattaatcccgtggggttgggaagcctttttacccggggggtctttgccttctttttttaaccggggggtgggttttttttttttcccccctcccctggtttttttttaatttttttcccaaaagggga

SEQ ID NO: 578265 - DNA, 530 bp, Homo sapiens
gtctgacagtgttcttaaaactggtagtcttttactaggactcataatgatagtcctcaagccgagaccttgagcttgcagctacgtacttatctcttgattaaaagaaaaaaagttggcttatttattttgacaccatttaagtgccttttgccatatgggcttcttcaggaatttgaagtccaatttgagttttattgaggtaaaatatttatatacataaaacgtgacgcaggcttacccattttgaaactatgcaatctcagggggacttaagatacattctcgtggttgtccagaccatcaccagtcatccatctgccagaaagttgttccatcttcccaaattctgggtcccatggaaactgataatttcccgctactgcccgcttgcccctaacaagagccatacttttggtctcgtatcatcaagttcactactcatatactcgtgtaagtgggatgatacaggtatttgtcctttggtgactggtttcacttagtcataaagtctttaagatgcatccatg

SEQ ID NO: 578266 - DNA, 371 bp, Homo sapiens
  misc_feature (13)..(13): n is a, c, g, or t
  misc_feature (132)..(132): n is a, c, g, or t
  misc_feature (137)..(137): n is a, c, g, or t
  misc_feature (160)..(160): n is a, c, g, or t
  misc_feature (177)..(177): n is a, c, g, or t
  misc_feature (255)..(255): n is a, c, g, or t
  misc_feature (319)..(319): n is a, c, g, or t
acaagaccagggncacacagtaaggaccttacttgacaagggtcaaagatcttgcaggcgtttgctgaggacttcaggaacagttctttcgggacagggccaggggcttcccttcttccattcgcggggtgnctggncgagggtgctgtctggggagggnctcaggtgtggtggggntcctccactcttcttacattcctttatttttacaaccaagtcacagcatgtgtaatctcctaggagagaagatttagnaatcccatttagagggcaccaagtgattttcacgtggctcctcaataccattggacacagaggncaattttaaaaataaccgccatggactttttattgggcctctttaagttacc

SEQ ID NO: 578267 - DNA, 259 bp, Homo sapiens
ccagcggggccaacctgcgggactcaccctcctacccggacagcagccctgaggggcccagtgaggccctgcgctcagcaggcgtagcgagcgacgcacagaggtaacgcacggaagatacacagagcacgcgaaaggagacgaagataacacaaagagaccaagacgacacgggagaaagcggcgaacaacacgggagagcgaaacgacaagaagataaagcaaaggagtaagaaaatagaagaggaagggcggaaaa

SEQ ID NO: 578268 - DNA, 941 bp, Homo sapiens
  misc_feature (1)..(1): n is a, c, g, or t
  misc_feature (89)..(90): n is a, c, g, or t
  misc_feature (155)..(155): n is a, c, g, or t
  misc_feature (306)..(306): n is a, c, g, or t
  misc_feature (309)..(309): n is a, c, g, or t
  misc_feature (359)..(359): n is a, c, g, or t
  misc_feature (385)..(385): n is a, c, g, or t
  misc_feature (388)..(388): n is a, c, g, or t
  misc_feature (424)..(424): n is a, c, g, or t
  misc_feature (445)..(446): n is a, c, g, or t
  misc_feature (455)..(455): n is a, c, g, or t
  misc_feature (463)..(463): n is a, c, g, or t
  misc_feature (470)..(470): n is a, c, g, or t
  misc_feature (472)..(473): n is a, c, g, or t
  misc_feature (476)..(476): n is a, c, g, or t
  misc_feature (481)..(481): n is a, c, g, or t
  misc_feature (484)..(484): n is a, c, g, or t
  misc_feature (501)..(501): n is a, c, g, or t
  misc_feature (509)..(509): n is a, c, g, or t
  misc_feature (513)..(513): n is a, c, g, or t
  misc_feature (522)..(522): n is a, c, g, or t
  misc_feature (525)..(526): n is a, c, g, or t
  misc_feature (528)..(528): n is a, c, g, or t
  misc_feature (540)..(540): n is a, c, g, or t
  misc_feature (542)..(542): n is a, c, g, or t
  misc_feature (553)..(553): n is a, c, g, or t
  misc_feature (577)..(577): n is a, c, g, or t
  misc_feature (614)..(614): n is a, c, g, or t
  misc_feature (663)..(663): n is a, c, g, or t
  misc_feature (703)..(704): n is a, c, g, or t
  misc_feature (795)..(795): n is a, c, g, or t
  misc_feature (812)..(812): n is a, c, g, or t
  misc_feature (846)..(846): n is a, c, g, or t
  misc_feature (913)..(913): n is a, c, g, or t
nagcttcgattggtctagtgaataataatacatggtgtgagtctcatacagtgatattgcttctccgtattatatagggaccgttgtanngtgctgagaacaaacatcgtatggctaaccaaagacagagggacaacaccaaggggccgacgggngcctcccccacccccacgccacgccaggtcaactcttgactcttaatgtagaaaaacaaatagcaagaaataaaatgttaccagagagatgtcacacagcaacacaccagaggcatctcaaagcgatttgtacaaaaaaaaaaaaaaaagncgncttttttttttttcttttttcttttttggtcaattgggtctctgtgaggnttggggaaaaaaatctgtgattgtgnggntgaacaaacaagctctagaaagatctaagacttggngcgttacagaaaatataaaannctgctaaantgtaaggngtgacananngcnggggnggnggggggggggggggggntgggcttntagngggttttcnggnngnttccgccacccngngggggcgtctngggcggttagtagtctggacaggngcgtggtgctacccgctctcaaggcaagcagcaaagngttattgcacaaacgcaaagaactaggtctcttattcaatgcgaagggntgtggggaaaaccaccttctttttacccccactttttttnngtaactagctattctccaatgttttaagaattttgggtgaattctcacatctccagaatacacgggattttttttttccaagaggtctcanatgggggtacgtgagangcccgttttctcaagggaagaggcagaagatggnttgagagagagaaatgcatagactaattagagaaaatgaaaagaaaaaaggctctggggagaggggncattgtttcggtggaggttctttcaaga

SEQ ID NO: 578269 - DNA, 138 bp, Homo sapiens
ccatcacgattaaatttaaactcctcaggcaggtattcaaaccctctccctggctcagcctcccgagtagctgggattacaggtgcacgtcatcacgcccggctaatttttgtatttttagtagagacagattgcagt

SEQ ID NO: 578270 - DNA, 178 bp, Homo sapiens
atacgggcggtagttgcagacggggggaagattgatgtggggaagccgtttgatcatcgcgcggaggagtagggcacagggacactatttctatagaggtgagccgtctgtgcaggcccgtgatagctaccgacacaggggctctgcagctgcacgtggccccggctgctaggcatag

SEQ ID NO: 578271 - DNA, 329 bp, Homo sapiens
taagtgtgcaaagaaaaataacatgaacctagacttctgtatccagtaaaattatcttacacaaaatgaaacagaaataaagactttctcaaacaaaaattgagagaattcttcaccagaaagtttgtcttgctagaaatagataacagataatctttacgagagaaagaaaatgatttcagtcagaaatttggacctacataaggcaagaaagcacattacagaaggaataaatgaaggcaaaataaaatctttttcttattcctaactgacagacaacagtttgttcaaaacaaataatagcaacaatgtgtcagtgattacagctt

SEQ ID NO: 578272 - DNA, 229 bp, Homo sapiens
gctgtgatttacctttgtccgtttaaaagacttcacggagccattctgtatacaaggtgtgctctttccaatgtagaaggggttatggaaaagggtgcgatcctttgctgtaaactggagagaccagtcccaaacagaggggaatccttaccccttccaatcaaccaattggattgtcatgcttatatcaaattcatgcaacataagtaaataaatgtgtgcaaaacta

SEQ ID NO: 578273 - DNA, 376 bp, Homo sapiens
tgctctagaggtcccggaggaaccttcacaccccaggccttcaggaactgggggctttgccttgcagccacatggccccatcccagttggggaagcaggtgagctctgacccttgggcctgggctctgcccctcccaacccagccgtcgtctccctcgacagcgcccctgctgtcttccccaccgcccgtggtcccacctctcgagaggtgtgagggggtgatctaagagattctttacgccggtttctattgatttgggttaatcgtgtgatcgcggtgggtggcacgagattgaccaagcctggggttagtatagcttagttagactttcgtttatggctaaaggttaatcagtgcatgtttcccgtgttccca

SEQ ID NO: 578274 - DNA, 856 bp, Homo sapiens
cgtggtggcaggcgcctgtagtcccagccacttgggaggctgaggcaggagaatggtgtgaacctgggaggcagagcttgcagtgagccgagactacaccactgcactccagcctgggcaacagagtgagactctgtctccaaaaaaaaaaaaggaaacacaatattgggaacttagaggcgggacaagggattattttggaagaatggtttcaaagaattctggacttttaattaaaaaaagcccctcaaggctaaatagttccttggtactcatttggttataggcccaattgaaattttttaaagctttatgaaaaatcaccataaattatttctctataacttctctgctggttctaaatgtccataaggctataattaacttaattttatttgacggatttaaaaaataaatagtggccatgctttcggtgggccatttttaaaaacccaaaataaaataacttaaaatgctgtttagagaaatgtgtcctacatactattatggaagattcaggcaacaggtctaagtttaatagcatcctcaaatggaaaaagttaaataccgaatttattattaatttagaaatagacatggggtctcgtgcatgttggccaggctggatcgaactcctgggttccaagtgattctccacttggctcccatgtgtggtatcaggctgagagcacaaactggcaaaaagcaattaggcttaagtcaaatgttttgggaagaacaccagcaatggggaagcgtttccaagtttgaaaggaaggggttcagggggaccaagaaggaaccgtgtccggagtagtgacacgattgatgggagacggcaaaagggggggggtgg

SEQ ID NO: 578275 - DNA, 909 bp, Homo sapiens
atgtggaatatgactagcgggtgttcgggcagctctacagggagcactgtgaatgatggctgaggatctccgatgactctctggatgccaggggagcgtgatacgcgtgatagctcggaatctactggaaaagaagagatagactgtctcaggagtggtcttagtgaatgtggaggataagagagcgtagtgacggtgcattgcagacacaaagagctaagtaggttctagatatgaaactggaatatgggtactaggaaaagtttgtgtgggaattttacaagagaatataatatgacaggacatgatatactctggggttcatgttatctaggatttaacgtggaatagttggctcggttgtctctttggggtggagttcctatacttggtgttctgtgactgaagtaggtaaaacatttcagcgtattgggttcaccggtttaaacacctatatagttagggaattctaatattggaagtaggaaaggtaattcctatatcgatagaagatgaagagaaaaattgataaagacgagaatgtatgcataaaagaagtgagttgggagggtgaaaatggtagaaactgatatgtatacggaatgaccagtggaaccaagagatgtctactggaactgtgatatgataaggcgatatacgagacctatggactgtatggtacgagaatatatgaacaaaggacgtttgtataatggtggatgacgcattgtggggtacaatagtgagatttgaatggttcagaaagcattttaaaaaaagatgcatttgggcgcgtggattaattggacgggggtaccgtaaaagggcaatgtgttaatccattctaaaggaaaaggtaaaactttaatggaacaaaaggaattataggtttccaaatatggaacgaga

SEQ ID NO: 578276 - DNA, 1281 bp, Homo sapiens
  misc_feature (923)..(923): n is a, c, g, or t
agagagccctgagcagccccaccgtccgccgccggcctagttaccatcacacccctgtggatggatgcctgcagctgcccgatgccgggccccatgtcaccatcacctgcaagccattgatgcatgctgaggcctgatgacccatgcatgcctgcctgctgacccccccctgcgaccccgacccctcaatgacaggcacaagcactgacagccaggactgcgccctgggcaacatatccgcagagcaaacgcggccacgcacgcgcgcacgcccagagttggcgcccccgcagtgcctgctgacaatcaacacaatacagagcacgagccagccttagacaccgcgcattcgggacctaaaagacatcgcgtcacttccagcaacccgcacaactcgcctatccgcgccggtcaacgccaccctcacacgagcactggcgctatccaaacattgctcacacccgccaccaagcttcgagtaacttgcgcatgtaacacactacaacacacccacggagtcaccacctgcacatcaccctcacagccgcgcacgccgcacatcagctcactcagccagataaacacaaccacatacgaaactcttgtaccccagctcacaacaccggcaacacggacaactaaacgagcccacccaaccccaaggtagccacacagccggcaaccaccatatcacatggcacacgcagccgagcgcttccaccacagacaagcagacatagcgtacacggaccagacaacgatcaggaacgagcagcaccagtgccagccagacgaacgcatacggcagcaacagacggcaccacgacaccaagtcgcagaacaaccatgcagcgcatagccagccagcaccaggcacgcacagaccaacgcacacaaacaggatactagagcgcacaagagtntcacccatcacgcaagcagatcacaccgagtacccgagatcgctccgcagcaacacacaagcccagctgcaaccaagcagatctcagagacgcagggcacagcagacgcgcggacacagcagcccacagcagcatactgcgagccagcccgcgaagctcgcaacacacagactatcaaccaacctagtccagtctccaaatccaccaagctccgacaagaacagcgaaacagcaacacacacaacacacgacacacagccatcaccgatagcgcacagagcacacgcaagcgcagcagagacagacacgcacgcagaaagcacagacaactccgctctattacactctatcgccccac

SEQ ID NO: 578277 - DNA, 1584 bp, Homo sapiens
gtgtcggtttgagatcctctcccgtgttgttgagcgacgtgtggtggtgttggtgtccgcgcgtttatggtgtttggttggtgtgtggcggcgccatgttggtgtgcgagtggttgtgcctctgttctgggtttatccctgctgcgggcgccggttgtctgatggtgtgtgtcgcgcgcccccctgtgtgttgtggtttgaggcgggcctgtctggggcggttgtctcgttgggccttgtgcggtggtccaccagggcgcgggggtagtcccgtggtttctgtggggtggggggggggcgctcgcccatgggtgcaccacacagggtggggggtcacagacaatgaaggagtggcgttgtgtttccggagacttttctttcgggagtggcgcccccgaggattgtcgtgcgggacaaattcgcccaaggggtccacgagatatatttgggggggccaaccccgtttcgcccaggagacacgtggttcttaggagccaagagcagggccccgatacgaacatgttctaccacccaagatgtgtggttcccacagcgcgcggactcaggataaatgggcggtgtttttccccagagaagttttctttgttctcaaacacgatttgtgacacactcaagattgtggacgcccagagtctctcactcacgtccaggggaagatgtgcgcagaggacacagtgctgtgtcctcacagacgaccgaaaggccgcacgcgccacagtgggggggcacacccagggaaatggtctcacccccgcatagtctccctcagagactcctccatattgtgaattatttggagtgtttctgtcgcccgacgatatcttgtgtgtgaatagataaaacagtgttgtgatcatctctgataatactctcttgtcgcgcggaaatagtgttctggtttgtgggtgagactcttgtgggatatctcagtcctctccacactccgcgtgagatacacacctccccaagagttgttgtggaatgtcgcttttgtcggtgcgcgctgttatgtgagaagctcctcgatgatctctcttgtcactaagctgctcccacgagatggtttatctctcgtgcgctctactctcgctttgcgcgcgaccaacgctaggtataagagagaaagctccggtgttgtcttcacagagagagtttaagggtggagagtttggcttctatcacgccgccacagctgtttatagtgtcctcgagggagatttggaaagagaccacgcggctgtcgtggtggttctctgtggtgtgttgtttcgcttcttgtggccctgtttgtgtctttcgtgggcgtattcctcgcacgatgagcacccgctgtccacactgccaccacgcaccaaggcgcctcccccgccccctaccgcccccacacaccctttcccctcttgggctcggaacgggaaacacacacacgctgtgtggctccacaggaaggaaaaagctccaccctggagctgtggcaaccccggccgaagggtggagtcttgggatccatttttattaaaatcgagaccgttctgtggttataatttaccaatttaagggcaa

SEQ ID NO: 578278 - DNA, 408 bp, Homo sapiens
aaaatacttagagatgaatgaaaacgagagcagaaactaccagaatgtatgggatggagccaggttgtgctcaggtggaaattaacgtctgtaaacactgattttttgtagttcctcagtgtgatgatttggtttcacactcatgtgagatgtgcttttctcaaaccttcttacaaagtcagcgccttacccatctgacccccaaaaacacagtatggtcccccagttccacttgccgtttctcttgtcctgacagaaacgtagggttccttgaccgctctgtgacctagccagctactcgggaggctgaggtaggagaatcacttggatccaggaagctgaggttgcagtgagccgagactgagccactgcactccagcctgggtgacagaggtagattctgtttca

SEQ ID NO: 578279 - DNA, 182 bp, Homo sapiens
gcgagagagagcgagaagacaggaacatctgtgtggtacatggcactgatcccttctatgctacgcagacggagggagacagggggatgaatgctagcttggctgccctgctgatgggcaggctctgcgaggtcagcagacagaaatgaatgcctggtaaagagagaggcaggtatgtgcaa

SEQ ID NO: 578280 - DNA, 139 bp, Homo sapiens
agaggagcagagaggacacgaatgtggagtcaagaattcagactggggcaaaaggggggtctggggtggaagcaggctggggatgaataaggggagccacagcccccaggatgtcagcccagggtaggcaacctggact

SEQ ID NO: 578281 - DNA, 917 bp, Homo sapiens
atgcggccccaagggggtctctcgaagacatgccgtatagcaagagtcttgtaaggttctctgcgccaccctgggggacccgccagtggccccccacgggccgctgagttccccgccaaggggttcctcctcgtcccccctcgcctattagtgcccccgttcgccccattgggggtccacccccggtatccttcaaggcaacgctcctctggcttcagaagagtagtgtcccccgctcttgcgttgagcctgggcgcggcccctcttttctagacagctcggcgagacccgccctctattatgatggtctcctggcaacgagcccacacgtggggcaggaacttttctccgtagtatccccccggtggggctccatgtatcccgtcgtcggtgaaactagagccgccccccttgcccgcgggtgttccctcaacacaccggcgtgctaccaccaagcgtcccgtggacacggccgagcgatcccctcgacttgtcccccacgtaagagctcctaagagaggcctcacgagtatattcttctcccgccagtagcctcgccgccgcccccgccgcttctatagaccgcagggtgcggacaaagaccggtgttcttacgcactggttttcgtttcgcaacattggcgccactatgatagattcaactcatatcacaaaacttcgtgttacaacaaatccacacagcctctgtctctaacaccccaccaataagcaatacacaactattttttgtgacaccactccctggagtatttcatttctgcgagtggccacctcattattatatcgatgtttgtttgtataacaccgcacgttctgttacttgcgaaccacccgtggccccacatgttctttcccacacactttcggaccccctccaaaaattcacccacaagaca

SEQ ID NO: 578282 - DNA, 320 bp, Homo sapiens
gggaacccctctgagatttttcatcgagaaacaggcatcccatggctcttgctgtacacaacctcctttctttccctgaaatgaacagaagcatttcttagagggctctaccctatctctctctgatttttctctgactacatgatacccccaacagacctatacctacccctactctggctacaggtaaaaatccagtgggcagaacaaggagatgttaggcggtctgcctgtcagcatgttcctggtggaagaactggaggctgaagtattgcccacaattgtccctggatcacgttaaaagggccaccaggagtggc

SEQ ID NO: 578283 - DNA, 302 bp, Homo sapiens
ccctagctagagtctccgatacagaatctcccttttcaagatagtcccatcgaagagaggccaagccagtgttgaactccgatgtctcattcgatgatttggtcatagctttcggctgacctgaaattacccctgcctttaaaaaccttgcttgcagccattggagaggttctgtcttaagcgggagctgctcaattctccttgcttggcaccctgcatatgaaggcccttctttctcctgctgtagatatttctccctccatgtagatattttggctttactgtgctgggcaatcaagctt

SEQ ID NO: 578284 - DNA, 266 bp, Homo sapiens
  misc_feature (109)..(109): n is a, c, g, or t
  misc_feature (113)..(113): n is a, c, g, or t
  misc_feature (240)..(240): n is a, c, g, or t
gaggatgtgaagcaattttaattgttatctttagatggggtagtaggagtgtcttaagtatagggctgttttaccctttgggagctgttcggggctagcccttcagttntggntgtggcaggttccccatcttagctccctggatctccatagggagtgttcagggaccctcaatctccagggccacttctgcaggagctcgggttcgaggttccacgtggccagaagagctcaggtctntgagggctggtgtgcccggtcgacgc

SEQ ID NO: 578285 - DNA, 399 bp, Homo sapiens
  misc_feature (67)..(67): n is a, c, g, or t
  misc_feature (198)..(198): n is a, c, g, or t
  misc_feature (214)..(215): n is a, c, g, or t
  misc_feature (360)..(360): n is a, c, g, or t
  misc_feature (374)..(374): n is a, c, g, or t
ggcagttttctcgataccttcatccagggtgatgaccggctgataacctaactcttcctgcgcacgngtaatatccagcgtaaagtcaaaattcaacttggagacgccgtagtgggtcagcggcggctcttttgctgacttgcggcctaaacgctccatgctgcgggcgatcatatccagcatcgggtaggggcggancgaatacgacagtcannattcactcgtcgatcagcttctgcacgatgctgcgcagtgtgcgatgctcgccgttggtgatgttgtacacacgccggaaggtagcttatcgcaggcttcctggcttgccagccacattgcgtgcacggcattttcatagtaggncatatcgccagcgnactgccgccatgggtaacagatact

SEQ ID NO: 578286 - DNA, 1717 bp, Homo sapiens
cgcctgccgccacccctgcccgcccgacagcgccgccgcctgccccgccatgggctcgacaggaaggcagcctggctgatccacggcatggcgcgtgagtagcactggcttcacaaccagtactcaggcataacacagtgtcattgcatacccgagatccaggtggctgacattgcgacgccggtaagctgggcgcattggcgtcgcgcaacctcccgtcccgattaccccataccgcgctagcaattaggctcatctaggtggacatagcgattggaggtaaccattcccccaggcgctggcggtaccagccgcccaaaaggcgggccacttctgggcttgggcaccacatcccaaaggacacaccaggaggcggaaggaaccgaagccgacgccagaataccggaggcagctgtgtccggcgcgctataatattccgcccactttcccgaaggtccaaccgaaaggagtatccgaatacaatgagacacccaattggccgggcacaccacacaatttgtatcatgtggcggcaacaccactatgacttgaatgagaccccactttgggctcattacgcaaaagccctgaatcatcccctgttgggacgcgtatggccagcacccagaatgtatatccacccccaggtgatacgaccaagaaaggacttttaccccgagtgtcaaccggattatggggcgggcgatacccagcacacaaaaacgcggcagcgggtgacgcttattccgactgatttacccccgactttgtgtacgtggacagcgccaagggtgacccctacgcccagccctagaaagatagacactacccccgatatttaggggcccgaacaaagaaatagaacccggcagcacagacaccaggtattgtggtgatcacgcccacaccccaggcgggtgggagacttcggtgggcgcaacaacaacgcatcgcccgcagcatttttagaaccttactagatgcggggtcgacctacatccacagcaaactagtgttagcgtgactcttttagggggcccccccagatttagtatgattcccagcgccggcgaggttttggtgacaatggaggatcaccagcgatattacaccacaggagagaacaattattatgggcggctaaacaaccagtgagagacccaaagtcgcagcatacggcagactattttgcggcggcacggcgtatcaaaaaaagcatattttatcccggaaagaacagcaacacgacataggggaagagcacccccactcgctattattggggggggagcaccccaaacccccaacaaccgcccgtagaaaacacaagggttttatcaccccgagaggctgtttataaaagagacgccccgaagagagaacgacccgacgctacacatcgagcaccccccagtctttttgggtgtgcaaggggaggacaccccccacagcagagagagcccacctcaaagcacccgcggcggacaaacaaaaacagcctacgcaacgaggtggcgaccccccccacacgattttattggagcagcacaagatgagcacggggccgcgcaaaaaaaccgcggcggtgtgaccccacgcagcaccgcagactgttatttactatattacctccccgacaggtgtcttctacaatttggtacaggcctagcgacacacggggagcgactttttatgtcgtgcgcctccccccagaatt

SEQ ID NO: 578287 - DNA, 859 bp, Homo sapiens
  misc_feature (587)..(587): n is a, c, g, or t
agcggggtctcagtcgccggtgccagctctcgcactctgtttttccgccgcgtccgccgtcgcgtttctctgccggtcgcattggatagaatgatgatcgccgtgcatggtctattgtacaatggctccggcatgtgccaatagcatggtcttctgctgggggacgatgctccccgaagcccgtgtttccgttctcgatcgtcagggcgccccaagcagaccagaggcagtcgatggatgagcaattggcgccaaaacatgcaatcctcatgttggatcaaggagcgcccactaacaacgcgtggcatattcttgaccctgtagaagtcacccctaattggagcatggctatcgtcgacgaaaatctgggacgatcgatgtgatcacagatctggctcctacatcgcattcatacgatacagagacttgcagcgttggccctcgggagcgtagccacccgaagtgtctgtcgtgcatcccgagagaccccccttgaagcgcaccataggggacgaacgaaaaggaggaacgtatcgcatcgtccaggatgtttcctgcttttgaacgaacccttcaatcatcctccngggcctcttgatatcggattggccagatcgccgaggaccgtgtgcttgatctcccatcgtcctgccgtcttggggctgcatctcgagctggggcggtctgttccattgggagcttcgatgggatgacccggcggtcgagccctaacgagcaggtgtccacattctaacgacggtggctaaccgctctttccgcccccaccgtccagttcccatgcggttctggaacccctgggcctaggcgccgggaacctttgaaccagaaaataccgtca

SEQ ID NO: 578288 - DNA, 472 bp, Homo sapiens
gatccccgccgacgcggtgggttgttcatcttggtgttttgatgaccagttataaagtttggtgcacacaggcaccagccagagtctacgcgcctacgtcttaccccttctgacctagctcctcatgagcactgttcatctgctcgtagttctcacacccgtgagcctgtcgctagcgtgcatgaatttgtgcttgaaaaaatatgtatgttatttttgtctattttatcggccaatgaagggttccgtcgtgtttttatgtttctcaaataaatccctttaaaatatgtaaataggctgggcgaggtggctcattcctgtaatcccagcactttgtgaggccgaggcggctggatcacctgaggtcaggagttcgagactagccatgccaacatggtgatgcccagtctctactaaaaatacataaattagccaggcgtggtgacacatgcctgtaatcccaccccgtcgt

SEQ ID NO: 578289 - DNA, 342 bp, Homo sapiens
gggaggagctctcaagtacaagtacttcatctgaggctcctgaacaggccaggaaattggggagtctcaagtaggtgtcttggggaaagagagggaaggggcctgccctcgcttcaggggagctgggcgcccgttggcaggcctaacagacctctaaggcacagacttggagcaggagagagctatttcctggacttcagatgctgggtaaggagcagctggatgtgctcagatggggctcatttgaaaaggtgggggtaggaaagagggcagaagagagtaagctcgaccaacggtagccttaccctgcgggcaccattaaatgcaacccctggtgatcac

SEQ ID NO: 578290 - DNA, 453 bp, Homo sapiens
  misc_feature (188)..(188): n is a, c, g, or t
  misc_feature (197)..(197): n is a, c, g, or t
tatgaacattaatctgtaagatttctttagttgttttcaacaaaataatggataaaaggaggaacagtttctttattctgtagtttatattcacatagtaaatataaattagggagattcaacatattttacattgcacataattattctattaatattctataaactgtttatttttcctttggtangtacagatngggaagttgaacaaaatctgcatacaagaatttctaaaaatagaaaagactttctaaaatctgcatagaagagactttctaaaattacattttttctaaaaaactaaaatgcacttttcttctttaggaaagaatgacttttattcagtattcatctacagtttgccaagaaagtacttccttatccatttttcctttaatttggaagaaacattaagagctatagattaatttgcaagattaatttgcaaaatta

SEQ ID NO: 578291 - DNA, 167 bp, Homo sapiens
  misc_feature (22)..(22): n is a, c, g, or t
gttcttaaccgcgcgtcctttntgaccttccaagagtccagaaataaacgagagagtgtaaggtccttaactgaataaattaattaggtagttggagagtatcgtttataaactcttttgtttacatataagtctaagaataaaagtcatcccttcattcttcaacg

SEQ ID NO: 578292 - DNA, 366 bp, Homo sapiens
tgagcacccatatccgggccttgacaggagcatgagtgagcagctgcggggccagctgccggatctggactccaggctccgtgctgggagcgtcagagtttgattcatagcacaacctaagctaagcaatgaagggcacagtctgaaaatacctggagcaccgcctaaatgagatggagagaactcaggctcagttgagggatgctgtcaagagcctgctagtttactccaaggacgcgggggtcgttggagtcaaccccgagcccctcaaagcaccctgcctcactggagacacaacctgagctgcccatcctgcctcatcacacgtggtctgggagcagagagatagccatcttagggggggtg

SEQ ID NO: 578293 - DNA, 1449 bp, Homo sapiens
gaggaatgagacgtagcaggcacgagtcgtatttcatctccgctaccataatcatcgctatccccaccggcgtcgacagtagtttagcctgagctcgtccacacctccgacggcaagctagactatagtaagatgagtctgtcgtgcgatgatgctctgaataccctaaggattcattctatacttattcgaccgtgaaagttggcctgagctgcgcaagtagtagtctatgcagagagctctagtcatcgtaggacagtactgtgagctatcgactgatcacgatactagcgtttgtatgtcccactttaccaactatgtatccatatcaagtcaggacgctggatataatgtcactcattatggagggtcttccattgcatcgtggatgtttcctctcgtactatcgtcagggctaatgacctccatagattcaaagatcgtacgtgccatagataatccacttattcatctaatcgagtattcccatcgggcggtaccagatcgtaaactattgcggttcctcaacaagaagttgtctacgggagctaatgcccggaagattgcgcactgaccggttgagctccggaactaatcgcctgatttggcattaacagctaggattgaagaggcattccttattcatcttaggaggggttccttccactttcttcttaacagatcgagttgatcctcttcccatgtccatcttgtcccatagggaattgggaggacagccgttacagggtttcggacagaccggaaaacaagtctccttcaaatccaatctcaggcagaagacactccgtgtccgatatagaaaacgttgggccgtttgagatgcaaatattgaggatatgtgccccccaccatagatcggcgtattacccaaggagtcacttttcgcgagacggataagcccccgttatttaacaacattttaaagaagtccttaagagaccgacgccacacgggggaaggacgacatttctcggagaaagcgcccgcacaagaatgtgcgtggggtgattccaacagagccaaaaccgccggatgtgtgggcatccccccatgtcagcattcttgttctcccacaggagacgacagaaagaatcagagcacgacccaccccgggagaggggcacactacctaaatctaccgcggcggcgacgcccggcacagaaaacacaagcagacaagcgccattgccgacgacaacgtgctggcgcccacttagttgccaacaaacagcgagtgagttcgacagacaacaaccacgccagaaatcaatatcgagctgcgccaacacgcagcggggagaacagatcgacacaggcggcgacccccccaataaaaccgagggagcccggacaatacaacacctcgccacaaaaccacaaggaggtaacctgcaccataagatacagccagcgagcacaagcaaacag

SEQ ID NO: 578294 - DNA, 296 bp, Homo sapiens
tctagaggatccgacattgtgtctcagtgggtcaggactcaaaacatgaggaggctagcagcgaagtacagttctggatacgcagcctgtccccaagcttggcaagtggtagacaccaatgcccgtggctgaaggacaatatctgcatgagcctacaccttgccaggcttcacctggatgctttgacctgggcgatcgtggttgttctaaaagaactgtacaccctcctgaatgagaactatgtggaagattgattgaccaacattgtccgattagattattccccgggagtatct

SEQ ID NO: 578295 - DNA, 630 bp, Homo sapiens
taaggtttggagggggaatgctggaaatggtaatggggtatggggacttttcatataagtaatgctagggtgagtggtaggaatgtttttccataggaggtgtatgagtgggtcgtagcggaatcgggggtatgctgtccgaattcataagaacagggaggttaaagtagggtctgggtgacaaaatatgtggtgtagagttcaggggagagtgcgtcatatgtggtccctaggaagatggtagtggtgagggtgtttattataataatgttgggtgtatccggctatgaagaaatagggcgaaggggcctgcggcgtatccgatgttgaagcctgagactagtttcggactccccttcggcaaggtcgaagggggtccggtgggtctctgctagggtggagataactcatattatggccaagggtcatgatggcaggagtaatcccagaggtgtcctggtgtgggcgaccacgggtggacgaggttcaaaggagccccttattacgtcaggtggactagtagaacttgagggctcagggtgactccctttgagatggttggggctactgctcgcagtgcgccgaatcagggcgtagttcgagttgatgccacctgatcagaggctcgca

SEQ ID NO: 578296 - DNA, 504 bp, Homo sapiens
  misc_feature (94)..(94): n is a, c, g, or t
  misc_feature (122)..(122): n is a, c, g, or t
  misc_feature (139)..(139): n is a, c, g, or t
tgacccattcactggcagtgtgatctcagaactcatctcgatgaagtacttggccgggtcacgcggtgggtctctccgggctctggagtagcantctcaggagtagtgtagcgagcaaattnctgaaagtagtcctcantcttcgatttccccagcaggactttcccagcgagcagatcttgcttgttgaggaacaggatcacagagatgggtgctcagccatctgttgttccagatgctcttgaagaggttcagagcctcctgcagggcggttggtctggtttgtcctcccggatgaccatgttgtagctgctgctggccaccacgaagatgatggcagtcacatcgttgaagcactggatccacttgcggcgttcatcgcgctggccacccacgtcaaacatgtggaagttgactttgtccacctggaacttggtctcaaagattccagaagtcaggacacggcagcgaagcaggtcctgatcgctcggcacatagtcagcc

SEQ ID NO: 578297 - DNA, 173 bp, Homo sapiens
cttacggtgacggtggtgtgtgctgtagtcccatctactcaggcgctgcggtgggcaggcattgtttgcagtctagccatgggtaccatgcgcagaccctctctttttttttttttttttttttttttttttttttttttttttttttttttttttttttttttttttttttt

SEQ ID NO: 578298 - DNA, 356 bp, Homo sapiens
aacctctgaccgagtcaaatgatgttcagcacccctggccatcaatgaagactaacctgtctccactagagcagagcagggttgagagttctgtgattccagactaggcatgggactgtcagtcacgtcggagtgacggagttacagaaaaaaagaccatcagtccctctgtctcacatataggacttacgtgggatctctgtctctcaagcggggaaatgaggcaggagaatacggtcgggaggcaggaaagctaaggccggttcatgtctcattggatatcagaggctactcttcaacacccccttttgctgcgcgagagctgctggccctcctttcgctgcctggcggttgaa

SEQ ID NO: 578299 - DNA, 598 bp, Homo sapiens
  misc_feature (247)..(247): n is a, c, g, or t
gtagcgggggaagatggcggcggacgttccacagcgggcgtggaccgtggtagcagaatgcgcagtgagcagctgcccaataaggacattatcattaggtttctgcaggaacacggttcatatgcgtttctggcacgaacataaattattaggacacattcatgaatgtggccacaggactagttaattcaaggaccacatggtggtttacgacgcctataacctagtcattttgaaactaagcgtntgtaagggtcatctgataatgtaataaggtaacagtgttctgagtcaatggtaaataatatgtgaagcttaactggtgattgaccctgggaaagcatacgtctgagagtataccctgtgtatgagggtccaccaataactatgatctagtatggtgtttctgacagatacgggatgataacatcaactttcccaaaccctgggagatgttgtgcatcatgctggtattcgggaacgtctacaatgatgggactgttatgagatgactaatattcgaatgtagtgcaagaagagaaggatgtcgagcttgagtttaaaggtcggagtgggcattggtctgaggctgggatga

SEQ ID NO: 578300 - DNA, 144 bp, Homo sapiens
ggcttggtttttttcccaaaaaaaattttttggaggcgggggattccttttttaacccctgggccaacccaaagcaaagcgatttccaaagttttaactgttcggggttggcccccccgggaaccctttttttggttccctgta

SEQ ID NO: 578301 - DNA, 730 bp, Homo sapiens
gcacagccaacaagatgaacggagctttggatcagtcagaccaaccagtacccagatgccagtataagatgtttgtcggacagatcccaccggtcatggtcgcgaaaaggagctgatagaagttgttgagccttacggagccgtctagcagatcaagcgtctctccggtgatcggagtcaggaaccctgccgcgagtagtacacatggttgtggtattccagtataccagttttattagcaacgtacaagagcatgctaccttggaggcaccagacatgcatctgtcgacaagtattaaagactttagccgtgggtatgcagtcatgccgcgattcaggagtgagacatcgcctgcaagactatgctgagagaaggtctcaaggcgcctcgtgcgtagagaccatggataacatttgttccatgaggcacatcggtcatccgaagcaaggctggtaatgacgaacgactatctagtggtcgatgttctcctctcattatggcccagataggaagaatgcccgtgatccgtccggggtacctgatgggctgagtcgagggctagctcttcgaccgtatcgtggtgaagtttagctagacgactcaggaaggactagagagcaagaggtctgcctccgagtggagcgagcctcgactcaagtcagatgcaggtgagctcaacagtgccagctgggggtaacctgacgaggggctgggccggagctgacccca

SEQ ID NO: 578302 - DNA, 746 bp, Homo sapiens
  misc_feature (433)..(433): n is a, c, g, or t
ccctttatttttgttttataatcagaagtgctgttatattgacaagatagggtgtcacaaatacatcatttatagggaaagaggggacatgaacaagtccaaaatcttatactctgcacagaagcccagcagggatgtcctactctagagatggttacatcaagggtaccccatgagagggcagtctccggatgcagctagccgggaagagcatcgcacaccggttcctctccggggtctctccccagggtatggtacgagtctggcctggaagtaaacgaggtccctgatgcgctctttgcagtcaaccttggcaaaatagttctgggcttcatggaggttctcgatggcagcctccagagcttctgtttctccgggatgatcgtaggaagctgctgaagccacctgggcactgggccactaagaacatggngacgaccttgtgtccaggatagccccgtcagccaagatgggctcgattggccatgtggagaagacttaagggctgtctgggattccaagaatgagctgggcaaaagccaagttcagcactggtgtcagaggcaagtactgtaaccggaactcctggggaggaggggcaaagcctgaggagcatgggcaagcgcgatggtacggggacgaagatcggcagtaaggtctggccggacagttgggcctggtcccattctgggtctccacgttctgacatgggccccatttggggcaagctatgtgccctacattgg

SEQ ID NO: 578303 - DNA, 778 bp, Homo sapiens
taaaatcgtttttggttaaaaatctcttcttcctcaggagtcagttggctcccttcttgcggcccaggggcagcgcatagtgggactcgtaccactgtcggtacggtgtgctgtcagatgagcacgatgcaattcttcaccagggtctgtggtacagaaccagctcgtatattaagatgctttgtaagacaacatcgatgatccttgtttacacgagtacaaaactctgagccccaggagaaattccccagtgtccaacctcagggcacggtattccttgtaacctccccgaacacggactgtgtgaatgcggcgggggccaatcattggtgttggcagttgggcgccccaactcatacttccgctacttgtggaagggcttactcttgcccccggatattatgcggcagctatgtgccatttgtcccgagaaatgcccatcagattcggccgccaaaattgggccgagttcgcaccaaaaccgtgaaaaatggcggcccgggtcatcattaaaaaagtctctacaggcgcctgggcaaaggatcttccacaggaaacaagcgcgtgtgcgaggaagatcgccatatatccccagaaaaaagctccggaacaagaatagcagggtaccgtacaggcatcttgattaacgcgacattcacgaagaggccccgttacagaggtatctcccctcaagctgacggaacgaggagagagaaagggagacgaccattatggtcctgaaagtacaaactatgatccggaaatattgcgcgagacg

SEQ ID NO: 578304 - DNA, 475 bp, Homo sapiens
aaaagtgctcaccactataatgtaccatattatacctgatgatattgtataattattatggagtatctctaattaatatgatgtagaaacctgtatggcaccttctggaaactaccataaaaatgacactccattgaagtgctgaaaagctgatctcataagaattctactggacctagtgtacatgcagaacaagaaaacagaacaatcgtgaaaaaacactcaagaatgtgtattctagacaccaaaaactaaacacaatcccaatccttttttctgtacctcacgcgcataatttggcggccccaaattttttccccgggtaaagtgtgtttaatggactctaagttaattctttggccaatatataaaatggtaattggtaaacttaatttatcaagaaggtcatctttttaaattaatatttacccaattggtccactctaataaatttttccaaatacaggtttaaaat

SEQ ID NO: 578305 - DNA, 156 bp, Homo sapiens
tacattcctatatgggcataaaatctcatgtagtctccttgtagtcaaacctgttcatggtgtttctggagagattcactgtaggcatgacacacacacacacacacacacacacacagataaataccaaccaggaatagtgcggaatgaatgaaa

SEQ ID NO: 578306 - DNA, 156 bp, Homo sapiens
tatacctgcgaaggctgcacggacgccggcgttcggcccttacatcgtctgggcgctttagcgcgttagtcggctgcgtcactgcgtgactcgtcgacgtccagccggatcggaggagttgagaaccacgtgaggctcgttcgttaattgaactac

SEQ ID NO: 578307 - DNA, 956 bp, Homo sapiens
caaagataagaaatcagcttccatgaaataaagatcctgcacaaagccttggccctgtgaaaatgtctgaaagagaagtctattgactacttaatctacactacagttaaaggaacacccatatgcagagatgagaaagaaccaatacaagaactccagtaactcaagaactccagtaaatggccagagtgtcctgcgagtgactgtaccacttctgcaacaagaattcttaccaaggctgaactggctgaaatgacagaagtagaattcagaacgtggataggaatgaatatcattgagattcaggagtacagaaaaatccaatccaaggaaactaagaatcacaataaaacaatacaggaattgaaggacaaaattgctggtataaaaaagaacctaattaatctgacagagctgaataacacagtataagaatttcacagtgcaatcacaagtattaataacagaataaaccaggctgaggaaagaatctcagatcttgaagactggctgtctgaaataagatagacaaacataaaaaagagttaaaaggaatgaacaaaagcttcgagaagtatgggattatgtaaagaggctaaatctatgaatcattggtgtctttgaaagggagggagggaaagcatacgacttacagaacatatttcaggatattgtccatgaaaacttccccagcttttgctagagaggccaacagtcaaatttcaggaaatgcagagaactcctgaaagactctatacaagaagatcatccccaagacacataatcatcagattttccaagattgacatgaaacgacaacaatgtttaaggtaggtcatctgcaaaaggaaccccatcaggctaacagcggatctctcaggtgaaaaccctaaaagccagaagaagatgaaggagggcttaaaaatacttaaggaacacaatggttccaaccaaga

SEQ ID NO: 578308 - DNA, 371 bp, Homo sapiens
  misc_feature (53)..(53): n is a, c, g, or t
accctgctctggtcaggcctagctgttttcacattagcccatttctgggcttntggtgtctgtatcaaaaatcattatgttctggctgggcgcggtagctcacgcctgtaatctagcactttgggaggccgaggtgggcagatcacatgaggccaggagttcaagaccagcctggccaacatggtgaaaccctgtctctgctaaaaatacaaaaagtagctaggcgtggtggcacacacctgtaatgccagctactcaggaggctgaagcacgagaattgcttgaacccaggagacgaaggttgcagtgagctgagatcgagccactgcacttccacctgggtgacagagtgagagtgtctcaaaaaacaa

SEQ ID NO: 578309 - DNA, 1093 bp, Homo sapiens
gggtccctcagtactacacgcttggatcaccagtctgtggctggttgcctgactctgctaggcctaccatgctgattatggcaatctgtactatgagccatagcacgaggggaccgagcgagcgtaagggtcagatgtgcatagctccctgtgtggcagcggtatttggcagtgtggcatcgagccatgtgttccctttgatgtcgcagaccggcccatggatcgttcttcaagcgaatcaatgggaaacagaggtgaggctctctgaccgatcaatgccgcatgtcacccaagatggattgatccctagccagtgggcatgcactcccatgggtgagggagtgttgcgggtgtgcatgtctaaatgtcctgaagcgtggtggcgtgagagacagacgagcgatagatgtatggttggagcattgtacacgagggatgaggatggcgggcgagggataacatgagtgtcgagagtctgttggtgacctcatggcgtggaagttgtcctaaacaggcacagtgggctagaccgtggccggtccgtgtggatcgttggagaggcttgtggaccagatcgcccacgggtcgacgcacaaattccaaggtcacacccgtgccgcaccaatcctagcatatgggtagggcttgggaagaattccgtagtggagcccttgatacgttagtcatcacgggcgtaccaattccggcgcccctggttagcctggcaccacacgggggtgaatgcgttatcatacccgccgcacatgaactccgaagtggcaagcttccgtgaggtttgctaaggagaccagccaaagacggaagtttgttcctggagacaggggcacctccttcaattccaacgtgcggccatcgccctcctggaccttgagcgtagccattggaactcggtattttccccattcagtcggcaaagttgcgactcaggatcggggtgcgggagaaccaccagttggtgtgggtgaaccacattggctctggggatcaaaaagacagcgggttggcacaccattgcttgggtgccctagctgcggcagcactcttgtccttccctacccagtgggtgagagac

SEQ ID NO: 578310 - DNA, 522 bp, Homo sapiens
tgttctgacccaccgatggagccgctcgccctggggctgtcgattctgctgcttgttcctgacggagggctgcatctgggcagatgctgctcaggagccgacaggaattaacgcggagatcttgtactccgtgcccctagaactacggagccctgccgggccctacttctccgattagtactacgacaggtacacgcagagctgccgccagtttcgtgtacgggggctggctaggggcaacgcctaactaggtttctacacctgggaggcttgcgacgatgcttgctggaggatataaaacgttcccaaagttcgccggctgcaagtgagtgtggacgaacagtgtgaggggtccacagaaaagtatttctttaatctaagttccatgacatgtgaaaaattcttttccggtgggtgtcaccggaaccggattgagaacaggtttccagatgaagctacttgtatgggcttctgcgcaccaaagaaaattccatcattttgctacagtccaaaagatgaggg

SEQ ID NO: 578311 - DNA, 743 bp, Homo sapiens
  misc_feature (509)..(509): n is a, c, g, or t
  misc_feature (526)..(526): n is a, c, g, or t
  misc_feature (538)..(538): n is a, c, g, or t
  misc_feature (549)..(549): n is a, c, g, or t
  misc_feature (558)..(558): n is a, c, g, or t
  misc_feature (565)..(566): n is a, c, g, or t
  misc_feature (574)..(574): n is a, c, g, or t
  misc_feature (658)..(658): n is a, c, g, or t
  misc_feature (688)..(688): n is a, c, g, or t
ttcacagttatttcatgacatggcatggatatctcttgaggttcactcagcttattggattcatctgcttgtgtcttgcagcaagtttgagaaggtttcaggcactactgtagtccttttcacttttcatggtttccattttctgcagtaaaatggttagaaaatattaaatggagaactccagaaataatttataagcttgccattctgagtggagtgattacatttcatgttcttgtgctctgacctatctgagacatgaatcattcctccatccagcatatccatggtgtatatgctatccacctgttagtgacttcatagctattttgtttatcagatccactgtcatggtatcacagtgcttgtgttcaagtaacccttattttacttaataatgacctctaagtgcaagaaaaatgatagtagcaatttggttattccaaagaaaaacagtgaagtgcttctttaaaattctcaacttaataaaagaaacttatatgctgatngtgctaaaatttacggnaagaacacattntatatctgtanaatcattangaagganntataattngccaagttttgttgcgtacctcaaactgggtataagcccagtgcttggatagagcttaggaagatgaacaagcattcaggtttnggttgacttaaccggaccttgtatcatttntggccattggaacaatccccttagggtttaggcttcccctgaagatgtggccttt

SEQ ID NO: 578312 - DNA, 404 bp, Homo sapiens
gctagcctcccaagtagctgtgcatcaccatgccgtgactaatatgtgtatcgtttatagagacaggatttgcaccatgtggctcgggcggtctcgaactccggggctcaagcagttcattccaccgtggcctcccagagggctggcattacaggcatgagccaccgcatccggtgaaactaagggtttaaatctgtgcgtttttcaaggaaagagggagcaaatggtaaatgtacctaggctaaggggtaggggtataaaagtgagaaaatgaaatagggaaagttgaaattcaaggagaatgagttgaagactactggtataccgcatctcttctacacagtatattgatttctataggagaatttgtctcaggccttaaggatgctgtcgggatgctcgtg

SEQ ID NO: 578313 - DNA, 471 bp, Homo sapiens
ttgatttatttcttgttgattcctctagaaaacactgagcttttaactgttgagaaaactgtgaggcattcttctcagcgattccagtattgcctggttgaattgctaatcagtgcttctgtacattttgcatgattttgctagctttgccacaactgtccaaacataagtggggtggagatatcctgtctctcagcttggcaggttccttggtaggaaggggatgacttgccctaaccctccctgccaccagggggctcacctggggccctccacagctcatcccgctcatggggccacttcgccagtgagtgttcgcccattcatgggcaatgagggaggttgaggcatggagcagtgtgggcgatggatgggcaaagggcaggcatagggttgatgctgttacatgaaggggcaggttccacgttgttagtttggctgggccatcgattgattggtaagggaccagtt

SEQ ID NO: 578314 - DNA, 201 bp, Homo sapiens
  misc_feature (182)..(182): n is a, c, g, or t
accggttggctttccaaaccactttcttcctgtaattcttaatgttggctagttctccttcctcagaaaaattcccctaagaatctcctaatagtgagggtgtacttccgaatagaagagccttcggctgaaatggcatctccaatgcctacagttcgaatggggtctttacacaccaatanctggtgtgaagttctctta

SEQ ID NO: 578315 - DNA, 124 bp, Homo sapiens
ggaaggggtgttgtttgatagacattatctgtggctgggtctttctggctgatgagagacatgtagattatgtgaagcaagtggctagaagatgagagagaacatgagagagcagagtgctctc

SEQ ID NO: 578316 - DNA, 316 bp, Homo sapiens
  misc_feature (268)..(268): n is a, c, g, or t
ctcggcccctaatttttatttcattttgcatagttcctggtacttttagaagtgctaagaagtggatttgcaatgacccatgacaccgtagcacctcttaggcctttcgtaaagtatcatataaattatcaccagatagcttttgagagccaaatgtacttttattcccttttaaaacatgaggacatgaactacgcagttcggatatgtaaggaccatggttatcttccacagtgggcttgttcgagggatttgagtgttctccagngggaaaaaaaaatttgtttaggtgtttttagagatattctttggatct

SEQ ID NO: 578317 - DNA, 977 bp, Homo sapiens
gctccatctcaaaaaaaaaaaaaaaaaaaatttagccgggttttggtggcacacacttgtggggccccgtctacttaggaggtgggggcaggagaaattggcttggagcccaggagtttggaggctggcagtggagctatgatcatggccactggcactctaagcctggggtgatagaacaagacccggtctcttaaaaaaaaaaatttggtttttatgcaccgggtccaatggtgctaggtaactgggggaagaagattcttaaaaaattgtgttttatacacccagggtacaatggtggctaggtggctggggagaagaagatcggggataaaggcaagagacaaaatttcctggtgcctaatgggagcttggtgggtcctaaagggagggaaaaaagagggcccatacaacacaaacttttaaaacagagagagggacatttaccacagaggtttatggtggggatgggggaattgcagtctacaacacagagagaggaaaaatcaaaagcagggggaaagagtatgagaacacttccgtggacaagacacagctgagggcccagtggtctccaaattgaggacagtggcccgaggggacaatgtgcccccacagtgtgagacaagggggtgaaccaccacaaagagcacaagagaacctcaacgaggagacagggtgcacaggtgggtgacaaccacatttacagcgtttccactaagacaagggaaggcgacctgtgtttcacccacgaggtcaaaaggggggaccagaacgacagtgccgaaaggggccaaacgacagagggggaccacccacgacgcacggggttggtgcttagacacaaaaagaggacaggggggggacaccccaaagacgggctcaaagtgctgggaaaccacagtgtgctacgacacagaaaatataacccgcgatacaggagagggacttgtgaaaccaaaccaaaccgtggggag

SEQ ID NO: 578318 - DNA, 989 bp, Homo sapiens
  misc_feature (792)..(792): n is a, c, g, or t
gagaagaagacaacatgtggcaccgtttgcctcaagtacctgctgtttacctacaattgctgcttctgggtgaggaggggtcgactgccccgaggcagacggggtggaaccggcggtggtgcagggtgagtagacgttatgtgtactggttgtaccatgactgcgtctggactgctctataggctagagggcatctgaacgactaggtcctcatcaacgagtgactacaatcagcctgctggtgctcaggcaccatacctggccactagcctacatcctggtggtaggaagggcactgtcgtcactagagcgacatggggttatttgggctgccttggagccaccttcaaggagcagtcaggaacactgcatgaagccctggatcaaggagaggcagcagggaccaacgagaggtgtggggtggtagccagatggagacacacagaggagagttagtaccgatgcacggcataagaaacactgtggacttgaactagtactacaacatgaggagagagagagactccacggaccttcccacaacaagccctaagtcactgatgagagtcacccaacagttccatgacaggaaccgagctagaggagaaagacaacaaaacttacagacaagaaaaaacattcagggaagagaggtgtggcggcacgatcaagacccacaaccataggaaagccatgaggcgagcacgcgaggcatggaagaagacatgcgtctaaccactacaacgaaaggcaataaacgacactagtgacaccagtaacaaatggttcgcnccttgattgacaggagcacgaagaagacaagatgactagctacttaataatatatctgatgctggaagacacacgcgcatgagatattcgacatacacctacagtcaacaagataaggaggcgagagcaggcaaacaaagacaggacctcaaagtgaacggaacgcgactatacggagcagagatacaagtacacaa

SEQ ID NO: 578319 - DNA, 444 bp, Homo sapiens
cgatggaagggcgtgcctggaatatctggagctccccctcccgcgatgccaaagcccgcgtgcagcagttcgcatatgcagttcgagataccttcgccgaactcgcaatacgcgacggtcaatgcaagtttgcacaaaaaccgggtatcatactccgaattaaaaggcactgctccctgtatgtcttcccctgaaaatacgttattccatatccattcaatggctgtggagtcagcttcgtctggagcagaaaaaccgtaatctgccagttgtatcccagcgaccgtggtgcctgagacttttctcaccttcctacgcttgaacgactctttaaattccaacaatgagcagcttggatcggcattttcattgaaaaaatagtatgccctcgcattcgccgatacctgctttaaaacaatgggattgccgcccatgtaccagtaa

SEQ ID NO: 578320 - DNA, 431 bp, Homo sapiens
  misc_feature (248)..(248): n is a, c, g, or t
  misc_feature (274)..(274): n is a, c, g, or t
  misc_feature (277)..(277): n is a, c, g, or t
gaaggttttttaatgctcatagtgctgtacacatcttggtctgttctcatgggcatcttaggaaatgtttcccgagcaccggatccagccatctgtgtgggtgtctccaggctgtgataccgtgccctgctgttccctcatgctcgtgatgaaccatgtgctgggatcctctactgccagcttatctgtgggcctcctgcagcctcgcctgccaatgcataggccccaggttaccatccgttttgcgnagtttcccccccctctcctgggtgantcntgttaggtggcagcttctttattttccctctccaacctcaacgggtaggactccttatgtctctccagaattataaaacatatacatttatttacaagtgcataaatatataaatatggctataatagaaaaataaataccaattttctctgtc

SEQ ID NO: 578321 - DNA, 312 bp, Homo sapiens
gggacatgattgttaccgacgaaactactgtagagaatcaggaacttctgggaaatgtggtctcggtcacgactaaaacagaaacgcaaaacggtggactagtggcagttcataacaagtagaatgacatggtcagatctgtcatatccagatagacagctactgacagcagaggacacacaatctctggactcatccatcactctctcctgcaccctctttaccactttagccccacctggacagtatcaccgacggcccgcctggccccaagcccctgcactgcagcacagcttggtggtagagaaatga

SEQ ID NO: 578322 - DNA, 406 bp, Homo sapiens
ggggcagtgtagtgacatgcgtggtagcggctctggcccttctgcaggtcactggtctggatggcaactacaggatcacgtgccacacggtcagtggaagtgcttcgggaacacaaggacagcgtcatggccgtgctggaagccttcgtctatgaccccttactgaactggaggctgatggacagtgagtagctcgtgcctgagaactggagtctgcacctcccaacgtgggagtgttggcgtgctccgtgtctctgacctgtccccctcacacccggagcctgaggcgctgcccagccacctgcgttacattttcacagagcagctctggtggctggaaatgaactttgcaagtatttttattaactaagaaaactccaatcatgagttaggaggaggaggagga

SEQ ID NO: 578323 - DNA, 139 bp, Homo sapiens
catattaggggttaatatcagatgcggttccggattgttttttaccaaatcactttcacctgctacatgatcgggggtatacgtacggtgcaggtgctctgaaatctgtgagagcaaaccacagtttcatgcccatcgt

SEQ ID NO: 578324 - DNA, 954 bp, Homo sapiens
taattaactgaagtgtaggagctggataagtgaggagggtgtgagacgaacacggatagtgggcttccctaggataataatgccagcgaccatgtgattgtgatgatgatgacttgtgatatcgtataccttcttgctgtaatcaaaatactctgactatttcgcgaaatactgggaaggatgaaaggggcagggcgtcgtccactgtgcgtgataggagaacgagtcccgtggagtgtacgacccgcgatatctgaaggggtccattttcacgagccgaccagaaaccgtgcaggtaaaatagggcatactaaaggtggaacgcagcccgaggtagataatactacgtgttgccgcgtattggggcatagcggtggggcggtcgcgtggctgatgctctcgaagtcgggcttgccgccctgaggcctcccattatccaatctgtgggcagtgcgtagagggaaaaggcatgcctggctgttgggtgagtcagggcatgtgatgctttttcgctcagagcaatcttgctataagccttgtagcctggtaaggcggaggattctgtccaggatagaatcctagtagtaatgcaaaaacccagcttagagaccaaaatctggaggtcaggcgaggggaaagtgcgacggttgcctaaagtcataggtactgtttggtatggattgacctatgcgggtcgattgccctgcccctgctttatgccgggtcaaccgcatgaacttggctctaggatttcgcgtcactgcgctctccgacgtggggccggtggggaatctgggacagtaccggtctatgtcaaatggcaccttgggatccgagaaatacggcgaaaacaatgtgggtgtcccggaaaagagagaaaatttggcgcggggaatcaaatgggcggaacatatcccgtgtgaatcaaccgagagttgtccactattctctctt

SEQ ID NO: 578325 - DNA, 219 bp, Homo sapiens
gtcagaggatcccggatcggcgacatgtcaagaaatactcgaggtcagccgtatgtattgagatccttacaagcaaagctcggatgtgaggaaaaacaggtatcgccatcccgtgttaacaagattattaagatgcagaaacttcatatccatgcagttagagaggctgccaagggattccaacagctcgtttgactcttgtaccatccaatagcttag

SEQ ID NO: 578326 - DNA, 290 bp, Homo sapiens
gctcagtcaactgtgaacgttgcggagcagaatagggtagtgaggatacagaaatcgctgggtctcggcgtgaccgcttgtcgactcgccttatctgaatgttgtttgaacagttggctacattagattggacaaaactcagtgattggcacaagtgtagtctgtttacacctccacttgtcacgatatacagacaaacctttaggccaaacttaaatatataaggaggcagctttaggctaaacttgatttcaatacctgtattccaacactttgggaggccgaggcgg

SEQ ID NO: 578327 - DNA, 875 bp, Homo sapiens
gatccgctgcgcgagtgtctcggtcccacgtgtgcgagtgctacgatggacgtaaagggaaaaagcaattcacaggagagagtaacaaagacagacaagacaaaaaacagatttcataaaacatagtgatcctggttcttcaaagacttttccacacactggaacgttgctaacagacggtgccctaaagtcacatctaggacaccttggagaaagagtatcacaaaaattgtgggacccccacgggtgtaaaagcagttcaagaataacgcagcacggggacaaattcacccaagagaacaatattccagccggcaaatcacatttcaccaagaccgagaaatattccagccagatggtagaagcgatgaactcagcagccaatgaagcccaaactgggctgactttcacaaagagacgacagaagcgaagtggaagcaaagcagacaactccgtggataaacccaattatgacattgttggtccgggccacagcagtatgtgggacgatttcaacgcaaggacacacagaactggttcacaagacacgcaaaggaagatcgtgacccacaaacacttgttgctgggcgcgccttgcggcccttgggagacaggtttatcagtaacaccaaatttgggttgtgtgcgcgcgtcgtctccctgttgacgtagcgttgacgtgtgcgcatatagcgtggtcacaaaagaagcatccgggccagtgaccaagggtgtgtaggttcctcgccaaattaaaaagggccgggggaaaccccgaccgtgttcatgaaaccatccacatggagtgtcagcaggccaaacggggcttattcaacggggaccaagcgagactgatataatacccgggtgggggt

SEQ ID NO: 578328 - DNA, 357 bp, Homo sapiens
  misc_feature (22)..(22): n is a, c, g, or t
gggttttaaaaagcggcagaancaattcaactaaaggcccaaatcatgaagatacaaaaccgtacatgcaggcggtgtctggttagtcaaggctgattgcttcaactgtctagatatgtatgtgcagcctgaaactggctccttaaaaggaaagccgggtcagtcatcttggaacaacacatgacagtgtaaacagtaaatcggataattcgtttatgaagagacggtacatgttttaaaggtcggccttaagcttcagtaacattgtcatttagtgacctttagtagtcacacctgtaccctaacctgacaggaattaactactgtttttttgtggggcagacaagcagaaaccgg

SEQ ID NO: 578329 - DNA, 133 bp, Homo sapiens
ttgcgtgtgcactgtctaagtatcggatagaccagtggacaccagcctctatgaactgcatatccattagccagtgacacttctgtactctccagttagtcatgcctcagctcattgtcagttcagctcggtt

SEQ ID NO: 578330 - DNA, 172 bp, Homo sapiens
cattcacacacacacacacacacacacacacacacaaatgcaacacatttatctttatagtagaagttgcttctccaagtttgtttttttgtgtttggtttttttgtttgtttgtttgttttagagatggagttttactattgtcgcccaggctagagtgcaatgtcacaat

SEQ ID NO: 578331 - DNA, 384 bp, Homo sapiens
gacccgctccccataaggttcagttccgtatgcagctgcaccccagtcaggcgagtaagcggccaggatcagattgcatgtgactctgaagctgagctgaacttccagtggtcctctattaatgagcactggtccccgaatccgaacctcctcggtgaagcattcgaaacagaaccttgttatttctcagacttaggaacaatgcattgtatcgatgtgatgtaagtaggccatgagctctgtctcagtgtagatagttactccagtgccaacaatcctagtgctttccttttttaaaaatgcaaatcctatgtgattttaactctgtcttcacctgattcaactaaaaaaaaaaaagtattattttccaaaaggggcctcttg

SEQ ID NO: 578332 - DNA, 648 bp, Homo sapiens
gcgaggccccctggggacgcggtggccgccgaggcgctacacccgcaggccgcggcaaggccgtcccaggaggccccgggccaacgggacccggcgcgtgagacagcggcctctgtggcggcggcggagggaggcctggaccgggcgacgggagaagccttcgcctgcggaaccgttgtccggggttggggggctccagttcctccgaccgcccggtggcgctggggagggagggccagagccccggggaacgccgctgtggccttggcttcggtccccccatttgtggcccgcgccagctccatcccgggccagcccgggttcccctggtccccccttccccggagttctcctcaggttcatcgggcctcaccataaacccccagagtgggagattagcccgaccgaggccgggaacaccacggcacagaagcatgtgggaggaaggaggcatgacaccctggctgaaaacgagcgcgcaggggatagcacaaaagagctgggggtaccagtagggcccggagaaggccaaggacggaggcgaaccaggcgaatgagtgcgaggagaccaaaagagggagagaccaggcacatcagcggggcccagaaccagtggaggggagacccaacatccagggcacagctagg

SEQ ID NO: 578333 - DNA, 623 bp, Homo sapiens
tgccaagcagcatgtgcccgagcagcaccccaaggtacaagccaatgcttcgtgcgggctcgggtgaagaagctgctggcagcgggtgtggtgtcggccatggtgtgcatggtgaagacggagagccctgtgctgaccagttcctgcagagagctgcgtctccagggtcttcttggctttagtggaagaggtagaggaccgaggcactgtggttgcccagggaggcggcaggggcgctgatcccgctgtccctggaaggcacggacgtggggcagacaaaggcagccccaggcccttgccaaagctcaccatcacctccaagccggagatgaccttccctggcgagcggatctatcgaggtggtccgggccccgtcgtctccctgtttgcacctcaacgtgctcaggccttgcagaacttcgaggcgctcatggccctaacaaaacttggctgggattcaggcgaagaggcttccgggcaagaaaggatccttgacacgagaaagggctggtgccctatgagtagaaggctacattgtttgagggagcatgagatgatccgccgggcaggccacggagtgcattgtgtaacttggcatgaggcaaggacggttgcaggactct

SEQ ID NO: 578334 - DNA, 134 bp, Homo sapiens
ataccaggaattatccatctcctcgagatactagtttatgtgcataaagatgttcatagtagccactgaatgatcttgtgtatttttgtgatattggttgtagtatctcccattttgtttctaattgatcttat

SEQ ID NO: 578335 - DNA, 329 bp, Homo sapiens
agatgcactgtccatcgaaatcttatatagatccatatagggactatacaaatattttcatcaaagcattgtaagtgggggtgagaacaatagaggcaatcaggatattcgtcactgggagacaggacaggtaaaaacatggaggatatacagggtgtgaagcactatgctctaggtagcaacactctagagataggtggataaatactatcaaaattttactgagtacactcagggacaaccacaaaatgacatctgtagcaccaatactatataatgtaactataaaaaatacaaggtactcgccggttgtgcagcactcacacctg

SEQ ID NO: 578336 - DNA, 113 bp, Homo sapiens
atgtagccagcatcactgtgataccaaaatctggcaaacacacaacaccaccaccaccaaactgcatgccaacatcgtgataaacataggtgcgaaaaaccccaccaaatatt

SEQ ID NO: 578337 - DNA, 370 bp, Homo sapiens
  misc_feature (77)..(77): n is a, c, g, or t
  misc_feature (321)..(321): n is a, c, g, or t
  misc_feature (335)..(335): n is a, c, g, or t
  misc_feature (357)..(357): n is a, c, g, or t
gtgacgaaatcatctgcacaacaaatctctgtaacacgagtttacctatatagcaaacttgcacatgtacccctgancctaaaataaaagttaaaaaaacaaaacaaaacactgtctttttgggattttttggaggtttcattacaccgacataattgatgacatcattggccattggtgatcaactcaaccttcgggcccctcttccttctcaggaggtggtggggtggggctgaaagttccaaccctctcatcaccagattggttcccctggtaaccagcgccatcctgaggccaccctggttccccaccccggaccgnccccagccactagncatctcattagcatacaaatgncacttatcacttt

SEQ ID NO: 578338 - DNA, 280 bp, Homo sapiens
tttaaagaggtcctttataaccagtttaaaattacttcagtgcaatcctacacaggatcagcattagaattttgagattagccgtatgtcatcttccattctatttttatctgcttttagctgctagcttcaaactgccagtgtttttccttttgcttttaaaatagttacaatatttttcatgatagccacagtattgccacagagtattataagaaaggtgttttatttgacttagccgattcaaagcttttttctatcacttttgagctcagaatat

SEQ ID NO: 578339 - DNA, 392 bp, Homo sapiens
  misc_feature (9)..(9): n is a, c, g, or t
  misc_feature (42)..(42): n is a, c, g, or t
  misc_feature (113)..(113): n is a, c, g, or t
  misc_feature (115)..(115): n is a, c, g, or t
  misc_feature (117)..(117): n is a, c, g, or t
  misc_feature (156)..(156): n is a, c, g, or t
ccgaaaccngctggaaaacctaggacttttggaggcccatgngaagaaagagtcagtggtagagtttctttttggatttagctcataatgatggtcagattgggcaagtgggntncncgcagtggctcatacctgtaatcccagcatttgggaggnccgaggtaggcggatcacttgaggtcaggagttcgaaactagcctggccaacatggtgaaatcgcatctctactaaaatagaaaaattagccagatatggtggcacacgcctataatcccagctactcgggtggctgaggcacaagaattgcttaaatctgggaggcggaggttgcagtgagctgagattgagccactgcacttcagcctgggtgagacaatgagattctgtctcc

SEQ ID NO: 578340 - DNA, 291 bp, Homo sapiens
  misc_feature (152)..(152): n is a, c, g, or t
  misc_feature (159)..(159): n is a, c, g, or t
gcccagagagggggctccaacagtgcagcggcgggctgaagggctcctcaagcgcagccagagtggacgctgaggccgaggaggcgccaagagtgagcgagggctgccagcaccctgtcatctctcaggttttagctcagggctgctgtccnagcaccngctcttgcttggatactttcggtggtgtggctgctggttactgtattgcacgacaaatgtttttccctctttctgttagtttaatagcaatcttaagccacctaattggttttaaactaacaaaaaaaaaaa

SEQ ID NO: 578341 - DNA, 1031 bp, Homo sapiens
  misc_feature (1031)..(1031): n is a, c, g, or t
caggctccagtgtctatggaggttggcacggggagctgttagcctgagcgctcgagttcttggggttaaacgcagggggtgtatgcagtcggaggattacgtttacttggctctcaaggtgggaccgttgggtaagccggcttcagggtctctgaggtgaggggtcgttgatgaggacgagtacagtttaggagtaaggtcgctagatacatgtaagtagggtgttaaccgtccatcttatgtgggtcggccgttgtcttcggtgtcttccggttagattggtagtatcaagagttctgtgtgatgaagtagtttgaagtcatctcagggcaatgacaatttagagggaatgttagtttatctaatagaataattccattggcgagtgtcttgtcttcacggtccctgtatgtgtctgtgcaagaggtcctctactagtgcaggaaaaggttgatatagttgttagtattagaagtcaacttagctatagatatttgtgtgattgggaaaggtggagtgcccagagataaaggtctgtgtgctatggtccaaggagagtagtacaagggtcaccgcggtgaagtttcattataactagggaagaaatacttctagcgtttgtgagtgcacatgttaagtgtttaatccctacttgccatgaaaaacctagagaggggccattgatggaagtggggagtgtatattgcgagggtgcttgttgccgcattgcgcttaatgtattggcagtccctcgattttattcgcgtctgcgagttgcatgtttaaacgtccatccatggtagcctaaggcattacgtttgggggtacaacttctcctcgtggttgttggcctggcaccccttgggaatttgggccgaattgccccgtggtggtccgatataatacctcgtggtactttatcccttgcccgtgtgtgggcacggtctcgggttcccttgagaggggccttgcccgtgggaggaccttcgggaaattgcgcccgagctatggccccgtggggcgcgaacttn

SEQ ID NO: 578342 - DNA, 304 bp, Homo sapiens
ttaaaaaaaaatgaaaggttaagggattttttggggtttaaactagtccacccgttttgaacccaaggcccttttttatacccccccctttgtttgaaaggaccaagtaggcccggaattttttttgggcaaatccttgtttaacccgtccgggccttttggcaaaaaatggataacatttttcccttttttaaaccccccgggggttttgccttaagttttattttgaaaaattttgggtgttcccggtaatgccaaacccttttatttttttttttttggcaaaaaaatgggccatttggga

SEQ ID NO: 578343 - DNA, 331 bp, Homo sapiens
cttctgttgagatggagtctcactctgtcacccaggctggagtgcagtgtcgcgaccttggctcactgcaacctccacctcccaggttcaagcaattctccccacctcagcctccaaagtagctgggattacaggcatgcgcaaccatgcccagctaatttttgtaattttagtatagatgggttttcgcttactagaaatggggtgtttgccaggctggtcccgaactcctgacctcaggtgatccgtccacctaggtcttccaaagggcttggggtttcaggcttaagcctccaagcccggcctaccttgttctatatttccattctcc

SEQ ID NO: 578344 - DNA, 1394 bp, Homo sapiens
accacaaagacattggaacactatacctattattcggcgcatgagctggagtcctaggcacagctcataagccatccttatatcgagccgagactgggccagaacaggcaaaccttcataggtaacagaccacatcatacaacgtaaatcgtcacagcccatgacattatgtacatcaatcgttcttcgatagtcaatacccaatcatcaatcgagcaggcattatggccaacatgcacctcagatatcccactaatcaagtcggctgcccccagcatatggacgtttccgccgcccatacacgacacatacagcatatcatagcacatctatacacccacactcatctcctcactcctagcgtcgccatcgtgcatatacgtaggacggaccgcgagcagagaacacggatatagcaacagatacgtacacctcacctataggcaagggcacacatagatcgccaaacacatgagagacacatccgaacagacccgtacgaccactctatacatccattaacacacatagacacggatgatctcttacgtactcatttaggggaccactcacatagccatcagcacaccaactatatcccaagtacatcaaaaccacacctagaacataagaccaaatcaacaaacaccgccaccctactagacgctcttgaatcccgcaccatacattcacacacgcagtcactacctatactcacctactctcataccacaggataccttaagctagctagggcgaatccactaaaagcgaagcgcaaacgaggaaccggaacacgctacaacaacaacaagccagaacataacagaagcccccagaccaggagaaaggagcaagacagaacacacgcaatagacacatagacccaaacgacacctaatgaacaagagatacaagacgggaccaccctaggacgagacacatcacaacacaaacacccaaacacaggacataccgaccacaataaaccctcgcccacacacagagctcaccatacactaacacacggacaacgaacaaacaaaaacacacgcgcaatcaacaagaggcatagcagcagaccagcgacacaacaaacaggcacacaacaggcataacacacgcagcaacaccctaagaagcaaacaacagcaccggactcaacagagcaaacacaaagggaacaacgaatacacaaccgacgcagaaaaacaacagaaaccccaaccggaccacaccgactcaaagagaacagaagacaacagagacagaaaaacaagcgcgaaacgcaaacaccagagaaaccacatcaccagcggaccactacaactcaacaccacacatgaacaagaaataaggaaacagaaaaacacgaacatacagcgcagcagccc

SEQ ID NO: 578345 - DNA, 935 bp, Homo sapiens
taaccccccaaattgtttttttaaaaatgcccaaaacaacaaaaataaatcctttaagggtaataattttttttcctaaattttttatagtctaccttttaataattatttcgtcgtttcacaatattacaaaaaagggaagaaaaacatacagagggaagcagcacgacccatttattttttattatctataaaatcctattattagaataaataaagtcgtcataaataagagggcccattgatttatgggtgggtttgtggcaaccggtcttgggcctacttgctttgggagggtaatttgaccaccaggattccccctcaggaggaggtcccagttcaaccaggacgacactgggaccctcggtgttcttataaacacctgggggggggcagtgaaggccttatttattcacagcacaatctgctgtcgctttaatccaagcctactgttttcacccattttctagtaagcctctacctgcacgacacaccctttatgaccccccaatcacttgccttttctatttttgttaaaacccagcccatgaacccctaaaagggggccctctcaggcctcttttaatgacctccggctagccatgtgttttcttccccctcaataaggtcttcaaatattagggcttattatcccaaccttatccttatccattgtgcggcgatggtagaccgagaagcgctttctgggggcgcgccacacctcctgttcaaaggggctctgatggggaatattcctttttttcccccaagttttttctcgcgcggtatctttgcctttcatccggctaggcctccccccgagttggggtggctcgcggtgctcctgctttctacatgctccccaccgtgttcgtctggtaattactcgctcggtctattatagcccactccggtgttgtttctccactggcgcc

SEQ ID NO: 578346 - DNA, 653 bp, Homo sapiens
tgcaacctgccgattcctttctgtcactgtggcggtgttttgttgccagcgggacgtgtcactgcaagcaatcgttggtgttatcactggggcgccgcttgttctaccactggcccgtcgtgttccacagtgagctcaaacagcgttgccgtatgggggctccacctattactttcgagctacaatgcctggaagaatgcaagtggatgtctcggttgccccgtatggcatgtcctgcacattttcgtgcccctcattgcgtgacatagtgtacagtcaactgtagtgtcagattcagtcgtctgggtgttgtgcccacttttcgtggttcaatttacatcgtaggctcccacagcacacacctgccgccgacgcccgagccaccgcgcagcacgccctgctgtgccacctcactgcgccaggtcggatcaagtggcttttacctgggacctgcccagcttttgagaatctcttctcatccacccgtctggccacccagcctctgagggaagcgagggatggggcatagtgggagacctcagccaagagctgagggtaagggcaatggtaggcgtgaggctgtgacccttttcggaatgttttggttctgtttttcttaaaccgggcataaccccgtgagttcaagcttagtt

SEQ ID NO: 578347 - DNA, 1330 bp, Homo sapiens
  misc_feature (94)..(94): n is a, c, g, or t
agcggagtggtgcgtgttcagtcgtagcgcgcgtccgctggctcagctaacagccacagatgctgctgcgaatctgctggcttctttccgtcangatttgcgcgcagatggacgattaagagcactgacttcccgcagggcattattcatataatacataggttcctggagaagctagaacatagtgtaccaaggtacgtagaacgtattatcatagagacgatgttcccttgtaaattacttgagacttagccatcacaggggtaaacggacgttgcggaataacacagcagacgctagtggttgctcagtacacaccttaacgcacttcagtagtgcaccgaagtacttagaaaccactttgaccagaaacagacatcggtcgagacggcagcaattggtagctccactaaaggtgacgttacactacgctgtgcttcgtccatctttgcggtgcgaaacacgaccccgtggttggggaacggcatgcatgcacaaagtttgtacgcacttgttaactagcagcgcttaaggcttttgcacttcttaccttgtacgttggacgtttgtatgcttatgtggagctataccttggggattttatgctcacgcgctgtcatcttcccctatgagaatttagagaggggccttgtacaccacgtttcggactgttacaccacgaaaggtaacggttatggcttaccttcacttacgttagcgtacgccctttagacaaagaggatattacccaaaagattaggccgtatgtcactcttggaagagcgacgggaatgagttaagccttaaaaccaagttacggaccttacagctgggtaaaatggcactggggcacagttattaacgacacattcgccatcaacgggagcagattagataacagatcgtgataaaggcggcgcgtttttaaatgtaaagacgcgaaataataaaagataccacaatgatgcgcgccacaaaacatttatatcctacataaatgcgggagcgaacagacatacacaccaaggattttttgcgcccattaagttggcaagcataaacaaacgttccctcaaacattggcctttgcctctgtgggcacacacattcacacctctaggcggatcttttccctcaagtgaacattcaatttgttgacaaacgacttctgacttgagttacagcacacagcatatcactacggacacgcgacattccaagagtcgaatagagctatataagcgtctgcaaaccacttcacggctcttgcttaaacaggggacagcaaattagattaatgtcccaatgagggaggacacgaaagcacaca

SEQ ID NO: 578348 - DNA, 1206 bp, Homo sapiens
taaactgggtatttaatcttggattctccttcagccactcacccctgtgttctcatctttctggatcaacagtctttttctggcctcgggtcccctttctcgtcattctcttatagcgtcccctccaagccgtggggggcaggtgggtggtggagaagccacgaggccgtgagaattgtcatcgtggctcctccttccgtggcagcccagcaggagggcacgcagacagggggctgtgtgtctcacaacaccccacagacacgagaggcaagaacggggactcatatcatcactttacacccctcaccttatactccccgtgtccccacaggacctgggccaacattcagggggtgggcgcagatggggtcccaggatggcgctcacacctgaagcaaagtgtcacgaaaccatacacacagcaaccaagtcagcctactataacacttaacacttcacggggtacatcacagagagacaacaacgacagccagagtagacagacaacgcacacacaccacaagaaatcaagacagaaaagaaagaaccaaaagcaagaacacgcacaaccagaaagcaaaccgacacaaataagtgagagaaccgcaggaagaaactcagcagagaaagagacaaacaaaagaaggaacacagcaattggtaaacaaagagcgacacgacaggcgcgtggataaaacaaaaacaggacacgaaacatacgagaagagacagagaacgagcaaaagaacagcaccacaaagacaaaagaagaacacaagaccacgcgggcgacgccacacaaagggacacaacaacgacaggcacacaagcgcaaccgaagcaggccagaacaacagaccacacgagaggacaaacggggtagacacaaaccaggcgcagatgacggacgcgccgcaaacacacaacgacgggcagcgcagcaggacacacacacacgagcgagactcaaccaccgtgcccgataagaacaggcgaccatcgggatggcatgcaacgaagggcagagggagaaagcacagagcgagagaggagaggagaaagaggaggagtgacgcgaggaaacagcaaagcagaggacagggacgagagagcaaaagaaggaggaagaagacaaaggcaacaaagacaagagaggaggaagcgggggacgaacagcagagaggagagcacgaaaaggacacgggc

SEQ ID NO: 578349 - DNA, 352 bp, Homo sapiens
cacgagggtgtctgcaaggctgaagctgctcaaccctgaattagaagcagtgcagatattaatgtctgccacctcatgtatacagctgaagacaatcagggatggtgcagcctctctgatctaccgcgacctgtgtggaccctgcctcgttccatttgtgcatgttgatgataacggctttctaggatcagggtctatgatcggcatacctaccatcgaaatgattgcacaagagccctttggggtcacgcaacccatcattgatgctgtcaaggtatcacctgtttcctacctgaaggtttccaggagccctgtcctgcacacccataagaacgaggtcctgcgggtcgtg

SEQ ID NO: 578350 - DNA, 312 bp, Homo sapiens
ggcaggcgggagcagagggtgaggacttcaggaacttactattcaggaataaggaatgaatcagcagacctgggccagcaggttgggaagcataaatgttactgcctgtctcacccagttaatcagtctcggtactggtttcccttttggaaacaagtgtctgggttaactaattctgttttatggttgtgctaaattcatagcaggtgccttattcttggcttttagtcaaaccattccatatcagaattttcctgggtttactatagatatttggctttaagttgttgtttgtgttttttaatgtacaat

SEQ ID NO: 578351 - DNA, 762 bp, Homo sapiens
ttttttgttttgggtgggcactcatagttacagttcattacagtgaaagggatccagattaaaatcagcaatgaagaaaggcacataaggtaaggtccaagagaacttccaattatcctctccgggcagagtcttcaggataaggcttaattctcccagcaatgatgtgtggctacaaggatgtggtggcacagagttattaccaaccagagtagctcaccctaggcctaggtggttccagggcttttactaagggattggatccactatggggctatggcttcatctggcccactatgggttaacttaagtctcctcagtctggaccttgcaaggtcaagctggatactggctagggcccagggcccacaggtaaacaaaaacgactcttatcaggcaagatattctaatgggcttacgaggttatctcccacgagagccaggcaggggcctattctttattgggaatggtccagggcttcaaacatcccaagttcatccggtatcacacaaaagggattaacttcaaaagtgggtatccctgggccaggtgtgggggttcacaccggtaatcccagcacctggggagcgctgatgtggggaatggactggctgtgagaccaggatttcgacaccagcctggggcaacctagttgaggatcccatctctatcggaatttttctaacaacggggtattctaaagtcaggttactaccctgtatggatgacgggagagagaactgggaaacccctgtgtggta

SEQ ID NO: 578352 - DNA, 135 bp, Homo sapiens
  misc_feature (113)..(113): n is a, c, g, or t
tgtgggtctggaactcgagggacagagggctaaatcatgaagtttgtggatggcctgatgatcacaacggaagccctgttaactatacgttgacactctgttgcgccacgtgntgctcagacagggtgtgctggg

SEQ ID NO: 578353 - DNA, 197 bp, Homo sapiens
cccccaaaaggttttttaaaccctccccctttggggatttaatgttggggggccccccctgggtttcaaaaattaaaggggcaagggggctcccggggcaaaaaaaacccaaaaaaaaggggggggggtgttaccaatttttttcaaaaaccccccgggaaaagtttgtttttaaaaacattttggggtttttttta

SEQ ID NO: 578354 - DNA, 399 bp, Homo sapiens
ttagaggattggaatcgggaagcctggtagaagtcgcgggtccagatcattcatggaatcacggcatgatgcaggtagatattatacgggcgtgggagtactccacgcctagtctactcggaaggagaatggtattcttgctagcgatgctgtgaattggaggttccttgagcggtccacgcctggtcatcagctggcaggaggctctccaggcacacgcagcacacacagcacatgcaccacacgtagcacacacactgcatgcagcacacacacaccagaggacgcaccacacagagcacgcacagaacacaccacacagcgcacgcaccacacagagcacacgcggaacacacagcacacacagcgcacgcaccacgcagagcacccacggcataa

SEQ ID NO: 578355 - DNA, 272 bp, Homo sapiens
cgtgagctcttttcctcagtcatggccacagttgtatccatatagcatctcttaacatttcatctaggattatctagtcatagatcgttactatattgtggggctatgttgtatacaatgtaaacaagaccatatcttctctgcttatatgtgtgaatcataaagaaaagcatgaaattgcacgtcttcaagtacaacacaacatgggtgaatctgtctcatgtgctcccaggtgtccgtggcatggggctcccccagcaaagcccattcct

SEQ ID NO: 578356 - DNA, 299 bp, Homo sapiens
catgagctgtgaaaccatcaccacaatcaattttaaacatttccatcactctagaaagaaatcccatactcattagcagtcattccccatttcaccagtctcccagctctactttctatctctgcgggtttgcctattcttgatatctcatatagatggaatcatacaatacatatgtggtcttttatgactgatatctttcacttagcaagctttcattggtcatctatgttgtagcgtgtatcagtacatcatttcattatcaaataccaaacattccattgtatgaatataccaca

SEQ ID NO: 578357 - DNA, 789 bp, Homo sapiens
acctccgtctccgccgcttcacacccttctctttctttctctcttcagagagggttgtagggcaggcagagcatcccccgaggaggacggtcaggcctaacggactcctggagtccagggacctgccgtacggctggttagcggctaggatgcgccctgtctttcgtgggtagagccaacatgaggtgtcagcccgacccctctcaaggctgaggggcacaggggccgaaagtgtggccgcccctgggggtctgcgcctctttgtggagcccaggcctggggcccagaatctatctaccgccggggagccagaagatggaggaagctgttacccgttgccaatggccacctcttccaagccaaagcgcttttaacaggagagcgtactgcggtcagtgcagcgatgaggatattggcggccttcgcgaggcaccggttcaccggttgcatcaactgcaaactgctggtcaataagcgctgccacgggcctcgtccccgcttgacctgcaagggaagcaatatggcgcattctagtcaatgccttccccagagagcctccagtaagacgacaagaacgaggactgccgaaccttcctttcccgaggagaacagatgggaatggcttaacaatttcctcatcccgggacacaatggacagcattaaaagacgactcgaaggaccttaaagccagtaatcgaatgggattggatggcaatccaaagtctcctcaggggcctgggcgcctcaaggaacttgggccctaatcaaagccaatcgggccgcggaaa

SEQ ID NO: 578358 - DNA, 387 bp, Homo sapiens
aggactccaactacttggtaggctcagttgggtagatcctttgagcctaggagttcaaggctgcagtgagctatgactacgccaccgcactctaacctgggtgagatgactgagaccctgtctctaaaaaaaacaagatagtcctggcgtggtagctcacacctgtaattccagcactttgggaggccgaggcaggtgaattacttgaggccgggagttcgagaccagcctgatcaacatggcaaagcgcatatctactgaaaataccaaaattagccaagcgtggtggcgtgcgcttgtattcccagctactcaggaggctgagacatgagaattgctttaacccaggaggcagaggttgcagtgaactgagatcgagccactgta

SEQ ID NO: 578359 - DNA, 369 bp, Homo sapiens
cgggtggtgggcctccccaaagcaggggatggcagatatgagccactacacccagcccatttactttaatttttagccggggaaacatagtgagaacctgtctcttaaaaaaaaaaagggcttaaaataaacgggacacttttaagaggtatgtgggcccggatcatgggtttaagaagatagagcaaaactggagagttaaaccctagggttttttgggtgggtgggttgggtagggtttttaagctctgattctactagaagtagtcatgtcatctggggcaattctcttaaggtaccattggggaactgggttccctggtctatatgagagagtggatgataccttacaagtggtccgggggatca

SEQ ID NO: 578360 - DNA, 161 bp, Homo sapiens
cctgcctctgcgatcggctttacgcggtgcgtaagctgacagcccagccaatcagtgcactcccattctctaacctctgctgattggtattagggcgctgcgctgacacagctacagccactcagcaacagccgcatagtctaactctctgctgatctggc

SEQ ID NO: 578361 - DNA, 346 bp, Homo sapiens
ctgagctctgtgcttccccaatgtggagatgaagggggtattccccagggccccccagggacccccaggccgccatgccatctcagatgggcagacaggaggaccccccacagataggattcgcccttacctgcagaaataaggggggctgatcccatagtgggactgccgaatctacaggtggcctgagttcagactggttctacctccagggactagagtgactcctctggggaccccccaggaccgcgcgaagttgatagcaatccagaggactgccccctccttttggcttggctcctttcgcgttcctatggagaaccagcctttcgtcctccctccccgg

SEQ ID NO: 578362 - DNA, 382 bp, Homo sapiens
gagggaagctgcttactttggggggtagacctgaagcccctcctccttcccccacagatggggacaaggaggtaaatggggtcctcagaaccctgcagctcccacttctttagccgggcagcttttttgggggccaagatagggccaagggtcttttcttcttgctcccggcactggtcagggagtcttgggaagattggagaagagcaggtcaagcctcacatctcacatccacacctccaggaggggagacactggtaagtctctcctctcactcagggccttagacctttctcgactagacgatattccttctgggtagacagccaggtttagttggcgtctaccagctgcagcagctttccgcggggtcacgaggacg

SEQ ID NO: 578363 - DNA, 342 bp, Homo sapiens
  misc_feature (115)..(115): n is a, c, g, or t
  misc_feature (128)..(128): n is a, c, g, or t
  misc_feature (235)..(235): n is a, c, g, or t
  misc_feature (248)..(248): n is a, c, g, or t
  misc_feature (291)..(291): n is a, c, g, or t
  misc_feature (321)..(321): n is a, c, g, or t
cgtccccttttttccttcagaagattgtgacctgaggttgagtggtgctgctttcttaccatttagccgactcaagattgtatgccaacttcagcgacgtattttgaatattttntcttcacccttantcaatattattctggcccacccccacccaatgtgtatattacctaaactattttggttattcgtaatgtgtgtctcttgtagaactcgataccgagaaaccctcgcnaagaaagcaacgnagacatatgcacattgtttttaatcgagttttatttatttcgnaatttttttccaaatagtcattttccatgnataaataaatatatctaattg

SEQ ID NO: 578364 - DNA, 1125 bp, Homo sapiens
gatgactcagaggctgtgatcatggtagatgtgacaccctcctttctagtcctctcggaatgccctgtgcccttaccctagaccttggtgcgggctcccgctccttgcaacgtgatttccgacgactttccgtgtcccggtccggtcgcggtgagccccgcttcttgctctgtgggctacgtggacgatacccagttcgtgcgcttcgacaagcgacgccgctgagtccggtaggatggtgccgcgtggtcgccgatgaatgggagcaggagtggcgtcagatgtattcgggaccgggagacatcgcgtatgacgccagggacgaccgtacagattttcccgacgtagaaagcctgccgaggacgctgcgcgggcttacactacatatccagagcgaggcccggatctcatcgaccgcttgtcaggtggagtgcttctggtcttgcagtagcctaggaggccacgcaacgagtgtcgtcatttactctcccccaggtgtattgaaccacgatatccgcccttacagacggtccaaggatatatctccacccgctgaattgagagacttttgcgcgtcgcttgataccctgcggggtagaatcaacgagtcggggtccatgactcttccggaagctagagatagtccaacattgatagccttcttgagggccgtgagcacctgcactagtccataagccctttggggaaacaagaactagcaattggcatatcggaaggtttgagccttctcgaccaacaatttcgccttggagcaggacaacgggtgggcatgtggaggacacagtcgcggctaagccaaccctttgtatggcccctccaatatggaccacccacttttgcaccttcacccaaattgccaattgccttcttgacactagtggaaggcgccaacaccttgcaacagcgctcggaggcccctgggggttactaacccccttgcgggtaaattggatcactggcgcccgggcacaggacatcggacgctggggacggcgccagatccccaaggaacgaccgacggctccgtggaaaaaacacagggcctggcaaggggcatctggaacaccctctcagaaatcttgggcaccattctcatctgaatgc

SEQ ID NO: 578365 - DNA, 1842 bp, Homo sapiens
  misc_feature (705)..(705): n is a, c, g, or t
tggaaaaagccagctaatcttaattggtcctcggggggcagggggctcagaagccctcggggggggcggggtcccgtttcctctctttcaccatctcacagggctttcttggcttgcccaggatgtggcgcttggccctgtgcggattggcttgccatgtgcgcagggttgggggcgggcactgtgttctctgtgcgggactcagtggtgctctagatgccgtgcagtgagcgtgtgggggcggaaggcatctctcgtgtggtgagaagtgggtggctccgaaacatatagagagggtgtggacagtgttccccgaatgtggaccggagaaatctctcgcggtattaatgtgagccaccacagaaaaacagcctttttgtgcccgggcgagagaaaggggccgggagatcatcagaagggcccccacaagagctcttgaggcgggggagaaatctcaagcccccaggtgtagcacacgcgggagaaaggagaacatgtgcgcggggcgccctctccaaaaagtatcaaagtgggggggccccaaaagggcgccctgatagagcgctctgcgagataaatatcctccctgctctttgtagcgagctcagacggggagaaatctgtcgggagcagcgaagattctccctcagacgatacagagccacaatctccacaattttttcgcgagatgattatctgcgcganaaaacagcatattttggcgcggagggcgaggggatgcccccctctcaccaggagaagaagaggaaagagacagcacacataacgggtccctcccaaaaggagtatttaatatagatatgcaatattaagtataataagatgatgtctaaacagcagaattatacacaccagcagaatgtcgggtatatacaataatatccgcggacaggacaataccccaaacgaagtagttgtgttgatgtggtccccccaacagaagggcatcacccagagggggaggggaaataacaccccacataaaaaagagggacgccgcccaaatgtggtggtgcccccccgtggtgcctacccaacaaaaagcgcgtataggcatccccatactgttgaccaccatttgatgcgatcaccacccacccccggcgctgggaagacaatacggaccaacgagagggagactccaccccccaaagatagagggaggggaagcggcggcgtgataaagagcgggcgaaccaccccaaacgaaaaggtagggatcacccccgaggagggatgtgagtagagcggacccccaccaccatgggggagcgtgcaggagcaggagaaacaaccccagagcgaccgatcgggaggggcgcacaaccaacagaggagcaggagaaacaaacacacagcgactgtcgggtggacacaaagagggaggagcgcccccccaccatggtctcaccagagacgtacagacgaggacatccacagggcgggctccgtcaacaagaagacccactattgcggctgtggagaacaagccgagcagaaaaacaacagccgccgcggggggggcagaacaacaccaaacgaacgcgcggcgataaaggaaaccccccccttgtatgtagtacacccgcgcggcgaacaaaaacaggcgcggggcccccacatgatcaaaaagagaggaagggcggacccccctcatcgatagaagaagagcacacgccaagcaaacaccaaacaaggcgagagtataaccgccgcctgggacaccacaagacgatggagactgaaggaagcaagcgtagagcacccataccaccacagaggagacagcggcaacgcaaccacgcagacagggaagtagct

SEQ ID NO: 578366 - DNA, 217 bp, Homo sapiens
actcctgcggataaaattgtgtgatttttcagttgatgcactctttctacacacacacacacacacacacacacaccatttatacacgaaagaaatctggagaatatatgtgggaatggatataaagtgtgtggcaccatggtggaagtaacacaaagtcggagtacgctatatttattaatgctaggcccactacaacagagtattctggtacttc

SEQ ID NO: 578367 - DNA, 500 bp, Homo sapiens
  misc_feature (25)..(25): n is a, c, g, or t
caacgatggtcctctagctacctgngaaggtgaggtgtgagaatcgcttgaacctgggaggcagagggtgcagtgagcctagatcatgccattgcactccagcctggaagccagggcaagaccctgtctcaaaaaaaaaaaaaaaaaaaaaaaatttggttaaaaaattaacttttttttaggtttttttatttctctcttaaatttaacaggattcaggagaattattatttaaagagagggcctatcacattatgaaaggggggttaacctacaggggattataaactttaacagtttattatctcagagaataccggagaataaacggggggggaatttttttcccgtgtaaaaggggagattaaggggaaggagaatgtgagagtataattgagaggggggagaaaaagaagagcaaggtgtcaaactgggaagatgtgcaaaagacaaccacatttaaggtttgggacaataagcctccaaagattaaaattaca

SEQ ID NO: 578368 - DNA, 1790 bp, Homo sapiens
  misc_feature (1712)..(1712): n is a, c, g, or t
  misc_feature (1724)..(1724): n is a, c, g, or t
cgggggagccagtcagtttccggccaaggcagcagggagaaagacaaaaaaaacggtgggatttatttaacatgatcttggcaaacgtcttctgcctcttcttctttctagacgagaccctccgctctttggccagcccttcctccctgcagggccccgagctccacggctggcgccccccagtggactgtgtccgggccaatgagctgtgtgccgccgaatccaactgcagctctcgctaccgcactctgcggcagtgcctggcaggccgcgaccgcaacaccatgctggccaacaaggagtgccaggcggccttggaggtcttgcaggagagcccgctgtacgactgccgctgcaagcggggcatgaagaaggagctgcagtgtctgcagatctactggagcatccacctggggctgaccgagggtgaggagttctacgaagcctccccctatgagccggtgacctcccgcctctcggacatcttcaggcttgcttcaatcttctcagggacaggggcagacccggtggtcagcgccaagagcaaccattgcctggatgctgccaaggcctgcaacctgaatgacaactgcaagaagctgcgctcctcctacatctccatctgcaaccgcgagatctcgcccaccgagcgctgcaaccgccgcaagtgccacaaggccctgcgccagttcttcgaccgggtgcccagcgagtacacctaccgcatgctcttctgctcctgccaagaccaggcgtgcgctgagcgccgccggcaaaccatcctgcccagctgctcctatgaggacaaggagaagcccaactgcctggacctgcgtggcgtgtgccggactgaccacctgtgtcggtcccggctggccgacttccatgccaattgtcgagcctcctaccagacggtcaccagctgccctgcggacaattaccaggcgtgtctgggctcttatgctggcatgattgggtttgacatgacacctaactatgtggactccagccccactggcatcgtggtgtccccctggtgcagctgtcgtggcagcgggaacatggaggaggagtgtgagaagttcctcagggacttcaccgagaacccatgcctccggaacgccatccaggcctttggcaacggcacggacgtgaacgtgtccccaaaaggcccctcgttccaggccacccaggcccctcgggtggagaagacgccttctttgccagatgacctcagtgacagtaccagcttggggaccagtgtcatcaccacctgcacgtctgtccaggagcaggggctgaaggccaacaactccaaagagttaagcatgtgcttcacagagctcacgacaaatatcatcccagggagtaacaaggtgatcaaacctaactcaggccccagcagagccagaccgtcggctgccttgaccgtgctgtctgtcctgatgctgaaacaggccttgtaggctgtgggaaccgagtcagaatatttttgaaagctacgcagacaagaacagccgcctgacgaaatggaaacacacacagacacacacacaccttgcaaaaaaaaaattgtttttcccaccttgtcgctgaacctgtctcctcccaggtttcttctctggagaagtttttgtaaaccaaacagacaagcaggcaggcagcctgagagctggcccaggggtcccctggcaggggaaactctggtgccngggagggcacgnggctctagaaatgcccttcactttctcctggtgtttttttttttggacccttctgaagcaaagacc

SEQ ID NO: 578369 - DNA, 422 bp, Homo sapiens
ggcggaccttcatctcctcccactcatcagtatcctcttaataataaatggaaccaccatcaaccaactgctcaagtcaaaaaaccaaagagtcagccaggtgcggtggctcatgcctgtaatcccaacattttgggaggccgaggcgggtggatcacctgaggtcaggagttcgagaccagcctggtcaacatggtgaaaccccgtctctactaaaaatacaaaaaaaattagctgggcacggtggcagatgcacataattccagctacttgggaggctgaggcaggagaatcacttgaactcgggaggcggaggtttcagagagccaagatcatgccatggcacttcagcctgggcaacaagagcaaaactccgtctcacaaagaaaaaaaaaggccaggcgcggtggctcacacctgta

SEQ ID NO: 578370 - DNA, 774 bp, Homo sapiens
ggttctttttcgtccttttccccggttgctgcttgttgtcctggtccgcgccagagcccagcgcgcctcgtcgcccatgcctcggcaaacattgaggcaacatcaaggacttcctgctcacagcccgacgaaaggatgccaaatctgtcaagaatcaagaaaaaatagggacaacgtgaagtataaacagtccgatgcaagcagatacctttacacccttggtcatcacttgacaaaacgagaaggcacgagaaactgaaggcagtccctgccccccgggttttgggccattgacacggacttgacactgacacccagacaacatctggatttggcacacctgcgtattcatatctcaacacttaccttaaaaaattcctttaaaacacaacaaatcatcacacatcacactacacacaatacaccaatcaccctttgtgtacgcgaacaccacatctgtcgatcatcgagagaaaaaaatttccgaaccacacacatgcggcatcatgacagcgccagcgtccctccagcttgattcattcaaacataagacaaccattgtggtccccaaatacgaacggtgttaaccaacacaagagagaaaaatcccatgagtggctactcagtgatacaaaagagcgactagcggaaatacatgcaccaacccaaagatgaagagaagcataaggtacgcgagatcgagacaacaaccgagacacgcagctagcgcgaaccacacatacactctcccaaagatgatgcgactatcatgga

SEQ ID NO: 578371 - DNA, 170 bp, Homo sapiens
accggtagagcggtctacccctgcagcgtatggaagttcccagctagggtcaaatcggagctgtagccgccggcctacaccacagccacagcaacgtcggatccgagctgcatctgcaacctacaccccagctcccggcaacgctggatcctcaaccagaccgctctacg

SEQ ID NO: 578372 - DNA, 356 bp, Homo sapiens
cggcacgagggtgaatttcaggtctgggttatcaatgacctaaattgagaaaatagaggggctgtgtggacaaggagagagaagagagcatacagctgccctatgccgttgctctgttcacagtgaggattgagccattctaatccccttggattttttatctaccaaaacagcttgggcccatcagcaaattgcagtggcatatggtccaggtttacgagtaatctggcacatgattaaggcaagggggatgtcatctttcagcaaatactgaaaatattgtagaagaatttggtagagtttttaaattcaaactgataaaattgtaactattaaatacttccccaaatcaaaaa

SEQ ID NO: 578373 - DNA, 349 bp, Homo sapiens
  misc_feature (21)..(23): n is a, c, g, or t
  misc_feature (69)..(73): n is a, c, g, or t
  misc_feature (79)..(80): n is a, c, g, or t
  misc_feature (103)..(103): n is a, c, g, or t
  misc_feature (106)..(106): n is a, c, g, or t
  misc_feature (108)..(108): n is a, c, g, or t
  misc_feature (199)..(199): n is a, c, g, or t
  misc_feature (201)..(201): n is a, c, g, or t
  misc_feature (203)..(203): n is a, c, g, or t
  misc_feature (210)..(214): n is a, c, g, or t
  misc_feature (221)..(221): n is a, c, g, or t
  misc_feature (223)..(223): n is a, c, g, or t
  misc_feature (229)..(229): n is a, c, g, or t
  misc_feature (245)..(247): n is a, c, g, or t
  misc_feature (258)..(258): n is a, c, g, or t
  misc_feature (267)..(267): n is a, c, g, or t
  misc_feature (290)..(290): n is a, c, g, or t
  misc_feature (309)..(311): n is a, c, g, or t
  misc_feature (317)..(320): n is a, c, g, or t
  misc_feature (327)..(327): n is a, c, g, or t
  misc_feature (335)..(336): n is a, c, g, or t
ccgacccgctgctagtgcctnnncccccaaaggaaccaccgcctccaccggtccctcggcctcctgtcnnnnnccctgnncccctgccggccactcccagtcngcnanccccaccccagccccagctgcagcttcgggtctcacccttcggcctccgcacttctccatatggcagcagcctggacctcagcactggcancncntcacggnnnnnccccaangncccggncccccccggggcacannnccccccctcancaacctctncgtcctcctcctcctcatctacntcctcctcgtccgcgcagnnncccacnnnnccccgangccctcanngcccctgcctttg

SEQ ID NO: 578374 - DNA, 619 bp, Homo sapiens
  misc_feature (311)..(311): n is a, c, g, or t
  misc_feature (364)..(364): n is a, c, g, or t
atttatattaccggatggggggggtgaaaaattataaccaatcactaacatagcagggattaacccctataccttttgaataatgaatcaactagaaataacttttcaaggagagcacaatctaagacccccgcaaccagtccagctacctatgaacagctatttttgcggggggggctatataacaaactacaccaaaaaaaaatagccacaagctacaaacctacttagcctgtttatagctatttttacaagatagaatctaatctcaactacaaaaatgcccacacaaccctctaaatacacttttnaaattaaatgatagggcaaacagcttcagctctttccacactaggaaaaaacntaaacgtaagcgccaaaaacttaacccttgttatacactaaaaggtgacaccaaataaataagaattcaatctcaccccccctacaaaaaagaatcatcaaaaaaccaatagaaaacttctctatcactccagatcctccccttttattttaacctttaatatcttcttccccattcttccttaatttccaagtcatccctacggacatcccctctttctttcctctctatatctaacactcttctccgatatca

SEQ ID NO: 578375 - DNA, 340 bp, Homo sapiens
gggtgagcttgagatcgtgccatggcactccagcgtgggaataagagcaaaactccatctcaaaggaaaaaaaacaaagaagtaatacagaagagaagatttccacgtcccggttctagggcgtagctaatgggcttcggcacgggatctgccatctccaccttctctctgcacaagggggcgtctaggcagggctctggagagtgtatgaacagctgcaccatgtgctctcggacttcctttcctcgcattggttctggcgtctttccagggcatctctgcaggagcctggtactcctagctcaccatcctgatcacgtaatctccttggtgcctctga

SEQ ID NO: 578376 - DNA, 225 bp, Homo sapiens
tgtatgcccaacactctgcctcttacaagtcaatgactaagtttatcacagcttttaaaaacaggaatggcttgctccctgacatctacacaataccggcacaaggttcccattaaactagcaagtcggaaaacttggaaggaaggagaagaaacaacaggacttacgagccgctgagttgttaacagcatggactagctgtgcaatggtgttgggcgataaata

SEQ ID NO: 578377 - DNA, 658 bp, Homo sapiens
gatcaaggaagtgtgtgtaagcccctgtctggtgtcctaccctcggtgtagaagagcgggaaaggtatctgatagtatctgtatagaggccctgtgcggattaagtcaaggagagcaggcccctaagtgggctgcagtcagcatgcgcctctcgtcactccccctagtaaggttagcactcacctacctatcacctatccactcagagtcgtccataaggccccacagtgccagctgcttccacctcctgcccacctaccttcctacctgagcccgtagagactccgaggtacccctaccagcccccctgagccccaggacttgagcagcagcgtctgcaaagaggagcaagatgcccagaggaggctcactggagagcgtacggctagcaccaaggagccagcctaagactcagccctgacggttgccatccgccgccacggccgcagaaaagtacaaacaccgaggggagggagagcgcaaagacattgtttcatcctccatgccaacggccaaacagagaggagcctgtggacagcccgacgcccgtgaccgagagagttagctgacttactacggagcaggaatgcaaagcaaaccaacaagaataaaggcagctgttgtctttactcccttaggggtagggctcgtggaacca

SEQ ID NO: 578378 - DNA, 351 bp, Homo sapiens
aggtcgcaacttatattaaaagtactttcaccacatcttgctttatgctcccagcgaaccctatggggagggtgggtctggaatacatccaggatccacggtaaaacacagttatccagaaccctaggaaaccagccattcaaggttcatcatctggcgtcaatgagcacatcctatgtgtcagacactgcgcttccaggatagaaagagaattgatggacacggccttggggactcgaacttggacagccgggttttaagagcagacacacatgaatgcatcttctggcttttttttcccgaaaaaaagatgcaccctggaatgctaccttcctaaactgtaggaaccca

SEQ ID NO: 578379 - DNA, 1113 bp, Homo sapiens
  misc_feature (1)..(1): n is a, c, g, or t
ncctttgacacaccacaattggggtctgtggggttttttgccaagcccctctctcccaaattctctacccagtttttcccgcccgttcctcaaagaagcctttcgccccctattgccgtctaaacttctcaaacccatggagcccacataagtaactcccacatgtgggttaccctccgtcctttgaagaaaacccacacttgacaagaagcctgcttgaactctttccacggtaacagaacgaaagttgggatcaattttgcctaaaatacttcactggaccccaggttcttaaaagaggctttcccgacttctcttccgagtcccaccccacggtccctggggccccccggggaagggtaattccccagaaaagggagcttcccagggacctctcttttcttccaggatatgccccccggatcaaagaggagagtgtgtgccctttttatagtccacaagagagagaaatatgtataggaggggaatagtatctttccccaggaactacccgccagtgtattggtctcttctctgttggcacaataggtataaaagtggaaaccccctgttttggagatggggcaccacagaaaagggaaggaacacttgttttgccagaagccaggcgtttctgtaagcccaccctggttatacgccacaatatgcgtcccctgcgtggcccgtgttctcagctctcccaaggcccagtccagagctggatctctccctcccagaaaggttccaggaataacatgcgtaccggaccaacacatcccatttctatgtaaagccctttccagaagattgtggttttctttttataaaagactgatagtttctggagcgatagaaagccaattactgaatatggttatataaggaagccaccaagttggctcaaaggccaaagatgttttttttgacccagatgaagaaatttgttgagtggttcaccaaaatagccagaagaagaatccgatatccggaaggtgaggaaaattaaatggcgtccaacaagccaccaataccttagggtacccaccacgaccccatttttgattgggaatgctgaaccctttgagaagagaaacttggcttctgtttttccca

SEQ ID NO: 578380 - DNA, 225 bp, Homo sapiens
  misc_feature (26)..(26): n is a, c, g, or t
tgtaatagtcaaatttagtttatttnttcatgccatgtgagagtacatagagtatctttaaaatgaaggcaaacaaaggattaatttaataacactatatatagaaaacattgctgatgttggagatggctcaagaatatttttcagatcttcgaattaggcgatgcctcctactgcgagctgatatgtagtattttcgggggcaaacacacactctcaggatga

SEQ ID NO: 578381 - DNA, 473 bp, Homo sapiens
agaagttcatttttattcagcaagaatttttagggtctattccatagagaccaataactccattcgttctaagtaaatgtctcggacagataacccaccaaaatctgcagtctgtgtggccctcaaacatttccatgctctgtatctgtgctgcagggggcgctattctcaggaaccacaggcttatctggctcatagtacttatcgactataacaattgctggctacaagcctgctactgggatgtcttgcacaaccataaccgtaaaacttagcgtttgattggtcacctgctccacataaatgaggacacgggtgttgctcacttatgtacggctcacagagctggatctttcaggcattgttactgttggattcaggggaataaaaccggatgccatctttacatatacagtcaccatattggccgcatgacggtttactgtgcaactgatggtcagtgacatccgaaa

SEQ ID NO: 578382 - DNA, 909 bp, Homo sapiens
  misc_feature (897)..(897): n is a, c, g, or t
attctagaggccgaggcgggtggatcaactgtggtcaggagtttgagatcagccaggccaacctggtgaaaccccgtctctactaaaaatacaaaaattagctgggcgtgatggtgggcgcctgtaatcccagctacttgggaggctgaggcaggagaatcacttgaacccgggaggcggaggttgcagtgagccgagatcgcaccattgcactccagtctgggcaacagagtgagattccgtctcaaaaaaaaaaaggaaagggaaacaaaaattagctttatacctcttccttgtttcaaccgcctgggaaaattctgaacatctcccaaatcccgttgaattatccagaaacaaattttatagggtttaaaaactaatttaccttcttataggaaatagtatacttaaaaaagcctcggggaaaattatcctctctaaacagctacacaatccagtgcagtaacattaaccaatatgtctctacgttgccgaaaccacctaggcctatttaactgcggtggtgccctcagtgcctaacaatgggtgcccacctacatattcgtagaatgaccctgacattgtaacagccatccgttttcgtttacatcgccaaccccaaaggtcgtatatgtcatgcttggagtataatcgattcagatacaagagaagacgatggtgggactagacctagtacccacatcataaagccacatatgactgttacacaaatctcctttccaagtatttcaaacatggggaccaaaggaatcatggcgaacaggcaaacttgcttagaaattgtaattgcgcaataagtacactctggcgcatgcaggacacaggtaactggggcgctgccagcacacaggagcacgtgtttccgctatacattcngacataaacaag

SEQ ID NO: 578383 - DNA, 256 bp, Homo sapiens
ggtctcagatacccaagaaaagaatcgtcacatataaaacctgggaaatgtagcgtggcagggagctgagtgtgggaagagggctgggtaggagtgggggacggaggagaggtgtcaggcgccttccgtgtgtacacctttactactatctcatcctcctccttgcggtcctcaagttcagagactgcttatcctttctagagcacaaatctcttgtcatttatagctgagaccagggaggcacagttgccctcca

SEQ ID NO: 578384 - DNA, 158 bp, Homo sapiens
gaatgtcaataaaaaaaggtttgttttttctacgcacaatatctttgggaacttggaggtgcagggtcaaacgtctgtgtgtgtatgtggcagggacaaaacagggattagggatgtgagggggtaaagttttcagaataaagggagagaaaattcca

SEQ ID NO: 578385 - DNA, 1239 bp, Homo sapiens
  misc_feature (552)..(552): n is a, c, g, or t
agcggagccgcgggtgttgtgctgtggggaatcggagaaggatttgtaaaccccggagcgaggttctgcttaccccgaggccgttgcatgctgacgtcagaccccccggagtgaacgtcccaccgttcaatcaatgtcatgacctcatgcgtagggtcaaacagccttcaagctgagcgacttcggggagagtaacgaacgagaagggtgaagtactattaaatctcataatgtcattggcacaagtgatagcatgtgagattcacgttcgaaccgttgaataaatgacgaatcggcatctctagcgtaatactcgaatgaatccctaactgtcaagagacagggttgtgtcctacaatgaagtttcaactcaaggttgtctctttctgcatgtgggtcagcagcacagtttgactgaatcataactcaattacgtcgctatcacagcacatcttgcgcgaattcgcgcacgagacacgaaaagatcgttcgatcttgacgaggtttaatcctagtggatacgcacatacgtggcgcgtggtccaagtatcngagaccccacgtttttcactgaataatttctttcttttgtaactctttcttgtataccctttttatgtctccccatcaagatccccgtatttgtacttcacatatgtatctaacagaaaaattaaggtatccttctttttggcattacagtcgttggggctcgtttcccaatccaaccgttgaaatttttggcttcacaaacctttgggctgacgccaccctaattcttttctatttcttgaaaagagctattcctttgagactaccattgtgtgcgcaattttccttaagttggctttccagctttaagtttccaattttaagtctcgactgcagcttttatctccacatttgtgggttggactttgcaagttttttaagtggcgcgttggaactctccaaaagggcccccttcaaagaggctccccccccgtttttccccaggttaatttttaagccccctcgtttccattgccccgtttttcttaggtcaaagcgcacacagtcttttaaaccggcttgatgtgggcccaatccacggcgaacagccaagaggggctccaaacccccttttgtgttgtggtaccaagggggaaacgcatattttggtcccacactctttcttcttcccaaggtcggaccctttgtggctcgggcgggtctggcacatctacaaggacttttaca

SEQ ID NO: 578386 - DNA, 243 bp, Homo sapiens
ataatctcttgaacctgggagaggatgttgcagtgagcccagattgggccactgcactccagcctgggcaacagagagagactctgtctcaaaaaaaaaaaaagggcttattttttgggccccccaattttttgtatttaaccctctttcgggggaaaccattgtttccccaggacccgaggggtttgtccaatcttttcgggggttcccggaaattaccacggggcttctgtggaaccccca

SEQ ID NO: 578387 - DNA, 495 bp, Homo sapiens
agttcaacgatcagctcgccattttcggcgcggattgatttcaatccgccgtcggcgcgatcgcctgttcggaaattccacaaaagttcaggtttttcgtccttccatttgtagatataaaccagttgaggaattgccgaaccgccggtttcaatcttgaggattacaacggcctctttggcgccgtcgccgtcaacgtcaaggtatttgatattaaccaggctggcacctatacggcgttcggccttggcggcagctttttcgtcggggctcatgtcgtcgcttacgtctttcattttcggctctaatttgccgtcagtcagcgtaatctcatctccgtcgcggtgctgccatccgcgcggaagcggataagtaaaattagcgaaatcgaaatgtcccagcggcgtgtcgggcggtatctcgcgtgtagtcagttcactttgaagattaggtaattcaggtgaaggttcggcagcgaatgcttttgataccgat

SEQ ID NO: 578388 - DNA, 462 bp, Homo sapiens
gtgggatacccagcacagtcagtccttaccacataaagacctgcccccatgattcaattacctcccacaacatgtgggaatttaagaggagatttgatggggacacagccaaaccatatcaaatagcaaagagcttaagtaattgacactggatgaactaggtagataattatagagtcaggactgaaacttagataacttgacatttaattcaattgtctctctagactagcttagtactaaaaggcaatactgacactccacataaactaagccaaaattgggccactaaatagtttcaggctcacatatacatactgagtaagaagcacagaggttgatctcaacatgtagcagatggcttctatattcttaagggataaaactttgagatttttcttttgctccttgtgtgttaagaagaaccaaaacactttagaggtcccagtcaatttgtgtttt

SEQ ID NO: 578389 - DNA, 407 bp, Homo sapiens
  misc_feature (103)..(103): n is a, c, g, or t
  misc_feature (115)..(115): n is a, c, g, or t
  misc_feature (300)..(300): n is a, c, g, or t
cttaccgtcacctgtatcatttatattttcttaactaatttatcatctttagtccaaaaaaatactttcttaagtaaagtcacctactaacccattcactagngactcctgaatntacaaacctggtcaaactcttttcctttgctccagttgccttgagatcaacatttccacaccagagcacttgtggccctggtgggaaacagatcgccatcccgcaaccccctgttatgttcatatacttccacggttctcgcgtcatgcctgtgcctccctttctatgctcatattcttgactgngccatgacttcagctctccatgatattgcccgcagcatttctcatcaagtcttctctgcttcagacctcgggtctgctattggacaggttcatctcggatcctctgg

SEQ ID NO: 578390 - DNA, 157 bp, Homo sapiens
  misc_feature (5)..(5): n is a, c, g, or t
  misc_feature (37)..(37): n is a, c, g, or t
  misc_feature (54)..(54): n is a, c, g, or t
  misc_feature (96)..(96): n is a, c, g, or t
  misc_feature (134)..(134): n is a, c, g, or t
gtacncccaggtctccactgcaagcagcaccctgggnccccactcgccagagcnactgggggtctgcagaaccccccgcccccctgctccccaatntggaggccagcgatgatgaggccctgttggctgttgancgctgggctcgctggtgaccgcc

SEQ ID NO: 578391 - DNA, 858 bp, Homo sapiens
ggtggcatagctgcggagcagaaggcggagacgttgcaacaacagttacagctcgttctgggagcggcatggagcgagagtgaggtgttcaggcacgagccgtgtgggcgcgctcacggcgtcacaagatgatcaagaaatagatactgcacttggggtgcgacatgcttgcccgatcagtcagaggacggagactgttatggtcctggctggtcatggtccctcgagccggggtacgtctgacagcccactcggcagcctgtgacaaggatgggcggacggatagtgctggcgataaggagatcagcaggcaggagacaagcagataggcctgggtcccaacatgtctcaacccccgcgacattaggttggcatgagaacctcagttctgttcgtccaattaatgaacccgaagacagctggaccgcccaagaggtcgggccggccccccaaaagccgggagagccatattacccccagtcacgagaggtcagtcctgtggggcccccccagcttcccatcatgagttccctgtgtcagcgcaagcggggttaggagcccccggcccagttcgagctcagacaggcgactaggtgataagtccagataatgaccccccaagtggacttagcagtccaatggcttcagcggtggagaaccatcccagtgaagaagagttcttggtataccgtaatgactgcagcttccccggagcaggttcagaactctgtagtccaggcaagcaagtagcaagttagcagcgcttgtttcagacccgtaacagcaaagtgcccttcaaaacagggcggtggcacaacctcgttctctcgggggcactttcccagagggacagcagta

SEQ ID NO: 578392 - DNA, 710 bp, Homo sapiens
  misc_feature (710)..(710): n is a, c, g, or t
cttctaggcatagtagggaggatatgaggtgggtgatctgagcggagtggatgcggaatgaaaccctttctctagaaagaagatacaaacattagctggacagtggtggtacagtagcgtgaaaggtcccaagcgtacctgcggggcggactagcagcccgcgcggaggcggcactaagaggagcacactgagagcacaagggctcatcgacaaggtggcgagcggaggagagagagggaggtagaaggaacggacatgcaggaggagagaggaacaaagatgggaaggcaaagagaaggggggaagaacgcgacaggcagtacaagcgagtctgtcgggcgacaaaaggcagtgctgagcagaaagaagtaacccgccggagcgacggtagagactggaagacgaagcaccagggatgggggacagcccaccaaaataggaggcagaaaacagagagccccgaggaaatagaactgagtgccgacacaaagagaaagcactgaaagaacgtagcaagttagaaagaagacgacgacgtgccacacacaataaaaggatggacacccacacaagaacgggcgcaaaagaactgtgggacaaagaaacaaggagccgacgagggcggcactagcgagaacgaacgagcacaataggaacagaggggagagcgctgtgagaggagcacacagtggaccgccgagaaacagan

SEQ ID NO: 578393 - DNA, 364 bp, Homo sapiens
  misc_feature (364)..(364): n is a, c, g, or t
agactacgtacataacctatacctactccaatgctaaaactaatcgtgccaacaattatattactaccactgacatgacttttcaacacataatttgaatcaacacaaccacccacaggctaattattagcatcattcccctactattttttaaccaaatcaacaacaacctatttagctggtccccaaccttttccttcgaccccctaacaaccccccttctaatactaactacctgacttctaccccttacaatcatggcaagcgcaacgccacttatacagtgaaccactatcacgaaacacaggcacagaacttcatattttatatcttcttcgccacacttatacccaccttggcttcn

SEQ ID NO: 578394 - DNA, 134 bp, Homo sapiens
cataacggcggagtgccgcggtctgctatacgatgtactccattcggtttaagctctgggcactttccaagtctctgtgtcctgttagttgtccagttggggtgtatggtcgccgtgccgttaggccgatctga

SEQ ID NO: 578395 - DNA, 119 bp, Homo sapiens
gtctagagatccctgtggagacgggtctcaggaacacataatggatacaatcagcatgtacaaagcattatcattctttcttctagattatggcaaagtcctgacttttgttcttcccc

SEQ ID NO: 578396 - DNA, 644 bp, Homo sapiens
  misc_feature (374)..(374): n is a, c, g, or t
gatgaaagccttgatagcaggcgcgccggagcccgagacatgtgtaagtaaatgaagcgcatagctacctgacgggagacgcacccaagatgacgcggctgtctacatgcagttcccagacgctgcaagccagctcacgctcgcacggcatggcgatcgtccgtccgctcaaacgatgcccgcacacgcagaaacggtctcgcaaggggcgcatgctagatggtgcacgactaagaggcacacggtgacaggacggtaaacctacagaatgatagccatcccgccagagtgcttagtctggctacaacgctagctcctaccaacaggccgacgagcccagagacctaaacgaacagtgtccacctgatacacangaagcggtagcagtaagagctagccacagaagcgggaaaaacatgggaaagagactgaattgcctggacaatggagcggcgagatacaccgcattgacatgatagattgggaagaatcgccactagaaatagcacgactcatggcgaattgagatatgctagtaagtgtggctcggagtattgcacataggtgaaaggttgtagttgcgatttgtttggataacttgttgttacttctggtgttgactggtacagttttgacaattagtg

SEQ ID NO: 578397 - DNA, 280 bp, Homo sapiens
cgctgctggaagcacgacttgccaccgtcaaccgcatggcggcagccaacgacctgccggatgccatcgtcaccgagtcgggcttgaagatcacgctgctggatgcggcggtgcccgacaccgcgcaggcgatgatagaccagacagccatggtcctgccgcacgtcaagatcaccgaactgctgctcgaagtcgatgagtggacgggcttcacccggcacttcacgcatttgaaatcgggcgatctggccaaggacaagaacctgttgttgaccacgat

SEQ ID NO: 578398 - DNA, 105 bp, Homo sapiens
catcggtcggtcgtgcaggtagaccggcttatagaagtgtgaaacgtgtcatctggctcgacacgaacaaatccctccgccccagctttccctctggtggtaccc

SEQ ID NO: 578399 - DNA, 117 bp, Homo sapiens
gatccccatggcagcacccaggtctgcagccagcagcactggcctcgccatcaggcaacaagggcacacccacatccttttccaggttggcaaggggtcacgcagctcgcacattcg

SEQ ID NO: 578400 - DNA, 171 bp, Homo sapiens
ggaaaaaagtaggatatgaaatgaaatctgtgtctataaaagaaaatggataggccaggcgcagtggcccacgcctgtaatcctagcactttgggaggtcaaggagggtggattatgaggtcaggagattgagaccaacatggctaacacagtgaaaccccatctctacca

SEQ ID NO: 578401 - DNA, 181 bp, Homo sapiens
tgccgtacaggcacagtacttgtttgattctgaactggggatatcaagacatttttaccaaaaaaaaaaaaaaaagggccttacggtttaacttcaaattcacattccctcattaagaagctaaaaccgggaattaccaaaattgacccaattgttcaaaccttcatagggaaaaagcaga

SEQ ID NO: 578402 - DNA, 218 bp, Homo sapiens
gtccccccccccttcccacttaaataaaggggccccctgttgggtgtcttttgtaaaaactgccaggcctaggctttttgtaaagatttttcaaaatcccggggggggagcgctttttcttggtgaaggagtttttttccccctggaatgtgcctgggggggtatgtaggggtaaaaaaaaaaatatatatatatataaccaagttttttgcccccta

SEQ ID NO: 578403 - DNA, 1276 bp, Homo sapiens
  misc_feature (226)..(226): n is a, c, g, or t
  misc_feature (456)..(456): n is a, c, g, or t
  misc_feature (476)..(476): n is a, c, g, or t
  misc_feature (615)..(615): n is a, c, g, or t
  misc_feature (1053)..(1053): n is a, c, g, or t
ggataagatgcgggtgatgggcctacgccggcagtcggaactatgctggccgctgggatgtcctgatccagcagggccacccagtgtcctctaaccgactgtccatccagcattgcgtgcccgctcaaagaaggacgcaactataatccttagactcaagacaaactgattatatgggatctagctccagtagactgaatacagatgagactctattgtgaaggcnttcgcagtcgcataatgctattagtataagtcttgtcccatatggacgtagggaccgtagagaagaccagtaaacagagtatcaagccgacatccggactgaagggaaggcgagaggatgtccgcgagattcattgctgggtccgttagaaatgaatagccaaacatgtcatcgctttgaccgacgaattggttcgcgtgcgcacgttgccgtggccatgaggggtctcnttgtttcgatgtgaggcatngcgagcagtggaacggaacgctgagatcaacgcctacgatgacggacaagtacctaacggacgagaaacggctcagtacaaggctgggagtcctagacccacggtggataaatcgcgcttttagacaacccagaacggntggtagcgtagagcttccgagggggtccgcaggggggcgatggggttggccggcttaaccaaagtctggctagttgcacatatagcccagaggaggaacccacccccttgggcatgagtcacatccggctgcggcaggactggccaagcaaaacacagaaagggcgcgcgaggagcaagtgcggagcgaacgcgaaagtggccacggatataccacagaattgcgaacggcgtttctccaaaaccccctggtgaaacgtaaagggaaacgaggatttgcgataagggcggatacagtaccgccctctctggagacattccaagcattttgctgtttgcggttatacaccaaaaatccattacctcccgtgtgctggaaataaaagacacaacttataaaaattcacccataaattaataccttagaaacgcgagtggnaagagcctatccaataaagcgggggggaactcccccaggcaaggaaaatattaagttacccgcctcaaggcccacaaggcgcacgctctattcaggaaccaccccattacacggccccaaaacttataagcgggcacgcagaaagattgcaactcggttttcacctaaattctccagggccttatacaggaccaacttgtccttccgggaaaatcccgcgccc

SEQ ID NO: 578404 - DNA, 326 bp, Homo sapiens
  misc_feature (24)..(24): n is a, c, g, or t
  misc_feature (48)..(48): n is a, c, g, or t
  misc_feature (131)..(131): n is a, c, g, or t
  misc_feature (201)..(201): n is a, c, g, or t
  misc_feature (255)..(255): n is a, c, g, or t
  misc_feature (277)..(277): n is a, c, g, or t
  misc_feature (322)..(322): n is a, c, g, or t
gcggacggagcgggcggccggcgnggaagacggcgcagcggcgtatcngggagccagcgggtgctgatggagccggacgcgggcgcaggggtcgctgtgatgaaattcaagaaccccccagtgaacagccntgagcctggagtttctgacggagctggtcatcagccgtggagaagctggagaatgacaagagcttccgcngatgtcattctgacctcggacccgcccgggtgtcttctcggccggcctggaccntgacggagatgtgtgggagganccccgcccactacgcttgggtacttgaaaggccggttcaggaagntttt

SEQ ID NO: 578405 - DNA, 552 bp, Homo sapiens
agatatttacgtttcttaaggtggataatattaatgcagctgcgatggatttgtcacaaaagaagatctgcacgctaagtgaagaggtcataatcggagtacatggaacaccattgaattgtctccatgctaaagactgcggtggtgtccttgcggaactggcgcaagcttgatttatatttgcatgcaactaaatctattgacgctgaaaaagctctatcaaatactatcaaaatgtactatgacattgaggccttcactgcttccatcatgtaaaagtgcacagcttgagactgaattacagaaagattaacacatttacatatatacacacataaatatgtatattattgagattaacatacatatttgttcaattgagttcgcagaaaaacttgcttgctaattacttagggaacattgttaaaagcatatagaaacaaattatgcctcttgtaaacaaaaaaaaaaattcactggccgccgctttacaacgccgtgactgggagaaacctggcggtacccaactttcgccttgcagctccccctttt

SEQ ID NO: 578406 - DNA, 85 bp, Homo sapiens
ttgtgctcttggggaagaggccttcccctccctactgggggatacgcgtatcctgaggcgcggggaggccgataaactcatcttt

SEQ ID NO: 578407 - DNA, 425 bp, Homo sapiens
gatctctctccgttgtatttttaacgacgtcagtatcaaggcggagcatcaacaggtatcatctttgatattttccctcagtcgcttgtagccaggttcccggggacttttcattatcatcatgagccaaaccatgtttactgaatgttctgtgggaaatgtctattctcctgtgtatctctgggctattgcttgatattggctgcctcctgctcagttcctctctttaggtatttagtacagcgttcatttcatgtcattcctgtggactgaaagtgatgctctttaacatggtgaacaatggtcactatatgttgggcaaacagttctgaggggctacgctgagactgagctgattgtatgtgctggaaaatggaacgaaactcctgttcctttttgttgctatggactagatctcggcaaag

SEQ ID NO: 578408 - DNA, 676 bp, Homo sapiens
  misc_feature (144)..(144): n is a, c, g, or t
  misc_feature (176)..(176): n is a, c, g, or t
  misc_feature (178)..(178): n is a, c, g, or t
  misc_feature (203)..(203): n is a, c, g, or t
gaaaattgtacattgatagtaatataggccagtgtatagtttcatgtacaatcaagcaagcagcatgtcaaacaaataacaagtgataccatgggaattcttaaaaatctacataggcgtagaacatgcccacagggacataantgtaatctttgtctgacagtattgataattancnctcttgtgtgacataacagtggacntaggaaatgagctgtacagcaacgtgtcatgctatgtagcttaagagagtatagtatacgcttttcacagcttaggtcatggtgaggccaatttccatgcagatcttgtgcgtctcagagtgtgtctcccagactactgccagctactgtgggtcatggtcaagagcatcagttggaatctccctcgttgaccctttggcaatgtacacaccattattctagaatcttttcatacgagtcctatcaagtctaatagcagcggggaataatatgagtgtttcattcaccacaatgtagaggtactccacctgtaccccggcaacataggtaggtggcgcattattgggcagaccagcagcgatctccatgtgcagtttttgctgcacatcagcgtgagtggccagttcatatacagtgaagcagagaactctgagggtggtgtctcgtgccgaattcctgcagccggggggatc

SEQ ID NO: 578409 - DNA, 191 bp, Homo sapiens
agagcagtctcagagaaaatgccacaactcacagcacctatatgcactccaagtgaaagttaaagcgaagagcacagggccaggaatccactcagggtccagcaggcaaggcattcacagggacatagagatccattacccagcgtgcttctaactccgctacggtgacaactggaccaacactaactccc

SEQ ID NO: 578410 - DNA, 304 bp, Homo sapiens
ggagctagaagcatctgaagaactagatacaattgtccaagctccaaatagaggaaggctcaagtgctgacaataagcttctgtgtgctcttatgaaggaacaacaggagcaaatgtggattcagcaacaattctggaatactaatagtactggtgttgaatatgaacattcgatatattggaggatgaagaagttcggcaaggattaaagcttactcaaattggccaccataccctcagctgtatgtgaaggggactggtgggaggattggaattttgtaaggaactaggaatgggaatttcc

SEQ ID NO: 578411 - DNA, 197 bp, Homo sapiens
tctgcactcgtgctcctccaccaccttgggcgcctcactcctgcggcggcacctccgaccctcacacagctgcagacgtgtcaacgggctgccaaggggcatctgagtcatccttggctggaaccacatcgtactcatagtcctcatagacctcgaaatgcttccatcgatgatacacgacgtggactttgactgtc

SEQ ID NO: 578412 - DNA, 511 bp, Homo sapiens
  misc_feature (208)..(208): n is a, c, g, or t
tccgtttgcgggcctttccactacaacccacattcagactttcacctgcatcagagagttcacactaatgagaagccctacacatgcaaagaatgtgggaaaaccttcagatataactcaaaactgtcacggcatcagaaaatccacactggagagaaaccatactcatgtgaggaatgtggacaagccttcagtcaaaattcccacnttcttcagcatcagaagctccatggtggacagaggccctatgaatgtactgactgtggtaaaaccttcagttataattcaaaactgattcggcatcagagaatccatactggggagaagccctttaaatgtaaggaatgtgggaaagccttcagttgtagctatgactgcatcatccatgaacgaattcacaatggggagaagccctatgaatgtaaggagtgtgggaagagtttgagttctaattcagttctgattcagcatcagagaatccacactggggagaaaccttatgaatgtaaag

SEQ ID NO: 578413 - DNA, 116 bp, Homo sapiens
caggactatataaaaaataatgcgtgtgcgcgcatatgaagtgtagggtgagatagcgggagtgtgtggggtaaatatatgaggcacgcgtgtagacagccagagcaaatgggggg

SEQ ID NO: 578414 - DNA, 1145 bp, Homo sapiens
  misc_feature (1145)..(1145): n is a, c, g, or t
cggttccgaggcagatgggaagagatacggcccctggacatctgtcgagcatgggggaacctggaggcaagctggaggttgcgtggagtcccagacggaggaattatcgatgcgagtattcgtgctgtccgcgtgtcgagtctacacggagcatcgcgcagagcgacgatcggcgctctgatggactgctgcggatgcacggcgcgagagccgtagccagtcgtcggacaccgagacggcaatgcataggtagtggacgaataggagcaactagtgactcaatccgagactacaaaaacggcagtgtggacggccttcaggagagatgaagcagcccgtcaacaccactcaatccagtacaccgcgtgagacgaagggcgagacctgagaggtgtcctgggacagagatcaacacgagagctgtctgcaagataggcgccgatgggacgcacagcgggggcccagaaggtaacaaactatggcccgacacgaactcgggcaacgacgttgactgccgtgggcctgggcacgaacatggggaatcacgggtaccgcgcaagatacgtacggacaagcacggcgcgcacgaattcgtgatcccgcattgaaggcccgacccgggacttccgagaggtacccgtgggagtgtatgatcctcccaagtacgcgctaacaaagatggggagattgattgtcctattggggaatcccaaaaagcggatggggggactaggcggcaatgtgcacgttgatgggtgcaccacattgggacagcgcacatcgcatcgagtgggtgccacagcgaaccacgaagcaccctgcggacagacgacctcactagaggcaacaagtcataattggggcacactccattagtatatggagagggagctatatattaaggagcaattattcaacatatgtatgtaacctagaattaccccacactattggtgtatgcctttataaagttttgggccattatacctatgggggatatgcaattagccaagtacggttttgagaaagagactaaaaacgattaataagcgagaggattaatgataagtacacagatagggcgattaaaacatcagggcgaggtagccatttaggagtatgagagggtgtttaaggggaagagn

SEQ ID NO: 578415 - DNA, 620 bp, Homo sapiens
ggataggtgtaaaaaagaaagctgtgaatttatttactatcatcatctctcttaggaagaagggaagtgtggaaaaaaattgtcttcaggagaggaagaagcttgtagatataattgaacagcatcttgatttcttttttgccaagatgttactgttggctggttattttcttgtattgttcaatgaaaatcataaaattattattcagtgattacttaatggacaccagaataaccaaacccttttccattcttttttttgcaaaggctggtctcctttggcctggacgtcctgatctttcccatagtagaactgggctgggtgtctcttttttttttttttgagacggcgtcttccactgctgtcgcttgggctggagtgcagtggcgcgatctcggctcactgcaacctctgcttcccaagttcaggcgattctcttgcctcagcctcctgagtagttgggattacaggcgcgtgcaccacgctcagctaatttttgtatttttagtagacaggggggttcaccatgttggccaggctggtcttgaactcctgacctcgtgatccgcccgactcggcctcctaaacttttgcaaagctgtatctctaaggaattgaa

SEQ ID NO: 578416 - DNA, 246 bp, Homo sapiens
gctgactctagagtgatcccccccatcgttacaaaaattacaaaaaaattagccaggtgtggcggcacatgcctgtagttccatgctactcgggaggctgagatgggaggatcacctaagcctggggaggtcgaggctgcagtaagctgagattgtgccactgcactcctgcctgggtgacagagtgagaacatatctcaaaaaaaaaagtataaataaaaaaggttaggtgccgatgaatagcga

SEQ ID NO: 578417 - DNA, 226 bp, Homo sapiens
cagaggtcagctggatggccacatcggcaggtcggagccctgcctgcatactcgaactggaatccatcggtcatgctctcgcctgaaccatgacatgcctctttgtccttgtgggttcttgcttgatgtaccatgttcttcttgggccacacttgggcttgagtgtggtgtacactgcagtgtctacaccatgtctcacttgtttgcagcaacgacttttgattgg

SEQ ID NO: 578418 - DNA, 361 bp, Homo sapiens
  misc_feature (353)..(353): n is a, c, g, or t
cacccctggggggtcccctacaattaaagttaatgggcacctcccctaactcaagtccccacaagactgccccccccacttcagatgcccaattacaaggagtgggtccccaacttggctacaaattgggggttccccacaaccctctcctctggtttgctaatttgctataacagctcacagaactcagggaaacacacttaccagtttattataaaggatataggtgtggctaagcatggtggctcacacctgtaatcccagcactttgggaggctgaggcaggaggatcgcttgagcctaggagttcaaaaccagcctgagcaacatagtgagaccccatctcaattcanaggattaa

SEQ ID NO: 578419 - DNA, 196 bp, Homo sapiens
tttgcgctccatcaggggcgtgatggtgtctacgctccccagtgttggccttaaacagcaggaatgaacagtcagggcatctgccagtggcagggtatggccatgccagccgtgctgatggcatgagctaaacaggcacaggaacagaaggcaggcagatctcacagtggcaaagctaaatgtctctggggtaccg

SEQ ID NO: 578420 - DNA, 718 bp, Homo sapiens
ctacaagatgcgacttcccctatcatagagaggagctgatcggctttcaggatcacgccctcataatcatgttccttatctgctgtcctagtcctgtgatggcctattattcctaagcactcgacaaggagaacactaactaatactaagatctcgagaggctctaggaaatagaagccagtctgaactgatccgtggccgccaatcgatctcgtagtcctcagcggccctcccatcgcctgacggcatccgtgttacgagtagacagacgagggtcaagcgatcccttcccgttgaccatcaaaatcagatgttggcctaccatatgtgtactgaacctgacgagtacagcgagctgacggcggtactaagtcgttcaggctccgtacgatacttcctcgccagtttagttgcctaggaacgcaggcgagctgcgatgtcctgaacgttgacaattcgagtagtactcccgtatggaagcgccccatttcgttaatacataagcttatcgagtcacctagaggaacgttcttgcaactcattgaagctgtgccccgacagttaggcgttaagaaagcagatgcaattgcccgggacgtctaaagccaaaccacgtttcaccggctacacgagcgggggtatactacggtcaatgctctgaaatctgttggatgcaaaccacaggttcatgcccatcgtcctagaattaatgccccta

SEQ ID NO: 578421 - DNA, 621 bp, Homo sapiens
  misc_feature (27)..(27): n is a, c, g, or t
  misc_feature (88)..(88): n is a, c, g, or t
  misc_feature (98)..(98): n is a, c, g, or t
  misc_feature (100)..(100): n is a, c, g, or t
  misc_feature (121)..(121): n is a, c, g, or t
  misc_feature (148)..(148): n is a, c, g, or t
  misc_feature (162)..(162): n is a, c, g, or t
  misc_feature (173)..(173): n is a, c, g, or t
  misc_feature (194)..(194): n is a, c, g, or t
  misc_feature (196)..(196): n is a, c, g, or t
  misc_feature (229)..(229): n is a, c, g, or t
  misc_feature (245)..(245): n is a, c, g, or t
  misc_feature (274)..(274): n is a, c, g, or t
  misc_feature (294)..(294): n is a, c, g, or t
  misc_feature (297)..(297): n is a, c, g, or t
  misc_feature (303)..(303): n is a, c, g, or t
  misc_feature (367)..(367): n is a, c, g, or t
  misc_feature (373)..(373): n is a, c, g, or t
  misc_feature (413)..(413): n is a, c, g, or t
  misc_feature (443)..(443): n is a, c, g, or t
  misc_feature (455)..(455): n is a, c, g, or t
  misc_feature (470)..(470): n is a, c, g, or t
  misc_feature (477)..(477): n is a, c, g, or t
  misc_feature (491)..(491): n is a, c, g, or t
  misc_feature (505)..(505): n is a, c, g, or t
  misc_feature (511)..(511): n is a, c, g, or t
  misc_feature (524)..(524): n is a, c, g, or t
  misc_feature (533)..(533): n is a, c, g, or t
  misc_feature (619)..(619): n is a, c, g, or t
aaaataaaaattataaaaaaatttaangtcaagttgtttccattaaaaaaaaatgattttaaaaaataataacttaaaaatgcaacangcaaaaaaananaaccaaagttttccaaaaaanattctcctttccttctgaaggttttangatgcattgttatnattaaccagtnttttactactaaacttaaatngncaattgaaacaaacagttctgagaccgttcttncaccactgattaagantggggtggcaggtattagggataatattnatttagccttctgagctttntgnacaganttggtgaccttgccagctccagcagccttcttgtccactgctttgatgacacccaccgcaactntctgtntcatatcacgaacagcaaagcgacccaaaggtggatagtntgagaagctctcaacacacatgggcttgcnaggaaccatatnaacaatggcagcatnaccaganttcaagaatttaangccatcttccagcnttttancagaacggcgatnaatcttttnctttagctcagcaaacttgcatgcaatgtgagccgtgtggcaatccaatacaggggcatagccggcgcttatttagactggatggntc

SEQ ID NO: 578422 - DNA, 860 bp, Homo sapiens
  misc_feature (1)..(1): n is a, c, g, or t
  misc_feature (94)..(94): n is a, c, g, or t
  misc_feature (97)..(97): n is a, c, g, or t
  misc_feature (110)..(110): n is a, c, g, or t
  misc_feature (127)..(127): n is a, c, g, or t
  misc_feature (158)..(158): n is a, c, g, or t
  misc_feature (166)..(166): n is a, c, g, or t
  misc_feature (246)..(246): n is a, c, g, or t
  misc_feature (467)..(467): n is a, c, g, or t
  misc_feature (530)..(530): n is a, c, g, or t
  misc_feature (534)..(534): n is a, c, g, or t
  misc_feature (569)..(569): n is a, c, g, or t
  misc_feature (786)..(787): n is a, c, g, or t
  misc_feature (811)..(811): n is a, c, g, or t
ncttgttaattttcagttcatcagcaatattgtatataacagaaatatgtttgtatacaccatacatgcacatacacatgcatatataacttcnganactattgattggngatgctctaagaatgtnctgtccaacactatagacactgactactggncacttganatgtgttttgtccaagctgcactgcactctataaaacaaacacaagactttgaagacttagaatgcaaacagagtaaaangcaacattaacaaatttgtgttattacatgaagaaattctatgtcaatatacaagaataaacattatcacgttaatagtaatatatgtacaaacatgtactataatatattgcatataatttattgaaatagtatgctatgtaattaacatcaatattgttaatattaatattaattataacattgttttgaattaaatatattatttaaatttatttgantgcttaaatgtacctattagaaaattttaaattatgttgtatttctattggacaaccctgctntagngtgttggaatcaacttggaaagaggaaatacaaanggagtggggatggccatgattattctttcaggaaagagaatatcccaaacactctcctcatagccccaggacttccttattcctcaggctgtagataatgggattgagcatgggggtaaggatggtgtagaagactgccaggatcttgtcttcagctggtgagcggagattcctgggccggagataggtgtagacaaaaggtgcatagtaaaagatnntacagttaaatgtgttgaaatggnggtgaaggcctttttctcccctcctttgagtgcatatgatagacagcaa

SEQ ID NO: 578423 - DNA, 147 bp, Homo sapiens
taccaagagaaccgcggcagtttggtagtaacaaacggcggagtggaacatgatctggatcagattgactacatagacatgctgcaccgcagaggaagaggaggccgaggtgagacagcccaagggaccagacctgagcaagccagg

SEQ ID NO: 578424 - DNA, 517 bp, Homo sapiens
gcttcacaaagggcagtacgggtagtgagtgccgtcatgcatcggtcattcagagatgctcatctaacgtgcactgagactccagaactaaatccttatgtatgaaattacctacaatgaatgttatgatgatgtatacaaaggtaaccagacagctctccttaagcggctttcggtcagtatttggtaccagtttatcttctacatattcagctcatggaaattacaagttatatatttccttccccatagtttttcaaaatgtattttcaacagagcatgcttaaaaatcatgtaactcattaaaaggccagagagcagagctaacacaacttgccttatcttgtaaaggccttaaaagtaaggcttcagatcgtttttttcttctgaattctgtcaatttggtatttgatggtgcctgcagttctcttaatgcacttttaaagcttcacagttctgaaactggaaacgcataaaacttttaaaattattaatattctaatttaacagattttca

SEQ ID NO: 578425 - DNA, 879 bp, Homo sapiens
  misc_feature (1)..(1): n is a, c, g, or t
  misc_feature (81)..(81): n is a, c, g, or t
  misc_feature (83)..(83): n is a, c, g, or t
  misc_feature (88)..(88): n is a, c, g, or t
  misc_feature (90)..(92): n is a, c, g, or t
  misc_feature (109)..(109): n is a, c, g, or t
  misc_feature (179)..(179): n is a, c, g, or t
  misc_feature (219)..(219): n is a, c, g, or t
  misc_feature (230)..(233): n is a, c, g, or t
  misc_feature (235)..(235): n is a, c, g, or t
  misc_feature (238)..(238): n is a, c, g, or t
  misc_feature (240)..(240): n is a, c, g, or t
  misc_feature (252)..(252): n is a, c, g, or t
  misc_feature (264)..(264): n is a, c, g, or t
  misc_feature (271)..(271): n is a, c, g, or t
  misc_feature (279)..(279): n is a, c, g, or t
  misc_feature (285)..(285): n is a, c, g, or t
  misc_feature (295)..(295): n is a, c, g, or t
  misc_feature (298)..(298): n is a, c, g, or t
  misc_feature (349)..(349): n is a, c, g, or t
  misc_feature (357)..(357): n is a, c, g, or t
  misc_feature (360)..(360): n is a, c, g, or t
  misc_feature (366)..(366): n is a, c, g, or t
  misc_feature (467)..(467): n is a, c, g, or t
  misc_feature (536)..(536): n is a, c, g, or t
  misc_feature (727)..(727): n is a, c, g, or t
  misc_feature (739)..(739): n is a, c, g, or t
  misc_feature (832)..(832): n is a, c, g, or t
nggcacagaccccacctgggtacagactcacatacagcgcacaagcccctcaccacagttacactcgattcatacagaccncnccccncnnnaggggtcgcgaagaaanctaatcacaaaggactggtcttgaagatgacaatgacgtaaacaagagtgctctctggaggccacaagcngccttaacaatgacgtgtgtctagatgcagtttggcagangcggggggtcnnnngnttngngggatcaagggncccccagggggntgcggcnggctgggncagggnacactcctgnggncaaaccagagccacttctgaggtcaaagccatcacccaggaaagctccgcnggattggnggnccaggncagctgtgccccacaagggaagggggagatccgcaccgtgggaccgtttctcgtgggggagtcggggcttcccacagagcgggctccatttttggtcagantcctcccggggccagtgcaccatctgaatccttgggcacgtggaggcagctttgtctttggctgggtgnaccccagcctggcccagatgcaggactctctcaccatagctgtctgggggcgtgggagcaggagggctgcaggagctgggtctccacacgctgacgagggataggactgagcagatgtcggctcacacaggcactgggaactgcacatcaacagcgggcaagcagcatggaaagtgctagcgtggggtctngggctgaaagcnagctcctcctccacgtgcatggggctgtttacacctcccaaactcctctgcaccgctatgccctgcttttggtcccttctgggtgctaagtgncccaccctgagggccgaggggcagacactcgggcccggccacactct

SEQ ID NO: 578426 - DNA, 168 bp, Homo sapiens
tgaccgacgaagaataagtctcagacatcttagcagtctaagcttgtatcatcgacttccacagccccacctacctgattcttggcactgtgccggtagccgtgtgtggttagggaggtggaattaccaggaagaattagatgaacatgttgcaaaacacatgtacat

SEQ ID NO: 578427 - DNA, 725 bp, Homo sapiens
cttttaccaactttaagggcattctatgcccagcaccccagggcctttttgggaggccctgcccccatcccctttccttgggaggcccccggggcccccccggggcggggccccgattttgtccccacccaagggggggtggagtttttcaaaccgccccctttttcgaaagatattgtggggggactttcggggctcggggcccccccccgagttccccgggcactttattttttggggaaaagcccggggccccccccaaatcccccaattttttccccagggaagagggcgggcccctttgccaatattttgtggggcaaatcccaaaacagcaggcaccccttttgtccctggggaggggggggggggccccttttcccccccccccttttgtttttcctgtttcctttgaaggagaatcctttttcccccgattgccccggcccctttgggaaaatttcccggaggtggccgggaaaattgggtcctgaaaatccccgccccccctgggtgggggggaaacccaggggatttttttacccctttttttttttttaattttgaaaaaaaccccccctttcctttggaaggggctaggaaattcccaatggggggaaccccgggggcccttcccttttccccgccccccccactttaaagcccagccctttatattttccttttagaaattccctaagggctttaaataaaatttttttgga

SEQ ID NO: 578428 - DNA, 459 bp, Homo sapiens
agcggatcgtcgccttttcttcttcgtcccgggcggtgcgttccactgctctggggccgacgccgcgcccagtcccgttcgggccgcagccccacgttcccctccccgggcggggctgccaggactagcccgttcccgccagccacctccttccccataggagcgcttctctgatcaggaaggaactagcgcagaacacaaaacacagttacagagtaagcccagcgatgcaagaacaaaaacactttgatgaaaacccaaagaccagcaagcgacaagtagcacagcgaatcacaagactagtggaaatgagcaggtagaaagagccaagagaccagacgcaaaaacctggcagcaagacgaaggacaccgcgatacagcgataggagaatagtaagtgcgcacagaccacgagactaccgagcatgacaaaaaggaacacgaaaagatcaacaagac

SEQ ID NO: 578429 - DNA, 630 bp, Homo sapiens
aatcgcggaatcggtgctttagtacgcctgtgacctttactctcgcggccgcgcgaacccgtttgagctcggtaatcctagtgcacacgcttgaaagcgaggggccatgagtctggacttccagttccagcgtacgagtgactggatcgcagcagttacccatggctgcttgggacagctgcaacatgtggtacatctagcttaccaaacagatttcatggtcaacaaggatcatcgcaaataaagctattgataaacccttcaccattccagaaaagacaaccccaagaattagtacatgctgtttgacatggcaggcgattgtgggagcactacacaggctggggtatattgccgtagttgggaaggtccacaaacaagttcccaattctgtgaatgggggcctcacacaacaacatacggaagcagccgtgcagacaattgtgggccctcttgatccatccacgcaaaacacgaacacttaacttggacaacttttgatggctgcaaactcagctctgtcggtgcaagttaccttgattgtttcacttagacatgatacacctctgttctgatacacttccgctgcttctaaagtgtatatggcacctgcggttccaattattgatg

SEQ ID NO: 578430 - DNA, 813 bp, Homo sapiens
  misc_feature (1)..(1): n is a, c, g, or t
  misc_feature (6)..(7): n is a, c, g, or t
  misc_feature (12)..(13): n is a, c, g, or t
  misc_feature (15)..(15): n is a, c, g, or t
  misc_feature (770)..(770): n is a, c, g, or t
nggggnnaaccnngngagggggccaaccgaacaggaagagggcgcggcccaccgggcacaaggggaaacgaggaagccgcaagaccagcccggacaacaagcaaccgggacgcgacaaagagagagcccgacaacagaccctcacccgaagcaaacgggacgccaacggcttatgacagcgggaacgcaccgaggacgcacaacacagaaagggcacccgaaacccggcaccccgaccaaggggcactagacagcatgcaccaccagccaaacaacaaggaaacgcccagaatagaaaaccaaacacacggagggcggccatcgagagaagagcgcaacagtaccgcaaaaacgccaaaaaaaaccaacgcgcagcgccaagaagcgacggaaatccagacggggggcaagcggaacggaggagcgaagccccaaaaaagcgcacaccggcgcaatcggccgatgacccagagagccgcccacccgcgaacggtaaaccgggcgggcccacaaaagcaggacggtacctcaaaaggagggcccgaaaagcggacccacaccgcaccaaaaagggcggccctaacccgcaaggcaaacgcacttaaaaagacgacacgagagcaaagacccggagaaaaaacgccacaaagagaccccaaaccaccaaacaagggcaacgcccgcggggagaggcacacaacacaagagggccacaggggcgcaagcggtcaacagcacacaagcagcaatggggaaaaacgaggcgacangtaacaacggcgccgcgacacaacacaggacacacaccaccga

SEQ ID NO: 578431 - DNA, 113 bp, Homo sapiens
tgtagaggatacagtagagattagtttctaagcaagctgttgatgagaatagcagcaggatggagatgaagattcccttgtttcacatttttatactaaccctttggccgaag

SEQ ID NO: 578432 - DNA, 853 bp, Homo sapiens
ggtgaattttcgacagccttggtatcttggagtatgaccccagtctgttataaactgcttaagttgtataattttacttttttgtgtgttaatggtgtgtgctccctctccctctcttccctttcctgacctttagtctttcacttccaatttgtggaatgatattttaggaataacggacttttaaagaagcaaaaaaaaaagactgaatttccttgcttacttggcatatacagactggatttttttttttttttaacagccatttccccaagggaatgtctggcatattacggaccttgggtatgttccatccatgggaatattccttaatttctacgtgtttggaaaagccggtaagaaatacgggattggataatatttggaaggcaggaaaaacccaaatggtttcttcttggagagtcatgactaccttctggtggtggagaaattggcctttggaaaattggacaatttggattctcactggtttgtttaaaacttgaataaagggaatagaattttttttggataagggttcacaaaacatttctaaaacctagtgtttttaaccatggaaattcaaatggggataataggttaacgtgtctagaaaggcatcggaaggttgttctgaacgcagttttgaagaagtgactgttagtggttttggtacaaccaagggaaatttccaaccgtttaacgcgggaagtgggggtcatatttgtgcggtggttgtgacaaatctgtgtggtgccttggggtgaagccttcatcgttgttggcactttgcgtcaagtcagggtgaaataagtgcacagttttgttccaccgaatgttgtcataatgtcgg

SEQ ID NO: 578433 - DNA, 290 bp, Homo sapiens
cacgtcccaacccctctcctgagtgtctgcgaccctgtgcgctgcctctgagagtgccccgcaccggctacccccccctcttgttcttcgagacgggggcttggtgcgatccccatgcgggaatacagcgccttgagcatagctgactgcacacttgaactcctgggcttaaagaaacctcaccgcctcatccaacagagactcttgggctacaggcgtgagcgcacatgcccatactttcttttggaggggccaccactcactgaggtgaggggttccgaatacactgc

SEQ ID NO: 578434 - DNA, 478 bp, Homo sapiens
cggatctcccggggggaggagagtggttcctgccacaagccacaagataggactctggacccatttggacttccacctagaaattccatggagaccgaattatatttgccaatgtttcagtgcgggacgtcaagccccacagcttggatgggttacgacctgacgagttcctaggccttacccacacttatagcgtgcgctggtctgagacttcagtggagcgtcggagtgacaggcgccgtggtgacgatggtggtttctttcctcgaacactggaaatccattggttgtccatcatcaactccatggtgcttgtgtttttactggtgggttttgtggctgtcattctaatgcgtgtgcttcggaatgacctggctcggtacaacttagatgaggagaccacctctgcaggttctggtgatgactttgaccagggtgacaatggctggaaaattatccatacagatgtcttccgctt

SEQ ID NO: 578435 - DNA, 374 bp, Homo sapiens
  misc_feature (7)..(7): n is a, c, g, or t
gcgtggntcaaccgcaataccctcttcactcagtgcaatatcaatctcgtcggcatcgaacagttcggcggtaaaacgccacaacttgttgatggcctgctgcatcttttgccctgatacgtcagtaccattgcccagtcgctccagccagccacgactaaaacgcaggtgatagcgcgcttctttaattgctttggcagaaatcgccgccagttgcggatcacggctttccatcagacgggtaaagagcgccacatgccatgcatcgatgaaatactggcgtgcaatggtgtcggcaaaattgccgtttggttgtttcaaccaacaattaagtttgctggaactggcgcgattgctttgctttcccccctgtt

SEQ ID NO: 578436 - DNA, 146 bp, Homo sapiens
  misc_feature (82)..(82): n is a, c, g, or t
gctcggtaccgacgctctctctgtggggggctgtatttattatttatttccgactgttgctcacttccttgtgaactcctgnctccacaggccctccagtggcagggacaggtcttgggtcttatgtcatcttggtgctgtgagag

SEQ ID NO: 578437 - DNA, 831 bp, Homo sapiens
tgctgtggctcacgcctataatcccaacaatttgggaggccaaggcaggcgaatcacctgaggtcaggagttcaagaccagcctgaccaacatggagaaaccccatttctactaaaaatacaaaattagccaggcatagtggcgcatgcctgtaatcccaggtattcaggaggctgagacaggaaaatgcttgaacccgggaggcggaggttgtggtgagccaagatcgcgccattgcactccagcctgggcaataagagcaaaactccgtcaaaaaaaaaaaaaaaaggggtgtttttaaaagcttttttcctaaaagggagaaaagggaggggatatattccattcaattgggcaagacaattacaacttttctcctcatggttttccctggtttgatctggaaagaccaaaatagacttcccttttatcacctaagagggcccctagggttagcggaacacaaaagtggctacaggcccggggctcagggccttggttgactggaattttctaaatttcctacggtacaagaaaaatcacctctgtgcgattgtttagaccccctcttagttctgagtttaacccaggacccgttgtgcttgtgatgtgccggggaccaggcccagaaacattctttctgatttgccaggtgcggatctaagccagttcccggccctttttggggttggccccaaccttggctttgggtgccatagtcgcctggcctaagagcaatccccttttctttgttttttctggacgatctgtcgtcccagtggtgcgggcatcggtccgtcctggggctgtccaaacactaaaatgtgccgc

SEQ ID NO: 578438 - DNA, 313 bp, Homo sapiens
  misc_feature (86)..(86): n is a, c, g, or t
  misc_feature (141)..(141): n is a, c, g, or t
  misc_feature (233)..(233): n is a, c, g, or t
  misc_feature (243)..(243): n is a, c, g, or t
  misc_feature (284)..(284): n is a, c, g, or t
  misc_feature (308)..(308): n is a, c, g, or t
tctgtctcaaaaaacaaaaaaaagggaagaaaataagaatccatgaatcaatggagggcaattgagttactgtgatataatatganatatatttagtccctggttcctcacagagcttaaactctcagaatttcccaagtnataagagtgtctattgttataataagcccttattagcacaactgaatttatgttaataaagtgactcagggtgggacactagctagcctcangatgaggctngccatcagaaagaccaagtgatttagaggatgagagggttngaacttttcaaccccacccaccanccact

SEQ ID NO: 578439 - DNA, 161 bp, Homo sapiens
cccgtatcccaccaacagctgtaggggaaaaataaggcagataaaggagcggggagagaaattaattggcaaccaggaggagttgggctggattttcaaaaggtggggagagtggagcacacacctttgagggaggaaaggcgagaaaagaaaaggaaaaa

SEQ ID NO: 578440 - DNA, 1124 bp, Homo sapiens
  misc_feature (670)..(670): n is a, c, g, or t
  misc_feature (772)..(772): n is a, c, g, or t
ggagcggtgcccgctcgtacagatgctgggggcgtgatcgctgccgtcccatctccgtgccgccggcttgtctgcgctgctccggtcgcccttatccctcgtgtcgtggacccttggcatcggcgcgaccggtggccagtgctcgtcccggggtcatcgaggccttgccccagtggctgagaggcccgtcgggtcccgggtcgacgactggctgcagtggtatgtaaccttccgttataggttgcggcatccgtagaggtaggtccgccacgcgtgtgtagctggcggtcagacggtatgcgtcgggcccgtggctccaggaccccattcgtcagagacgcttgcgtggcctggccgtcgcgtgcacactgcgtgagatcaacggaacgcgctatcccagagattcccgcgataccatgattcgcgccggttcgccacccgcgcagtcatttggtcggcaggcaccagccgaccgacggctgacttgactcggtccttacaagacagagcctagcggcgcacggcgaaccgagcccagcctacatagagcaccgctctactgtagacggctcggtagtataccgttcaattccggcacgcgctggtcagggaccctagcaaaccaatagtcaactgcgtgggttgccgccttgactcgggcacgtcccgnacgcggtccggagggctggtttgtggcaggaacgcgtcattccacggacccattgtgtgtcgcccattcggccattgggggtcgcactggaaccttggcccntttgggctggaaaggccgctttgcccgtcttgaagagttccttacacgcccggttcctcttttagaacagaacacgtgtttggcccctggtggaaccctgccgcaccaaagattcgcgttatcttatttacccaaggcggaaactggctgcccttagagtattcccctggtcagaagcaaaggcaccctggaggttaatccaatgggacaccgcctggagaatttccaccccatttcgctttgtgttaccccccttacaggttctcgctcaagaccacaggataccaggctgccgcaaaggacgtttcccaacacggaagtgggagtgccctttaagagggaggaaaacccc

SEQ ID NO: 578441 - DNA, 444 bp, Homo sapiens
acagagtgagaccctatctcaaaaaattaaaaagttaggtgaggctgggtgctgtttacacctgtaatcccagcactttgtggggctgaggcaggcagattgcttgaggtcaggggttccagaccggcctggccaacatggcaaaaccctgtctctactgaaaatacaaaaattagctggtcgtggtggctcacgcttgtagtctcagctacctgggaggctgaggcaggagaatcacttgaacccaggaggcagaggttgcagtgagccaagatcacaacactgcactccagcctgggcgacagagtgagaccccatcttaaaaaaaaaaaaaaaaaagagttataaatagtattccattaggcacttgcactgtgattagaattacagcacaattcttgcagtagcaaagatgttataaaaactcgttcagaaaacaaaaaa

SEQ ID NO: 578442 - DNA, 670 bp, Homo sapiens
  misc_feature (537)..(537): n is a, c, g, or t
  misc_feature (542)..(542): n is a, c, g, or t
  misc_feature (588)..(588): n is a, c, g, or t
  misc_feature (637)..(637): n is a, c, g, or t
  misc_feature (645)..(645): n is a, c, g, or t
ctcagtcagtttctgaatattgtgaattcaggcaggtgtgtgttctcttctgcatgtttttatgcactgccaattagcttctactaaccacggttcaacagaaaataaatgtgtatttgtgaataacaaactgcacaacctgcaaaccaggagagagggacaggttctgtcaggggtgacaccaggacacagggacaggttctgtcgggggtgacaccaggacacagggacaggttctgtcatgggtgacacgaggacacagggacaggttctatcatgggtgacaccaggagagagggacaggttctgttggggtgacaccaggagagagggacaggttctgttgggggtgacaagaggagacagggacaggttctgtcgggggtgacaccaggagagagggacaggttctgtcaggggtgacaccaggagagagggacaggttctgttgggggtgacaagaggagacagggacaggttctgtcgggggtgacaccaggagagagggacaggttttgtcagggggtgacaccagangaganggacaggtttttttgggggtgacccccggacacagggaataggttntgtccgggaggacaagtgcttgatcgggtcttcagcatcaggaaagganaaaggccnaaggagagcccttaaaaaacctttc

SEQ ID NO: 578443 - DNA, 157 bp, Homo sapiens
cacgacggttgccagacacacccctgcctcccactatatgacgcaaccgatcatgatggccactgcttttttgtttgtttgtttgtttgagatggagtctcactctgtcaccaggctggagtgcaatggcgcgatctcagctcaccgcaaccgtcgt

SEQ ID NO: 578444 - DNA, 239 bp, Homo sapiens
gctggagatgggtcatggaggcctacgagcaggtccatgaaggggacctcctgaagctgcagaaggctggatcgcagagtcctgggaggtgaccaagcggtaagtaagtaaataacgaatggagcaagagactcaagcgataactccctgagaatgcattactggagaacgagctaagaaagtaacgtaggatggagcaacgcggcagcgggctgagacaacgacggcacccccgggca

SEQ ID NO: 578445 - DNA, 309 bp, Homo sapiens
cagaagcccttagagcggtcccgtcccatcactgttcacctagaagcggtcatcatctctcactgattcacctagaggagaggtcatctccctcacgtgttcacccatgcggtcatctccctcactgtgcaccttgagcgctcatctccctcagtgttcatctagagcagaggtcatctccctcactgttcaccctgcgggtcatctccctcactgttcaccctgcggtcatctcccatcactgtacagggctgcggtcatctccctcactgtgcaccactgacggtcatctccctcactgtacaacct

SEQ ID NO: 578446 - DNA, 1870 bp, Homo sapiens
  misc_feature (392)..(392): n is a, c, g, or t
cgcaagaatcgcttgaacccggaaggcagaggttgcagtgagccaagattgccccactgcactccagcctgggcgactgagcgagactcttatatctcaaaaaaaaaaaaaaaaaaaggtctcaagaaaccgtgaaattctcccattttaggttctcctcaaatctcaggtgatctcgtgctcaaaattgggccttggttaactgtgaaattacctttacaaggccagttctctataacttaatgtgcaatgtggtgttttattatagacaaatttttataagtgtgaacacctttactattgtggtgaaacaattatattgtgccaacatgtgttattataagacacaaaaacaagtatattttatacatctcctgtgtgacaaagacacnctgtgtctctgtgtgtgatatgtggttcttcctcacaaagattgtgtgtgcgtacaggacaaacttttatatatatatattcgtgggattttacacacacatatatttgtgtgcacacattatacaggcacacgtatttgtataccacagcgggggtatacacatataggggcgcataattcgtgtgtgggataatatttacacagagattttttgtataaacggacgacagtggagacgggttctgtgggacaacaagaggccccctctcacaagagagcgtttatatgtcgtggctaaacaaagagacactctaaatctctggcgtcttataaatatacaagtgtgacacacaaactctgtgtctatcaacacagatatttcacaccaatctatttcacacagacgtttgagggcacccagttatattaaacccgaggggcaggctaatgggggctgcgtttgtgtcgacaaattttgggccgtcaacccaaagagacacagaggttcaccgagcagcaaagagagggcactatccacagttgtatagagggactatgtaggtatggcaaaaacatctttctcgagaagagtggtattaaccccgcgttggaaagaagaggatgcacattattacccctttaaagaagagcgcatagagtgtggcccacatggtggctggagaacaactcctttatgacactcttagggacaaatttgtgctgtgccacagaaacaatttacaagttgggcggcaattttcggagagggcgccacaccacaatttatcatttttggcgcgaggcgaaggtttagcacaaggtgctggcgcaacggcgggcataactacaactaggacccctaaccagcgcaagaagacacgaaaatttgactccctgggcacacacattaattgcgccctggtgcgaacagagaggcaacagcaaggtttttgtagtatacccttcagcaagcatatgaatagtgatggcgcatacaaaaggggaggcaccatcagatcggcgaggtgggacacctacattacacagaacatcctccatgtgaggcaccagcgggccacaaaaaaagtaggccacacccgaggagatcaccccacacaaggagttgcaagacaaactaacacacaaccgaatacaagacgagaccaagcatggagcgcgcaacaaagcaagaataagagaatataaaacacctgaataaccggacgggaaaaagaaacggcggaggagagtaaacacacgctagcaacatggagggagaggaggcacaagagcagatgatgagaaagagcagacgaaaatagcgtgcaggacaaacgacaaccaaagcgggggcagagagcaagaatgagagtaaataaccaaacaaaaagcaaagaaagcaggatgaagcaggagaagagattcgcaacactatgtacaggcaggcagtcagcttgtcctactcacacgagcgag

SEQ ID NO: 578447 - DNA, 314 bp, Homo sapiens
agtaacatatagtccaatggatgtctccatcgccaagtcggtgcatatcggtgagcactgtgggttggtcatcgcccctcccatgtctgatcatgtcagcctagtttccacagtttgccttgccttgctccagtgctatctgtagaagctagtgttacgagcgccacgtcagtgttcctacacgtcttgtattgatcgctatgtatttcctcggaccggcatgtcgagacatgcacaagtcactggacaattgtgtactctcgtcgcaagtgatcaggttgaactgatgaagttaagtatgactggcatctcgc

SEQ ID NO: 578448 - DNA, 666 bp, Homo sapiens
cacatgcctgggggggaggatgccctacattacgacgacttcataatgtcatatgcatgcatgctcaacaaataactgtgcagcattatccaatggacccatactgccagctgcagttcacaaccctctctggacctctccacatgggggacgatgcacatgatgttattctacgggaggaggcataatatgagccacacacagatgctgtaagattcaatacaaccctacacacgctgatgacctatctccttatacttcactctatcaatgcctactcaacttggattttcccccgggagcacggaactctacttacactcatgaactggtcgggataattacaactttttcaagggcacttaataaagacctgttgagacaaagccccgttgactgggtgctcactggggccaagaccacacagtcatacagcgtataatcagagcaacatgtatgcacacaatgcaatactagttaaagcactgcacctcttactggatgacatgcgggacatgacagtcactatactgtctcttgtcaagcatatgtcactctaaagggcctctccattatccaaaggtcacaccgtacccactaatgcaggagatgcctggtgactatcatataggcttgactgtggtctatcaccagccctgattgtat

SEQ ID NO: 578449 - DNA, 448 bp, Homo sapiens
ctacaaaaaaaaaaagaatttggtaccatgtggacatttactaagcaaatgtgatagcttaagattgagggtagccacctgtaatcccagcactttgggaggccgacacagccagatcacgaggtcaggagttcaagaccagcctgaccaacatggtgaaaccccgtctctactaaaatttaaaaaacaaacaaaaaaaacgaaagaaaagaaaattagccgggtgtggtggcaggcaccttgtaatcccagctactcgggaggctgaggcaggagagtcagaaaccacttacaaatgttttcacgatgcagtggtttctgactctctttgccacatgcctccctaaatcagaccgttttaaagatctgggatacaagtctactttgaaggtccagaaatcatcctaagggtgtcgctggcatatagtaatataagtccatcaccaga

SEQ ID NO: 578450 - DNA, 386 bp, Homo sapiens
ggaccttttggccttccctggtcacatgaaacatggaagccaacaggctgggccccccaaattctcctttgatggaaaggaaaggattgttttcctcccaggccaaggggccccttatgccttgccccaaggacaagagttaactttagggaaatgaccttttccactttgggagctcaccttccggggggcctctggcatacccttttccctgccagctgaagagactgccggcagcctggacgtcctggttagctgaaggcagctgaaatgtgggcctccctatgtggggtttagtactgaattatgtgtttgtggttttgcttctttttgtagacccacaaatatttttatttgaatagtaaagagctgtgctcagattgtaa

SEQ ID NO: 578451 - DNA, 565 bp, Homo sapiens
tcggcctgtgttgagcggcccttttgcaggggctggtttttgagaccttctgtgtagatggatcgcctcggggtctctcggattccctaggccttccgcgggagctcctgaggctgctatcggctcctgccgtgtctctgggtcggcgcggactctgtccggccgcgtgggttggtccacgctttgctcgtcctcagctttatggggcccctcacttttaggggtgggggcgagggtatctactgctacgttgaccgctttggtgaccggtggtagtggggcgggtcctggcgtaaccccggctccccgcggcagtgtcccccgcgggagtaacgcgaacggttgggaccgcacggacgtggtgagccccgggggatgggcacgcccgaggcggacggaggggaaacgggcccaccgtgccaagcggagcgctgtgagcgttcaccgcggcatgcggtgcagatagcagtgggcggcgagagggacgtccgacgcccgactagggctgcaccccaagccgccggagtgcgcgcgcaaggccccgcgggccagttgatccgcgcgt

SEQ ID NO: 578452 - DNA, 322 bp, Homo sapiens
tgtgtgaataggggcttcctttatttatctcatgagtaacacgggataatacctaacaggcaggctctggaagataggaaatcacatacacacacacacacagacacacacacacacgatcaatcatgtagctcatattagatgttcactaaataacagctactacagatgcctatcagaagagtaagtagttcattaaattgagctcacacaggtctcttctcttcacatccatatccgtttctgcagcactcacatagatacatgattgtatatctgtaagaaattactgcacagagaatcttaatctcctactaacagt

SEQ ID NO: 578453 - DNA, 215 bp, Homo sapiens
tgtcgactgtatcaggatcccccacatagatttgatagtgaggatagacagaccttcttacagggatcgtgactatgataaccctacggcagctggtgggcgtcttcttcatctcatggagattttgaatgtgaagaatgtcatggtggtagtatcacgctggtatggagggattctgctaggaccagatcgctttaaacatatcaacaactgtg

SEQ ID NO: 578454 - DNA, 135 bp, Homo sapiens
gattgtccagaagccttccataggaggaatgcatggtcattaggtatgccacagctccaaacaccagcaacaccactcaatgactattgaggtaatgacagtgacattgcagctccacatggctgtggagctgta

SEQ ID NO: 578455 - DNA, 190 bp, Homo sapiens
cctgcgtctggcgtcactgacgtcctcctgcttgtgagctcccttccgtcttcccacctcaacccctgagtagctgaggctacagatgcacaccaccatgcccagctaatttttgtattttttgtagagatgggatttcgccatgctgcccaagctggttttgaactcctgagctcaagcagtcagccca

SEQ ID NO: 578456 - DNA, 306 bp, Homo sapiens
catcttcatgttatacatacaatcaaggaggagagacagcgcaggatgttgtcagttcacacatgatactttgggggacatgcctttattttttttcccccccaaggtttaactaaaaactttttaaaaaactacagtttgttggtaacccagggtttccggttcccatgtaacacattattatcccagtatgtaaacagtatcaggtgtccagtacagtcacttaaaagggttctacactctattggacaggcctctccagtgaacagggtctgtccacacttgcaacttattttggcccctgaa

SEQ ID NO: 578457 - DNA, 751 bp, Homo sapiens
ggaaggcatgagcaacggcgtggcggtggggcagcagccgagcacggggctgtcgggacatcacgcgcccagtgtgcaggctagtaccatgctaatttatgggatgccgtctcgcgagcctctcgctgtacttcacgagagctcgacctccagggcaaggtgctgcctgagggcgtcgggcccggggacatcaaggccttccaggtcctgtaccgggaacactgtgaggccattgtcgacgtcatggtgaacctgcagttcaccctggtggagacgctgtggaggaccttctggaggtacaaccgtcgagccagtccagtgaggcgccagcgttggctggtacatgactgaggccgagaagcgacttgcccaaggccatcctggtgctccttctccgaagttcgagccctgtgctccgaatggaccaatgcactgtgacaaggtgctgtacctagggcctggtggaaatcctcattcccgacgtgctgcggaccatccccagtggcttgacccaagcgatcctggagctttgccaatgagcctggagagctgggtcaccgcgacgccatggtcaacatccccgaggagatgctgcgggtgaaggtggcctgcggctggcgccttcgcgcagacactgcggctgctactacgtcgggtcaaccagctggcgcaggcgggtgcgcgctggtgctgcaagaacaacggcacaagatcaagccagatggctgagcgacctccaagccgccgtgga

SEQ ID NO: 578458 - DNA, 338 bp, Homo sapiens
tctattacttaatatattccatgattgtcgatatggattataaggactcacaaaatagttttcagatgtctttaatttttttacttagtgtagatcctataaatggattagaagtattctattaactcccatgtattcagaaatcgaattggagtggcaaattctgtttgaagtaacaagggatatcaaaggaaaaaaataattttgtgactatgtcttctatacgtaaatttttcaggcatctttatcaatggcttatactaaagacattttctggatcatgggtgacacacagaagacctgtggataagtggcattgtgtacactactgcatttta

SEQ ID NO: 578459 - DNA, 386 bp, Homo sapiens
  misc_feature (194)..(194): n is a, c, g, or t
  misc_feature (304)..(304): n is a, c, g, or t
  misc_feature (346)..(346): n is a, c, g, or t
  misc_feature (360)..(360): n is a, c, g, or t
  misc_feature (379)..(379): n is a, c, g, or t
gaaagtctccagatgcagtagctcacactgtagtcacagtgactcaggaggctgaggtgagaggattccttgaggccagggttcgagaccaaccttgggcaacatggcaagaccccatttcttaaaaaaaaaaaaaaaaaaatttaaacttagctgggtatggtggcacatgcttgtggtctcagctacttgtnaggctgaggcaggaggattctttgggcccagggagtttaaggttacggtgagccacaatcacaccaatcactgcactccagcctgggcaattaaagttaactctttggantcaaaaaaataaaaaaattttagtgggtaggcctgtgtttanttgttttaaataanttttccccaagggggcttnaaggtta

SEQ ID NO: 578460 - DNA, 421 bp, Homo sapiens
  misc_feature (13)..(13): n is a, c, g, or t
  misc_feature (40)..(40): n is a, c, g, or t
  misc_feature (54)..(54): n is a, c, g, or t
  misc_feature (98)..(98): n is a, c, g, or t
  misc_feature (404)..(404): n is a, c, g, or t
  misc_feature (406)..(406): n is a, c, g, or t
gttaacaattttnacaacccataatgtgtagtgtagaganatccaacagccagnggaccccactcctaacacattaagtccctggtcaaataaaaganattcccctgttgaataacagaatttaaaacattttcagtggtaggcaagtgtgttaatcttcccctggcccatagtggaaataaaggccgtaaaagaactgagtgatgttattagcagtgcaaatagagttaaaaattgccatcatctagaactgacctcatgtgcttgggaaactgaatcttctcgccacagatggctctaatgagtcgggaggatggtgctgggcagaggtcagtgttggaagtcctttcttatggcaaagagtttgcagtctgtgcatgcatgtgtgtgtaagtgtgtgaaangnaattgcagttgtggg

SEQ ID NO: 578461 - DNA, 852 bp, Homo sapiens
accgctcccttgccattattgttcccccaagactttggaaacccataattgtgcctttacagtaggcaataaacatgttatggccttattatatttctataggaacactcattgtgtaataatcgtctccactgcctctagacaaccccccctcttgtaatatatagtaaccacgaacaacttagttgtgttttaagcccctcctcttataggactccctcaataatattattcacggctcttcttttatacagacaaactgtccgttaactctctcccgacataatacccccccggccgtgtttctatactacgcaccacgacgtaacttgtaataccaaaagtgataataagcccccacggtgccttcttagaaccaaataaaatgtgattgtgctcacaaatctctcttgtctctgtcatactttcgcacaccctaattacgaaagctctcacgttgttcgattcttcccgaatgtgcacgcaccctagaaaaccactattatgccccccccctgttacaaccaaaatacagaatacattcttatgggattaaaacaatatctcctctcaatataacacctgggggtcactcaaacatctcaccccttctttattaccatataatgcaaaaagaatctatgtgcgaaaccacgaactgggtcacaccatctttgatcatcaccagcattcttggcttgtcagcctcacaaagcattgtcacggcccccgttcttggaaccccctcagcgagcattacaaaaaagatgcaaaaataacaacatttgttttttatgaggacatggaatctactaaacatcccaccccaaaaaatgtctgcccccaaaaaca

SEQ ID NO: 578462 - DNA, 366 bp, Homo sapiens
tctaagttattacgtccacacatttatttagattgtcttagctttatctatttcattgttccacgattccatcatatcgacaccgacattatgcttacttgcatgtctccataatctcctcttcgctgtgactgtaaaggccctgctggtcaggtatcttgtaggatgcccctctactggaatttgtctgatgtttttcttattagactggggataagcttttgggagaacagtaattgtattttgtaatatgccagcttgacaatttctttctttctttttttttttttgggaccgggggaatggaatctcattctgtcacccaggctgaattgtagtgccgtgatctgggctcattgaaaattc

SEQ ID NO: 578463 - DNA, 428 bp, Homo sapiens
aaatagtatgacgtatgataaagtgatagagcgaccattcgtggagtaaaccttcatggagtgagagtaaggtgttgactggaatagccctgtcgatatatacttgatatctattctatatattgttctctcaccccatgtcttgtactaggagctgtcgcgcgcagtctcgtgaacgcttacatacctttagatgttgagatgacagagatctaacttctgagagcagaggtgtcaagtgacggtccccttggaggaatggtctttgcatctgactacttccttctgcaactgtgttcttccattagcttccatgacactctcctgctttatttttttctacatctctagcctttgctgtttcctctcctaccccacctttagattttactcagagttcagtctccagccctacaatctgagggaca

SEQ ID NO: 578464 - DNA, 359 bp, Homo sapiens
atattccctcttcattacattttttttttttctaaagtttatggccgggtgtggtggctcatgccatgcaatcccagcaccttgggaggctgaggtgggtggatcacttaagcctaggagttcaagaccagcctgggcaacacggcaagaccctgtctctacaaaaacacagtaattagccagagtgtggtggcgtgtgcctatagtcccaggtactggggagctgaggcagcaggactgcattgaaacctggagatccaggctgcagtgagccatgatcatgtcactgcactccagccttggtgacagagcaataccccgtctcaaacaaaaaaaatttaaagcctaaagcactctta

SEQ ID NO: 578465 - DNA, 352 bp, Homo sapiens
agaaagcttgccagagtccagatggtggtgacaataaggatagagagggggcagtcgatttagggaggcaagcttgccttggacgggtaaccagttgggatatcatgggtggcggagagagctggcttccaggatggtgatatgaggagccaagtgcccttggcaggagaaagacttcaggaggaagggtcatatttgaggggcagggaattatgcttacgattagggattgtcaagtggaggagccctgagcttaagctgggatgtctaccgcggtcgacagagcctcaaccaggagactttatctagatgagacttgggcacagagagaaaaaaggagctttgtatgccc

SEQ ID NO: 578466 - DNA, 427 bp, Homo sapiens
  misc_feature (9)..(9): n is a, c, g, or t
cgacagagntgtgccttgaggcaaaggtacctcctaatttgcttatgttgctgtccgcatgccaagcgtgctgcctggggatgttttcagctcagaggagctgccccccctaattttcccacaggtgccttagggtctagctgcaaccctgcctagtttgggaagattccccataccattcccactggtatgaaaagaaacatccaaggccgggcgtggtggctgacacctgtaatcccagcactttgggaggccatggggggcggatcacctgaggttgggacttcgagaccagcgtgaccaacattgcgaaatcccgtctctaccaaaaatacaaaattagccgggcgtggtgatgcatgcctgtaatcccagctactcgggaggctgaggaaggagaattgcttgaacccgggaggtggaggtt

SEQ ID NO: 578467 - DNA, 349 bp, Homo sapiens
tggcggaccaggcgggtctcgaactctgggccttaggcgatccttcccagtttcagcctcccaaagtgttatgattgacagggcgtgggccactggcgccgggcccaaacttcatgatgtctcttatcagcttaacttcctccgaggacttcccgtgtctcccagaatagagaccggaggtcttcgctggtgctctatcgggcctcggatatggacctgggcccctctgcacaccaacagctccggttggcaccattaagcccttctacctaggctggagctggagcctctctccagttccctcggttggcaaagaccgttcctggccttggggacctctggttgggcc

SEQ ID NO: 578468 - DNA, 195 bp, Homo sapiens
gcactagcccagctcaactttttcatttttattcctttgaaatttttatttatttatttatttaataaagcacaaattagctgggtgtggtggagcacatggtgtcctccttgttggccagaatgatccctcccccctgagcccaagttatcctcaaacaaaaacctaaattcaaaacaaaaaaaaacacaattc

SEQ ID NO: 578469 - DNA, 146 bp, Homo sapiens
ggcgtcacaccgacgctcggcttaattttggtatttttctttggtagagacggtgttttgccaggttggccaggctggtctcgaactgctgggctcaagcaatcagcccgcttcggcctcccaagtgtggtttttcggcgtgtgca

SEQ ID NO: 578470 - DNA, 349 bp, Homo sapiens
gggagatcattgagctcaggagtttgagtccagccggggcaacatagtgagaccctgtctctacaaaaagtcaaaaaaatcagcccggggtggtggtgcatgcctatggtcccagctacgtgggaggctgaggcaggaggatggtttgagcccaggaggtcgaggctgcagtgagccgagatcgcgccacggcactctagccggggtgacagagtgagactccatcacgcacacgcacgcacgaaagtgaatggcacctccctctggttggtgcttctggccatgtgacatgcccttcacctcccaccatcattttaaccttcctcaggtttcccgagagggtgaacag

SEQ ID NO: 578471 - DNA, 321 bp, Homo sapiens
accccccaaggttgggtaaaaaaattttttggtttaaaatttttaaccccaagggcccaaaagggggggggggaagggggggcctgaaaccaagatggtcccaaactctaaaaaaaagggaacaactttaacactagaccgtaataaaagttatgtgaatgggatctttcaaattatttggcggtttttagagacagacttttgctatgtcgcccagtgctggagtgcaatagcgagaactcgaccttcttgaaccttcaccttccaggcttaagctaacctaccacccgagctgggacaactggcacatgccaccacttt

SEQ ID NO: 578472 - DNA, 947 bp, Homo sapiens
  misc_feature (136)..(136): n is a, c, g, or t
  misc_feature (148)..(148): n is a, c, g, or t
  misc_feature (181)..(181): n is a, c, g, or t
  misc_feature (228)..(228): n is a, c, g, or t
  misc_feature (266)..(266): n is a, c, g, or t
  misc_feature (288)..(288): n is a, c, g, or t
  misc_feature (302)..(302): n is a, c, g, or t
gccaaacacacaaggtgtagaaaaattatcctgaaagggaagggggatataagctgcactttcacccccctgacacacgaaggtttcaccccacatagggcgccccgctctttaaggaggttattaaaccattggncttaatataatnggggaggacccaccgcccacagaggacacattnttggagactgcaatattggcctttctggtggcgcacaccacactccnccaagagacgctcgtgccgctctctatatagaggagangtcgtcacccacacatgagatntatatataggagcnctcgtttttgagaaagacgtttgccacacatatatatgttcatatatataattatatataatgttcttttgtgtgttatacacacatggaattgagaaacacttttttttgtgttgtttttggcgttgtgtttgagtaatatatataataccacaatggtgagacacccatggtatttcgtgttgtttctgcgagattcacacaatgttttatacccccttaaggagcttctggtatatttttgaatctggcacacaccacataattttctggagaagttgagagaatgttctcacgccttgtaaagagacccacacaaccacgagaaggagaataatgtaccacacagagatataattttttctgctccaccgagtgaggtttatgtgtgtaaaagtttaagagaacactctgagactttgaataagctataaattaaaccccacacccctatttgaaagagaattgaaataatatgctaacttcacagaaactaaattgagttcttcgtagaattattcttaataaaataatggctataattttcttctgcacaaatcacgatgtccgcactaagcgatggagtaatacctaataaactgccctcagttaatccctggttaataaatgtggtttttacaatta

SEQ ID NO: 578473 - DNA, 213 bp, Homo sapiens
tattttctgttatgtagtggacctgcagctgtatggctaggccggaggacattaggagggcagagagggcccctgttaggggtcatgggctgggtttactatatgataggcatgtgattggtgggtcattatgtgtagtcgtgcaggtagaggcttactagaagtgtgcacaacgtaggcttgcgattaaggcgcaccgcgcattctcaggat

SEQ ID NO: 578474 - DNA, 900 bp, Homo sapiens
  misc_feature (262)..(262): n is a, c, g, or t
  misc_feature (361)..(361): n is a, c, g, or t
  misc_feature (436)..(436): n is a, c, g, or t
  misc_feature (550)..(550): n is a, c, g, or t
  misc_feature (576)..(576): n is a, c, g, or t
  misc_feature (602)..(602): n is a, c, g, or t
  misc_feature (614)..(614): n is a, c, g, or t
  misc_feature (626)..(626): n is a, c, g, or t
agcggattcctagttaaggcggcacagggccgaggcgtagtgtgggtgactcctccgttccttgggtcccgtcgtctgtgatactgcagcgcagccatggcagaaccgcagcccccgtccggcggcctcacggacgaggccgcctcagttgctgctccgacgcggaccccagtaccaaggattttctattgcagcagaccatgctacgagtgaaggatcctaagaagtcactggatttttatactagagttcttggaatgancgctaatccaaaaatgtgtgattttcccattatgaagttttcactctacttctgtggcttatgaggatacaaaatgacatccctaaagacaaaggatgnaaaaatagcctggggcgctctccagaaaagctacacttgagctgacacaccaatttggggcactgaagatgatgngacccagagttaccacaatggcaattcagaccctcgaggattcggtcatattggaatgtgctgttcctgatgtatacagtgcttgtaacaggtttgaagaactgggagtcaaantttgtgaagaaacctgatgatggtanaatgaaagggctggcatttattcaangatcctgatggntactggattganattttgaatcctaacaaaatggcaaccttaatgtagtgctgtgagaattctcctttgaggatttcagaagaaaggaaaccaatgtgatgcaagatatttcttcagaaggtttggctgtgggtactgtcgatcaatattttttgcacatttccttctaattaggtgctttacaactgtcgcctctggttagccggcgttcggtgaagtggcgtttgtagaagagaagccaaggggtttggcaaaattcgcgggcaaaaaaaggggttgggcgaac

SEQ ID NO: 578475 - DNA, 243 bp, Homo sapiens
catccacctgtgtgctcatgagtgtatttcttcacatctgtgtccctggccctggccgcggggagccccgcgttcatcgccgtgggctacgtggacgacacggcagttcgtgcggttcgacagcgacgccgcgaggccagaggatggagccgcgggctgccttgtcataagagcaggaggggccggagtattggggcaccagggagacacggaatgtgaaggcccagtcacagagtgaccgag

SEQ ID NO: 578476 - DNA, 178 bp, Homo sapiens
ccgtataaaggggcgcccggcgccccgggcccccccggcggactcctggcctgactgcggggcttttttaatgcttccctggacttcggggaggggcggggggagggagggattttttttcccgtttgttccctttttaggataataaaggtgtgtgatttggtttgggcccaccgga

SEQ ID NO: 578477 - DNA, 140 bp, Homo sapiens
gtgatgggactggtgcgctcagtgccagatgacctgatatccttggtccatccacagtgaggaccccatcagatgacaggaatgaagtaactggtgagagggtctacatcagcctgggatccggtattccctgtggaact

SEQ ID NO: 578478 - DNA, 219 bp, Homo sapiens
tctgtatgggggatctcggagatcccccatacagagtacaaatacgaaattagctgggagtgatagcgcatacctgtaatcccagctattcgggaggctgaggcaggagaatggctcgaaaccaggaggtggaggttgcggtgagccgagattgcctcattgcactccaacctggcgacagagcaagattccgtctcagaaagaaaacaaacacaaaaa

SEQ ID NO: 578479 - DNA, 218 bp, Homo sapiens
  misc_feature (110)..(110): n is a, c, g, or t
gggaaccccccccccctttttttttcctcttttaaaaaacccggggggtttcccccctccggtttttttttttggcgggggggggggtatatttttttcccagagaaacnttttttcccttttggccttttttttttcccttttaaaaaaatttttttcaaaaaaaagggttttttccggtccggtttttccgggtttttttttcccccccgttttta

SEQ ID NO: 578480 - DNA, 99 bp, Homo sapiens
cttccccttccgacgaaaatattcccacctctgtcgcccgcccgcctcccctgcctctgacagccatggcccacctccagctcgcggcggtcgccgggg

SEQ ID NO: 578481 - DNA, 383 bp, Homo sapiens
gtgcctggggattagaaggaggggagggatacgctgggcctgagagaagtgtgctctgacaggtatcacagcactctagaattagcctagaggccatagactggagcagagggcagggatagccaccgaacaggtcagagagaatgacagaatgacgtggacaggccagcatggaaagagtctggatgggtggattgctccatccccgtagagggagggaggcggtggggcagcacaacgcaaaatgcacatcaaggtttagcaggggcagtcacaggcagaggtgagaggcaccttggtgtgtccaggaatagaaagtggaacttgaagggcatagaaaggagacgcggagagccagagccagacagagccctcagggcttg

SEQ ID NO: 578482 - DNA, 107 bp, Homo sapiens
atggaatattccttcctgtcagtcacagctttcttcatggcttaagattcagagacttcctgggcacagtggctcacacctgtaatcccagcactttgagaggtcgg

SEQ ID NO: 578483 - DNA, 179 bp, Homo sapiens
tggtgcagtgtgactgtgatgatgaatacgttacattagggatttgccaagcccacagatcacgaggagtgaaccttaatgtaagctatggactttcgttaataataataataatcactattggctcattaattctaacaaatgtgccatgctaacattaataggggaaattgtgtgtg

SEQ ID NO: 578484 - DNA, 438 bp, Homo sapiens
actggaggctgcaatatagcctcctgtagacttgttcagcaccaattgtctgttcatctgtggaatgacttgaatgtgtctattatggtctccatactttctcaccttcctagagtaaagttgaataaactgtgctgactatcctcacaagatagtaattgatcaccttaggtgggtcatctgcttttcctaacaagtctgctttgctttgaattgaatacgtctattccgaggcatattcgccagctgtatgctccaggaaatggagcaactaacagtggttttccttatgatgtcatagtcttatcatgtcctatctttttttttggaaatgcaacttatgagatcaacccaaaggaaattgtgcatcagtgtccataggggtggttcacagagtggcaggagtctctgagcaacaatctaagctgtatatgaatt

SEQ ID NO: 578485 - DNA, 391 bp, Homo sapiens
  misc_feature (103)..(103): n is a, c, g, or t
aacaagctattaaagacgccgactgcctgaggggcggggcacatgagagaggcgtctgattgggctgagaagggcggagagaaacaaaacagatcgcacgccnctcactaaaaacacgctagccaggaccctggtggggaggagcattgcttggaagagacagggccgcagaaagtagaaacggtccagatgagacttgcatgggcgggaactagagatggaggactttcccgcgcaagggggacaggcttgacttgaaaggaggacacgggaaagaacaaaggaactttagactcgcgtgagacaggttgtttgaaatcttgaggagaggtccctggaaaacccgaagaggttcttggatagggccttaaggggaggggagcgggggcta

SEQ ID NO: 578486 - DNA, 211 bp, Homo sapiens
gttcatcttctccatgtgttccaatttgagtccaagtgtgggacaaggttttaactgtccaagcagagatttctccaagtggaaatccatatttttgtgagatctccatgctttgctctcaaggcttggagaggtatgtcccacctccatgggttgctcaccgcctgctacacaggcaggtaatgcggattggaggcaggtcggatctgca

SEQ ID NO: 578487 - DNA, 183 bp, Homo sapiens
ggggacgtcctctcttgcggataacccatacatccgagccctagtcctaatcacataacctattcccccgatcaatctcaattacaatatatacaccaacaaacaaggttcaaccagtaactactactaatcaacgcccataatcagggaaagcccccggaccaataggatacagtagggaga

SEQ ID NO: 578488 - DNA, 358 bp, Homo sapiens
gactgcaggatatgccccggaaatacgcagtagatgtgcagcctatcagaattggagatggaacgacacgcccttttgcggaggacggtgaacggccacctagtcctgcaggttatcgacgggtacaggctcgccgtcttgcccctatttttcgatgggccattcccattatgcagatcacatgattgggattggtggagactgagatgatatggaaatattcatggaggagatgagagaaatcagaagaaaacttagggagctgcagttcaggaattgtctgcgtctccttcttggggagctctctgatcaccatgaccatcatgatgaattttgccttatgccttcccctccacca

SEQ ID NO: 578489 - DNA, 432 bp, Homo sapiens
  misc_feature (228)..(228): n is a, c, g, or t
  misc_feature (370)..(370): n is a, c, g, or t
acatggaggctggtgagggtgacctggagcctctggtcatgatcaaatgagataaggaagttaggctgctctgaaaattgacacacagcccaatccatagatggtgttattatcatcaatatgattattttgtgtaattccacaatagctgtttcattaacttcaaaatgtggaattgcatatatttttaaattttgtgtccatttttaaaaagtttacctacctttntaaaacgaatcaaccagaacggagtttcacccacgggaggtgcctgccttcctcttgcccacttgctcccagcgtgggtttgccgtttctcacctcgacttcccgacagagacccgggatctgtcgccatcgctcctgtctntcgggcaaacgaccgtgaacatataacctttcaggtttttaacaaattgcaagatttcagtg

SEQ ID NO: 578490 - DNA, 255 bp, Homo sapiens
  misc_feature (61)..(61): n is a, c, g, or t
  misc_feature (119)..(119): n is a, c, g, or t
  misc_feature (243)..(243): n is a, c, g, or t
aggctggtctcgaactcctgacctcaagctatccacctacctcggcctcccaaagtgctgngattacaggcaggagccatcacgaccagctatttctggaattttccatttaacatttnggaccttaccaactgcggtgcaggggccaagggaaaacttcccctttaccctctgaaggtcactgaaaagtcagctcataaaagcagaatagaaattggatacacattcattagcatgcaaggngaaatcagagtg

SEQ ID NO: 578491 - DNA, 778 bp, Homo sapiens
tcccccccccccccccagggggccggccccccccgaaaaaaaaaggggggggggggggggggcccccctctatatcccgcgggcagaattaacaccgcgttcgaggaaagagacagaagccatcaacatcgtccccccgcccaaggtggcctattttttcacaagaactcccgaggaaatataaagcggagcccattatttctgtcgaacagaaagaataagagggtaacaactcacgagcgagagataatatactaataggcgcccctattatataagaaccccccggggggtaataaatatatttggtaagcccctttatagggcgccgagtttgtgtgtttgagaaaagcgcgcctcgtgtgaaaaaagtctataaaaatagtgtgaggcgcccccaccactgtagcaaatgaatgaagggcgccccggggggaaacactcgcctccaaaaaaatgtttgtttctgtaccccccgaaaaagatgatttagtccccccccccacgaggagggggatccacacagatggcgagagaaacaaatgcggtgggacccacaacaaaaaaaaaacaccacagagagaatcccgacgaaacaacgaggggcttatggagcacttgagaggaaaaacaaccccccttttaaaaccacaatgtgctcacacaaaaaagagcgcgagaccttgaaaagaacaaaaacacacgaagaaacacaaaacaaagaaaagaaaccacagaacacacgcgcagcaataatagtggggggcggagacaacat

SEQ ID NO: 578492 - DNA, 951 bp, Homo sapiens
tttatgcgtaattttcggaatttatatctgtgtgatcttttacatatcttagtacttttagatgggttgctccattctttatagtatttttattatctcgtatatggagtttactgcatgttttcgatgggcacttccaacggtttactggagataatgtgatctctgggcaactgtatttgtgagtttaagggagttctatgttcgagcatggttacgtctgacttgtatgccgtaggttatttcatttgtatttcgatgtaattatgtagtgtatttattttcaacatattgttagagtatggttgtaagatactccagttaacttatctttttgtcctttgtgaagtgtacctggaattctttgatgtatgttagttgcatcaatgaattaaaagcgagaatgcttgggggaagaagatttggctataatcgtataaaatatctgctcatagttagatacagcagtataattcatgcagtaaagcatctagaatgcaaatgaatagccttttgtatcagttattaatcttttctaactctgcttagctgctaatgatcctgaggcatagaaagtctgaagaaatttgtaataatagaattgccttaaaggatttgaagtaagaacataattattggggagagttcttttagtgattgcacagtatccctacattagcattaatttaaggtaaagagtgcagattgattttccctctttcctggtaattcctaagtaattaagaataaataaggttccataaagaaattgtagctggaatcgttaataacaattgtgagtggactgtcttgagttgcccctcaccatgtccttagatctaactctgtgctaccttattaagctgcatcagcaggcttagctgaagtggcttcattgtcagatgttagttgatatctccacctaaatgcatgtcatgtattctcataggc

SEQ ID NO: 578493 - DNA, 300 bp, Homo sapiens
agtcactgacattacgatggatggacgaggagccggtggcgagggacgattgccatcgccattttggactcttccctgccccttatgtcaagcttctggagtgactagacgctcactgtctactgctactatttatttcccatgtacaaggtggctctggcatccaacacctccctattccttctgcaaatatcttaccagataacgttctggacaaatccttcctactaactgtcttcatttttggcttggggcagacacagcttgccgaaggaggtccccctccccgagagtcctctc

SEQ ID NO: 578494 - DNA, 1043 bp, Homo sapiens
agaggagatggagagataagagaagaggcggtaatatatagagattgaggacgattgaaagattggggagaaggagcaacaagaggttaaataaggtttggggaaaaaaaagagagatcagactgttactgtgtctatgtagaaagaagtagacataagaaaccccattttggtctgtactaagagaaattagtctgctttgagatgctgttaatctgtaaccctagccgcaaccctgtgctcacagaaacatgtgctgtgttgacccaaggtttaatggatttagggctgtgcaggctgtgcttggttaaaatgtgtttgcaggcagtatgcttggtaaaagtcatcgccattctccagtctcgagtaccctgggacagaatacactgtggaaggccgcagggacctctgcccaagaaagcctgggtattgtccaaggtttctctccactgagacagcctgagatatggcctcgtgggaagggaaagacctgaccatcccccagccagacacccgtaaagggtctgtgctgaggacggttagtgaaagagatagccctctttgcagttgagataagaggaaggcctctgtctcctgctcctcccctgggaatggaatgtcttggtgtaaaaccaatcgtatgttctgtttacagagataggagaaaacttgctttatggtgtaacgtgagacatgctgggtggccatactgctgtttactggactggatgtctgcgtcaagtcaacattaaatctaccctaatggccctctagggtcgaggatctttccttaaagtttttttggcacacaaaaaggcctggcgtacaaagaaatccggcagagacatatccccaccataaacccaaagagagttaaaaatccccctcgaagaaggggggacacagcacacacaaacaggggggaagcagaacaaaggaggatcgtaccacaactgaagagagaagcttgacagcgcagcttagacgaagacagggctatattagccacccacgcgacaagaagaaaagggcgagataaagtg

SEQ ID NO: 578495 - DNA, 221 bp, Homo sapiens
  misc_feature (91)..(91): n is a, c, g, or t
  misc_feature (159)..(159): n is a, c, g, or t
  misc_feature (201)..(201): n is a, c, g, or t
cgggaagagatgcgtgggaagagatagcgtgggaagagatagcgtgggaagagatagcgtggtgtaatacaatgaagggaagagatagcgntggcaaaaaggcaagacaccatccgtccgtgccccactttccagttccagcttgcatggaggcccgcnggaacgctgttccctgctccgtcttatgcagtgagacgtcangcattctggtgccacagcct

SEQ ID NO: 578496 - DNA, 134 bp, Homo sapiens
ctgtctcactgcagcgggtctccctgcctcaggccctgcgccctgaccaccttgcatccgtgtcatttccgcctcccctctgcgcgttgcccgctagcatgcttgtttctgcacccccatgcgttgattgccag

SEQ ID NO: 578497 - DNA, 932 bp, Homo sapiens
  misc_feature (35)..(35): n is a, c, g, or t
  misc_feature (72)..(72): n is a, c, g, or t
  misc_feature (170)..(171): n is a, c, g, or t
  misc_feature (185)..(185): n is a, c, g, or t
  misc_feature (190)..(190): n is a, c, g, or t
  misc_feature (206)..(206): n is a, c, g, or t
  misc_feature (210)..(210): n is a, c, g, or t
  misc_feature (250)..(252): n is a, c, g, or t
  misc_feature (271)..(271): n is a, c, g, or t
  misc_feature (278)..(278): n is a, c, g, or t
  misc_feature (285)..(285): n is a, c, g, or t
  misc_feature (299)..(299): n is a, c, g, or t
  misc_feature (314)..(314): n is a, c, g, or t
  misc_feature (344)..(344): n is a, c, g, or t
  misc_feature (386)..(386): n is a, c, g, or t
  misc_feature (411)..(411): n is a, c, g, or t
  misc_feature (415)..(416): n is a, c, g, or t
  misc_feature (425)..(425): n is a, c, g, or t
  misc_feature (428)..(431): n is a, c, g, or t
  misc_feature (433)..(433): n is a, c, g, or t
  misc_feature (437)..(437): n is a, c, g, or t
  misc_feature (863)..(863): n is a, c, g, or t
  misc_feature (900)..(900): n is a, c, g, or t
cttaaattacaaaacagagaccacaaagaaggccngaggaaaaaccccaggacttccaagggtgaagctgtnccctcctcgcctgccaccctcctcgaggctcattgagtcgtccttggagaggggcagaggactcagaggggatcagtgcgccaggggccctgggctgnngcgggtgaggcagngagtnctgaggccacagagcngggnaacctgagccgcctctctggccccctcccccaccactgcnnnaacctgtgtacagcgcctncgccccncccctcngaacccgtccatcngctctgcacttcccnggcaggtggcgctgggcaaggcctgcagcnatactcgctgggcgcgggtgtcggtgagcgtagcgcacagtnccacgcaggtgatagcaaggccganccgnngcagggggntgnnnngnaganagagtggggaaaatgtaaatggggacagtggccaacaccgatgcaggcagatcccaaagtcagggttaagccatcctggccagcagaagccagctccccactccaccaccacaccctgtcacttccgtccctccccaatatccagaggagggtggactctgttcttgctagcaggaggcggccttgggaagttgtccgagtgggccagagaggctgaaggctgctgccttcctgcctggctcagtctctgcccagtccccagtccccagcagccagtggcccgtggcagggccctcctgggggtcacagcctgcgctgagctcagttcagggaagaacaaagcagagaggaacagagtggagccgtggcaccttacacgtagttgctggcagcagcagagcgggcagcagaatacttggcggagtnaggcttgtctgtgcggggtggacagttgcagcaaagnaccccccgccaaggagcagcagggcgggaggg

SEQ ID NO: 578498 - DNA, 310 bp, Homo sapiens
cacttgaggttgctatcggtcggcctatcccagttctggtagttgaacggttcgcggatctgggtcatgtaaccgtcgagggtcatgcgttcaattgctcccgtagtcaggtttagcttcgggctgacggtgaaggcaggcccatagtgaaaagaggataatgggctcttcgcaaggtattcgttacccggttgcccgatccaaggtccccagcacacgccatcctctgggcattggccattcgttctctccaggcccacgctatactcggcgaggtaagggagcagctggttctccaactttgcggccg

SEQ ID NO: 578499 - DNA, 613 bp, Homo sapiens
  misc_feature (345)..(345): n is a, c, g, or t
  misc_feature (502)..(502): n is a, c, g, or t
gaattatctaagttaatgctgagaaaataaaacagaattaaaaataacaacagagtgtagcatggtggttaacagggcttcttcgcagtgttttattacagctaacttctactcctcagagtctgattcaggggccatctttcaggctagtctagcttcactactgattattctggctaggatttaataatgactgtacattgtaagagcagcaaacctcataggtgcccaagttctgatgccaagcacaatcacctgcatcatatgggcaagcccttctgctcccatctaacctggacagggataagcacactgccaagtggaacagcatacttatgatggacntttacccacagatttgaaactgtggccggttccaatatatttttaacttgaaggctcgtgccgaatttggacgagacatcatgatcatcgagaaatgcaactacagggggattcattaacttagtaaaaggctctaatcaaaggaaataatgcctgngatacttggaaaatggaaccttataccattatggggaaggaaattttccattcttagggaaccgttgaagtcctattcccaaaggattcaggttgaaagaatactgttccc

SEQ ID NO: 578500 - DNA, 368 bp, Homo sapiens
  misc_feature (294)..(294): n is a, c, g, or t
cagcggaacaagcaaggggctgctgagaagcagcagagtgacacagggaagctggattcttgctcatctgtgacaaaggctgaatccaaaagtagatagcaacagttaaaggattttaaaaaaggcaaatgaagattttttaaaatggcgactttaggcttcaaacaacctcttcttagtatccttggcaaagccttaataactctccccactaaagatgaagaaacagagagaaagggagctgacctggatgagtcaaatcgcaccctctacagagccacctccagctatccntggcctcaaggagctaattaagtagcagagataattaaattctgagaaaatccccaactgtgcttgttccgctg

SEQ ID NO: 578501 - DNA, 121 bp, Homo sapiens
agcgatcttagcactgttcggatgatcagattgctcgttagctaaggaggaagttgaacccatcgcaaagaagttaaaaacctgaaaaacgattagacgaatggctaactagacataacca

SEQ ID NO: 578502 - DNA, 567 bp, Homo sapiens
tgcgactcgtgaccaacatgctgtgatgtgtgcgagggaggaatggtcagctacacaacctggatcttaccacagttggatatgactgaggctctccaatgggccagatatcactggcgacggctgatcagaggtgcaaccagggatgatgattcagggccatacaactattcctcgttgctcgcctgtgggcgcaagtcctctcagatccctaaactgtcaggaaggcaccggattgttgttccccacatccagcccttcaaggatgagtatgagaagttctccggagcctatgtgaacaatcgaatacgaacaacaaagtacacacttctgaattttgtgccaagaaatttatttgaacaatttcacagagctgccaatttatatttcctgttcctagttgtcctgaactgggtacctttggtagaagccttccaaaaggaaatcaccatgttgcctctggtggtggtccttacaattatcgcaattaaagatggcctggaagattatcggaaatacaaaattgacaaacagatcaataatttaataactaaagtttatagtaga

SEQ ID NO: 578503 - DNA, 860 bp, Homo sapiens
ctccccccgtccgtcgtgtcgtagcagactaaggagtagagacaagcgaagacatgcccgccgcatgggcttctatactatgtccgtgccatcggtccccctggatgacacaccgtgttgggccggctggccccagtgtttctctaaaaggtgaccccgtctaaaatgccactggtcagaatcctgccgcaggttcacgcatctaagctccagttttacggcattcgacctttagggctcccctgggagcaaaaataacgggtttcaaccccgcgggggtgtagtcacttcttccggggcaaattgtctcttaacgccgtgtgtgagagaggtcctccgtcgccctcggctcttttccccacatagccccctgctcttttgctttcaaaatgagggtgaatctacaccacgccttaaagttttgtctaaaaggtgagggtggtcacaaaacattttgagccggatcttcttttagaaccgaattgaacacccgaggcggttcataagcccccccctgaaattccctacccccggggaaatccgtcctttcacccccgcagtagcgccactctcttcatccccgcgacgcaatgggaaccaattatcttggggcgggcaggatgaaaccccctttgagagagacataaattctcaagggtgcatactcggctaaaccccaagtacctgggaggctcaaacaaaaaactatagtacaaattttggcgcaatttagcaagagtaaacacaccttctttttaaagagtagacaaatctaatcttagacccccgaaagttgtggacccaaaacccaccttgggccacataggcccaaagcccaacaagaaaaaaatgaacaaaac

SEQ ID NO: 578504 - DNA, 135 bp, Homo sapiens
cattttgtccatgagtagactgtctgtcacagggttaggtgtacagataatatcgtcactcgaggtaatcagcataatatctgataggtagtttttaaatccctcacactcctcccaacttccaccctcaagtcg

SEQ ID NO: 578505 - DNA, 486 bp, Homo sapiens
  misc_feature (233)..(233): n is a, c, g, or t
ggctcgcgtgcgagcgcgaggaaccgccggtatgcgcgatagacggccgcgaccgagccggccggcgcatcgagcggcccgcgcaggaagttcgcgacgcgcacctccgtaacgttgccgcgcgcatccagcccgatcaccggcgccgaacagcggtagtcgctgttcgcactcttgttccagaactcgatacggcgtcgacgccaggtgcccgaaatcggccggaatgcttncgccgtagcgcatcggcaagcgcgaagccgtcgaggaagatgctgtctccgcccgttgcttcgttggccaggcaatgcaggaactgcacgcccggctgcaactcgcgcgtcggcaaatccgtatgcggcggcaggttcagcgacgtgtacgcattgctgtccggacgcggcttcgattcgacgtcaaacaggacgccgaaattgctttcgcggatcaggccgatgcggcgcgcgatttcgtcgacgcggccgc

SEQ ID NO: 578506 - DNA, 1014 bp, Homo sapiens
  misc_feature (368)..(368): n is a, c, g, or t
  misc_feature (374)..(374): n is a, c, g, or t
  misc_feature (508)..(508): n is a, c, g, or t
  misc_feature (513)..(513): n is a, c, g, or t
  misc_feature (523)..(523): n is a, c, g, or t
  misc_feature (556)..(556): n is a, c, g, or t
  misc_feature (589)..(589): n is a, c, g, or t
  misc_feature (594)..(594): n is a, c, g, or t
  misc_feature (632)..(632): n is a, c, g, or t
  misc_feature (859)..(859): n is a, c, g, or t
tacacggagacccggtggcagaagtggcagaacaaggatgaccagggcagcaccgatcggcaacggggaccagcacccactggggctggacgaagacctgctggggcctggggtggccgagggcgagggagcaccaactccaaactgaccatgggccgtggctgcctcgtgagcctcccagagcccaggcctccgtggcctcctcctgtgtgagtcccaccaggagccacgtgcccggccttgccctcaaggttttttgcttttctcctgtgcacctggcgaggctgaaggcgaggggtggaggaggccccagcacagcctcatctccatgtgtacacgtgtgtacgtgtgtatgcgtgtgtgtacgngtgtangcgtgtgtgtacgcgtgtgtacgtgcgtgtgtacacatgcgtggccgcctgtggtgtgcacgtgtgctctgggctccgaggcttctccagagctgggagctggctggcgtggcaagggcatgctctggggcagngtgtncctcaggaancagggtcctccctcccctttctgcctggtcagncccgtggcctctggcccaccaagctcctgtcanccagncatggtgtggtccaggcagggacatctcggtacccttnctgactccgtgggccctgggtgcgctgaggcctggaggcgtctacactggctccacatccacttcccccgcagctcgtgtgggcgctcgtccacaaacactccgtggctgagaggcagcggatccaggcagcgatgctgagccacctcctccgagccttcctttcacacagaccaccccggaggacacgtggatgatggggtcagagatcactgagctgccctcaanggggctggaacccgggtgctggggtcatgctgctccgtggtccaagtgaggtctcttcacgagcaagagaacataagggacagacgtcaaaaaaaaaaacacccacaaaacacggcggcccagacacgagccacgagaaggacaaaaaaagggcg

SEQ ID NO: 578507 - DNA, 462 bp, Homo sapiens
  misc_feature (71)..(72): n is a, c, g, or t
gctcgacctgaaggtgaagcgtttctgattatcgggttattggtcgttgccgcgtgggccatgggccgacnncttcgctgcgaaccgggtattgctggttcgggcggtcggcgaagaagcattccagggtccgtccgacggtcctgaacgccagttcggaccaggggatctcgtgttcttcgaacagccgtacttccaggctttcttcgccggcggaaattccaggtccaccagttcggcacggtagaacacatgtacctggttgatatgcggcacgtcgatcaacgtatagatgctcaggttgcgcacctgggggcaagcctcttccagggtttcccggcgagcggcctgttccacggtctcgccgttttccataaaaccggcgggcagggtccagtaaccccggcgcggctcgatggcacggcggcagagcaggacctgggtgccccagaccggcagcag

SEQ ID NO: 578508 - DNA, 427 bp, Homo sapiens
gcaggggaattgcttgaacccggaaggtgaggttgcggtgagccgagatcacaccattgcactccagcctgggcgatgagcaaaactccgctgcacaaaaaaaaaaaaaaaaaaaagaattgatggtggtcgggtgtgcgggtgtggtggtggctcacacttgtaatctcagcactttgggaggctgaggcaggaggatcgcttgagcccaggagttccaagaccagcctgaccaacatagagagaccctgtctctgctaggaatgcaaaattagctgggcatggtggcgcatgcctgtagtcccagctactggggagactgaggcaggggaattgcttgaacccgggaggtgaggttgcggtgagccgagatcacaccattgcactccagcctgggcgatgagcaaaactccgctgcacaaaaaaa

SEQ ID NO: 578509 - DNA, 212 bp, Homo sapiens
ctctagagcataaaacaagcacccatttattgaattagttgcatgcaggagcattcctgatcttaccatgagcagcagagacgagtgtatagagtgcaggatccagagcggggagaggctacacgcagttgggggcctgtaggctgtttcctggttacttggtgacgtgcagagctctctctggggggctgcagctcgtcttgcggggactg

SEQ ID NO: 578510 - DNA, 287 bp, Homo sapiens
caacggaacctgtcacccaggacgctgaggacaacacagtctctctcctgcagaccaatggtgccatctccgaaccttcactatcagttggaccagaggctgacaacttcacagttctcaatctggctgtggacagatgcatccccatatctcatcaaaatcaatttgttccacacatgcatcctccaattccacttcattaacacagtctaacaatcttctcatgttcccaagtccagcaactttgcagcagcacactgttcatggaggctcatcagggcatccca

SEQ ID NO: 578511 - DNA, 235 bp, Homo sapiens
gaagggcaactggaccagaagacagccatgtactcctgtggaaagtccgtagtccccttgttttgattgttaaaggaacttgattccagaaagccactgagaaaatacttacggaggaacagacgacactgtcaaaaaagaaagacctgttcctggaccttgatcagcagactgtgatgctatggtgtcccactctgtgatttgtggcccgggaaccacaagagattgcttggac

SEQ ID NO: 578512 - DNA, 548 bp, Homo sapiens
  misc_feature (90)..(90): n is a, c, g, or t
  misc_feature (133)..(134): n is a, c, g, or t
  misc_feature (548)..(548): n is a, c, g, or t
ttgctctgtcacccagattggagtgcagtggcacaatctcagctcaccgcaacctccgcctcccaggttcaagcaattctcctgcctcancctcccgagtaggtgggactacaggcgcccgccaccacgcctnnctatttttgtatttttagtagagatggggtttcaccatattggtcaggctggtcttgaactcctgacctcaggcaatccacccacctcggcctcccaaagtgctgggattacaggtgtgagccaccgtgcccggcctgttttgactcttttatgaactcttttgtttgttgggtttatcgacctattaacctttttaggatttttttaccttatgcatcttttaacgcttttgcattactcttgttttggattaggtgtagtatttaagaacatatcttccttatacaataaagccatctagtagaaatcaagtgcaggtgactggaatgtatgctcaacaagggcaagttatggtctagttcagaggtgggaaactatgggtcatgcattggctgttttcataaatcaagatn

SEQ ID NO: 578513 - DNA, 1028 bp, Homo sapiens
  misc_feature (692)..(692): n is a, c, g, or t
gagccgcctgaccaggcctcaacacccttcgtttgtcacgcacgcactttcatactccgtcctcgcgccccttttcctacactttcctcttctccccgagctcggatggagcacgcgtcttatcctgcgcgattgcacttctgggagcccgaggtcgaagcccggcgctgccgcccgtcggcctgacgggaagcgatgaagaggcctgcgacgcggcagagaaacaacgtcggatgtcgtcatcggagagaagtcgactccctaccatgcatgccggcggcaggagtatggcccgaccaatcgcaagttccgcccggtccccactgacccccgcttcaacaagatgtaagaacatgctttccttgcaaaagtcgtgtaccgagtcgaaatggtgactactgttctttcacttcgaaattatttgttgcttgaacgacgacataaatggcactgctttaaatcgcttcgagtctcccagagattatactcctaaaaggtctagcgatatacggtgtctcgcttctccccgtaggcgacaagctgcactaaatttataacagccattgggtgggacccggaaaagttggaatctacggtttgcaacgttgccatatgattccacgttctcaatatcccacaggacagtgctgctcgaatagcttcgatgcgacgaatgttcaagactttgcttnggagaatccggctgttgacagcagaacttgagcgaagcaccgtcccttggagagccatgtggtccgaattggtccccacaacatgtgtcaataccagcggaggaccatgggacccaacagcggttgcctcattagggcttgctatccatttggggtctttctaaggatgaaatcgcaaccgttgcgccacgttaaactttgcgtcgacagaacggcaccgtggtgagttaaatacgacctcgacttaccccggaccttgaatgggtacccaattggctcctcaaagtgtggtcgcgaaaactagtaaaccgcgcctgacaatattgactggcttac

SEQ ID NO: 578514 - DNA, 356 bp, Homo sapiens
cccttatttatttttaatggggaaaggggtttttttaccaagcatccctgccctcctggagacaccacctgctttccggggggccctgtgatgggagttggtggggactgagtccttttgtaggggcaactgggaaacttttgtcctttgaggaaaggaagctccccgcccctcggggggggttttttatttgggggaaaggaggggggaagggttgggggaagagctccagccggtttgctccccagctttgtaggggcagaccagggtcccctttgaggtaaaggtgagagaaaaatatttacaaaggctttatttttttttttaaaaaaaaaggccccggtattttaaaagca

SEQ ID NO: 578515 - DNA, 606 bp, Homo sapiens
agcggagctgggaggctggagatccctaccgtactagcctcctctgccgtcgcgtgagcttcccgagacctcttcaggccgcccggagccgttcccggagcccggccgtagaggctgcaatcgccgccgggagcccgcatgccggccccgaggcccgccgcgcgaccttcgatggcgcctcccatgtcgacgccatggtgaaagctgactttctaactccgctctggcccagaacggagggcaagaacggacggaaccctaagagcggcgatgaggcactcatcatccccctccaacgccgtcgtccgcgtggtactgcaatggactacagatgatgtggtaccagttggccacaaagaagaccctggtgttggtgcactgtgctttgggactatgcactttactgcttgcacggtgtaagttctagagaggacgcactacattgttagcaacacctatttttgcaccttcagagccatgaatgaccgctggtactactgatgggaagtaaacgctacatcatacacgaatgagtgtcaatcttaaagtgatgcccatcgtgcatagtgcctccaagctgctctctaccaaacaagttgacagaaa

SEQ ID NO: 578516 - DNA, 308 bp, Homo sapiens
aagcccagcgtgctcaagtccaaggcagagggactgagctgcactttctggccttgccttccagctgccctgaccctaccaagtacttggccttcccttagactctaaccatatatcatgaagggtcctctgatcccaagctgcctgaccattcctaaccctacctgcatatgcctgcatagggtctcaagaaggccaccttcctcagattgaaccaggccagtgggaagctagagcatactgcgtactttactcactaggcctcgttagctagcatgactggctggagaactagcccatgctactga

SEQ ID NO: 578517 - DNA, 171 bp, Homo sapiens
aaaaatatgtagcagcatagaataattatgaccggagaatcatcaggttgctatcgatagcatcctacttgatgcgtgcgcttatgtatgactatagacattgacttagtcatagttactggttgaacattgtttgttggtgatatatattgtaattgagattgctcagcg

SEQ ID NO: 578518 - DNA, 405 bp, Homo sapiens
  misc_feature (313)..(314): n is a, c, g, or t
  misc_feature (316)..(316): n is a, c, g, or t
  misc_feature (318)..(318): n is a, c, g, or t
  misc_feature (321)..(323): n is a, c, g, or t
tttgagagagtatttcggcacaaacaaaactgtgtggagttttatcctatattcataattacattgtggatggctgggtggtatttcaaccaagtttttgctacttgtctgggtctggtgtacatatatggccgccacctatacttctggggatattcagaagctgctaaaaaacggatcaccggtttccgactgagtctggggattttggcctcgttgacccgcctaggtgtcctgggaataggaaacagctttctggatgagtatctggatctcaatattggcaagaaactgaggcgggaacgctaagttnntntnttnnntttaatgcttgcagaagctgttcccaccatgaaggtaatatggtatcatttgttaaataaaaataaagtctttattctgtta

SEQ ID NO: 578519 - DNA, 1192 bp, Homo sapiens
cggtttttgtttttctgttcttctttcttcttctttatttctgttctcattttgctttgctcgcaccccctgtgtttctttatactctgaataatagttgtttcgccgctctccttttttgttctgatttttcgatttggcaagacgtttttaaacccttcgggtttctccagtggaaatctgttaattttcgttattatacctcccttattaccatagattttaccttgccgaggcttttatagagattgtccgccaccccccccgccgcgcccgcgtgtttggagaaaggcctttttcgctaatgtggataaatgtaataaggttaagatatgaggataatcgctcacaacttgtctagatttcttagatatgggtaacctatagtctttggaaatgggtatttgttaaaatatccccgtgtaattccaaattggaccagaagatttgatataaaaagttaacctgagtttgaaccctaaaggtgttacacgtttttaaagtttgccataatagacgccacttttttgttttttgagtttcccccccaattctttatttacccggaaagagcctttgccaaatagattttacactgttctttggccacctggaagaggtagattcttgtgaaaacctatcccttttgtttgtagaagatcttcccagttcttgtccccctgggagattaaatagagagatgggattccacccaaactttttggggtttttctccctccatgccaaagccatctttctttaagaggcctcttatctttaaagccccatattaaagactctgtggttctcgccctctcttagaagctttaagaaaattgaatattccattggatcccacaattaaccttagataaatattcgcccaagtgaccccttgagattgaatatttctcttattgataataatttccccataatttccaggtggaataaaattaatattaaatagcacccaaaccccgatcttagtccactgggccataaatagaccatatttctttaaatatagactctattttgaattaaaagagtgtttattataaaacccgtggtggtttttggtgttttctaagatgataataagaaagccttgtataaaatccagatttatccatttcctgatttaaagtagactttgacttttttattaaaaacccttgtattaaagcca

SEQ ID NO: 578520 - DNA, 202 bp, Homo sapiens
cagatcgaatcgagctcggtccccttagttttagactgttcaatagcactgctgcctggggactatggttatgtggatgagcgagctaaggttcggacgggtgggatgaagacagagaggaggtcgagtttaattatgcctttgagggtggaggtgatgatggaggtggagatttggtgctattgaaacttctaaaactagg

SEQ ID NO: 578521 - DNA, 172 bp, Homo sapiens
  misc_feature (156)..(156): n is a, c, g, or t
gcggccgcctactactactactgctcgaattcaagcttctaacgatgtacggggacatgcggataaccagtaattcttcgagcctgacctctacaagtctgagatggaggtccaggatgcatagctaaaggccctactccagaagttctgcaagtncgaaaaacccaaaaaa

SEQ ID NO: 578522 - DNA, 647 bp, Homo sapiens
agtaggtttcagagtgattcattcaataaacacttactgaatagctaatatgaatgtacaaagcactgcattagatacctacagtttcatgggggagacaagtccataaacagagcccaatctgaaggtcattccccaaaaataaggcagttcattcaagatctctgaaatggttctcttcaaattccagctgtgacctgacaaacatttctgacattattcactttacctagatccttgacttcattaaaggcatacaacggagaatattagatgaggaaaaaagaaattgtccaaaaaaaaagagatcaaacctgaaacaataattgacactatctagacagaagcaaaataatctactgtaggccaggcatggtgattcatgccagtaatctcagcactttggaaggccgaggtggaagcatcacttgagctcaggagttcaagaccagccatggcaaaacctcatccctacaaaaaatacaaaaattagccaggcacagtggcacatgcctgtagtcccagcttcttgggaggctgaggtggcaagatggcttgagccagggaggtggaagttgcagtgataccagattgtgccactgcactccaacttaggtgacagagtgagaccatgaccaaaaaaaaaa

SEQ ID NO: 578523 - DNA, 283 bp, Homo sapiens
  misc_feature (32)..(32): n is a, c, g, or t
  misc_feature (42)..(42): n is a, c, g, or t
  misc_feature (65)..(65): n is a, c, g, or t
  misc_feature (113)..(113): n is a, c, g, or t
  misc_feature (242)..(242): n is a, c, g, or t
ggagagctttcatgtgggaggattgctacatnggaggatttncttgggcctgggagcagaggttncagttagccgagattgcaacactgcagtccagtctggaccacagagtnagaccctgtttcaaaaataaaatatataaatgacatccaataaagtatgcatatttgagctgcaggataagtcttgaattttctttttcttttttttgagacagcctcgctctgtcacccaggctggantacagtggcataatctcggctcactgcaagccctgcctcct

SEQ ID NO: 578524 - DNA, 400 bp, Homo sapiens
gtagtctttggtgggtagagagtttgttatctttaggtcagctgaggaatctttttagaaatgtgattgctcatgaatattagagaaccttgaggtggaagcagtttatcatactttcgttgacctcttctttaatgtattttactgtcttactggtttcatcattccccataccagctgtggggccatcttttatccacgcatccttgtttagaagtatggaagccgtggccaggcgctgtggctcacgcctgtaatcccaaagtgctgcgattacagacgtgagccatcacgcctggctgaagcagagaatttcttaaacctgggaggtggaggttgcagtgagccgagatcgtgccactgcactccagcctgggcaacagagcaaaactcggtctca

SEQ ID NO: 578525 - DNA, 224 bp, Homo sapiens
tctgtggatacgttgtatcctctggaggggaggaatggcaatgtgatgtgactctgagtggcaaatgttaagatttgacaaagtaggtgcatgagcttggatattcagtatgtagttcacatatctagaatgtacagtcacaccaacactattagccagatgctgttcatatacttgtgccctgagcagatgcatctaggattggtcagtgacagccgtactct

SEQ ID NO: 578526 - DNA, 250 bp, Homo sapiens
tcataggttcgcaggaggtccaggctgcaatgagccatgattgtaccactgcactgcagcgtgggtgacagagtgaggccctgtcctccctccctcaccacaaaaaaaaaaaaaaaaaaccagtaaaaaacaaatacaaaaggtcatactaagagtgtgggttaatttccaggtgatttgaaaatcaaaaagcttccttgggaagtgacttataacctggcagcttggtaaattgtgcaccttaacccct

SEQ ID NO: 578527 - DNA, 302 bp, Homo sapiens
gaactaacataatagctagggagcacagcaccggcagcatcctatggagcacagctctctcctctgccacgtgcacatcattaacaccttccccttgtggctggttagctcggctgcaaacgggccacagaacgtcagtagtttcagtcatacacagcacccgttgtgtatgacaagtcactttctggaattctacaagaagtcctggtcctgttgccacgagtatctaatttgaggctgattataactatttcttccaccccggaggcccactccgggttaccgaagctcgatacttcgat

SEQ ID NO: 578528 - DNA, 229 bp, Homo sapiens
cgtcttacacaggcggctagatgtacgagttccttttactttttttaaccttaccttatgagcatgcctgtgtagggttgacagtgagggtaataatgacttgttggttgattgtcgatcttgggctgttacttgtcagttcagtgttataatctgacgcaggcttatgcgggggagaatgtctccatgttacttctcctacacccttacgttcttctactacggtgac

SEQ ID NO: 578529 - DNA, 193 bp, Homo sapiens
gggcaggggaaggaggctgggctggccaggccagccgatcacccttgagccattgccttttgcccgcagggggaaaattgcacttacaaggccgtccacaacacggctgtgctctttctgacagaacggccctgctttgcaagtggggcgccgacgctgaaacgtctgcaggagctggagtgctgcctaccgg

SEQ ID NO: 578530 - DNA, 1293 bp, Homo sapiens
gggatgcctgctccctgtgagccctggctgtagatggctgcaatctgcagcctgggagccctgcagccctgtgccctgagccctgccgccgcccttcgatggtgctgccccatggcctgctgccatggtgaatgtgtgacgttcaactcctgctctgtgcccagaaggaggccaagaatggacgatgcccaatgagctgtgcgaggaggcgctcatcatcccccccgacgccgtcgcggtggactgcaaggacccagatgatgtggtaccatgttggccaaatgaagagcctggtgttggtgcatgtgctttggactagcatttatgcttgcaggtgttatcctaggaggagcatacttgtacccactatttcgcacttcaaccagatgacgtgtactactgtggcctacaagtacactcaaagctgatgtcatcttaacctgagccctctgcacgatgccccaggctgctctctaccagacaattgaagaacctattcacacctctttgaccgcacagaacgaggttcgacatcatcagtcgtgcctgtcccaggacgtctggcgaacttagtgaatccttgccaaccatttgtctcattgactttacccacgcacaacttacctgcctatccaccatcttacccctggcactccgtgctcatgtgactcccctctgcaaccactttccaattggtcctggccaaccccagaaaaccctacttgcacgctaacgttattcacactccaagggcctggcacccctactttggcccacatgctccctaatactgagattccggacgcaccactcgcgctaactcacactgagctcgccatctttgaccacactctttgcatataccaccatcgcgcctattaccctcaccactctcctcgcgcgcccttgtttgtgtccaatctaacccactcgggacaacaacatacagcaactgttgatcgacgcctcccagctgctcaccgcctactatctccacggcctcattcccgccatgctccgtttgtagccccgctccgatctaccttctgcttgccggcccaatcactccgtgcccattctgctcacccacacgacatgctgcgcgtcggcttcccacacatctacactcctcgctccctgtctcacaatcgtatctgctcataacactctcctgttgctggctcgacaccgtctatctacctcgtcattgctactcgctctcccaatcgggtacgaccccacatccctatgcgaacaacctgcgatcaagtgcggactgacacccgcatgctc

SEQ ID NO: 578531 - DNA, 199 bp, Homo sapiens
tccggttaaagcacacccggttgacgctcaccccgtagttgttcgagataaagctctcattgaggctgacgaagtcgcggctcaagggcggcacgaacatctggatcttgaccgggtctttcgggttggcgacgaactcgaccttggcgtcgatgttccacaagtcgtcggtggcatcttcggtgacgggaattcccag

SEQ ID NO: 578532 - DNA, 692 bp, Homo sapiens
cgccctgccgcagccgcccgagcccccagccccgggcggccccgctccagcatcccagctcctgcactctcgcatgccgccgcgccccccgcccggaacatggactctgactcttgcgccgccgcttccacccggaggaatactcccccagttgcaagaggcgcaggagcgtggaagacttcaacaaattactgcacctattgtctatggcctatagctggctacataccctatataccgaagggagggaactccctatataaggaggcagccccaggccctagctaaacgagcactgctaggtaccatatagacagcgacggctagggacgcgggtttctcagacatcgcgtcctcagtgcccttgccagtctctagaccgactgcttaagccaccttgcagcctaactctcttggcaagcggacccaagcccagtaaacttccttgctggacagaaagaacgacggacaagctgaggaagaagacgaagaggaagcgcagggacatgtgatgcgcctgtggacaagcagggggctacgggggggggggctagcctggaagcttgtaaggcctgctgacccctacggtgtaggaccccccacgagttccaacctttcggggatatcccccagggctcccggtgaaccctgctcgggctgggccctcatatcccctcgcgggattgtggcgc

SEQ ID NO: 578533 - DNA, 145 bp, Homo sapiens
tttgcccttcgttctggttcctcttagttcttccacaaaccattctcaagtaaagccaaaaatctttctcttgctccccctcaggccacctcctgtcctcactcctgtcctgttctttctttcaccattgcaacacggtctctca

SEQ ID NO: 578534 - DNA, 228 bp, Homo sapiens
  misc_feature (122)..(122): n is a, c, g, or t
tccgcaccacgcaggatcggtggagaaatgatgcatgtctcacataacatatctctggagttaagaaagggccaactggtcttgtcacattttgagaatgaaagattgaaaatgccgttctnggatattacgctttaggggctcatgtacctattcatctaccagccatttcagagtaacacgagatagggtcattctcatatgacactaaatttctaacaaagtgcg

SEQ ID NO: 578535 - DNA, 124 bp, Homo sapiens
tgcccttctagcgccggaagactcttttatcgtacacgactcacgcaggcactcgactttagcgacgacactgtataatcataacactgtgcgcctagacagcggtactagggttcactgaatg

SEQ ID NO: 578536 - DNA, 838 bp, Homo sapiens
gccatggtggtgacgctcccagaccctgcaagagaaactgcaccttatcacccggaacctgcagtgagtgttctggagggaagagaagctgaaggagatactgaatgtgagcgtggaacttaaaatttacttggtgagaactggcaaccactgtggacaagaccagcatgtgtgctatacattttgttgccctatgtcaagacgctttgcatgacattcattaaatgtgcaagtggatgtgacgtgtaacagattcattgtatttgcaggacactccgacgcactaccatgtgatagacatgaaatgccccgatgggaaacttctacgaacatccgacgtacagttactactgagacatgtgatcagaagcaagtgctgcgagagcaattggattggtgcccttggaaggaaactcaaagttacacccccctctcggcagctgattaaccagactacagcaagaagagtacaacactagactgtgtacaagacatctcactcacgtggctcacacagagagcgaattcccaagacagggcatggagcatgcagggtgggataaacggccggtagggagccaccccgttatgcatgagatgagctcttataccccggacatgcaggctctggaactgaaagagtatactcacaacgtacgcatgcgcaattaggcggcattgaatcaggagaaagataattcagctattgcagagaagtactaccatgcacattggctatacaaaacgggtccatctgataatcctattgaccaggatcaccaggcaggcaatagacatcaaagaggatcaactgagccatgactgaataggattgagc

SEQ ID NO: 578537 - DNA, 336 bp, Homo sapiens
  misc_feature (12)..(12): n is a, c, g, or t
  misc_feature (33)..(33): n is a, c, g, or t
  misc_feature (114)..(114): n is a, c, g, or t
  misc_feature (130)..(130): n is a, c, g, or t
  misc_feature (142)..(142): n is a, c, g, or t
  misc_feature (172)..(172): n is a, c, g, or t
  misc_feature (178)..(178): n is a, c, g, or t
  misc_feature (274)..(274): n is a, c, g, or t
  misc_feature (287)..(287): n is a, c, g, or t
  misc_feature (332)..(332): n is a, c, g, or t
ccagagcccatnccttgctagcagctgcccatnttcccttggcaattgaaaccaccctgcaaacatcaaaaccccatctcttgctaatagatacaaccgttaacacctgaaaangcactctccgccttcnaaaaagagctcngtactaaatgcaatatgcaaagggggtttnacaggnaccaatctcaatgcaaagaccagtaccagatgtctgagttttggttacaggtttataattagacacaaaattcactccacactggagttttacttncaagctggaagcnagcattagttctacttggggggaaaaaagcaaagtcaagtcaacntggg

SEQ ID NO: 578538 - DNA, 1303 bp, Homo sapiens
  misc_feature (557)..(557): n is a, c, g, or t
cctcgctgctccagcctctggggcgcacttccaaccttccagcctgcgatctgcggagaagaaaccattactgtgattttcttgccccatacatatccttgaggcgagcatgtaaaattaagagtttgtaaaccactgagggaaattctgtgcacatccatgcgctggttcatgtgtggctagacctagattcggtgccaagttctgggaggctgatcagtgatgaccatggcatcgaccccaccggtcacctaccagcggggacagcgacctgcatctggaccgtgtctcctgtgtactacgaatgaaggccacagtgtgggcaaatatgtttcctcgatgccatcctggtgtgcatctagaaacctggtgaccgatggtatctctggttcgccgtcaggttccttttggaccaggatctttcacaccagcagcaacgtttgatattcgcgtgcagttcgtggcgtgccacggttataccacaacatcgtggcccaaaggggctcacgttagcgatcgagagcgtgcagcctggagtcgttgcgtacgaacttctngcttcgctcgggaaatgatggatacagcgaacgagagagaccagtacgagcatagtcgaacgtgctctgcaagggggctctccctaagactgggtaaccccaacttgcatcttgtgatgcgtgtgggtgcaaccaaggacttctgatggtaaatttgcgtggcaaccttcattaccacttttatacaaggccacaagaaatgctccggtacgcaaaagcaaattacagcacccttggaaatacggggcccattccgattagataatcacccttttcacaatgtgttagtcgaggtttgcaccgtgttcccaaccccctaacaatggttgttactggggatcaataccagtctgagattccagaaagtcccgcgtaaataacaattggcccaaccaaccgtgtcatcaccgtgtacaactttcaaggttgtggggccaacaaggaagagttcacgttgcaattggaaagaaagccataaatataggcccactttgtgtacacacaccggcacggggcccccctacggtcattaggaattactccattgggtatatcccgacagatcgtcctgtaggaacggcattgcaacctgtcatgctgagaacgataaccggggggacatccataggtataaccgaaccctatgcatcatcacgaggacgagacacaaatggttaagcatgagtgttgcatcaacacagatcctgtgccacgatcctaggattatccccattgtgaacaccagc

SEQ ID NO: 578539 - DNA, 211 bp, Homo sapiens
tatcgatggacgtagtgacaagagaggagggaaggcaagctctggagccgctccctcaggccatccaggagtctctaaacaactcttcccctggggctttcgaggaagttgtcagatggcacctgaagatgctacagaggaaatcagtggatttctttgcgctaggagaataacgatgtctgtagactgtgcggccgtcacgttcggcctc

SEQ ID NO: 578540 - DNA, 458 bp, Homo sapiens
catggggaggctgagctgagcagaggttgtgccactgtactccagctgtagtcccagctacgggaaggctgacatggtaggactgcttgagcctgggagtttgaggctataatgagccatgataggaccactgaactccatcctgagtgacagggcaaggtcctgtttcttgtccctgtgcatctctttcattggctgttcctgagatggagccattacattgagccagtaatagaaaataaggtggccagatgcgctggctcatgcccgtaatcccagcactttgggaggcagaggtgggcggaatcacttgagcctaggaatttgagaccagcccgggcaacataagaggaccccatctgaataacatgttgcccagtcagtttctcttcctggattcagaagtctttcatggtaggtccagaatgaaaggtgatgtttgggactcaggtggtgtg

SEQ ID NO: 578541 - DNA, 263 bp, Homo sapiens
ccttgtgttggtcccgccaaacgccctgcgacctgtcgtcagaagcctacatgctgtccattgccgtgatgtgctgcctgcctgtgttcatggacattgctgtgagagtgcggtgagtgccagggcttccagcctcgtgctgtctcgggactcctgaccgtggtgtgctgtgtgttgccctgtcttgtgactttctactcaccacggttgaagacaggaaacggggaaaatcacaacgtggtgttcaaaaccccccaaccgtc

SEQ ID NO: 578542 - DNA, 496 bp, Homo sapiens
ctgagaaatgacgacctagatgtgggaagatggtctcaacgtattgttctgcaaaggagaaaaaaagcaggttgcaaaacactgggaactgtctgcccatcttcgaaaagtaagtcatatatctagaaaaatctggaagggtagtcacaaaaacatcatcagtaggtactgtggagagggtggatttcacgttattgttactttccccttttatattaatttttgtgcaataaacatgtgtatttgtaatcaataaagccaacttcttttctcttttcaagaaactgctctcttgcttggcctcatacctcccccaatctccttaatacaaaatgaaagattccagtggaccctgagagggacacccccgcagccctctcaggggcccccttgctagcacagagcaggtctccaccacccaaggggcaggtagaccagggatgggggtcgttgacagaccctcaccctgccccatgctttttttggatgatacaga

SEQ ID NO: 578543 - DNA, 116 bp, Homo sapiens
ttggagatttgccatacagcacgaaaaaaagaaaagaagaaatgttgaagaggtgcaccaaaaagttagggaaacgttaagaataacagaagagcaatataggatagaagctgatg

SEQ ID NO: 578544 - DNA, 392 bp, Homo sapiens
agcggggctcgcccccaagcaggagggagggggcggtggcgagagcgcgcgagggggtgagagggctcgagagagaccccggcgcgcggcgcgaaaagaacgaactgtgaagcagccgaggaaggaacgccaccggagcaaacgaccaggcgaagcacagacccggacaccacataaagaggagatctaaccaagtagaggtaggaagtagagagctagaacaacgagaagaaacaccgcaaaagagccgcgacgagcaataaacgaagagagacacctcccccgggacgaagcgtgaaaatagctgacacgagacaacagcagccggacaaacacgaagcgaggagaacaggaacaaagagcagcagctccaagcaaaacagggaacaact

SEQ ID NO: 578545 - DNA, 333 bp, Homo sapiens
ttttttctgagacagagtctcgctctgttgcccaggctggagtgcagtggtgtggtcttggctcactgcaacctccacttcctgggttcaagagattcttctgcctcagcctcctgagtagctgggattacaggcatgcacccccacacccagataatttttgtattttagtagagatggagtttcaccatgttggccaggttggtctcgaactcctaacctcatgtgatccactgttttgacctcccaaagtgctgggattacagggatgagccactgcgcccagccagccatgttttaaatgaacagacattttggttaacgtcgacgcgg

SEQ ID NO: 578546 - DNA, 218 bp, Homo sapiens
aggatctttggatgaggaacgtcactgtggatgaggaacgtcacttggatgaggaacgtcacttggatgaggaacgtcactggaagatttaatgtacccatccgaaggtatacatagagggtaatttatttgtggctacttgattttgcagcatacgaccccataactctctgtgcataactgctggtcggggttattctttactcccaacactgggc

SEQ ID NO: 578547 - DNA, 195 bp, Homo sapiens
  misc_feature (36)..(37): n is a, c, g, or t
gggttgtgacgaggttttctcgctctagggagattnncttcaagcaatcactatgtcaacagacacagggtagtttcccttccttcatatgaggaaccgatcagggatcaataactcattcgaaatagctacaagaggcaccagttcgtacccgtttggaatagcgggttttgcagcaattgttgcatatgggac

SEQ ID NO: 578548 - DNA, 112 bp, Homo sapiens
tgccttggacgtggatacatcgagccgtattcgtcactgttatacaatggaagtaacaagagtctaacctgggtaaaatttcagacttcttaggctactgtacacccaatac

SEQ ID NO: 578549 - DNA, 210 bp, Homo sapiens
gcccccgctcgacggtgcatatcctgcgtgtgtggtgtgtgtttccgtgtggtgtgtagtgtgtgtggtgtgtgtcctgtgtgtgtggtgtgtacgttttcacattggttgtgtgttgtgtacgtggtggtgtgtgatctgggtatgtgtgcatgtgtttggtgtgtgtcctgtgtgtgtggtgtgtggtgcatgtgggttgtggtcgac

SEQ ID NO: 578550 - DNA, 156 bp, Homo sapiens
cttcacctactgaagggcatcttgatatcagggcaattatgagtaaagccgctgtagtaatacaggaaaaaccaaagatgcatttttcccactctagtctccaatctcacccttcttgccccatcctcacacacacactactttccaccatacttc

SEQ ID NO: 578551 - DNA, 391 bp, Homo sapiens
gtgaaagacggtcagtaaagattataaaaaaggagagtccgcgatgacatggaaacactatgatcaaagatcagactaacagacatgcaaacaggctggcacgaaatagagtgtccatttctttcagatgagcctctgatctcaggctcttgcagcaagcacttcacaatgaacagaggtctggccagctcatttcattagcggagaggcaaaggtatgatggcagaatcatgagaagatggaaataaggcctgaggatatggcttgatctctgagagcaattatctttgagttattcaggccaggatagaagcttagagaggatcgaggcaaaccatgaaggggagggaatgcaggacaatgccacattactggctttaccacaaactcc

SEQ ID NO: 578552 - DNA, 165 bp, Homo sapiens
tcaacagaactctcttcctatcgggagatgatttgtaatacccaagagtatcatcttttgccgtatttcactttttaaataaaattttaaagacagaaatcggaaagttcttttttttcatagttgttgccaaactggaaatttggacacagaatgacatgtaca

SEQ ID NO: 578553 - DNA, 605 bp, Homo sapiens
  misc_feature (26)..(26): n is a, c, g, or t
  misc_feature (35)..(35): n is a, c, g, or t
  misc_feature (195)..(195): n is a, c, g, or t
  misc_feature (200)..(200): n is a, c, g, or t
  misc_feature (203)..(203): n is a, c, g, or t
  misc_feature (205)..(206): n is a, c, g, or t
  misc_feature (210)..(210): n is a, c, g, or t
  misc_feature (218)..(218): n is a, c, g, or t
  misc_feature (222)..(222): n is a, c, g, or t
  misc_feature (227)..(229): n is a, c, g, or t
  misc_feature (234)..(234): n is a, c, g, or t
  misc_feature (256)..(257): n is a, c, g, or t
  misc_feature (262)..(262): n is a, c, g, or t
  misc_feature (264)..(264): n is a, c, g, or t
  misc_feature (266)..(266): n is a, c, g, or t
  misc_feature (285)..(285): n is a, c, g, or t
  misc_feature (298)..(298): n is a, c, g, or t
  misc_feature (301)..(303): n is a, c, g, or t
  misc_feature (306)..(306): n is a, c, g, or t
  misc_feature (317)..(317): n is a, c, g, or t
  misc_feature (322)..(322): n is a, c, g, or t
  misc_feature (327)..(327): n is a, c, g, or t
  misc_feature (334)..(334): n is a, c, g, or t
  misc_feature (349)..(349): n is a, c, g, or t
  misc_feature (351)..(351): n is a, c, g, or t
  misc_feature (367)..(367): n is a, c, g, or t
  misc_feature (376)..(376): n is a, c, g, or t
  misc_feature (384)..(384): n is a, c, g, or t
  misc_feature (414)..(414): n is a, c, g, or t
  misc_feature (420)..(420): n is a, c, g, or t
  misc_feature (426)..(427): n is a, c, g, or t
  misc_feature (447)..(447): n is a, c, g, or t
  misc_feature (452)..(452): n is a, c, g, or t
  misc_feature (459)..(459): n is a, c, g, or t
  misc_feature (469)..(469): n is a, c, g, or t
  misc_feature (497)..(497): n is a, c, g, or t
  misc_feature (504)..(504): n is a, c, g, or t
  misc_feature (507)..(507): n is a, c, g, or t
  misc_feature (511)..(511): n is a, c, g, or t
  misc_feature (513)..(513): n is a, c, g, or t
  misc_feature (519)..(519): n is a, c, g, or t
  misc_feature (537)..(537): n is a, c, g, or t
  misc_feature (599)..(599): n is a, c, g, or t
cccgttgccagttctgcgcgtgtgantctctttcnccttgctccgggctttcttcgctcgcagcgcggcagggttatcaccagatctgggctttccccttcttgccgtcaggtgctacggccacgtggcccgcggcttcccgctcgcgcagtctggcagcccggagccttccgcggtcccccgcccgcccggggnccaangangnnctantgggcgancacnatttnnnagganagggggtaagggaaaaaaaaannaaaanananaaggaaaagggtaaggggnaaaaaggggaaanaannnaanaaaaaataaanaaaantaaanaaaaaanaaaaaataaaaaaantnaggaaaaaaaaaatantgaaaaaanaaaaaaanaaaaaaaaaaaaaaataaaataaataatanaaaaanatatannaaaaaaataaaaaataaaanaaaanaaaaaanataaaaatantaagaataaaatagggtatatatatggnatttctnctntacnancacaanatattatccttgcatctnatgtgttctttgaaccagaagattttgaagacattttggctacaatatattttttgatgcanaagaat

SEQ ID NO: 578554 - DNA, 677 bp, Homo sapiens
cctagaagcagccattacaggaatctcttaatctcagcatccggagctccaggagggaaaatttcaagtcagatagaatctatatataccatttcttgtggaacccttcagccctcaagattccaacatcatgacctcagtttcaacacagtggtcctttaagtcctcatgtcactgcatttggagggcatgcctgtttgtgagaagcaagtagaaagcccggttgatgcaatcgccctttaggtaaggtgtggtccctcagcattaccaggcatttggtgccctggctggggggtatatgcaccggaaaagcgaaatgggaccagatgtgacctttgaaaggcctacttgagtcaaacccttcacccctgaaaacctttggcgcttaagaggctacaacctgagatatgggtggtgtgacaagggttccccaaggacatcaggtacacatcaaggggaggttccacaattttttccatgggtttccaatgaaaatggccaacaaacatacattttataaaattggactcaacgacattgttttctttacaaccaagataactgcacagacaaatggcagcctataaattggcttagttcaggtagtcacacgaagtaagatggctgaaatttacataaggtaatatttcatactcttagaattctctccacagctg

SEQ ID NO: 578555 - DNA, 208 bp, Homo sapiens
ttttaatatctggcatgcaaaggacagaatctgtttgaacactactcagaacacagctaggtgttaaatacattaggctcactagagtattcttgactggtggcgacctatagaccactttctacagtctattcatttgcctcctggagagcaggttcacataattcgcagcatggtttcccatttgtaaaactcaccttcataaagt

SEQ ID NO: 578556 - DNA, 297 bp, Homo sapiens
gttaacatttatccctgcttctactttctggttctccttcccgggctctcacttttcttttttttggagatggagtttcactggtggtggcccagcctggagtgcaatggcgcgatctgggctcaccacaatctccgccttcggggttcaaacgattctccggtctgggcctcccgagtagctgggattacaggcatgtgctaacaggccgggctaatttggtattttaagtagagacggggtttctccatgtgggtcaggcgggtcttgaactcccagcctcaggtgatccaccgg

SEQ ID NO: 578557 - DNA, 618 bp, Homo sapiens
  misc_feature (26)..(26): n is a, c, g, or t
  misc_feature (35)..(35): n is a, c, g, or t
  misc_feature (195)..(195): n is a, c, g, or t
  misc_feature (200)..(200): n is a, c, g, or t
  misc_feature (203)..(203): n is a, c, g, or t
  misc_feature (205)..(206): n is a, c, g, or t
  misc_feature (210)..(210): n is a, c, g, or t
  misc_feature (218)..(218): n is a, c, g, or t
  misc_feature (222)..(222): n is a, c, g, or t
  misc_feature (227)..(229): n is a, c, g, or t
  misc_feature (234)..(234): n is a, c, g, or t
  misc_feature (265)..(265): n is a, c, g, or t
  misc_feature (401)..(401): n is a, c, g, or t
  misc_feature (403)..(403): n is a, c, g, or t
  misc_feature (407)..(407): n is a, c, g, or t
  misc_feature (510)..(510): n is a, c, g, or t
  misc_feature (517)..(517): n is a, c, g, or t
  misc_feature (520)..(520): n is a, c, g, or t
  misc_feature (524)..(524): n is a, c, g, or t
  misc_feature (526)..(526): n is a, c, g, or t
  misc_feature (532)..(532): n is a, c, g, or t
  misc_feature (550)..(550): n is a, c, g, or t
  misc_feature (612)..(612): n is a, c, g, or t
cccgttgccagttctgcgcgtgtgantctctttcnccttgctccgggctttcttcgctcgcagcgcggcagggttatcaccagatctgggctttccccttcttgccgtcaggtgctacggccacgtggcccgcggcttcccgctcgcgcagtctggcagcccggagccttccgcggtcccccgcccgcccggggnccaangangnnctantgggcgancacnatttnnnagganagggggtccgggcccacccctttccattctngcgaccacccgcggctccgcgcgcgcgcccgcacgcgcgcgcctgtcctgcgaaggtccacgtcccgcaaattggagctggagtaagccttccaggaattttggctgccacaaatgtggctccacaactaatactntnaganagctcaaaactgcctcactgtctggaagtctgtcggcaaaactgccaaatgaataacctgccacatctgcatgttttaggactaacatgggtatatatatggnatttctnctntacnancacaanatattatccttgcatctnatgtgttctttgaaccagaagattttgaagacattttggctacaatatattttttgatgcanaagaat

SEQ ID NO: 578558 - DNA, 389 bp, Homo sapiens
agaaagtgacagagtgtatatataaaagctaaggaaagcacaaaataaggttcagagataaatgggtaatatgtttaacagttggagactgtgcaatgtacgacttggaggagtttgtttggcataatgattttgtcggtctgtcagcattttgatatattgtggattagccaggtgaatgatccttgcaaacatctctttcaggtctggagaaagagacagaatgcccttaaagtgtgaaataaccttatacctgaattacagttttgtgatataaaataaagctgagtataaaataaaaccaatcaaacacagaattggatgggattggttattcatgggtatacaacaatttttattcttatgtgtgctttaagggctgtgtattg

SEQ ID NO: 578559 - DNA, 354 bp, Homo sapiens
actttgctagctgatgggaatttggagtggtcacaggttaaagcctggactcttctaagtgacattaacattttcacctgagtcttttcacgccttcagtcaaatagggaacataggaagggagcccatttggctattctcaaattgttcctcattatagacctgaagatgacgccatattgatgactgccattttgtgatatctgtagagggtgtttattcgccaatattctgttgaagaggtgagaaacaatcccaaacatgtatgtacatgatctccacaaaggctctcagtaccatatccatgtttcacaaggggatcattttgccaagtaagtttgaggagaacaatgt

SEQ ID NO: 578560 - DNA, 184 bp, Homo sapiens
gacgatctgcacggagatgctgcgatcagcccacagggattcccaacattccaaaacctcggcgactcttgcgctcggccgtggggcagcaacccttacttccgcggctcctatatcatacacgcaggtgggctccagcggggcgggatgtgacgaagctggccaagggtaccgagctcgcaat

SEQ ID NO: 578561 - DNA, 461 bp, Homo sapiens
gtctccgtagtatctagcctgactgagtgcggagctatctcactccgtgtgaccctgtagagtgaggcctctgactagctcaatcgtgtctaccgtcgggtttagtataaactaaatgtatacacaatatcgggcagcatgtacagagtagcagctagagggagcttgggcagataaacaattacgcttacaagatataaccaaaagctgaatctaaatcctaaaattagaatatcaacagagccccctttaaaacagtcatataacgcttgtgtgggccaacagaggggcagtgtactctctctggaaccataaatgtcaaataatttataacctgcagtaattgagcaaacttaaaataagacctgtgttggactttagttacttgaagaggtcgagggataggttagtaagatgtatagtaaaacaacaggttaaaggtaaagcataataattagccc

SEQ ID NO: 578562 - DNA, 975 bp, Homo sapiens
ggaatcagaaggtggagagacttgaagttgctacatcaagggacgcctaaagaaagagtttcagattttgaagactgaaaacaagtaatcgtgctgagattgaaacccagacagagggtgagcactatgtatgaaagagagatgagtggaagtaagaatagtgccggagactgttggaagtgaagtggaagtattgaaccgtctaggtgacgtctctgtcctaaggagtttcgaaagatggctcatactaaaatctcagcgaaagtttgaagtctaatgaagaatgagactctgcggaaaaagtggtatgccgtttgtaacgggaaagaattcttggtaaattccaatctagagtttgaagtgaaaaagcaaaggagcttgtttatagtatgaaaaaagttagatgtgactaatgtgggaaatgctattgtctatgcagcacattcaatttggatctatggtgtataaccagatgtatgatttaggtcctcattacctgtgttacagaatgaccagcactagagaaagcttacttttagagaatgtaactgattgttttgaacaatccatgtggagtgaattagctggacaatgagtccggatataaggtgggacccggctgggtgttaaaggaacctggcgtggaaaatacctgggaagtggcatgagaacggctctggctattgtggaaagtctgcgaaggtgtgtgaaaagtgtaagcaagacgtgggccatgcggatgaagaggcctgggatgcatgagccatccctacactggttagaatggaagagttccgttcgtttacatgctgagggagggcgagggggacaattgctgaagaaaacgagcagtgggattggcagtgcgagttgctgaagagaaggaggttcaaaaacgggggaatgtttgtgggagtcaatgatgggaaaaaagagttgggagagggttttacgggggggggggaggggaagaat

SEQ ID NO: 578563 - DNA, 371 bp, Homo sapiens
tgcgcgcgggactgctcgaggtgaccgcacgctcgcggtgtagggaggaagacgcggcggcggcgttggtccccctcgcggcgagatgtgcgcaacttggcttgatcagacccctctgcgacgagggggcgacactgacacagctggtgcgttcgcttcgagaacggctcctgcacaaccagtggcccagcgagtggccgacgatcgatgagcggttcttgtcggcggtcctgcctcggccgaacagaccgagccgccagtccattgaagtgaatctggactccggggaacgcatgggacgtgccgtgcccccgacggaacacggcacgtcccagtgatggctgccgtggaccgtgggggtgagcggccgc

SEQ ID NO: 578564 - DNA, 118 bp, Homo sapiens
atttccttacagcaagttttaccgtttcggtagttccttttttaaggttttactgcttacctaaaccctgtaccaagggctcttgaaccctatttttatgcttaagtccggaaaaaag

SEQ ID NO: 578565 - DNA, 152 bp, Homo sapiens
gctgcttttttgctgcggcgcgccgccggcccctcttcttttttttttttaatttttccccccctttttttaaaaaaaattaacacaatttttaaaaaccccccctttttggaaaaaaaagggggtttttcccccggggtaaatttattcca

SEQ ID NO: 578566 - DNA, 136 bp, Homo sapiens
taatggctgcacctgaaacatatggaagtccccaggctagggatccaattggagctgcagctgcaggcctatgccatagtcacaccagatcccagcagcatctgcaccctatgccgtagctggccctcgttacgct

SEQ ID NO: 578567 - DNA, 308 bp, Homo sapiens
aagcaggtagtgttacgcagccgggcggtcatcagacaattaggggcggaacgagtgaccgaggattggccgagtacagggctgaggacagaagccttgtcctgaactccatccaggccctgaagcactgggagacttctgtcccattgttgcgtccctggccagctctgggtgtcagtggagcgtgtcctcccttggccaagctctgggtggtcagcagagcgttgccggtgttgaaggacagctgggcccggatccctcctcgaagcttgatgaggccctcggtcctccggtggtccagggtaccc

SEQ ID NO: 578568 - DNA, 836 bp, Homo sapiens
gagctctgtggtgacggtggccgaggtggagggccggtctgaagagtggcgggactggcttcacttcctccgcggttcctcggagccgcctcgcatcctcttcagggactttgcgtgagaagggctctcgggcgtcagaccccaccgcaaaggtgttgggcgatccgtcgagaagttgttggccccaggagcatccctcggggccgaatgcgcagtggacgatgccccttctgacccaagcagatccaagaggaggatgatcagtacagccttgtgggcagccttgcaacaacgttacggaatctctccactatcttgaaagctattcatttccgaagaacagttgccacgtgtttcgcaactaacaatgggtctcaaagtcacagtgggaaatgcaaagtggtgtgcgagcaaaatgctttctattcaggctgggaatatttcacggagtttaacggttcccggacacgaagtctgttacttttcgaattaatttaactggtccttttagactgtttatctatttgtggtcaagtcctatgccaggactttaactggccttcgaatgtgttcctagggtttatggttactctttgatgcttgtcctggaacgaaggaggagtggtgacagtcctgccaaatcatacacgggaacctgtggagacctggtctttgattctgcggcccagtgttctcacttaacctttccgcggccgaggcggcgggaagccttttggaggggttccggtggggcccaatacctgtccgggggcccttcggggtccttggggcggggcccctgttcccagttgtttgggtctttgtccccgaatttg

SEQ ID NO: 578569 - DNA, 112 bp, Homo sapiens
ggaagagtcatgttggtaaacacaagccactgaacagtattatgccatgaagatcttagatagcgaggttgttaactgagcaatagagctactttgatgagaagatatacag

SEQ ID NO: 578570 - DNA, 310 bp, Homo sapiens
tgtgtacttgagaccaaaagttaattacaggaagatgatatctggcgtctggaagaggttgaggtccatgattttcagattgattactgaactgctctgctctgagaggatgctccctctagagaaggactggggcgtggggcggttgtggcagggcggggagcggctggcctgggatagaggtttggtggaccctacttcattttcagccaattagtacagtactttcaatgagtactttcaatcttatatcattttatatagtaggccctagggtaacattttatttaatgagcctttccttccttgt

SEQ ID NO: 578571 - DNA, 167 bp, Homo sapiens
gtgtgttaggagctggatggccctaaagacagagctggaatgacacactggacagcacatgtcactcagcagggagctcatgggccaagagggagcagtgaggtgacggtgctgaatgaaggccctgtgatgaatgatgacgcgtgtcccagtgagtgctcagtgtc

SEQ ID NO: 578572 - DNA, 636 bp, Homo sapiens
cctctcttccgacactatccaagccaggtgtttgattccagcttgcttatgtaccacatttggaaatcaagatcgcaggagcatgtccgctgcagccattctgaaggatttggtctcctccttagtgggcccatttagcatagccagcgtgatggcccacaaagattaagttccctatcttcgggaaggcaaggctgggagggcccccagggctttccattagttttttctttggttcaggccaggccaaggttaggtccgaaaccccaaaaagttttccctctgtttttaaatgggccggtggaccttaaagggtttttaaaaaaagggttaaaatttttttacgggggccaagggtgggtttttaaaaaggagaaccccaatgaaattggaagccctggtttttttttcctttccccccaaaatttataaaggggaaggttaaatttttccttgtaagggttttttagaaactctataaaagatttaaattttttgaacctcccaatcccctttccgaggatatggttttcctttagaaaccaaattggtactcaaatttttgatggtagggacattagccaacttgaaaattctttgcccctggccaaaaccaaaaaagccacctgttgtgga

SEQ ID NO: 578573 - DNA, 118 bp, Homo sapiens
cgagctcggaaccggtcagacgctgaactatgtgatcactgatctaatccacaccatcgcttccaatactaatgtaataatatccacaccatgccctaccacatagttcagcgtctga

SEQ ID NO: 578574 - DNA, 958 bp, Homo sapiens
gctgcgtaaagtgtgggctgaagcagtgcactatgtgtctggactaaaagaagactatagcaggctctttcaggggacaaagggcagcaatgtaagtcttcttagatataatgctaacttaccaaaaaatgacgaacacttgtgatctcagcatcacaccaatgaaaggcttaaatgggagtttttcaccaaaaagtattcagctgtgactgtggagagatacagcgagcagatgaagtatgggatatcttcagaaaaaatgctaacaagccatgcacaacgaactggacaggaaacaaggcatccactatgctgagggcggtgtcattgactacctggaggctcagatttatgtctatgcagtgctgacaactccatggacgctacagaaagagccccctatggaaagcacggtcagggcagactgtgatgagaaattctctgaaaacagcgttgcccactgtgaatctatataagcaggttagaaaacacaagaatccttcagataactccatacaagttgacaggcaccacggagatgggtgaaacattcattgtgcacacactgtgccgacgtcaggaccgtgtgctcaaagcagctgtcgcgcatagagcagtaagaggcggaaacgagaaccgactactgaatcaccccaaaggggaagggagcgcaggcatcaaaagaccggaaacaacgcacgctctgccggcaaaaggcaaaacgaatagggccgtctaaaaatgccgtacacacgctgcccagtcctggagcaccctcacaaggggaacccctagaatagcgtggcccgactccaaaaggcacccacgatggggacacccccaggggaagaacagtagaaaatgccggcgcaacagacatctaggcagctaggcaacaccgtcggcgacagcgcacagccaatcaggtaaaaggagacgacacaagaacagatccaag

SEQ ID NO: 578575 - DNA, 659 bp, Homo sapiens
  misc_feature (176)..(176): n is a, c, g, or t
  misc_feature (254)..(254): n is a, c, g, or t
  misc_feature (302)..(302): n is a, c, g, or t
gcacggagggtgtgcccccgttgccggcttggggaagaggttatcagaaggcgccccttgtggtggaaagcgcccacaagatagcccgcggttatgcttcgtgagaagtgtggtcccccacacgcgcgggcttgtaatacacaggtgagttgaaacttgccggggaggagtttggntttttcgaaaacaaatggcgcagccgagtgacggccgcggttcttgttccccaacgccaaaagtgggataaccgccanttgttctctatatacaaaacgacttcggtgagggttcgccctctaccnaaaaaagaatacgacgatacgcacgtgtctgtaggcaccgcccacaagatctctataacatgctagtagcgtcgccgacattctagtatgttgttacaagtggcgaggaggcacaccaccaatgacttttcaatacccgtgaattggtaggaaaagcagaggccgttggtaggcatggagtaaaactagggcagctacactctgctgaccacgcaaacgagcataacaatctttacaggccctgggggtccccgcatagaagattactatgttggggccacccgaggttaaaaaacatatgtcaagagttggtcccaggacccaagggaaaaaattcatttggcgccccacaagaca

SEQ ID NO: 578576 - DNA, 350 bp, Homo sapiens
ctacacacagactcacacagacacacaacacatcctgacacacacacacagacaatatacaacacacacacacacaatcgaacccacatacacacacgcggacaacacacaaaacacaacacatagaacacacgctaacccacagacacaaacgccagacaacacacagagacacacaacacaccctaacccatatacatccacaacacacacaacacacagaccccaatatcgacacccatcaccaccaccactacggtgaccccaaccccaacacccaccggcacagagaccccaaccacgacacccatcaccagcaccaccactgtgaccccaaccccaacacccag

SEQ ID NO: 578577 - DNA, 1065 bp, Homo sapiens
cctggcttcggagccttaggcgccggggctttccttgtttccgccagtccatgccgccatggcaagtggggccagggaaccccccactggatcgtggaggagcgggaggacgggaccaatgtgaacaactggcgctggcgcggtggggggctccttccgggatctggggagtggcctgtgtgcctgctgggagccggggctgcctggggtctgtgcggggccgcggggcagggggccgcccccctcagctgctggacgcagtgctcggccttcgcctctcggctcgggagagtccttgagtacggagaccggctaggaggtttgcagctgcctctttttgacacgtcgggttggggcccaagagtgactttccgacaagacctttccactcccaccgtctgtggcctgaggggccttccccttcttcgctcacgaccaagccctctggatgtttcggcggagttacgaagggagcctggattcgagagacgtgttgtaacgcggagcggggggatatagggacaagataagatgaaaagaggcaagaaacaccggaggataatacattatagagcgatacaacattctaacgagcggccatacacggtaagtcctagcaacacatagtagggaatgagacaaaaaagcacgcactctcgataatcacaagcatagcgcggcggcgcggcggaagagaggcaggcacacacgccacggcgccccaagacaaccggcaactggaagaaccatggcgtgtgataggacgagggatgggaggcgcaggggtagcaagtagtagagagagaggacgaagaggggaagatcaggatgccgacagatacgaggatggaataagatagaggaagcaggcatagagagggtaagtgatgggataaatagagatcgagtactgaagtagcagaagcagtgaagatagtcttcagagagagagaggggaggaagagaacggtgctcacgaaaggtaggagcagtctccagaggagagaaagacgaaagactaaggaagagatagggtggaggaagttctagtattagtatcggtgt

SEQ ID NO: 578578 - DNA, 958 bp, Homo sapiens
ggctgccgagcttaatcctgtgggggaggggtgctgaccttagtgtgaggagcccactgtgatccttgagctgacctgtcgcacgcctcccctccctgtagcaacacctctgggtgtttggagtataagtcttttgtgggtttgctctccctatcccatctcctgtactacacagttcatggtagggtggggaagcgcggtggggttggttcgtgcgtgggtcgagggtcttaatctcctctgtgtgcgtgttgttatctgacagttctccgtccctactggccttactcctcgtcttcatatttgtatccggctacaagcaataaagacactcatttgcagtacacaggtcccagacctgctaactcacgccagtgccaaccactctgggctttgccttggtgatggagtcagacccctgggccccagctcctcctgtactagccgttcccttcagcaaggagggcactgagctcagggtgagggcagctggaggtgtgtgcatgtagctcaagcggctggagagtggtgggtggagctggtgctgtggtgctgaggggtatgggatggctccccgcatgtgggggtggggtggccacagacgacctctccgatgccctcattgctgcttcaggctagagagaggtggggtggcagggacagcgctggaggatctgggtagccaaatgacgagggtgcctgtgctgtcccttgatatgacaggtacgtggtcattgcacccgggtggcgagctcagaggggggatctatctgccactccggtttgttgccctgtagtctgaggcgcaattccgttgaccgtgtgtgtctgtgcttgtgtgcacggagctgacgttggtaacctgttttgagtagctcccaaactgcttaagtttttgccaatcgtaaccggagccgagggaagaacccagggaagcctccaccgtaggggaaatcgg

SEQ ID NO: 578579 - DNA, 540 bp, Homo sapiens
cgccgcgctatcaagtgactgtgcgctggatagcatcttgttcacaatctcatgagagatccaagtgagagacaccctcagtaaaccactcccaaatttgtataaataacttatcccaaaacttagtgtcacaagaaacaatatctacttaataaaaagttagtccagtaaaagaatatcccaaatatatctatataaatttaacaacattacataccacatctatatcagcatgatcttagagtacaatcatccttaacaatgtcggcttgtattcttgacgaaaacaataaggtttttttgaaaacagtcaaattcagcaacaacagaaaccaggcagacacatctacaacaaatcgatggcaaaagaggtcacaatatataaaaccacaatcttatcatgcagggcattgaagactacagaaatagttgtagcaatagaatggtcatcttatgcacaaaccatgacacaaatatcacatacaaatgataagccgtaactcaagaaaacagcatagaacatccctagtgagtgctgta

SEQ ID NO: 578580 - DNA, 680 bp, Homo sapiens
  misc_feature (97)..(97): n is a, c, g, or t
  misc_feature (117)..(117): n is a, c, g, or t
  misc_feature (135)..(135): n is a, c, g, or t
  misc_feature (251)..(251): n is a, c, g, or t
  misc_feature (256)..(256): n is a, c, g, or t
  misc_feature (264)..(264): n is a, c, g, or t
  misc_feature (282)..(282): n is a, c, g, or t
  misc_feature (287)..(287): n is a, c, g, or t
  misc_feature (387)..(387): n is a, c, g, or t
  misc_feature (451)..(451): n is a, c, g, or t
  misc_feature (588)..(588): n is a, c, g, or t
acttcaggacatatttgttacttcgtgagtaagttgggagggctcggagccctttgtcgtgttcacaggtgatactttgtttgtggttgggtgcggnaagttctatgaagggactgnggatgagatgtgtaaagntttgctggaggttttgggtggtttccctctggatataagagtctattgtggctacgagtacactattaataaccttaagtttgcatgctatgtggagcctggcaatgctgccatcnggganaagttggnttgggccaaggagaagtncagcnttggggagcccacagtgccatccaccttggcagaggagtttacctacaaccctttcatgagagtgagggagaagacggtgcagcagcacgcaggtgaganggacccggtgaccaccatgcgggccgtgcgcagggagaaggaccagttcaagatgccccgggantgaggccgccctgcaccttcagcggatttggggattaggctcttttaggtaactggctttcctgctggtccgtgcgggaaattcagtcttgatttaaccttaattttacagcccttggcttgtgttatcggacattntaatgcatatttataagagaagtttaacaagtatttattcccatatttacggtcgcgggatcctgattgatcggatactaaatgtagcttct

SEQ ID NO: 578581 - DNA, 361 bp, Homo sapiens
  misc_feature (20)..(20): n is a, c, g, or t
  misc_feature (348)..(350): n is a, c, g, or t
gtggaccccctcatgaatgnggttggtgttctatgaaagaggccccagaggccaggtgcagtggttcgcgcctgtaatcccagcaccctgggaggccgaggcaggtggatcacctggggtcgggggttcgagaccggcctggccaacatggcaagaccctgtctctgctgaaaatacaaaaattggccgggcgtggttgtgcacacctgtgattccggctgctcgggaggctgaggcaggagaatcccttgaacctgggagacggaggttgcaattaactgagatcgcgccccaacccttcaggcttgggggcaaaagtgaaactccttctcaaaaccccaaaaaggnnnggaaagaaaag

SEQ ID NO: 578582 - DNA, 744 bp, Homo sapiens
  misc_feature (97)..(97): n is a, c, g, or t
  misc_feature (117)..(117): n is a, c, g, or t
  misc_feature (135)..(135): n is a, c, g, or t
  misc_feature (251)..(251): n is a, c, g, or t
  misc_feature (256)..(256): n is a, c, g, or t
  misc_feature (264)..(264): n is a, c, g, or t
  misc_feature (282)..(282): n is a, c, g, or t
  misc_feature (287)..(287): n is a, c, g, or t
  misc_feature (451)..(451): n is a, c, g, or t
  misc_feature (515)..(515): n is a, c, g, or t
  misc_feature (652)..(652): n is a, c, g, or t
acttcaggacatatttgttacttcgtgagtaagttgggagggctcggagccctttgtcgtgttcacaggtgatactttgtttgtggttgggtgcggnaagttctatgaagggactgnggatgagatgtgtaaagntttgctggaggttttgggtggtttccctctggatataagagtctattgtggctacgagtacactattaataaccttaagtttgcatgctatgtggagcctggcaatgctgccatcnggganaagttggnttgggccaaggagaagtncagcnttggggagcccacagtgccatccaccttggcagaggagtttacctacaaccctttcatgagagtgagtggccctggttcctccggtgggggtggcttggcacagcctacagcccggtgttggcctccgcagggagaagacggtgcagcagcacgcaggtgaganggacccggtgaccaccatgcgggccgtgcgcagggagaaggaccagttcaagatgccccgggantgaggccgccctgcaccttcagcggatttggggattaggctcttttaggtaactggctttcctgctggtccgtgcgggaaattcagtcttgatttaaccttaattttacagcccttggcttgtgttatcggacattntaatgcatatttataagagaagtttaacaagtatttattcccatatttacggtcgcgggatcctgattgatcggatactaaatgtagcttct

SEQ ID NO: 578583 - DNA, 474 bp, Homo sapiens
  misc_feature (97)..(97): n is a, c, g, or t
  misc_feature (102)..(103): n is a, c, g, or t
  misc_feature (112)..(112): n is a, c, g, or t
  misc_feature (115)..(117): n is a, c, g, or t
  misc_feature (121)..(121): n is a, c, g, or t
  misc_feature (124)..(124): n is a, c, g, or t
  misc_feature (126)..(126): n is a, c, g, or t
  misc_feature (141)..(141): n is a, c, g, or t
  misc_feature (164)..(164): n is a, c, g, or t
  misc_feature (174)..(175): n is a, c, g, or t
  misc_feature (180)..(180): n is a, c, g, or t
  misc_feature (183)..(183): n is a, c, g, or t
  misc_feature (187)..(187): n is a, c, g, or t
  misc_feature (189)..(189): n is a, c, g, or t
  misc_feature (191)..(192): n is a, c, g, or t
  misc_feature (195)..(196): n is a, c, g, or t
  misc_feature (204)..(205): n is a, c, g, or t
  misc_feature (209)..(210): n is a, c, g, or t
  misc_feature (216)..(216): n is a, c, g, or t
  misc_feature (221)..(222): n is a, c, g, or t
  misc_feature (227)..(227): n is a, c, g, or t
  misc_feature (244)..(245): n is a, c, g, or t
  misc_feature (247)..(248): n is a, c, g, or t
  misc_feature (250)..(250): n is a, c, g, or t
  misc_feature (257)..(257): n is a, c, g, or t
  misc_feature (259)..(259): n is a, c, g, or t
  misc_feature (275)..(276): n is a, c, g, or t
  misc_feature (278)..(278): n is a, c, g, or t
  misc_feature (280)..(281): n is a, c, g, or t
  misc_feature (302)..(303): n is a, c, g, or t
  misc_feature (307)..(307): n is a, c, g, or t
  misc_feature (311)..(311): n is a, c, g, or t
  misc_feature (318)..(318): n is a, c, g, or t
  misc_feature (333)..(333): n is a, c, g, or t
  misc_feature (347)..(348): n is a, c, g, or t
  misc_feature (375)..(375): n is a, c, g, or t
  misc_feature (378)..(378): n is a, c, g, or t
  misc_feature (385)..(386): n is a, c, g, or t
  misc_feature (450)..(450): n is a, c, g, or t
tgcacacatatgtttattgcagcactattcacaatagcaaagacttggaatcaactcaaatgcctatcaatgatagactggataaagataatgtggnaaatnnaaaaaaaanaannncagnaananagaaaaaaacagcanggaagagaagggcaacccaaagncagcaacagnnaaaanaanaggngnannaanngaaaaaannaaannaaaaanaaaannaaagnggagaaagaagaagggnnanngnaaaaagnanaaaaaagccaaaaacnnancnnaaaagaaaaaaagccccaagnnggangggngggggantaggggagggatagnagtaggagaaatanntaaggtagatgatgggttaatgggtgnagnaaaaaannatggaaagtgtataaatatgtaaaagaaatgaaggttatgaaaatgtataaaagaaattaaaantgtaataaaaaaagataaaaattt

SEQ ID NO: 578584 - DNA, 1452 bp, Homo sapiens
  misc_feature (1336)..(1336): n is a, c, g, or t
ggaacaaaacgcaaggatgaggagggcgcgcggcctgcagcactcgcccgcgatcccggccgcggcgtgatgcgcgcggaccagcccgcgacgccctgggctgccgctgtccccgcacctgtgacgctggcgcgtgtggccgctgcccagactcgatcgctcgccgcggcgactgggggcccagggctataccggcgaccgggtgggttgtcctcgctctccactgggggctagaggggactgggctgagaacccggtgtgcatgctagcgtgccgaggtagccgacgatgcataggagaattagcagaggcgtgaagtcaccgcagccccggacgcaaaggcccattgggcgctaaccaatcttgggcaattagccaatctgatagaacctggacaggtgtatagaggacgcgtcttgttatgcacgtatactccttcctcgttaatcagtcctgatacgtctggatattccggtaagggcatgagcgaaggcctggcggcccttggtgcgcggggtgaaccctccttcaatgacagttacgattggcacgcagttatttgcccgggtgacggtaattatggcaccatggagcggactccatttggccgtggggaacccatatcgttttcgtcgtagccaaggagcagactcactttgtgtcccgaacatggggcacgccgactagcgctggttgaacgtggccaaggttttgcctatacgacttctaacccagacatttggccggacgacggttcacacggcgttatgcgacagcgaggtttaccgtattggccccagcgttctaaccggccagcacggggcacaccctttagggctccagcaggcaggacagtcagttgcggtgtcccacgtggctaatcagctttggcacgagagcgaaccatgatgacgcggggcgaacattgacgagcacagacgggggttagcacgtccccagcgttagggaagtttgggcatgggaacaaaaccagacggttggggacaacaggtcagtttagtagaaagttagtgtgtaagcagcagcaattttgtcgggccagccgttgccttgacacgattccgcggggggtcaccgcggcagacgctaaaggcgttagggtaagattagagggatcgatgggacattgaagaaaggaggacgtgggtgaacacgtatgcagaacaatgtagtagtgaacataagatagcagcagagagtggaggaccattagatatctagtagcgtaggaagtgtcccagcgaaggtgtgtgtgtatagcgacgataatatgtgcagatagggggcagaaggaaagcgcactggtgagtgtctngccagcgtgagattaacaatggcggcattggagagagaagccacagagatagaaagcatggagtgaggggtttcacgggggcgacaacttatgttcacatcagttctacggaaacg

SEQ ID NO: 578585 - DNA, 343 bp, Homo sapiens
agctatacctgtgcacagctctaacagaagaaacgctgatacgtgaaataggtataagacgagcaagaagcattaccagctaggtactttacactgagattaaaaaataaacatacacaaaaaatacaacaagtacagtcctataaggtacagatagcttggcacagataacagactaaactataagacacgaataaacaaactgtgtaataacatagggccacagattgtaaactgtcctattttcccatcctaagatgccaaaattgcactctcagttgtagttgggcaagcagcaagagtttaacgaagcaagcagtaggtaaggcaaaccagctgtcac

SEQ ID NO: 578586 - DNA, 792 bp, Homo sapiens
  misc_feature (49)..(49): n is a, c, g, or t
  misc_feature (62)..(62): n is a, c, g, or t
  misc_feature (93)..(93): n is a, c, g, or t
  misc_feature (134)..(137): n is a, c, g, or t
  misc_feature (145)..(145): n is a, c, g, or t
  misc_feature (185)..(185): n is a, c, g, or t
  misc_feature (231)..(231): n is a, c, g, or t
  misc_feature (277)..(278): n is a, c, g, or t
  misc_feature (280)..(280): n is a, c, g, or t
  misc_feature (285)..(286): n is a, c, g, or t
  misc_feature (291)..(296): n is a, c, g, or t
  misc_feature (299)..(299): n is a, c, g, or t
  misc_feature (320)..(320): n is a, c, g, or t
  misc_feature (342)..(346): n is a, c, g, or t
  misc_feature (376)..(376): n is a, c, g, or t
  misc_feature (418)..(418): n is a, c, g, or t
  misc_feature (421)..(421): n is a, c, g, or t
  misc_feature (424)..(424): n is a, c, g, or t
  misc_feature (429)..(429): n is a, c, g, or t
  misc_feature (455)..(455): n is a, c, g, or t
  misc_feature (464)..(464): n is a, c, g, or t
  misc_feature (484)..(484): n is a, c, g, or t
  misc_feature (502)..(502): n is a, c, g, or t
  misc_feature (513)..(513): n is a, c, g, or t
  misc_feature (534)..(534): n is a, c, g, or t
  misc_feature (559)..(559): n is a, c, g, or t
  misc_feature (585)..(585): n is a, c, g, or t
  misc_feature (647)..(647): n is a, c, g, or t
  misc_feature (675)..(675): n is a, c, g, or t
  misc_feature (698)..(698): n is a, c, g, or t
  misc_feature (706)..(706): n is a, c, g, or t
  misc_feature (709)..(709): n is a, c, g, or t
  misc_feature (715)..(715): n is a, c, g, or t
  misc_feature (722)..(722): n is a, c, g, or t
  misc_feature (779)..(779): n is a, c, g, or t
aaaaacctcatctccattaccctcatacatggctataatttgattctgntactaaattctgngaatcattatttaatcaaatctactaaagantagaaaaaattctagcaagacttataactcatgaaatacannnntaaaagtntaaacctaccaaaagtcctatggcctattatttagctgtnaatgagacacgtcaggagtataaatctgcacttttgactgtaagtnaaatttgctaatgcaggaagcgaaatagtgaaggaatactggagtnncnaaaannttacnnnnnnctnttttttttgcaaaatgcaacntaccttaaaagtgtctcacccnnnnngcctctacctgtaatcacattaatttttcnaaagacaatttggggttttgaagataaatgtcattagtctanganaanagcancataggacaattagccattttagacntgaccatantttctctttttagcataaanccatcttgatatttaggngggagactacnccaatggagcaacagtttcantttacatgattggatttagaaattnacaaattttaaactcataagaattcnaaaaaatttgaaaatggaaacatttgacccacagtctagcagcataaatacatttataaaanacttcattgttgatcttaggtcattganttaaaacagaatttggtgactangggcaggnggngggggncagtaangaaggtataaaaaagaaatctttatgaattgtgttcagattgattttgtataaacanaatatattcatgg

SEQ ID NO: 578587 - DNA, 135 bp, Homo sapiens
catacttcctccaaggctttatcatttctccaaggctttcatcattctccatttccatttcccgggtcatgcaatcaacagcgtggcaggcagtcatacacagcggtttgcaggggtcaccggcagctcgcacat

SEQ ID NO: 578588 - DNA, 232 bp, Homo sapiens
caaatattctgtaagaatcaattgtctatatggaatttaggataaagaatctttcccactaaaggactatttccaataaagagtttattattatttgtaagttgtgtgcaccaaacatcccctttatctctgtaaaatttatacccccaaaaattaacaaaagattctgtaagaattaattggctatatggaatttaggatagaatatttccaataaagagtatttccaata

SEQ ID NO: 578589 - DNA, 166 bp, Homo sapiens
ctggtgagcaagatagccagctgagcggctagaaagtaagccagggctacgaggtagatatctagaacgggaagtgtggacccacagctatccctaaaaccaagagagcggtctccaacggcgtagggtagtagtaaatcatatcctactactacctagtacagct

SEQ ID NO: 578590 - DNA, 921 bp, Homo sapiens
  misc_feature (616)..(616): n is a, c, g, or t
  misc_feature (629)..(629): n is a, c, g, or t
  misc_feature (632)..(632): n is a, c, g, or t
  misc_feature (637)..(637): n is a, c, g, or t
  misc_feature (639)..(640): n is a, c, g, or t
  misc_feature (661)..(661): n is a, c, g, or t
  misc_feature (667)..(668): n is a, c, g, or t
  misc_feature (677)..(677): n is a, c, g, or t
  misc_feature (690)..(690): n is a, c, g, or t
  misc_feature (696)..(696): n is a, c, g, or t
  misc_feature (698)..(698): n is a, c, g, or t
  misc_feature (702)..(703): n is a, c, g, or t
gcagcccagcaacaagcggccaccgcccccaccccggggcgggcaggttccgacctgaatctgaaagtgcttctaaaccccatgcttcacagaacgttcggagggggaggcgctccgtgggggctgctgcgtgcccatgtagccgaactgactcgaataaaagcgtgtccacgtctacatcacacatctgtgtaaatgcagaagcctgcggatgcgcggggctggccagacttcacagtgtgcagacacatgggctcatgcacgcgcacgcgcgcgctcacacacacaccccaaattacctccgggatggagaaagccgctgcggattggccagcagagccgtcactcacgcccagggggcagggagacttcgcaaagctgtttccttttttttttttccctccttctcctccctataccggtttcatttaatgggtaaaacaacaggcagagctctgaaaggttagccattctggggcaagagttggccttcttaaaggagggaggggtcaaaggatatccatttaaatattttgggtatttccaaaagggtgggaaggggaaattcacgaggggaggggaggcggaaggggagctccgagaaagaggaggggtnatccgaggggggnggngaggngnngcgggggccgacgcagggacngagtgnntcttaaacngaaaggggacttngacctncnatgnntccgaaattcacagacacgtttctcacccgggtccatctcgttccaacacccgggtcctaatttatggaagccgacgggtagaatcaatatttaagaatgcgccagaaatggtgtctcttaaaaagacactggcataattgggcgggagaaaaggctccgttttacggatataaaatagaaatcgggggtcttatggggggggaaaagcgtctaagga

SEQ ID NO: 578591 - DNA, 103 bp, Homo sapiens
  misc_feature (75)..(75): n is a, c, g, or t
tccggaaagaagagccggagaggatcaaagattgaaaaagtattattgataaccttgaaaaaaaacagtggatcncaaagtggaacgaaaatgaaagctactc

SEQ ID NO: 578592 - DNA, 173 bp, Homo sapiens
  misc_feature (4)..(4): n is a, c, g, or t
  misc_feature (7)..(7): n is a, c, g, or t
  misc_feature (92)..(92): n is a, c, g, or t
  misc_feature (116)..(116): n is a, c, g, or t
gganaanatggctgccccaacagtgtccgggctctcccggcagtgcgatgcttcagtacctctgtggtcataccatttgccaagcttgtgangcctcctgttcagtatacggtatnaaggtcgctatgccacagctctttattctgctgcatccagaataagctggagcgtag

SEQ ID NO: 578593 - DNA, 909 bp, Homo sapiens
atgggctcacggagcgggtggctaggctgaggagagctcgccgggctccgaccggcgcaggacatccaataaagaaaatggcagctcttactccaaggaagaggaagcaggattcttgaagtgtgacagcctttacagttcactgacaaatctgtggtccatcacctaataaaaagcactgtgttgatcatggacagtgataaaggcatgaagaaaacctggcatagactctcaacgagagcatgtgttttaagtgcgctcaaaacaactgaaataaatagactgccatcagcaaatcaaggctcacccatttaaatctgcgctctccagctgtatctttttactaaccaaaataagtggtacctcaatccactggagagaaagcctgataaggaaagagagtagatcgtacttgtctaaaagacctaatgatgaagataaatcttttccatggtgacagaagaagatgcaaggaaaaacagtctgtccaagaagaacaaaaaaaaaacaagaagaagttaaaatgtaagtatcaaccaaagtatagacacatccacgcctgtataagaattcgagaaattcaagcaaaatacgagggatctataggcaattgtggagaaggaaatacttgtatcaggtgacaataatccaggtcgtagagtcatgagtcgaaaaataaccaaagtcactccagggggcaggatttggtgaaaaatttcctaaaaacgtccggaatgagcgtgagggaggacgaaggggatcaagttgtagtatgaggtgaagggctaaacaattggaagaggaagtgtgtaacaacaagggagggacgattggacaagggtaaggaagcaggtgagtaatttaccaagtgagcatatttacaaaaaggaagaatattggtgggttctt

SEQ ID NO: 578594 - DNA, 262 bp, Homo sapiens
  misc_feature (33)..(33): n is a, c, g, or t
  misc_feature (42)..(42): n is a, c, g, or t
  misc_feature (59)..(59): n is a, c, g, or t
ctcattgaaaccttcacctcctgggttcaagcnattctcctncctcagcctcctgagtngctgggattacaaccgtatgccacaacgtccggctaattttgtaattttagtagagacagggtttcaccatgttggccaggctggtgtcaaactcctgacctcaggtgatccgctcacctcggcctcccaaagtgctgggattacaggtgtgagccaccgcacctggcttaggggccatctttgagtcggccctggctctgct

SEQ ID NO: 578595 - DNA, 81 bp, Homo sapiens
ggggaaggaggaccgggccatattttttcaccttctgggtgggggaggactgggggattttttctggccgataaactcatc

SEQ ID NO: 578596 - DNA, 224 bp, Homo sapiens
caggatctaacgtaatatgtaaccaggatcatctacataaccatcttccacctccagatattgtcctctggaaggtgtcaggagcataacatacatggaggtgtcatctcctattgtagcaattcttcttgttgattacctacctgaaggaccctgctagaggctgttttacagttgactatttttttttttcaaaggtagagggagtaccttctaaaattatg

SEQ ID NO: 578597 - DNA, 309 bp, Homo sapiens
tggagtttgctcagtgaagaagtgatgtgggccgggcaccgtgctcacatctgggatctcagcactttgggaggcaagttgggcggatcatctgaggtcaggagttcaagaccagcctggcaacatggtgaagccctgtctctactgaaaatacaaaaattggccaggcatggtggcgcacacctgtggtcccagctgctcgggaggctgaggcgggagaatcgcttgaaccctgtgaggcggaggttgcagtgggctaggatggcgccattgcactccagcctgggcaagaacagcgagactccgtct

SEQ ID NO: 578598 - DNA, 837 bp, Homo sapiens
ttgcacaccagtgaatcacatctggccgcgtgtgaaagggtcgggagcccttctactgagagttctctgtgtctgagttccacccgttgctaaggaatatgactcgcatggatatcatcaggttcgaaatcactgtacagatgtcttcatactaccgagactccgagtgtaacggaggatggtccatgtgtatcttctcgtgtggttcccttctgtatatgtcggtaagtgatgcgaggttctcctcacctcgggtttccaacggcgtagtacatgtatgattgagatactagaatagtaaagcatggtcttcgcgccatacattactgacgtctttgtgtgcaacccatcacgctttacttgctaccctcaaaggtaggtattgtttatttcaaggccccaggctgactggctagtccttcttcgaagtaaatgtgtccacctaggctttggcaagctcataggtaaggataccgctattgctcccatgttagatgccaaactccatgcgtataggatagaagggatcttggagcccaagtatgtccagatcgcagagtcattggagctaaaacaacccagggatcctgatatccgagacgactaagacccatgccgtgtcgtgttagaatcatttactgcactcactgcagaggtcgaaggttgtgagatttgggaggaatcgtgtattaggagagatctgtaagggtgtaggatgagatgcgggagctatgcgacaattggtattgagagttgtcggggccataggtggaagcggttacgtagtttatcagcttttcccccgcttgttcctcctttacagtgccgatacgccaa

SEQ ID NO: 578599 - DNA, 458 bp, Homo sapiens
  misc_feature (209)..(209): n is a, c, g, or t
  misc_feature (397)..(397): n is a, c, g, or t
taacttgcagaagatcacagaaaagtttgaaatcagctggttggattcgcagccaggtcctgcagactccagaccccgcgcctccccgccctacttctgggccccaagagcaggccgcggcaacttccagaagccgggtctctggggcaccgcggctcgcggacgcgacctcagatcccatcccagccgctccactgcctgggcagaantgggggtccccgctgggaacgacgatggtgctgccagggttcacagggcccgccccttcccctctgcaggtgccgggtacaccgaccgcatgagcgggcgccgtacctagtgggaggagcccagtaggtgcgggatgaggtgcggagcgggaagggcgcgggcgaaagcaccgcaggggccctcgctngacccctgccacacgcaaaagcaggagctgcaacggcatccttcacgactggagcggcccg

SEQ ID NO: 578600 - DNA, 487 bp, Homo sapiens
  misc_feature (2)..(2): n is a, c, g, or t
  misc_feature (34)..(34): n is a, c, g, or t
  misc_feature (49)..(49): n is a, c, g, or t
  misc_feature (75)..(75): n is a, c, g, or t
  misc_feature (84)..(84): n is a, c, g, or t
  misc_feature (99)..(99): n is a, c, g, or t
  misc_feature (101)..(102): n is a, c, g, or t
  misc_feature (113)..(114): n is a, c, g, or t
  misc_feature (116)..(116): n is a, c, g, or t
  misc_feature (166)..(166): n is a, c, g, or t
  misc_feature (204)..(205): n is a, c, g, or t
  misc_feature (207)..(207): n is a, c, g, or t
  misc_feature (212)..(212): n is a, c, g, or t
  misc_feature (214)..(214): n is a, c, g, or t
  misc_feature (247)..(248): n is a, c, g, or t
  misc_feature (307)..(307): n is a, c, g, or t
  misc_feature (414)..(414): n is a, c, g, or t
gnaggaaacgggagttaacggagagcgtagtaanccatacatgagcctncacaacaagcccaagaattaaatgancccagaagngctgcaaaagcgagntnnggaggaatttnncnccggataccactctctgttctcacacagtcagttaagaacaatacccaanttctcatcaactgccgcaacaataagaaactcctgggnngngtaangnccttcgataggcactgcaacatagtgctggagnncgtgaaggaaatgtggactgaggtacccaagagtggcaagggcaagaagaagttcaagncagtaaacaaagaccgctacatctccaaaatgttccatgcgcggggactcagttatcgtggtcctgcggaacccgctcatcgccggcaagtaggggccgcctgtttnttgacagaactcactcctcttttctatgaagaccgctgccatttgtgttgagaataataaagctctgtttttt

SEQ ID NO: 578601 - DNA, 468 bp, Homo sapiens
ctgctgctcgcggatactcctgctgctcgcgatattcctcctgatgctcggcaaccctcttccccaggaaaggagaaaagagaaaacaggctgggcccggtggctcactcctgtaatcccagcactttgggaggttgaggtgggcggatcacctgaggtcaggagtttgagaccagcctggccaacgtggtgaaaccccatctctactaaaaaaaattacaaaaattagccgggagtggtggtgggcacctgtaatcccagttactcgggaggctgaggcaagagaatctcttgagctcaggaggcagaggttgcagtgagctgagatcttgccactgccctccagcctgggtgacagagtgagactccatctcaaaagaaaagaaaaaggctcccagaacaaagcgtaagagatggtggccacacagcaggagatgatggacgcgcaggtgaggctccagctgcggg

SEQ ID NO: 578602 - DNA, 989 bp, Homo sapiens
gcaccatgaagttcaatacccttcgttacctcggaccgcagtaaaaaccgtaaacgtcatttcagatgccccctcacacgtgctacaggaagatcatgtcgatctcccgctctccaaggagctgcgggatgaagtacaatgtccgctccatgcccatccgtaatgacgagagaggtccaagtattacgaggacactacataaggtcagtcaccattggcaatggtagtccagggtgtccagacatcgacatactgtcagtctactctcgacgcgggtgcatgcgtgtagcacaggccaagcggcacagactgtccacgtgggcattcacccaagcaaggtggttatcaccacgtgctaaccatctggacataggctcggacaataacaattcttgaacgctgaatgccatcgtctcgacaagttgcaaggagagaaaggcgaatatagaagaagaactgtagttgtagcaaacatgctggcattcaattgacacctgttgtgctaccacggtttaaccgtgggaattgcgcctgcgcgtaggagtgtcctcattaccatggttggtgacctgtacaggtcgctgctatctctaaggggtgatagccattctgggtccaattcatccctctctttggtccgcatcgagacatgaaagcatctgggtatctgacgtatcattggccttgaggtaagaagacgtgctctacagtgctcagtctttgacgtcccgagaagcgaactgccttgtagatgggataagtccggtccaagcagatccctttgcttgactgcctgttcgtgggccttacgctgccttaagttaaagcgctttgaacgctaatctaaagagggtttccttgccttttgacctgggatactggccctatacgagggcgccccccaagattttctctggaaaaagggtttgaaagaccccgaatgagagaagacgctccggaacaaggtaacgtccacaccggttgggccc

SEQ ID NO: 578603 - DNA, 242 bp, Homo sapiens
  misc_feature (28)..(28): n is a, c, g, or t
  misc_feature (33)..(33): n is a, c, g, or t
  misc_feature (106)..(106): n is a, c, g, or t
  misc_feature (120)..(120): n is a, c, g, or t
  misc_feature (200)..(200): n is a, c, g, or t
  misc_feature (212)..(212): n is a, c, g, or t
  misc_feature (226)..(226): n is a, c, g, or t
caggtgcaggcagcagcagcagcggcanaggtnggcccaggccaggctcaagctcaagcccaggctcaggctcaggctcaagccaggcccaggccaggctcccagnatcacagcagcagnagcagcagagagcagagcagagagcaacagcaccaccacacttccagtctcctggggcagcccccaggttggggttggtngggacagcaatnccaaaccctctaancccaagttgtttcttt

SEQ ID NO: 578604 - DNA, 395 bp, Homo sapiens
tggcttacgcctgtaatcccagttcttcgcgaggctgaggcggccggattacgaggtcagaagatcgagaccattctggctaacacggtgaaaccccggctctactgaaaatacaacttagccaggcgtggtggcggcccgcctgtagtcccagctactagggaggctgaggcagcagaatgccgtgaaccccgcaggtggagctcgcagcgagccgagatcgcaccactgcacttcagcctcggtgacagagcaagactctttattcaattgctagctcaccatcacacaacttctgccgcctgcttgccccaaccgactctagacccgagcacgcttatccatgcgaccggaattcgagcctacttgccctcgccccatagggccgcgctctc

SEQ ID NO: 578605 - DNA, 314 bp, Homo sapiens
cgttagccagacatgggactggaggacgagcaaaagatgcttaccgaatccggagatcctgaggaggaggaagaggaagaggaggaattagtggatcccctaacaacagtaagagagcatgcgagcagttggagaatgtgtaaaggcccggagcgctagagctctgtgatgagcgtgtatctctcgatcacatacagagaggattgcacgcagagctctttgactcttgcatcgagcacatgcgtgccacatctctttacactgaataatgtgtgacttattcacccatctcatcatctggcatcagatattct

SEQ ID NO: 578606 - DNA, 931 bp, Homo sapiens
  misc_feature (21)..(21): n is a, c, g, or t
  misc_feature (75)..(76): n is a, c, g, or t
  misc_feature (81)..(81): n is a, c, g, or t
  misc_feature (87)..(89): n is a, c, g, or t
  misc_feature (135)..(135): n is a, c, g, or t
  misc_feature (187)..(188): n is a, c, g, or t
  misc_feature (200)..(200): n is a, c, g, or t
  misc_feature (283)..(283): n is a, c, g, or t
  misc_feature (306)..(306): n is a, c, g, or t
  misc_feature (308)..(309): n is a, c, g, or t
  misc_feature (311)..(311): n is a, c, g, or t
  misc_feature (316)..(316): n is a, c, g, or t
  misc_feature (320)..(320): n is a, c, g, or t
  misc_feature (335)..(336): n is a, c, g, or t
  misc_feature (338)..(338): n is a, c, g, or t
  misc_feature (358)..(358): n is a, c, g, or t
  misc_feature (360)..(360): n is a, c, g, or t
  misc_feature (363)..(363): n is a, c, g, or t
  misc_feature (365)..(365): n is a, c, g, or t
  misc_feature (367)..(368): n is a, c, g, or t
  misc_feature (374)..(374): n is a, c, g, or t
  misc_feature (390)..(390): n is a, c, g, or t
  misc_feature (426)..(426): n is a, c, g, or t
  misc_feature (457)..(457): n is a, c, g, or t
  misc_feature (463)..(463): n is a, c, g, or t
  misc_feature (536)..(536): n is a, c, g, or t
  misc_feature (543)..(543): n is a, c, g, or t
  misc_feature (550)..(550): n is a, c, g, or t
  misc_feature (579)..(579): n is a, c, g, or t
  misc_feature (592)..(592): n is a, c, g, or t
  misc_feature (638)..(638): n is a, c, g, or t
  misc_feature (641)..(641): n is a, c, g, or t
  misc_feature (661)..(661): n is a, c, g, or t
  misc_feature (683)..(683): n is a, c, g, or t
  misc_feature (707)..(707): n is a, c, g, or t
  misc_feature (806)..(806): n is a, c, g, or t
  misc_feature (818)..(818): n is a, c, g, or t
  misc_feature (859)..(859): n is a, c, g, or t
  misc_feature (924)..(924): n is a, c, g, or t
taataatagttttcaaaatanaatagtgggacaaacaaaggatggatattaatatacaaaaaggaagaaagagannaaganaaatannnatgggactcgaagcgaagtacaaatcatagcaagaggaaacgtccnaacgatcttaagcgtctgcgtagaataatcgactttaagataatcatggccnncgtaggggcagnaccacgcgtcactcgtgggactccctgattggggctggaggaccacaatataaagaagtgggcagacaatgtactcctcctanaggcagggaaggcactgccacangnngnggctntctngtgtggccctgcccnngnggcaatttcctgtggggggngnggntncnngttcantgatctgctggccttntcttccttcactgatcccctgggtgttggtcctacntttagaaattaaaacagcacccctcccccancccatncactctgggtcttgtgcgtgggagaggcgagcgcttggcggatatctgaattgcctttaggatctctcttctnttgtctnggagaancatgcatgtttgcagtgaaattgttctanggtttggtcctgnggagtctaagaaatcgtgacagtctttggtcattttgtcctgtttntgnttgtttcctttagtctcggntggcagtgttaccgctggtgtnatctcttctctgttcctggctttnattgagatggttgatcatctttacacagtcctttgcatgcagatgtatgtatttggagttgaacagttttctatatagcctttaaagctcgaggcatanagtgcacagtcncccttctgcatttcaattattgttagtaggttgggtgaganaatggagccatcttcccactgccaagatccatttgttggaatgtgtactagtcccatccaatganatgactt

SEQ ID NO: 578607 - DNA, 888 bp, Homo sapiens
catgtgccagtcaccctaacggttataagtgtagcgaggccttgtgttgctgctcctgccgccgccacatgaccacctccatccgccagtatcacctcctccagctccatcaaggtgctcctccggcctgttcggtgcggctcgtcccgcacctcactgccggctgtctggcgtgcctggtgtgccggctcctgcagtgctgggatctgctggcgtgcctgggcagcaccctcgggggtagcagctactccagatgctacagcttatggctctggatggtgtgctatggcagcagctatgggggtgttagaccgggcatgcaacagactgacacggtgagaaggcacaaacaacgagaaaaaccacaaaagcacaaaccaatagcacagccacagaaggcggacacacagacagaggataaccccatgagacggacggaccagacagagagaagaagagacgccggccagacacggagcgcacgagaacacagaaagcagaaagaaagggaaaacaggacgcgaagaccaaacccagagcaggacaacaagggcaccaaacgaggaacacacagaacacaagagaccagaaaagaagacaacaacaacagagaaagaaaggcaacacaacagagagccaaacagaagaagaacaaaggcggaaagaaggacgagacagaagagaaccagaaggggggggcagggagagcggaggaaaaccacagacaaagaagagagggagaagagcagagagggagggcgcaggagggaaacaggagacagaggcgacgaaggagcggcacagcaagcaccggagggcacaggccacagagacaaaaaagagaaacgagaaagagagaaagaacaggcggaagacacggacaaaagc

SEQ ID NO: 578608 - DNA, 110 bp, Homo sapiens
ttgatctagaggctcccgatgaaatcaacaagctgtccatgctgagaatgagttggtgatgctgaagagggatgtagatgctgcctacatgagcaaggtagagagcctgg

SEQ ID NO: 578609 - DNA, 171 bp, Homo sapiens
ctgactcgccttacctttggagtagcaggaacacaacctgactggctccttctggaatgactcctttgccaggctctcactgacctatgaacgagtctttggtaccacagtgacattcacgttccttctggccaaccagctctacccagtgtcttgcccaggcactggttt

SEQ ID NO: 578610 - DNA, 1130 bp, Homo sapiens
aggtagtggcatttccgttctcaggcagcttcgaatgggaaaggtctcgaaagcttcaggaggagcagaataccagatcgcagggcggatggcgtgtaacgatctacaccgctcgtcctataccatcgaggtacccctgtttttggagaagtagaagtggtaggagggtggtgaagggacaccgaaatttgtaagaatcatcatttgtctgggaggaggggaagggatggtggttatgcagagcggtaagcgagagttaggaagaggcatgagcagcagagctctcgatggtagttcccacagcgtcaggtgaggaggtggtgagctggggtgaggcatgtggagtctgggatgattcccaccgctcgagtgaggaggtgtgagtgggggtgcagtatagagcgcagtgccgtgctgatgggggtcacaactggatgcagtgccagacgccaaagggacctgatcttgtaggggtcagttctcagccagcgtcctcccatcagcagatgacgagctccaagcgctaggaaggggctcagatgacagcggcgcaggacaaggccctcagggaactgtggcctcctgagcacccttggttccacctgtcaccatcaacatggtactccaacatggcatggcctggctgggctgtccctgtgtgtgtgtgacacacaggtgtgcacgtgcatgggcatgtgcccggggtggggaagggtgtctaatgtggcacgtgactgtctgagctcaacagctggtggatacctctccatggacccactgaacactttcacatcgctggtccttggttggtgtctaacctaacgtgggggagtattatccccctcaaggtcctggggtcggagcatgctacaggggactgacctggaggtagtcagggcaccctgtctggttccccatatgagtccttcggaggggtacccaaacttagacaggccgcgaaaacggaagagcccacccggggacagtccaaaaaggggaccccgagctgcccgacaggaggagacagcgcaagcgagagccccaataagacctgcgcgtggcgccacgggagaggagcacaccccagcaacggaggggaagacgacaacgcaaagcggcacacgatctgc

SEQ ID NO: 578611 - DNA, 525 bp, Homo sapiens
  misc_feature (14)..(14): n is a, c, g, or t
  misc_feature (92)..(92): n is a, c, g, or t
  misc_feature (121)..(121): n is a, c, g, or t
  misc_feature (125)..(126): n is a, c, g, or t
  misc_feature (129)..(131): n is a, c, g, or t
  misc_feature (139)..(139): n is a, c, g, or t
  misc_feature (151)..(151): n is a, c, g, or t
  misc_feature (161)..(161): n is a, c, g, or t
  misc_feature (165)..(166): n is a, c, g, or t
  misc_feature (173)..(173): n is a, c, g, or t
  misc_feature (176)..(178): n is a, c, g, or t
  misc_feature (189)..(189): n is a, c, g, or t
  misc_feature (198)..(198): n is a, c, g, or t
  misc_feature (205)..(205): n is a, c, g, or t
  misc_feature (223)..(224): n is a, c, g, or t
  misc_feature (310)..(310): n is a, c, g, or t
  misc_feature (315)..(315): n is a, c, g, or t
  misc_feature (332)..(332): n is a, c, g, or t
  misc_feature (341)..(341): n is a, c, g, or t
  misc_feature (405)..(405): n is a, c, g, or t
  misc_feature (421)..(421): n is a, c, g, or t
  misc_feature (423)..(423): n is a, c, g, or t
  misc_feature (476)..(476): n is a, c, g, or t
  misc_feature (490)..(490): n is a, c, g, or t
  misc_feature (496)..(496): n is a, c, g, or t
  misc_feature (502)..(502): n is a, c, g, or t
gaagctcttaaggngtatggagtgtttcttaagtccacagaagatgctcaagaaatggttaataggtaagattgaggaaacaatatgttgtnagtgacaccataacattattattatattntggnnagnnngtgttagngtgccctaaganggtgtgaganatgnnaattcanatnnnctcatacaggnactctaggnctggggnttagcaatctgtgctttnncacgtccttccagtgatttcgacacagcactagagctcagaactactagattcctttatcccatccctgtgtaatacacatgagtnatgcncagtaaatgttcttganatgtatttnattaagcctagtgggtatggactcaataatcctcaccaaaatcctgctattcttagtataaagngcaggccattcttctngncgtttgctagtctccgggtaaaggctatactaaggctaatcttagtgaaattnttttttgtggtaanagttanagaganagagttcatgatatacaaaatga

SEQ ID NO: 578612 - DNA, 528 bp, Homo sapiens
  misc_feature (65)..(65): n is a, c, g, or t
taccgagcagtggtggggttagtaggcaggcacgacggcagtggtggaccaggtgcaggagtgtngggctgcgtgtcccggcagtggaggagtgtaggagtttttggggagggtgaccctggctgggatatcttctggtatgcctccacctcaggcagttcaggcatgctccagcgcacattaacatgtacaaactcctgaaccttcttgcgaatcatagacataacatcaattctagtaaggacatgctggggagacaggccttctcgggagacaccatcagcaaaggtctcagccccgttctgcccccggctcactataaatgccgcatgagaagagagacatatgccttgaactctttctctgatttgcctcgcatgtctcttacaagccactgggtagtaaaagcatcctgaggtggcataccatatcgcataattggatagggaaaggcttttcgatgacgagcattaaaaccaagtactgtaatatgcccaccactgcctcgttgcctatcactgcctcgtg

SEQ ID NO: 578613 - DNA, 483 bp, Homo sapiens
cagctccgctcaaggagaattcagccgtaccgttcagataccacagcgtgacggatcagatcaactccccgactttattcgtcatctttaatgacacacaggcttatccaaaataccttatcacatgcaagaagatctacggttaatcacatgctttcagatcctaatgctggcatgcatttacagcaactgccaatcatgtacagttattaaactgattagagccactttaatttacagctttactgtattattatttgaaacaaaggtttgtctgtttgtgttttatttaattttattatttgattgttatgtttggaaagtgacattttcatatttagccatacgtctttattcatactatttttgttacaaatgaattaaatcataaagacactgttcgccttaatgctgtcagatacacatcattttttgaataatcattttttggctgtcaaataataaagtgaaacagcaacaaca

SEQ ID NO: 578614 - DNA, 556 bp, Homo sapiens
  misc_feature (422)..(422): n is a, c, g, or t
agtcaaggcccttggctcttataggcattgttcttttccagaagcccctacattacattcaccagtgcaacatgacaatccagcagataggcttgttgtcttccatgaagtagaagtgatggtagaagtgaatatggaaccttcatggagagtttttatactctactatcctatcacatttcttagaatataattgtctcacaagaacttactgcttaaggggaagaatatatcaaaatatatgcctgtagtatcagtgaatcccatatgtgtaggaatagcagatacatttccattttcatgtatcagaaaaatagatcaggcaaatagtataaattagacattgtgaatataccactacctggccagcttctcaggaattgtatcacccatttcatctaatgccccgtggagagccaggncagaaattgggaatgcattgaccctcaactgtggtcccagtaggtcagtgtcaggttcttgttttctaattaggcagacatgggtagggctggaaaagtggatccaaatgggatatcagagccaagggggctat

SEQ ID NO: 578615 - DNA, 235 bp, Homo sapiens
cgtcgcgacgtgtacccgagtaccctacttcaaaaatgagtaggagtatcaggaaacacgacatgtgaatatcctactcttcatgggctataccacaaagccagaactggctatggttacccgagtggtgtgagggctccagctggtatcaccatctccatatcattgagaccaaattcgagatgatcaaacttatagatattgcacgacagacggcacagggcatggattactt

SEQ ID NO: 578616 - DNA, 708 bp, Homo sapiens
gccactctaagattttgccaaaagaccaagtgcagcatcgtggacagtgcagtggagatggcccacaggtccaactctcacgaagagacaactcccttggcaccgacactgctatgaagagtggactcggaaagtgaagcgtgactagccccaccagccttcccctgtaaaaccggaaggttcatggataatgatgccgggccgcacggtatctagataatctgatgatcatcacaatgatcaattccagcatcagctcaagtgcgttcacaatgacagtctattctctgtgattgtctgactacttatgccagagagtgttttcaacaaattgactctgctgacctcgaccctcccacaggtccagactgacctccaggcctggaggctgggctgcaacgcgacctactcatgcactccaggaggggcacttaagcagcctgagtaggaagatgtgggcaacattggaggacgcaccgagaacagacacaagtgggacctgggacgcgcgttacacagaaggctggctgacatgcccagggctccactctaatctaatgtcacagccctcagaacctacatcgtactttgtatacactgccttcttatgtagtcagcttgccatccctcactcttcactagcagtctagatcattccagatacagtgggggagggcacagtctagcaacctctgagtgtggacaata

SEQ ID NO: 578617 - DNA, 662 bp, Homo sapiens
taaaagtccaaaatctttattaattctcccgggtcccgcccccgccccaggggatgcttgcaaggtcaccaggcctcaggtccagggggtccgaagcgccgacaggaagcgtgcttccgtggttctttcacaggtgtcctttccgcacctttcttgtgcgcatgtggtaaaaaagaatgtggggacagtccgcggctgtggtgtgcagatgtagacgtctcctcgtgtgacagagcgtgccctgtggacaggcgcgtggacacgtgcgttccagaagggcgcgagaaaaggcgctctcctctcacgagggcacattctcaaatgtgggatatacctctctcttctctgtgtatatacagctctcagaacctccgcggggcctgtgagacaaaaaacttcacacacagcgggtctcccctgggtgtggctgtgagccatcgtggtggcggagcagcccatagtggcagacagttgtggcgggcgtgtggggcgaagaggccacagaggaggcccgagccccaactctgtgtgccgcggtgagacgcaccgggtcttgtgcaagcgcggtgtgtgtggtcccccccggaaagttagcaacagcctttcggcacggggccacttcgccccaggaagggggttaaaaaattgcccaagagaggggg

SEQ ID NO: 578618 - DNA, 179 bp, Homo sapiens
atcgagctcggtaccatcatctccttaccgtcagcgcttctgtgctccaatttccaaacccagagcacactggatatcgatggcggttcttctaaacccaatcaatgatcaccagctaaagcgtggatatgctgtcgtgtcccacacctccatatatggagagcggctgcacttcctcc

SEQ ID NO: 578619 - DNA, 330 bp, Homo sapiens
  misc_feature (186)..(186): n is a, c, g, or t
cccccccccctttttttttcccccctaaaaaaacccgggccgggccccccccccgcctttttctttgggggggggggggggaaaaattttctccccggaaccaccattgccccttgggcccttttgggtgcccctttaaaaaaagtttgttccaaaaacccggggggggcggggcgggttttttcnggaaattttttacccccccccccccccccccggccgggacctttttttttggggcccggccggggggttttttttcccaaggtttttttttttttttggggtttttttatttgccttgttttttttatttccccccggggggga

SEQ ID NO: 578620 - DNA, 89 bp, Homo sapiens
cttcctgaaacctttgtcttaaaaatactcagctttcaatgtatcaaagatacaattaaataaaattttcaagcttctttaaaaaaaaa

SEQ ID NO: 578621 - DNA, 1017 bp, Homo sapiens
tgaatctgatgacagcaaatcatagaagaaaagagatgctgctgaccgaagcatgaaggattagccataggtcttgatcctgaacatcaataattggtgccacagacagccgttggagaatagatgtttctcatgaaatggatcgattcagatgaggcagacttggtgctggcgaaagaggcctatatgatgtgtcctcacacatcgtaattggctattttctatggaagaagcaggactaacttgcgccattcttgtcccaggaagcatgaagctcgaagtaattgtttgcacatagattctattatatattatagtattatatatcatcatcatatcacattgggctctgtcagcatctatggagtcttactatgtggtggaccagaaatcaacgtacaatccttaatgcaagaatcaacgcttcgaatatgctggtaatgaaacgtagcgtgggaaccagcttgtagagggtatcatgcatccatagcactggttagtgtgaacaacaatacataagagctatctgtagtatgcttcctttatcagaaaagaacattcgataccatggtatatcattacctcttcattaacgacacgaagtctcgtctaaatgtcgggggaccatgtccatacgtacatcatctcagtcactaactggtgttctcatgagtcctaagaccatactagattctataacgtgtcttctggagcgcagtgtgagtgtgagagtgtagtgtgtatccataacatagtcttgtaaatggtcagcgtaagaaatattcccccacatagcaagctcagaagtaacccccagttgtgagattcaatactgcaagaaagaacaaatagtatccttcgggctaactacaaagtaccgaaacgacctacgtggacaatcgtacctccaaacacacgaaacgaactacaggccaaatgagcgagcaatgaaaatcaacacaagaaaggaaccaacagcacccagaaacaacggttgcacacacaacaacacaagca

SEQ ID NO: 578622 - DNA, 457 bp, Homo sapiens
  misc_feature (32)..(32): n is a, c, g, or t
  misc_feature (53)..(53): n is a, c, g, or t
  misc_feature (67)..(67): n is a, c, g, or t
tgaggaccgatgcattgtcttcaactgaaggnacttagcattacgtaatcatnatactgcccatgcnagaatccttctattacatctctgacaaatcacatagtctccacttggatacaaggtctgacagggactcattactttggtataatgtctaatttattaatggacagctttaactgtgaagaaatgcttttctaaactaaaacaaaagctatcaccagcctcacaccccaactataactttcacataccggttttgattctgttctccaggacaataaaatctacttcccaaggatgatggaattttcatgcaaaattgttagacaaagcatttctttacataaacatttgttgtagatcagcatcatgatgttgttatgagccaaacagtggccttattttacaaaatcctgtcttatatcagtacttgcttgtacctatattcattcat

SEQ ID NO: 578623 - DNA, 1442 bp, Homo sapiens
actgcattccaagaagtgccgattatacccacatattgttgcgcatcctaataattcagacaccagtatttgaagtatctgtactcgctaattactggcacatgtaatgctcgtgcctgtgcgcatagtccccttatggatgtagtaaagtaggcttccttctaggaaacttgtacgatatggaccaattgcggaggttttccttacgtcagatcatagctacatcacattggtagactcctagtattgagaaatctctgtagagtatactagataatgaataactttgccttataaattgtcctacccatatagattgttgaggaggaattagctgacaatcgtggaaactaattatattcctctttcgatggtgccatgcgtgcgttaggatttgacgcagatgctgtttcaactattaagcctaatttctcaggcctccttaggctttggggaacatctttttcccattttacttagttgatcccttttggggttgtgaattcgagtcccccaatgggttgaaaagaagctctacaaaagactacttttccattacggcaagtacacatcaacgtgtggatcacaattttttcaatagcaaggttccacgcctattgtttctccgttaaggaacctataccttctacaagtcttgactatggaaaacagtccatcccctcatgatttgacattttacccctataatctaattagtgggatgcattgtgttcccgccgcactctttaacttgtggtgaggaacttatagttccttacaagacgtaattaaggaccccaaggtttaatccttttgaaatttgttcccctcatgggtggaaaccttcggcgggggacgtgcgcagttactttctacttttttcaacacaaccaacaaacattggctgcgttgacaatcttgtcgggaaggataatcaccgaaaaattgtccaagaccaaggtgattaactccttttcccaaagagatgaagtgaaacaaccgcagttgcgctttcaaccctcatccaacgttgtgtacaccccaggacacaggttttgtgtggtcacaaccatttaaagcacagttttttgtgctgaacgaggaacatgacaaccgcttcgggcgtcaggtgcttccacctctgttcagacagttggaagcacttttagttgtgagaccccagcaacattttacctggacgcttccccaacgtttgggtgggaaaccaacttggctctcaatccacagaagtgtaaaccctcaagcgggacagatcatttcatttcgtcgcggcaaacaacaacagtcttggtcaacaccattatttgtgttccaccagctgatttttggcgtgacgctaagacacgtttacgcaatcatttgtttggcccaacaaggttccactctatttgattctgccccaaaagtacctgggacatcaa

SEQ ID NO: 578624 - DNA, 2267 bp, Homo sapiens
  misc_feature (277)..(277): n is a, c, g, or t
  misc_feature (1024)..(1024): n is a, c, g, or t
  misc_feature (1098)..(1098): n is a, c, g, or t
  misc_feature (1170)..(1170): n is a, c, g, or t
  misc_feature (1228)..(1228): n is a, c, g, or t
  misc_feature (1254)..(1254): n is a, c, g, or t
  misc_feature (1334)..(1334): n is a, c, g, or t
  misc_feature (1369)..(1369): n is a, c, g, or t
  misc_feature (1441)..(1441): n is a, c, g, or t
  misc_feature (1564)..(1564): n is a, c, g, or t
  misc_feature (1761)..(1761): n is a, c, g, or t
  misc_feature (1856)..(1856): n is a, c, g, or t
gtcttgcgtgtatcagacagagtattgcgtaaagtatagcctatgcagtactctgattagcagttaccctaggattagtaccttacaataagatgcgagaagactttgcgcgttgtaatacttaccacaaacttagttgcgcatacagagagagtgactagctgtaggtgcccccctggactgtcctacatacctgcagtgggcgcctggcgaagctagaccgtactgtcctgccgtgtgtcctaggcacacgatcacgtctattgtcgtctatgcntccataggtacttagagcggcatgtctaggaattcattgcttcgtcactttggatggcgcgattcaatggagtagtgtatgtcgagtacactttgtgattgtcaacgtaggagggggactgaaggaagtaaaaaaagccgagattcgaccgtaatagtatacccttggggagggaaggtaatgctttgagagacattgtagaagttgaactcgaggggcaccggtgttgtggtgccgtatgggttggttgacgcattgtgagggggatgtagggaggcttgtggggggaattgtgaggtcgcgtagggtgagacgcgtttcatgaggggcagatgattggcttgtggccagtatagattagaacttcggaatgtagaatctatcgtctaggtagttgctattttgtaggttggtaggccattataagaaagcgagggggagaagcaaattagttcttttagcacttaacaacatataggggattgaagaagaagagttctcggcctcaatgggagaacaccaccgccgataagagaagacagagggctttgagggcgaacgcgaagatgtgtgcattgttgccgtccgtgactaacatgatgagaaacatgaccatggcaagacgacaagaagagagcgttgaaagttgaaggcgagggtggagggaacatagagacaacgatggaggtgggcgatggcaatacggcgctagtgaaggcattgatggacatatttggtggcgacggnacgttggaaacgattgtggagcgtgttggcacgtgtaaggacgtgaaattgagtagggcgacattatgttgaanaatgaaggcagacgtgtctgtttaggacaatcccagagcgtggaagagggtaagagggcaaatgagatactnatgaagcttatgtataacgaagctattaatatttgccgatggatagctgcgcacagancaagatgggttcatctcttccaaaantctgtgtttgtgctcaaacaccctcacacgttccatatatattccaagtgattcgtttatggagacgccactttactatnactcacgagagctagagaggagagacacacaagcnctatctttttcaatgtgctcacatgatggatacacattctcgagatagtagagcacctatgttggtctctcnaatacaaaaaattcccgacgaaacatcgttacacagcttggagaagattgtccggcgcagatgtttagggcagtctaatccatgttagagagtaaaccggaagagagaggtatatgagcgganggcagataaacggcagttcagagtggttgtaagtgaaccgtccctctgtggaggaagagctgatgagcagggttataaacgagggtgaaagcggacacgaataatattcatcaacttttctgttggtgagcgcaaacagacaaagccaaacgcactttgaggtggggaacagacacatgcgattagcataaatgtangagaaagacagagagtaagaagagccagcacgggcgagtcaaaattattagaagcacacatcaggaccgcgaggggcgcggggggagaccatacnccactaggaagtatacacccacaccagtggcatgggtggcgatagacaaatgaatatggaggacgatactacaaaccatagtagagcttatgttgtaaaataaggaggggggtgatcacagaagagagatttgcacatttaaaatgaaacatgaagagtggtggtgaggcgacatagtttataatatgaagcagaacatttgggttgagcgcccaagcacaataaaacgtgcgagtggagagtagaaagaaagaaagacaaacaatgcgagggggaagacaacaagagcgcaagaacggagaggagtgccatgtcattgtcatggaggatgacaaacaaagcagtctagttgtgtagtaacaagatcttgttaggttgataaatatggacgaaggataaaagaagaacagg

SEQ ID NO: 578625 - DNA, 131 bp, Homo sapiens
ggagacccataatgagtttccccgggaacaagtaattcagaggtgttggaatcacaaaaatgggtagcataccaggatgatccctgaacacgagcagtatgtaccaggagactttggccccaggattccaa

SEQ ID NO: 578626 - DNA, 144 bp, Homo sapiens
  misc_feature (135)..(135): n is a, c, g, or t
tgcccataagctgtataccaagataacaatataggccaggtgcagtggctcacacctgtaatccagcacttttgggaggctgaggcttgggccaggaggttgagaccagcctggtgcaacatgtgcaggcccctngtcgctacc

SEQ ID NO: 578627 - DNA, 146 bp, Homo sapiens
tgtctcttttacatcaactgacgtggtatattactttgctagaatccagtaaatcatattatggtagctctggctgtgctattcagtaaaaagatgaaagcaacacgttgattttttttaggtctactatatgatttgaacgcgga

SEQ ID NO: 578628 - DNA, 750 bp, Homo sapiens
  misc_feature (99)..(100): n is a, c, g, or t
  misc_feature (102)..(103): n is a, c, g, or t
  misc_feature (348)..(348): n is a, c, g, or t
  misc_feature (632)..(633): n is a, c, g, or t
  misc_feature (640)..(640): n is a, c, g, or t
agcgggcctgcgccccggcggtggacgggcccggtcgtgggcggggattggggcggagcctgaccgttacgcgcagccccgcccccgcggcctcgtcgnncnngctgaggcggtagccgcttttcgtcgactcttaccggttggctgggccagctgcgccgcggctcacagctgacgatgggggaccccagcaagcaggacatcttgaccatcttcaagcgcctccgctcggtgcccactaacaaggtgtgttttgattgtggtgccaaaaatcccagctgggcaagcataacctatggagtgttcctttgcattgattgctcagggtcccaccggtcacttggtgtncacttgagtttcatatcgatctacagagttggattccaactggtcatggtttcagttgcgatgcatgcaagtcggaggaaacgctagtgcatcttccttttttcatcaacatgggtgttccaccaatgacaccaatgccaagtacaacagtcgtgctgctcagctctatagggagaaaatcaaatcgctcgacctctcaagcaacacggaagcatggcactgatctgtggcttgatagttgtgtggttccaccttagtcccctccacgcaaaggaggaagattnntcttgcntctcacgtttctcctgaggtgagtgacacagcgtgggcatcagcaatagcagaagcgatcttcttgaacatcaaggcctgtggaaaccactttggaaaataatgaaggtg

SEQ ID NO: 578629 - DNA, 229 bp, Homo sapiens
  misc_feature (61)..(61): n is a, c, g, or t
  misc_feature (63)..(63): n is a, c, g, or t
ctcagtactcactcttcttgcttaggctctctgtgtgttgaaaaccatcccgttttgcatntnttttgacaattttctgtgaaactttcaaattatgtttgagaagaagtggaaagttttccttctgacctcatttccttcttgatcagtggacactaacattttggggacaacttaatcaattggttttccttaccccccaataaagtaaaatgtaccccaccccaaa

SEQ ID NO: 578630 - DNA, 346 bp, Homo sapiens
tggtattgtccatctagtagattcagtgggggtctgcagaggaagatgagtgcctgttgtgcctctcccagtggctcagtcattgacagctctgctgtgcctcagcctgcacattctggagtgcccgaaggtttgcccaggatgtcatcagcaccattggccagcgcttcgagttgcgcttcaaacaatacctcaggaacccacccaaactggtcacccctcatgacaggtgagccaggtggggagagtgtggagcagctcttggattaggattaggacaggagggcttgttcttcctacacttgagttgagaggttcagggagggaataacctgtgtgcctctgt

SEQ ID NO: 578631 - DNA, 779 bp, Homo sapiens
  misc_feature (99)..(100): n is a, c, g, or t
  misc_feature (102)..(103): n is a, c, g, or t
  misc_feature (348)..(348): n is a, c, g, or t
  misc_feature (661)..(662): n is a, c, g, or t
  misc_feature (669)..(669): n is a, c, g, or t
agcgggcctgcgccccggcggtggacgggcccggtcgtgggcggggattggggcggagcctgaccgttacgcgcagccccgcccccgcggcctcgtcgnncnngctgaggcggtagccgcttttcgtcgactcttaccggttggctgggccagctgcgccgcggctcacagctgacgatgggggaccccagcaagcaggacatcttgaccatcttcaagcgcctccgctcggtgcccactaacaaggtgtgttttgattgtggtgccaaaaatcccagctgggcaagcataacctatggagtgttcctttgcattgattgctcagggtcccaccggtcacttggtgtncacttgagtttctcatctccgcaacttccctttaaccaaaggcaaagcttcgcgactttcccaaactgggctcaatggtttcagttgcgatgcatgcaagtcggaggaaacgctagtgcatcttccttttttcatcaacatgggtgttccaccaatgacaccaatgccaagtacaacagtcgtgctgctcagctctatagggagaaaatcaaatcgctcgacctctcaagcaacacggaagcatggcactgatctgtggcttgatagttgtgtggttccaccttagtcccctccacgcaaaggaggaagattnntcttgcntctcacgtttctcctgaggtgagtgacacagcgtgggcatcagcaatagcagaagcgatcttcttgaacatcaaggcctgtggaaaccactttggaaaataatgaaggtg

SEQ ID NO: 578632 - DNA, 389 bp, Homo sapiens
ttaccctcctggacaaaccagtgtctccttatggtcagccttacagcatttctctacaaaagttgcgaattcatccatacacagctttcagttgctctttggttcgccttgggcttgtgtttcacaagctcaacaagtccagtttgtttcttgattgtgtctctccttctcagaaagtgtgcatatatgcgcatgaaaggtaagtgtttcagcattaacctctttggaaaggtatgtttcatcgacttccagagttgaaaagcatgttcgctgtgttcccagagtattctgtacacgcatttggtgtctctgtcactcagtggcgttttctcatgccacacacatatgtggctcaggcccgcatatatagagtccgcgtgccgtatcct

SEQ ID NO: 578633 - DNA, 369 bp, Homo sapiens
ccatatttaaccgtgtttgggactccgtgttttcaatggtttgttagttgccattacaactttgtttgggtaaagtttttgagtttttgcagttcagtatccctctgtctattcacccttcgtgttagtggtaactcagtttgtcttttaatagttacacaaagggaacgtccatttgttaatgcttttttgaaatgagttaaaccagctttttgtattttaaagctttagtgtttcagttttataaatgaaaattttattttaaaaaccagtgggaaaaagtggggggtttctttttatgtttgggtcattcaggcagtacattttaattaagctgaatgtagacaaataaaaaaaaaccaaacttga

SEQ ID NO: 578634 - DNA, 844 bp, Homo sapiens
  misc_feature (86)..(86): n is a, c, g, or t
  misc_feature (104)..(104): n is a, c, g, or t
agcggctctcaaaatgtccatgtgaataataaatgatacgaccaccataattatgggatctcagccacctgaagggtggggaaatnttaataaatgtaacattnacacactacagaaaacatgtctggctccctacaaatcatttaagtctggcccagtcttctccaccactcgttcatactcaccttatttctccatgagttccttaattagctgcaagcaagctcatcctcaggtcttccttatccttccactccaacatccacacatcatcccaaaatgtcctcactgctgtgcttgaagttttacattttatttccactgattagatatttttcttcctagccacatctcaatcgtggtttatgaatcaggccaacatcctcaaaaatgctgtccatgagcaccctgcctcattctgttcactctcctgttaacactccgtcaattcttgtggtcactttattcaataataatagacagtttatttgcacatttctagttctgcaaagagatattctgcctcccttggtgaggtccttaaaagcaaaagcccattttctaattcttttgtattgtccaaagcaactattgttctgcccatggcagggtctataaatgctgattagatcacctacagtgggaaaggcagcaaaagacaaaactttttcataacaggcaatatgtcaggattatagataataccttgtgggacagatgactctctctcaaattatttgagtcccatagagctctattaaaaactctcaaagaataaacatgcgtcaaagtacagtgaatccaggtagtgttggaaagggtcaataagatataaactagggaa

SEQ ID NO: 578635 - DNA, 402 bp, Homo sapiens
  misc_feature (260)..(260): n is a, c, g, or t
  misc_feature (322)..(322): n is a, c, g, or t
  misc_feature (375)..(375): n is a, c, g, or t
ctcattgagtctaggagtttgagaccagctggggcatagtaagatcctatctctaaaaaaaaaaaaaaaattatctggacatggaagtgcgcgactgtagctccggccactcaggaggctgaggtgggaggaccgctcaagcccaggaattgaggctgcaataagccaagactgtgccacaacactccagcctgggcgacagagcaagaccctgtctcaaaaaaccccccccaaaaaaaaaggacaccataaacagtcangccagagttagagaagatatttgcaatacacgttatggataatatcaagactatacaaaganttattagattaataagaaaaaatctggtagctcacgcctataatcccaacttngggaggctgaggccagcagatcgcttg

SEQ ID NO: 578636 - DNA, 103 bp, Homo sapiens
gaatgttacgctataactcttaggctatgcatagccccatgtctaatcaggcattcactgatccagcaggtctccaaggtgaacagcctctggcatgttggaa

SEQ ID NO: 578637 - DNA, 166 bp, Homo sapiens
ggaatttaaagccagtataccaaccctgattcaacgggtaagcgagcagcctagaaagtcaaacccttagttgcttttctctagggattcgccgccatctctgagagatatggtgtgtgctgccaggctctacgtgtacagtcaggtaatgtgggttcgagtagca

SEQ ID NO: 578638 - DNA, 1058 bp, Homo sapiens
taaagaaccctcatcaatagatggagacatacagaaatagtcaaaccacatctacaaaaggccagtatcagggcgggggcttcgaagcccaaaggtgagtgtttgtggatgtggtaaaggtgaaatattagtggggggatgaagcagataggtgaggaaagtttgacccaataagtgacggtgaagctccggggaagccgtggtggctacaaaaaatgtggttgagcccgataaatgccggtcggaaaatgtgggtaaagggagaactcgaaagttactcgtggagggctgtggtaggagagggtaaaattagaagaacccagttaaaagtggggtaaataagcaggtgctgtgaattatgtggggttcacgaggtgtggtattctcttattatagaacttatgtgggtgagccctcaggggtgagtgtgatatacctccgtgagagtgcgaaagataaatacggagtgtgtgtttaaggaaggtgggaacttctcataggggaatttatagccgggggggtagtgccgtgtgtggggggcccagtgtggcccccctccaaagtggggagggaatagggggcatagagcgtgggaggggggctaaacaagggcctccagaaaaaaactccgggcgaaaagaacaaacaacacgttcgtggaggggtaataacagtgagggaattatccccggataatcagaaaaggcgctttgtgggcaccaggggggcgttgctgttggggtgggcctgtggaatatgggtgcttaccctcgggggtcaaccatcggggccccacccaatggggcaatatgggcacaggggggggtgggaaaaagaaaggcccctaaaatataaaggaggcggaatggggaggcgggacggttgcaacctcacagtggggtaggggcggaggagcccaatagagagggggtgaaagaggcccccggtaaggggcacaggggcggggatacaccatatgacaccggctgtgaataagaacaagacctgggggaagaatccgggacaccaagaacacttatccacccggagggcacaaa

SEQ ID NO: 578639 - DNA, 815 bp, Homo sapiens
  misc_feature (51)..(51): n is a, c, g, or t
  misc_feature (328)..(328): n is a, c, g, or t
  misc_feature (346)..(346): n is a, c, g, or t
  misc_feature (348)..(350): n is a, c, g, or t
  misc_feature (353)..(353): n is a, c, g, or t
  misc_feature (374)..(378): n is a, c, g, or t
  misc_feature (380)..(380): n is a, c, g, or t
  misc_feature (383)..(383): n is a, c, g, or t
ggcatctgcccctcctcaagagcaaaagcaaatgttgggtgaacggctgtntcctcttattcaagccatgcaccctactcttgctggtaaaatcactggcctgtggttgacatggataattcagaacttcttcatatgctcgagtctccagagtcactccgttctaaggttgatgaagctgtacgctgtactacaagcccaccaagctaaagaggctgcccagaaagcagttaacagtgccaccggtgttccaactgtttaaaattgaatcagggaccatgaaaagaaacttgtgcttcaccgaagaaaaatatctaaacatcgaatnacttaaatattatggaanannnacnttgcaaaatataaaataaatnnnnnanggnaaggaaactttgaaccttatgtaccgagcaaatgccaggtctagcaaacataatgctagtcctagattacttattgatttaaaaacaaaaaaacacaaaaaaattgtacaatatacaccaaattatgttttatagaccctggaaaaagaattttcagcaacgtacaacccatttaaagcattcctttcttaaatttggtaattcttactgtggatagctcagatgtcagttctgttaagtacagacttgtactgagcagaaacgtacttggtttaaatctgctaataaaatctaacgcaaaaaaaaaaaaaaattttgggcctccccgaatttcaacctttgggcggccgagaaaaaaagcagcgtcagaaccggcgacgggggtccaaaccgggcggtgcaccaggtcgtctgtcagcgccccaccccgga

SEQ ID NO: 578640 - DNA, 531 bp, Homo sapiens
  misc_feature (51)..(51): n is a, c, g, or t
  misc_feature (328)..(328): n is a, c, g, or t
  misc_feature (346)..(346): n is a, c, g, or t
  misc_feature (348)..(350): n is a, c, g, or t
  misc_feature (353)..(353): n is a, c, g, or t
  misc_feature (374)..(378): n is a, c, g, or t
  misc_feature (380)..(380): n is a, c, g, or t
  misc_feature (383)..(383): n is a, c, g, or t
ggcatctgcccctcctcaagagcaaaagcaaatgttgggtgaacggctgtntcctcttattcaagccatgcaccctactcttgctggtaaaatcactggcctgtggttgacatggataattcagaacttcttcatatgctcgagtctccagagtcactccgttctaaggttgatgaagctgtacgctgtactacaagcccaccaagctaaagaggctgcccagaaagcagttaacagtgccaccggtgttccaactgtttaaaattgaatcagggaccatgaaaagaaacttgtgcttcaccgaagaaaaatatctaaacatcgaatnacttaaatattatggaanannnacnttgcaaaatataaaataaatnnnnnanggnaaggaaactttgaaccttatgtaccgagcaaatgccaggtctagcaaacataatgctagtcctagattacttattgatttaaagtttcctttccttttttttatttattttatattttgcaatgttttttttccataatatttaagtt

SEQ ID NO: 578641 - DNA, 1474 bp, Homo sapiens
  misc_feature (369)..(369): n is a, c, g, or t
  misc_feature (378)..(378): n is a, c, g, or t
gccgccatcttccagttaattcgccaacaatgacataacacaaagggaaacgaggagaggcacccgatcatactgttctctagcgccttcttagcatacacacactgggagttgcttccctcttggcgcacgacttactagtgcgaactctagtaagacagagcgtgcactattggtcatgacagtcatagggtacatggggttagctgtgtcagaaaaaggagatgaccccagcaagcgtcgttatccagatggcatagacaccgtgggaataactgtcgtaccacagtggttgaccccagtgcacttgctgagtattggcacttagtgtgagtacatagcaaaacacaccgttgaagcggagcacancgacttccntttgcccaagcgaagacacttacactgtcgcagtcatttgaagccacatttacaagccacgtcctgaagcagccagcagcattagcattcgcttggaaaaccgttgttgaaagcgtagacaattggatcatagcacataacacaggaacagaaagcccatcagagcacgtacaagcgctcacactcggagattccaagctcaaatatgccgccgagcctagactgcccaaccacacgagcaagcaacaactttctggtcgaagaaccgacatggggaaggtgacgcctggatgcgtcgctgggagagcctaatctcgcctcatggacctctgcatcggcataccataagggtcgtataaacgcaagcagacacagaggtcccataggggcagccttcttagcgaggctcacaaaacatcaagccacagattgacgcacgaaccctgtcggcagcgcacttaacaagagccaaacggggacatgagaagacaaagagaaggccaagaacaccatcgagcacatacgcacaagtaacagaccggaccaccaagagacaccccggggaagctatcgacacgcccagcaaagagtgaggggacacccacatgtccacgaacaccatacacgagaacgaaggtggacagccagaccgaacaatacccgccgggacgcgccaaggactcaacctccctgcgacatcaaggaaagcatacgagagaagacaggaaccagcaacttgaacaaatacccaagaaagctgagccacgccaaggtcagggcagtgacggcacggctggccaagaaacccaaagcagaaaacccacagcaccacaccccactaccaaaaaagaaactaccaccaaaaacaatacagggagagccagcacacagtgccaagacaagaatgcagcacaaacccaaagaaaaaaagccacaaaagagacgcaaacgagacacagaaaagaccaacagaaacagcagagcggaacaacagacccgcgacagagacattagccacagaaaacctgaagcagacacccagaacgcgaaagacaaaaacaccaaaagcaagacaagcagaagaagaaaaagaacg

SEQ ID NO: 578642 - DNA, 202 bp, Homo sapiens
actgaacgcctacagcaccggtattcccaggcggtctcccatccaatgtactaaccaggccctgacactgctttgcttcctgagatcatggcttcatgtgcctggcctggcttcatgtgcctgaccatggcttcatgtgccgtgaccagtgcttcatgtgcctggtggtacctgagctctgaattctgtaatcagtggtcag

SEQ ID NO: 578643 - DNA, 468 bp, Homo sapiens
cccccatcgcctgtagtaaggacagagagctgtaagactgcctccggtactgcttgtgaacgtgctaagcgtaccctctctgggaggagccaggccagtattgagatcgattctctctatgaaggaatcgacttctatacctccattcaccgtggccgatttgaagaactgaatgctgaactgttccgtgggcacctgggaccaggcagagaaagcccttcgagatgccaaactagacaagtcacagattcatgatcattgtcctggttgggggttctcactcggtatcccaagatacagaagcttctccaagacttcttcaatggcaaagcaatgaataagcagcatcaaacctgatgcagctgttgcttatggtgcagctgtccaggcagccatcttgtctggagacaagtctgcgaatggtcaagcattgcagatcatggatgtcactcctctttcccttggtat

SEQ ID NO: 578644 - DNA, 115 bp, Homo sapiens
aggtagtgcctagtgattgagcgttgaccagtgtgtgtcgagttagggaggggggtacatagtacaagagcgatggtaagagctaaggtcggggcggtggggtgcggatggaagc

SEQ ID NO: 578645 - DNA, 622 bp, Homo sapiens
agcggggtatcaggtgcctgcgcccgcggcggcggaggcgcacgcggtggcgagtggatatctccggacatgagataatgtagacagttggcaatgcagtgatgtcgactctttgcccacctgccatctccagcatgttgccaatgacgagcagattgcgttaagtggcgaaatcatgctttattatggccgctactttttgcttacttgaggacaatgagttctgtggtccctagacgtaacgcgcacagtaaaggggctccggaatgacattgagatcacttgtaactgtctcaatgtgactgggaggaaaagtaaccttattacatattgcccagatgccagcgaccttctaagactggatgaaactccgttactgaaagttgcatgacctgacgtgcgtagctatacggaatgctagcacggctcctctcgcgctcatttgctctttgaatacatgggtgagcgtgaactataacttgggtagccattaacctctctgcactgcgaacagcatgggaagttggggcgcagtctgcgagctcgccattattggtacctatcaaatctactacgccttaccagcgcacacgctgaaacctgaatactcttcttccttccg

SEQ ID NO: 578646 - DNA, 958 bp, Homo sapiens
cccacgcgtccgcggacgcgtgggctgtgataccaatcttgagggtccctatctagttttagcagtcagtgacttctcttgtaaatgttgttggtcttgaacaaagtaacaaggcgtctcattaattggcatatagaaggttgcattcttgcaaagttttatgaccaaatgtacattagagcgtgacagcaaggcatacaagatatttgatcatcgttaagaatccacagggtttgcaaaggcttgacaagcgacaggtatttggccacttgcaggctacagtgggagatgatgaaggcgacagctgccattcctctacgggcaggataaatttgcaatcatgtcaacgacatgatggctccattgaggacccacgtggcacgctgtgccgtgcgcctgttccaaaagtcaggaaatgtccccgtatagggcaatgtgagacacaggatgacgcgccccgtggaaagtgtacaatcgtctagagttcacgcggacctgtccattaaccgtcacctatcatgcacatcagaaagcttacttgctcccaccaaggggatggccacgggcaagggggactgtgtcacgacccactaagagcaggtgtgtagagaaaccagtaggcgataagaacaagctggttaccagtccacgtgcccgacacaacacgtaaggacaacacgcggaaagctgacaagtagcaacgcatggggcgtacgtcggaaactgcaatgccgttccggtataggaacaaggatcactagacgcatcgagagcgacatactgacggacgacgaaaacgtagaaggaagcccaccgtcgggtggacccgaaacacacagaaaaatgtcatggggaccacaggggaccaaaatgaagagacaaacaagaaaagagcgaccctgcggggacgacaatacaacagccagtagaacaaccgcaccccacaggccccagcccg

SEQ ID NO: 578647 - DNA, 654 bp, Homo sapiens
gactcccagtgaggcaagaccgaagtaaactacactcagctcgtcgacctgcacgcccgatacgctgagtgtggttgcgtgatcctggccttacccgtgtaaccagttcgggaagcaggagccagggagtaacgaagagatcaaagagttcgccgcgggctacaactgtcaaattctgatatgttacagcaagatctgcgtgaacggggacgactgcccaccctgctgatggaagtggatgaagatccaacccaagggcaatgggcatcctgggaaatgccatcaatgtgtgaacattacaccaagttcctcatctgacaagaactggctgctgtggtgaagcgctactggacccatggaggagcccctggtgatagagaaggacctgacccaatataactaagctaccacaaagtgtgatggacccgaacacgaaggcacaccatgacacccacagccacaatgaaagcacaaaacaccaacggacaactcatagaacgagcactgcactggcaaagaaacctgaatgggtgcggagcaagacaccagaaaaaacacaagcgaagaaccccgaccggagagaaggtccccaaaggcactgcaggaacatatgaaaacggaagcacaacacaccaagagcatacacattgtagg

SEQ ID NO: 578648 - DNA, 387 bp, Homo sapiens
acggtcttgctgactgagaccaggttcggctctcggactctgtcagtcctatacggcgcacgtggcagggctgaggtggtgcgtcgcgtcgctgcgtgctgtgagctgagcaattcaccaggtcgctgttgtctccccttgggcaccagagcttccagtttgacgaggacgacggtgacggggaggatgaggaagacggtgatgatgaggaagacgtggatgaagatgcccatgattcagaggccaaagtggcgagcctgagaggaatggagttacaggggtgcgccagcactcaggttgaatcagaaaataaccaacgaagaacagaaacaggtgcgcttaccagaaagccggctgacaccatggcaggtgtggtttattggcaaa

SEQ ID NO: 578649 - DNA, 369 bp, Homo sapiens
  misc_feature (293)..(293): n is a, c, g, or t
  misc_feature (299)..(299): n is a, c, g, or t
aactacaaaaattaggcaggcacagtggcaggggctataatcccagctattcgggaggctgaggcaggcaggagaatcgcttgaacccaggcggcagaggttgcagtgagctgagatcgtgccactgcactccagcctgagagacagagtgagaccccgtctcaaaaaaataataatagtaataagaaaaataaaatcttatgtgcctgcttaccagggaaattgctcgtgagaacattaaagcccactcccaaaagcaaactgcttgagtgggattgaagctccaatccaantatccnttaattcccttgttggcctttccgggcctttttgggtgaacccaggaggagttttttaaactttttggct

SEQ ID NO: 578650 - DNA, 90 bp, Homo sapiens
  misc_feature (21)..(21): n is a, c, g, or t
ttacgcccaagcttggcacgnagggacacctccaggcctccgccgtggttggttcactagccgtctagagctgtatagcctgcagcacag

SEQ ID NO: 578651 - DNA, 138 bp, Homo sapiens
ttaccatttattctactcttaagctgtattaggttatgaaaataaaatatctccactttacgtcagatagtgggcaatcatatgtattcattctacttaaatagtattgtcttgccttcctaaacgtgtggctagcac

SEQ ID NO: 578652 - DNA, 219 bp, Homo sapiens
  misc_feature (35)..(35): n is a, c, g, or t
  misc_feature (78)..(78): n is a, c, g, or t
  misc_feature (119)..(119): n is a, c, g, or t
  misc_feature (149)..(150): n is a, c, g, or t
  misc_feature (167)..(167): n is a, c, g, or t
  misc_feature (193)..(193): n is a, c, g, or t
ggttcccgacgaacgttacgaacggccaccttggncttttccatttccgccttcacgtatttaaccagttccttacgncggtcttcggtcagttgcggaaccaccagccgaatcgtttncccgtcgttttgcggcgtcaagcacggttnngattcgtaaatcgcccnttcgatgtccttctaaggtcgtcttntcgtacggcgagatacacgttggcgg

SEQ ID NO: 578653 - DNA, 125 bp, Homo sapiens
  misc_feature (18)..(19): n is a, c, g, or t
gtcccacagacatctggnngctttggagttgggagctcaggattgtgcgaagtctaggcagagctatcacccaatcttcagggtggctgctggattacagctgtgcccagaagaggcttatgctt

SEQ ID NO: 578654 - DNA, 166 bp, Homo sapiens
tcagcagaaacagcaatgttaaggttaagttcaagaccagacaagaagagcagtcacagagaatttaaaatgaagagaaaggggaagaaatggacatgagagacttatctaaagcctgattcacagacacttggacaactaactgcaacataggtggaaagaagga

SEQ ID NO: 578655 - DNA, 412 bp, Homo sapiens
ctgaaaccagaaggcctgagcaatatgccccgtccccaaaagatgacacagaggctggaaggggcagtgcaggggctgaccaccctgctcatgaaaggagggtccagctggacttcctgggtcgagtaggggttcagcaagctgtgaaacactcatttcctgcatcaggacttacttcggtcctggatgaagagtactgaagatacatgcctaaaatattcctaacaccaggattggtgcatgtgtttccttccccaagaaagctataaacagcaaaaattctgctgtaagcttccctgtgtcctctctccctctcttccttccccctcccctaaaactaaaaggcatgttaaaagaccctttttctgtgaccagcggaccttatctatgctcccaattccaattccttgtg

SEQ ID NO: 578656 - DNA, 240 bp, Homo sapiens
tccccccccctttttttttaaaaattggggggcccttccccaaaagtttttggggaaaagggtttagggccccaaaaaaagggccaaaacccgggttgaaaaccccccctttccaacccccccccccaatatataactgtttttcccttgggaaggggggttggggggggcttttttatttttccaaggtttttttttaaaaaaagggccattttggcccccccccctttttaattttga

SEQ ID NO: 578657 - DNA, 1272 bp, Homo sapiens
  misc_feature (72)..(72): n is a, c, g, or t
  misc_feature (163)..(163): n is a, c, g, or t
  misc_feature (205)..(205): n is a, c, g, or t
  misc_feature (236)..(236): n is a, c, g, or t
  misc_feature (383)..(383): n is a, c, g, or t
  misc_feature (388)..(388): n is a, c, g, or t
  misc_feature (433)..(433): n is a, c, g, or t
  misc_feature (446)..(446): n is a, c, g, or t
  misc_feature (536)..(536): n is a, c, g, or t
  misc_feature (539)..(539): n is a, c, g, or t
  misc_feature (759)..(759): n is a, c, g, or t
  misc_feature (855)..(855): n is a, c, g, or t
  misc_feature (860)..(860): n is a, c, g, or t
  misc_feature (913)..(913): n is a, c, g, or t
  misc_feature (975)..(975): n is a, c, g, or t
  misc_feature (1128)..(1128): n is a, c, g, or t
  misc_feature (1272)..(1272): n is a, c, g, or t
gtgggacccttggtgggtgtgggtcgactgttgggtggcggtgtctctggtactctattcatacacacattntaatgatgttatttatttaatctctatacctgtaagtcgtatctaatagtagaatgtcgcagtgatttctggaattcgaacagtaagaccnccccgactggcgtggagtgagtcgctcggtgcgtcgccgacntcgtgctcagcgggtctggttgcacatatgnccgatccagactctcgccgcttggctgtctcgctgaggacgctccgccacctctgacgagtagatgctgctcacggtcgcgtgtgagagtcagcgttgctgtctgttagtgcgtcgcactcctcctataatgcacgcgtcgtagcancacgntcagacgtgcaaggttgatattgtgttattccgtttattagccgncttctgctagctntataggatgtaatagtgagcggttggtatatgttgtaatgagatggagtagagagtacaggatagtatagtgtagagagcaagcggaganagnagagcaggatgaggtgcatctagtcgacgtaacacagtatagaacagccaactacatacaacgagtacgatctgaatgatgaaggtacacacaagtaaacacaagctgcagatagtcacatacgcacaacatagtgctcgagaacttcttgttattatgcatatcagtgtattttagtgaagagttgacggtgtgttgcccttgcgcgtgatgtacgcanagtgagtcgatgcccgtggcagaggtggtgcgtgtggggagagcgtgcagagcctgcacagcacgcgttggtggagcggtgacagcatacgtgatncgtgntgcgcctctctcggacgcggcatgttctggcggcgaactgctcgtcgatgaantcgtatcctgtcaatgtgccaagactagccatagtaaacgtaaatatgataagctacaagangatcatatattcatactggtgttatacggtacgttcgcggctgtaacggagtgtagtagagctatgtcggcatgcgagtgcaacgacgtggtaaatgcgggtctgtcgtgtgtcgcgcgatgcgaggtcgattgtgcagataatgactggtgncatatatgcagcatagcggcactatgcgtagacagtgatgatgatgacgcagcatatagacgcgagagcatatcaagcaatcatcgtagagcgcgagacgacgatgatataaagcgtacgatgagcgtcgcatcgcgtgacatn

SEQ ID NO: 578658 - DNA, 100 bp, Homo sapiens
gggtgctaacgacggactccccccctcttctcctaccggacgaccgacggggggtacccgacgctcgacacttcgtaactcacgggtcactacgctggtt

SEQ ID NO: 578659 - DNA, 484 bp, Homo sapiens
tcttagtagtcggtgttttgtcgtgataggatctactctgcatttcggcgggcgctgctctctctctctccgcgcgggtatatattttgtatctctttgtctcgcaggcgcctccgctcggttataatatatatctttcgtctgatatcactcgactccatcgcgctcatgagaggtgcctaccgcatctcgtgtgtgtgacagaaagatatatctcttgacgagagagtctggcgtgttgcgcggagggtatttttttatcgctcttcgatgctctctctctgttggtgtgttcgcccccgccgctcatttttttttttactcaaggtgtgtgttatagcgggtggttgccaccccctctctactccccgccctcgcgttgtgtacactcctgttgcccccggccccatttttctccccccccccctttttttgtgtggaaacggggggtttggggaaaaaatgtgttttttataaatagaca

SEQ ID NO: 578660 - DNA, 533 bp, Homo sapiens
aggcaccgtatccgcgagccgataataggtatttagatgccgtagtaataagtgcgtcctggccacaatagctagataagcctcttgttatgtcagctctactctttgtgtgccccttggttatggtgagatcggaatgatgagcatgtctctaagtgtatttagtgtgaccagcaaatattgccggtgcgagtcgcggccatccccgacatttccactatgcactgatgactgtcgtgggcctgtctgactccttatattagaatcatttagtcctcataataactctttgcagtaagtactatgattatgtccattgtcagatgtgttaggaggacagggatattaagtgatttgtccaaggtgacacagttcataagtaacagaaccactattggaatcaggtgctttgaatatgaagtcctgttatgaaatatgtcgggatgtgttggaaccccacttccttatttataatgagtgatttcatttcaaagatggctgataggcattaaatgtttccatctatggcaagc

SEQ ID NO: 578661 - DNA, 174 bp, Homo sapiens
gctagagaggctgaggcaggagaaatgcttgaacctgggaggtggaggttgcggtgagtcgagatcgctccattgcattccagcctgggcaacaagagcgaaactctgtctcaaaagaaaaaaagagttaaaaggctgttccatcttgcatactcctctcccccaagttgcgtg

SEQ ID NO: 578662 - DNA, 105 bp, Homo sapiens
ggcggcggcacttaagaccggccgccagatgatgcggtggtgggggactgccggcacgcgacttccccacggcccaaattgatattcactgatggactccaaagg

SEQ ID NO: 578663 - DNA, 212 bp, Homo sapiens
cttaaaaccaaacctctttgtggttttgaccaagggattttccaaatttggttggggttttggtttgaaggttaaaaaatttttccgcccataaagccccccgttttttgcccctctaatttttaagtttggggattgggggagggccaggggttttttttttttttttttaagggggggtggaccaatgggaataaaaccggggctgttga

SEQ ID NO: 578664 - DNA, 1575 bp, Homo sapiens
gggctgtgagccctacgtcgttctctttctttctgcatcaaaggcgcgcctctcttcgggttgtttttgttcgccgaccgcgccacgaatattgttgtggtgcgccctcccacccacacacatgtgtgtgtactcccctccttctgttgtctcttctccctcttgtgttgagttccgctgtgtggctttcccttccccttggtggttgatgaacactcactctctttagtggtgcgccgcggctgttgtcgttgtcgtcacacatatcgtccaccactgtgggcgctggcacctttcttcgttgggggggtgctcctctgcagcgttgttgaattgttgttgggtaagcggcttccacccacaccaaattttgtggcggcatacaatcatttgtgtgcgaccgcaccaacaccaagtttggggcgactacttcacccataagaggggggccccccccgtgcgtagtttgtcgcccctcctctgttgtcgccacccccacttttgggtgggcccctctgccaccacgctgcttcgcttggtgggggtaatattcttttggcgcgccgcgtgtgtgctacccccaccgcttgtctattagcttctcttctcgtcagttatggtccctcgcgtcgcgcgtgctcttctggtctgtggttgtagacaacaccctcttttcgcggggtggtgacacccccccctttgggccgccctctccatgtggggttttgtcccgacagagattgttggtttttctcgtcgcccccgcccccaccctctcgcggggtatatatttggccgcgtatatgctgctctctattataggctctcttctagggcgctctgttgtctctagacgctcgcgattgtgtgacatatattagggcgcgcggggagtatgtagtttgagagagatattgtgggtcttttccggcgcgtctgtggagcgcacatcatatctgtgtgtctctccacaagggcgctctcccctctggggccttcttctctttgtggtggcgtctctcctctgggagagagagtttgggcgcctcctctttgtgggccccacacagctctccactctggcaccactgtgggcgtctcacacacctctctttgtgctctctctctgtgtgtgtcaccacccacacagagcaggggagagtttttttcacacacgctaccacgctgtgagagtgtggggcttctgcgcgcctctctgttaaatgtctgagactctgtctctcttctccacaccccgcgagtgtttggggggttttatagctcgtgttgttcttctctcttatatttctcaccgctatcgccctcttttcacgcgtgtatgtacacgcgggtgtttcttcttgtgtccagggcgcccataactccccattctctccctttgaaaacagtatttaataaaccccactttgaatttttctcccccccgagaaatttaatttccggtgaataaaggcgctttatagaacttgcttgaatataaaccgggtctcgttttcacggaccctctccccccggggtacttccggaaagccaataatcccaaattatggccca

SEQ ID NO: 578665 - DNA, 173 bp, Homo sapiens
gactgactctggcatctctgccgaggctgctggaatcgactggggcatcttcccggaatcagattcaaaggatcctggggtgatgggatagactggggagacgatgctgttgctttgcagatcacagtgctggaagcagaaccagtgctcagagtcctccccagtgttcgata

SEQ ID NO: 578666 - DNA, 862 bp, Homo sapiens
gggggcgcggtgtggcggtggggtgggcgtggcggcgagtggtaagagttgggtgggggagggggggatgtgtgtggagcggtgggtgtcggacgcgcggtgggtatgtggtgcgcgggggcgcgggtgtgcgacggcgggttgtggcgcttggggtggcagtggggccgggggggggcggttgttggccgcaggggtgtggggagggggtgggtcagtatgcgccggacgcgggtgtgtggcgccgggttcgcacgggtggtcggggggcggtgtcttttgtgtgggtttcgccgtgggtgtttttgcgggcttgcgtctgtgggtggtgccctcgcgtggtggtggttgaggtggggggagtgacgcggcgccggcgggggcgtgttgtgttggcggggcgtgacggtgtgttgagtggggctcggactggatctgtctggaggagtagaggggatgatggcgggggcgccgcggtctgcgccgtctgtgtgagagggtggctgccgcgccgcgaggagtgagtcgcttgggtcgcccggtctgcaggggccgcgtggaggctcgccgccgtcggagatggtttgtggcgcctcccacgtgccggcgcctgtggggggcggagcgcgcctctgggcggggggcctgaggctttgtgtggggggcgagtggaggggtgtcggtgtatgtgtctatgagggatgcgggaggccgcgtgtgcgaggcggcgcgcgtggcgcgcgttttcgtgtggtttgttggccgcccgcctcgggggcgtgcgctttgggttccttgttcgtccggggtcaacgtttggagtcagaagggaaccccaaagaatattgtaagaaacaagaca

SEQ ID NO: 578667 - DNA, 969 bp, Homo sapiens
gaattgttcaacacatcttcaactcgccaatggctaccagcactccctatggctttgcaaacaattaaagatttagaacgacaggatggggcggtgggaagctactgacaacgaggccaggaaacaaagttccttttgacccgatgcgtgtcagagagcgtgcatgccatggacgacagagttagtggtatacacccagtttaatatacagaagcgcctaaggaactgcctgtgcaccgtatcggtgacactagtgatgggtgaacttccacaatttggatgccaagtattactgtgtacaacgacagctaactccttgccaacatcgtggctggacctgaaccagctggcgcactaatgcttaagccattcccagcttataaaagcccccatggcagctgcaacgtgcacagcatcagcaaacgtatagtcatgcacagacactggactcatgaccagtggcacattctttacacacacggacacaccacgaaactccaatacttggtaacacgtaataccaaaatataacatataatacatgtgataggcaccaacaattcaccacttactgaaaaccaatcttgccaggccagagcccggcgaaccagggaataccaatgcgacctgataacatacccaagcaacatcaggaggcaaggaccgaagagtggacaatgggaatcaagtacagaacgcacaagaaaggtcccaacgaccacagacacgtgggagcaaagaccgggatgaaaaaccgcccacggcaaatcccaacctacacacaagtaccaaaaaaaccaacaaacctgggaagcagctcgggcgggccgaaagatcgcccgagaaccagcgccacagcaaaacctagccgagagcggacgagacgggcacataaaacacaaaggcacaggagcaaccagagcgagcgccggaccagatgcaacgccgaaaaccgaagcacgggacacc

SEQ ID NO: 578668 - DNA, 855 bp, Homo sapiens
cgctcacacctcatatcctccctactatgcctagaaggaataatactatcgctgttcattatagctactctcataaccctcaacacccactccctcttagccaatatgtgcctatgccatactagtcttgccgcctgcgaagcagcggtgggcctagccctactagtctcaatctccaacacatatggcctagactacgtacataacctaaacctactccaatgctaaaactaatcgtcccaacaattatattactaccactgacatgactttccaaaaaacacataattgaatcaacacaaccacccacagcctaattattagcatcatccctctgctattttttaaccaaatcaaacaaaaaactaatttaagtggtggccaaacctttgcctcgcgaccgctataaaaacccctctctcataatactaatatgtgactcctacccctcacaatcatggcaagccaacgccattatccagtgaaacatatcaacgaaaaaaactctactctgatataatcctccctacaaatctccttaatataacattccacagccccagaaactaactcatatattaagtatctgctccgaaaacaagagtttatccccacctggctttcattcacccgatgaggcaccaggcagaacgctgaacgcgggccatacttcctatactaacccctagtagggtccttccctatatatcggcaatctcactcaacacctagcgccctaaactctggcactatctacccgccaacaacttaatctgagcaacactgcttgacggcaacaccggcttgtagagaatcctacgggccgatgaccagacctgttagccccacgcacta

SEQ ID NO: 578669 - DNA, 175 bp, Homo sapiens
actgtcaggtctattcctactgtgcccccccatctactagtgtctactactagtatatccaaatttcctacttagaagaggccactagtaggtagctcacacctgtaatcccagcaccttgggaaggctagaggctggtggatagttttaagtccaggagtcaagaccagcctgg

SEQ ID NO: 578670 - DNA, 235 bp, Homo sapiens
gtatagtgcacctcagtatgtggagaactttggtcttcttgacttgtttcagcttcttcccccttcttgggcgcctcatggagtttgtcctccttctgccttaccggatctggaggctactgatagggggagactaggcttcaaccagcagcttgctttcagcgacgtggcgcgaaagttctaatgaagttttgtacacagttttcaggatgagaagcgtcagctggcttaccag

SEQ ID NO: 578671 - DNA, 270 bp, Homo sapiens
gaagagtaaaggggactctgtcttacaggcagagtacaagctcaaccacagtggggtagaacaccaagtgtgctcttgaggtccctgtttctaggccttggctcctggatggtatttctggacgcactctgggccagaggggagcccgttgccctgaagggagatacccaggcctatcagcattgaccacaagctgaccaaagagcccttggaccttgagtgaatatcagcaacagccttgcagtacttgctgcaggcctggggcacctc

SEQ ID NO: 578672 - DNA, 814 bp, Homo sapiens
atccttgtggccgtctggctgcacagctgacaacggacgtcgtgagaacattgagtccagctgctcatgctagtagagtaaattaactgcaggctcaatcctctacagatctctttgaacgttatgtacaagtaataaagaagcagcagatgataaaagtgtagcataagcagcacaggagttcttccaacgagttggaactggggcgattgtgcaagcacggttcactgtgagcaaaaaatatcgggacgttgagcacttgacacgagtacactacgggtatacaaagcgtctgggagtatataaatgatgaatattcatggagaatcatccaaatcgtgaaaaatctcaagaggtcttacacagttagctggacgagtaacaggactcctactgagaacaataaaaggaacggctgtagtagatctctctgggaatggcgaccctcctcaattatgtactgtaatgcgaagtagatagggacttctctctatgcaaccagagatcttgcagctgcgtatatgatcggaatggacaagtattaatttgatacaatgatatatgtgacagataaaggagaaaaaaagcatttcagcaagtattccaaaattgctgcagatcatgggatatgactgggagcaaaggtgccacacgatgccttggaagtagtaccaggcatgagaatccagaagagagtgcctcccgggacgggttaacatgccatccatagttgtaaaattgttctaacaaaagaaaactcaacccaaatgacaggtcgctaacaaaaagacaggtcaatacagccggatcgtcc

SEQ ID NO: 578673 - DNA, 451 bp, Homo sapiens
  misc_feature (98)..(98): n is a, c, g, or t
gttacctcctcattatggaatcagagaagcatctcaaggattccatgataaggacatgtccaggttggagttgcagacatcagataaagatgcatatngcatatttagcgtctctagattctacaggaaagcctggttatttcagtgacacgtgaaactggatcaaggggaacatttgattatcgttggacggagtgattatgattgttttggcgatcgatcagagacctgtgctttgcgcagatttgaacggagtgtacctagtccttgctgtgacaaagcccgtcgaagatgatatggtcaaaaccacttccaccaagtgaacgcttggagcaagaactgtattctggaggaaacacggggattaactttgagaaatatgatgatataccagtagaggcaaccggcagtaactgtcctccacatattgagaatattagcgatattgaca

SEQ ID NO: 578674 - DNA, 210 bp, Homo sapiens
  misc_feature (112)..(112): n is a, c, g, or t
cacgctggcggttccgcatgtgtctgcgccctggtgccatgggccagagtcccaaggaacgaagagaggcaaaggctagaggctacctggacctggggccacgtgaccctanggtgcgcctcttgggacgcatcctcaccgtcatcctcccagggctcttgtagaccacgcagcacacttcttaggtattcctggtaaacgattatgcac

SEQ ID NO: 578675 - DNA, 250 bp, Homo sapiens
cctccataaagaaccgcctttttcggaactgaacttaacttttttgggcctggagcccctcgacacaacggaggtccctcctcaccccctcctgggccaaaacaggggccgcaggctttggggacccggacccccccttttgggtctcccctttccctccccagcccggcccctggaggggcctttggttcaaaccttcgcgtggcattttcccattatttaaaaaaaacaaaaacaactttttggagga

SEQ ID NO: 578676 - DNA, 329 bp, Homo sapiens
  misc_feature (43)..(43): n is a, c, g, or t
  misc_feature (60)..(60): n is a, c, g, or t
  misc_feature (91)..(91): n is a, c, g, or t
gcaaaagcaatttgacacttcataacgtctagaaatatttttncaaatgtgatgtatgantaggaagtagcatacaaaaacaaattactgngctatccctcccccaagaatacatattctctcttcacaccacgtggctgctgctggggcatgggggaggggtggcattggcagttcaagactgtcctaccctcttcagtgactcttttagcaatatgaagttaaaaaccaggtactgttaccactcacctgatgtttaattctcatgaagatgcttttttgtgtagatagttgtcaaatgtggatgttcctgcagggaggaccaattg

SEQ ID NO: 578677 - DNA, 1585 bp, Homo sapiens
ggagagaactagtctcggagttttttggtttttttttgggcttcaaaaagtctttatttccattgggtccaggggctggttaaggatagtttaaaaaagcgtgccatagtgggcgtggagggagaggctttaggcagaagcccttatatacttgtgcagggggccctttcagaaagttcgcgtgggctcagaaaggctctatagtcgggcgtggagagagggtgaggcctttttcgagaaagaagatatacctcgccacagcaccaagccttccgggggccaccacaggcctgtgtggggagggtggggctcaggggtggctcaccacattcttctttgagagataacgctctcacttctcctctcattcttaagagaagtgtgggtgtcttcacaggagagactgtcaccagagagagacttggcgggtgccccgtggcgtggcgcacagaaccccagggggcattggaaagactccaaatagggggcctgtggtctcacagcgttcttctctcccaggggggccaaagtggcagagcgcatctctacattggggcgcgtcctgggggcgttttaacacccccaaatctcattctttacacgcctgggggctactcctagagagtgtgtccctgtgagaacagaagacgcgtgcgagggccttgcacaactgctggtgtctctcggcgatccttctcaggagacagccacccgccgtgccgataaggcgcccctctccgcagagaccatttaccctcacgtgcgggccacaacgatcccggggcggcacaccacaagccggggggcacccaaccgccccttatcacgagagaagccccaacaccttcaacacggccggggcgccgaaaaataaaaagagccccagaaagaacaagcgcaggcggtcgaccacagcaaagggccacgaacaggcgtttcccccaaactgggcgccacccaaagaccgagcagcaacgcgcaacgaccctcccccagccccccgtcgcgaaaacaaacgtcgggaacgcacaactccgggctgcgaccccctcggggccgccgctgggcgcccaccaccgccacacgatcacacccccacaaccaagcgagtagccgacagaagcgtccccacacaacacgccacgccaagtatcccccccaaacaaagtggcgccccccgcggacgattggcacaccgcgcacaagcagcaaccaccaggcagcacgggcgcaaccgcgacgccaaaaaagaccccgcggctagggccccccgaccaacacactggcgggaccacaagcaacacacccaccgcgaacaaaacacggaggagcccgaccacacaacaagccagaagaatgcagcaccaaggcacgccagacctccgccgcgcagcgccacacgagaactccaagcaagcgagccacaccaccgtcccccccaacgcacccaacaggagagcctacacagtcctccgcaggagcagtacacagaccgcaaaccacggagcggggcagaacgacgaaagtacacacacaaacgcaaacaccactaccaatgatagccgcaccgcgaacacacaacaac

SEQ ID NO: 578678 - DNA, 139 bp, Homo sapiens
gtaggtcgattcatacaggatcccgagcagaggcccacgtcaaggatatggacggtggaatctggagaccgacatcttaataagcacagtccgtgcttgagtgtggtggctcatgcctgtaacgctagtctcagccctt

SEQ ID NO: 578679 - DNA, 406 bp, Homo sapiens
  misc_feature (154)..(154): n is a, c, g, or t
  misc_feature (160)..(160): n is a, c, g, or t
  misc_feature (185)..(186): n is a, c, g, or t
  misc_feature (214)..(214): n is a, c, g, or t
  misc_feature (216)..(216): n is a, c, g, or t
  misc_feature (236)..(236): n is a, c, g, or t
  misc_feature (316)..(316): n is a, c, g, or t
  misc_feature (344)..(344): n is a, c, g, or t
  misc_feature (357)..(357): n is a, c, g, or t
  misc_feature (360)..(360): n is a, c, g, or t
  misc_feature (362)..(362): n is a, c, g, or t
tgaatgggggacctgctttgagcctgcccaggggccaggcctgctccaggttaaactggacggaaggcccaggtttcagtttttttcaaccaggagaggccgctgcctagagcccctccccccctttttctggatgggtgaggcaagccagganagcaancagtgttgtcctcccgggaggaggnntgagcgactgggaaaactcggctttacntntcccccagaacggcttttanaaaccccccagctggagagtcctgggtgagccttgggagtttcagctttttggcggggggcccaggtgccatgcgatcancgaagcctgcgagttggcaggactttgnggtttcctgcagnccntnccatgagattgaaggggcggggaaataaaaaaaaatccccctta

SEQ ID NO: 578680 - DNA, 677 bp, Homo sapiens
ccgacgtggccattttcgatgccggtgatcagtcgagcgattctgtcagatcaggcagatgctgaggactctcttggctcttccacagattgctcagaggccgataagcactgcttcccgcaggcatcctacaagtaaagatccgcagaagcaatactgttccaggcaggactgatgaacttgcactgaatctaaagggtgggggagctgaggccctcctgtatagagccaccatgatctcttacagcatgagtggaacagcatatgccatatatgagctgggtggggcttcatttcccacgaagcgcgagtgacttcggacatcccagcactcgcttgggtcacttacattcagctctctatggaccagtgatcagataaccaaccgcgctctcctttgccgatcaatatttattggctcgtagtaactgccaccactaaagcactctctgccatgactaatctggatcctcaaagggaaaccccgccagctcgccttaggccaagctgctctactttcctgcaaggttatgcatccgaccgaagaccgagctcatttgccatttcgtcctatggggcggctattacaattgactggcctttattcacatcgtgatgctctgcgccaagtacggattagtcctggacgatcgccatcccatcgtcctgctacagat

SEQ ID NO: 578681 - DNA, 1642 bp, Homo sapiens
  misc_feature (292)..(292): n is a, c, g, or t
  misc_feature (586)..(586): n is a, c, g, or t
  misc_feature (647)..(647): n is a, c, g, or t
  misc_feature (716)..(716): n is a, c, g, or t
  misc_feature (784)..(784): n is a, c, g, or t
tgggttaattctggccacttttaatgtgggtgaaagagtgatcttatctccttaatgtgacattttatactgtggtttaaaaaagtttctccttagcccatgttaagcccgtgctacgtgattttagacaaggttattagtggctcatttactttgtgtaaccccttattccttctccaagccactttcgtggtatacttctcgaggctgcgtttttatcactgtgatctccaccaaaccacctataaaagagagctctatagtgctatacgagctctctctatagctatanagatgtggaaaaacaccacaatttcaattccttctctctccctctcgtgaagcgtgcttgtgggatctcatctcaatttatatgtgtgacattctctctatataaactatacatttttctctataacaaggttttgggagatgtgtgggcgacccttttcacgagggcgtcctcttattgtgcgaggagggggcacaagaggacatgtgtgcccaaggcatcttctctctggtggggagaaacactgttgtgtgtttttttaaaaatatcttcccaaagagacactgtggtganacacccaaatttatctccccctgtgagccacagtgttgaacaccgtgttgtttgtgcgcgnttttatataactccgccttttctctctgctccaagtgtgtgtcctctccctttgtcgcaccaaatcttnttatagtatcccccccatggtggtggtaagcgtcttctatactacacaacccatttttctgtggggcnatgtttcttttaacaaagaaaagaggcccatttttttcttatccaccccgcaatatttctatcaattttgtctttatataaacacagccgtctttctccaacagagaaaaaccgtgggctcgttgacaccaggtttaactgtgggggtgcgcacaagttgtttagcggacggttctatttaacaaaagacgctcttgtgtgaaaacacagatgttgtggcgcacaaatttgttttgtggacacaggcggcacaataacacatgaaggggagtagaatcctgtagtggggggcgcgatgtataaaagaatcacacctttatataaagtggggaagaagagatcattgggagtacaattaattaagaggggaccaacaaagttgataatatttataaacacggaggagtattattgtgtgtaaataattccatatataagacgacgaacgaaaagccagtctttctaaagatggttgtgagtcacccccataagtgtgttgtaagagggggaggataacaacattatcccaccggggggagaggaaatattattctcttccacctatggtggtgaacacccgcgggtgttcaataattaaagaggtgggagaacaacaatcagaagcggaagtatgtaatctctttaaaacaagaaggggagggtgtgtcagaaaaaacatctgtctttgttgaaagaagatattcatcttgcaagctaagaaaacatggatgcgatggcaggaaaaaaaaccaagtagattgatgatgatgggttgaagtgaaaaataaaaagacgtttccaccaggagaattgttttatcaggcgggtacatattttgtgattattagcaacaagaaa

SEQ ID NO: 578682 - DNA, 292 bp, Homo sapiens
ttttcccccaaaccccccccccccccttttttccgggggggggggggggggtccaaaccggttgttttccttggccccttttggtttggggggaaaagcggggttttttttcccccgccctggttaccccccccaagggaagggggagttttttggggcccccctgggtttttttttttgggggggggcggttttaggtttttggttttttaacccgggcctttttttggggaccccctgcccccaaattttgcccccgattttttggccccctttaaaaggttttttggga

SEQ ID NO: 578683 - DNA, 1185 bp, Homo sapiens
  misc_feature (728)..(728): n is a, c, g, or t
  misc_feature (732)..(732): n is a, c, g, or t
  misc_feature (736)..(736): n is a, c, g, or t
  misc_feature (744)..(745): n is a, c, g, or t
  misc_feature (753)..(753): n is a, c, g, or t
  misc_feature (781)..(781): n is a, c, g, or t
  misc_feature (794)..(794): n is a, c, g, or t
  misc_feature (799)..(799): n is a, c, g, or t
  misc_feature (810)..(810): n is a, c, g, or t
  misc_feature (1069)..(1069): n is a, c, g, or t
  misc_feature (1071)..(1071): n is a, c, g, or t
  misc_feature (1076)..(1076): n is a, c, g, or t
ctgcctagcggactctcttgtttcttgtgtaacgcttgtgcttttcgtgcttctcttgcgtcctgttgtcttccattgggtgtttcctctttcattgtgttcctttctctcctttttctattgcttggtttgtctacggttcctttgggaagtttttgcctgctttttccaccgccccttgggggctttctcgctttatcgcttccttgtttaacgtatgggttgtcctactcgttctccggtgtgttttcgttgccctgtcattcgctttcctgcgctctggcgtttgagatggtcgcttcccttctcctgctggtttccaacttcccgggcatcacttggtcttgcggtttaccaactgggcttcctgtctgaagttctcccggatgctctggttttctcttgtccgtacttcgtgctcacgttctggctgtcatcggaattccacacgcactcgatcacgtactgcggtaaagagtctaattcttgccgatgggccatgttcgtcgccacgtccttgcggtgtcgaagatctggggtatacaaagccacgttttaattctttaagcttcacgtacagatactagtttcaggtcagggtctgaaggaatggtattggcccaacatcagacctgttttccaaggtgaccaagtcctggctactatccctagacctgtggttacagtgcagacaggccatgtgagccttccgctgcctagtcaccagngcgncctnccccctgnngactagtnccgtagggagtacctgctgccccagctnactgtggcccccnccgtnatccatccatntccagggagcaaaacagagacgcaggaatggaaagcggagttcctaacagtatgaaagttcccccatcagttcccccagtacctccaagcaagtagctttccacattggtcacagaaatcagaggagagatggtgttgggagccctttggagaacgccagttctcccagggccccctgcatctatcgagtttgcaatgtcacaacctctcttgatcttgtgctcagcatgattctttaatagaagttttattttttcgngnactcnagcctgggggacaagagtgaatctgtgtctcacccaaataaaataaagaaaaagaaagatgcttaacaaaggttaccataagccacaaattcacgaccacttatccttc

SEQ ID NO: 578684 - DNA, 808 bp, Homo sapiens
  misc_feature (25)..(25): n is a, c, g, or t
  misc_feature (72)..(72): n is a, c, g, or t
  misc_feature (74)..(74): n is a, c, g, or t
  misc_feature (92)..(92): n is a, c, g, or t
  misc_feature (98)..(98): n is a, c, g, or t
  misc_feature (140)..(140): n is a, c, g, or t
  misc_feature (146)..(146): n is a, c, g, or t
  misc_feature (160)..(160): n is a, c, g, or t
  misc_feature (173)..(173): n is a, c, g, or t
  misc_feature (179)..(180): n is a, c, g, or t
  misc_feature (183)..(183): n is a, c, g, or t
  misc_feature (189)..(189): n is a, c, g, or t
  misc_feature (196)..(196): n is a, c, g, or t
  misc_feature (222)..(222): n is a, c, g, or t
  misc_feature (224)..(224): n is a, c, g, or t
  misc_feature (229)..(229): n is a, c, g, or t
  misc_feature (234)..(235): n is a, c, g, or t
  misc_feature (243)..(244): n is a, c, g, or t
  misc_feature (252)..(253): n is a, c, g, or t
  misc_feature (257)..(257): n is a, c, g, or t
  misc_feature (260)..(260): n is a, c, g, or t
  misc_feature (264)..(265): n is a, c, g, or t
  misc_feature (269)..(269): n is a, c, g, or t
  misc_feature (288)..(289): n is a, c, g, or t
  misc_feature (304)..(304): n is a, c, g, or t
  misc_feature (318)..(318): n is a, c, g, or t
  misc_feature (327)..(327): n is a, c, g, or t
  misc_feature (329)..(329): n is a, c, g, or t
  misc_feature (338)..(338): n is a, c, g, or t
  misc_feature (340)..(340): n is a, c, g, or t
  misc_feature (345)..(345): n is a, c, g, or t
  misc_feature (351)..(351): n is a, c, g, or t
  misc_feature (355)..(355): n is a, c, g, or t
  misc_feature (359)..(359): n is a, c, g, or t
  misc_feature (367)..(368): n is a, c, g, or t
  misc_feature (376)..(376): n is a, c, g, or t
  misc_feature (404)..(404): n is a, c, g, or t
  misc_feature (417)..(417): n is a, c, g, or t
  misc_feature (422)..(422): n is a, c, g, or t
  misc_feature (433)..(433): n is a, c, g, or t
  misc_feature (692)..(692): n is a, c, g, or t
  misc_feature (694)..(694): n is a, c, g, or t
  misc_feature (699)..(699): n is a, c, g, or t
ttgccaactcctggaacactaactnggttgacaaatggcttcttttaaaatactcagagaacatgatcactntngaatcgaatcagaagtgntggctngaattccacgcaccgatcagtactgggaaaagatctaatctnccgtgngcctgtctttccantcctgtgggcganatctgnntanaaattnattttantctttaatttcacttaatatacaatntncatanatttnnttaattannttatgttnnaaanatnatanntttntcccaattataccaatccnntcaacaacccatccnttttaacatatcanacattccantntatccaccncntccancacagngcgncctnccccctgnngactagtnccgtagggagtacctgctgccccagctnactgtggcccccnccgtnatccatccatntccagggagcaaaacagagacgcaggaatggaaagcggagttcctaacagtatgaaagttcccccatcagttcccccagtacctccaagcaagtagctttccacattggtcacagaaatcagaggagagatggtgttgggagccctttggagaacgccagttctcccagggccccctgcatctatcgagtttgcaatgtcacaacctctcttgatcttgtgctcagcatgattctttaatagaagttttattttttcgngnactcnagcctgggggacaagagtgaatctgtgtctcacccaaataaaataaagaaaaagaaagatgcttaacaaaggttaccataagccacaaattcacgaccacttatccttc

SEQ ID NO: 578685 - DNA, 820 bp, Homo sapiens
  misc_feature (460)..(460): n is a, c, g, or t
  misc_feature (547)..(547): n is a, c, g, or t
tggcagtacgcagctgtttaaacgcgcccactgaggggcccgagaagaaaccagacaggtgttgtgtcaatataaagacggcattgtgcaagcccaaatggcgctgtcgcttgtgagatatagcccacagtggaagcagagcggtcatccactgttcggcgccaaattagtggcggctgtaccgttttccgcaaccagcttgtgggccgcggaatagcgctcccctgctcaggataaaagaaggggggcaccccctgggggtgatacccttgtgttgttcccccgctcgagaatttatatcgagtgaggttcccgcgtatggggaaacctgcgctcgttagaagaggactataatgaccacctgcgtctttcagcacagccgaataaattctagggccattgtctaagacggcgggttaacacccgcctcctgaatacagggtactatcggtgagtctcncgcgggggcaataatagacatgagataacaatcttgttgcccctgcggggtggcaacccagcacactctccgggaatttctcccgtngtagcgagaatactcctcgcgatcgccaatgcgcgtgtcttcgctgaagatgaacaccgagtgatcagtcctttgagtatggccgcgacctcgtggatcttcaagaagcacagtgggtaatctgcaccgccccttcttgaaaagtgctggcaatgactggcttcgctctctctagaaacagccgcctcatctccttgggcagatagcagcattgattggggccaaccgtgtgccccctccgctgttccaaaaaaaaatccctttgaaacatga

SEQ ID NO: 578686 - DNA, 1638 bp, Homo sapiens
tggtaaagcgctgatccggtatattgggcaggaaaacgaaaacaattccagcagcccaggagggacagggtggactataattcctccttccatcgatcgatctccgagccccagaccccaccgcttggcccttcatgggacattcttcctctttcacggcggtccgcggggcggcacacccccgcggataggcgaagaagcgcagcagaagaacagctcgagtgtgtgctttcgtgggaaactccgagggcggcaccaagtgacaggcacgggaagtgtttcaccacacgggcgtgggcggaacctctgaatatatgggcgccgtggcgggatatacagacactgccgaagagcgttgtgtgtgtgcacgtggcacctgtggtccccaagcccacagatttgtgaaaagaactcgtgggtcttgcagagcgcgttcttctctctaaacacatatctcgtttattaatcttattcacaggggcctcgagggaaagtggttttataccttccaagcatcgttctcacattcatgtgcactcctcttcaatatcacaagaaccatcacaccacaaagtgcgcgggaaaaccaagaacgcgactccgccagaaaccgagggggcgcgattgagacactttttgcgagaacacagagtaagcgcaccccatggtggggagactcccgtcttccctcaacctcccaaacgtccgtttcaacaccgagctttccctcgcgggggggggcagagaccccttatgacgcgatgaaattcactgggaggaccaccagggcgagtctaccaatcttgttttggaacccccctcttccacgaaatcaccatcctaccccaggtgttttgtcgttcatccagccggtgaacgatgcccccattaaccatccagccgcgagaacattcaagggacatacacagcagcatacacatgaggagacacagcaagcaacacacaacaacgaccataccctaccagaaaaagaggagtcactccccaccagcgggagcaggggcaccaccaaataacaagcgcgtccacttacggtgagacacacacaccaaccccacaaagaggcacatcccgcggagcgagcacaccatcgcggcgcaattactatcacgggacaccaccaggacaaatatccctctcgaccaccccgggaggcggcccacagatgctggcctgtgagagggggcactctcactgacagacaccacacctcaaccaaaccaggggcgaccctctgggacagcaacctccagacaaacgtcgggcggccaccacctccacaacagtgaggcacacgcggcagccacaccgtgccacaacgcgcttgccagcccctacacacaaacagggatgcacgccacctctcttcaaacaccactccgccctgggagcgaaaacccgccccacaactagtgtggcaacacgacgtggaccactgcaaaaacacacctcgtggtcaaggtgctcaccacgacaccaccccctcgcccgtgtcgcggccgcccgcctgtcgccacccccccctacctcacagcctgacaagcagccccaacaacatccacacagcggacccacgcagcaccactagcacgacctactaacgacgtgacactcagt

SEQ ID NO: 578687 - DNA, 92 bp, Homo sapiens
  misc_feature (40)..(40): n is a, c, g, or t
cgtgcatcgaggataagatggccatcgatgacaagtacanccggaggaggaataccgaggcttcacacaggacttcaaggagaaggacggct

SEQ ID NO: 578688 - DNA, 145 bp, Homo sapiens
gggtctagaacactaagaagtacttgcaacgtgatttttcatgcaaataagttgcgaggtagccttttcccttcgagtagaatatgtactattccagagagagggggtccagactattataggcatagtataatgaacctcactg

SEQ ID NO: 578689 - DNA, 214 bp, Homo sapiens
cgttaaggcaccacttgtgatggagttcctcagggatcctgaggagatgctgattcaatgagcgggaggcatctctcccttcccgtaacttctcccttaactgggtcagctcccgttcctgagagtgaaccaggactttatattgcctgagctcctcagcttgcttgagctgctctgcaagcttctcctccttgaactgtcgctcattcctcag

SEQ ID NO: 578690 - DNA, 848 bp, Homo sapiens
ggttcttcgccgagagtcgtcggggtttcctgcttcaacagtgcttggagcggaacccggcgtctcgttcctccaccccggccgggcgtccatagtcaggccctccgtcacctcttcagccgcagccctcggactgccgccaaggccccgcgccggccagcatccaggcgccgcgcgaggcaacgcgccgacgtcggcgcctcatcacttagtcgccagcatgacgaccagtcgtccaaccatcggaggtgcggccagaactaccatcgaggactcagaggccgccgatcaaccgccagatacaacctggagctctaacgcctcctacgtttacctgtccatgtcttactacttatgaccgcgactgatgtggctttgaagaacttgtgccaaagtactttcttcagcaatctcatgaggagagggaagcatgctgagaacacctgatgacagctgtcagagaccaacgaggtggccgaatcttccttcaggatatcaccgaaatccagactgtgatgactgggacagtcgggctgaatgcaatggagtgtgcagttacagtttggaaaaacatgtgagatcagtcactactggaactgcacaaactggccactgacaaaagatgacccccattggtgtgacttcattgcagacacattagctgaatgagcaggtgacacgccatcaaagaatgggtgagcacgttgaccaaactttgcgcaagatgggagcgcccgaatctggctttggcggaatcatctctttgacaaggcacagcctgggagacagtgataatgaaagctaagcctcgggctaatttcccccatagccgtgggtgaatttcctgg

SEQ ID NO: 578691 - DNA, 296 bp, Homo sapiens
gctatccactaatgcctatctgcagttagtcttttaatgcgccagtcatctcttcatgaagcctgacaaaccttacacaaattgcatatcgcctttggctttaaagttcgattttctccactttaaaggatttttaaagtataggtcacttttcttctgatagttggccagctatatgtatccatgtgagacaatgagtcaacccagaaagcagattgggtacttacatggtaagtttaacactaagcattttctgttgattccccaccccctgcccataagtaaatattcatagc

SEQ ID NO: 578692 - DNA, 201 bp, Homo sapiens
ggggtcaactcaaactgtgatgatccactgaagaagtagaaaaatccaaatgccttgtaatacagcatcaaacttaggctcaactcctggaaagtcatcagctattactctagggaagcctttgctccatggactggctattttcatcaaatctccagtacttgtccgctgcaaagaagtatgttttcttcttttccttgt

SEQ ID NO: 578693 - DNA, 131 bp, Homo sapiens
acgctagtcaaatgcaggcgattctgaggacgccatcccttaggagagtggcgatgagtgacgaagaggagcctatacaagcgcatctcgatctgctcctcttacaaacgaattggctgtaaggaagagtt

SEQ ID NO: 578694 - DNA, 123 bp, Homo sapiens
ggttccaacttcatttccacggtcactgccatctcgaccagttcggacctgcagtcgctggtggcagccccccctcgtcttctccggtgggcccattcgagaaccagaggcccctcacccttt

SEQ ID NO: 578695 - DNA, 451 bp, Homo sapiens
tagtacgtgaaacacatggatcaatagccaagagagggccattatgcagctctaatcactactatatacacgacaggtgtcaaagcccaaagaaaaggggctgcacaataataccagaagatggaggactgccctttgttatgtgttactacagcaaccagcccacaaaataagaagaaccttctctgtcttatgccaaggttctagtagtgtactgtgacagtgaatagtataagctacaaagtgtgggacgtttcacagggtgagaataggtcaagtagtgagaccaaatgcctatatcgattcaagagagtgggagtccaaaaagtaccctacaggctgggggcccaacccttaccacagctccctctggctcacacacagaaataaatagaggattcaagaacagaccccaactttgaaacagctgcagaaaattcatcctgattaa

SEQ ID NO: 578696 - DNA, 587 bp, Homo sapiens
  misc_feature (13)..(13): n is a, c, g, or t
  misc_feature (31)..(31): n is a, c, g, or t
  misc_feature (40)..(40): n is a, c, g, or t
  misc_feature (58)..(59): n is a, c, g, or t
  misc_feature (61)..(61): n is a, c, g, or t
  misc_feature (79)..(79): n is a, c, g, or t
  misc_feature (84)..(86): n is a, c, g, or t
  misc_feature (88)..(90): n is a, c, g, or t
  misc_feature (93)..(93): n is a, c, g, or t
  misc_feature (114)..(114): n is a, c, g, or t
  misc_feature (180)..(180): n is a, c, g, or t
  misc_feature (207)..(207): n is a, c, g, or t
  misc_feature (235)..(235): n is a, c, g, or t
  misc_feature (262)..(262): n is a, c, g, or t
  misc_feature (269)..(269): n is a, c, g, or t
  misc_feature (272)..(273): n is a, c, g, or t
  misc_feature (275)..(275): n is a, c, g, or t
  misc_feature (285)..(285): n is a, c, g, or t
  misc_feature (310)..(310): n is a, c, g, or t
  misc_feature (340)..(340): n is a, c, g, or t
  misc_feature (347)..(347): n is a, c, g, or t
  misc_feature (349)..(350): n is a, c, g, or t
  misc_feature (358)..(358): n is a, c, g, or t
  misc_feature (364)..(364): n is a, c, g, or t
  misc_feature (404)..(404): n is a, c, g, or t
  misc_feature (413)..(413): n is a, c, g, or t
  misc_feature (439)..(439): n is a, c, g, or t
  misc_feature (450)..(450): n is a, c, g, or t
  misc_feature (494)..(494): n is a, c, g, or t
  misc_feature (523)..(523): n is a, c, g, or t
  misc_feature (544)..(544): n is a, c, g, or t
tattatttaatanattttatattatttattngattttatnttatatttttttattttnntngtttattttataggtttngaaannntnnnatntttgtagaaaggataattttnataatataataaaatagattgttttgtttttgtttttgtttatgatttgatggtttatttatatangaggaggtggagggtattagatgatanggagttagttttatattggttttaaatnatagattggagggatgggggaggatanagatttnganntntttttttatntttttttttttagattttgtatttnagagaggaaatgaaaaattttaatttattngtataanannttatgaantttatnattttagtttttggagattggtttattttgagattatatnattaaatanattattggtattaattatggggtttnatataaatttnttttttttttatttatgatggagttgtgattttgtggttaggtnatttaaattttagtttttaaattggatanagtttattttttttattaagntgattattttttttttttattaggaaattttttatgtgtgttg

SEQ ID NO: 578697 - DNA, 217 bp, Homo sapiens
gggctggtctcaaactcatggcctcaaacattcctcccacgttgccctccgaaggtcctgggattataggtgtaagccaccacacccatcactttgagtataattttaaaaaatacatattgggttttgcatgaaaggagagaaggttagcactccacttgacaaggatggaagcactttgggcctgacaacacacatacaaggcattgccacctac

SEQ ID NO: 578698 - DNA, 354 bp, Homo sapiens
tgcaatgactttgatggattccaggggtttatgctaagttaaaaaagccagtcccaaaagttcacaaactgtgtaaatccacttatatggtagtctcaaaatgacaaatatagaaatggagagcatattggtgttcaccagggttcagaaattgggggaggcaggtggaggtgacagtagctataaaaggcaacacaagagtattgtggtggtggaactgttctgttatagtgactataaatttcaatatcctgattgtgatattgtactatagttttataacatgtatcatttcttgcaactgcatgtaaatctataataatctcagaattaaacatttaattaaaaactact

SEQ ID NO: 578699 - DNA, 113 bp, Homo sapiens
gtcaatggatattttatagcaagagaatatttataaggtgatattcaacctgcttcctatcaaatgcaaataatctcaattagaaattaaaatggagacattaccactgatac

SEQ ID NO: 578700 - DNA, 523 bp, Homo sapiens
caacgatggtcctacagctggtcgtcgctggaacattccagtgatgagatgcagctcatgaaggtctgagtgatgttcttcaggggaagcgatactcgtgagtaccacagggaccagccgtccttatcaaagtgctcccagaaatatggcagtgccacagagagtgtgtcctcgattggagtacttgcgctgaaattcatccaacacaaaggttactctagggcgaggtgagctgaaggggtcctgggggctctcggctctagctagccagggccggctcgcattcatccatctcctcctcaggagcaggggcagccgcctttttctcctccttccgctgcagctggggcttctgcttctcttccctgaggacccttctcgttccgaggtgtgtcctttttaggttgggtctctgcaaactttttagcatcaaactgggccatcttctcacacagtttcacttcccccaagacagcccggaactggggctggttaatgcagctgaggaccatcgttggggtac

SEQ ID NO: 578701 - DNA, 395 bp, Homo sapiens
  misc_feature (9)..(9): n is a, c, g, or t
  misc_feature (14)..(14): n is a, c, g, or t
  misc_feature (157)..(157): n is a, c, g, or t
  misc_feature (374)..(374): n is a, c, g, or t
gatcctttnacccnagcctcccaagtagcctagaacgataggtgcaaaccatcatgccccagctaatttttaaatttcctttggaaagacacggtctctttatgttttcccaggatggtctcaagctacttggctcaaatggtcttcctacgtcaanactttgggaggctgagggaggaggattgcatgagtccaggagttcaagactggcctgggaaacatggcaagatgttgtctctacaaaaaaaaattaaaaattagccagggatggtgacatgtgcctgtagtcgtagctacttgggaggctgagatggaaggaccacttgagcccaggaggttgagactgcagtgagctgtgatcatgccactgcacntccagcctgggtgacagagca

SEQ ID NO: 578702 - DNA, 187 bp, Homo sapiens
gcctccgccgctgcacactgcagcctctgctgaaccccgtgccgcgccgccgccttcgccagcccggaccggaccggcccgccttcccttcctccgctccacgccggcctccggccccgcaacctcctcctcggcgaagtctccctggccgccccatgtcggccgcccccgcctacagcgaagacaa

SEQ ID NO: 578703 - DNA, 729 bp, Homo sapiens
tctcattaggcagagtgacagagcagtggccagggctggggatgtcctgccttcacacttggtctctgccagtcctcagggatattctccgcttgagagtactatgtgatgcttactgtgggttaacgatacagtgacgaggcactcctgccacggaactgtaagatggtgggtgaagcatggttagtccacccttaagtcatctacttttcctgggtgtagacacagtgagtcggggcggagagttttccacgtgcttgagtgccaggcagcaatgggcggaacacgggtgtcatggatgtggaagtcctattcttcttaccatcctgacattggagcttcttcatgccaactatctctgacacactcccctgaccaacctgatctcacatttatcactatactgacgtctctcgggactatttctctcggtgactgcgtcctttgcgaagctgatagtaatacagtctacatcacggtcacacctggcactggccgctgggaggaacgtgacaaccaaagcctcggcgattactaccgacgtgcccatactcagagcagcatacagaaaatcctcgttctgtaaccagttctacccaactcgacttcccgcaccatgctggacgccagcccctcgtggatcgcgctcatacttcgaattcgccttcacccgcccttagggcacgtccaaacttgtacttccttagctccccttgatatgtacaacgt

SEQ ID NO: 578704 - DNA, 221 bp, Homo sapiens
aatgacaaagaaaagaagggaacaatggtcgtgccaaaaagggccgcggcacgtgcagccttattcgctgcactactgttcccaatgcgtgcccaaggacaaggccattaagaatttcgtcattcgaacatagtggaggcgcagcagtagggacatttcttaagcagcgtcttcgatgcctatgtgcttccaagctgtatgtaagctacatactgtgtgag

SEQ ID NO: 578705 - DNA, 518 bp, Homo sapiens
  misc_feature (51)..(51): n is a, c, g, or t
  misc_feature (61)..(61): n is a, c, g, or t
  misc_feature (63)..(63): n is a, c, g, or t
  misc_feature (69)..(69): n is a, c, g, or t
  misc_feature (76)..(76): n is a, c, g, or t
  misc_feature (78)..(78): n is a, c, g, or t
  misc_feature (95)..(95): n is a, c, g, or t
  misc_feature (97)..(97): n is a, c, g, or t
  misc_feature (100)..(100): n is a, c, g, or t
  misc_feature (103)..(108): n is a, c, g, or t
  misc_feature (116)..(116): n is a, c, g, or t
  misc_feature (119)..(119): n is a, c, g, or t
  misc_feature (123)..(124): n is a, c, g, or t
  misc_feature (145)..(145): n is a, c, g, or t
  misc_feature (256)..(256): n is a, c, g, or t
  misc_feature (268)..(268): n is a, c, g, or t
  misc_feature (271)..(271): n is a, c, g, or t
  misc_feature (366)..(366): n is a, c, g, or t
  misc_feature (387)..(387): n is a, c, g, or t
  misc_feature (401)..(401): n is a, c, g, or t
  misc_feature (423)..(423): n is a, c, g, or t
ctaaatgtccagcctctcaagcaacaatgtacagctttcttggtcctccangctaaggggngnaaaggnttagggntnaaacaataccaattgtntnggnttnnnnnnccatctangtnaggnnattctctagtttttgctaagntacacctggtacactgacaagtcatcacttacatagaataatgtgaagtaaattttttgaaaaataaattttagtggaacaatcctgaaggataaccccagaagaatagcnggttaccagtanggngtcagccaatttgttccagtcacttttgaatccatgttctttaatctaaaatttattctctttccctaagctgagagcttcctatcatgtcagtntctatgttatgaagaaaaggngacttaggtgggangtttttatttatcgcaactgcngcattaattgcctaggacctcaacagcttcatgaaagtctgggaaatgttcatgcataaggttattgccttagctgacttaaaattgccccatac

SEQ ID NO: 578706 - DNA, 284 bp, Homo sapiens
  misc_feature (142)..(143): n is a, c, g, or t
ttttttcccttcccaaatttttttttccggatttggccccgggggccaaaagccaccctggtagggggggggggacccccccggtttttccccgggggggggccttttaaaagggggttgttttccttccaggggggggtgnnaccattttccctaggttcccctgggggggggggggggggtttcctttttttttgggcccggttttagacccttgcccttttttgttccccccctttggggggtccctttttttaaaaaaaaggttttttttttaggcctta

SEQ ID NO: 578707 - DNA, 607 bp, Homo sapiens
  misc_feature (78)..(78): n is a, c, g, or t
  misc_feature (92)..(92): n is a, c, g, or t
  misc_feature (101)..(101): n is a, c, g, or t
  misc_feature (127)..(127): n is a, c, g, or t
  misc_feature (129)..(130): n is a, c, g, or t
  misc_feature (153)..(154): n is a, c, g, or t
  misc_feature (350)..(350): n is a, c, g, or t
  misc_feature (386)..(386): n is a, c, g, or t
  misc_feature (423)..(423): n is a, c, g, or t
  misc_feature (448)..(448): n is a, c, g, or t
gacatcatcttctggttggctggagttgtcttccttggagtcgggctgtgggcatggagcgaaaagggtgtgctgtcncgacctcaccaaangtgacccgngatgcatgtgaatcgaaccctgtggntnngctgtgtcccttttttttggggnnataacaccgtttttgggcgggtttgtgcgctgtggtgctttgcacttgcttttccgaaccccccccttgggggggttttaccagccctggggacctaggcccggttggggggggggactcccttgggccggggggcaacgggcacaatttagttcccttagggcgtttttggctttcccaaagcgtgtatgtttcnccttgtgtttgcggacacaaacccaaatacgctcgncgtcaagttcgtttatccgctttttcccattgttggnaggccgttgggcccgttgtgtgggnccagtgtggtcccttgggtcgccccatttttccccagtggtgttttccccaagggggagaacccttggggggctttggcaaggggggggaaacccccggggggctttttcccccgggggcgggcacggccttttcccttttttcccggcaaacggccaa

SEQ ID NO: 578708 - DNA, 486 bp, Homo sapiens
ctgtcgcccaggctagagtgcagtggtgcaatcttggcccgctgcaacctccatctccatggttcaagcgattcttgggcctcaagcctcctgaataactgggattacaggtgtgcaccaccatgcctggctaattttttgtgtttttttagtaaagacagggtttcaccatgttggccagaatggtctcgatctcttgaccttgagatctgcccgccttggcctcccaaagtgctgggattacaggcgtgagccaccgcacctggcctgtatgtatacaatattgagcttcattcacaggactcattttcaaagaaagtcctgatgtctgaatgaacgtttatatttttaaattaaaatgttcaggatgcaaatgtgtgtatatgtttaatagtttccctgttttactacctgtctttagccattcaaatagtgtttttgatcacatcggttaaaaggtattatcctgtttctggagcttttctg

SEQ ID NO: 578709 - DNA, 165 bp, Homo sapiens
aaaagtatctgctcttaaccaacatccccctcctttcaagtaagctgcaatacattaatcactcatcctcatcccataagagggttaagcaatgatatacatggaattacatcaaggcacttgcataaattaaaaaatacagatataaacactgtcccataaaga

SEQ ID NO: 578710 - DNA, 806 bp, Homo sapiens
  misc_feature (29)..(29): n is a, c, g, or t
  misc_feature (42)..(42): n is a, c, g, or t
  misc_feature (61)..(61): n is a, c, g, or t
  misc_feature (64)..(64): n is a, c, g, or t
  misc_feature (77)..(77): n is a, c, g, or t
  misc_feature (82)..(82): n is a, c, g, or t
  misc_feature (96)..(96): n is a, c, g, or t
  misc_feature (99)..(99): n is a, c, g, or t
  misc_feature (139)..(139): n is a, c, g, or t
  misc_feature (148)..(148): n is a, c, g, or t
  misc_feature (160)..(160): n is a, c, g, or t
  misc_feature (165)..(165): n is a, c, g, or t
  misc_feature (172)..(172): n is a, c, g, or t
  misc_feature (177)..(177): n is a, c, g, or t
  misc_feature (179)..(179): n is a, c, g, or t
  misc_feature (200)..(200): n is a, c, g, or t
  misc_feature (205)..(205): n is a, c, g, or t
  misc_feature (211)..(211): n is a, c, g, or t
  misc_feature (217)..(217): n is a, c, g, or t
  misc_feature (225)..(225): n is a, c, g, or t
  misc_feature (239)..(239): n is a, c, g, or t
  misc_feature (242)..(242): n is a, c, g, or t
  misc_feature (246)..(246): n is a, c, g, or t
  misc_feature (249)..(249): n is a, c, g, or t
  misc_feature (251)..(251): n is a, c, g, or t
  misc_feature (253)..(253): n is a, c, g, or t
  misc_feature (256)..(256): n is a, c, g, or t
  misc_feature (260)..(260): n is a, c, g, or t
  misc_feature (276)..(276): n is a, c, g, or t
  misc_feature (282)..(282): n is a, c, g, or t
  misc_feature (285)..(285): n is a, c, g, or t
  misc_feature (291)..(291): n is a, c, g, or t
  misc_feature (305)..(305): n is a, c, g, or t
  misc_feature (315)..(316): n is a, c, g, or t
  misc_feature (335)..(336): n is a, c, g, or t
  misc_feature (351)..(352): n is a, c, g, or t
  misc_feature (363)..(364): n is a, c, g, or t
  misc_feature (372)..(374): n is a, c, g, or t
  misc_feature (379)..(379): n is a, c, g, or t
  misc_feature (386)..(386): n is a, c, g, or t
  misc_feature (419)..(419): n is a, c, g, or t
  misc_feature (447)..(447): n is a, c, g, or t
  misc_feature (456)..(456): n is a, c, g, or t
  misc_feature (461)..(461): n is a, c, g, or t
  misc_feature (472)..(472): n is a, c, g, or t
  misc_feature (483)..(483): n is a, c, g, or t
  misc_feature (492)..(492): n is a, c, g, or t
  misc_feature (505)..(505): n is a, c, g, or t
  misc_feature (508)..(508): n is a, c, g, or t
  misc_feature (529)..(529): n is a, c, g, or t
  misc_feature (532)..(532): n is a, c, g, or t
  misc_feature (540)..(540): n is a, c, g, or t
gcctagagtcctggggagcttctgtccanctgtcctgcagangagtcgtttccagcccggntgncacaggatgggtnagttnaaagagaagaaganaanatgtggcaccgtttgcctcaagtacctgctgtttacctanaattgctgnttctggctggcnggccnggctgtnatggnantgggaatctggacgctggccntcaanagtgantacatnagcctganggcctcaggcaccnacntggncanancntanatcntggtggtggcgggcantgtagnaanggtgantggggtcttgggcngatgcgcaannttcaaggagcgtcggaacnngctgcgccagtacannaaaaatgctcnnaaaaaaannnctgcnggagaanatcgctggtatcctcgcctacgcctactaccancagctgaacacggagctcaaagagaacntgaagaganacaanaaccaagcgcnacaacaaaaanggccatgangctgtgacaaganctntggaccagcagaagcaggagnacnaatgctgnggcagaaacaaatcacagagactggcgagacagtgagtggatccgctcacaggaggccggtggcgtgtggtcccagacagctgctgcaagacggtggtggctctttgtggacagcgagaccatgcctccaacatctacaaggtggagggcggctgcatcaccaagttggagaccttcatccaggagcacctgagggtcattggggctgtggggatcggcattgcctgtgtgcaggtctttggcatgatcttcacgtgctgcctgta

SEQ ID NO: 578711 - DNA, 1414 bp, Homo sapiens
  misc_feature (62)..(62): n is a, c, g, or t
  misc_feature (68)..(68): n is a, c, g, or t
  misc_feature (73)..(73): n is a, c, g, or t
ctccctgttcatcattgcctccaagacctttactacccaggagaccatcacgaatgcagagncggganggagnggttctccaggcggccaaggatccttctgcagtggcgaagcactttgttgccctgtctactaacacaaccaaagtgaaggagtttggaattgaccctcaaaacatgttcgagttctgggattgggtgggaggacgctactcgctgtggtcggccatcggactctccattgccctgcacgtgggttttgacaacttcgagcagctgctctcgggggctcactggatggaccagcacttccgcacgacgcccctggagaagaacgcccccgtcttgctggccctgctgggtatctggtacatcaactgctttgggtgtgagacacacgccatgctgccctatgaccagtacctgcaccgctttgctgcgtacttccagcagggcgacatggagtccaatgggaaatacatcaccaaatctggaacccgtgtggaccaccagacaggccccattgtgtggggggagccagggaccaatggccagcatgctttttaccagctcatccaccaaggcaccaagatgataccctgtgacttcctcatcccggtccagacccagcaccccatacggaagggtctgcatcacaagatcctcctggccaacttcttggcccagacagaggccctgatgaggggaaaatcgacggaggaggcccgaaaggagctccaggctgcgggcaagagtccagaggaccttgagaggctgctgccacataaggtctttgaaggaaatcgcccaaccaactctattgtgttcaccaagctcacaccattcatgcttggagccttggtcgccatgtatgagcacaagatcttcgttcagggcatcatctgggacatcaacagctttgaccagtggggagtggagctgggaaagcagctggctaagaaaatagagcctgagcttgatggcagtgctcaagtgacctctcacgacgcttctaccaatgggctcatcaacttcatcaagcagcagcgcgaggccagagtccaataaactcgtgctcatctgcagcctcctctgtgactcccctttctcttctcgtccctcctccccggagccggcactgcatgttcctggacaccacccagagcaccctctggttgtgggcttggaccacgagcccttagcagggaaggctggtctcccccagcctaacccccagcccctccatgtctatgctccctctgtgttagaattggctgaagtgtttttgtgcagctgacttttctgacccatgttcacgttgttcacatcccatgtagaaaaataaagatgccacggaggaaaaaaaaaaaaaaaaaacaacaacaaaaaaaaaaaaaagaaaaaaaacaaaaaaa

SEQ ID NO: 578712 - DNA, 1391 bp, Homo sapiens
  misc_feature (62)..(62): n is a, c, g, or t
  misc_feature (68)..(68): n is a, c, g, or t
  misc_feature (73)..(73): n is a, c, g, or t
  misc_feature (1361)..(1361): n is a, c, g, or t
  misc_feature (1365)..(1365): n is a, c, g, or t
ctccctgttcatcattgcctccaagacctttactacccaggagaccatcacgaatgcagagncggganggagnggttctccaggcggccaaggatccttctgcagtggcgaagcactttgttgccctgtctactaacacaaccaaagtgaaggagtttggaattgaccctcaaaacatgttcgagttctgggattgggtgggaggacgctactcgctgtggtcggccatcggactctccattgccctgcacgtgggttttgacaacttcgagcagctgctctcgggggctcactggatggaccagcacttccgcacgacgcccctggagaagaacgcccccgtcttgctggccctgctgggtatctggtacatcaactgctttgggtgtgagacacacgccatgctgccctatgaccagtacctgcaccgctttgctgcgtacttccagcagggcgacatggagtccaatgggaaatacatcaccaaatctggaacccgtgtggaccaccagacaggccccattgtgtggggggagccagggaccaatggccagcatgctttttaccagctcatccaccaaggcaccaagatgataccctgtgacttcctcatcccggtccagacccagcaccccatacggaagggtctgcatcacaagatcctcctggccaacttcttggcccagacagaggccctgatgaggggaaaatcgacggaggaggcccgaaaggagctccaggctgcgggcaagagtccagaggaccttgagaggctgctgccacataaggtctttgaaggaaatcgcccaaccaactctattgtgttcaccaagctcacaccattcatgcttggagccttggtcgccatgtatgagcacaagatcttcgttcagggcatcatctgggacatcaacagctttgaccagtggggagtggagctgggaaagcagctggctaagaaaatagagcctgagcttgatggcagtgctcaagtgacctctcacgacgcttctaccaatgggctcatcaacttcatcaagcagcagcgcgaggccagagtccaataaactcgtgctcatctgcagcctcctctgtgactcccctttctcttctcgtccctcctccccggagccggcactgcatgttcctggacaccacccagagcaccctctggttgtgggcttggaccacgagcccttagcagggaaggctggtctcccccagcctaacccccagcccctccatgtctatgctccctctgtgttagaattggctgaagtgtttttgtgcagctgacttttctgacccatgttcacgttgttcacatcccatgtagaaaaataaagatgccacggaggaancaanacaccaaagaacacctacacaacaaa

SEQ ID NO: 578713 - DNA, 1374 bp, Homo sapiens
  misc_feature (62)..(62): n is a, c, g, or t
  misc_feature (68)..(68): n is a, c, g, or t
  misc_feature (73)..(73): n is a, c, g, or t
  misc_feature (1329)..(1329): n is a, c, g, or t
  misc_feature (1331)..(1331): n is a, c, g, or t
ctccctgttcatcattgcctccaagacctttactacccaggagaccatcacgaatgcagagncggganggagnggttctccaggcggccaaggatccttctgcagtggcgaagcactttgttgccctgtctactaacacaaccaaagtgaaggagtttggaattgaccctcaaaacatgttcgagttctgggattgggtgggaggacgctactcgctgtggtcggccatcggactctccattgccctgcacgtgggttttgacaacttcgagcagctgctctcgggggctcactggatggaccagcacttccgcacgacgcccctggagaagaacgcccccgtcttgctggccctgctgggtatctggtacatcaactgctttgggtgtgagacacacgccatgctgccctatgaccagtacctgcaccgctttgctgcgtacttccagcagggcgacatggagtccaatgggaaatacatcaccaaatctggaacccgtgtggaccaccagacaggccccattgtgtggggggagccagggaccaatggccagcatgctttttaccagctcatccaccaaggcaccaagatgataccctgtgacttcctcatcccggtccagacccagcaccccatacggaagggtctgcatcacaagatcctcctggccaacttcttggcccagacagaggccctgatgaggggaaaatcgacggaggaggcccgaaaggagctccaggctgcgggcaagagtccagaggaccttgagaggctgctgccacataaggtctttgaaggaaatcgcccaaccaactctattgtgttcaccaagctcacaccattcatgcttggagccttggtcgccatgtatgagcacaagatcttcgttcagggcatcatctgggacatcaacagctttgaccagtggggagtggagctgggaaagcagctggctaagaaaatagagcctgagcttgatggcagtgctcaagtgacctctcacgacgcttctaccaatgggctcatcaacttcatcaagcagcagcgcgaggccagagtccaataaactcgtgctcatctgcagcctcctctgtgactcccctttctcttctcgtccctcctccccggagccggcactgcatgttcctggacaccacccagagcaccctctggttgtgggcttggaccacgagcccttagcagggaaggctggtctcccccagcctaacccccagcccctccatgtctatgctccctctgtgttagaattggctgaagtgtttttgtgcagctgacttttctgacccatgttcacgttgttcacatcncnaagtctggttacaggcgtgagcacccgcgctcagcaaggcggg

SEQ ID NO: 578714 - DNA, 835 bp, Homo sapiens
agcgaaaggtgttaataaaattctattgcaaaaatttctttttctagaaaaaataaatacaaaaaaaaacaaaacgaacgaattcccaaagtaattaacaaccttttcttgagaccaacacaaaaaaaaagttggcttacctattggacttacattaacaattttaacttaccattttcctttaagggtattctaaactttttaaatggtctctgtgagagtacttcggtatgactcccataatggtatatttactgtaaaattcaaatttatctattaaaccagttacccaattatcatttatagaaaaacaattaaccattttaacaggtactactggtcctaaccaatcatattggtgaatccatttggaagctccataatagcgatattggataaactgggggaattggctctataaggtgttttttatattaaccctgacatttattttataaacccttaaccgttgagattgactcagcttacattccactcagtgggatgagctttggaagaattaactacattttcatttccaaactaccaaagtgtaatacggtattaaagtcccagtggttggacagatattctcaaatcacaattattaatttactcttggaacctggaacagttccctggtaatatattctggccttattcccacgtgtggcatagtgtatgtacgcagaacttgaagcagtttacattacccgctaaaattagtgggtacacccaggagcgccaatggtacgaacaaaagacaaacaaaaaccgctcccccagcggctgagacccggggccaatagggccgtgaaccccctcaaagggagat

SEQ ID NO: 578715 - DNA, 2371 bp, Homo sapiens
  misc_feature (2198)..(2198): n is a, c, g, or t
  misc_feature (2206)..(2206): n is a, c, g, or t
tgacatctggtcggaccatgtctaaagagttgaactgtgtgcaggtatgagcccttggttctgccagtgtctggggagttgagcctgggcatgggtgtgagaccctgggtctgtccatatctgaggaggtaggatctggtatgagtatgaggatctgggtgtgtccgtgtctgaggaggtgggccctggcacaggtatgaggcctggggtctgtccgtgtctgaggaggtgggccctggcgcaggtatgaggccctgggtgtgtccgtgtctgaggaggtgggccctggcacaggtatgaggtcctgggtctgctggtgtctgcagagacagggcccgacatctcagggaagaccacggtaagctcttcagtttgtcttgtggctgtggtcagtcatctgtagtctgccctgttggtcttcccatgtgttgccagcacctgcctgctgccttgcttcctggaggtgggttgggccagggccctccgagacgcccctgtgcaagaccagggacagggtttccggcaggaggtggggggcggggtgtgccggccctccctcagcaccttgtcctgtctctcctagtgggtgggaggacgctactcgctgtggtcggccatcggactctccattgccctgcacgtgggttttgacaacttcgagcagctgctctcgggggctcactggatggaccagcacttccgcacgacgcccctggagaagaacgcccccgtcttgctggccctgctgggtatctggtacatcaactgctttgggtgtgagacacacgccatgctgccctatgaccagtacctgcaccgctttgctgcgtacttccagcagggcgacatggagtccaatgggaaatacatcaccaaatctggaacccgtgtggaccaccagacaggccccattgtgtggggggagccagggaccaatggccagcatgctttttaccagctcatccaccaaggcaccaagatgataccctgtgacttcctcatcccggtccagacccagcaagagtccagaggaccttgagaggctgctgccacataaggtctttgaaggaaatcgcccaaccaactctattgtgttcaccaagctcacaccattcatgcttggagccttggtcgccatgtatgagcacaagatcttcgttcagggcatcatctgggacatcaacagctttgaccagtggggagtggagctgggaaagcagctggctaagaaaatagagcctgagcttgatggcagtgctcaagtgacctctcacgacgcttctaccaatgggctcatcaacttcatcaagcagcagcgcgaggccagagtccaataaactcgtgctcatctgcagcctcctctgtgactcccctttctcttctcgtccctcctccccggagccggcactgcatgttcctggacaccacccagagcaccctctggttgtgggcttggaccacgagcccttagcagggaaggctggtctcccccagcctaacccccagcccctccatgtctatgctccctctgtgttagaattggctgaagtgtttttgtgcagctgacttttctgacccatgttcacgttgttcacatcccatgtagaaaaataaagatgccacggaggaggttgtaggctcagcctctgattttttttttcctgtgatggtgctttatgtagcagagggcaggagcgctcagcaggacgcaggctgtgcctctgcggacacttaacactaagtggtgagcgggtctagagtggagcaaggtgccctgagaagacaatagtggggtgggggcacaatcagtcaggacggcaacttggcctgtgtcaccaaatcccaagactgttttccactcctcacctctgtgactggagaaattggatactctgttcactcgatggttctaaaaactgcattgagattatgtttgtttcgggtgaattcctggacaagaccgaggatgactgccatctcctggcaagacgctcaggtagttcttttgctttaaaaggcagatattgaaaactggaattttttttttttgagtctcgctctgtcacccagactggagtgcagtggtgcaatctcggctcactgcaacctccgcctcccgggttcaagctattctcctgcctcagcctcccgagtagctgggattacacggcgcacaccaccatacccagctaattttngtattttnagtagtgaaggggttttaccatgttgggcaggctggtcttgaactcctgacctcaggtgatctgcccgcctcagcctcccacagtgctgggattacaggtatgagccaccacgcccggcccattttaaaatttttgtagatcagtgtactgttgtaaaaaaaaaa

SEQ ID NO: 578716 - DNA, 2047 bp, Homo sapiens
  misc_feature (62)..(62): n is a, c, g, or t
  misc_feature (68)..(68): n is a, c, g, or t
  misc_feature (73)..(73): n is a, c, g, or t
  misc_feature (1874)..(1874): n is a, c, g, or t
  misc_feature (1882)..(1882): n is a, c, g, or t
ctccctgttcatcattgcctccaagacctttactacccaggagaccatcacgaatgcagagncggganggagnggttctccaggcggccaaggatccttctgcagtggcgaagcactttgttgccctgtctactaacacaaccaaagtgaaggagtttggaattgaccctcaaaacatgttcgagttctgggattgggtgggaggacgctactcgctgtggtcggccatcggactctccattgccctgcacgtgggttttgacaacttcgagcagctgctctcgggggctcactggatggaccagcacttccgcacgacgcccctggagaagaacgcccccgtcttgctggccctgctgggtatctggtacatcaactgctttgggtgtgagacacacgccatgctgccctatgaccagtacctgcaccgctttgctgcgtacttccagcagggcgacatggagtccaatgggaaatacatcaccaaatctggaacccgtgtggaccaccagacaggccccattgtgtggggggagccagggaccaatggccagcatgctttttaccagctcatccaccaaggcaccaagatgataccctgtgacttcctcatcccggtccagacccagcaccccatacggaagggtctgcatcacaagatcctcctggccaacttcttggcccagacagaggccctgatgaggggaaaatcgacggaggaggcccgaaaggagctccaggctgcgggcaagagtccagaggaccttgagaggctgctgccacataaggtctttgaaggaaatcgcccaaccaactctattgtgttcaccaagctcacaccattcatgcttggagccttggtcgccatgtatgagcacaagatcttcgttcagggcatcatctgggacatcaacagctttgaccagtggggagtggagctgggaaagcagctggctaagaccaatgggctcatcaacttcatcaagcagcagcgcgaggccagagtccaataaactcgtgctcatctgcagcctcctctgtgactcccctttctcttctcgtccctcctccccggagccggcactgcatgttcctggacaccacccagagcaccctctggttgtgggcttggaccacgagcccttagcagggaaggctggtctcccccagcctaacccccagcccctccatgtctatgctccctctgtgttagaattggctgaagtgtttttgtgcagctgacttttctgacccatgttcacgttgttcacatcccatgtagaaaaataaagatgccacggaggaggttgtaggctcagcctctgattttttttttcctgtgatggtgctttatgtagcagagggcaggagcgctcagcaggacgcaggctgtgcctctgcggacacttaacactaagtggtgagcgggtctagagtggagcaaggtgccctgagaagacaatagtggggtgggggcacaatcagtcaggacggcaacttggcctgtgtcaccaaatcccaagactgttttccactcctcacctctgtgactggagaaattggatactctgttcactcgatggttctaaaaactgcattgagattatgtttgtttcgggtgaattcctggacaagaccgaggatgactgccatctcctggcaagacgctcaggtagttcttttgctttaaaaggcagatattgaaaactggaattttttttttttgagtctcgctctgtcacccagactggagtgcagtggtgcaatctcggctcactgcaacctccgcctcccgggttcaagctattctcctgcctcagcctcccgagtagctgggattacacggcgcacaccaccatacccagctaattttngtattttnagtagtgaaggggttttaccatgttgggcaggctggtcttgaactcctgacctcaggtgatctgcccgcctcagcctcccacagtgctgggattacaggtatgagccaccacgcccggcccattttaaaatttttgtagatcagtgtactgttgtaaaaaaaaaa

SEQ ID NO: 578717 - DNA, 702 bp, Homo sapiens
agcggtagagacgggttttcaccgtgttagccaggatggtctcgatctcctggacctcgatgatccgtccgacctgtggcctcccaaggatgctgggattataggcgtgagccaccgtgcgcagccccgagtaatacattttcttaaaggaacacacaattaaagattgtagtgcatgggctatctcaagtagacttgtacagtatgaagtttgactatacttctattataatgcaacaatgctttgatagaaaaagaaagatcttgtcctctattatcaaacatgtagtatgactcaagcaccgtggccctttgcctgcgtgtctctctgtatttgcactgtagcttaaaccccaatgctgggcaggtcaggactcagccttgcagagggaggtggatattaagtctgggagagatgtgggatggtgagacggctattctgggcagagccggcaggccactatgagcttccccagcttgggactgcagaatggacatgccgtggctacaggggacattccatggaagatgggcatctggtgacagggtctacagagcccaaggcagagggctcttgtagtgcagattagagtggagcccagtctgggcatttcctcatggcgaacatctggatcagtcgggtaccccacatgggcatattctattaacagtcgtgatgagttgaataggagagtgagaatc

SEQ ID NO: 578718 - DNA, 920 bp, Homo sapiens
gcggtggctcacgcctgtaattccagcactttgggaggcctaggtgggcggatcagctgaggtcgagagttcgaggccagtctgaccaacatggtgaaaccccatctctactaaaaatacagaaaattagctgggtctggtggtggatgcctgtaatcccagctactcgggaggctgaggcaggagaattgcttgaacccaggaggtggacggtgcagtgagctattactccagcctggcaacaagagcgaaactctgtctcaaaaaacaacacaacggggggggggcacttaaacagagtggtgttgccccaatttgttgacccaattttgttgggggggggggtcctaagcggtggaaatcctgaagggtctataacagtgaactagctgcataattgaaagccaagcgtttctgggcagcaagacaattttccatttcttactggaattcctatgtgcggctcccaaaggtgactcgactttccaaggcaagacatgtccccatatggccgggttcaaaggatcggtgccaggcctcttatcagagtggcctaactggaaaaggctgcctacccttcagtgggaaattattcccgtgtttaaccagggtacgctctttcaacctgtctaaggacctttgggaatgcgcggaaatttctgcccaacacaaggggacgcctggtcatttaaaaaagggcgccgagcgctggtcaaccgtgccccagagttcctgaattaagcacactgtgtagagaccttctatgccggaagaataagccacacaataggaaaggggtatgcacgaccggcaggaaaaacacagagaaggataaagcagcgttgcaacagcacaaaagggctgcactagacaattgtccttcaatcccctgcccccctcgccgctccgtcacgggggtg

SEQ ID NO: 578719 - DNA, 921 bp, Homo sapiens
  misc_feature (7)..(7): n is a, c, g, or t
ccgccantccactagtctaattgtcgctatctctttcgctggacagtctcgacgcatcggctctattcaccctttggtcacccccctgcgggggtcaccccccctgtgtgtgggttccccccctctttgcgcccccccccctttgggggccttcgctccttttaatcggcgcgcctctcctcctctgtttcggaaccgccctcccccagggggtccaccggcttccctagcaaagggcaaccttgccgcttgtgaaggatcgccctgccttctcacaggggcgtttgtcgcctacccggagatgctgaagaggtctcccagtctgtcggcctcttccatcgtctgcgctccccttctgccatttcttctccgggtattttccctccccccgtatgtgccccccagggcccatgtacccacggcggtcgagcgtcgccgaccgcttggtgctcccccgcggctgccgcaggggcaacgcgaatccccttccccgccgccaccggcatattcccttgtgacgccccccctgaggcccccatttgctcgtgcaagtccgcctttacaccgcctctcccgccccacctattttgcaacgcgtcggtttgcttccccccacgtgagaccccccgtttctccacatatatctaaggctctttcccagtcatcactccacccaagagagttatcatacattctcgccctcggtaggaacaccttcctgtataagatatttctttggacccacatggtgacataatagtttcactcttccattcgttatctttccatcacccaccggaaacatccgcaccttccctacttataaaagcgcgaagcggagatttccccatcccctgctttcagaaaacattccgcccccgttctttaccaccaaaaagggtttcccccacatgtacgcaa

SEQ ID NO: 578720 - DNA, 1103 bp, Homo sapiens
  misc_feature (62)..(62): n is a, c, g, or t
  misc_feature (68)..(68): n is a, c, g, or t
  misc_feature (73)..(73): n is a, c, g, or t
  misc_feature (930)..(930): n is a, c, g, or t
  misc_feature (938)..(938): n is a, c, g, or t
ctccctgttcatcattgcctccaagacctttactacccaggagaccatcacgaatgcagagncggganggagnggttctccaggcggccaaggatccttctgcagtggcgaagcactttgttgccctgtctactaacacaaccaaagtgaaggagtttggaattgaccctcaaaacatgttcgagttctgggattgggtgggaggacgctactcgctgtggtcggccatcggactctccattgccctgcacgtgggttttgacaacttcgagcagctgctctcgggggctcactggatggaccagcacttccgcacgacgcccctggagaagaacgcccccgtcttgctggccctgctgggtatctggtacatcaactgctttgggtgtgagacacacgccatgctgccctatgaccagtacctgcaccgctttgctgcgtacttccagcagggcgacatggagtccaatgggaaatacatcaccaaatctggaacccgtgtggaccaccagacaggccccattgtgtggggggagccagggaccaatggccagcatgctttttaccagctcatccaccaaggcaccaagatgataccctgtgacttcctcatcccggtccagacccagcaccccatacggaagggtctgcatcacaagatcctcctggccaacttcttggcccagacagaggccctgatgaggggaaaatcgacggaggaggcccgaaaggagctccaggctgcgggcaagagtccagaggaccttgagaggctgctgccacataaggtctttgaaggaaatcgcccaaccaactctattgtgttcaccaagctcacaccattcatgcttggagccttggtcgccatgtatgagcacaagatcttcgttcagggcatcatctgggacccaccatacccagctaattttngtattttnagtagtgaaggggttttaccatgttgggcaggctggtcttgaactcctgacctcaggtgatctgcccgcctcagcctcccacagtgctgggattacaggtatgagccaccacgcccggcccattttaaaatttttgtagatcagtgtactgttgtaaaaaaaaaa

SEQ ID NO: 578721 - DNA, 580 bp, Homo sapiens
taaagttaaaaagaaaaaaattatagtgagaatgagattcatttcaatgtaatgcactaaagcagaacacgaacttagcttggcctattctaggtagttccaaatagtatttttgtgtcaaactttaaaatttatattaattgcaaatgtatgtctcttttttttttttaaagtatttcagtgaaacactgggtgtaagtctgaacccatctttggaaatgtatttcttcatggcaggtccacctaatcatctggtgaaagtggttctctatggaaagcttggttggcttcctacaaatacatgcttatcccttaagggatgtgtagagttactggggattctctgtttcgggtcttacaagaaactggttctatgtcaccttaaatacttgggttaaggatgaggagtctggggccccctgtaacaggtagtctgacgttatttccctcttctgtcccttagtaagcccagttgctggtatcttgaacagttggagctctttggaatatactcctaaacctgtatttctggggtaataacggagatgccagaacccttggaaaaaaacaaaaaaaatac

SEQ ID NO: 578722 - DNA, 806 bp, Homo sapiens
  misc_feature (77)..(77): n is a, c, g, or t
  misc_feature (633)..(633): n is a, c, g, or t
  misc_feature (641)..(641): n is a, c, g, or t
cctccctatattctgaagtttggaaattgggtctcttttcctttcctcctgtttagcctggctaaaattttattgantttaatgaatttttttttcctgtgatggtgctttatgtagcagagggcaggagcgctcagcaggacgcaggctgtgcctctgcggacacttaacactaagtggtgagcgggtctagagtggagcaaggtgccctgagaagacaatagtggggtgggggcacaatcagtcaggacggcaacttggcctgtgtcaccaaatcccaagactgttttccactcctcacctctgtgactggagaaattggatactctgttcactcgatggttctaaaaactgcattgagattatgtttgtttcgggtgaattcctggacaagaccgaggatgactgccatctcctggcaagacgctcaggtagttcttttgctttaaaaggcagatattgaaaactggaattttttttttttgagtctcgctctgtcacccagactggagtgcagtggtgcaatctcggctcactgcaacctccgcctcccgggttcaagctattctcctgcctcagcctcccgagtagctgggattacacggcgcacaccaccatacccagctaattttngtattttnagtagtgaaggggttttaccatgttgggcaggctggtcttgaactcctgacctcaggtgatctgcccgcctcagcctcccacagtgctgggattacaggtatgagccaccacgcccggcccattttaaaatttttgtagatcagtgtactgttgtaaaaaaaaaa

SEQ ID NO: 578723 - DNA, 665 bp, Homo sapiens
  misc_feature (53)..(53): n is a, c, g, or t
  misc_feature (633)..(633): n is a, c, g, or t
caattaggtcttgaaggaagactttaactttggatttttcaatgtgtaatgangaagaatggaaaggccattctaaacagaaagataaagagagcaaaggaaaacagttcctcctgaggatttcagagaagagctggacttcctggctgactctcacattctcttcttctgaactgcttcttctggtagctccctgtcactttggacaagctcgcactgccctccttggctgttctggaactgtgtgatggacttcatcctactaggacacagttgcttcttgaattccccagataaacacccacccgtgtgaatgacaagccataataaaaattaattgtcaaaattaatcaacaaggtcccaaacaagattgagagccagggggacagaagtgccaccggtaattatatagtcacaggcagacctacgaggatgttcatctttcctcttaaggacaacttggaagttacagacgttttcttggaacttaaaaagttttgataggccccttaccccaaagaaatagaagcattggaaaatatgttaaagaaatttctatgaaattaagacaaaatgacttattttgcaagagaaaaaataagtaaaaggctaacctcttggaagtccacatncaatctaataggtgttcccagaatcagaaaaa

SEQ ID NO: 578724 - DNA, 595 bp, Homo sapiens
  misc_feature (311)..(311): n is a, c, g, or t
gtctcgtcagcttgaaatgattattcctacaagtgataacacgtaggacgtattatggatgtgtactatgggccttgtctgattatggcgggagtataatcctatgtatgtttttgatttacgtggcaataaggtttaagaggattagatatgtaatataggattcacactaagggagtataaggttgagctctagtgccctattataacacctgatttgcatccaagatatatttatactcgtgctgggtacccacaacatagagcatctactacacacccataatgataggaaaacatcattatttgtngcaaaagaaaaattcccaatgtttggtgtagaacattgtttattttatttaaacaaccaggggaaccaccctagtaaacaaggaggtggttttacaattacatcacgttttatgggtaaaaaagggcgaaagcaggaaagggtgcaaaatttggtgggcaaaaaaaggcataagttggacgctgagggagatcgcgcgttggaacttaaaaacaggagggggaaaatattttgaagaaaaaggtgttagacggggaatagaatagaatatttatagataacgta

SEQ ID NO: 578725 - DNA, 888 bp, Homo sapiens
tgttgtggacatggaagagtttagtcaacacaacactttgtccccgctccgggagatgagtcagatggtggcttgagtgtcacttggtcccctccgccctcgggtggcccctttgcagtccccattagcttagtgatcaggtgtgagagtggcacatattccttacctttgatccctgtaaagcagaacggactcctttgacaggcaacgaaactactgtggtgagcagaatgatttcctttttcaagacaacacctgcctggttctattaatgtgtgctggccatgataattgccaccaaatccggcccacctgaagtgttccctaaggaacagcatgctctgctcctcaaggtcaaccccgtaggccctagagcagtgtcacaaggcttcagtaaggcagtcagctggaagctcaggctaccggcatagtaacactgtattcaggtctacagaccacactctagtgtttgccatgaacaggtatacaaggtgaagaattctaggcaaaacatgtataaacccatcagtgctcagggcctctctccattcgcgcgagtcagtctactaaccctatgacaggtaagatactcctcacgctcaccccggcgggccggccaatgagggcgggcttggcgaaccacggccatccacttaaggccaggcaagcctacaggaaacaacgaggtcctagcgggacgagaagacccaagagataacgtccacaagcagcccaagaagggggtggcaacacatcagggggcacacagggaaaggtaccaaaggccacgtcggaagacacgacacaacaaggacatacacgagacgcaacccggacggaacaaaacgcacaagaaacaacagccgactaacagcctgtgttctgtta

SEQ ID NO: 578726 - DNA, 490 bp, Homo sapiens
  misc_feature (361)..(361): n is a, c, g, or t
  misc_feature (468)..(468): n is a, c, g, or t
  misc_feature (470)..(470): n is a, c, g, or t
ctaggaaacaggcgaactggcgaactccttggacgttgaccatcgaagtagtactcccggattgaagcccccattcgtataataattacatcacaagacgtcttggactcatgaactggccccacattagggcttaaaaacagatgcaattcccgggacggtctaaaccaaaacactttcaacggctacacgaacggggggtatactacgggtcaatggctcctgaaatctggtggagcaaaccacaggtttcatggcccatcggtcctagaaattaattccccctaaaaatctttggaaataggggccggtatttacccctatagacaccaaaagggaatctcaaagggaaatttggaanacagaaactggtataaatccaaaggtggactggtggatactgggagtaattcctgtgctctggaagacagaaagcagaagactcccacaggctggcagaagaagacnantgacagggagaccaacaaaa

SEQ ID NO: 578727 - DNA, 663 bp, Homo sapiens
  misc_feature (631)..(631): n is a, c, g, or t
tgctccctggtgtccccaagatttctcattttttgggttaccacttccttttcattttaagtaaaatgactcaagtccccaacccctgtgtttacaggaaaacagttcctcctgaggatttcagagaagagctggacttcctggctgactctcacattctcttcttctgaactgcttcttctggtagctccctgtcactttggacaagctcgcactgccctccttggctgttctggaactgtgtgatggacttcatcctactaggacacagttgcttcttgaattccccagataaacacccacccgtgtgaatgacaagccataataaaaattaattgtcaaaattaatcaacaaggtcccaaacaagattgagagccagggggacagaagtgccaccggtaattatatagtcacaggcagacctacgaggatgttcatctttcctcttaaggacaacttggaagttacagacgttttcttggaacttaaaaagttttgataggccccttaccccaaagaaatagaagcattggaaaatatgttaaagaaatttctatgaaattaagacaaaatgacttattttgcaagagaaaaaataagtaaaaggctaacctcttggaagtccacatncaatctaataggtgttcccagaatcagaaaaa

SEQ ID NO: 578728 - DNA, 321 bp, Homo sapiens
  misc_feature (305)..(305): n is a, c, g, or t
agacagcatctggctctgtcacccaggctggagtgcagtggcgcaatctcggttcactgcaacctctgccttccaggttcaagtgattctcctgcctcagcctcccaaatagctgggattacaggcatgtgccaccatacccagctaatttttgtattttcagcagagacggggtttcaccatgttggccagactggtctcgaacttctgacctcaaatgatctgcccatctaggcctccaaaagtgctgggattataggtgtgagccactgcgcctggcccttgggtaaacacttcaaatgcanccaaccattaaaggta

SEQ ID NO: 578729 - DNA, 630 bp, Homo sapiens
  misc_feature (7)..(7): n is a, c, g, or t
aacgctngatgccgggaggacgcattttgcctacccgatagacgaagagcgctttttaaacagcctcggtgttactaattcatgcgctccgcgggagcctctccaggggcccagaatgacatttcaattactgataaatcatgacccatttctaagggaaggagcagcccatgcatttgcacagtataacatggaccagtttactccagtaaaaatcgaaggttaagaagatcacgtattgataacagaacatggcgacttgggaaatggaaagtttctggatccaaagaacagaatctgttttaagatcgctcacttaaggaaggacgtttctgatccaagaccctgggaagtaaaaaatgcaggtgaaatatggagaacttcaaaaaaaactgcattgagagcttacgaaaaaaacattacccgaacggaggctgcactgagtatggcaaaaaaatagatggaccgcaaaccataatggcatcctaggaagccatcgggtccaccaaaaaatctctgggaaggccgtgggggtcagaaggaaagttacaataactgcttaaccactcaagggggggcaaccagaaatccaggtcataacaagaaaagggttggtcacctcggagccaa

SEQ ID NO: 578730 - DNA, 222 bp, Homo sapiens
cgagccgtacggttctcaggagtatgtcgcacaacctgggtatgacactcggaagcgatgactatcacctcctaaaggactagaggaagcatccaaacgctgatggggaggctggaaagacggcagccgccggactgggcagatcctcaagcagacctacagcaagtttgacacaaactcacacaaccacgacgacacgaccacgacgaattccgaacgacg

SEQ ID NO: 578731 - DNA, 919 bp, Homo sapiens
gaatctctgagtccgtgcttatgtacggccaatgcgcgaccttatatctctcgcacgagccgcacagacacccggtaatgatgcgtcagcttatcctacttgctacatcagcacattgcactgcagacagatatccatgatatctgcactcaccatgttcccagtctgtacatacttgaaattgggatcagtccgcagttgtgctcaatgcgcgtaggcgtggtgagaccatgacttggctatattagtgatcactctcaagcatataccgaatagaggaattcctactcgatttatgaagtagtcatctgtacatattactatgctcaatttcattataaccgttcacctagcctggataaaaccaagacctcactaataggtaccatggcttttagaccattggcaggcataggtgaaatagggacttgtgtacttggcgcaatatttagagacagaggccgattaacaaggtctacctcaggttcgtagctagaaatggcggcgtcatcgactattcaatacataagacaaaacattgaacttcgtgatgaccatactgttggtccaactctctttgatttcgattctaattaatatataaacatcatcatataagttgaaaagcgctttatctagaaattgcttgcagtaagtccaagcctgtgttctgaagagagattccccgcgagtataggtatactaaatggaagaaataggtctattcaagcttctgaaatcggattttcacccttcctcggcttgggattccttgaactttgattgatacttttcaatagatacgacttggattccagaaacataaggatgacccaaggctggtgataaacttttacggtaaaaggggccatgactttaggaatttttaaattccgtcgcttgaaatcaacatggtttc

SEQ ID NO: 578732 - DNA, 124 bp, Homo sapiens
ttgacatgatacgactcgagcttagtaccctcgataaggcaagaaagtgtgtgggaagaaagtagatttacgccgatgaatatgatagtgaaatggatttggcgtaggttggccccttatcgag

SEQ ID NO: 578733 - DNA, 881 bp, Homo sapiens
  misc_feature (5)..(5): n is a, c, g, or t
  misc_feature (80)..(80): n is a, c, g, or t
  misc_feature (114)..(114): n is a, c, g, or t
  misc_feature (123)..(123): n is a, c, g, or t
  misc_feature (133)..(133): n is a, c, g, or t
  misc_feature (278)..(278): n is a, c, g, or t
  misc_feature (335)..(335): n is a, c, g, or t
  misc_feature (490)..(490): n is a, c, g, or t
  misc_feature (553)..(553): n is a, c, g, or t
  misc_feature (583)..(583): n is a, c, g, or t
  misc_feature (590)..(590): n is a, c, g, or t
  misc_feature (613)..(613): n is a, c, g, or t
  misc_feature (622)..(622): n is a, c, g, or t
  misc_feature (652)..(653): n is a, c, g, or t
  misc_feature (678)..(678): n is a, c, g, or t
  misc_feature (681)..(681): n is a, c, g, or t
  misc_feature (691)..(691): n is a, c, g, or t
  misc_feature (693)..(695): n is a, c, g, or t
  misc_feature (697)..(697): n is a, c, g, or t
  misc_feature (771)..(771): n is a, c, g, or t
  misc_feature (810)..(810): n is a, c, g, or t
  misc_feature (835)..(835): n is a, c, g, or t
  misc_feature (843)..(843): n is a, c, g, or t
tcatnactgaggagttcgtccaaatgaattacctgaaggaccagcgcgtcccatacgtggagccgcccgaatacgagttnttttggggctcccgggccagccgcggaatcaccnagatgcaantcatggagtncctggccagggtctttaagaaagacccccaggcctggccctcccgaaacagagaagctctggaggaggccagagctccgcgggaggcaaatcccactgcccacaaccctcgcagcagtgtctctgagcactagcaaagtctggangcagataaatggtatctgaccctcaccagggctgtggaagggtgggggtgggtcatnatagtattcaggatttacagtgcagtattcacgtgtaacttttaagttttcagaacagtgcttttataccttaaatgcaatgtagaattcatttgggtactattgtgtagtatttaggatgtatgcatgtttgtttatatgtaagcttggttggngctttcgcttttgtgctacctttcttggatttttgtaccagagatgtgctaaactgatgaaanacattgagaaagtttccatctaattctttnatatggnactgatgatgtgtgttggggtanactgctccngcagagtttggaagaagtcaccagcaaaanncggcctaaccaagaaaagtcaaggnccntcatgacctngnnngnggcacaagaaaacatccctctgtggaggtacacataatttgaactggactggttctcaagtgtgagcacttggngcacacttttactaaagcacaatatacagaccccaccgnctgagtgcaaactttaaagctaaancattaaangattcttgtgatacaatacagaaaaaaaaaagaaaaac

SEQ ID NO: 578734 - DNA, 436 bp, Homo sapiens
gcatcttacaatacaagtacaaaaattatcagcagcgtagaatggcgcccacctatggtacgcagtttactatgggaagctgaggcaggcgaatcacttgaaccgaggaggcggaggctgctgagagccgagatcacgccactgcagcttcagcctgggcgagagataaagactccatctcaaaaaaaagaaaagactgagagacagcaaacgagacagtagggtttatcaggggaacttacttacagggatggtccagtggtggcaggttggacaggagaaccactaccatttgtaaaaaacatacagtttatatagcattttcacttagcaccctccacctagcaaactcctataacccaaaagaaaaaactcaattaaaaaatggaattagctgggtgtggtggtgcccgcctgtagtcccagctactcggga

SEQ ID NO: 578735 - DNA, 844 bp, Homo sapiens
  misc_feature (23)..(23): n is a, c, g, or t
  misc_feature (73)..(73): n is a, c, g, or t
  misc_feature (82)..(82): n is a, c, g, or t
  misc_feature (87)..(87): n is a, c, g, or t
  misc_feature (181)..(181): n is a, c, g, or t
  misc_feature (318)..(318): n is a, c, g, or t
  misc_feature (344)..(344): n is a, c, g, or t
  misc_feature (356)..(356): n is a, c, g, or t
  misc_feature (386)..(386): n is a, c, g, or t
  misc_feature (389)..(389): n is a, c, g, or t
  misc_feature (435)..(435): n is a, c, g, or t
  misc_feature (454)..(454): n is a, c, g, or t
  misc_feature (465)..(465): n is a, c, g, or t
  misc_feature (491)..(491): n is a, c, g, or t
  misc_feature (508)..(508): n is a, c, g, or t
  misc_feature (513)..(513): n is a, c, g, or t
  misc_feature (528)..(528): n is a, c, g, or t
  misc_feature (537)..(537): n is a, c, g, or t
  misc_feature (560)..(560): n is a, c, g, or t
  misc_feature (571)..(571): n is a, c, g, or t
  misc_feature (573)..(573): n is a, c, g, or t
  misc_feature (576)..(576): n is a, c, g, or t
  misc_feature (663)..(663): n is a, c, g, or t
  misc_feature (667)..(668): n is a, c, g, or t
  misc_feature (679)..(679): n is a, c, g, or t
  misc_feature (684)..(684): n is a, c, g, or t
  misc_feature (696)..(696): n is a, c, g, or t
  misc_feature (701)..(701): n is a, c, g, or t
  misc_feature (706)..(706): n is a, c, g, or t
  misc_feature (714)..(714): n is a, c, g, or t
  misc_feature (720)..(720): n is a, c, g, or t
  misc_feature (732)..(732): n is a, c, g, or t
  misc_feature (744)..(744): n is a, c, g, or t
  misc_feature (757)..(757): n is a, c, g, or t
  misc_feature (772)..(772): n is a, c, g, or t
  misc_feature (815)..(815): n is a, c, g, or t
cgccgccgccctgcccctaaacntctgccgtagctccctttcaagccagcgaatttatcccttaaaaccaganaccgaaccncggcncgggaaaggagtccgcggaggagcaaaaccacagcagagcaagaagagcttcagagagcagccttcccggagcaccaaccccgtgtcgggagtncagaaaccaacaagtgagagggcgccgcgttcccggggcgcagtgcgggcggcgggagcaggcgcaggaggaggaagcgagcgcccccgagccccgagcccgagtccccgagcctgagccgcaatcgctgcggtacnctgctccggattcgtgtgcgcgggcngcgccgagcgcnggggcaggaggctttcgtttttgccctggnttncaaagcagcgggctggggagcagccgggtcccctgggggaaatatngcgggcgcgctgttggatncttgctcaccnttggggctttggttggccttgcgttnttgggcggaggttgaanaggcngaggctgacatcctnataaaaganatcgtacctttgagcaacacgcnccatttgaagnangcnttcagggagttgtattcctatttgattgaggaatgactaacgctttctgcgttttgggctcggggagcccgattgagggattgtagnagannttcaagagctngacanacaaactccganccacnttccnaaagatanctgttngacttagtgctngctccaaaaagntggaaaccacgancgcttgaatatacangaacaagatacctgctccagacaaagttaccttgaagaaactngataaagagaaagttcacctctcttgact

SEQ ID NO: 578736 - DNA, 1398 bp, Homo sapiens
  misc_feature (221)..(221): n is a, c, g, or t
  misc_feature (304)..(304): n is a, c, g, or t
  misc_feature (570)..(570): n is a, c, g, or t
  misc_feature (1398)..(1398): n is a, c, g, or t
ggcctggggcacagggtagaggctatgggatgaggtgccatgcacaggattccccttccggatgcgaggcgaggcctgcggtccctatgagtcctccctgtcattccagagcaagagcctgtaccttgtccatcgcttcccctaatgcgcctgcatcctgctggtgcatagatgcacttcaagtcacagtggagctgcttggactgtagacgcgatgcatngtacatatggtgcctgctacgggttggctgtcgagaaacgcgattgtgcttgggcgacgatccacgagagtctgtcatcgttnctcttagtaaccgtgccacgctctcgcacgtagcctcatgctagtctcggtgcctcataacgaacctcactctatggcacggtaagactctatcccacatactccttggcctgaagacttccacccgggaccatgtaacgctagcatgacgctagacacctggcacttgagaccttgtcgtgcgtgccacggctggccctccctgggtgttcttgtcagctctggtaggtcggttcgtgtgggggccatctatcctagtgagtgcnctcgagacggcccttgtgtcatacgttgccaacaccgtgggtggtttacccgtgggggcggcacgggggttcgtgaggtcagggggatcccccgtccaaggggcaattactccccggacaatagcccgctcgctccgagaaccgccactattggccttttgtgcttttgacctttgtgccctcctgtgaagacacttggttggaacttcccagtcccacgggttccttgtctgcacgtgccccaggaaacgttacttgcgatatcttcgaggagcaaggtgcaatgggacctgttgcacccttgtcaccgaggagagcaacggcggcaaacagccaaggcctggcctgttgttaatctctctaaccacatgggctctattgttaaacccggaaatacatttatccctggggcgcgtcattgacagcggagactaggaggaatcccgatggattaaccgccagttgcggtgataggagggggccccatgggtgatagaatggtacgacccgtgagagattgcctggcatgaacaggcactggggaccatcccctattgagacatggttggcctgatggattgcttacccatacgacaggggtgcgaccccgcacagtaggtagcaaaggaggcacgttgtcatttcccccatagagcaataacagaggaaggccctctagcgcacacatgccccagaaccccaccgtggcctacacaggcatactatggacaaacgatatcatagacgacttacgcatatatagtgagctggaaagagaggcccgaccagataaacccaagactgtcaagggacccaccagataacgcn

SEQ ID NO: 578737 - DNA, 163 bp, Homo sapiens
ggtgactccccgagcttattatcccaacacccccccgtggcgtatccgcaatggcgttctgcagattggcgcactgttacttgaccttgtcaaactcggctctcagcctctggatcatccggttcatctcagagatctcatgcttggtgtatgggctataaca

SEQ ID NO: 578738 - DNA, 561 bp, Homo sapiens
ccgggcggctccacctccccggtttatcgtcgtggcgggggggggagttcatttttcccagggacccgttttgcctctcggccctttgttgggcccttatacacaagttttgcacaaaaacgggggggggccgggtcgggtttctccgggtattttttcacccccgggcccgggtttaggggagggccccaaaaaagggtgttttttttcccccccccccccaagggggtttggggttttttccccccgcaccaaaaaaggccccccaaaaaagggggggccccccggggtttttggggtttggggcccccccctttcccccttcccgggggggtgggggcccgccccccccccgtggggtttttcccttggggggtcccggggcccccccccggggggtttcccttttccccgggtttgcgggggggccccttttggtttcctcccccccggggggcccttttcccccggggcccccccggggggggggggggggcccccccccccggttttttttttttttggggggcccccccccagttttttaaggggtttttttta

SEQ ID NO: 578739 - DNA, 400 bp, Homo sapiens
cgatgcacgactgaaggagccagacacagcgtggagggcttcccagtcgtctgccttcttcctgactgctccaccccagcctgctaagtctgctgccagcggctgcacctccagggccagggtgacagtccccatagagccccactcctgcccggtccaggctgctctgggtgcgtcagtcgcaaacacgcacatgcacacttataacgctctacgcttacaaaaataagatgcatctccatcagatcatgtccttagttattcccttttttgaaagacaaaaataataagttaccttcagaagaccccctttgctcaaaaaaacccttgatttccctctgtgggctttactttcctttttaaaatacgttgctctttccgggaagctgctgactcgtgg

SEQ ID NO: 578740 - DNA, 335 bp, Homo sapiens
aggatctccggcactgcttcggatgaactcttaagcggagggggggataagctggagttacacggttgagtttaccagggttggaggctcaggaagaggtctgaagagttgaactcagcaactctgagagaaggggtgctgctgtgtgctgctagaacctccaaggagggggcttggcgggatgtgatgaggctggtcttgtgaataacaggcattgggtagcttggtgtcgttgttaatggtgatcgtgcttctcggcctcgaagagcaagcacgactcgaaggctggaggggcgttcaatgctaccgccgccgtcgcgtgcagagaccaaggg

SEQ ID NO: 578741 - DNA, 502 bp, Homo sapiens
tccttcttagtcgtgtgtacatcatggggaagggagggaaataaatgacgggagggtcgctgctttttaggtttcaaatggacattccagaacaaggcggtgcctgagcccgtgcctgtcttcagaatcttcagcagcacagttccggggaaggtgggagccaccagcctctccctgaataactgggggagatgaaacaggaagctctatgacacactggatcgattatgacagacactgaaaatcacgatctcatccccctccagcacctctacctgtggcccgccgatcacagccggaatgcagctgaaagattcccgggggcctgggttccaactggcccactggtggactctgaggcctctgcattggcgggtgggtcttgcctgtgatatttgggtcatggggctgggtctgggtcggtttcccatttggtctgggccagtctcggtgtgtctataatccctggtccttcattaaaagcaaaacctaaagaaacaca

SEQ ID NO: 578742 - DNA, 135 bp, Homo sapiens
aattttgctgatcctctcaaataacaaatttttgggtttgatgatatcggttattgttcttttttctatttcatttatttatgctctaatctttattatttcctacctcttggcttggtttcccttaacaatggg

SEQ ID NO: 578743 - DNA, 896 bp, Homo sapiens
cctatgcgcctggccgcgtttcatttgtctccgccgcggcgattgtggcgccatcttactcatatgttctgcggcgcaatctggttcccttcccggcacccgtgccaagccccggttctaatgccgctcctgggttccagcctggcgcctccccttcgtgggacgccaacccgtgggccccactatccgggccattcacacagcccccggcccagatcctgcggaaggggttttattctcccgggccctcttttacggagggtcctcttaacccgcgtctcggagggaccccccccccgcttgtgtgtgtgtgcccccccgcccagcccgagggcgccgtctttttccaagggtgtaccctcaccgcccgggcccgggctttttgtacggcccccctcccggatgtgccccccggatatgtgggccacttctcccacaaaatcctggggggccccagcacttttgcgcagcgctggtgaattcccttaggggccccccccagaacctatcacacgtgtgtgccgcttttaacctgtgacgagtgatgaaagaatacttggggcgctttcttttttaaatcggtgccacccacgaggacggacccaagagccacttgggaagtttttacaaggtttgaatgcgtgcgcaatttcccaatgccgaagtgcacagtacacgcgagtgggaaaaaggaataatagtggtaaggccccggggaacacccccgaaatgaggaggagaacacgaaggaagggggaaccctaacaacggagcaccaaccctgggacaaggagcacgagaactttggggcactccccgccccccccacaccccaaacagcccccgccttttccccccccgcccccaaaaaattttttttttgggcccaaaaaaaa

SEQ ID NO: 578744 - DNA, 124 bp, Homo sapiens
  misc_feature (90)..(90): n is a, c, g, or t
ggagttgggcaagatttgattcggagcaggtgtcaagacgtgtttgggaacttaggatccagttgaatagaagccagtagaggaggaatntagaggccttctagattaagaccgattctggaat

SEQ ID NO: 578745 - DNA, 220 bp, Homo sapiens
aaaaatttgttttggttaatgtcccccatttacacttttcggcaaatttggttgcaaacaaatggtttttttttatttttcccttggtttggggtttgtaaattgccaaaaatgtacattgaatttcaccttgtaaaagttttattttttcccttgtttggtattacccaaaaaatccctgtttttttgaaagggcttaataaatttttttggtttccca

SEQ ID NO: 578746 - DNA, 347 bp, Homo sapiens
  misc_feature (19)..(20): n is a, c, g, or t
  misc_feature (26)..(26): n is a, c, g, or t
  misc_feature (53)..(54): n is a, c, g, or t
  misc_feature (68)..(68): n is a, c, g, or t
  misc_feature (75)..(75): n is a, c, g, or t
  misc_feature (79)..(79): n is a, c, g, or t
  misc_feature (84)..(85): n is a, c, g, or t
  misc_feature (99)..(99): n is a, c, g, or t
  misc_feature (182)..(182): n is a, c, g, or t
  misc_feature (209)..(209): n is a, c, g, or t
  misc_feature (267)..(268): n is a, c, g, or t
  misc_feature (289)..(289): n is a, c, g, or t
  misc_feature (343)..(343): n is a, c, g, or t
cctctgacttacagcgcgnncagtgnccagttgaaagagcgcaacagctcctnntcccttccacaggnacacccnagtnctctnngcactccttctctnagtagaccttgttcccgttgccttgacagccccgttagggaaagagcacgcacttccccttgacagcttcaaatgcccagagntgaataaggctcgccaggggccccggnctgtgacaaagttgtcaccgttgcccatacagccgcggtactgaaatgtctcacagcnnatgatatgtaccattataganataccttgtgtgtcattcacatacagggcgcgccagagtagcacatctgacagntatc

SEQ ID NO: 578747 - DNA, 135 bp, Homo sapiens
atccttatttgttgtgggtagcataacgcaggacgtgtaggggcgctaagatccaggacactatggcaggctggggcgggaatccctgtggtctggacagtgagggcggtgaaaaaggatcctgtacacctccct

SEQ ID NO: 578748 - DNA, 454 bp, Homo sapiens
tttttttttcacactctgtttctcttgctctctctcatgcagagaggagacagagaaataataaagtgataaaggatgtcattaaaatgtcatgaaagaagaattgaaaatggcaaataagtgtatgaaaaaattttcattagcaatcaaaacaatgaaaattgaaatgaggctgggcacagtggctcatgccggtaatcccagcactttgggaggcccaggtgggaggatcacttgagcccaggagttcaagaccagcctgggcaacacagtgagaccctgtctctacaaaaaataaaaaaattagctgggcatagtggagtatacctataatcctagctacttgggaggctgaagagggaggagagcttgagcctgggaggtcaaagccaccgggaactatgattgcctcactgcactccagcctgggccacagagtgagaccctatctcaa

SEQ ID NO: 578749 - DNA, 341 bp, Homo sapiens
ttttgttttgggacccaaccccgggttttcatgaaaaaaaaaagccagacccttagtttgggaacggcggttggggtgccaacctttttttttcagtttggccgggctagcaaaaaggggcccttgttatgtaaataaatccccttaggtggtcaaaatcaaaatttttcccccccttttttcctttgggggggggtttttttttccccccccccccctttttgggggggattttacccccttcagggcccttgttccccatattttggaattttcctttggttttgttcaagtcaaaattggccaaccccaataggaaagggcccaaacccccaaaacca

SEQ ID NO: 578750 - DNA, 283 bp, Homo sapiens
  misc_feature (127)..(127): n is a, c, g, or t
  misc_feature (131)..(132): n is a, c, g, or t
  misc_feature (150)..(150): n is a, c, g, or t
  misc_feature (161)..(161): n is a, c, g, or t
  misc_feature (209)..(209): n is a, c, g, or t
acagtgcagtgtaagcattaccatgatctgtaggtaagaaggcagattattagagaattgtgaacatatgttgcagtgggcagctcagcatagaaggggctacctgcaggaggcagggctggagganagtnntatagggtcctggtaagngtgctatgtgngaaatgaggtcattgtgcccgcaggttgtttgtgattagctgtctctnacaattgttcatacaataattgttcattattgttctcaacttggggctctccccaacctggggacccttcctta

SEQ ID NO: 578751 - DNA, 165 bp, Homo sapiens
ttcatttctacacgattatacagtgagccggatcttactgctctcctctgcttcacgaagggccgcaggagtcatttggtaatcataagtgccatataatatacatgaagcactttgctggtggctctctgtgcagtacttgtcccgtaaacagccgatgggcgt

SEQ ID NO: 578752 - DNA, 1471 bp, Homo sapiens
ggggttttttataatgaatgtgtggcgtgctcgcttggtggtgtggtgttgttccacgcgccatcgtccgctcgagtttttgttctcctggtgggggccgcccccccggtcgcacgggtggtaaaatttttgtggtgggggctgcgcacgcgcccccacggggggtttttctcattggggggcactatcggataggtgtttctttcttggccgtcttgtagatcggccccgaaaagtagggtgttgtcgccccccatgtgtggagattatattctccgcgggagatcctttttttttttgggggcgcctcattgtgagagcctatgtctccggagagaccctgtgttgtggggggcgcgcccccctcgtatataaaattagggcttcccctcttgttttttgggggaaatataataaaatcttgcgcccgataattccccactggatataagaaaatcgtgattctttccgcccacaggatatacaggatatataagataaaaacaccttctatttggggtgtgtgaaaaatatgtgtaaagaccttctctcgggggcacatcgccccctctcttcgagaaattgggaaatattggctagacctcgttttctctttagagaaaaaatatatagatatatagtcgctcgccctctcttatggagccccttttactatagagaggagataataaccccgctctcatgggtgagatggtgtatgagagagataccccacatctgtataaatatatggccccccgctgataaaaatgtgtgtctcttctcagcactggtgtttctctctccaaaggcgggttattagcttttgggcgagtttctcctcgcagaagacaggatcttttggggtgtctccacagagtgtcccacacacacacacagagacacacacactgctgtgctctgtgtgtgtgttatgtagagccttctcacagtgtgttttgttgttttctcatgcagagaatatatagaggagatacatcttctgggctcacacacacacgcgccacacacatagattgtgtggtgtgatgacactctttgtggtgtgggtgacccacacacaccacacatactcacgtgttgtctctcacacacaatatatgagaccgcgctgtgtctcttatataaaagaagtgtgtatatgaatatatatcgcagggtgtagcctctctctaataaccacacacccaccctgcggaacccagaagggagaatggagctttgtggctttagtgatattcacctctgggatagcccagatgtttcgtgaataccactcgacatttatagtcgccaaactcggcgccacgaaatattttatttaacttcttttgccgtgttttggattacctgctttttgctttccttttggtttggttttgtataaaatgataaaacttccagaaaattaaatgtcccgtgcttgaattaaacaaaaataaaaaaaaaa

SEQ ID NO: 578753 - DNA, 360 bp, Homo sapiens
ttggataaacagcaccgttcggcggcggtattcttgcgcgaaatcacagctgaagatgtcttggaagtaacagacaagattgcggctgagggagcataaatggagccttccttcgtgcttgcccaaagtctgggcgagaactttgctcatgccgcgacgtctgggccactggtcttgggaatgctggcagccgctgctgcggacttagtttcctttgcttctccttgcgtggtcccgctcgtgcccggctacatttcctacctggccagcattgtgggtggggaggtaacgcatgacgtgaaacgtggcgcggtcgtcggcaagcgccccagtggtctgtggtgggttccgcgctgctgt

SEQ ID NO: 578754 - DNA, 104 bp, Homo sapiens
ggatttgctggtgcagtacaactaggcttaatagggatatataatgctctcagagattatatagaaaacccggattatcacaaaagccaaaggagaccaaaaaa

SEQ ID NO: 578755 - DNA, 403 bp, Homo sapiens
gagacggatctccctccgtcgcccaggccggagtgcagtggcgcgacctcggcccactgcaagccccacctcccaggtccacgccattctcctgcctcagcctcccaagcagctgggaccacaggggcccaccaccacgcccggccaatcttttgcatttccagtagagacggggtttcaccgtgttagccaggatggtctcaatttcccgacctcgtgatccgcccgcctcagcctcccaaagtgctgggatcacaggcgcgacgaccgtgcccggccaagtactgttaataggacaaaactggacagtgtgaaagagcctggggataggagcccccccccgcccttttttttctttctttgagacagagctcactctgtcacccaggctggagtacagtgg

SEQ ID NO: 578756 - DNA, 658 bp, Homo sapiens
cgtggtggctcacacctgtaatctcagcactttcggaggccaaggtgggtgaatcacttgagcccaggaattcgagaccagcctgggcaacatggtgagaccttatctgtacgaaaaatacaaaaattagttgggcgtggtgggcatctgtagttccagctacaaggaggctgaggtgggaggatggcctgaactcacaaggaggctgaagtgggaggatggcttgagcttgggaggtggaggttgcactgagccaaaatcgcaccactgcactccagcctgggcgacagagtgagaccctatctcaaaaataaatgtggtatatatacaccatgtgatactacgcagccatgcaaaagaatgaaatcatgtcttttccagcaaaatggatgcagtcagagactattatcctaagtgagttaacctagaaaaccaaatactgtctggtctcactcgcaagtaggagctacacactgaatacacatagccatttagatgggaacattaaacactgggcactccaaaaagtgtcagggaaagaggggtgagggctgctatctgtgagtcctatgctcatcatctatactcatcacttggatgacaggatcagcagaagcccaaacgcttagcttaccacattatccaccttcccgtggct

SEQ ID NO: 578757 - DNA, 354 bp, Homo sapiens
gggattattattttaagttttattaaaaattcataaactttagattattgtgtatatcagggacccctgggccatggactggtaccagtctgtggcctattaggaactgggctgcacagcaggaggtgaggggctggcaggggagcgagcactactgcctgtgctctgtctcctgtcagatcagtgggtggcattagattctcagaggagtatgaacctgattgtgaactgcacatgcaagggatctaagttgcacgctccttatgagaatctgatgcctgataatctgaggtggaacagtttcatcctgaaaccatcccttccacctcccttcagtctggaagaattgttctc

SEQ ID NO: 578758 - DNA, 910 bp, Homo sapiens
gaggcggagcgaggcttggaggcgcgggagggcagcgagaggttcgcgggtgcagcgcacaggagaccatgtccggggcagcagctgcagccagaccccaagccgggccatccccgccactctgtcgggtggtgctcgggacgggtgcagtcccgcccgggactacagcaacgacccccgggggcaacgctcttcagaaccacccccgggaggtacccaggatcattcatatgaccggaaattcctgatggagtgtcgagaactcaccttgtgaaccaaaaagaccccccaaggggatctgcccaccattcggggggtcaccagccctttccagtgaatgagcccccattgaaagccagcaaagagcaacctgtcgcaaataggcccagaaagataagcggggcgagcgcggtgaagaagtccacccagttggcgatggaacattttaacacgcaccagccatcggttgtggaaggcacctacccaaggggggcccttcgagggcctttcctggagaaggaggttccaccagcaaggccttatgaaagtgatcatacttgggccaggcagtagacgtgggtcaggacaccccaagcctttctccctcaatcaagggaacctgcccactcttcttcgtgaacacccagcagatacctctttgggcctccactgatgaagggagctgcaccccagggagtgaccctgcaggacaacctgagccaggccaggatgggcagacgaccttcttcgaatgtcagagtcagccctgtgtgggggcacaccatcttaggtgattgtggaagctccctctccagaaggataagcctgcagcaaaaaaaaaaaatgggcggcagatctaatggggccgaaacatacggaggaagttgaaaacgagtgaagtgtacgcacg

SEQ ID NO: 578759 - DNA, 450 bp, Homo sapiens
  misc_feature (124)..(124): n is a, c, g, or t
caggagaatggcgtgaacccaggaggcagagcttgcagtgagccgagattgcaccactgcactccagcctgggcgacagagcgagattccatctcaaaaaaaaaaagaaaagaaaatgaagttnctaatgtgagagttaaagaggaaagaaacaccaggcggggcacggtgactcatgcctgtaatcccagcactttgggaggctgaggcgagtggatcacctgaggtcaggagttcaagaccagcctggccaacatggtgaaaccccgactcgactaaaaatacaaacattagctgggcatggtggcaggtgcctgtaatcccagctacttgggaggctgaggcaggagaatctcttgaacccgggaggtggaggttgcagtgagccaagatcatgccatcacactgcagcctgggagacaagagtgagacttcatctcaaaaaaaaaa

SEQ ID NO: 578760 - DNA, 301 bp, Homo sapiens
  misc_feature (14)..(14): n is a, c, g, or t
  misc_feature (70)..(70): n is a, c, g, or t
  misc_feature (95)..(95): n is a, c, g, or t
aacggagccagggngctgactgatacactccaagcggagacagaccaactagaagatgagaagtctgctntgcagaccgagattgccaacctgcngaaggagaagggaaaaactagagtcattcctggcagcttaaccgaacctggcttgcaagaatccctaatgaacctgggtttcccaagagagagatgtctgcgcgctccccttatctctactctgggggccctcagagaggtgtcccaccccgagtgtctagagggagccctacaccctctctctactacagtagccccgtagagcc

SEQ ID NO: 578761 - DNA, 250 bp, Homo sapiens
  misc_feature (222)..(222): n is a, c, g, or t
accatagatgtgttccagaggcaaaagagacacattatcctagatggcagaacatgctttcaaaacatataaaacgtcaaagttccagatctttctacattttaaatcctgtctgaggatggcagctgactttatgtagctgatagacgactagagtttcatccaaatacctgaccacgacttcatggagatttgaataatctatccgatgagatttatatntaaacaactcaactcctgtcgaaacaaa

SEQ ID NO: 578762 - DNA, 1623 bp, Homo sapiens
ggtgccatgtaacgaatgtgcctttcaccacccccacaccctgccatgactctgagtgcctccccagtccacgtggaactgagtgcagctgtatgtgatgtgccaatatgcagacaacgggaagtaacctcaggcacttttgtgcgtggacgcaggtaacatgacaagaacgagaaaagacctgcaacttgactgccctgctccctcgcacacatacgcaaccttgctgacctatactgcttggctactaccccagcacacttgctctgtgcttatcctcttatctagaccacatacacagcttgtgccccactcctaactcctgcgctattgcgaacctagcaacgatcccctccaaccttgtccacccacactatgctcctctctagccactccctaactacctcagattctaccactatgcccccacctgctcccaacctgccacttcccaacccctcaatcccgcaccctccacaccccccccacgtaccacctcctaaccccctctaaccagcacaaaaatccaacacctctcccgccactcttccacgcagccccctgtccactcgtcacccccccccccccctcccttgatacttcaccaccctcccccaaacttcatcccttcctcttaaacccacatccctcacgcccctcgtacttccccgccctcgaccaacccatccccccaacccccccccctctaacccaccacgcaccataacaccctccctcccacccaccacccctacctacaccccaccatctctcccccctgattccccaaacagacatcccaacacccatactaccccaccgcctcatcacctcctccacccactcattcgaaacctcacctaccactgtcctcatgccccctacgcacacaacatccaaacacacccaaaccatccacaccttacccaaccctaaccactctaccttactcacaccatattccaccctctaccccccccatccataccccccattcacactcctccttgaccttcctcctacactatccaaattaacattctgtacgacacagtccatcacaactcccactcctatacctcctatacccctatacccaactcctcttacccacacccatcacactactatatacccaacaactacatcatcactcctccagcattatctatacaccctatgctccctacccctacacctctcaccacacctactactctcgcttcccacttatgctactacctctaacttcgtcaccatcctacaaaccccccacacaccatcacctacccaaacctaccacaaacacctcccctacccctcctcctcctcaccgctacccactactcctcccaaccacacaccccccccaccccccccctcacgcccctcatcccctcccaccccccctcacccctacccccacctccctccactcaccctacaccatcctaacctccatcacaccacacacacacaccacactacccctccccactcccccactcaccctaccccccccaccaccatcacccaccctaccctaccttacactccactcacaaccacctataccatccaccccatctcctcctcccactccttcctcacccccataaccat

SEQ ID NO: 578763 - DNA, 333 bp, Homo sapiens
cacgcactgactagtcctggtgtgtgcacctctagtcccagctactcagaaggctgaggtgggaggatcacccaagcctgggaaggcagaggttgcagtgagctgagatggtgtcactgcactccagcctgggcaacagagtgagactccatctcaaaaaaattaattaattaggccgggcgtggtagctcatgtctgtaatctcagcactttgggaggccgaggcaggctgatcacctgaggtcaggagttcgagaccagcctggctaacatggtgaaatgctgtctctactaaaaatacaaggcgtgcacctataatcccaggtattcggg

SEQ ID NO: 578764 - DNA, 858 bp, Homo sapiens
  misc_feature (9)..(9): n is a, c, g, or t
  misc_feature (12)..(12): n is a, c, g, or t
  misc_feature (18)..(18): n is a, c, g, or t
  misc_feature (21)..(22): n is a, c, g, or t
aaaacaaanaanacaaanacnnccctccccgaacaccacaaccacatcaatttttattattctcagcggccacttttagtggctttcaaaggtcattcattttgttcttcctcagttatgacttattccataataggagatgaaccgcccaaggttttccaggcctcaactgaaactcggggagctccatgaggaataaaggaaaccaggaccggaatgagagatattgactgaggactcaatttcatggtcccccgcctctcatccacccgtcagtgcctctgcttccggttgtttggccatctatttaatggttaatcaccaggtcctctcccccgtcaaccaacgacccctttttccggccttatattctcacgcactaaaatatcaaaaaataaacatcctgatattactaatattaccatacgattaataaatgtcacaaactaccctagttttccttttttttgcccccatctcttctccgtttttgtttttttcgttaccattctaatccattagtttttagcttccatcgtcccagcccccctttctttctttttttttcccgcttctccccccccctttatcgtactctatttgttatcccccacccccacaccatccctctcgatttcccccttttaccgtgcttcttcccacattttgtaacccctccgactaccgccccagtacaaaacgattaatcacccccatcccaatcctctctatcacgtcccccattcccttacctattccaccccttgcgtcgaccggggagatcttttatcccgcctttgcctcctttcttactactatttctccgaccatcctactcttgtgttttcccatcgcccc

SEQ ID NO: 578765 - DNA, 568 bp, Homo sapiens
tcaacgctttatacttcctacacatatcaagttggacacgttcacattgctaacgacggggtgggccgatagtacgacttcggtgagaactgtctgagatacgtgaacacggaggtgacaaagtagagtgtagctgtaaggaaactagcagatttgtgcccgtgctgtaggcaacgagtacggtggcaggggaacagtcagtgaggatactgaacaatggctcccatgttgtgtatcctgtcccggggaatctagaagaagaggaatgggtacgagcagtgcatgaagagggataagcaggttcttctgcactgggtgtactatgcgtgacagttacgacacgtggatgccatcgagtgctgttgatggatctgtggcggatgctcgaactcctgtagaacctcaggaaggttcgggcgaagtggatcgtggagagcgagagcttcaaggaatggttgaatgaggacgactatgaagtaaatgatgacgaaaaccctgtctcccgccgaaagaagatttcagccaagacactgacggatgaggtgaacagcccagattcagatcgacg

SEQ ID NO: 578766 - DNA, 929 bp, Homo sapiens
caagaaaagatatgtattatgtataattacgacgtgtataagttcattagtgttggctggttttctgggtaggtgttgtgtagtctttcctggtggtctgcagcaacaatgaccatgggaccccccctcctgttaccccgcgggtttttgtcctctctattggccttcttctcccgcaagctggtcgcgatcttgtgcgaactccccgaggttcgttaccagaccatatcgaggtttctcttgtgccgtcccggaccattcccgcgttttgttccctattgtcgggggcgacccacattatcgattgtggcccgcctcccggcacacacttagtgtcacaagattccccgccatgtggaatgtttcaaatgcatgggggaacaaacaaggttcctataatgagacgcgtcagcaaccccctttgtatccgcccccagaacaacgctgtgttagaaattacaattcaaggaaaaattttcttgcaggaaaatagtttgccgtagaacgccgcccaccaaaacgaatgctcgtgaagtctcccgcgtagtttacacggccctgaggacaacaataatgctcgccgcgagcacccacgcctgtgtattgatcccccattcttgtacccccggctccggctttgtttcgccgaagacaactctacggcgcctttgagttctcttgggccaaggtaagcgtgaaacacgaaatctctcttctctcacaataatactaaacagggagcaatttttctcccgtgattatctcctcagagaagagacaatggttctcaactcctatttatcagactacggaacctgtggggaaaagcctccttctattggacaaaccaccccaagagatttctcccaaaataaaaaaaaaaggggaaacttccataccccccaaaaaaacggggggccaaaaaaaaa

SEQ ID NO: 578767 - DNA, 736 bp, Homo sapiens
tagttgttttttgggctccggtgaatcctttattatttcccactgggacacaacatttttcccaagacagtagcacagtccttggtataaggcatggttaatatggtctattttggcagaaaagaatatggctacaggtcactggccattcacattttcacataggcattctggacagaaattaaagaacattcccatgggtggttcaacatttaatggaatagtaagttctactttctggccctggggtatattaatgggggtctttcaggtgaagtgggtgaaaaacagcattatggtgatgggctggcttcttaacaggggcccacgggtccaatgacaaggtaggcccctttgggctgaatttctcagactatcttctggtagttcccaaatcccttgggcaggccaagttttcgagattctttattctcggtctctctggtccaggggacatggctgggtcaccccggtccttttccatttctggctcctggtggggtgggtcccacggggttctcagaatcatagaagccgggcaactccacttaattcttcccggtctgaaagaacttggtccagttgtgcaaccgggtatatagggcttcagggtccgttgggggaccctttcgaggtgtccttttcataccccagttacatcttcgacgggttttctcaccagtatagtgatccgggagtttccggtcaggtccgacattctctccctcgttgcctg

SEQ ID NO: 578768 - DNA, 889 bp, Homo sapiens
attagtcccctggcccaacccgtcatctactctaccatctttgcaggcacactcatcacagcgctaagctcgcactgattttgatacctgagtaggcctagtaaataaacatgctagcttttattccatgttctaaccaaataaaataaggcccgtcggcccacagaagctgccaatcaagtatttcctcacgcaaggaaccgcatccataatccattctaatagctatcctcgttcaacaatatactctccggagcaaggaagccataagccaatactaccaatcagtacctcatctattaatgaatcataagggctatggcagataaaaggtaggaatagccccctttcacttctgagtcccagaggttacccaaggcacccctctgacatcccgggctgcttcttctcacatgacataagaagctagcccccatctcaatcatataccaaatctctccctcaattaaaggtaagcctgtctccgtcactctctcaatcgttatccatcatagcaggcagtgtgaggtggattaaaaccaaagccagctacgcaaatcttagcatactcctcaattacccacataggatgaataatagctgttctaccgtacaacgcctaactataacattcttaattaagtatatatatctaacgtatacgcattcctagtactcaatttaaactccaagcacaggacctatagtttctcgcactgaacaagtaatgatagaccttattcatcacctcttcccaggaggtgcccgtaacggttggcccatggccttcgaaatccaaaaaagtcgttcccctaataccaaaccttattttttccggattacacaaaagccttagaaaaagggggaaaccccccccaagggtccttaa

SEQ ID NO: 578769 - DNA, 243 bp, Homo sapiens
ggaagcgtgttgaggcagaaagattaagagagagatagaaacagccaggcgcagtggctcacgcatgtaatcccagcactttgggaggctgacgtgggcggatcacttgaggtcaggagttcaagaccagcctggccaacatggtgaaacctttccctactaaaaacacaaaaattagctggatgtggtggcgggcgcctgtagtcccagctacttggaaggctgaagcaggagattcatttg

SEQ ID NO: 578770 - DNA, 283 bp, Homo sapiens
ctgctccgcccctctctgaggactgagtagcggtggggtccctgggtagaagagtcaagctggggagcacgctggaggggaggccttctctatcctggtgcccagccagtgggctggcctcccaaggagggttgactttgtgcgtgtctagcaggctgagccagccgggaggctgtgcctctgtcctctaggggagctgtaaaaacactgttgctggaagcatcagatgcataagatagagttaggtttaaaatgattgcctgataactgtgaacagcagatg

SEQ ID NO: 578771 - DNA, 339 bp, Homo sapiens
taatctagtttattcacccaaaaattgaaagagaaggaaaattttgaaacaaacaaaggaaagaaaccagtttttaagattagcagtaaataaatttatacaacagttgggtctgaataaaatgatgaaataaatcaacatcttttttaatttgggggctttgaattaaacaaacaaacaacaattacagggatttgttcacaaagcatgaaggccaaaaaaaaggttttttaaaaccctaaacggcaattggtgaagggaaacactgattgcccaaaattggaatttcctttgcaaaggccaaaagttttgaacaaataattccccctcaacccccca

SEQ ID NO: 578772 - DNA, 131 bp, Homo sapiens
gaaaagttcgttatggactgatccctgaggaattcttccagtgttctgtatcctaaaactgagtgtaacaggaaccctatgtactcggaactagggcttatctagtacgctgtatccaaagaaatatatgt

SEQ ID NO: 578773 - DNA, 383 bp, Homo sapiens
taatttattaactttgacccaccctttttgagcctgcagcctttccgtgtggcctgagggctgtcgagtgagctgccccaggcccttccaagcccttgcccaacctgggggagtggggaaggtttggggcaaggcccccttggggggtttatttcctgttttgtttcttgtctttgtgttctgtgggccctgctgagagaaaaaaaaagtgagcccagcagaaggaggtgggaaaacggacccaaaccccagtgggccctgccccatgcctttcctttagtggtgggaaacccttatcttgcaaagtgaatgtgtccccttcccccccctctagtgtatttcccagaaaacaaaacctcccaattaaacggttggaacctgga

SEQ ID NO: 578774 - DNA, 451 bp, Homo sapiens
tctgttcagaggatcccgtcctaggataataagaatctcttagacgtgtttgaaaggaagggcgaagaggggcaacttcatgatctaatcaataaagataatttgggattacaatcaaatatgaaggaagttgtaaaaataataatgttagttgtttggtgtcttcaaaaagacttctctaaggggccttcaatgacaagtgtggtcaaggtcttggaatgcgccgttgaagtcgaaacaacttggattacaatttcatgagaaaacaaagacacgaatgaatgaatcatatgattccaatcttattgattttttcccataatgggagtcctatatatacacacactatttttacagtatatggaaagaaatcatgtttatctaaataacacaatttatgcctactatatttatctaaacaacacaatttatactatccatatttaccata

SEQ ID NO: 578775 - DNA, 136 bp, Homo sapiens
tatgaggagaaaatggaagtaaggccaaatattactgattgtaaatctaatgaatgcaccaagtgatataagtgttctaatagacaattagccagtagtgataaaaaacaataattgttacctatagaatgataaa

SEQ ID NO: 578776 - DNA, 146 bp, Homo sapiens
ctattccccgggattttaatgccccaaccctattgtgcccaaagatgagcctctgtcctgtaaataaaaaatgaagtagagaaatgtttaatattttatgagtttagaatatagtaaataaaaggtgatgtaaatgaatgctgcca

SEQ ID NO: 578777 - DNA, 195 bp, Homo sapiens
aaaccaaaattttgggccctaacctggggtttgcagcccgtttccgttaacctcggggatgtcccctcacccccagcctggggtttgacgtttttcctcaaactggagtaaggagtgatgggccgtaaaattctgtgtaatgataaaagggtgaaatatcccctgaatgatttaaacccactttaataatttgga

SEQ ID NO: 578778 - DNA, 217 bp, Homo sapiens
gacagggctagatttaagaggcaggagtcaatgtaaatgcacttaagtatcagcagcaggagggaaaaaaagtcaacagttattggggactgaggagcagcctgatttatactgacaagcaagccttgtgagaatgagagaaactcaactgagaggtagcactggcttgctttctcaattgcaccctcagtgttcaacacccttctggaggtcgacg

SEQ ID NO: 578779 - DNA, 257 bp, Homo sapiens
agatgaagacttaatggaaaatttagcccaagatgaaacatctaggcgggacctgggattggaggagtgggatgtagctggcctgcctgggtggtttttaggaaactggagaagcaactatacacctagaagtaagggctcaactgatttacagacaaatcaggatgtgggtacggccatggtttcagatactacagatgactgggggttttggaatgagtcagtatcagagcagtaaggtgtggggcgataacata

SEQ ID NO: 578780 - DNA, 668 bp, Homo sapiens
agcggaaaagttaagcactcccactttcaaaaaaaaaaaaaataataacccacacacacaaagagtgtgaggactggtagcttaaaaaaaataagttttaaaaactgactttctggtatttatgatagatatgaccattttgggtgtgagtagattggttggcatgggaaatgaactgaagcagtatggtagatttaacaaggaaaaaaaaaaaaaaaccctttaggtggtacatatgagcatcttgggtatgggcccagctagaaagcctccagctaattggagatgttgcgtcatggtaacatcccttaggccagatgtgataaattggcaacgccgatggaatacggcaataagcattttacatccccatggttcccctatataattcgccacattcatacttcactggtcccccattaaattcccaagttactcctctattccgctatctttcacacacactgctcgcgggatcgaataataatctcactccccactttaaagaggggatagcagttgaccttcatcaatctcttttagaaggggaagcatggtcagaaacagtatattgttataatacagaactctaaaagacgaaacgcaaatttccagggggaatacctaagggggaatcactaagagaattcagtacagacggattagat

SEQ ID NO: 578781 - DNA, 935 bp, Homo sapiens
  misc_feature (732)..(732): n is a, c, g, or t
  misc_feature (760)..(760): n is a, c, g, or t
ctggagcttccccaaccgggccatcggagccccagctgcaggaggaaaaactgattggtttaatggggcattctcagacttcttcttcgaactctgccaatggagagctacttccggtcgtgggggaccctgcagctgttgctggtgggcgaatcaaggtgcccaacgactctgacaatgcctgctgagggccaccatactttgggagcaatgtcctgcagagcccagcacgctgattgactcccacatctgaagctggagcagcgggtcatggccccaccgcgctgcaccatcaagccctctggcaccaccatctctgtcactgctagcgtcaccattgccatggtcccaccagaccagcctgaggtccagcatagtccagcatgacatatggacagcccgtactcagcgcgcaagatggctctaccgggggaaggaccatgcgcacgcagctggacctgcgcaggttccgaatctattccaaccacttctgcactggagtcgctggctctgatcccattacaggcccctctgaagaccatgctgcagattggggtgatgcccatgctcaatgagcggacctggcgtggggtgcagatcccactacctgagggcaatcaaactcttagtgcatagaggtgggtgacgaaccatagcgggattcctcaccgatcggggcgtgatctgccgaccatttgaccaaatgggctcgacgacgagcgtgatctcgangaagaacctggccatgcatgatgtcagnggcgtccactgcccccacaccgtccacagcagctgtaatgagccctcaatccccaagctggcagctgtcattcaggaccccaacccctctcagcccctcttttccacattatagcatgtagtgccccctctaacccctagtgccacagagaatacgggaggggaagctgtaccca

SEQ ID NO: 578782 - DNA, 145 bp, Homo sapiens
gcagtgaatcgagcccggtaccccaaagttgagactttgcagaccaggttctgttgacaaggatgttgcgagcagccaggtcgcggtgcacatagttcatctcgggcaggtacttcatgccggcagcaatgccccgcaacaagca

SEQ ID NO: 578783 - DNA, 236 bp, Homo sapiens
  misc_feature (97)..(97): n is a, c, g, or t
gccccccgggttttccctttttgtttccgggtttttttttttggggaattttgaggggaaaaactttttccccagggaaccggttttgcattttttnggttttttacgccccccctttaggggatttggcccccggggccaaaattttgggcaagggccccccccccccctttagggggggaaagggaaatgttttccctgtgcccccaaaacaaaaaatttgttcccccccccca

SEQ ID NO: 578784 - DNA, 825 bp, Homo sapiens
cacatgggagaggcagatttaaaggcagggtgagcccagaggagcagcgacacgagtcttgatggaggggcaaaatatgacatagagggggacccttcctggggtaaactaaagagagatgaagtatactgagaaatctgtaaggatggtgttaaaccaaaaaaagattgggttctaacggtccacgaagactgtcacagtgaagaaatggtggagatatcttggtgtcttgagccgccccacctggatgagtgacttcagggacagagcagagggaagccaaatggatttcccttatgttgaccccaaacttgttgactgaaattttgtataggtccgggagaaataagcctaaaccaatagttgtagccctagaaaaactgttttccccattctgttctgagttagaatccgcatagcctccctggtcgcccttaaatgtgaaaatcctattttgattaatacccccgcctaagagttatagccatacgagagactgaatctatttttgtttcgggtctttacctcatagtatgaaattaagtaagacactgcatagattttgccctgaataactggtgtgccccggtataccgtgctctctctctgtttcccgtggtggtaattttaaggcctaaagaagctggggttaatcctcgaagcttaaagtaaatgtttcttgaattgattttgttctgtggtaccaataacatctatgaatatcatatctgtataatatctgacccagttgtgtgcagagaggttgatataactataatttaccagaaatgatttttaccattaaagttcaccttttaaccatga

SEQ ID NO: 578785 - DNA, 116 bp, Homo sapiens
gctgacatacactattttggagaagttaccacacgcttcacagactaacatcaagaaatcgccaggtaaggtgaaagaagttaattgcaaaagaaaaatgaagactgtgaaagagg

SEQ ID NO: 578786 - DNA, 369 bp, Homo sapiens
  misc_feature (298)..(298): n is a, c, g, or t
ctttattttatttatttatttatttttgagacggagttcgctctgttgcccaggctggagtgcagtggcacgatctcggctcactgaaacctccgcctcctgggttcaagcgattctcctgcctcagcctcccaagtagctgggattacaggcgcccaccaccacgcctgactaatttttgtattttttagtagagatggtgaaaccctgtttttactaaaaatacaaaaattagccaggtgtggtgacacacaccttacagtcccggctacttgggaggctgaattgggaggattanttgagcctggggaggcattgcagtgagcggagactgcgccactgttctctagcttgggatgaccctgtttt

SEQ ID NO: 578787 - DNA, 512 bp, Homo sapiens
gggcaggtgatggcggcgctggtcgtatccggggcagcggagcaggcggccgagacggccctggcagaggtcgggcccctcggggccgcgtggccaatcagatcccccctgagatcctgaagaaccctcagctgcaggcagcaatccgggtcctgccttccaactacaactttgagatccccaagaccatctggaggatccaacaagcccaggccaagaaggtggccttgcaaatgccggaaggcctcctcctctttgcctgtaccattgtggatatcttggaaaggttcacggaggccgaagtgatggtgatggggtggacgtggaacttacgggggcttggcttggggttgggttgctttcccagcaaggcgcccgggaacgctgactctctgtggtgccactacggcacacagtgtgccgtgattcccaagtggacacactcgagcccaaagacttccgggatgctgtacgtctttgtggacatccggatagacactacacacctcctg

SEQ ID NO: 578788 - DNA, 88 bp, Homo sapiens
atgatgtcgatcaggttgccattgaattttgctctggtgaatgctgagacccagctttttcttacaaataaatatggaccctattttc

SEQ ID NO: 578789 - DNA, 87 bp, Homo sapiens
ggggcccccccccccgggggcctgctcccttagataattttaaatacgcctgtgggccccacccccttaaacccctgtttgttcgga

SEQ ID NO: 578790 - DNA, 137 bp, Homo sapiens
gccctaggatccatctttcttttcacctgtaggtggcctgcctggcatatgtataagcaacactcatcactagcacattgtactacactgacactgtactacgattgtagactcacgttccactcatgtccatatca

SEQ ID NO: 578791 - DNA, 110 bp, Homo sapiens
gtgactagtgagctctacggctagtagaacatttaaaaactacaatgtgattaactcgagcctttcgttttcatccatttacattgatcacagttttgctagttcaaacg

SEQ ID NO: 578792 - DNA, 141 bp, Homo sapiens
tgctttaattccaagttttatttcttccctaaaagttttttatgggaatgaggcggaaacaggaaaccccctatttcctctgtatttttgaagtggaatttctatttaaggggctcattaaagcatagtatttatccccca

SEQ ID NO: 578793 - DNA, 357 bp, Homo sapiens
ttaatgtaattgcaagtattaacagcagaatagaccaagctgaagaaagaatctcagagctcacaggcaacatctctgaactcagtcagacaaaaataagaataaagaagaatgaacaaaacctccgagaaatatgggattatgtagagaccaaatctatgactcattggcatccttgaaagagaggaggagaaagcaagcaacttggaaaacttatttcaggatatcatctatgaagacttccccaacatcgctatggagaacaacattcaaaatcaggaaatgcagaaaatccctgtgagattctatataagaagaccatccacgagccacatggtcgtcagattcttcaaggcc

SEQ ID NO: 578794 - DNA, 284 bp, Homo sapiens
actatcccaggtctaaatcactactgtagagaagtggaccgaggtcacactatcaagacggacttcctcagttaggcctggcggaagcaggcatgggagggtttgagctagggagccccaggaggggatataccacatatggagtatgggctagcccaggtactaggggtagcaggtagaatagtagcttggcctcctctgctagcccccaacccagcccctgtcttattgagatgatcagtgtgcatcctacaccaagaccctgggacccagcacaacctggg

SEQ ID NO: 578795 - DNA, 325 bp, Homo sapiens
attaataggaaagtctagaagaaatggacaagtacctcacttatatacaacctaccgaagactgagaccatggaaaaaacacagaacctgaacagaccaataacagataatgagattgaagccatagtaaaaaatctctaagtcaagaaaagcccaggactgatggcttcattgctgaatactaccaaaaatttaaggaagaaatgataccaatcctactcaaactattctgaaaaatagaggagggaatacttataaactcgttctatgcaggcccagtattacccgtgatatcagaaaccatgacaaatgacacgattccaaa

SEQ ID NO: 578796 - DNA, 156 bp, Homo sapiens
tagaggatccccgtgcagaatcacactcaaaaagctactaacaggactggtgtaatttaaaaaaaactaaggcagcaaggctttggcacagagttagcaagcacattggccaggccttcaacatcatagtcagcttcagtttgcaacaaatgtgca

SEQ ID NO: 578797 - DNA, 396 bp, Homo sapiens
cctgtgtacatggccgcgtgctgttaatactgacagcggaaatctggcgctagctggcaatgcgcgagagagaatagaaggacgggtccaacccggcacatctgctggctgtggccaatgatgaagagctgaatcagctgctaaaaggagtcaccatagccagtgggggtgtgttacccaacatacaccccgagttgctagcgaaggaagcggggatccaaaggacagttggaagccatcatcacaccacccccagacaaaaaggccaagtctacatcccagaagaagcctgtatctacaaaagcaggaggcaagaaaggggcccggaaatccaagaagcagggtgcagtcagtaaggcagccagcgccggacagcgggctcccgggggtaccgag

SEQ ID NO: 578798 - DNA, 1017 bp, Homo sapiens
tggaattcaacaagtttttattggagtgtctattatgtgctaaatactgaaacacttcagaaaacaaaaccaaaagccctgccctgtgtcgggcttacagtctagcactttaccgccagtttaaccgtgcaggctaccgtggagccccgggcaagtcaccgcacctcgtggtgcctcggtcctcagcgtgcccaatggggagaataagcagaccgtggctcagacttgaatcatgtgctggggtgtactgcagatgccaaacttgcttccccaaaacccaccacgttaaacgagcagacgagggcgtggaagtttgaattttaaatgataaagtcacaatgaagggagggcagaggggctaagcctagctgtctggggtgctgatggtggtggtagacgtggtctacaccaaactgtagcatgctagcatcgcggcagactaggaggaggcccgccttgactgggagaggcaccatgtggccttactctgaacgctgccagtgccagtcatccattggcctatactccctggagcttcctgtgagctagtactacaacaagttgttatggacaaggggcctcgccttgacagcttagccaagatattttcaaaacccttacatagtctgggtcacgtggctttggacccgggcaagaccaaatcctggacagctcttggagaccccaaatacgctagaggagacccaggcttccccgggcggattcagtcgcagccactggtatgtaaagagttcagcaccagtaaaacacattcgttcctccaaccaccaattaagccgggcgttggataagaagtccccacgcgaaacggtaggccatgggccagaatacagagagggtcccacaaaaagaagtcctccccaggacgtataccgcggattggagccaacatgtgagggacaaaagggccgatcggccccggcggggcactcccagttgggtcatgagaccagaaactcggcgagagcacacagacaccggaaagggggacgactc

SEQ ID NO: 578799 - DNA, 276 bp, Homo sapiens
  misc_feature (109)..(109): n is a, c, g, or t
cttatgcggaggagatgtgttcatgttacttacactaacattagttcttctatatgggtggatgattggtccattgtggtgtgaggagttcagtatatgttgggaattnaggtaagtgggtgttgaacttgaacgctttcttaattggtggctggttttagggctactatgggttttaaattttttactctctctacgaggttttttcctaagttcccaagagctggtcctctttggactaacagttaaatttaccaggggggctgcgtaaaagtg

SEQ ID NO: 578800 - DNA, 141 bp, Homo sapiens
  misc_feature (20)..(20): n is a, c, g, or t
  misc_feature (31)..(31): n is a, c, g, or t
  misc_feature (56)..(56): n is a, c, g, or t
  misc_feature (113)..(113): n is a, c, g, or t
tgttccctggctcagcctcnaatgcagtacntttgttgtgctctgttgtttttatngcagggctggggtggtttttgagccatgcgtgggtggggagggaggtgtttaaacgncactgtggccttggtctaacttttgtgt

SEQ ID NO: 578801 - DNA, 238 bp, Homo sapiens
  misc_feature (7)..(7): n is a, c, g, or t
  misc_feature (24)..(24): n is a, c, g, or t
  misc_feature (30)..(30): n is a, c, g, or t
  misc_feature (36)..(36): n is a, c, g, or t
  misc_feature (42)..(42): n is a, c, g, or t
  misc_feature (91)..(91): n is a, c, g, or t
  misc_feature (101)..(101): n is a, c, g, or t
  misc_feature (111)..(112): n is a, c, g, or t
  misc_feature (127)..(127): n is a, c, g, or t
  misc_feature (132)..(133): n is a, c, g, or t
  misc_feature (141)..(141): n is a, c, g, or t
  misc_feature (189)..(189): n is a, c, g, or t
  misc_feature (200)..(200): n is a, c, g, or t
  misc_feature (221)..(223): n is a, c, g, or t
gcctagncatcctgtcggaaggtnaaggcnaaaggnaaattnaagtccagactgtgacaaacccaggactgaggcctgccccatgaagagnctgagccccntgaaaccccnnccccgttggtggtanagtcnnagagacgnaggggcctgggggatatgaagctagggaagcccctgcttcgattcccnactgcccttgncctggatccaacaccaaatannnagaaacaagtgaagt

SEQ ID NO: 578802 - DNA, 220 bp, Homo sapiens
  misc_feature (35)..(35): n is a, c, g, or t
tctagaggatcccatcaggcgaagacttgtggggntcaggagtcagaaagtggttctatttcaaggtctctcacagggctgcaatcaagaggtgggcatggctggggtctcatcgtgaaggctggactggagaagaatctacttccaaagttatgtggtagtgggaagaatttagttcctcagggctgctaaagtgatggcctgtgttccttgcctctgg

SEQ ID NO: 578803 - DNA, 629 bp, Homo sapiens
aaacactacaatcaggcacagcctaaatctccctctaacaaatcagactttggaagtcttcagtccagagcataggccagagagagcaggaacaccagggttgtccttagcataaccagttgcaggttatttgcaaatcttttgctaggtggagggctgctcgagtctatttcctctgccacaaatttgagaggactcagccaaaggtcacatggtttctatctgacaccaatatcggggccacaccccacagactgcagcattgttgtgcaaaccatgttggctactgtcccctaagctggcaataccaatccacgggtggtgaagccactgcacattatcctgtgttgccctgctgctgattcttgaaaatgcttgctagcagcattccaactcgtctctgtaaccaggctttgactcgaaacgctttacacctcagcctggtataaacaagaccctgatcaaacccaactctcaaaaagcaagttcttgataaacttggttgcctccggaaactgaggggcacaggagctgtgtgtgttagccctggtgttagttaacccacagcaggccctcttactaaacagctcattcttgcactttaacatctctccttgataaccgtgtct

SEQ ID NO: 578804 - DNA, 125 bp, Homo sapiens
atcgaaaccttgcgggtactactatctacttgcgccaggtttcaatttctatcgcctatactttatttgggtacatggtttggctacggttgtctggtagaggttatgatgacaggatttgatag

SEQ ID NO: 578805 - DNA, 656 bp, Homo sapiens
tccacactagtcagagtgctggatacaggcatgagcacatgcagactttccatttactttctgcagctgttccctagcagctcctctagggagaggtgaattcttgcagtttgtagcagagcacacaggaaaaccctaaattttctaatacccaaccggctctttcccttttctgtcccgggatacctgggggcaagaagaatttctttggttatttggtccaatgctccccaagaaatcaggctaaattggccagaacaacggggatttgaagaagccaattcaagtgaaaccctttggcaaagcccccaattcaaacctggcactcccctctaccaaatccctggcaacagggtgttcctgaaagagcaggtgctgtacatttttaccagctttaacaatggggggctgtttgacagacaataattaagggagggcattgaatttatgcgtgctataattgcagagccctaaaattacaggcgggaatgaggggctggaggcagcaaacggaatctgccctatgagcgtggctgttgagtcctgtctcctgggtctgactttccgtaatatgattggggtacagtagaggtgattaatgggggctggcattctctctttggcctgaggttctgtattctgggaaaagtatacag

SEQ ID NO: 578806 - DNA, 426 bp, Homo sapiens
cacgaggggtactcgagggcctgctctagccctgccgccacgaaaaaatttcgcccgggcgagcgcttgcgcacgaagagctcgaacacggcggtcgcctgcatgccttgctccaggtaggcctggagcatggtgagctggtacaaatcggtgagcagggggctcatcgaggggagcgcttcctcaggccaggtccgccacggtgatgggcaccgccccagcccgctccatctcggtccgggccgcctctccgtctcctggcttcacgtccacggcgcggatggcgtcggtcaggagcagcacctggaagccctgggtcagcgcgtcttttaccgtgttcagcacgcagtagtcggtggcgagcccccccaccacgacccgcttgacgccccggcgcctgagcagctccgccagctcggtaccctg

SEQ ID NO: 578807 - DNA, 141 bp, Homo sapiens
tgatagagtttgggcgaaagatctcactatctaatttaatggtagaagccggtcgtggcgtgagcgggtgtgatggagtgctagtggcattttgtaagcagaatgcgctgcggatgaaccgaagcagggttagggttccgg

SEQ ID NO: 578808 - DNA, 385 bp, Homo sapiens
acaccacctgagtcgggtacacatgagggatcctgtgatggaaccgttctctctcttgactggggtgttggttataagttgtatagaactaaatacacacataaacgagagcctgtcaaactggtgaaatctgaataaggttggtagattttatcaatgtcagtttcttcgttgggatattatagttatgtaagatattaccattaggggaaactgggtaatgggcatacagaatctctgtgtggtattccttgccttctttctttctgtggttttatatttaatttgggaacagagttttttgacagagtttggctctgttgcccaggctgaagtgcagtggcatgatcatggctcacttgaacttctggactcaggtggtgtg

SEQ ID NO: 578809 - DNA, 438 bp, Homo sapiens
  misc_feature (23)..(23): n is a, c, g, or t
  misc_feature (38)..(38): n is a, c, g, or t
  misc_feature (292)..(292): n is a, c, g, or t
  misc_feature (295)..(295): n is a, c, g, or t
  misc_feature (309)..(309): n is a, c, g, or t
  misc_feature (313)..(313): n is a, c, g, or t
aattttaagcaaggtccctgggnaaactttcctgaaanccttcctcccccttaatgaatgaaaaggaccccagaacttccttgtttccacatacttgcctaaagttttgttcaaagatcaagcaaatgaaaggcttcctagctcttttgtgtctccctaatttagctttctgaggagtgacagtggcagagagaagagctggggtagagtctgttcgagaattcagtttttcatcactgaagctgaagctgttcctataaagtgaatctgcatctccgagtcctgaagccgnctntgtcgctgaacaanctgnctctgcgccgcttcatgcgctccaggtgctcctcgtagtggaagtggcgctcgtggaagggcgacgcgaagtcggccagcaccgcgtcagaacgtcacagcgcgtccgacaggtcctcccggccc

SEQ ID NO: 578810 - DNA, 889 bp, Homo sapiens
gacagtatggaagccggacccagagcctgaggtgggcagtgtgccaggctccctatgcggcctcctcaagccctgtacaggcgtatgggcatcaagacagcattgccggcggctgagctggtgcctctacgtctctggtgctgagtggggccctggcctatgctggccggggcctccttgaggcttcacaagatggggcccgacaggaaggccttccgggagtctgtgcgagctggcgtgggagtacagtggccggaagatggatgtggctgacgttcgagtgggtgagtgtggttcaccgtccgtttcagtcaacagtcaatcatcgtttgccgcatctccgggacatgtgctgtttgcttaaacgtctgcacgatggttgccccagagctccgctcctggatgtatgctgtgtacggggccttggctgtgatgggcacgaatgggcccttggtacctgctgctgctgcttggtcactgtgtgggcctctatgtggcctcactttggggccagccctggctctgtcttggccttggcgttggccagcctgtgcctccttcaagatggacccacctaatctcttggcagagcgggcttgtaacaggcactttagatcttcaagaggtgctgtgtcatgggggcagcagcttcacagtgctgcgtagcaccagctttgcactggagagctgtgtccacccatgagcgacgactactccttagctgagctggtcaagtacaagttctaagcatgacccttcttccttcgtacgggcccatcagtgaccgttggatcggcattccatgctcagggtgagccaggtggagccagtggagacgcgaagggtgagctgtggaaaatcgaagcccagggcaggctacagcgtggtg

SEQ ID NO: 578811 - DNA, 180 bp, Homo sapiens
taatttctattttgtagttcgagcaccgtttagacgtcgcacttcagtgaaccagtagcggcttgatcagtgaccccagcgaaggccaaacggagcagaagaccaccggctgagacctgcggaaatggtctgacctccagaattgtgagaattaataaatcattgttgttttaagctacc

SEQ ID NO: 578812 - DNA, 197 bp, Homo sapiens
caccggctggccgctgaccacgttgtcctggttggtgatcatgtagacgtgttgccagtcgatcaacgtcggctggtcggggttgcggctggggttggggtattttttcaggatggtttcagtgtcaaagctgacaagtacatcagtaactctagacatgtttaagcgtccttacttggtggtaggtcagtcgacgc

SEQ ID NO: 578813 - DNA, 236 bp, Homo sapiens
atgtcccgtagcatatcaatacctggccctgtactcctaccccaagtacggcaccctattaactacatagaggagggaaaagagtagctaacgcgggggtgaaagaggacgtgtaacccactgccatgcacaaaggactggctagtagtaaacctaggttggcccctgcttgtactctactgggctagcagagtctagccccaacatgtgcccatggcctctagaaactagctcag

SEQ ID NO: 578814 - DNA, 1247 bp, Homo sapiens
agggggcctctaaaatggtaaaataggctctacaaagggaaaataaaaagtggtgttctcccgggcgcaccacacagtcttcccggcgaaggaaccaccagggaggccttattaaaaaaaattgggggggaatatccccccgtgtggttgtagaggaaaaggcctcctaaaagaaattttttcggcccaagtggagaacaggacctatcttcggcccctcctaaggggggcccctccaccccgcgcgtttgtggtgggagaaaatggggcccccgccctaaagatatcccagcgtgtgtcaagcgcggccagatggagcccccttctctttcttaatttaacccgggcttgtgaaaagtggcgcgttctcttgcccgatgttttcaaccccgggtttctaacccaccagaggccccatggggcacctcccgcctaaccaagcggtagcttcaagacgtgcgttttataactttgggccccccacaaaagagggaccaggtaccccaaggagtactctatacgccttagtagaaagaatacccaagaagaacatgttttggccccccggggcccggaagaatagaaagagcgtgcttggcgccaaaaagaggggaacagtccctcccaacctaagagagaacccccaacgtggtgctcattttggaaccagaggagattaacacacacggttcgcaccacacccttgggtggggagaacaccaagagaaaaacttctcacactctgtggtgggtggattgccacacaccgcacattgggagactcccatcggagacctgtggttggtctatttttgtgccctgccccctgtgtgttctggtaaaaatagtgggggtctcccttacttgccattatacaagaggaaagagccaagaacatggggacacttttagagtctccaccaggaagaacacctggccacccacattgtttcgccctgtccaacacacagagtgtaacatccggaagaacacaaagagcgcctttttggctaagactggtggaagactatccaggacccaattaccaatagaccagataccgatgagatccccccgtccactggggtggccaaagtcctgggtcctaagatctgtggcgtctgtatctgcccaagctctgaaaaggccaagggctaaagaacttgcccctataactgggcgtaaaaggaccctgttgaattttctgtacataaaaataattgaaataataccaattttcccttcca

SEQ ID NO: 578815 - DNA, 933 bp, Homo sapiens
  misc_feature (1)..(1): n is a, c, g, or t
  misc_feature (48)..(48): n is a, c, g, or t
  misc_feature (61)..(61): n is a, c, g, or t
  misc_feature (117)..(118): n is a, c, g, or t
  misc_feature (170)..(170): n is a, c, g, or t
  misc_feature (174)..(174): n is a, c, g, or t
  misc_feature (180)..(180): n is a, c, g, or t
  misc_feature (183)..(183): n is a, c, g, or t
  misc_feature (213)..(213): n is a, c, g, or t
  misc_feature (216)..(216): n is a, c, g, or t
  misc_feature (234)..(234): n is a, c, g, or t
  misc_feature (237)..(237): n is a, c, g, or t
  misc_feature (271)..(271): n is a, c, g, or t
  misc_feature (362)..(362): n is a, c, g, or t
  misc_feature (391)..(391): n is a, c, g, or t
  misc_feature (464)..(464): n is a, c, g, or t
  misc_feature (499)..(501): n is a, c, g, or t
  misc_feature (518)..(518): n is a, c, g, or t
  misc_feature (520)..(521): n is a, c, g, or t
  misc_feature (588)..(588): n is a, c, g, or t
  misc_feature (767)..(767): n is a, c, g, or t
  misc_feature (799)..(799): n is a, c, g, or t
  misc_feature (801)..(801): n is a, c, g, or t
  misc_feature (839)..(839): n is a, c, g, or t
  misc_feature (842)..(842): n is a, c, g, or t
  misc_feature (863)..(863): n is a, c, g, or t
  misc_feature (872)..(872): n is a, c, g, or t
  misc_feature (925)..(925): n is a, c, g, or t
natgttcattttcccccttccctccctatcttttaagaattaaaaaangaagaaacaaaanaaaaatttcatccccacaacgcaagacacgatgcttcttgaccagactctgcccanncgcccctcctgggagctccttctcaatccgcctcactgcggccaggtcattntggnggtgcntgntcccaggggctgcagcacctagttttatanttnggagaggttgggataganctngggaggcagctgaggtgttttagtgtcaaaagangactggctgacccccctagctcaatttggtctcacaggtgagaaggtacctggctataaatatgaatactgattgaggcaggcttgatctnagactttcagggcaggcagaatgactatngcccaggtcccacaggatgtggagtttccgggctcagcatcatggtatctggggcgcatgtccaagtggagtnaattctagctgggaaggtccgctcaggcacacggnnnccccggtctgtttttcntnncccaccccatggagtatccaacgctggtacctcacctcccccccaaccccaatagcacccatgtgtntcaggagcctttggatgcctcctgccatcctgtgtgcaccctgaggccctataactcgtctcgcatcttgtcacccttaggccggaccaggcgcccaatgaatagcagggagccgctttgggtgtcccgcactaggaagatgaaggggtggtcggcgtagaacagcttggggctgcgantccctcgcgcccgtagatgtcctggtcaaagnanttgccatctgtgtccactcaaaggcggtggcgtggacnctnggccaggtacaggtcttcttnctgacatgntgacagtcggcttgttttgtcatggctcagtaggccagccagcagtgttctgnggtatggg

SEQ ID NO: 578816 - DNA, 547 bp, Homo sapiens
gtgacagatatttttacacacacacacacacacacacacacacacacacacccaacagattagaaaagtttaataagtacacttggatatctaagttttaccagctatttatatcggctatttagttttcatcctgccagcagtgcttatttcattttgtctatatttaacatttggtcaggaatatgaaaacataatctgttttaagactcctagaaagctatgatattatttcgttaatactatcataggtttctaggttacaggttgctcgcttctgtaatctcagtactttgggaagctgaggcaggcagatcacttgaggtcaggagtttgagaccagcctggccaacatggtgaaaccctgtctctactaaaaatacaaaaattagccgtgtgtggtggtgtgtgtctgtagttccagctactcaggaggctgaggcacaaaaatcacttgagcccggaaggcggaggttgcagcaagccaagatcggatcacttcactttagccttggtgacagagtgagactgtgtctcagaaaaaaag

SEQ ID NO: 578817 - DNA, 141 bp, Homo sapiens
  misc_feature (113)..(113): n is a, c, g, or t
  misc_feature (125)..(125): n is a, c, g, or t
aggtctcctaaaactgggattaagaaccttgctctcctcatctccaaggcagggaccatcaagaacctacagactccatctcttctgcagcctcatgccaacccgggctattntgctgccttaanacaggtgtccttaacc

SEQ ID NO: 578818 - DNA, 278 bp, Homo sapiens
ttcatgacttctctttggcacatcaaaattgctaacatgactactcttgcattttgggtccattattaagttaaataaggattgttacttgaacataagcactgtggtacccaacagttgatctgataatcaagatggctactaagtgactaactggtaggtagtgtatgtatacagttacagcatggataagctggacaaagggatgaatcacatcctaggtgggatggagtgggacagcatgagatttcatcacactactcagactagtgagcact

SEQ ID NO: 578819 - DNA, 149 bp, Homo sapiens
aataggctggccccaggctcgaacccactactgatcagcagcgcgagtttagacctgctccgtttccgacctgagccgggtcacccctccttaggcaacctgctgggcccccgctcccgggaggacaccatattgatgccgagctaacg

SEQ ID NO: 578820 - DNA, 316 bp, Homo sapiens
cccgcgtccatcccccttcgtcagtgactcagacccacactgtgccgtgcagctgtgtgccctgcacacccgcttgacggggcactgattacttttggggggccctttcagaggcacttttaaagcaaataaaacattcattgctcaaatgtttttctgtattcttccttttaacaaaaacatgcatacatacacaggggatggtgggtcctaggaaagacacacacacacgcttcacacacacacgctcacacccacactttagtgagcacatgctcacacacattttgcttcttgaccccaggcctgtacccca

SEQ ID NO: 578821 - DNA, 812 bp, Homo sapiens
  misc_feature (600)..(600): n is a, c, g, or t
ctcgctgccgcgtcctggcgctggctgctgctgctgtgcgctgcctgcgcctgctccgctgcccccgccgtgccccgttacaccaaccactgggcggtgcaagtgctgggcggcccggccgaggcggcacctgcgtggccggccggcgcacggggtacctcaactatgggcagattggaacacctgcgaagataactaccattttgatcacagcaaaacctttaaaagatcaaccgttgagtagcagaggccctcaacgacccttcctcagaatggacccccaggttgaaatggctccaagcaacaaggaagtgaaacgaagggtgcaagcagaccaggtgctgaagtgacccgaaggccctattactatcaacgaccccattgtggtccaacatgtgcgtacctgcaattgtggcgacaagaacagtcgctgccggttctggaactgaatgtccaggcagccgtggaacgaggggctacacacggaaaaaagcgtggtggtcaccatccttgatgatgggcataccagagaaatcacccctgatctggccccaaaattatgaattcctaacgccaggctaccgactgtgaacggcaatngattattgacccatctccaggatattgactgccatgcaatgaaaaaataaacaccggcactcgttgtgcggcaaaagttgctgcttccagcaaaacaagttcctactggcatcgggggcatagcgtacaatgccacaataggggggctaccgcttgtgggacggggatttcaaaatgtgtccagggcaaggcccggcgcgttagaacccgtc

SEQ ID NO: 578822 - DNA, 1100 bp, Homo sapiens
gcgagaaagaagctgtctccatcttgtctgtatccgctgctcttgtgacgttgtggagatggggagcgtcctggcggctagtgctccatggcgagctggataccatgtttgtgtggaagtgccccgtgtttgctatgccgatgctgtcctagtggaaacaactccactgtaactagattgatctatgcacttttcttgcttgtcggagtatgtgtagcttgtgtaatgttgcataccaggaactggcaagaacaactgaataagattcctggattttgtgagaatgacaaaggtgttcgtcccttgtaacattctctggttggctactaacagctgctatatcgtttgtgcttcggcttctggctactgtctctactcttcttctctctttactaatgatcaacactgacgcagtaccacgctgactcctagacgctgcacgtgccacaactggacttccggctctctttaaatttgctgcagcaacttgcaattattattggggcacttcttcattccagcaaggaactttttacaactgctgtgcgtctaatgctaggccactggccacgtgcccttctcgttctcatcctcatacaacctagctccttaccttacttgcattcttgcaccattccactggacactggacatccgtggcgtcgcacccacactcgccaacccaacggcgcaactccgaagcatgctccgctaatgcacgcctttgctcatccagcctacagcctcctgacattatctgcctgctcctttcacttgcctatccgtcctgtcccttggtctactaacactcaatccagcccagttgtccaagaaaaaccaagggccgtccatcaggctgtcaacaatgctccctcctgcgttgggtgctttcctgtaaattgcccttactactggcccaacacaatccccaagcatctcccccaacccaagatcctcgctctcggtccacagctctccagcctacttcccgcccctacaccaacggcacttccgccatgcgccacctctgtcccacgtgacccacaacctcatttccccccaccccctactcccctacgggctacactctcccccagccg

SEQ ID NO: 578823 - DNA, 693 bp, Homo sapiens
gcaccacggcagctctccgccaatttctctcagatttccacagagaccgtttgaagatctcaagcgcagagtatgccatgaacgcgatatggccaggcgtggtgggacggcctggaggtgtggtgagggggaacgtgtaggaatgggccacagacatggccgtgagcccgtctagccatgccaggaaggctaagagcatgtaagaggccgagcacacttaacatacaccgagaaggcaccaatcccaacactgtggcacctggacagacataagacagacgaaaccagggaaaaagagaagacaaccagaaactaggcgggggctcacaaacaccaatgaactccaaagcacacaacaccagaccatcaacgggaaaagcccgagaacaagcacaagaaacacgcccgtagaacacagaatagacaccaaacaggcaatcaagagaaaacacgacaatagaaggatccgacaaaagtcactggaccaacaagtcgttcacaccactgcaacagagatggaatagacggcagatacatacgaagccgaaagcgccacacgcacaaaccaaaccgcagcgacgtagaagacataacaccaacccaaacaagagaaaaaacaaaacacaagcgcgaaagaacgaaaaaaaaacacaacaacaccacacatcacagaaacagaccaacacaagaacg

SEQ ID NO: 578824 - DNA, 158 bp, Homo sapiens
tattgtcactggcggaggagtcagttgatatttagggatttattaggtagtgagtgttgagcttgaacgctttcttaattcgtggctgcttttaggcctactatgggtgttaaattttttactctctctacaaagtttcttcctattgtccaaagagc

SEQ ID NO: 578825 - DNA, 296 bp, Homo sapiens
ggtcggtaccctgtgctggggaagatggtggttgctggccagagtcgggtgatgagtgggtctgggtatggggcgtgggcgcggtgttgagcgtagctactctgtccagtcccagaaggaagctgttccgtccagttgaggagcggcgcgctgatggttcactgctcctcctccaaggactcctgcgagatgccctcgtcttcctccttctccagttgttttggttctgccccttggtttccttccttgagttgtggtggttatccgggtcttggtagcacccttgttttttgctt

SEQ ID NO: 578826 - DNA, 291 bp, Homo sapiens
ttccttgtcgagcgggtcgtaaaccctcatcccttgatttgtattttttttttttggaaaagggaagtctggctcggtcaccagggtgaattgcaggggtgtgatcacagccgtcaacctccaaggcctcagcagctcctcccacctcagacctccgtgagtagcgtggaacatataaacatgtaccaccagtgccaccgggatgggcttgggctcttttttttttttatttttggggagaagggaagggagtcccccggcggggggcgcgccacagggcctctcgagaga

SEQ ID NO: 578827 - DNA, 302 bp, Homo sapiens
  misc_feature (3)..(3): n is a, c, g, or t
  misc_feature (27)..(27): n is a, c, g, or t
  misc_feature (108)..(108): n is a, c, g, or t
  misc_feature (110)..(110): n is a, c, g, or t
  misc_feature (112)..(112): n is a, c, g, or t
gcngagggtggcatcagctgccgcggngggcgtggacacagccgcagctccggctcggtggagctcccccagcgcacggcagagtccgggcagagacgccgcgtctcnangnggggtcacgaatgcggccgacatattacccccagcaccctcagcgtgcctttcccgacccccttggaggcggaaatcgccatgggtccctgggcaccagatgccgagccccaccaaagggtggtttggggaaggatctcacagttgagtgggcaggatcctgggtcgtccgctggaaagttgaaagattg

SEQ ID NO: 578828 - DNA, 459 bp, Homo sapiens
  misc_feature (108)..(108): n is a, c, g, or t
agtagagacggggttttgccacattagccaggctggtctcgaactcctgacctgaagggatccaccagcctcgtccccccacaatgttggggttacaggcgtgacacntgcggccagcacatgtcttcttttttgttaagaccaggtctcgctctgtcacccagactggagtgcagtggcacaatcttggctcactaaacctctgcctcctgggctcaagcgatcctcccacctcagctccccaaaatagctgggactacaggtgggtgccaccaatgccaggctaattttgtttacttttttgtagagataaaacaccatgttgctgaggctggtctcaaactcctgggctcaagtgatctacctgcctcggctccaaagttgctcacagccatgagccaacgtgcctggcctatacatctcttgggtacacatatatgagtttctctaggggacaga

SEQ ID NO: 578829 - DNA, 173 bp, Homo sapiens
ttcaatttctacacgaggacactcagctgttctgctacccatttatttttaaggataggactccattccttgaagtaacagtagtcatcataagaaaaatttcattttaagaggttagaagagctgttgtcctaaatgtactgttatacataagaaattgtgtagaaattgaa

SEQ ID NO: 578830 - DNA, 135 bp, Homo sapiens
acatgatgatgacatcaccccagcttaggggcctctctgccaagaggaacttttatctggttctgacccatcccttcagggtttgactaggagacacttccccttctctgatttcctaggcggtgatgttctctg

SEQ ID NO: 578831 - DNA, 293 bp, Homo sapiens
cgggacgggagacgacggggtggaaggccgagggcccaggaggacagcagtggctggtgggagaccctggaccccaaacccccaacagagtgggacccagctgtggtctggtgtgaagacccgtgcaccatgctgcccccagtgtgacctccactctgggggccttggttccttctgagtgctgcatctcgcacacaatccacagtgtgacatgggtgcgggctagggccacatggaatgcctcaccccagtgactgggagaactgtggtgtggatggccacccttgccttgg

SEQ ID NO: 578832 - DNA, 333 bp, Homo sapiens
  misc_feature (24)..(24): n is a, c, g, or t
  misc_feature (113)..(113): n is a, c, g, or t
  misc_feature (134)..(134): n is a, c, g, or t
  misc_feature (137)..(137): n is a, c, g, or t
  misc_feature (180)..(180): n is a, c, g, or t
  misc_feature (198)..(198): n is a, c, g, or t
  misc_feature (208)..(208): n is a, c, g, or t
  misc_feature (210)..(210): n is a, c, g, or t
  misc_feature (212)..(212): n is a, c, g, or t
  misc_feature (223)..(223): n is a, c, g, or t
  misc_feature (249)..(249): n is a, c, g, or t
aggacattactggctatgggaatnggtacttatgaaaactaagggttgggtctcctgaggaactctaactacccagttagctcttctctttggcacttaatatgaccactgcngggatgaaagggtctacagtngcnacttcaacttggccaacagtcctcccagtcctggtcgagcttngaatcgtcccttgaagtnttcttcagtntncnccttcactganagtttgattccttcaggaagactgcnttggattatttccaagaaaatttctgcaaacgtagcacttaaaccgctgaactaaaccacttgctcatgggtggtaagcactga

SEQ ID NO: 578833 - DNA, 203 bp, Homo sapiens
gctcgctgttcgctggcacctcgctgtcgctgctaaacaatacaacattagccaggcgatggtggtgcatgcctgtaatcccagctagtcgggaggttggaggcaggataatcacttgaacccagcaggaaaaggttgtggtgagctgagattgtgccattgccagcgtagatgtcggtggcctttcccacagacacctccag

SEQ ID NO: 578834 - DNA, 272 bp, Homo sapiens
cagcgaaaacgaagtacttccatactgtcctctccgggaatgagccggttctgtttcttaaagtactttgattcatcctgcgagaggtccccctggcgtcagccaactccagcacaatgttcaggctcgttgtccttcgattaacggaggtccaatacttgatgatattggggtggtaccgttgcttcaagagggcgatctccttgacacagtcctgcctcgccttggggtccatcatctcaaagatctgccccttcttcagagccagtgtc

SEQ ID NO: 578835 - DNA, 153 bp, Homo sapiens
gcaagactcagaataaaaggacagatcccagtgagaaaacttaagtttaaataagtgtggtaaaataatctacaatattaaatgtaagttactcatcagatatattaattttacagcatataaattaagaaataaaattctccatcaattgga

SEQ ID NO: 578836 - DNA, 114 bp, Homo sapiens
gggttctccaaacggatacagtagcgccaccagtacacgtgggaattctgggcttccctcatgcccatgtagaaggggatgacagtgacacgtatgttctcagttgtttcccga

SEQ ID NO: 578837 - DNA, 370 bp, Homo sapiens
tactgttgactgtaatatactaacaagtgagtactacagcttcgtgagttcccttagagacttcctataagattaccaggtctcaagtggtcttgggaacccctggagatattactgaacttaaagttttcagaatatctgtatgtggtatattccagtggcaagcactatatccatcacacgttttcatttattgacataactccaaatatttccacatagtctaaaattcaggaaagtaaccctatccttacctctgaggatagggcttgttaagcataggtaaaccatgataatttaaattcacctgttggtgactgactttttttaatgactgtttttagtcaagaaaatgtgaaggtaggtctgc

SEQ ID NO: 578838 - DNA, 98 bp, Homo sapiens
  misc_feature (84)..(84): n is a, c, g, or t
ctcaaggtagccccggagaccaaagtgaagagcagctagcaccaggcagggagccagggcccccagaccttccgccaggcgttnggcaagtacatcaa

SEQ ID NO: 578839 - DNA, 189 bp, Homo sapiens
  misc_feature (146)..(147): n is a, c, g, or t
  misc_feature (173)..(173): n is a, c, g, or t
  misc_feature (180)..(180): n is a, c, g, or t
tctgcaggatcttgtgaataaccagcgaccaggggagatgcatgtttatttacaccagcagccaggtgggtgaggctcacgctgtcctgtggtcttgagatttttatttttggcatatgtaatccattctgtacaggtagctaacnnttgtaaaacgctagtgtattcctggnggtaccnggagctcga

SEQ ID NO: 578840 - DNA, 293 bp, Homo sapiens
ggtcgatgtattagtcaatttgcacactgctgataaagactgggcaatttacaaaagaaagaggtttaatgggacttacagttccacatggccgaggagacctcacaatcatggcggaaggcaaggaggagcaagtcacatcttacatggatggtagcaggcaaaaagagagagcttgtgcaggggaactcctcttttaaaaccatcagatcttgtaagacttattcactatcatgagaacagcatgggaaagacttgctcccgtgattcaattaccttccactgaggcaagg

SEQ ID NO: 578841 - DNA, 120 bp, Homo sapiens
  misc_feature (71)..(71): n is a, c, g, or t
  misc_feature (108)..(108): n is a, c, g, or t
aattcgcggccgcgtcgacgagaagacgacagaaggggccttttgcgggtggcggcgaaaccggagaacancgcccaatgggcttcgggcaacgctaacgagaattancggtttgggtcg

SEQ ID NO: 578842 - DNA, 1584 bp, Homo sapiens
  misc_feature (1054)..(1054): n is a, c, g, or t
aaacgtccgtcgtggtgttgtcgatcccctgctgtagtgtgaagtcccctgggggggatcctattactacctctctcgtccgtgattttttctctccatattggtgctcctccgcggtgcgtgctcggtgattactacacattgtttgtcgaccccaccccgggggtacctcctggtcttgttgccccccctttttagtccctcatctttttttagggtcgtcgacgccaccctgatgaaggaggacccacaacattggttgggcacaccgcaaataaaaacgccgccaggcgcgtgtggtgtcaacgcgctggttcctccctgcgggcatatctctcccccgccggggggggaataaacttcttggctttcgggaaccacacaacagtgacgtctttctccgggggggggcaccacaaagtgaaaaaacaccctacagtttctgtccctaaatgacccccgtgttgggttttccgggtggggagaaaaaaaactcccgcctctgggcttcttcaagaggggctcttcttcttttaatgtggcagaatactgaattatgtttgttcctgcgcccgcccaccctacgagcaagtggggattgttcccccctctgcgggccgaattactagacaactgttgatgagggagtataagacgccgcgccgggtgggtggtcttctgtctttgtagaaattgctgcccaaaagacttttggggtggggccgggaaaatatgttgtgtttttcgccggggggtctccctcctgttttgggggcctccgctcttctgtctccgtgatttggtgtcctctcctctcagacaccccgctcttctcaaagtggtgtgtgaaagatctggggagacacactctgtcttttgggtctgcggtgtcgccacatattctaaatggccccgtgggtatatttttcggctctttaaaagtctcacagagacccctctcgggagtttacacccacaaccccttctcgagagcccctcttgtctccacgatgaagtgtgggtggctctgtgatattggtgacacacacagagngggtgtgtgttctctgtaaaatatattttcccttctaaaatgttatactccacgagacatatgagaagatatatatatgggttcacattataaggcttataaagggggagaaccacatattgttgagaatgagaataattttggagaactttacccacaagtctcctataagaggaactcttttgtgagaagagggagataataataatatgcacatagtgatccactatccacctctatataacaagtggagaaactctcttggagccacacgagatttggagattaaatttgtcttttgagaagttttttggtaataataaaataatgtaaaaaacacatgctttaaatttgcacaatttaaaaatgaaagggggtaaaataaagttaagaacacatttaaaaagagaaatgagttgttacccacataaaattatagtgctataatgctgaggagaactaccgttttttttttgaatttagtatttgagatgagttgttgggacacacccaatataaatgaagaatga

SEQ ID NO: 578843 - DNA, 187 bp, Homo sapiens
aaatggttttttggttacaggtttttaatggtaccaaacaaaggtatttggcacctggttccctgggtccttcctttttaaaaggtaggttcattagatcaggaaccttggttctaagtctggttccccgtaggccccaaatgttctgctgtggaggaaggttcccaataaaagtttttaaatgaaa

SEQ ID NO: 578844 - DNA, 122 bp, Homo sapiens
atcctagtatgacgagctaatctgggccgacttgtgtacttgccagctccagcagtctatcttgtacactgctttgatgacacccaacgcaactgtctgtctcatataactgaaaagcaagc

SEQ ID NO: 578845 - DNA, 133 bp, Homo sapiens
gatgacacttgtagatctcgttggccccccttagtccaggagactaataagcagcccccgccagacggtgaacccaatgggccatctcccagaaagtttaacaaaacccgaccaggtcgcccccgttcacctt

SEQ ID NO: 578846 - DNA, 200 bp, Homo sapiens
cttgagtgtgaggaagctaaaaatgtttgcacagtgcaactcccgcccttgctccctcggactctccgtggagctcccacggactgaaagatgcgtgcccccaagcccgaacgagccccgccgtgccctttgcaaagggcagcagtggccgtcgctgccctgtgcgggctcccggtggctggcagccttgtgccaggggg

SEQ ID NO: 578847 - DNA, 554 bp, Homo sapiens
tgggggggggaattttccccccgcgcgccccccccaggggggggtcagggggggaaggggaaaagggggggggggggggcaacctacaaggggtggtgctcccggtggggtttactacttctcttgtgtggttttgcttggggaccttttggtgaggagggagagggggtccacgtgcgaagagagactttttgtgggcgcgtgttggccgatagggaggtagcaggcgccttgtggtgttggctggccccctcgccgtggtgtggtatatctttccgcgggtggggcgtgtcgtgtgtttatactgacttcccaatgaatatcaagagggggggtttttttttttaacagagagggggtccaatagatggttcccacaacaccttctgtggtggctactgagaaagaatccgcgcgcccgcgggcacctccagagtaatctcctgcgcggggggtgcctccgtccgagacccccgtctgctgttgttggtggcgggggcccaggaggtttttctcccacagggggcgctctggagagagcccccccttggggg

SEQ ID NO: 578848 - DNA, 196 bp, Homo sapiens
tcggggtattgatagtagaaaaggctcccaaagcacggataggagacctgccacaaaaataaatacctggtgccttctgatctcacagttggtcagttctacttcttatccggaagcgaattcatctccgagctgaggatgccttgtttctctttgtcaacaaggtcattccacccaccagtgccacacatgggtc

SEQ ID NO: 578849 - DNA, 148 bp, Homo sapiens
gattagcagaactagtgtttttgttttcacattcagttctcctgaagcggtgtaaggctgaaatggtggaacttctcaaagaaacaggataagagtaaaagtagactgttcctgttccaaagtgtggaagcgaactctgccaagtgca

SEQ ID NO: 578850 - DNA, 732 bp, Homo sapiens
tactatgcccttgctcctttgattctcgagacaagagaacgtcagttacagaaggagaagaaagtagatagaacgtgcggagcaggggaggtgcccaagttcgaaggcgagcttccgctggcctcatttggactaccattaagctgccagagaagaaggtaaagaatgtgacccagattgaacctttgcggcttggagactgatgaggagaggtgtctctgaaggtcacagacttggatagcaccagctggaagaagaactgagacagtggacagaagcagcgttgtatcaacggctcgtccaaacagcgtgcactctctcaggagccctttgttcccaagaaagagaagaagatcatgttgctgagggcctttctggttctctagttcaggaaccttttcagctggctacgtgagaagagagccatgagatgcggcatggtagcgtggagcgaatgagaatggcgtgaggtagaagcccatgagaagcccagcatttggaggaggccgagactacaggaggaagagctagaaacaagagatggagcggggcaggctacggagagaactggtgcataagggcgagatccaatacgcaagtaccgagggtctggacgataaacgtctaagtgaccagcctctgactgtgtctgtatctcccaaattctccagtcgattccactgataaactcagctgtgagctgcggatagccgccggcatgggaccgggtcg

SEQ ID NO: 578851 - DNA, 88 bp, Homo sapiens
ttgctgtgctctgcttctgcccctgcttctgctgcttcctgcttctgcctctcatgtctcttcacctgtgccagactagagtcaagcc

SEQ ID NO: 578852 - DNA, 419 bp, Homo sapiens
  misc_feature (339)..(339): n is a, c, g, or t
  misc_feature (413)..(413): n is a, c, g, or t
aaagtctccagatgcagtagctcacactgtagtcacagtgactcaggaggctgaggtgagaggattccttgaggccagggttcgagaccaaccttgggcaacatggcaagaccccatttcttaaaaaaaaaaaaaaaaaaatttaaacttagctgggtatggtggcacatgcctgtggtctcagctacttgtgaggctgaggcaggaggattctttgggcccaggagtttgaggttacggtgagccacaatcacaccaatcactgcactccagcctgggcaataaagtaactcttggactcaaaaaaataaaaaaaattgtagtggtagccatgtgttnattgtttaaataaattctcccaaagggcttaaaagtaattactttttaatttttttattagtttgtattttttngaccct

SEQ ID NO: 578853 - DNA, 214 bp, Homo sapiens
tcgttattcattcaacgatttataacacctcccttcaggtcatacaaatgttcaaccttaggtaacctgacgtacgagctctgttttcaggtgactgggcactgcaaccccggagaccactgtgtcagcaatgggtgtggccatgagtgtgttgcagggtaaggacagatgaatagttatcttaaggatcatctttccctaagatcgtcatccc

SEQ ID NO: 578854 - DNA, 588 bp, Homo sapiens
agcctgacgctaacaaaaccggagctgatctataacgatgaagcggagcagaaacgcccggtggacgccgagcaaaaaaacgcgcaggatactgcacaggtgcattactttatggagtcatacagggataaatgtgttgaaaagccagcgcaaggccaaaactctggcactgaaagaggtgtctcccgcagtggagaccggttccgtgaaaacagttttggcatcaccagacgttctagccaaaaggaccagaaaggttggccgggagccatcccccagaagaactacagaggcaaatgacattgtttctaagcagatttaagggcaagcgggggaagggaaacaaacccgttgtcagatcacaaccacgccgctgtaaaaaaggcgagcagtacagagacggttgaaaggcgagctagaaattcccttggaagaagctcctccagaagaattaattagttaacacgaatttactacaaagctcagtctgatggtatctggggagaacatgaaattgattacatctttgtgggggaggaagaacaaaattatctgccgcgctgaacacatagggacattagcccgtcc

SEQ ID NO: 578855 - DNA, 117 bp, Homo sapiens
gagtctccagagatggggcctggagctcggaggaaggggccaggctcacattcgtggggctccctgaatggcagcctgagcacaggtaggcccttaataaacacctgttggataagc

SEQ ID NO: 578856 - DNA, 364 bp, Homo sapiens
aaagaatctatgctgatgacagagtactgcacttgattctaccatggaaactaacagatagtggtgagaagaaagcctaagatcggggggtctaagactgatggaatcgtttatggttccattggatggttggaaagagatttggagagaatcaggcattcagtgtatttctttcccactgaaatcccaagaaagcagagttggagtttcatgtatgatgacttagtgccatagcagtggtactagcttggaaactggactaactctctgggatggaatccgtgttcgtgtaaagcaaaaacctattcatttttatagaccaaatatttggatggtttatatttctacagtattaacagcgacc

SEQ ID NO: 578857 - DNA, 689 bp, Homo sapiens
agagggccatcgctggtggcggggacaagttgtgaagagttttaaaaaaatttatcatttctccttaactttgggcaagttaagaaatctccgatggtggatgtctcagcaagtacctgatggttgtcctccacagaacttaccctggtgcagatgggaggcatttcaagccacaggaccggcacttgccctctgtatggtaaacacataacggtgtgagtcctgtatcagatgttacagcaagtattagcccatttgggtgcaatcatgcgcctcatgccagtatgtgggcctaggcctcttgggaccgatcatgtttttacccagagaaaaaaaagcatcgccggttcgctgcctgtgacaccatgtcatccagcaatgggccaatggcctttgttggcaacaaggtgagcagggcttacattcttctgcgggaatatttatacagcgcagaggagtcttgattccagtctggtggcaagcttccattcgcttaagatgcctgtagggagtgtcaaaaaaccggtctcgttcttgcagtttggttcaggctggcagtccaagtaaactttctgtgggtgtgccctctttcaataaaccaagtaccattccccctcttggtatgccagtcacggaggccttgatcggtcaaaccaatgtttaaaactttggctacaatcaagagctgc

SEQ ID NO: 578858 - DNA, 338 bp, Homo sapiens
tatacttgtgttttttttttacagcccaaaacccttattttccttttggcccaatggaagatttttgcacaacctgaaccccggggctgggcccaacgtttccattattccccaaggggaaatccggggggtttaggactcgcaatttcccttttttcctgaaaatataaggaactggacctattggagaaaccctccttggctttcctaattataaggtttcagagggcttgaaatgtggttttgggaagttgccattttggaaaggggttaatttgttggggatacagggattgcctgctttaaaaacccccttacccgtgactcgcccctttggg

SEQ ID NO: 578859 - DNA, 81 bp, Homo sapiens
acatctgtgtacttctgtgccatcaacggcggctaccaagaagagcagtacttcgggccgggcaccaggctcacggtcaca

SEQ ID NO: 578860 - DNA, 766 bp, Homo sapiens
tgggcgggcggggccgggggataatgaggtcaggagtttgagaccagcctgaccaacatggtgaaaccccgtctctactaaaaataacaataattagtggggcatggtggcgcacgcctgtaatcccagctactcagcaggctgaggcaggagaatcgcttgaacccgggaggtggaggttgcagtgagccgaaatcgcgccactgcactccagcctgggcgacagagcgagactccgtctcaaaaaaacaaaaacaaaaacaaaaattaagccaggcgcagtggctcatgcctgtaatcccagcacttgtgggaagccgaggcgggcagatcatgaggtcaggagttcgagaccagcctggccaacatggtgaaaccggtctctactaaaaatacaaaaattagctaggtgtggtgatgggcgcctgtaatcccagccactcgggaggccgaggcagaagaatcgcttgaacccgggagggcggaggctgcaagtgagccgagatcgcaccactgcactactccagccttggggacagactgagactccgtctcaaaaaaacaaaaaacaaacagacaaaaaaagccaggcgtgatggtgggcgactacgaatataatccagctactcgggaggctgaggcaggagaatggcctgaacctgggaaggcgaaggtgcagcgagccggaccggacactgcactccagctgggtaacaggagatgtctcaaaaaaaaaacgcaaagaaaaaaatttggggccggcccg

SEQ ID NO: 578861 - DNA, 944 bp, Homo sapiens
tggctattaatcctgccacaaaattttaaataacttacaaaaatctgaaattgtcacccaggaacccatttcacccagctgctcttttgggccgccagtctttggtctctcttttagagcaatggtgagggggatacccttttcctcggggaagcagaattcctagggttggtcgccctgtgcgattacacaaaattgttggcaacagtcgatggcgcaaagctgtctgcccatgggccttcttctcacgtgaaccccacgtcaaaagtacccgagggttgccctctctcgtggtgggtgactcaacgcccaatttctctccttaggttgagcaccttcccaagtaaccattacacgggttcaccgagttgctcgcaccttgttgcaccatccaggtattctgtgccggtctctacaatccaatctgcatactggtcatcatcccacctgtgaatcgcagcgggactcgccgcttaccgcgcagtggcggcgcggccatcaatgcgctcccccaacatgagggatcccttttgtgtcgccccccaccaagcattctttccctcgacttctgccacacctcttgtacttgtggcctccctcgggtggtacacgattgtacagcaacggcgacctttgctgccatacgatcaagccggaatattcctctcccgtcgtgtgtccactgctgttgacatcctagtgattcccgcagggacgcttctctcacagccgcaccttgccacccgatttaatgaaccgctggttcaaattcttcttcatccagctcctgggccggcctactaacgttttgccctccggaacatgtgggcgggggactcctcactgtggggcccgtgctgggaacgccgacccccggcatttcccctcagcgtggacgccccctctatttttggcacgccgggtgtccataacgagctatatcg

SEQ ID NO: 578862 - DNA, 396 bp, Homo sapiens
tattctcaaggggatcgaaagggtcatgtcgtcacatatatagttggcatgatagcctgtcctgcacgaatagtgatcagcaggcgcggtatgtgtctcgcctcgacgtatactcatgcaccctacatagctgcataagcgcgtggactatataatctgctgcaaagtacattgtctgggctccaggatgttagcaacgtctctcctccaatagtcataggtatctaattccctatgcaaaagttatagtggtcactccgggcactatcatggtggatcatactaatagatcattcccgaacgggaacacatcaagtggctcagatagctctcactatcgcttaatcaaaatctgagtctatggcacgacagatgtagattcgtagtacactgtag

SEQ ID NO: 578863 - DNA, 496 bp, Homo sapiens
  misc_feature (24)..(24): n is a, c, g, or t
  misc_feature (75)..(75): n is a, c, g, or t
  misc_feature (132)..(132): n is a, c, g, or t
  misc_feature (135)..(135): n is a, c, g, or t
  misc_feature (142)..(142): n is a, c, g, or t
  misc_feature (150)..(150): n is a, c, g, or t
  misc_feature (177)..(177): n is a, c, g, or t
  misc_feature (181)..(181): n is a, c, g, or t
ataatgagacgtcgaagtttaaanggaggtcataggagttcctggagaaatggctctccgttcttcataccccantgagttcaccccagtttctggccacagatttgaggaaggaacctgttgccagggaantcntcctctngtccccantgttgattaactaaagtcctggacacnttcnttcctccactggcccaagacccaccttgacccaccttgaaacctcttttcagagccgagtggcatgaaaaatgtgtactgtttctgcttctgttgatggagtggctgtgggagattaaggaaatgctaatttgagcttcattcataggggaacctactatatattgcatccctgctggttggaaattatcttcatctctggactgcattgtttagaaaaatgttaatggcttacaattctgagaactttattgtgtggctctggggttaagaattctgtggtttgaaaaaaaataaatattttgtattgattccc

SEQ ID NO: 578864 - DNA, 134 bp, Homo sapiens
tttcacacaagttaaaggaagtttaatacagataaggattgaactatacatttttttactgtttatttgtttatttatttatttagagacagggtctaactctgttgctcagcacagagtccagtggcatgatc

SEQ ID NO: 578865 - DNA, 467 bp, Homo sapiens
tggggttgtgtccttcatcgtggggtcatcctctcgtgctctttgttaacttccccatcatcatccctttctgtggctcctgtaaatcagatgttgatcctcccagatgagggcgtcttttttttttttggaaacagttccattttggtcgcccaggtgggattgacgtgggtgtggctctggcgctcagtgcacacctctgtcccccaggtccaagtgattttcctgtctcagctttctgagtagcgggaatacagaggtgcacaccaccacgcccagctattgtttggtatattaaaagaagcagaggggtgtccacctatgtgggccaggttgttctagcagtcttgacctcgtaatccgcccgcctgggcctcccaagtgggctggcttaccgggcgtaagcacacggtgcgcagcccttgtgaggaatatatccctcctccataaagctagcctcggtttct

SEQ ID NO: 578866 - DNA, 153 bp, Homo sapiens
cgaaacaacagtcctgctctgtcaccaagactgcagcgtagtgacacaatcacggctcactgaagcctcaacctcccaggtcaagcaatctcctcctcagctcctgagtggtgggctaaaggcatgtgcacacaggcctggctaattgttatt

SEQ ID NO: 578867 - DNA, 1195 bp, Homo sapiens
cgacgttctgtcatttagtgcgggagggatcatgaacctgctgctggctgaaccctccggtgtccctgacccagtgctaagcttgagcatggctgagcatgtgagcccacagcctgagcagctgtgcccagattgcatgcgtgagaacgaggatggatgatgcactctgtgtcaactacaatgccccctgtgtccagaatgatgcatccatgtgagatccgaggatggctggacaatgttgactggactgaagagccttgcgaaatgtaacaatgtgatgtgcgcctgcctttgggccctgctgatgtgcctgtttcctgacaagaacccactatactgtacacgcctagaaccgtacagctagggttgaacttgtggcctgtgagccctagtgttagttgccagacctactgtggacccccctgtgggacccacaccgtgtgaaagacttagggaccctatgactgtgagactgcatccctttgcggcagaaggcatatccgagatggaaaaggccgaggactccggtttgaggtggttggccgtgcggaacacggtgcactggggcgttggtgtgcgaacggttaaccccggggaagtaacaagagagacgtccagtccctatagtcccttgggggcgtccacacgcccgtggacaggcagagcgaattacacggttggatacccctggggcgcaccttagaacaacagaattaacgaagaattccccgacggaccgagtataggcgggaatacacccaggtgggcaccaaccgacgggcgtgccggatatgctagagcggtgacagttagaggggacacccagagggggaagcgcttgggagaggcgcgtaacccacaccttgtgcgggctcgaagggcggccccagagagccggtcaacatttgggcgagggagccccagcccgcgcgggatgggacccaccgggcacacgcaggagccacgcgagcataccaccagggaacgaaggagttgaggcaccgcacagggggagaccccactcgcgcccgcccggcaataggaggaacacgcgaggaggaaggtgggcgcacaagctgagcacacaccaacaagcagggagcgagactgaagcactgtgcacccgatggaggagggaccccccacacgaggaggccgcggcaaccagaacagcgacagacggaacgccagcggg

SEQ ID NO: 578868 - DNA, 382 bp, Homo sapiens
ttttccccgcctaactgacagtcccacatcgcaagagagttcggatgcggactgaacagacgacatcagatgtgaaaattagaaaatcagtcctgctataggaagaatagtccccaacgatacccaagtcctaattactggaacctgacacctatatgcataaatgactctgcagatttaagttaagaatcctgagatgggaaaattatactccattatataagcaggtcctaatgtaatcacaggtgtctttataagagggagtcagaaggagatttgtctagggaaaagagagtaggaaattcgccaatggaagcaaaaggttggagtgtgacaagaaagcacccatgacccaaggaatgtgattggcctcccgaagcta

SEQ ID NO: 578869 - DNA, 244 bp, Homo sapiens
catccatcttcattcccatcccccaacattcattacttacacaccactcatccatcagttgttgctgtgcagcaattcacatcccatggtcaatcacggcattcatgcaacagtgcacatccacacagcagcatgggagttcattcaactcaacacagggccaaagcagcacagctcacatgcaccatgctcaatgtaggatggtcaaagtgagtggcatatcatacatgggcgccagtggcag

SEQ ID NO: 578870 - DNA, 301 bp, Homo sapiens
tgacgtctagagtgatcccgcactcaggcacttctggcaggagcgtgcgaggtatgctgtcccacaaaaccaagcgaggccacggccgctctggacacgtctcaaggtgtttgagcggtattccaccgtcctacgacaagaatacgcggatggtggttcctgctgccctcaaggtcgtgcgtctgaaacctacgagaaagtttgcctatctggggcgcctggctcacgaggttggctggaagtaccaggcagtgacagccaccctggaggagaagtgcgcctggggaagtgcgcctgggtg

SEQ ID NO: 578871 - DNA, 2165 bp, Homo sapiens
  misc_feature (386)..(386): n is a, c, g, or t
ggtcacggctgtaggggcaggccacctgctaggtaaccgaacaacatctacgaatgatcgtacgtcacagatccagtgcgagtgtagtgagatgaatcctgtctgtcggtaagatacataacccatcaactatagtcgagagggcatattgcgcgaatcattgcacgtacgctctccgccgtcaaactaagtacggtgctggctcgctcactgattgatcgcgtctgattatacaccacagccaatatacgatcgaaccaactacatgctccctgagctccttacgcgtcacctactctcactatgtccttgctgcggattctcggtataggtcggaggtcgcggtagtcagtgcgatacgagagtgttagaagagcgaggtgcanagccgcttcgcctgtgatcagggcagagctattaccgcgatctcggtgaagtgcctcacgattagtaacacttaaacacagtgcgtttcttgctgtacaaacctgatgctagcgtgtttctccttcgtaatgcgttaggagaggctcatgcaagtttccatacaacgagagtcacatctttaattcgaactcaatgaaatagtaactccccctctggcccattagaggcccagaataagctcggaaaaatgtgtccccccctacttccctgttcgttgaattcgccagtccacctgaactctcgaatcaatgtcaaggtggcctcaactttgacttcgctgaattctatctttctcgcatgttccgcttatgctatgcgtagtgcaattttcacctaatgatcgtgaactaaggccaggacgcggaaaacactgcgaatcaattgctaaccattttctgttgcgagctccccgggacggcaagaggaggggatggaacccccaatattcttataactcaaatcaatcgtcatctggtagagtggacaccgaggagcgacccctctgaaaaggtgtgaatcacttgcttatataccgaacccaagggagtatgacggggaagaaaattcgtcccaataattggtaactatgacatagtcctggtggagaaaatgaaccactgtgggatcaacaaagaggcaacggggctgaagctaggagaatcacaccggcgttcgcagagggatacacgggcgtggggcaccccaatatattaacagaaggtatatgaggtgacaacgaggaaataaacgatcgtacataataatgaatcgcgaggcagaaaatagatacgctcacctggcgaacaatcagtgagggtacccaaactatactgagggaggagtcaataacacaacacgtactctcatcctctctctctaccttctgtacttgtgatacacgcaaaaaggaagaaagacatagaaacatagaagagacaatcaagcgaacaagaacacggagccacacgaagaagagagcagcgagacggacgaacgacagagcaaaagaaacaagagagagtacggacaaaacagaagaaaggaaaggacagacagggaaaaacgaggaagaacgagagacagcaacagaagacgaacaagaagaaaggggcagaacagaggcagaccaaggggcagcgacacgaagcagaacaaaggaaagcgaaaaaaaagcaaagaaagaaaagaaagacgagaggaggagagcaggaaagaagagcagaaaaagagaacgcatagaaagagcagaaacgagaagacacagagaaacgaagaggagtagcagaagagaagacccagacgagcagaaaggacagcaagaggaacaggacaacagacaacgaaagcaaagcagacagtcaagagagagaagaagaaaagagcaaacgacaagaaagacaggagaaggaggagcaagagcacgcgcgagacgaggacgagagcaagcagagcgagaaggaagcgaagcaaaaacaaagcagaagagaaaaaaaggaagaagaaagcaggaagacgaaagcacaacaaacagacaacaacaaagccaaagaaaaagaaaaaaaaaaggaaaaagagaaggaaaaaaaacaaaagaagaagacaaagagaaaagaaaaagacagagcgagacaagacggaaaagaaaaagaaaagaggaaacaaaagagagaaaaaaaagaagaaagcgaaacggacaaaaaaaaagacgcaagaaaacg

SEQ ID NO: 578872 - DNA, 225 bp, Homo sapiens
ccccgaaccaagctttagcgccgaggcgcgtgtccaaaggccagtaatccctcctctgtgttgccatgggaattcaaggcctggcaaactaattgctgatgtggccccagtgcatccgggagaatgacatcaggagttactttggccgtaagtgggccattgatgcctctatgagcatttatcagttctgattgctgttcgaagggtggggatgtgctgcagaat

SEQ ID NO: 578873 - DNA, 347 bp, Homo sapiens
cgttcctcccccatctcccccccaggaccaccacgaatacaggcctcagggtggcgctcggccccctcatgaggcgaaacggctcgttttcagagaacacaggagagggaagatgataggtgttccttgaacatctactatgtgagaaacaccacccagggcactgcacctgcctgtgttagaaagaggatgcaaccatccccaacagggaagggcggaaaatgctgcactgcgcatgggctcacaaggaagatacataacgccacagttttttctacagactcctatttctgcaagctgcttgcgttgattaaaactccaatacagccctgccctcgttggcctca

SEQ ID NO: 578874 - DNA, 362 bp, Homo sapiens
cgcacatgtcatgcagtcgatccacgcatccatgtttgcgccatagaaagcgggaaagccaagggtctccgcgaagacctcgtggaaggaaggccaatctgaaatcaggttggtcgggatcggtactatagtggtgttcatgagcgcaccatacgcgtgaaacagccaatatctgcaacgggtcgatgtcagtcttgggctccgacgacgaaagcggtcgctatcgacgtcagctcgggatggttagcgtaaatgccccggacttcgcctacggaaccgctcttcgaacggatgagaggcaagaagtttcatcagaagggactgtcatgccttctgcctctaggcgtcgagccgcagtgcga

SEQ ID NO: 578875 - DNA, 1980 bp, Homo sapiens
  misc_feature (1453)..(1453): n is a, c, g, or t
  misc_feature (1489)..(1489): n is a, c, g, or t
  misc_feature (1491)..(1491): n is a, c, g, or t
  misc_feature (1513)..(1513): n is a, c, g, or t
cagtagcacgatctcggctcactgcaacctcttcctcccaggctcaagtgattctcctgtcttagcctcccgagtagctgggattataggcacacaccactaccacctggctaatttttgtacttttagtagagatggggtttcaccatgttggccaggctggtcttgaactcctgacctcaggtgatctgcccgcctcagcctcccaaagtgttggggttacaggcgtgagccaccgcacccggcccccttccttcgtcttagtcaatcctatcccacctcttcttccaccagtcccctcacctgatggtcccaacacttcatcatccaccacctcctggagggggtaccccgaggtgctccgctggggactctgctcattctgggggtgcggttgacggctggtcgtgatctttcccgtaatctgtcccctcttacggaacctagtctccgttctgtccatggccttcttctggacactgctaggatccagaagagtatgttatcaattctcaagcctaggagaagtcaggagtggagaacagctctgagaagatactgttgtccaactgatctccaggcaccacggagtccggtccctccaatcaggaaggtcggaatctctgatgtcatcgttcatgccaacctggcaaccagtttgaaaaaaaacacatgtaactgccaggctgatctcttgtcctggagatcctgggtgaatggtatctcctgccactgtcccaacctcagaccattgtccaaaagcatcttcagggactccacatccctctgttccctgtcccagcagaggctgtgtcctctccactcaaagcctgaagcatgttggggtctcttcgtctctgtacatgcccatttcagagtccagtctggtgggagagggatcaggatgggaaagaaaagtagggtaagcagaaacgatgaaaccttataagagtgagattatcatgtacaagagtgagattatcatgtacaagagtgagattatcatgtacaagagtgagattatcatgtacaagagatcccaggaacattgacttgatgaaaaagtcacatcagagcactcaatttggcagaggttttctgccgaatgtttactcacattcactgtccgagattctgtactgggggtacacgcgtcctctgccctaaggcatctttgagtccaagagatattttgaggactggaaatcataggaaactgcccctgagctcacacatatttccaatgtgagctcacacatatttccaatggtgtccccaatttcagggaatccatggattacctaaagccagcccctccagttcggctaagaaactctagtctatatatcaagttttgtatcatatgtattgctctgaactcagaaatttcccttccatttatggattctatgaataaaatatcacatgtacaaaaagactaagtcaaaaaatntcagctgtgcacagtggctcatgcttgtaatcccancnctttgggtggccaagggaggangattgcctgaggccagcagttcaagaccagtatgggcaacatggcaagagcccatctctaaaaaaaaaaaaaagaaaaaaaaaaactttttgggcggcctggcctggaaaaattttctaaacaccattcgtgtggggcgcgggcccagagtgttacggaacactgggccaacgaggtcccagagggaaacccgggcacgcatcaggggtggtttactccaccataaaagaaacgcccggggaaaccagagtttttcggacgatcccaacgggttccgcagggccagcacgggtccccaccacggggcccagaggtcgaaagaatacccgcatccgtgtggaaaacaacgagaacgaacaaagaggacaagcacacacgagcacgagcaagcgacattgacacacaaagcaggaacagcgaccaagacacagaaacaggacgaagacggacaaagaagacgacagaga

SEQ ID NO: 578876 - DNA, 403 bp, Homo sapiens
agactgagcaatgtatttaatctaggtaataagtaagtagcaaagcccatactaactgctgaatgatatgcccatctatacatttgaaaactaaggaaaatttaattactacttctgtggtaaagcattgtctgccttctataggccaaaggattagagatttctcagctgaattaaaactattgagccatacaggtgcagtggctcacgcctgtaatccctacacatagggaggctagaagatgggaggatcgcttgagcccaggagttctgggctgtagtagcgctatgccgatcgggtgtccgcactaagttcggcatccctatggtgacctcccgggagcgggggaccaccaggttgcctaaggaggggtgaaccggcccaggtcggaaacggagcagg

SEQ ID NO: 578877 - DNA, 919 bp, Homo sapiens
  misc_feature (181)..(181): n is a, c, g, or t
  misc_feature (185)..(186): n is a, c, g, or t
  misc_feature (189)..(189): n is a, c, g, or t
  misc_feature (269)..(269): n is a, c, g, or t
  misc_feature (276)..(276): n is a, c, g, or t
  misc_feature (280)..(280): n is a, c, g, or t
  misc_feature (283)..(283): n is a, c, g, or t
  misc_feature (892)..(893): n is a, c, g, or t
ctgggtcctatcgggggtggtctggtgatctgtcccctcatggtcctatccatgccctgttgaagggcctccgtagtactctcagtggtgcatcgtgcggactcctcgccgttcgtcgttcgcctctcattcgttgagtgccacagcatgctgtcttccgccagcccaggtctcctcaggntcannggncgagctccgttctctggtctcatcatcagatgtcatcgcgtacactccctctgtcctgtgtgcaggccaagggacctacntgggggnctgngantctaccccagggtctgatggtcccaacacttcatcatccaccacctcctggagggggtaccccgaggtgctccgctggggactctgctcattctgggggtgcggttgacggctggtcgtgatctttcccgtaatctgtcccctcttacggaacctagtctccgttctgtccatggccttcttctggacactgctaggatccagaagagtatgttatcaattctcaagcctaggagaagtcaggagtggagaacagctctgagaagatactgttgtccaactgatctccaggcaccacggagtccggtccctccaatcaggaaggtcggaatctctgatgtcatcgttcatgccaacctggcaaccagtttgaaaaaaaacacatgtaactgccaggctgatctcttgtcctggagatcctgggtgaatggtatctcctgccactgtcccaacctcagaccattgtccaaaagcatcttcagggactccacatccctctgttccctgtcccagcagaggctgtgtcctctccactcaaagcctgaagcatgttggggtctcttcgtctctgtacatgcccatttcagagtccagtctgcatttcccctcnntgcacaaagtcgtggcccagatctgg

SEQ ID NO: 578878 - DNA, 1893 bp, Homo sapiens
  misc_feature (1366)..(1366): n is a, c, g, or t
  misc_feature (1402)..(1402): n is a, c, g, or t
  misc_feature (1404)..(1404): n is a, c, g, or t
  misc_feature (1426)..(1426): n is a, c, g, or t
cagtagcacgatctcggctcactgcaacctcttcctcccaggctcaagtgattctcctgtcttagcctcccgagtagctgggattataggcacacaccactaccacctggctaatttttgtacttttagtagagatggggtttcaccatgttggccaggctggtcttgaactcctgacctcaggtgatctgcccgcctcagcctcccaaagtgttggggttacaggcgtgagccaccgcacccggcccccttccttcgtcttagtcaatcctatcccacctcttcttccaccagtcccctcacctgatggtcccaacacttcatcatccaccacctcctggagggggtaccccgaggtgctccgctggggactctgctcattctgggggtgcggttgacggctggtcgtgatctttcccgtaatctgtcccctcttacggaacctagtctccgttctgtccatggccttcttctggacactgctaggatccagaagagtatgttatcaattctcaagcctaggagaagtcaggagtggagaacagctctgagaagatactgttgtccaactgatctccaggcaccacggagtccggtccctccaatcaggaaggtcggaatctctgatgtcatcgttcatgccaacctggcaaccagtttgaaaaaaaacacatgtaactgccaggctgatctcttgtcctggagatcctgggtgaatggtatctcctgccactgtcccaacctcagaccattgtccaaaagcatcttcagggactccacatccctctgttccctgtcccagcagaggctgtgtcctctccactcaaagcctgaagcatgttggggtctcttcgtctctgtacatgcccatttcagagtccagtctggtgggagagggatcaggatgggaaagaaaagtagggtaagcagaaacgatgaaaccttacaagagtgagattatcatgtacaagagatcccaggaacattgacttgatgaaaaagtcacatcagagcactcaatttggcagaggttttctgccgaatgtttactcacattcactgtccgagattctgtactgggggtacacgcgtcctctgccctaaggcatctttgagtccaagagatattttgaggactggaaatcataggaaactgccctgagctcacacatatttccaatggtgtccccaatttcagggaatccatggattacctaaagccagcccctccagttcggctaagaaactctagtctatatatcaagttttgtatcatatgtattgctctgaactcagaaatttcccttccatttatggattctatgaataaaatatcacatgtacaaaaagactaagtcaaaaaatntcagctgtgcacagtggctcatgcttgtaatcccancnctttgggtggccaagggaggangattgcctgaggccagcagttcaagaccagtatgggcaacatggcaagagcccatctctaaaaaaaaaaaaaagaaaaaaaaaaactttttgggcggcctggcctggaaaaattttctaaacaccattcgtgtggggcgcgggcccagagtgttacggaacactgggccaacgaggtcccagagggaaacccgggcacgcatcaggggtggtttactccaccataaaagaaacgcccggggaaaccagagtttttcggacgatcccaacgggttccgcagggccagcacgggtccccaccacggggcccagaggtcgaaagaatacccgcatccgtgtggaaaacaacgagaacgaacaaagaggacaagcacacacgagcacgagcaagcgacattgacacacaaagcaggaacagcgaccaagacacagaaacaggacgaagacggacaaagaagacgacagaga

SEQ ID NO: 578879 - DNA, 248 bp, Homo sapiens
tgtattaagcatcttatgcctttgctgtggtatgaattatgtccgagcaccctgaaggacagatgctggtagatggtcttcggcacttatgctagggaaactgcacgcttctttcccttgaggtactttctgtaattgtacacagtagaagacagtcactgtcatagcgatggtcctggcactacgcgcggccgacgcatcagtcaatgagtgtcaaagtaagccctctaagagtagaaagtcgccag

SEQ ID NO: 578880 - DNA, 183 bp, Homo sapiens
aacactcagtatggcccccacacagagaactggatcaacagatccaaaaggtaattctggctcaggagactatatgggagccacttgtcatgcctgcataggtggaacaaatgtacgaaatgaaatgcaaacactgcaggctgaagcaccacatatagtagtaggtacacgcgggtgaagggg

SEQ ID NO: 578881 - DNA, 1949 bp, Homo sapiens
  misc_feature (1422)..(1422): n is a, c, g, or t
  misc_feature (1458)..(1458): n is a, c, g, or t
  misc_feature (1460)..(1460): n is a, c, g, or t
  misc_feature (1482)..(1482): n is a, c, g, or t
cagtagcacgatctcggctcactgcaacctcttcctcccaggctcaagtgattctcctgtcttagcctcccgagtagctgggattataggcacacaccactaccacctggctaatttttgtacttttagtagagatggggtttcaccatgttggccaggctggtcttgaactcctgacctcaggtgatctgcccgcctcagcctcccaaagtgttggggttacaggcgtgagccaccgcacccggcccccttccttcgtcttagtcaatcctatcccacctcttcttccaccagtcccctcacctgatggtcccaacacttcatcatccaccacctcctggagggggtaccccgaggtgctccgctggggactctgctcattctgggggtgcggttgacggctggtcgtgatctttcccgtaatctgtcccctcttacggaacctagtctccgttctgtccatggccttcttctggacactgctaggatccagaagagtatgttatcaattctcaagcctaggagaagtcaggagtggagaacagctctgagaagatactgttgtccaactgatctccaggcaccacggagtccggtccctccaatcaggaaggtcggaatctctgatgtcatcgttcatgccaacctggcaaccagtttgaaaaaaaacacatgtaactgccaggctgatctcttgtcctggagatcctgggtgaatggtatctcctgccactgtcccaacctcagaccattgtccaaaagcatcttcagggactccacatccctctgttccctgtcccagcagaggctgtgtcctctccactcaaagcctgaagcatgttggggtctcttcgtctctgtacatgcccatttcagagtccagtctggtgggagagggatcaggatgggaaagaaaagtagggtaagcagaaacgatgaaaccttacaagagtgagattatcatgtacaagagatcccaggaacattgacttgatgaaaaagtcacatcagagcactcaatttggcagaggttttctgccgaatgtttactcacattcactgtccgagattctgtactgggggtacacgcgtcctctgccctaaggcatctttgagtccaagagatattttgaggactggaaatcataggaaactgccctgagctcacacatatttccaatggtgtccccaatttcagggaatccatggattacctaaagccagcccctccagttcggctaagaaactctagtctatatatcaagttttgtatcatatgtattgctctgaactcagaaaattccaccatttatagcagtggtttatttatttataccattgaaggaaatggtttatttatgaatctatattatggatattctataagatactgggtgtacaaaaagactaagtcaaaaaatntcagctgtgcacagtggctcatgcttgtaatcccancnctttgggtggccaagggaggangattgcctgaggccagcagttcaagaccagtatgggcaacatggcaagagcccatctctaaaaaaaaaaaaaagaaaaaaaaaaactttttgggcggcctggcctggaaaaattttctaaacaccattcgtgtggggcgcgggcccagagtgttacggaacactgggccaacgaggtcccagagggaaacccgggcacgcatcaggggtggtttactccaccataaaagaaacgcccggggaaaccagagtttttcggacgatcccaacgggttccgcagggccagcacgggtccccaccacggggcccagaggtcgaaagaatacccgcatccgtgtggaaaacaacgagaacgaacaaagaggacaagcacacacgagcacgagcaagcgacattgacacacaaagcaggaacagcgaccaagacacagaaacaggacgaagacggacaaagaagacgacagaga

SEQ ID NO: 578882 - DNA, 1886 bp, Homo sapiens
  misc_feature (181)..(181): n is a, c, g, or t
  misc_feature (185)..(186): n is a, c, g, or t
  misc_feature (189)..(189): n is a, c, g, or t
  misc_feature (269)..(269): n is a, c, g, or t
  misc_feature (276)..(276): n is a, c, g, or t
  misc_feature (280)..(280): n is a, c, g, or t
  misc_feature (283)..(283): n is a, c, g, or t
  misc_feature (1359)..(1359): n is a, c, g, or t
  misc_feature (1395)..(1395): n is a, c, g, or t
  misc_feature (1397)..(1397): n is a, c, g, or t
  misc_feature (1419)..(1419): n is a, c, g, or t
ctgggtcctatcgggggtggtctggtgatctgtcccctcatggtcctatccatgccctgttgaagggcctccgtagtactctcagtggtgcatcgtgcggactcctcgccgttcgtcgttcgcctctcattcgttgagtgccacagcatgctgtcttccgccagcccaggtctcctcaggntcannggncgagctccgttctctggtctcatcatcagatgtcatcgcgtacactccctctgtcctgtgtgcaggccaagggacctacntgggggnctgngantctaccccagggtctgatggtcccaacacttcatcatccaccacctcctggagggggtaccccgaggtgctccgctggggactctgctcattctgggggtgcggttgacggctggtcgtgatctttcccgtaatctgtcccctcttacggaacctagtctccgttctgtccatggccttcttctggacactgctaggatccagaagagtatgttatcaattctcaagcctaggagaagtcaggagtggagaacagctctgagaagatactgttgtccaactgatctccaggcaccacggagtccggtccctccaatcaggaaggtcggaatctctgatgtcatcgttcatgccaacctggcaaccagtttgaaaaaaaacacatgtaactgccaggctgatctcttgtcctggagatcctgggtgaatggtatctcctgccactgtcccaacctcagaccattgtccaaaagcatcttcagggactccacatccctctgttccctgtcccagcagaggctgtgtcctctccactcaaagcctgaagcatgttggggtctcttcgtctctgtacatgcccatttcagagtccagtctggtgggagagggatcaggatgggaaagaaaagtagggtaagcagaaacgatgaaaccttacaagagtgagattatcatgtacaagagatcccaggaacattgacttgatgaaaaagtcacatcagagcactcaatttggcagaggttttctgccgaatgtttactcacattcactgtccgagattctgtactgggggtacacgcgtcctctgccctaaggcatctttgagtccaagagatattttgaggactggaaatcataggaaactgccctgagctcacacatatttccaatggtgtccccaatttcagggaatccatggattacctaaagccagcccctccagttcggctaagaaactctagtctatatatcaagttttgtatcatatgtattgctctgaactcagaaatttcccttccatttatggattctatgaataaaatatcacatgtacaaaaagactaagtcaaaaaatntcagctgtgcacagtggctcatgcttgtaatcccancnctttgggtggccaagggaggangattgcctgaggccagcagttcaagaccagtatgggcaacatggcaagagcccatctctaaaaaaaaaaaaaagaaaaaaaaaaactttttgggcggcctggcctggaaaaattttctaaacaccattcgtgtggggcgcgggcccagagtgttacggaacactgggccaacgaggtcccagagggaaacccgggcacgcatcaggggtggtttactccaccataaaagaaacgcccggggaaaccagagtttttcggacgatcccaacgggttccgcagggccagcacgggtccccaccacggggcccagaggtcgaaagaatacccgcatccgtgtggaaaacaacgagaacgaacaaagaggacaagcacacacgagcacgagcaagcgacattgacacacaaagcaggaacagcgaccaagacacagaaacaggacgaagacggacaaagaagacgacagaga

SEQ ID NO: 578883 - DNA, 290 bp, Homo sapiens
ttactagcatgaaggatactaccctatggttagattccacccaccaggtcccttccatgacatgtgaggattatggtaactgcaattcaagatgagatttgggtggggacacaaccaaattatatcacctcccaagggctccatctccaaataccatcactttgggagttaggttacaatatattagttttggggacatatatattcagtgtacagcaaagttttatagtgtctaatagtattacagtatgagtggaacttttctttgcagttgacaagagaatctgatc

SEQ ID NO: 578884 - DNA, 439 bp, Homo sapiens
tagttgagaaggtctgagtattaaggattcatcctgggaccagtgaataatcgtatgcgggattgagacatcaggtttgagttctagaaagatctctctggctatacattggacaacagattggagttgaaagaccagaagccaggagagctgtgggaggctattgtgtcagtattcgggagagattgcatgggcctgtactctgtaggccattcctgccgaagtaatcttggagtcgggtcttgggcaagaagaggagggcgctcatgcagtccgaacacgtcgtctgtcatggtgggtaagcatgtggaccaactacctttaccactctggaaaacccccatgtagagcaatttactaattcattggtctacgaatttcgtttaccctggcgtgtgtgcttgcgaatgttctacgtgacacctgaatttgctcgttt

SEQ ID NO: 578885 - DNA, 1572 bp, Homo sapiens
  misc_feature (1045)..(1045): n is a, c, g, or t
  misc_feature (1081)..(1081): n is a, c, g, or t
  misc_feature (1083)..(1083): n is a, c, g, or t
  misc_feature (1105)..(1105): n is a, c, g, or t
tttctccacagtccctactgctatcacacctcctggagggtgtacccgagttcgtggatcatcgggggtgcggttgacggctggtcgtgatctttcccgtaatctgtcccctcttacggaacctagtctccgttctgtccatggccttcttctggacactgctaggatccagaagagtatgttatcaattctcaagcctaggagaagtcaggagtggagaacagctctgagaagatactgttgtccaactgatctccaggcaccacggagtccggtccctccaatcaggaaggtcggaatctctgatgtcatcgttcatgccaacctggcaaccagtttgaaaaaaaacacatgtaactgccaggctgatctcttgtcctggagatcctgggtgaatggtatctcctgccactgtcccaacctcagaccattgtccaaaagcatcttcagggactccacatccctctgttccctgtcccagcagaggctgtgtcctctccactcaaagcctgaagcatgttggggtctcttcgtctctgtacatgcccatttcagagtccagtctggtgggagagggatcaggatgggaaagaaaagtagggtaagcagaaacgatgaaaccttacaagagtgagattatcatgtacaagagatcccaggaacattgacttgatgaaaaagtcacatcagagcactcaatttggcagaggttttctgccgaatgtttactcacattcactgtccgagattctgtactgggggtacacgcgtcctctgccctaaggcatctttgagtccaagagatattttgaggactggaaatcataggaaactgccctgagctcacacatatttccaatggtgtccccaatttcagggaatccatggattacctaaagccagcccctccagttcggctaagaaactctagtctatatatcaagttttgtatcatatgtattgctctgaactcagaaatttcccttccatttatggattctatgaataaaatatcacatgtacaaaaagactaagtcaaaaaatntcagctgtgcacagtggctcatgcttgtaatcccancnctttgggtggccaagggaggangattgcctgaggccagcagttcaagaccagtatgggcaacatggcaagagcccatctctaaaaaaaaaaaaaagaaaaaaaaaaactttttgggcggcctggcctggaaaaattttctaaacaccattcgtgtggggcgcgggcccagagtgttacggaacactgggccaacgaggtcccagagggaaacccgggcacgcatcaggggtggtttactccaccataaaagaaacgcccggggaaaccagagtttttcggacgatcccaacgggttccgcagggccagcacgggtccccaccacggggcccagaggtcgaaagaatacccgcatccgtgtggaaaacaacgagaacgaacaaagaggacaagcacacacgagcacgagcaagcgacattgacacacaaagcaggaacagcgaccaagacacagaaacaggacgaagacggacaaagaagacgacagaga

SEQ ID NO: 578886 - DNA, 113 bp, Homo sapiens
cagaagagacgagatgagagcacgagatgggaaatgttgctgagacaagaaagcctagggaaactttagtgctagatacaaaattcacactagggcaaatggcacggtactct

SEQ ID NO: 578887 - DNA, 971 bp, Homo sapiens
cagtagcacgatctcggctcactgcaacctcttcctcccaggctcaagtgattctcctgtcttagcctcccgagtagctgggattataggcacacaccactaccacctggctaatttttgtacttttagtagagatggggtttcaccatgttggccaggctggtcttgaactcctgacctcaggtgatctgcccgcctcagcctcccaaagtgttggggttacaggcgtgagccaccgcacccggcccccttccttcgtcttagtcaatcctatcccacctcttcttccaccagtcccctcacctgatggtcccaacacttcatcatccaccacctcctggagggggtaccccgaggtgctccgctggggactctgctcattctgggggtgcggttgacggctggtcgtgatctttcccgtaatctgtcccctcttacggaacctagtctccgttctgtccatggccttcttctggacactgctaggatccagaagagtatgttatcaattctcaagcctaggagaagtcaggagtggagaacagctctgagaagatactgttgtccaactgatctccaggcaccacggagtccggtccctccaatcaggaaggtcggaatctctgatgtcatcgttcatgccaacctggcaaccagtttgaaaaaaaacacatgtaactgcctgctctgataatcagagagagagcttcctgttaaaattggtgagacatagctcaaagctagggggacggaactacatatacaatccacttgatgaattgatctgccaagagaggatgtgattcgcttagattaaatcccatgttacctagtgctcactcaggaaaggagtgtctactgattgtctactagcaggtgaagattagacatctccagctttgtagtaagggagtcattgaagattatacaacgtaagccagatgcatacatacattatatgtacaccgctg

SEQ ID NO: 578888 - DNA, 592 bp, Homo sapiens
cgtagaggacccttattgatggttcgaccatcttgatctagtttcctctatctggttcagtgcacacgcttgtggataacagtgttaaatatgtgtgcataaagtcttaaatgaaaagatgtggaaaataactaaaatagtgttgtcattgtgggaatttggttaatattttgtctcaaattccttaaataatctttggggtttgggtaataaattttatgtatgtattttccattacaaatataatacatactcatacaaaactttggaaattcagtaaagaaaattcacacatattcccaacacccaacaacaattaactgttaacatcttgatctgtgcactggtctgtgattattagggtgttagtgataagtatgcataaatgtcaaagatgggaagaaagatgaaaaacaagaaatagttgtgtggttgtagtgggataatggtaatttggtttcggtttccttgaaaggtcatcattctagtgtatgggtagtccacctttactacatatatttccattatatatgaaatgtgtacatcatagaaactttgaagttacagaaatgtagaagagaaactcacccat

SEQ ID NO: 578889 - DNA, 718 bp, Homo sapiens
attcggccattatggccgttagcagtgtctcacacctctaatcccagcactttgggaggccgaggtggacagataacctgaggtcaggagttcaagaccagcatggccaacatgttgaaaccccgtctctactaaaactataaaaattagctacgcattgaccgcttgcggtggatcatgcctgtaatcccagcactttgggaggctgaggcgggcagatcatgaggtcaggagatcgagaccatcctggttaacatggtgaaaccccatctctactaacagtatagaaaattagccagtcatggtggaggtcgcctgtagtcccagctactcggaaggctgaggtaggagaatggcatgaacccgtgaggtagagcttgcagagagctgtgatagcaccactgcactccagcctgcgtgacagagcgaaactccgtctcaaagaagaattaacttgtcgagccgatggtcgcctgtaatcccagctactcaggaggctgaggcaggagaatcactagaagctgttaggcagaggttgcagtgagcctgagattgtgccagtgccctcctgcgcaacacgagtgaaactctgtctcaagaataattacaaggacaagtcattttcccactaaacaaggtattacgaccatccgaggacatattatcatacgccgtctttatatgctcgttgaagaatttgtcagtcacctatttttcg

SEQ ID NO: 578890 - DNA, 353 bp, Homo sapiens
gctgatagaggatccccagcgctgcgcagtactaaggtagggaaatcccacatcatgggaaccatcacacagatgcctttctgggaaccccaaccttctatggatccccaaaaaggtgcttggtgggctttagcctataatgaataaagggggaaggagggaaaatactggaaaagggccattatttaatgggtgaaagaatgaagctgtagaggtcccaaccagcctagggccaaaaaagaaaattaaaattctgcacagagcaggcaagcctctgacggcggagagtagggcattcaggcgccaaccgggtgagagtcctcagcgagcacggtcaggtatggctcagcgcg

SEQ ID NO: 578891 - DNA, 212 bp, Homo sapiens
gatgaatatgaggaagaggagaaggaggacggaagaggaggaggaagaggaggagggaggaggaagaggagaaggagcgcacggcaagagcgaggagcgaagagcaggaggcggacgcgcgcaaggatgagcgaggacgaggtgatttcgcttaagaggccttccttcgccgctgttcaccaacatattcatataactcagtccatataagc

SEQ ID NO: 578892 - DNA, 340 bp, Homo sapiens
tcaggccactggttgatgcaggccaatcgcagcataggtgattggccctgatatatctggctctgcacttcacaagggagtaaatgcaaacagatgttcatgggttccccattatatggtgttaatttgcagctcagcagttggagtactcactgaagaaatcatgaagtttttggtacagattgccttacctatcgctgtaggacagcaaagatgacttttgaaccgcatcatatatcattcccactttgagaattccatgtttgaattggaataggaccattaccagttcaatgcatttgtgctaaatattgtgaaaggcatctttaaccttgttatt

SEQ ID NO: 578893 - DNA, 602 bp, Homo sapiens
  misc_feature (405)..(405): n is a, c, g, or t
gaatactatcctctattacataacataatatactgttgggttagtgtcaatttctcaaactctcccaggctgccataatgcatgtctgacctaatttctatttctcttggaggaaaatacacacacacacacaccacagaagtgttgcattaagaatgctacatttcgaatagactttgcccttgcaattttaagctatgccatattcagattaattttgtgagtgatatctgcatatgtttctgtacagtgtgaaatgactgaccctgtagtatagtacgtgatagagttctacttgttaaagtaggttagatatagacactaatgtgtgtgatgatagtgtcctgtgtttcttagtgcaaatctgtagagtaaaaatgtccatagaacttttacttaaaaacnatcccatgctagagttgccattaagcagtgcaaaattaatcggctgtatggtagattcttgaccttaaatttaacaacaacaaccaaaatcagattttttttgtgagtcttactgacctaagaaacattgtttaaattgtttaaatggatctgctgcagttactttgtgtacctagtttatcgtggtgcgtaatggg

SEQ ID NO: 578894 - DNA, 142 bp, Homo sapiens
  misc_feature (24)..(25): n is a, c, g, or t
  misc_feature (34)..(34): n is a, c, g, or t
  misc_feature (121)..(121): n is a, c, g, or t
  misc_feature (132)..(132): n is a, c, g, or t
gcgagtagtatgacttatacacanngtatgggcnaactgtggataaaaaagcccttttgcccgacctgcgaaactatccacaggttcccccccagcctgaggggcctctatacagggggtntcagctgcatnaatctcttaa

SEQ ID NO: 578895 - DNA, 1375 bp, Homo sapiens
  misc_feature (579)..(579): n is a, c, g, or t
aggtagaagagccgtatgaagctccagatggccagctgcagcttggacccagacatcagcattccagttcaggagcatcccaggaggaacagaatgatcttggtcttggtgaccttccctctgatgaggaggaaatcatcaacagttctgatgaagatgatgtcagctctgagtcaagtaaaggagagcctgacccactggaagataaacaggatgaagataatggaatgaaaagtaaagttcatcatattgccaaggagatcatgagctcagagaaagtgtttgtggatgtgttaaaacttttgcatattgatttccgggatgcagtagctcatgcttccaggcaacttgggaaaccagtgattgaggaccggattctaaatcagatcctatactacttgcctcagctgtatgagctcaaccgggatctcttgaaggaactggaggaaagaatgttgcactggactgaacaacaaagaattgctgatatctttgtaaagaagggaccatatctaaaaatgtattccacatacatcaaagaatttgataagaatatagccttgctggatgaacagtgcnagaaaaatccaggtttgctactgttgttagagaatttgagatgagccctcgctgtgctaatctggccctcaagcactacctgctcaagccggttcagaggatcccccagtacaggctgttgctgacagattatttgaagaatctcatagaagatgctggagattacagagacactcaagatgccctggctgttgttgtagaggtagccaaccacgccaatgacaccatgaagcaaggagacaacctttcagaaacttatgcaaattcagtacagcttaaatggacaccatgaaattgtgcacgcctggtcgggtttttctcaaagaaggaatcctgatgaagctgtctcggaaagtgatgcaacctcgaatgttttcctgtttaatgatgcctgctgtatacaacaccagtgcagtctgggatgtataaactgaaccaatgctctcactggctggacatgcacggtcagaaaactacccaagaagcctatcagaatgactcacagattgaacagtgtcccacgtccttcattctctcagccagttctgccaacagaaagggtgaatggtagaagcgatttccaggccatagaagaagtatgcagaaaagataaccttctgtctaacaggagttctgatgaggcgatcagaacataagagaaatagctctggtcggagcccatggttcggacgagccatgtgttatccgcaggatcctccccgggggaaccgcgcgggaatgttcacaggcgaaatggtacggaacacgatgcgtcccaggtccccctggcccaccg

SEQ ID NO: 578896 - DNA, 444 bp, Homo sapiens
gacatgaggcttgaaggtggatggttcagaggaactctgctctggcgtttaccagcttcacacgctttggtgaggtgtctgctccctcctggcttcgctgcgtggcagagattttaatgcacagagaagggaggtgacttactcagttactcagcaggaggcagtgtagcctggggctccagggctctgggatgtggggcctgtttcaccatttcttactacgtagcctcaggcaagttacttcactttgggcctcagtttcccctctctaatctcatgctgccctcaggagtaatgttttggttgttgttgttgagacagggtttcacttccatcacccaggctggagtgcaatggcgcaatctcggctcactgcaaccttggcctcccaggttcaagggattctcctgcctcagcctcctgagtagctgaggaccatcgttg

SEQ ID NO: 578897 - DNA, 341 bp, Homo sapiens
agatagactaccccttccttgtactatccctatgaggcataattataacaagctccatctgcctacgacaaagagacctaaaatcgctgcatgcatactcttcaatacagccacatcagccctgcgtagtaacagaccattctacatccagaacgcccctgacagcttcaccgcgcgccagtcattctacataatgcgcccacgggacttactatccactattactattctcgcctacgcaacactcaacactacgaaacacggcatcttcactcggcgaacaacggcatcgttcatcgcgcaaacggcatcttcatcggcgaaaacggcatcttcatcgg

SEQ ID NO: 578898 - DNA, 1506 bp, Homo sapiens
  misc_feature (738)..(738): n is a, c, g, or t
  misc_feature (757)..(757): n is a, c, g, or t
  misc_feature (884)..(884): n is a, c, g, or t
  misc_feature (1056)..(1056): n is a, c, g, or t
ccctcgtgtgtttggcgtcactttttgttgtccggagtagtctttgtcagtcgttgcatggcttctctttggttcttctgtgggcctttggctcccaaccgcggttacttctactaaggggggtatgtgttctcttccgcacccccgtattctttctttcttcctcccggttttgtgtgtctatataaattagtatgctggttggggtctatgtggtgttatccgggtctgctccaagggtgtccgttgcgaccactcggcaccgccgggggtgattttctcccccgcccggctccccttatgttggggtgctttaatttgaatccgtgtcacaactttgaagaggcccccttttttcgtccttgctttaaaaagaagtattttccaatctgtggaagggcgacccaagtcgtgaaatgtaattaacccctcttggttttagtgaaaaggggacttcactgtatggcgtccgccccttgccgccctggtgtaaaaggaaggaggtggaaccacgaacccatttttagcccaacttccttggccttcataaccgcccctttatatagagaaatagtttagttgtgtcaagggtaaggacaatattacgaagaaggtggccccctccccccccgcttcctccttttaaggagggaaccccctcgccccttggaatgtcccaacgggagattttttctcgtggccacaactattttggtaggcagaaatatttttataatngaggagcccaccgcagatnttttatagttcggaggacacccccgtttataccttctctgcttataaggcgacaacacgtcggagagaccgcttcctcttatcccacacgccctctctatgagagactgggcacactcttgtaacgngacacactctttaaactctgtccacagattgtattttttttgtgacacgcgtggagccacgagattctcggctcgtcccacgccccgcgcctttgtttatagtatagatatattggcccacgcacataagaaggctttcacgagagttctcttctctccacgagaggagaanataagacatggagattatatgaaaaatctttctgtataacaaagttataaggaccacactcctcccacaaaaaaagcgcacacggataaaacatatatagagacccgctggaataaaggggggaggaaagcagaaagaaataagagagacttcttcacttataagagttctccgcaaagtaaggcgctttccacaaattctttctgcagaacaccacaagttcacacgcccacgcgtaaccacgtgagattcttcgctttctagggccagaaagagatcactctaagtcccagtctcactcgcttctcagacaccgttcaccggtcaacgttccagaacccacgcgaggagaagcacgccgatcccagatccaagttctagaggaagaagatctgtatccaaagagaagccccaaagatttcccaagccccagatcccagttctagggga

SEQ ID NO: 578899 - DNA, 342 bp, Homo sapiens
accgtcttgcttacttgtccgatgaaatgaatgaaatagaaagtgggaaaataatattttcagagcatcttcccttaagcaagctccaacaaggcataaaatctggttcctatcttcaaggaacattcagagctagcagggaaaattatttggaggctacagtatggattcatggagacaaagaagaggaaaaagagatacttatacagggaattaagcatctaaacagagctgtgcaatgaagacattgtggccgtggagctactgcccaggagccagtgggtggcaccgtcttccgtggttttagacgatgaaggtcaaaatgaagacgatgtggagaaa

SEQ ID NO: 578900 - DNA, 931 bp, Homo sapiens
  misc_feature (7)..(7): n is a, c, g, or t
  misc_feature (70)..(70): n is a, c, g, or t
  misc_feature (89)..(89): n is a, c, g, or t
  misc_feature (98)..(99): n is a, c, g, or t
  misc_feature (111)..(112): n is a, c, g, or t
  misc_feature (117)..(117): n is a, c, g, or t
  misc_feature (122)..(122): n is a, c, g, or t
  misc_feature (146)..(147): n is a, c, g, or t
  misc_feature (151)..(151): n is a, c, g, or t
  misc_feature (154)..(154): n is a, c, g, or t
  misc_feature (160)..(160): n is a, c, g, or t
  misc_feature (169)..(169): n is a, c, g, or t
  misc_feature (171)..(172): n is a, c, g, or t
  misc_feature (174)..(174): n is a, c, g, or t
  misc_feature (184)..(184): n is a, c, g, or t
  misc_feature (195)..(199): n is a, c, g, or t
  misc_feature (202)..(202): n is a, c, g, or t
  misc_feature (205)..(205): n is a, c, g, or t
  misc_feature (212)..(212): n is a, c, g, or t
  misc_feature (215)..(215): n is a, c, g, or t
  misc_feature (220)..(220): n is a, c, g, or t
  misc_feature (224)..(225): n is a, c, g, or t
  misc_feature (232)..(232): n is a, c, g, or t
  misc_feature (240)..(240): n is a, c, g, or t
  misc_feature (244)..(244): n is a, c, g, or t
  misc_feature (259)..(259): n is a, c, g, or t
  misc_feature (340)..(340): n is a, c, g, or t
  misc_feature (399)..(399): n is a, c, g, or t
  misc_feature (429)..(429): n is a, c, g, or t
  misc_feature (478)..(478): n is a, c, g, or t
  misc_feature (487)..(487): n is a, c, g, or t
  misc_feature (495)..(495): n is a, c, g, or t
  misc_feature (507)..(507): n is a, c, g, or t
  misc_feature (579)..(579): n is a, c, g, or t
  misc_feature (592)..(592): n is a, c, g, or t
  misc_feature (651)..(651): n is a, c, g, or t
  misc_feature (927)..(927): n is a, c, g, or t
ccctgtnatatgttccatattcaagtattgagaatgctcagtaacttactatagcagcttaactttttanaactgccacacaatttccnacgaatttnngtccttcaaatnncttanatgtntggaacaatgctacatctacactnngctnccntaatcnacctcttcncnngngggccctgangaagcaccagnnnnnggnggnggttcancancaggnaatnncccaggnattttttntggnatgttttttgtactntggtatagcttggtgatgatggggttgcaaatttttttcagctttttttgttgatgtttaaattttttttttttggtagtntgatttttattaagcaagttgataattttattatatttgtttagaattttttgtttgtntttatcgttaattttgctttgaagtttttnatttttaacagttgtttttatgttgaagggataggatttaagtgaattnttggatganaccttgtnaatttgtttttnatttttagctttgtactttttagcttcttggatcatacgtttaatgtgttctttgttcaaacggcgcttgtnattagtgatagtnatcttgttctcttttcccgtactcttgtccacagcagagacattgagtataccattggnatcaatgtcaaaagtgacttcaatctgaggaacacctcggggtgcaggaggtatgcctgtgagttcaaacttgccaagcaggttgttatcctttgtcatggcacgctcgccttcataaacctgaataagcacaccaggctggttgtcagaataggtagtgaaggtctgtgtctgcttggtaggaatggtggtattacgcttgatgaggacagtcatgactccaccagcagtttcaataccaagggaaagaggagtgacatccaagagcagcaaatnttga

SEQ ID NO: 578901 - DNA, 304 bp, Homo sapiens
tgggcttgacccaggatttaaaaccgggaccggtgaaggtgacagcagtcggttggagcgagcatcccccaaagttcacaatgtggccgaggactttgatggcacattgtgggtttttaaatagtcatcccaaatatgagatgagttgtcacaggaagtcccttgccatcctaaaagccaccccatttctctctaaggagatgggcccaagtcctctcccaagtccacacagggacggtgatagcctggattacgtgtacatactgtaatgcaaaatttatcaaatctacgatttagacgcgta

SEQ ID NO: 578902 - DNA, 852 bp, Homo sapiens
gatttctcaaactacctaacacagaactaccacttgacccagcaatcccattactgggtttatatccaaaaggaaataaattgctctaccaaaaagacacatacactctcctgttcattgtagcactatttacaatagtgaagacatggaatcagcctaggtgcccaccaacggtggactgggtaaacaaaatgtggcacatatacaccatggactatcacatagccataaaaagaatgaaatcatgtcctttgcagcaacatggatgcagctggaggccattatccaaagcaaattaacacaggaacagacaagctaataccacatgttctctcttataagtgggagataagcattgggtactcatggcaaaaagatggcaacaatagacactggggaatactagaaaggcagggggcaagggttaaaaaactaactattgggtgctatgttcactacctgagtgacaggatcaatcataccccaaacctcaacatcacacaatgcgcccacataacaaacttgcacatatattccctgaatctaaaataacagttgaaaatgataacaaaacgtgggcggagggggaggaattattctaccaaaacacaataaaaacggcaaactcggggggtatacccacaattaatcgaaactacctacttggggcagtcaacacggcgcattcaccctcgggctatacctcccaagcgtggacccaaacgaattccgtagacccaaacgactagcccactcacgtggactgattccccttgttttacgaaacctcataagcggtcaaaccacgtctatactcgatagaagagtgtctgcaacgtgtgcctcgaacat

SEQ ID NO: 578903 - DNA, 318 bp, Homo sapiens
  misc_feature (79)..(79): n is a, c, g, or t
tctacaggacccaattgtgtggtgttatgatgcggcatggctttcaatgagtgtctggaagttacttgtgatccaattnagcattttttcttctttagtgttttaagatggacgacactttgtttaattatccatctctagatcattttatggtcgacatacactaacttcaatagtgtcactcctgtaattggttttgtatttgtgttaggctccttggtgttatgtatgctgggatagtgtttctataattggatttgggcatatattgtcttaagaaatattatggctctttggtttccataacaccacacaatt

SEQ ID NO: 578904 - DNA, 167 bp, Homo sapiens
gatggtctgcattgactatctatctcctggttatggattatgtcgacatctgagaaattttttatctgtgaaagagagaaacagcaaagaaaaaaaaatatagccagttagttttcataatctgatgtaatgcatcttccctggatagaaaaaaacgccaacagaat

SEQ ID NO: 578905 - DNA, 1872 bp, Homo sapiens
cttggattctagccagcacgactgaaggagccccatcagtagcacctttaaatgtcactgtgtttctgaatgaagccaattacaaagcaacaaggtgagctggttggctcaaggatctcccatgtgtggcaaagcgctggcatttctaaagaattattagaagaagttgggcaaaatgggtctcgtgcgcgtatttctgttcaagtccataacgccacctgcaccgtgaggattgccgctgttaccaaggggggagtcggccctttctctgaccccgtgtgtaaatattatacaggagggaataccgggtatttctgcgctaacgtatcccgcatgtccacacatagaagctttaaactaaataacaccttacacatcccctgtcgagggcgaccacaaccaaacgtgacctgccgagacctaaagcggtgcaatgtgtccgacgaagttcaaaggggcatgccagggaacgtcacaccctgcacacgactaggccggctctgtccgctatttaactcaggcgcctggcaacgcagatcctgtgctcatcatctttggctgcttttgtggattattttgattgggttggttttatacatctccttggccatcagaaaaagagtccaggagacaaagtttgggaatgcattcacagaggaggattctgaattagtggtgaattatatagcaaagaaatccttctgtcggcgagccattgaacttacccatagcttgggagtcagtgaggaactacaaaataaactagaagatgttgtgattgacaggaatcttctaattcttggaaaaattctgggtgaaggagagaaagggaccgtgtatgaaggactgtggaatatccccgaaggaaaggaagtaaaaattccagtagcaatcaagaccctaaaactggacactatggctaataaagaaatacttgatgaagcaagtgtcatgaaaggctttgggaacccccacgtagtgcgactccttgggatatgtatgacatctacaatatatgtaattactgaatactgtctactggtttatagaaggaataaagataaagctgaacaacaccggtcaaattgtgccgagctaaacccaccgctgcagacactattgaagttcatggtggatattgccctgggaatggagtatctgagcaacaggaattttcttcatcgagatttagctgctcgaaactgcatgttgcgagatgacatgactgtctgtgttgcggacttcggcctctctaagaagatttacagtggcgattattaccgccaaggccgcattgctaagatgcctgttaaatggatcgccatagaaagtcttgcagaccgagtctacacaaaaagtgatgtgtgggcatttggcgtgaccatgtgggaaatagctacgacgctgcggggaatgactccctatcccggagttcagaaccatgagatgtacgactaccttctccacggccacaggctgaagcagcctcgaaccgcttggaactgtacagaaatccgaatccgactcctaaaactaccaatcctggggagtcgaacaatgcgtccaatgacaatattttcaatggccacgcgactatcatcacccaaaacagcttggatgaactgtatgaaaaaatgtacactagcaggggaacccataccaaagactggaccgacattctcggtactaagactacagctggaaaaattgctagagagcttaccggacgttagaaatcaagcagatgtaatttatgttaacactcaattgctagagagcgaaggccttgccagggttcatccctgtagtaccgggctcgaacaccatccatgcagcgaacatcgaccgcgtccgcacctctataattgctaa

SEQ ID NO: 578906 - DNA, 378 bp, Homo sapiens
ggataaaatgataaattattaccaagcataatattacatggactatcccctataccttctgctttatgaattaactacaaataactttgcaaggagaaccaaagctaagacccccgtataccatacgagctaccttacgaacagcttaaagagcacacccgtctatatcgcataatcgtgggaagatttataggttgaggcgaggaatctaccgagcctgagtatcgctggttgtcctagatcgaatcttagttcaagctttaaatttgcccaatgaagcctcttaatccccttgtcaatttcactgtttgtccccagaggaacggctctttggacgctatgaaaaaaccttgttgagagagtagacaattttgcatc

SEQ ID NO: 578907 - DNA, 368 bp, Homo sapiens
gtcgtaacctcctccttacatatccagaactacaaacgaggataatgagctcagccacctccagtgcctgttaaaaccactagaagtataatccaagggctgggcgaggtggctcatgcctgtaatcccagcactttgggaggccgaggcgggcagatcacctgaggtcaggagttcgagaccagcccgaccaatatggtgaaaccctgtctctactacaaatacaaaagttagccgggctgtggtggcgcacgcctgtaatcccagctactcaggaggctgaggcaggagaatcgcttgaacccgggaggcgcccgttgcagtgaggacgagatggtgccactgcagtccagcctgggcgacagagc

SEQ ID NO: 578908 - DNA, 700 bp, Homo sapiens
  misc_feature (68)..(68): n is a, c, g, or t
ggggaagggggggccttagagattaagagttgcacaggaggagagaacaatgtggttgagccaaaaangaaggggcagccccaatttggaggttgggttttttttggttgttggggcccgggaagcagaggtttgatggcccaaaatggaaaccatgttaagttggggtgggttgtgggttctctggttggggcaagcattggatcagtccattggtggggggtttaattaaagaaagtaatcataagcttgcaggcctgacatcacttacaagaagcctcagggaagtgagccagcaaaggagcaagaacccttgccaatatgagatcaagaggtttctggagtgtgcccaaaaccagggtgacatcaagctatgtgagggtttcaatgaggtgctcaaacagtaccgacttgcaaacggattggcctaatgaagaagttcaacgtggagagatggaaaatcagctctcataactaagttaatttagtataaaaatagaattgatagtgagggtataaagtgtaaccatcagttaaacgtctcctgtcattactagagtccaagagtcagaattacaatgaaagtgggggtgtggtgaataggtagaatctggttttgagcaaatgtatgtgtgccctccttaaactagctgttatgatatgatgaaatgaattgtgagttaattagaataaagtcatt

SEQ ID NO: 578909 - DNA, 1065 bp, Homo sapiens
ggcaggccgggaggagcggcgcgcgctcggagctctcccgccctgctcgttcgcttctccagcttgggatggcgcggttagctgctgggtcgttgcgctctgcgtcgtgcatgagcctccatgctcgcggtcggccgtgggctgccgtgctgtgccctgcacagaccccgcgatgcatcgacaacgagcagaccgcggcgcctacttatgccgtagaaataagaggatcaatggtgagcgatagactccgttggatggagatggatggtgtatgtagatgagccagttattagtctggacatgttcatcaatggcagtaagctcatctctgctcccaacagttggtagcactcgcatgcttagaaccgtgatctgtttgatcgcctccgtgcgtcaattcgcactagaaacacgctgaatcgcaggaccctgtagtgaacacaacggtcaacgcgatgtggaacttcgtggtgatcttggtcccaacctcgaggaaagtaccaagttgctggcgttgtccaaatgttgtaggccaaacaattgcaacccctttgacattgaagtggcccaccggtgactggcacaacgtacggttcaaaaggacttgcatagcgacagcgaggtgattcggaagacacaaggttcccccttatgttgaggagaaccaataatctcgggtaaagcaattcgcacttggtgccagaggggaaccttgtttcgtttccctgccggaggccaccaatacacgtcttggggggagcacacagttccccgagcgaactttatgtcctcttagaggtttggaaagctcaatgtcggtaaatagaaccccaattttgcgtggacggcgccaaccgtcccccattgtgagagaactacaaatgctaacagaaacgggccaaacaacggaacgatctctggtttgggaacgaactcacgggaggacgccgtggccaccattttttacaacattatgggagtaattttggaacaccccgagaaataggaattgtggcattgtgcagatgtacaaagcggaagttggggaaaagttgagtacagaaa

SEQ ID NO: 578910 - DNA, 185 bp, Homo sapiens
cccgggggggggtttaaggggggggggggggccccccccccggggggggggcccctgggggtttcccccttaaggggttttcccaggaaaaaaaaccccccccgttttggaaccccctgggggggggggttttagcccccccccctttttttttttttttttttaacccgggggggtttccccca

SEQ ID NO: 578911 - DNA, 954 bp, Homo sapiens
agtgccggttgcggtcgctggccaccgctcaccatggatcggggtcctcggttgtatgatatctcttcgtggttcgcgtggggctcggtgcactggtgtaagcttcggggtgtcgagggtgtccgaaaggggtaggtccttgtcgcaggatggaacaaaggttctgctgtatgtagtgtgaggattgcagacagaagattgctcggctcagatgtgaatggcctctttgtgactcgttgtgcccaagacacgttgggaataattattgtagcatcttagcagaacagggagagtagctggatctgtgctgatcaagagaagccatgtgttcactcgtgtcaagcaaggcaattcatgaattcagggtaggtgacctcaaggcagctggaggagtggacaactggggtgggggtttgagcgattcctagtgggttagacagttttcccacgagtgagaaatctttcataaggctttgaaggcagcgtaatgtgccaatctgtgcgtggcggtcaactcattgggcaaacgtttgggggcctgtaaacccaatgggtctcagtttcttttagtcaacctatgatacatgcccagactggtttggatggaagccagtgtgggtttgtgacaggtcgttgactggcctgactgtggtgctactccatagagctcggcaattgagtgtgtagtgaccgtcagttcacagtggtcattatcaacaggggctgtgacgtgaaaggctttgtggtgagatgctggtggtgaaaactggtggaaagacggttgcttgggggagtcattttgtgggggcacgatttggagctccaaatgggttagaaaagtttgggtttcaccaaggaattagagaacgggctttatggggtagactggggagaaatactaggggggaaaaaagggttggattttatatacggagtaagaattaaaaggtattt

SEQ ID NO: 578912 - DNA, 195 bp, Homo sapiens
tgcgtgcctgaacaccgaaggcggcagccttgccacccggcccccaaaacgcacaccgaaagagcatgacggaccctgtaacgctcagccacccaaggtcgatagagctgctaacgtagtcatcaatcactttggtcgcatcgcttagctggtgcgggaggggaatacacaatgtctttcaccactcggatgatg

SEQ ID NO: 578913 - DNA, 295 bp, Homo sapiens
ccaataaccctcccaatcatagcttcctatagcctcaaactcctgggctcaagcagttcccctgcctcagcctctcaggtagctgggactacaggtgtacaccaccatgcctggctaattaaattttttttttctaaggttgggatcttgctttgttgcccatgcgtggcttgaattcttggcctcaagcaatcctcctgcctcagagtcccaaagcactgtgattacagatgtgagcctctgtgcccagcctggaaatatattttaactggtgttcactgaagatggcctttag

SEQ ID NO: 578914 - DNA, 131 bp, Homo sapiens
ggagtgcaggagggcggtcggcggcgctgaggagcctaagacacccacccaacccttaggagaccgggagggccggacaggggctggcgctggtgtctagcagacaaaaagcagacgggtgtgtgccctat

SEQ ID NO: 578915 - DNA, 817 bp, Homo sapiens
gatacgtgtttctgttgagaagttgagtacaaggttgagtgtaagtagggaaagttcaactgcagtcagttctagtcttggtaagtacactgtgaggcgctccaccccaagcatagcaaattaatggttccccagtgtttgcagaatcaaaattaagttctttggctaggttctccctgatgtgcccctgcttcttccctaattcaacacatccccagctccatccatgcattcccaacacatcacagctctttacatgcccaggctgtgtcttctgcacctttgtaccttctgcacctttgtttccttggccccaactgccctttcttttcctccacattaccctttatcccaaatttagcacctgtctcaaggagtcaccttcccaaggaagtttctccaaatttgttaacagatattccattgttcctccaatgcttgaccatcttcctttatagatccctgcctagaaaaatgtgggctcactgaggccagggctgcagctagtttattttataacccagcattttaaaagtgcctatttatgattggtgggaatagttaataaatggagtccttgcagatcataaccaagaccacagttcgtaatggtttcattaacttgtgttactattggatgtgattctctgcttatggtcttcctttacttgtttttcccttactgtcagcacctctagacatcaggtaccttggctctgattgctaattaaaattgttgactgggaatgacacttccaatttgctaaggcagagcagtttgtcccttgtggtttactttctaaccaggaccttagaa

SEQ ID NO: 578916 - DNA, 246 bp, Homo sapiens
  misc_feature (13)..(13): n is a, c, g, or t
  misc_feature (34)..(34): n is a, c, g, or t
  misc_feature (41)..(41): n is a, c, g, or t
  misc_feature (87)..(87): n is a, c, g, or t
  misc_feature (101)..(101): n is a, c, g, or t
  misc_feature (115)..(115): n is a, c, g, or t
tgttttcctcttnccttccaacaatgaaggtttngtattcngaaacgaataatttggttcaaaatctttatatggaagaattctttnattgctgtttcttnatttccttgtaagnatatcctgttctcccatagttcctcttcacataaaattatatctatatgggcatatgataaaggacattcttgtaaagtgttaatcttttctgtgactaaatagcaataataaacagaaaataagaaatta

SEQ ID NO: 578917 - DNA, 742 bp, Homo sapiens
ccatttcgtagagtgacgttttctgttgtgagtcagcctcaggacccacatcaggggtcactgcagagttgctatgacagcgggctggaggagtcagaaacaccaagcagtaagagttcatcagggccaagactgggtgcgcttccactcccagaggacaactatgaaaggaccacgccggatggcagtgttggtgaggcagagcatatggaaaatggtgttgctgccatcactacctttcccttcctcccctttcctcatggcaagacgcatggaagaagagtgctgttaaggcctctccattaatcaacaggtggctgaggcaggaggaacgcttgaatccagaagttctagtccagcctggggaacatagtgagaacttatctccaaaaaaaatcagttttcttttttctaggggcctatatagaattaagataaattgtgaatacgtttatttggtgaggtattcttgggcaatattttgagacataataggtccatatggattattttatttgtgcagtatttgtcggaattttaagtaacggacttaccgtagatgttgcctgcaaccgtgggggagctgcatattttgttacttgttttagggggaatatggaggctttgaagagacatggtgctctgtttttgctagtccagattgtcgtcggcggagaatacatataatgatcacgtccgaaaattgaaggtaacgtccggtgcagcatagtcgaaggtttgc

SEQ ID NO: 578918 - DNA, 277 bp, Homo sapiens
atatactcatacgatccacgcataagacttccctgtgcagctggacgaacaggatagacgcgccgatccataagctacttcctaaagggtatttactggtgctatttttagatcgattagtgttgccgtacggttgtatacgtcactcacgatcaaaaaggcgacgccatcatggccaaacgcacatcctcccgtcaatttgttacagtttttgtatcgctattactttcttttggtgtcaatgccgccgacctgacggtggggccgcgcagagttt

SEQ ID NO: 578919 - DNA, 316 bp, Homo sapiens
  misc_feature (12)..(12): n is a, c, g, or t
  misc_feature (162)..(162): n is a, c, g, or t
  misc_feature (270)..(270): n is a, c, g, or t
ggagtctcgctntgtcatccaggctggagtgcaggagtgctatcttggctcgctgcaacctctgcctcctgggttcaagtgattctcttgcctcagcctcccaagtagctgggattataggcacatgccaccacgttcggctaatttttgtacttttagtanagatggagtttcaccatgttggccaggctggtattgaactcctgacctcaggtaatccacccgccttggcctcccaaagtgctgggattataggcgtgagtcaccgtnctggcagccaatgttttatatcgctttcccattgttctgtattttt

SEQ ID NO: 578920 - DNA, 357 bp, Homo sapiens
cactcagaccacccatgatctgtgggtattctgggcctttcgtacaagtcctgcaacaacaggacaggtgacaatgatatctggggtacaaggaccatcttacaattgcaacacggacagaaggcagccgaaggatctgaggctgtcagtgtggacaaaaaggctccagccagtgagtgaccataagtgatccgaccccaaactgctgacttactctgcgaatataatcagaaagtcctggcgttgatccccatgtccagagggaacgcgcgggcttggacacggccaggacggccgcgtggcacgctcatgggctcctgccaatgatgtgctgggggccaaagcctggaccagcac

SEQ ID NO: 578921 - DNA, 901 bp, Homo sapiens
  misc_feature (693)..(693): n is a, c, g, or t
  misc_feature (755)..(755): n is a, c, g, or t
  misc_feature (808)..(808): n is a, c, g, or t
  misc_feature (838)..(838): n is a, c, g, or t
  misc_feature (898)..(898): n is a, c, g, or t
cacaggggcggccaagaggcgccagggcaccggcgccgggcgccggcgcgggggaagccggggggccagccaggcccagcagcaggagggcagcgcgccggacacgaccgagagaaacaacaacggcccagagaagaccgacggccccagccacggggacggcgggcgggacaccgcggagagcggcaccaggcaggcccccacggacagccggcgcggccacaggaagcagggcgggccgcagggcagcagccagcggcagaacgagggcgaccgggaccagggggcgcggagcgggcgcgacggcggccggcacggcgcggaccagggggaggggggcagcccaccgggcagcgaccgggccgccggcagcaagaaccggcagggcagcagcgccggccgccgcggcaccggcaccgacggcgcgcgggccaacaggacggagcagagccggcaggaccgcagcaagggcaccggccacggcgccgggggcagcaccgacggccacggcaccggcagccccggcgggggcagcaagcggcaggccgagcgggcccgcgaggagggcagccggcgcggcgccggggcccccaaccagaaccggaaggagcagggcctgcgggacatcgccagcacgccgcacgagctctaccgcaacgactacgccaccatgctgcccgactccaccgagancgaccaggacaccatcaaccgcatcatcaaggtcatgaaacacgaagcctacggagagtgcnacaaggtgagctgcctggaaatccctgggccctctggccccaagggctaccgnggacagaagggtgccaagggcaacatgggngagccgggagagcctggccagaagggaagacagggagacccgggcatcgaaggccccatngga

SEQ ID NO: 578922 - DNA, 482 bp, Homo sapiens
ctcacagactgcgcccggctaccaaaatttttttaaaaaattagccaggcatggtggtgcgtccctgcagtcccggctacttgggaggctgaggcgggagaatcgcttggacccgggaggtggaggttgcagtgagtcgagatcgtgacactgcgctccagcctggaagacagagcgagactctctctcaaaaaaaaaaaaaaaaaaattgtagagacggggttttggccatgttgggccaggtgggtcttgatctctgtgacctcaagtgatcctcccgcctctgcctccggaagtgcggggattacaggcgtgagccactgacgattctctggagctgaaaagcaaacattttcatttcacttctgcatatggagtgcatggaggaagaagtgatgtccatggttaggggcggggaacggtttccctaaggggctaggccttaaaagtgggatgggatctgcgggcgcagtctgtgaggg

SEQ ID NO: 578923 - DNA, 212 bp, Homo sapiens
tcccccaagtcacgagggcagataagcttcacctatggtcttcacctgggatgtctgaaagtgccaatgggaagacattggctggttctcacctactacatacaagttcgccatcgatgatgccagctacaagctgacctgtccagtgtgcctccaagcgctgccgtcggttcctttactcagggtgtgacttggcaaaaccttgcggcaca

SEQ ID NO: 578924 - DNA, 1035 bp, Homo sapiens
cgttcctggcggccattgcggaaaacttccccacggctactgcgtccacgtggcggtggctgtggtggactccctgaaagcatgagctggcatgggctgccctgcgagagtctgttgatgtctgagtcttccctgggctaatccatgcctgggtttggatggcttgctgactgcaggtctggcgcccagtgtgcttggtgtctgactctgtgggacgtgcctgggtgcttgccctggtgcccggggaacagaacacacatcttggctttttgttagagtgtcttcatgtgaaagagttggtacattggttggtgatgacgcatctttcttgaagaaaatgtcccattcattaagcagttggtctctgatgaagataaagcccaattagcaagtaaactgtgtcctctgaaagatgaaccatggcctatacatccttgggaaccaggttcctttagagttggtcttattgccttgaagctgggcatgatgcctttatggaccaaggatggtcaaaagcatgtggtcacattacttcagtgtacaagactgtcatgtcttaaaatatacgtcaaaggaaaactgtaattggacaaatgtgaacctgtctgtaggaggaacaatgtatcacgttacgtaagctacatcatattggaatttaccgggaactgggattgcgtcgaaaagacagttaaatcttaatataaagatatgctgaatttaacagtgatctattatgctgtcaatttcgtcaggaagatgtggatgtacagcagaagtaatgattctaagtggctggattaagagtctgggaaagtttacattccctaatattctggaggagagtaaagggaagttccaagaatttggtgtataaaaggtgtaaaccggtgggcataatacaagtgaaaaataatgagtgaagcacaactatgtgaaatagaaacaggttataagacgaaaaataacattataaacaaaacgagatttggagagaacaatacccatagtgtaataaaaataataaaaggaggtatc

SEQ ID NO: 578925 - DNA, 147 bp, Homo sapiens
gcaaacaccgcaatcacaagctgctgtggagaggcaggcgctggttacaggaagagagactggcacggcccagtcataggaatcaaggtcaggacaaagtccagagaaacaagcgaggctcaacggagaggtccagcctcggaaatg

SEQ ID NO: 578926 - DNA, 116 bp, Homo sapiens
tggttagtccagagtgtatgaactattgatggaagccagctgctccaggttttcctttctgaaattcatgtgaactttaccatgactttacttgcaaagccaagccctgttcagca

SEQ ID NO: 578927 - DNA, 430 bp, Homo sapiens
cttccagcagtaagtgggcctccgtctggatcaggatctcaatgccatgtgtctccatcccatagttccgaaggctggtcagggcagtccaccggatgtccctccaggtaggtccattattaaaaatgattcccctgtccctgtgcgcatggaacgtggcgaggtagcctcagcccgagaactcgtcccagtagtccagcagcgcttccttcactgcctagtatccgtgcatcatcaccatgcgctgcgagcccacgtacagcgtgaactccggccggaagcgctgggccatccgggtgtaggacttgggaatattcttcaattccaactggaagaggttcccgatgatgggaagcgggcaagggcctggggtcagattccagttgctgtgcacctgcctccacatggacaccagcaggaggaaggtcgc

SEQ ID NO: 578928 - DNA, 454 bp, Homo sapiens
aatgtaagaagcatgggagcagggactttgttttgctccctgccatatccacagccctagaaaaacgtcgggccattgatagctctcagtaaatgcttgacaagtaagtgaatgaacgaatgcacaattaatgaaatgagggctgcgtcaatgaataactgggaatctgactcctgcagggagccttcagcccacaggtgtatgtaagacccgccccgcctctcatccttcgggctcccacccccgccgttaggctgcggttcgcgccgcggtcgccagagggcgcggagcggcggggcttcccgcacggagggctttgcgtgaggcaccgcgtggggcggggctgcgggcgggctcccagctgctgggccctcatctgctgggccctcatcggctgggcctcgtcgaccggcaagcggaacgcggcagcggggctgggcctgtgcggcggccg

SEQ ID NO: 578929 - DNA, 266 bp, Homo sapiens
aagcgttccagaggatccccggatcggcgaccatttcaaatcatggcgtgatctgcatcagagagaaaaataagctcttgcatttgacaatgaaatgtctacccatgtagatgacttgtgcttacttccactcagcaagtgattgcccaggagctacttgaccgtggctccaagtctaaccacatgggtggtgctacttgacaatcataccatgtaacctagaaagactgagacgaaacaaagttattaagtgatgaccacacccc

SEQ ID NO: 578930 - DNA, 210 bp, Homo sapiens
gtccgagctcttagttgtcggggacggtaaccgggaaccaaaaaactgctcctgtcgacttcgactcctaatccctagccactatgcagtaagtagcatctccatccacagttagccagcttggttgtccacaatttgcaaatctgctggactctaccttcctgaacacggcatcagccaattccacaattcaattacaaaaccatttgg

SEQ ID NO: 578931 - DNA, 529 bp, Homo sapiens
gcaagcccgggttgttgtcaggggctcaccccctccccctccgtgtcctttcttgttgggaaaagacccattggtgcccaccccccagaagcccatgtctttggaggtccctcttgtatgtattgaccccacccgcttgcccgaagcccccgctttatgctccccccgaagacgccctttcgaggttttagttggatgggcgcaaagaccctcaagaaggcttgaagccagcccttgcatttccttccccccccccctttgggcctgcttgtggtttttttcccttcctttgtggcgccaggccctttgtggggttttttcccttgttttggggcccagggggggttggtcccctttcccgggccccaacaccttttaaaattggttaaaggagtttgccctccttgggcccccccctttgttgttttccccccccccccccacccttttccttcccccccctctttttggggattttttatttcttttccttttgcccccattccatttatttttttcccccccccca

SEQ ID NO: 578932 - DNA, 107 bp, Homo sapiens
gcggcctttatttcttctttatgtatattacgtggttgggcacgacgacgtgtcttgttggggacacgtactctaccgaagtatttagggataaagaggaaaataag

SEQ ID NO: 578933 - DNA, 455 bp, Homo sapiens
  misc_feature (99)..(99): n is a, c, g, or t
  misc_feature (178)..(178): n is a, c, g, or t
cctcttggacggcgagtcccggcggcaggcgctgcaggagggcgctacaattgtcaggaagttgtgcaggcaggatgcttctttaggccttggcttggngtctccgcaccacctggtgggcgctgctgttgttgaaggggtctccgggcaggatctgccagtggtcaaacacacactnggggaacgcctggccgcccgtgttggacctcaggtcagcggtgaagccaaaggactcgttgacgggcagataggccttgacacaaacatgggggtgcggccacctggaactcctcgaacacgtggccccgcttcctgttcaaaaccccgtagatgccaccgaccacctgctctggacactggatctccacaaggtagaatgggctccatgaggcgtgactgggaagtcagcacactggcatagaggcagcgccgtgctgtggggatgaatctggccc

SEQ ID NO: 578934 - DNA, 251 bp, Homo sapiens
tcaaacataagggctatatgaagtgtaggtgtgctgctgaagaacagtactctccaaaagaagataaatataggaagaagtcaagtatacttactgagtaactcaagagaggcaaagaccctgtgctgagttagctgcaaaatcggtagccaagctggaaaagacaattgatgacctggaagataaactgaaatgcaccaaagaggagcacctctgtacacaaaggatgctggaccagaccccgcttaaac

SEQ ID NO: 578935 - DNA, 184 bp, Homo sapiens
  misc_feature (98)..(98): n is a, c, g, or t
  misc_feature (136)..(136): n is a, c, g, or t
  misc_feature (183)..(183): n is a, c, g, or t
ttggcactgacatccaggacaacaaatgcagctggctggtggtttcagtgtctgcaacgggccactccagaacagtaccaatcctgaaggaaaatacntggcagaaggaggctgagaaagtggctccgtgaaggcnctatagagggctgatctgccagcatgtcttcaatatgaggaaggcant

SEQ ID NO: 578936 - DNA, 206 bp, Homo sapiens
atattactgtacacataatgcagaaatccagtgcattattatctataagcatgtatctataaccttcatatatgagttcatactaaaatataataagctatatacatagctcaaataatattacagcagtttaaactagtaaacagctatgtataatatagttaagacgaacattagcagataatagtacctactagtataagtga

SEQ ID NO: 578937 - DNA, 158 bp, Homo sapiens
ctacccggttagcgacgcccttcctgtctatccctggtgctgctcatcctcacagaaagcctagcacagtggatgaaaccagccctgtgtagcccctgtggcaacttgcttgacagcactagttggtttggttgtcttgatgattgcttaccttgcct

SEQ ID NO: 578938 - DNA, 327 bp, Homo sapiens
  misc_feature (170)..(170): n is a, c, g, or t
  misc_feature (218)..(218): n is a, c, g, or t
  misc_feature (285)..(285): n is a, c, g, or t
ttttaaatgtttttggagatggagttttgctttgttgcccggctggccttggactccttgcctcaagcatcctccagtttcagcttcccgagtatctgggattacaggcaagagccactgtccctgaccattttagccatttttaagtgtgtagttcagtggcattaagnacattcacattgtagtaccggctaggcatggtgcctcacgaccataancctggtactttgggaggccgtggtgggaggattgcttgagctcaggagttcaaaaccagcttgggcnacttagtgagaccttgtctctattaaaaataaataaataagt

SEQ ID NO: 578939 - DNA, 330 bp, Homo sapiens
tgatcaaagatccaagaatattggttctaccaggctggaatgaatttggtttggaagttcagcgtacatttaaaagctgcaacaaaatataggacgccaacaatctcagaatttgggatcagcccagatggagatcgcaattggaaatgtcttcgatcccttacttaaatgacgaaaggtctatcagcccagatagagcaattggacaggttttcgatcccttacttaaatgatgacatgtatatcatactatctgtaaatgggatattccattacagtgattacgtacagaattcccatgcgttataacactttcctgagagtaaagca

SEQ ID NO: 578940 - DNA, 591 bp, Homo sapiens
ttggcggttaatgtagacagatgataaggcaaacagcgtgcaggacatcatcaacgatctgagcgaggcgattgaaagccatagtggccgccatgagctagctgatgccccccgtggagctggccaagcccgagaaccattacagagtggactacatcctgagtgtgatgaacgtgcctgactttgacttcctctcccgaattctatgagcatgccaaggctctgtgggaggatgaaggagtgcgtgcctgctacgaacgctccaacgagtaccagctgattgactgtgcccagtacttcctggacaagatcgacgtgatcaagcaggctgactatgtgccgagcgatcaggacctgcttcgctgccgtgtcctgacttctggaatctttgagaccaagttccaggtggacaaagtcaacttccacatgtttgacgtgggtggccagcgcgatgaacgccgcaagtggatccagtgcttcaacgatgtgactgccatcatcttcgtggtggccagcagcagctacaacatggtcatccgggaggacaaccagaccaaccgcctgcaggaggctctgaacctcttcaagagc

SEQ ID NO: 578941 - DNA, 275 bp, Homo sapiens
gaagtttctaaaacatcatttgcgaggaaagacctgtgactcctcctggtggtatcagaagaggtagaggctcatcagagttggaggaccgatgtgtaacaagttctgcccaacctcctctcgctcagcccttcagtctctgtgacgtgctgtggcctctacagtggtctgccttgccactccccaacaactcatcaagtttcccctcagacttacagtcataggcaacaggttggctgtataagctcatcagattgtcctggcaagaggtaggg

SEQ ID NO: 578942 - DNA, 141 bp, Homo sapiens
aggtagtcactgcctgacaatggaagacatacttgaatggggagcaggtatgtgctttcatatgaaaaaagagctgatgtataaaactacatatatggtgaagtcaacgtaagtcacataaccttacacactaagaggata

SEQ ID NO: 578943 - DNA, 580 bp, Homo sapiens
ttgatggccccctctttccaagcacgcccccgtggatctctggctaccaccgatcccctgcctgtactaaaagtacataaaattagccgggcattgtggcaggcgcctgtggtcccagctactctggaggctgaggcgggagaatggcgtgagcccgggaggtggagcttgcggtgagccaagatggcaccactgcactccagcctgggcaacacagcgagattccgtctcaaaaaaaaaaaaaacttgattgatttcacagtgataaccatgtttttgatcataagtagagaaaagtacaggcgggatgaccacggggtctgtcgggagatttgaaacggaaatcagagctgtacttataatggtgacccaattgtggtctatatctggaaacgttatactcttagactagcagtttctttcccgggtacgctaccagtctcttcaattctgtcaccatcctttccaggagtctgtatataaccttccctctttttgcaagaaatctttctaatgccaacaagctgggtcccctggactctctatcttaattgttggtccgccatccaccactcggaaa

SEQ ID NO: 578944 - DNA, 886 bp, Homo sapiens
ggagagaactagtctcgagttttctattttagtttggcactaacaaaacatgcttaattggataaaaatgtgagtgtaaaagggggtgacacgaggggggcagggcaaaagggtgccggtggaggtgggggcgggggtcaacatacctgggacctggccctggggggtggacgtctaatcaggacggaggaaacagaggtcagaagtcccggaggtgggcagcccttggtaaacagatcattgcgttttcccaggggtgaagagaggagctccagaaaacctgagtaggatggggggcagtgtccagtagactctagggaagcccagcccccagcaagcagcagaaactctaggggacagtctgtcctatgtaaagcaagagcacagaacaagcaaagcgagcctcccgctttatgttcccatagcttgattgggccttctaaagatggggcattgtacaacgatccagaatctacaaagaatcccctctttgggcttccatacatccaagggtgaacaaacagcaagagcctaatgagagacgtctgagtccaaaaacccttggtacaggttccacaaatgacttctaacaataccctcagtcaaagagaaacaaatcagcaggaggcaagaaacaaaaaggtacggaacccaatcccaaaggctgtggagcgcacctgccacgtcgtgaaaggccctagagccaaaggaagccccatatccctacacgctcaaacgaaaaaccaggaaagagacccagaaggccgcgaaagatggcagcgcagatttagaaatccgcggccaataagggggccagaagcccccaaagaaaatggcagacgaacaccacaataacaaaggcatggaacaaccaaagagacgccac

SEQ ID NO: 578945 - DNA, 435 bp, Homo sapiens
cagagaacacattaatccattaagctaactattattcaactatttatgataatctatgtacatatatgtctgtccatatgtatttgtaaataggtagtatataatgtcaggttagggtactgggttcaagtgtatatattcctgtaagtttcttaactgcattttgatgaattcacattatgtaactataagaattgtcccaaaagtacctgtacagaacattgaatattgaaaaattgacaaattgtgtacaaacactaaaaaaaacttgtttaaattgtatttgcaataaacaacatcaaattttttcatgaaatcttggtacaaattcagatctcttatttaaaatttaaataaggaatacattttcaaaatgcagtaatcaaaatgtgatctagtgtaatgaaataaaatgtgatctacgcgtaggatgac

SEQ ID NO: 578946 - DNA, 619 bp, Homo sapiens
  misc_feature (189)..(189): n is a, c, g, or t
gccctccgccatccctccccgacccctcggccggtccgatccctggggtgattcggcactgatgagtcccgggaggaaggactcggaggtgctggcagctctggctggtccaggcctcgggccttcgcctgaggcaaattcgtctcgcattcaccatcgtcccaagattcgtctcgtatcattcacatntcatgcctattgccaataacaatcatgtcaggccgttgcgcggtagcaaccccatgcacggggcttcatcgtggtgaaggatgagtggtgggatgaggacgcgcagtcgggagtacgatccaggggaatctttccatgtccacgaagctgaaggcagagacggcgagagacgtccgatatatcgtacggtgcctctagattgctcccgtgaagaggcgatggtaggagtgcaggtatttgaggatctgtaactaaggtattaaggttcctcatggagtcacataccagtattaacgacggcgattgtgcctatcagtgcgaaggtgcagactgtacaatggagcagtcaaggcgagacagattgctatcctatacttaaaatatcgagagaagagctagatattggtgaatatcgaagcaaagtgagaat

SEQ ID NO: 578947 - DNA, 233 bp, Homo sapiens
ttgaacgtgcggtcgtctcgagacgagcaggactacatggcacaacacatcatcagtagggtaaaactaacctgtctcacggacggggctaaacccagctcacgttcccatattgagtgggtgaacaatccaacgctagagtgaattctagcttcacaatagactaggaagagccagacatcgacaggatcaaaagagcgacactcgcatatgcaacgctatggcacgctgca

SEQ ID NO: 578948 - DNA, 529 bp, Homo sapiens
atcttatggatctgcatgtcgtaggcggtcaagagtgatgtcgtgctcgctgcatattgcaggctgcaaactcccgggatcccccattgtggattcttctcatatacactcgtttcattgtgttgagtgcatcttttaggtctgattctttgctgtagttctctgtgaagttcatcaatgcgctgcatgtaggttttttacgtctccgatgctggtggcagatgactgaaagtcttctagatgctgggccctatgatttctttccaaagagccacagatggcccttggcctttcgcgtactgtggttttggtatccatcttcccagtctcctgtggggatgcactgatagtcccatcagaagtggttctatatatatgttgactgtaatcttcaaatggaaagtctcctggaggttcagaaccagatttgaaggagtctagcaccatttgaagttctcttctttcgtcaactgattttgctgcaagaatcattccttccaaacattttgaaatgatgggaatagctttg

SEQ ID NO: 578949 - DNA, 369 bp, Homo sapiens
  misc_feature (22)..(22): n is a, c, g, or t
  misc_feature (91)..(91): n is a, c, g, or t
  misc_feature (230)..(230): n is a, c, g, or t
  misc_feature (320)..(320): n is a, c, g, or t
  misc_feature (360)..(360): n is a, c, g, or t
ttgagacagagtcttggctctnttgcccaggctggagtgcagtggcctattctcagctcactgcaacctctgcctctcggcactacaggtntgtaccaccacgctgggctaatttttgtatttttagtacagatggggtttcaccatattggccagggctggtcttgaactcctgacctcataatctacccgccttggcctcccaaagtgctggggattacaagcgtgancaactgcgcccggccagaccactattaaagggataaaattatgagttaatatatggaatttaaaaacagaacaagtcccacattgatctngaaagtaagttttgggagggcaaggagggaggggaaacanttttctttt

SEQ ID NO: 578950 - DNA, 240 bp, Homo sapiens
ttcttcaattcttcatgttggccatctcacatgctcactcatgcaccagtttttcagcaggtggggcccttcaggcaggtgcattagggccatgagggttctggcgcttcatacagtgggcattcagtgcccccactacaccagcgggttggggcagctttttgccctatttgctcatgtgcagaacacagacaagaaggcaccatcatggaaagcaaaacattcaagaccgatcaggga

SEQ ID NO: 578951 - DNA, 145 bp, Homo sapiens
taggaattttagaattttaaaattatacaattccaaaaactggggttgggttactttaattcctttactggcaaaacgggggggagggactggttaaatttctttgccttctttttgttaagaataaccaaggggtaaagggttt

SEQ ID NO: 578952 - DNA, 492 bp, Homo sapiens
tcctttcccaatagatttgagctcagtaggttaataaggccctcttgatctctgaatttgagaacaacatgttcctgggaccctgatgactttttatactttgtaaagccaattgttggagagcccctcacacagcccctggcctttgctcaactagcagatacagggatgaggcagacctgacttttttaaggagggtgagagccccaactgctgttccaaacatgcccttccttgcttaaggtatgggcacaacaatgcctgccccttggaaagaaaaaactttagtagataaggaaataagaacccctcataatttttccccttaggaataatctcctgttaatatgggggccattcttcccgattattttttacccaaacatgtaaaaaatgtctttcttttttaaataggggtggactatgctgttatgagtggctttaatgaataaacatttgtagcatcctctttaatgggtaaacagcctccca

SEQ ID NO: 578953 - DNA, 845 bp, Homo sapiens
ccgcgaactgcgtcatggaggtgtctgtggaccaggcggaaagcagttgagaagcccaacgctgaggacatgacatccagagattactacttagactcctacggcacacttgggcatccacgaggagatgctgcaaggacgaggtgcagcacccgtcacgttaccggcaactccattgtttcagtaaccgagcaccatcttcgaatggacaaggttggtgcttggatcgttcgggctcgggcaccggcatcctctgcgtgtctgctgccaaggccggggcccagtaaggtcttcgggatcgagtgattccagctagtctcatgattctaatggcggctgtaacgagtacgatctaaatgtccgaaacacatgttgtatgacccagcgttggttgtaccattcactcaaggggagaggtggagggagcgtggagctcccacttggagaatggttggacatccatcaatcaggcgagatgcgatggggcataactgacctccttcgtacgttactccagtgctcaacactcgttgtctctaatgtcccgggaacataggtggcttggcgcccggatgcgctctcattctgtcccaggaccgggctcatcgctgtatgtggacggctcgatcgagggacctggctagtacataagactacgagatccactggtgggatgaacgtgtatggcttcgaccatgtcttgcatcgagagatgtggccatctaaggagccccataatggatgtcgtggaccccaaacaggtggtacaccaactgcctgctctcagtagaaggaggtggacgatctataccgtcaaggtggatgacctgaacttgagctccccg

SEQ ID NO: 578954 - DNA, 411 bp, Homo sapiens
agaacaagtagtctgctgtgctagcatgattctaaccgtctgaccctcaggcggaaaactaggtgttaccacgaaatgtgtttagtggagtggactatgtagatgctcactagtcctagctgatgcctggtatagaaaaaatgtggttttcttagctgaaaacactaaaattccacccccacaaggggtatttatgagtgacaggggtggggcctggacataagcaattttcccctggatctagccacaggattactgatgggtgatgatctgctaggccgcgtagctaagcagctaaggagacaggaggccagggctttaaaagttagagcatgctcaacagcaagtgctaagcattagcattctttgatttgaaagtcaagtgttgaatcccccccttaagcggatcag

SEQ ID NO: 578955 - DNA, 154 bp, Homo sapiens
  misc_feature (137)..(137): n is a, c, g, or t
agaaagtaagattctcagggcaacagtgtacagcagagtggttgctccacagacagaggagggcagagtggcccagagtatcagcgtacagcaaagtgggtgttcccatccacaggggcagcgctatctcatagganagaacaacccctaggaa

SEQ ID NO: 578956 - DNA, 798 bp, Homo sapiens
  misc_feature (31)..(31): n is a, c, g, or t
  misc_feature (37)..(37): n is a, c, g, or t
  misc_feature (40)..(40): n is a, c, g, or t
  misc_feature (60)..(61): n is a, c, g, or t
  misc_feature (66)..(66): n is a, c, g, or t
gacacaacgggaggggccactccatacgagncccctnagnacgctgaatacctatagtannaacgngagcaattggggaaagacccccgaaggaggcaaaaagggcgggaagactaaaagaagaacaggttcaagaaccaagagaagggggaaaaaagaaggggaaaatttaaggaaaaaaggggggacccaaaagaaaaaaagaaaagaaaaaccacaagaaaaacgcaagacaaagaaaacagaacagacaagaaaaaaagaaaaaaagaacaaaaaagaagaacaaaagaccaaaagaaaacggaaaacaggagaaaagaaaacaaaaagcgaaaaggacaagaagaggacaaaacagaagaaaacaaaggaagcagacaaaagcagaaagaaccaagacaaaacggccaaaaaagagcggaaccacaactaaaaggaaaaagaaagaaaacaacacaaaaggaaaaacccagccggaacccaactaaagcgccaagaagaagaatccacaaaaggccaacaggcagaaaagagaaaaggacccaaacgaaggacaggaccaaccaggagaaaaggcgagaacgagaaaggaaaaatggcacgcaacaaaaaagaaggaaaaaaggcgacaaaaaaggaaaaggaaagccaagaaacgtgagaacccaaaaggaacagaaacggagcaaaacgcagactggggcaaaaaggccaagaccgaaaacgcggtaaagcacagaacaaacaaagaaacaaaaagaaccacaaagaaagaaacggggcaaacgggacacg

SEQ ID NO: 578957 - DNA, 259 bp, Homo sapiens
gcacgagcagaatagctttcatctggggaatgaagttctgaaatatctaaagcagttgactcatcgtctgaaaagtcctccaaaaagagaactattgggaaaccatggcgtggtggtgtaaaagaaaagctccctcagttttttggagggaatagcttaaaaaaatacttaaatggctcagttcacttggtgcagttaagatattaaacttgtcaattttaacactggtgtcacttctggaataaccttatgtgatgtt

SEQ ID NO: 578958 - DNA, 152 bp, Homo sapiens
tgtgttagaacaagcatttgctgtgttttgtgtagcacctggttccaggacagactcagcttcccaagaggatactgctgccaagaagaagttgctctgaagtcagttcatcgctgtgatcagcacgcctcacggtcacagtcccagaaaaa

SEQ ID NO: 578959 - DNA, 602 bp, Homo sapiens
gcactcacagctcagcaaggcctactgcctttataaactccacccctgcggcaggtcatagctgaataaaaggcagcagaaacttcttcagacttaaacctcccatctgacagctctgaagagagcagtggttctcctggcatggtgtttgtgctctgagaatggacatactgcctcctcaaatgggtccctgaaccccgtgtagcctaactgggagacatctcatagtaagggccaacagacacctcatacagatgggagaccctcttcaacaaagcttccagggaaggatcaagcagcaatatttgctgttctgcagccttctctgttgatactcaggcaaacagggtctggagtggacctccagcaaactccaacagacctgcagctgagggacctgactgttagaaggaaaactaacaaacagaaaggaatagcatcaacataaacaaaaaggacatccacaccaaaaccccatctgtaggttacaacatcaaatacccagatagataaaacacaaagatgggaagaaccagaacagaaagctgaaaatcgtaaaacagagcactcttttcttccagagagtgcagctcctcacagca

SEQ ID NO: 578960 - DNA, 100 bp, Homo sapiens
taaatgtcctatagattaaatatcaagaaatattcataattgatatttaatgtataggacatttatttatactcaataaatatttttcaaaaggaaaaaa

SEQ ID NO: 578961 - DNA, 131 bp, Homo sapiens
tatttaatcgaggaaaggtctcattaacagatgttattaatctccttaacagatgttatggagaactgcaaaccactgttcaatgaaataaaagagaatacaaacaaatggaacaacattccatgctcatg

SEQ ID NO: 578962 - DNA, 508 bp, Homo sapiens
  misc_feature (33)..(33): n is a, c, g, or t
  misc_feature (80)..(80): n is a, c, g, or t
  misc_feature (91)..(91): n is a, c, g, or t
  misc_feature (109)..(109): n is a, c, g, or t
  misc_feature (121)..(121): n is a, c, g, or t
  misc_feature (127)..(130): n is a, c, g, or t
  misc_feature (135)..(136): n is a, c, g, or t
  misc_feature (144)..(144): n is a, c, g, or t
  misc_feature (146)..(146): n is a, c, g, or t
  misc_feature (149)..(149): n is a, c, g, or t
  misc_feature (159)..(159): n is a, c, g, or t
  misc_feature (172)..(172): n is a, c, g, or t
  misc_feature (183)..(183): n is a, c, g, or t
  misc_feature (211)..(211): n is a, c, g, or t
  misc_feature (279)..(279): n is a, c, g, or t
  misc_feature (291)..(291): n is a, c, g, or t
  misc_feature (332)..(332): n is a, c, g, or t
  misc_feature (357)..(357): n is a, c, g, or t
  misc_feature (429)..(429): n is a, c, g, or t
  misc_feature (450)..(450): n is a, c, g, or t
  misc_feature (491)..(491): n is a, c, g, or t
atatagtacatgtaaacaactggcataaaattnataaaaatacaatactcctatgcaataacactatattcctgaaaaanactttcatttnctcattaatatcactggnctattttaacantatatnnnnggggnnaagcattngnggnggcttatgtntttaaagaaatanagccccaactntgtcttcgaaaatctcgtagcaatagcnattttgatcacttctttgcccatccttactttcctcaaactaaagcaaaaatatttgtaaatcctaanaatatgcaaaanactaagctttaatactgttttgtacgcctatggaacctgcnaccaatttgcattgccatcaaaggngtggatgccccaaagtccttgggctgcgagcggtggccacggctgcatagcagggaccttaaggcctttgcnccaaactggctcccctaaaanatagccatattttgctgggggttacattgataaacactgcnacaaaaggatccttctg

SEQ ID NO: 578963 - DNA, 102 bp, Homo sapiens
actctgtggtagagtaacctgtggaacatgtaccctgtggaacagtaggaaaatgtaccctgtggaacagtatcctgtggaaaagtaacctgtgaaaaagta

SEQ ID NO: 578964 - DNA, 235 bp, Homo sapiens
  misc_feature (13)..(13): n is a, c, g, or t
  misc_feature (15)..(16): n is a, c, g, or t
  misc_feature (19)..(19): n is a, c, g, or t
  misc_feature (40)..(40): n is a, c, g, or t
gagagcccgccgnannctnggcgtaaggcatcgcaggtgncctcctgcaaacctcgagctgcacacgcgcccaggggaaagacgtgacgttgctgcacctgtggctagtcctgcgcctgtgtgtgagacctgagtggggctgtggagaccgagaagctgtggctcttgagtgtctatgtacctcattgttccaggacacggaacaagaacttgggacccaccgagggaccccgcc

SEQ ID NO: 578965 - DNA, 113 bp, Homo sapiens
  misc_feature (49)..(49): n is a, c, g, or t
  misc_feature (58)..(58): n is a, c, g, or t
  misc_feature (83)..(83): n is a, c, g, or t
ccggcaggtactctgttactgtactgtactctctgactcttacctacangaatttgtnacataatcttctacatgtatgattntgtgccactgatcttaaacctatgattcac

SEQ ID NO: 578966 - DNA, 530 bp, Homo sapiens
  misc_feature (240)..(240): n is a, c, g, or t
gtcctttgtgagatgccactatcgggggaaaccggatggctccacagaaaaagttcgtttaaaggaaaatggtttaaggccaaggaaatacctagaaaacggaaagtcttgaaaccagagccggaaaaagaatgcctgtgtttcgaagttccttcttaggacgaaaccagctgaagctggcgaaatccaagatggcgcctctgaagagcctctggctttatcatcatcctgttctcatgntaaacaacactcccaccagcgccgtgacaactgacggtcgccatgacaacgactggaagagaccaagaagggacagaaaaaaaggggtttcttgattccgggaaaaatctccgttctttcccaaggaaagcacgaatattcccccccgtgctcttaatgcccagccccttcattaaagacaccctacctctgaaacttcccagctctcacaagctaagttgatttcagatcttccaattccatagccattgaatacagcctgcactgcttgacacaaaaataaaaaaaaa

SEQ ID NO: 578967 - DNA, 204 bp, Homo sapiens
  misc_feature (25)..(25): n is a, c, g, or t
ttgggatcaagtttaaatgactgtnctgcccctttcacatcaaagaactactgacaacgaaggccgcgtcctgcctttcccatctggtctatctatctcgctggcagggaaggaaagaatctttcatgttggtgaaggaagaagtgggtgaagaaggtggggtgggacgacagtcaaatctagagtaaaaccaagctgcccaag

SEQ ID NO: 578968 - DNA, 396 bp, Homo sapiens
aagggaaaaaagcttatggctgggtttggttttttcccttcccaaagggttttactgttccagggtggccccagggcaggcaggggcccccctatgcctgcgccctggtaaaggtgacccctgccattttccagcagccctggtatgttcctgccccccaggaataaaatggagggagctccaaaaactttccttcccaaaggcagtctccgtggttgaaacagactggatttttgttttgcccctgcccccttgtccctctttgagggaggggagttatgttaggactccaccctcagggattcgggtggcctgcgctagctttttttaaaactaaaaacttttaaggtgggagggtggcaagggatgtgtttaataaatcaattccaaccctca

SEQ ID NO: 578969 - DNA, 386 bp, Homo sapiens
ctaaattcgcggccgcgtcgacctctgatgcttctggacaaaataaattgaaatgtgaaaagaattcacaattttagaaccattaagagcatttttgattcatggaaagaggtcaaaatatcaacattaacacaagtttggaagaagttgattccaaccctcacggatgacatcctccaagacttcaggagaggaagtcactgcagatgtggtagaaatggcaagagaattagaattagaagtggaggtgaagatgtgactgaaatgctgcaatctcatgataaaacttgaagagatgaggagttgctttctgtcaatgagcaaagaaagtgatttcttgagatggaatctgctcctggtgaaaatgtcgacgcggccgcgaattt

SEQ ID NO: 578970 - DNA, 764 bp, Homo sapiens
gtcggttgggggtgtgccttgtttcatggaagccgccgcgggggttacaggcccgcacccccgcggtgctgtcatgtggtttctccacgatggtgcactgcagcagccgtggggtgaacccccttcccggctgttgcgatgttcatctgggcagccggggtgatatattagagccctgccccgcgcgcgacgcgtgtgttccacagccaccacagggcggggcgctgtagcgtcttccggcggtgcctgtcgtgtttggcagggcagagaatgacgacaccacgcgacggagatcagatgtcacgccgcgcgcgctcgctgccgctggggggcgacgacagcacccccggcgtcgaaagggaagccactcgcgcgcgtgcgggtcgctcagcgcgagggtgcgcagtggggggcacgcagagaggagaccaccagcccggggtccccgcgcgagtggggcacacaaagtgggtgacggcctgcgccgagcgagggcgcgtggcgtgccgagccgccagggtcggccctcgtgcaacggcaacggctctcctcccatccactcgaggcgaccgcacatcagaggggtcacacaagggccgcagcatgctcacaacgacggagatactacatagagaggcgggggatgacccacacccgggcgctcacagtgaggaagactgtctcaccgccggccagtggctgttgagggactccgaagagacaataaaacgggtggtgcggcggaccacatacattagacgcaa

SEQ ID NO: 578971 - DNA, 353 bp, Homo sapiens
ttaccaaaaaccagcagatggcagccacttttttccaacttgtagggggacgtctccccccttaaattagtggccaaccagtgccatttcactcccctcaggttttttaggggcaaagcccctgccccctttttggggtggttaaatgggagtttaagtggggtgctcacaacctcctttaaagggccccccaattttttgggcccttttcagtgtgtggaaggtcatttgggccccctaagggtcattccttggaaatgttttggtggggggtccccggagggctggcccaaaaaacccttaaaaaacgggggtccttaactgggcttaataaaaaggggtttcccccttga

SEQ ID NO: 578972 - DNA, 329 bp, Homo sapiens
gctggagtctgaagttgtatgaaccagaggcccgtttcttcttgccgatcatcttccttctggaagggaatatctgcactatgcctgtcccatcactgtactttggaagcagacaacttgcttgatttcacagcccatgactggagcagactctgattcaggatgaaccataccttgagttttacccacagctgacttagatgagactgtgcactgcgcacttttaatgtgatgctgaaacaaataagaattggggattataggtaagatgcaaatgtattctacatgtgacaaggacatccattttgtggactggggcagaatgctat

SEQ ID NO: 578973 - DNA, 144 bp, Homo sapiens
tgaggtcaaatataatgctgagtaatagccacaccaattaaaaaattgttttttaagacggagtctcactctgttatccaggctggaatgcaggggcgtaatctcagctcactcactgcaacctccgcctcccgggttcaagtg

SEQ ID NO: 578974 - DNA, 349 bp, Homo sapiens
cacgagggcctgtgttgtagtttccacagcgcgaagtgtctatttagaacacttcactctctgatgagagagagagagagatatctctctgtgagcaatatgcacatgtgccgggtcttttggttaaaccgtcgggaaatcggtggcatattttacctcttacaaatgcgctgtgttgccattggccctcaaggaaagctacacccggagaaccgtggaaggtgataagggagacggaggttaatctgtgcccaaggtcacatgaagaatgtgcaatttggccggattcttttacaagttccgtgataacacattttgcgcacgtgttttgtgaccccgtgttttgccg

SEQ ID NO: 578975 - DNA, 1153 bp, Homo sapiens
gcagggatgctgcgggcgggagcaccaaccggggacttacacgcgcggtgatggaagaagtccacatccgggaccaccagtcatggcagatggaagtttggacagggggcgtcgtagatgggttctgattcccagagtgtctgcaggcgaggcaggtggtgaaccgagtgtgggacaagctgtccccggtgcacgagcgcatctactgtgcactctctggttcagctgctgatgcccaagccgtggccgacatggccgcctaccagctggagctccatgggatagacctggcggaagctccacttgtctcaggctgctgcaaactgtggccgagaaagtactcagcctataacatatcgagaggacttgtctgcacatcctcatggtacgctgggctgggaccaacgtgaagcgacgcgtcaggtatactggaaccctgggcagggaatgctgactcgacagcctttggccattggctggctcggcaagcacctttatctatggctcactgtggatgcagcatataagccagggcatgtctcccgaggagtgcacgcgctctcaccaacagacgctataggctctggccatgagccgggatggctcaagctgggggtgtcatctaactggctcactattaccagctgccggctgtggcaccatcgagtcatcttgcgccaatgaacctgccacaatctactgatgcagtgaaccgaaccccaggaattcctcgcgcctactgggagatcaagctctcccagcgcccatacaaacagagcgcgacaacagcagccacgaaccgcccacgccaccggtcgcgtgcacgccccaaacggggcccgcgccacacagcacacccgcgcgcgggcacgaacacgagccaacaccctctcgcaagaccgcggcccccagacggcccctcacagagacaacaccgcgcccagcacacaccacaagcaggcgcgcaaacagccgagccgaccgcgcgcgaccacccacccgtcggcggggcatcgacagcgcccagcgacagacccgccgcgccacacacgcagccgctgacccgcaccgcccgggccgaaccgcaaacgaccaccacaccacgaaccaccagcccgggcgccgccacgcgcccacggccacccacccgaca

SEQ ID NO: 578976 - DNA, 137 bp, Homo sapiens
tatgcagagaaccccccttgttgtgaatggcttgggagtgagaggtcaggatgggtccagatgcgcacatacacatcccctttttccataggagatgaactgccctgtgacggcaggtggtggtgagatcattgtgg

SEQ ID NO: 578977 - DNA, 1234 bp, Homo sapiens
gctgatttaggaaccttgccgtgtatactagtcaaatgaccatcctgattcttggacaatgatgtgagatctgacttttttgccaatgtactatgactgacacctaccccatgtgtcaatggagcaaaatggcctttgagaatgaacattttcaacaagacccatctggactgacagtgacaatttgccctcttgttacagtgccttgaccagttgtgtcatcacaaaaagccagtcataagcatcatctcatttcctatgtcgcattgtgtgccatgctcctcatgcaacaattgcagcttgcattgcgttattgtgcttgtatcattggaacttgtcatccttctgcacgtccatgtgcaggcccagcatgcctgcacgcacaacaatggtcagcacaacagccgcagccacttgcttggcagcaaccatggcaggggcatgttccttgtgctggtggcatcgcaaacataatggtcagcattgtgcaagtgggagtagatcactcagcacgcagttgcatcccccaagccacgtgtgggttacacactgtgtgttggcaatttcacaagggggtcgcaagcattgttccccccattcacgtggagccacagacccggtgttcatacacaggttggcctgcgaggattaacagacagccaaaatgaaacaagggagtccacactgtgggtacacataccatatacgactaggaaggcacccttccacatggtatccctgggacttcctttcaattccgttcctatcacacacaaacatatgtggcattgtcatggcgtggtgacactctttcaaatcagtaggagtattccccacaaatacagaattggaatacgtccaggcgagtcacatcattcgagcgagcaaatcaccaagggtggaaatcccattatacaaatccttccacaagtacatggagtaagggttaggggagtaggtagtcaccgacagattctccaaacaaccaataccaccccgtatagcaacacgccgatgtaaccctaagaattagaccgttctaatatatccaagatatcctcatttcatatcgagcacatagagtagcatcggcagagaacgactacaacggggtacacccaaaagcaaattagtattcgtaggatatacgtatactggtgcacctgctggcgctatgcacaacccactagtatattcatcgttacttagaaaagtgtgggcagatactggctct

SEQ ID NO: 578978 - DNA, 211 bp, Homo sapiens
tgacttccttccaaagagtacagtatggaaagcggggcaggagtggtgggagactgactttacagtggagaaacttgcagacactacctcagccagatgatcaaggtcaacatcaacagtgataagtcatactaatagtatatattctggatatgatgtgatgaaaatacggtcttccccaaacccctagccccagtctaatatggagagg

SEQ ID NO: 578979 - DNA, 741 bp, Homo sapiens
  misc_feature (188)..(188): n is a, c, g, or t
  misc_feature (198)..(198): n is a, c, g, or t
  misc_feature (210)..(210): n is a, c, g, or t
  misc_feature (227)..(227): n is a, c, g, or t
  misc_feature (250)..(250): n is a, c, g, or t
  misc_feature (271)..(271): n is a, c, g, or t
  misc_feature (306)..(306): n is a, c, g, or t
  misc_feature (321)..(321): n is a, c, g, or t
  misc_feature (355)..(356): n is a, c, g, or t
  misc_feature (361)..(361): n is a, c, g, or t
  misc_feature (372)..(372): n is a, c, g, or t
ggaccgcaacccttgccgtctgccgctgacatcgctaccatggtctccggcagcagcggcctcgccgccgcccgtctcctgtcgcgcagcttcctcctgccgcagaatggaattcggcattgttcctacacagcttctcggcaacatctctatgttgataaaaatacaaagattatttgccagggttncactggcaancagggcaccttncacagccagcaggcatnggacatatggcaccaaactcgtnggaggaaccactccagggaanggaggccagacacatctgggcttacctgtctttantactgtgaaggaggncaaagaacagacaggagcaacggcttctgtcatnnatgtncctccgccttntgctgctgctgccattaagtgaagctattgaggcagaaattcccttggcttgtgtgctatcactgaagggaattccccagcaggacatggtacgagtcaagcacaaactgctgcgccaggaacaagacaacggctacttgggcccaacgtgacctgggagttcatcaatcctggagaactgtcaacaattggcatcatgccttggccatattcaccaccacaaggaacggattggcattgtgtacagatctggcaccctgacttatgaagcagttcaccaaacaacgcacgtcgccttggggcagacttagtgcgttgccattggcaggtgatccttataatggaacagattcactcgactgcctcgac

SEQ ID NO: 578980 - DNA, 320 bp, Homo sapiens
  misc_feature (70)..(70): n is a, c, g, or t
gtcagaaaatttccgggaccagccatcaaacagtatattccaattttcttcgtgctatactcaccaagtnggcaaaggttcgtaatggcatctctgcaccaatctcctcccccatagcaataagggcaatccccagaacagccactccctgcaatttgaagagagagcagaacccattaagcttccaagggaataaaaaaacagtcaccctttgactcaaggtcccaatctggaaaaattaaaaaggccattccctgtgcggggaacacctttttaaccccttaacattaccaggaacccgcgttctcccacaggggtta

SEQ ID NO: 578981 - DNA, 113 bp, Homo sapiens
atatcagctcggtaccggtctgacagcttctgagcagaaagctggaggggggatgtcgcgggggttattcttgttgtggtttattttattacaatctttttcctctttttcta

SEQ ID NO: 578982 - DNA, 310 bp, Homo sapiens
ttgtttggaaacctctgcgccatgagagccaagtggtaggaagaagcgattgcgcaggctgaagcgcaaacatgaccgaacatgatgaggcagaggtccaatgtagaccgttagagtgtgtttgccaccgttggaggccgccacaggtagcagaacactagggaatgccagaagctggggatgcgggttaagaatgttgtgggaactgactatgtctagctgtctagagtctcggttctcgctggtatctagagaccttcatcgtcctgcatgatcgccgagtcacctgctgaggagcccaaccttgatg

SEQ ID NO: 578983 - DNA, 324 bp, Homo sapiens
cacgaggacaactgctttgttcggatgtcaagttcaccaccctcatccatgtccttcacccgttacaagttaaggaagatatagaatctctttctagattgattgattgaaaccacatagatgaagaccctcccagcaccttttaaattttccgtgtcaccagaataccccagggccatcccatgtcgatcacagtggacgtgatggaatcctcaccgtttatcccggtcctgggggcatcacacaagcaccctactcatgcacacataatgtataatggatcatttcccacgctccctcaaatgctaggaagacattttgtta

SEQ ID NO: 578984 - DNA, 595 bp, Homo sapiens
tcccaatttgtaaagcgctgatcctgttttattgggcaggaaaacaaaacaacccagcagcccaggagggacaggtggatccttaatcctcctcctcgtcgtctccatgccccagccccacccgtggccctttctgtggctttctctcctcttcacgcggcccgggcggccacccccgtagggagagcgcagagagaagctcgatgtgctctcgtgggaactccaggcggacaatgaaggacgggatgttcaccacctgtgctgtgcggacccgtggaagcagcgacaagggtgagggtggacgtggaggaaaaacggacgcataaccccgagctaccgcaccactcttgcctcttccacccaccccgtgaaggccgccacggttgcagaccccaaggcgctgcaggacaggtgtgcccctgactcctcacgtgcgccccccggggattccaagggtactcgaccttaatccccaaaaaggctccagatgactttctcaaccccattttataggagaaactctgaaagtatcccacctaagaaccacaaagcaaatgaagatggccgtgtgagagcccccaagttccgagtcgaa

SEQ ID NO: 578985 - DNA, 451 bp, Homo sapiens
atccaccaggcaccactgcaatgtgtgtctaaggcagagcctttcagatccgtgtccacccatgtgccaataggacaatgggcaaagctacaaatggcaagagaaaaatgggactattaatgcgtgtggaaaaggccttaatagttaagttacagctaagaatgtcatgtcttgggttagaattttcatttttagcaccgttaatgtattcacttaaatctatgttagcacctcgtctccaggcagaacaacaaaccatccaaacatcttaaacattgggggaaacacgaaggggagggttaaagagagaatccggtactgtggaaggagtggatttagatcacaagatccttgtcgatatccttctgcttgatgccgaagcagccggcccactcatccagggcgatgtacttgtcattggccaggtcacaggtctcgaaaaagcgggtgg

SEQ ID NO: 578986 - DNA, 141 bp, Homo sapiens
gcatccccacgtacgtcgcatatctaatagaaaacaaacgccaaccaatataattcaagtactgcattattacaattattactaggagtctctattttaccctacctacaagcctacagaagtaatatcgagatctaccac

SEQ ID NO: 578987 - DNA, 785 bp, Homo sapiens
  misc_feature (13)..(13): n is a, c, g, or t
  misc_feature (41)..(41): n is a, c, g, or t
  misc_feature (57)..(57): n is a, c, g, or t
  misc_feature (134)..(134): n is a, c, g, or t
  misc_feature (155)..(155): n is a, c, g, or t
  misc_feature (158)..(158): n is a, c, g, or t
  misc_feature (180)..(180): n is a, c, g, or t
  misc_feature (215)..(215): n is a, c, g, or t
  misc_feature (220)..(220): n is a, c, g, or t
  misc_feature (250)..(250): n is a, c, g, or t
  misc_feature (252)..(252): n is a, c, g, or t
  misc_feature (307)..(308): n is a, c, g, or t
  misc_feature (330)..(330): n is a, c, g, or t
  misc_feature (333)..(333): n is a, c, g, or t
  misc_feature (337)..(337): n is a, c, g, or t
  misc_feature (345)..(345): n is a, c, g, or t
  misc_feature (406)..(406): n is a, c, g, or t
  misc_feature (419)..(419): n is a, c, g, or t
  misc_feature (423)..(423): n is a, c, g, or t
  misc_feature (425)..(425): n is a, c, g, or t
  misc_feature (457)..(457): n is a, c, g, or t
  misc_feature (463)..(463): n is a, c, g, or t
  misc_feature (493)..(493): n is a, c, g, or t
tctgccggttgtntttgtaagaggcgaattcagtttcccangtggcgctgcggcagnagtccaaagtcggactttcaaaacaaacccgaagttttgaacccggcggtggcagttgtcactggcaaaggtttggngtggtggcgccagtgtactanttntggggaggtctcaaccaggttntggcaccttcaatccccacctgatatctgcgtatnatcanggtatcccgcttttcccccagttccccaanancgtccttcctttccctagttaaaggatcgcagttttggtctgatagtgcatccanntattccagtgttgtattcccanttncctnttcccatntaaagtggtggcctttcctggggataacttgggtatcccccgctgggagagcaagaacaanaaacaagggagcnagananctgccgctcccctgccaaaggatatgaatacnagcctnagctggtttgagaagctggatgtgcttctnaacgctaatgatggaaatgtggtccggaataagaagtggctgtataatcttggggtctcaaaagagataattggcatgtgcatctgtttcttctgtagcagtggctgtatcttcttggggtctccaccgcagaatagcactgctgtcactcctgcagtgctgtgggaggagtcagagattatgcagaaggaattgaagttgctgcagtaccagttgagccagcaccaggagctgctgctgaaacagctggctgagggacgacaggctcaggttggcagttggaaggatctcc

SEQ ID NO: 578988 - DNA, 435 bp, Homo sapiens
gactccctccatgtggccccaggtgccaccaataaaaatcctacagaaaaaaaaaaaaaaaaaaaaaaaaaaaaaaaaaaaaaaaaaaaaaaaaaaaaaaaaaaaaaaaaaaaaaaaaaaaaaaaaaaaaaaaaaaaaaaaaaaaaaaaaaaaaaaaaaaaaaaaaaaaaaaaaaaaaaaaaaaaaaaaaaaaaaaaaaaaaaaaaaaaaaaaaaaaaaaaaaaatgttgggcaaatataataaaaattttaaaaaatttaaaaaattaaactaaaatatgaagatattatgaataaaagacaaataaaggtaatagataaaaattaatatacattaagtattaaaaattaaaaaaattgaaaaaactttaaactcctccaaattaacaaccttatcaccaaaaacacaaatctcccatttttgaaattatacca

SEQ ID NO: 578989 - DNA, 157 bp, Homo sapiens
agagcaagtacagcagtaggacaataaatcaattcaagaagatattaccatcatgtcccagggagtgcgaggtttctagaggagcaagcggctctcctcactcagggctgccgggggggtcttgaactaggtgctattgaaacttctagaaactagg

SEQ ID NO: 578990 - DNA, 172 bp, Homo sapiens
ttcatcaaccacaatactctgcgtattaacaagtataatattaagtatggcatgacctctagagctaatgtgatcgtggggttgtaattacagaccccgacgatcacataatcctaaactggatcagccatagtatcgtggtgtgtcgactccactaacgggggatcctcta

SEQ ID NO: 578991 - DNA, 388 bp, Homo sapiens
catgtctcccctaagtgctgagtgtgagcccctgtgccctctttcagttctttaggaaaaagtatagtgggcagggtgcagtggctcatgtctgtaatctctgcactttgggaggccaatttgggcagattaccagagatcaggagttcaagatcagcttgaccaacatggtgaaaccccgtctattcttaaaattccaaaaaaaaaaaaaaaaaaaaagaagaagaaaaaaaaattagccaggcatggtggcaggcacctgtaatcccagctacacgggaggctgaggcaggacaatcgcttgaacccaggagggggaggttgcagtgagccgagatcgcacccctgcactccatcctgggtgacagagcaagactctgtctcaata

SEQ ID NO: 578992 - DNA, 1371 bp, Homo sapiens
gtgtccctgtggtgtggacgtggttggtgattggcagtgatcctgtgatatccggcttaactcagcgtcaaaaatgcgatgatcttctcgtgcaaagacaccgttgaccggcgaagaccgatcaactcgctggaggttggagccacagtgacgactcaatcggacaacatcgtgtaagcggccaaggaatcgcagggactaacggagatggcgattccgcgcccgatccatgcagacggctcactctgtttgcacgggcaagtcagcgtggaacggatggcgcgtaactccttctcgtgaccttagcatacagttcctagaacggacgctctgagcgacgtgacagcgctgggctccatggcggctcgtgacgtaggggtggctatgttgcaagattcgtatcggtgtcacggaggcccatgacgccaggggcgaacgagcgccaagtcatgcacgcatgggacacggtctgggaggccgcacaatgggggacacatcccagctccgcacagacctgggagagacagggcccaaaaggatttcgccaagaggactaaccacggaaacgcgccaagtccccaaatcacgccggggataccaacgaccacaggacggtgccatccaacatccagtgaagacggccaagggggccacagcgaacacgggcaataggtgcacaagagcaactcggccgaccccaaggacacacatacgatatgaatacaataggaagccgatcacccagcacgccacagttccaccagaaggcaaacaaccgggcgaaccgccttccagcgaaagcaacccagcagatggacacaaaaccccgaatagaagggaacaaacccaattgcgaccgcgacctctacttacggacaagccaacacggacgctaggagcgacacacaacacgttgtcccctacaagcagcacacatcaccgctgtggtaccgagcgggaccctcgcccaccccagttcagccgcgccacccagtcgtagacacagcaccatagagaggcacccagaaaacatcggccaacacagcgagcaactggctgatcccaatatgaacgtaccccaatgcgtcagcaacacgggagcccctaggcgggcacacggcgcccgcaccaaacatcgagtgcgctagtacaccaccacatgccgctccacacaacgacggcgcaaccagcgtcactcaccatcggctgcgctaacacgacgacacacaactgcgttgtgtggactcgacacacaccagacgagaaacactatcttaccacaccaacgacaaacaggcaacaatcatccagccgcagcacacgcgggccatccaacaacaacagccacccaacgagtctagccacccgacc

SEQ ID NO: 578993 - DNA, 815 bp, Homo sapiens
cggacccccctggttggggagcaggtggtggtccgctcctaacccggtggctagcgctagagacaaggagaagcgcatacagcgtaccagacccctgtggaccagctacctagcaggacgggctaccagctagcgctacctagcacatagccagctagctagaaaataggcctatatgacgaggaggtaggggtactagacagcgccgagctacttccgtaagcagctagcataaagctagcggtacccgccggacatacagggccacctattagcgtatacacctatgggctactgcccacacacctaggaccggccaccgacagagtacaccaaggacaagggtaccttaccctacagaaccctagtacccgagaacctaggtacaagaacgccaagaagaccatacgggcggcagcgatgtacaactacgcaagaagtacaaaccccccagctagggagcaccggggccagccgccccctagaggaccaggaggacgcagatcctacgagtagtacgagagggaactaggagcccagcacgctagaccccgtacctacagacctagaagccctaccgcagcagcatacaccatagagcaagacctggtggaaagggctatgctagtcgcgactaaccaggcgccttcgggactaggggcaccctgaagcagaagactagagccggggccaagtctagagaccctatccggatatctccggtacaccggatgtaatacatctagcggagtaacccaggctgctgatagtgccccaatgtgcaggaaagccttagagggttccagtgtacgaga

SEQ ID NO: 578994 - DNA, 291 bp, Homo sapiens
tacagtcctcaagccatccgtgctgggtctgtttttttttaatataaaaaaaaaacccccctttctacccaaaatagaatacaattacaagatcttcgttaaattaaaactccaccttccggttaaaaagaaattctcttcctaccccctccaaaatagtggaattaacggcccccccccaccagccccgtttatttttttttaaccttaaaaaaaagcaagcccaaagcctggccaaaattttaaacctttggaacccccccccctaaccccccaaaagggctgatataa

SEQ ID NO: 578995 - DNA, 180 bp, Homo sapiens
gcgagatctcagctcactgcaacctctgcctcccaggttttaagtgacttcccctgccctcagcctcccgagtagcttggattacaggtgcccgccaccatgcctggctaattttgtattttaagttggccatcgttggccaggcttggtcctccaacttctcgaccttcaaggtgatcc

SEQ ID NO: 578996 - DNA, 660 bp, Homo sapiens
caggctgggcacagtggctcacaccggcaatcccagtttttttggtggcccaagcacttggatcatgaggtccggaggttttttataccctggctaacatggggaaaccttggctctactaaaaataacccggttgtctggcaaccgatgacagactccttagcgagagccaaaccaagcccttcagtgagttacacaaactgtggagtttgaactgaacatctacaaggagcgtggaggctgagcttctcaagagtcctggttgcagaagcaaggctccttcttggaaaaaaatcaaggacccagggtggcgctttttttttggcttcacaagctactgggtctaaagccccatcttcgtaacagggcaacccaaaaggctggttgggagcccaaaagtcatgaacgtgaagtgggaaccttaataccacattctttttggcacgacactgaaggtccttaggtggtcaaaaggagaaaccagcggctccattttcgttatcaccatcgtatttccttctttaaaaagggtttctttggccattctaaaactttctaggcgggcggtttggccacaaaagggagagttggttcgatcacaaaagagcgctatacttatcacataacaaagccttctccccaagggcggtttggagcagg

SEQ ID NO: 578997 - DNA, 168 bp, Homo sapiens
atagttgaccgagccacccagtgtccagcgcctggtcaagaacgttggcgccgcgcagtacctcgacgcggctttgccacagcgggtccttgagttcataggtgcgtgccgccggggccggtgagcggcaaaccgtcgagcattgcatacaagcccgaggcgtgggag

SEQ ID NO: 578998 - DNA, 169 bp, Homo sapiens
gagatcacacgcattgcactccagcctggacaacaagagagaaactccatctcaaaaaaaaaaaaaattcttggccaggcacgggggttctaggcccagggcagaaatttatcaaaatcaagaagctaaagaagttcggtctctaataattttgctcggtgaaaaaatt

SEQ ID NO: 578999 - DNA, 151 bp, Homo sapiens
ccggttagagcggctctgtgagcgctccatccccgctatgtttctctaaagtaaccatctttaaagtgatcctctaaatatttaaaatagtactcatctcagtcataacaagagacaaaactttgcaatagcctaggggccctacctgatc

SEQ ID NO: 579000 - DNA, 250 bp, Homo sapiens
actagtgacagtacctgtctgatagtggatgctctgacatatgtaaagagttatactatatatataaaccagtgatatatctgacaaactgtatttgtgagtcataagagagtgtaatacataacattatacataaattgtatgtatatataactctttacatactcagagcatccctatcagacaggtactgtcattatccctttattatcgttgagaaatgggcagaaatgggctatcggggtcccga

SEQ ID NO: 579001 - DNA, 176 bp, Homo sapiens
tgctgtgattacaggcgtgagccaccatgcctggccttgttcagggtttcaaagctcgttgcgcaattaaccctccacattctgtggatatccttttgcccaggaaacaaacgctctccacgtgacctactgcactcaccactcccgacttggggcccctcggccggtaccgagct

SEQ ID NO: 579002 - DNA, 106 bp, Homo sapiens
tgggacctgagaccaaggtcagagaagccttccaacctcaggagcctgacttcccgacggctccaccagaccttgaacagctccgactaacagatgagcttgctcc

SEQ ID NO: 579003 - DNA, 1214 bp, Homo sapiens
tatagcgagggggtctcattaggtggcccaggggggttcctcaaactcctataaacgcaaggtgactccctccggcctcacccgtctctcaaaggtggtggggattgtgcgggcatgtgagccacggagcgtgggcacaatgtttgttatatttctttaacaagtagaagggcgtcacatacgtgaaacgtggaagggtgcatacaatgtggccgaaagagttgggtcgtgacgcataagttattggagggaagttacaccacccgtggacctatagagcgtggtgggaagaatcccactctcctttggcggactctcaagaggggctcgtgtgttccccactctcatctctgtggtgaaaactcgtgccgtgagctcccctaagtggcgtataaggcatattgtggaggttttgggagacactccctttataagagcctgtgggatcctcccgacttacaattggcgcaggaaacatttgtgggaagccacagcggggaaacacccctattttaagagggaatatggggagggggatctcataaatattcacaattgtacacctaaaccaatgttgaagagggtctcggaaccagcgcggagggtatatgaccccccttgtgtagtgtcgatcctatatgctgtaccaaagagtggggagcaacaagaagggaggcgtaataccgaaaccaacgagagggggcgccccaagcgtagaacggggacacgagagacgcaggaacgagagcacaacgagacccacctcagagagagaaaaaccaccgcaacgacacaaccaaccactacaacagctgacacgcagacaccggtcaccacaaaaaggaaaaaaccacacaaagagggagaggggaccccaccacaagcacaacaaaaagcagaaacgaccgagaaacaaacagcagggtggtaccaacaaaaggagggcggcgccccccagagagaaatcaagactgaactccgccacgcgcaagcaaaaataaacaaggcgaacaggacgacacggggcgtgaccgcccggggcagcgcaaaaacaaaacaagcacagcagagacgtgagcgagaggaaaccacacagcgtggatcaccagaccggggcggcacacacctagtaggatgaaagcgccagccaccaccaccataccgcgggatgtatagtgcaaacacaaagaaggggcgcagaagcacacacccaa

SEQ ID NO: 579004 - DNA, 428 bp, Homo sapiens
gggggctcctttcccccccccccccccgggggcattgtgtgggggtctcggggtttttttcccaccggggggtttcccgggccccccccccgccccatttgaaaggggaaatttttttcccccggggggtttcccccttaccttcccccaaggccggggtttttccccccccccccccatttgggggggggaggggggtcccccccgggtttggttccccctccaaaggggcccgctttggaaaccccggaacccccgcaggaaccccgccaatttttttgccccctccaaaaggaattttggcgggcccctttttcggtttagggaaccgcggtttcttaaggggttccccttttgcccaaattggggctttagggaattttatttcccggggtggttttttttaaaaaaaggggttttaaatttga

SEQ ID NO: 579005 - DNA, 124 bp, Homo sapiens
ggatcactgcacagagtgagactctgtctcaaagtcaaaaacacaaggtagacagcccatttcttttgtttttgttttgttttgtttttgagacaaagtctcgctatgttgcagtgtgcttccg

SEQ ID NO: 579006 - DNA, 113 bp, Homo sapiens
gcgcgatactcgttagtgtgccctagaaaagacaaaaagacaaaaaataaaaaaaataaagtcaattaaaataaagagcagtgtaagataatggcagaatagttggtatttca

SEQ ID NO: 579007 - DNA, 333 bp, Homo sapiens
gcatgcatgtggagcgaaacacgtggatctggactcaggctgaggtactggcctcattaccttctcacgtgttgaaaaatgaccatgtcaggaggtttctcagcacttcctctcccccacagcagcttcagagtccaagtcctggcaatccctccctttctaaagtaggtaccgtgatgggcgtgtctggaaggcctgtgtgtggagtggctggtatcccgtcctcgcagagcggagcccagcaccacgggcagcacccggccggctccgccgcccccttgcctcactgctcccatgcgggcagcgcgggctcagccctggcctaccggaccc

SEQ ID NO: 579008 - DNA, 318 bp, Homo sapiens
  misc_feature (229)..(229): n is a, c, g, or t
  misc_feature (316)..(317): n is a, c, g, or t
catttttccttagttggtttccagtaataaagtcatgttgtctgaggccgggtgcagtggctcacgcctgtaatcccagcactctgggaggctgaggtggcggatcgagaccaccctggctaacacagtgaaaccctgtctctaccaaaaatacaaatatttagccgggtctggtggcgggcgcctgtagtcccagctacccgggaggctgaggcaggagaatggcgtnaagctgggaagcagagcttgcagtgagccgagattgcgccactgcactccagcctggggtgacagagcgagactccgtcaaaaaaanna

SEQ ID NO: 579009 - DNA, 421 bp, Homo sapiens
  misc_feature (11)..(11): n is a, c, g, or t
  misc_feature (70)..(70): n is a, c, g, or t
  misc_feature (74)..(74): n is a, c, g, or t
  misc_feature (114)..(114): n is a, c, g, or t
  misc_feature (216)..(216): n is a, c, g, or t
  misc_feature (403)..(403): n is a, c, g, or t
caacctttttnaaaaggccccccacgccttattttccaaatagaattaaaaccccgattcccgaagaggncccngaaagttgggcctaatttcccccggccgggttatgggggnagggcagggtaaagggatcccttaaaaaagtttaacacctcctatgtatcctcacaatcctattgtgaggatgtgacttgttccagtgttcctgaacttttncgaaggaatcgtgctctcaatgcaaagtgtcattctctggaattgcacctggctcaggaaaggactgtctttgtacttgaatttaaatccaatggagaactttaacacgggcatttgcatgactgagaattgctgctgtcttttttccgtatgtcactttcttgaatgtgttctaataaaatgattnctaaaggcagaaaaaaaa

SEQ ID NO: 579010 - DNA, 264 bp, Homo sapiens
gcatgattcatctggataagggaatgataaatagaggatggagtgcatacagtatgagtcagcagaatgagggatgccttcgtgcccacaaagatcttactcaatttgcacaacttgtacttggcctcctcaggtgtaatacgatgtacagcaaagcgacccttggtgtcatagatcagacggaaattctctcccgtcttgtcaatgctgatgacagtccattaatccagcagggtaggttatatcagttcggaccttgccatc

SEQ ID NO: 579011 - DNA, 176 bp, Homo sapiens
tcgaagagcccaactccggctagagctgtacaatcctcaggccgtcttgtagaaaagaaagcagcgaggcactgcctggatccgagaggaacgctactctttttgtgtctcaagtcgcctgcatcctgtcatttcgctccggcttcctctctgcgtttgacacgcagagacgatcc

SEQ ID NO: 579012 - DNA, 742 bp, Homo sapiens
  misc_feature (3)..(3): n is a, c, g, or t
  misc_feature (144)..(144): n is a, c, g, or t
  misc_feature (214)..(214): n is a, c, g, or t
  misc_feature (225)..(226): n is a, c, g, or t
  misc_feature (263)..(263): n is a, c, g, or t
  misc_feature (269)..(269): n is a, c, g, or t
  misc_feature (271)..(272): n is a, c, g, or t
  misc_feature (274)..(276): n is a, c, g, or t
  misc_feature (280)..(280): n is a, c, g, or t
  misc_feature (283)..(285): n is a, c, g, or t
  misc_feature (287)..(287): n is a, c, g, or t
  misc_feature (296)..(296): n is a, c, g, or t
  misc_feature (327)..(327): n is a, c, g, or t
  misc_feature (332)..(333): n is a, c, g, or t
  misc_feature (354)..(354): n is a, c, g, or t
  misc_feature (418)..(418): n is a, c, g, or t
  misc_feature (513)..(513): n is a, c, g, or t
  misc_feature (547)..(547): n is a, c, g, or t
  misc_feature (552)..(552): n is a, c, g, or t
  misc_feature (711)..(711): n is a, c, g, or t
ggntggggtttttgggagtgaggcagggaggatgcctggggcctgtgggaatcagagagaagctggggtcagaggtaggagctgacgctgtggggggtggggggtgaaaggtgaggcaaggtcaaaggtgaactgcagctcggngggaggggtccaatataaaccaggacttgcaggtgtagaagtaaaatgggactcatagagggtgaaaganaagttggagtnngaggggattcagagatcaaagagaagttggggttttntgtagntnntnnngttnttnnngngggttaatngtgaggcaaggtcagcggtgaagtgcagctnttttnntggggtcaaacataaaccagntcttataggtctagaggtaaaatgggattcatggggggcagaggtcaaaggtgaagcagaagtnaggggtgaaggaaggtctgcaaagttaaaggtgcggtttccagagtgagaaggggtgaagcggggctcctcctgggaatgtcaaggttggaaganctcaagggggttaaagataaattagggctctttnggganccagggtcggagatgaagtagccagaggtaaagcgagctccaaaggtattgttagggtcaggggggagtcagccttcgagggaaagcggggctctagggttcagaaatggggggcctagcggatcaaaggtcagaagcctcgaggggacaggtgggaancgatgggagcagcctaggccacctcctcctc

SEQ ID NO: 579013 - DNA, 691 bp, Homo sapiens
  misc_feature (252)..(252): n is a, c, g, or t
  misc_feature (363)..(364): n is a, c, g, or t
  misc_feature (542)..(542): n is a, c, g, or t
  misc_feature (546)..(546): n is a, c, g, or t
acggggctttcagggaccatggtgataagatttaacccttggatttccccgccgccactttatgggccgttctggcaggggtaccctacccccaatctatggggggtttaaataaagcactcggcctggaggaaatgtagcgccccgtcctgtgcttctcaggccatttttttaaacccctgttaggaaggttggatttggcgcgccttgcttcaccaaaaatccgggggaaaaatttttgggtttaatttncggggatatcccaagcccacagtgaccccccttgtttagtttcgcaaggcaaagggcccctaaaagtccttttgtgaaggggttgggtttgagcgggaaagaaggtcaaanngccgggaagcccccccccccccctttgaaaaattttcctttaaggcccccgccttcatgtttgaaaaaagattaaggggggaaaaggtttttcttttttgggggtttccccggaaaaaaaggggcccggtttcccccaagttttaaactttccgcctttggggacctacccaaaaaancctnatttttttttttttaaagccgggggggggttaaaaaaaaggttttttccgggccaaaggtttttttggggttttggaaaacccccccccaggggggtggggtttgttggcccaaaccccaaaaaaatttccaaaggtttaagcca

SEQ ID NO: 579014 - DNA, 1082 bp, Homo sapiens
gtatcggacacgggaggatcaggatgtttgctgagctggctggaaccttagacggtgccagataggagtgaagcgtggctccatggctgccctcctgctgctgcccctgctgctgttgctaccgctgctgctgctgaagctacacctctggtgccgcagttgcgctggcttccggcggacttgtgcctttgctggtgcgagctctgtgcttgcaaaatgggctcttcgagctcgctgccctgtgccgcggctgtctgccgccggtcgggtccccagtcccagcctagcgcacgtaggaagtgcgcagcgcgcgctggtgctggcgccagagtttctggagtccctggagccggacctgcccgacctgagagccatggggctccaacatgtgggactgcaggcccaggaaccaaacacatgctggaataagcgataaagctggctgaagtgtacgctgaagtggaatgggccagtgaccaagatacatctaattcaccccagagcaataaacagacacagtagcctgtacatcaaacaaactctaggaacacagagactccccaaggagtgactcaggactcaagaacatatagaagatcctgaaaatgacaaggagtacatataagcatagtagaaggaagaacaaacagagaaaaatgatgatactaacctacggcaaatccccaaaaacataaagcaaacattgtaccagagaaacccatagagtagaagaaaatcaggaagaaggaaggaaattgagagaaattagtgggggacaacaaagttagggatagattaaaaaaaattacataaaggtttacataagggacgaatgtggtaaaaagatagaagtggagaaaagaaaataggaacaaaataagaaacaagagggagattgaaaggagatgaatacacaaaaagataaaaattatgatgagaaaaagaagaagacacaggaaatacatttgaaaaaaacaagagaccacaagtaaagagaagagacaaaagaacgaattggaacttaaagagtacagaagaatgcaaaaaataggaaagatagtgaatagatagacaagatataa

SEQ ID NO: 579015 - DNA, 126 bp, Homo sapiens
ggcttaacgtatatatgtgttactacccttgtcggtccggccactacgtcggccacgtggccggacacgttgtggccggaacgtacgatgaattcgagctcgaattcatcgatgggacgtgtacgt

SEQ ID NO: 579016 - DNA, 1254 bp, Homo sapiens
tttttttttttttttgctttgtacttgagtttatttcacaaaaccacggagaaagatactgaaatggagctctttccagcctccaagcaaggaggccccagcagccagtctccagccccttgagccctttttgttaggcccacacccaaaagaggagaaccagtgtgtgcgcgaaggtacatggcaaggcacttttgaaaacatcccagtttaccgtggtgaaattgaacttactctgaaacagatgaaaagggacatgcaaatttgctgagcacatggaggtgtttgttagtaggtgaaaatcatgtcctgggtataacccagcttctccaggttagggtgagccgccgtctggatcagtggtggcgggccacacaccaggatgagcgtggacttcgctggaggaggaaggtgctccttgatcatgtcggcagtaacgaagcctgagctgtacttccagccaatgggaggcctgtccagggtgtaccacaggtcgaactggtctgggtgagtcctggcaatttcttcaagctcttttctgaccaagatatcctcctctgtctggttggcaaagatgagggacatcctggtcctgtcactggggtccttggtgatgtggcgaatgagctgcaacatgggtgtgatgcctgtgcccccagcaatcattcccaggtgatcggccagtgtttttttaggctcactcgtctggtctggtctgattccaagattccctggcccatggtaaaacaagcgtccccttggccctcgaaaaaagatggtctccccgattttcatgttctccaaatactgagtcatcttcccaccttcaggatattgggggtgtacatttttgaagtagatctttataattaggtccacaaagcctctgtcatcatcactggagacaggggtgtaagccctgaccaccaattcattatcgatttttgccaagagctggacatagttacctacaggaagccctaagacatggtccggcgaaggcagtccaaagcggaacctccgggtgttgtggctgattttctctttctcaatcaagggcagcgggtacttggcttcagggtcctgtaaggtgattggctctctcctcctggagttcatgctcttcaggaccaacacgagcacagtgaccccagtgacggtgatggtcaggagcagggacgggtcccttaagctcggcaaggctggagaaggccgtctgggtgaccgggcggagggggatgctggggaaggaag

SEQ ID NO: 579017 - DNA, 287 bp, Homo sapiens
tagcctctgagtagctgggatacaggtgcgtgcaacatgcctggataattttcgtatttttagtagagctggggtttcatcgtgttaaccaggatggtctgaatctcctgacctggtgatctacccacctcagcctccctagttttttaacagataatttctatctctttatcattatcttctatatggtaagacatcgttcttctactttcttttatttctttagacatgctttcttttagtattttgaacatatttaaaatagctgatttaaagtctctgtttag

SEQ ID NO: 579018 - DNA, 1655 bp, Homo sapiens
tttttttttttttttgctttgtacttgagtttatttcacaaaaccacggagaaagatactgaaatggagctctttccagcctccaagcaaggaggccccagcagccagtctccagccccttgagccctttttgttaggcccacacccaaaagaggagaaccagtgtgtgcgcgaaggtacatggcaaggcacttttgaaaacatcccagtttaccgtggtgaaattgaacttactctgaaacagatgaaaagggacatgcaaatttgctgagcacatggaggtgtttgttagtaggtgaaaatcatgtcctgggtataacccagcttctccaggttagggtgagccgccgtctggatcagtggtggcgggccacacaccaggatgagcgtggacttcgctggaggaggaaggtgctccttgatcatgtcggcagtaacgaagcctgagctgtacttccagccaatgggaggcctgtccagggtgtaccacaggtcgaactggtctgggtgagtcctggcaatttcttcaagctcttttctgaccaagatatcctcctctgtctggttggcaaagatgagggacatcctggtcctgtcactggggtccttggtgatgtggcgaatgagctgcaacatgggtgtgatgcctgtgcccccagcaatcattcccaggtgatcggccagtgtttttttaggctcactcgtctggtctggtctgattccaagattccctggcccatggtaaaacaagcgtccccttggccctcgaaaaaagatggtctccccgattttcatgttctccaaatactgagtcatcttcccaccttcaggatattgggggtgtacatttttgaagtagatctttataattaggtccacaaagcctctgtcatcatcactggagacaggggtgtaagccctgaccaccaattcattatcgatttttgccaagagctggacatagttacctacaggaagccctaagacatggtccggcgaaggcagtccaaagcggaacctccgggtgttgtggctgattttctctttctcaatcaagggcagcgggtacttggcttcagggtcctgtaaggtgattggctctctcctcctggagttcatgctcttcaggaccaacacgagcacagtgaccccagtgacggtgatggtcaggagcagggacgggtcccccggtcggacgttcgttcccggctctggccggcctccgcgcctctggcctctttccttccggccgtcccgacggagatatttcttcaatactccataaatacaccccgccgcggaacccacccggagtgagacgcccaacacgtcgtcgaactggggttggccgggggccgctccccgccgcgggcccgcagactcgtggcgtcgccccgcagctccgcctggccgacggggaaccggccgagacccggacacgcacgcccgggaggacaaaagcgcgggcggaccccgcaggctgggaccccggcggctggcccgctccccgagaagggccgtggtcggggggctctcactcacgagccgctggctctgggtcagccctgcccccagggcagcgctccatcatgaggctggcggggcgctgagccgtggcgtcctcgctcctgcgctgcccctctgcaccctccgct

SEQ ID NO: 579019 - DNA, 80 bp, Homo sapiens
ttcataatgaaaggaaatgttatttttaatagaggttagtgaaaataaaaataaaactattttctaatcgcctaaaaaaa

SEQ ID NO: 579020 - DNA, 1301 bp, Homo sapiens
tttttttttttttttgctttgtacttgagtttatttcacaaaaccacggagaaagatactgaaatggagctctttccagcctccaagcaaggaggccccagcagccagtctccagccccttgagccctttttgttaggcccacacccaaaagaggagaaccagtgtgtgcgcgaaggtacatggcaaggcacttttgaaaacatcccagtttaccgtggtgaaattgaacttactctgaaacagatgaaaagggacatgcaaatttgctgagcacatggaggtgtttgttagtaggtgaaaatcatgtcctgggtataacccagcttctccaggttagggtgagccgccgtctggatcagtggtggcgggccacacaccaggatgagcgtggacttcgctggaggaggaaggtgctccttgatcatgtcggcagtaacgaagcctgagctgtacttccagccaatgggaggcctgtccagggtgtaccacaggtcgaactggtctgggtgagtcctggcaatttcttcaagctcttttctgaccaagatatcctcctctgtctggttggcaaagatgagggacatcctggtcctgtcactggggtccttggtgatgtggcgaatgagctgcaacatgggtgtgatgcctgtgcccccagcaatcattcccaggtgatcggccagtgtttttttaggctcactcgtctggtctggtctgattccaagattccctggcccatggtaaaacaagcgtccccttggccctcgaaaaaagatggtctccccgattttcatgttctccaaatactgagtcatcttcccaccttcaggatattgggggtgtacatttttgaagtagatctttataattaggtccacaaagcctctgtcatcatcactggagacaggggtgtaagccctgaccaccaattcattatcgatttttgccaagagctggacatagttacctacaggaagccctaagacatggtccggcgaaggcagtccaaagcggaacctccgggtgttgtggctgattttctctttctcaatcaagggcagcgggtacttggcttcagggtcctgtaaggtgattggctctctcctcctggagttcatgctcttcaggaccaacacgagcacagtgaccccagtgacggtgatggtcaggagcagggacgggtccccgagccgctggctctgggtcagccctgcccccagggcagcgctccatcatgaggctggcggggcgctgagccgtggcgtcctcgctcctgcgctgcccctctgcaccctccgct

SEQ ID NO: 579021 - DNA, 1432 bp, Homo sapiens
tttttttttttttttgctttgtacttgagtttatttcacaaaaccacggagaaagatactgaaatggagctctttccagcctccaagcaaggaggccccagcagccagtctccagccccttgagccctttttgttaggcccacacccaaaagaggagaaccagtgtgtgcgcgaaggtacatggcaaggcacttttgaaaacatcccagtttaccgtggtgaaattgaacttactctgaaacagatgaaaagggacatgcaaatttgctgagcacatggaggtgtttgttagtaggtgaaaatcatgtcctgggtataacccagcttctccaggttagggtgagccgccgtctggatcagtggtggcgggccacacaccaggatgagcgtggacttcgctggaggaggaaggtgctccttgatcatgtcggcagtaacgaagcctgagctgtacttccagcctggttggcaaagatgagggacatcctggtcctgtcactggggtccttggtgatgtggcgaatgagctgcaacatgggtgtgatgcctgtgcccccagcaatcattcccaggtgatcggccagtgtttttttaggctcactcgtctggtctggtctgattccaagattccctggcccatggtaaaacaagcgtccccttggccctcgaaaaaagatggtctccccgattttcatgttctccaaatactgagtcatcttcccaccttcaggatattgggggtgtacatttttgaagtagatctttataattaggtccacaaagcctctgtcatcatcactggagacaggggtgtaagccctgaccaccaattcattatcgatttttgccaagagctggacatagttacctacaggaagccctaagacatggtccggcgaaggcagtccaaagcggaacctccgggtgttgtggctgattttctctttctcaatcaagggcagcgggtacttggcttcagggtcctgtaaggtgattggctctctcctcctggagttcatgctcttcaggaccaacacgagcacagtgaccccagtgacggtgatggtcaggagcagggacgggtcccggagtgagacgcccaacacgtcgtcgaactggggttggccgggggccgctccccgccgcgggcccgcagactcgtggcgtcgccccgcagctccgcctggccgacggggaaccggccgagacccggacacgcacgcccgggaggacaaaagcgcgggcggaccccgcaggctgggaccccggcggctggcccgctccccgagaagggccgtggtcggggggctctcactcacgagccgctggctctgggtcagccctgcccccagggcagcgctccatcatgaggctggcggggcgctgagccgtggcgtcctcgctcctgcgctgcccctctgcaccctccgct

SEQ ID NO: 579022 - DNA, 652 bp, Homo sapiens
  misc_feature (250)..(250): n is a, c, g, or t
  misc_feature (318)..(318): n is a, c, g, or t
  misc_feature (366)..(366): n is a, c, g, or t
  misc_feature (383)..(383): n is a, c, g, or t
  misc_feature (395)..(395): n is a, c, g, or t
  misc_feature (402)..(402): n is a, c, g, or t
  misc_feature (409)..(409): n is a, c, g, or t
  misc_feature (412)..(412): n is a, c, g, or t
  misc_feature (425)..(425): n is a, c, g, or t
  misc_feature (427)..(429): n is a, c, g, or t
  misc_feature (432)..(432): n is a, c, g, or t
  misc_feature (436)..(436): n is a, c, g, or t
  misc_feature (439)..(439): n is a, c, g, or t
  misc_feature (443)..(443): n is a, c, g, or t
  misc_feature (445)..(445): n is a, c, g, or t
  misc_feature (463)..(464): n is a, c, g, or t
  misc_feature (466)..(466): n is a, c, g, or t
  misc_feature (469)..(469): n is a, c, g, or t
  misc_feature (476)..(476): n is a, c, g, or t
  misc_feature (480)..(480): n is a, c, g, or t
  misc_feature (489)..(489): n is a, c, g, or t
  misc_feature (501)..(502): n is a, c, g, or t
  misc_feature (528)..(528): n is a, c, g, or t
  misc_feature (549)..(549): n is a, c, g, or t
  misc_feature (551)..(551): n is a, c, g, or t
  misc_feature (556)..(556): n is a, c, g, or t
  misc_feature (558)..(558): n is a, c, g, or t
  misc_feature (564)..(564): n is a, c, g, or t
  misc_feature (574)..(575): n is a, c, g, or t
  misc_feature (578)..(578): n is a, c, g, or t
  misc_feature (582)..(582): n is a, c, g, or t
  misc_feature (595)..(595): n is a, c, g, or t
  misc_feature (607)..(607): n is a, c, g, or t
  misc_feature (612)..(613): n is a, c, g, or t
  misc_feature (618)..(618): n is a, c, g, or t
  misc_feature (631)..(631): n is a, c, g, or t
  misc_feature (633)..(633): n is a, c, g, or t
tgtctcattcagaacaaaaactaactctgtctaactactgtaaggcaaactcttggtaccaaccaacagagtcaacttgccacccctggcacacagctctattcctatcacatgacttcctgcatgctgcccttcctttctccatcccaattacacctcccagccagatacacaagacacatttgctggtgaactccactcctcccagctctctatgcatttccactcaactacctctactgccttcagntatgctttacttactcagttccttcaccattgtcttctgaaaaattgtcttttatctgtgtttggtgngaaaccttaatctgtcagaatctcccagaaggtcattaccagttgccngggtgtttattcggcantctctaaggcancctttgnggaatcnaanggggaggaccccnannngcnattntgncctncntcaaaattaaggccctanntnccncctctanaatnattcaccangacgcaggcttnnattcaagttggaaggtcgggaagctntgtttaactaaaagctgcacnancagangnaattgnagaaataaanncancaanggggggtactatngcaatattaatnatgcnnagccngcaagaaggcagncnttcaacagggtgggagtgc

SEQ ID NO: 579023 - DNA, 1441 bp, Homo sapiens
  misc_feature (301)..(301): n is a, c, g, or t
gatagatttgagaccctggaacctgaagtatctcatgaagaaaccgagcatagttaccacgtggaagagacagattccagtgaaccagtagtagaagatgaaagattgcaccatgatacagatgatgtaacataccaagtctatgaggaacaagcagtatatgaacctctagaaaatgaagggatagaaatcacagaagtaactgctccccctgaggataatcctgtagaagattcacaggtaattgtagaagaagtaagcatttttcctgtggaagaacagcaggaagtaccaccagaancaaatagaaaaacagatgatccagaacaaaaagcaaatttgctgagcacatggaggtgtttgttagtaggtgaaaatcatgtcctgggtataacccagcttctccaggttagggtgagccgccgtctggatcagtggtggcgggccacacaccaggatgagcgtggacttcgctggaggaggaaggtgctccttgatcatgtcggcagtaacgaagcctgagctgtacttccagccaatgggaggcctgtccagggtgtaccacaggtcgaactggtctgggtgagtcctggcaatttcttcaagctcttttctgaccaagatatcctcctctgtctggttggcaaagatgagggacatcctggtcctgtcactggggtccttggtgatgtggcgaatgagctgcaacatgggtgtgatgcctgtgcccccagcaatcattcccaggtgatcggccagtgtttttttaggctcactcgtctggtctggtctgattccaagattccctggcccatggtaaaacaagcgtccccttggccctcgaaaaaagatggtctccccgattttcatgttctccaaatactgagtcatcttcccaccttcaggatattgggggtgtacatttttgaagtagatctttataattaggtccacaaagcctctgtcatcatcactggagacaggggtgtaagccctgaccaccaattcattatcgatttttgccaagagctggacatagttacctacaggaagccctaagacatggtccggcgaaggcagtccaaagcggaacctccgggtgttgtggctgattttctctttctcaatcaagggcagcgggtacttggcttcagggtcctgtaaggtgattggctctctcctcctggagttcatgctcttcaggaccaacacgagcacagtgaccccagtgacggtgatggtcaggagcagggacgggtccctacaaggccgccctgctcctctcccaactcaagcccgacagggaaagttgcctctcctcccgccgggtcactggagtctcagccttccggaatccgagccggcccgccccgctccccgcccttcgcggtcccgcccacgacctctccccacgcctcccgctccggcccccacctccgct

SEQ ID NO: 579024 - DNA, 855 bp, Homo sapiens
ggcaaggctgaggtcagtgaatatctcccgatccttgtggataatgtgacagatggaatgcagtgatgtcaagctctttgccctccgctcatctccagctgctcgccaatatcagaagagttgctcttgttcattggccaaatgcaccgtttattagcgaccgtagctgtttcgcgttcaactgtggacagagtaattctatggtcctacgcagtagaggcacagtttggcgctccaagagacagtaagcaggtacttcctcagtgatgcgagaaataacttatcttgccaaccacactctaaatggagaaatccttcgtaacatgcatagagtggtgctatagatgtaaagtcttgtagtcttgtctgcaaaggcgagatgatctagttgttatccttaatctttgatggacacactggacactggggatcgcaagctacatatggactatcacattatacgttccagcagtacacgaacttagtttctatctcccggttcatagacgtgtgatgtcgactatgagttaaccaccatagtaagtccggatacaggaagaagtatggagtgcactaagggaaagatcaagaagaagtgtccagacgattattcttacgaaggcatcagagtagacatggacactatcaccgggtccgagtacttattccaatgcggtgactggagaaagtgattcctgtaatggaagctgctttccatctatgaaatcacacaagtgttcctgaagaccactagatataggctgatacacgtactcaggtgactgatgagtattggctgacagcctgttccttgaaatggctttcttctcaatgccttccagactcaccccttga

SEQ ID NO: 579025 - DNA, 171 bp, Homo sapiens
cttcaggggacgcagcgctggaggtaggcactgggtatggatgttgaagagagaaacccaaagagttccttctctactggaagaagacaggaaactggaaggattttgtcaacggcttgaagttctttatgaataaagttctttcagctgtaatatcctctcgctatactg

SEQ ID NO: 579026 - DNA, 730 bp, Homo sapiens
  misc_feature (54)..(54): n is a, c, g, or t
gcagaagtccaggctaggagcctcagccggtgacgccaggaaacaggtctaggntaatagcaggtaatggtgacaagtccagtgtgcgtacgtgtcatgaagaatccatggttgatgacatcccagaagagaacactaagtctaagcttacatcttacccctgaattcccttcctctgaagcactcattaaggtgaataaacaatattccttaatacctatagaggtggaataccacccagaatcctctcatatacaaaagaaaaagaacaaatgggtgatagacacagaattgtctcattcaaaatctcaaagggtcgtcattgaaaacccttcggtgaaagactattttgtgagggccgttgggggttcgggaattttagttgcaaaaaacgagaggttgtgggttccaagggaaggcccctttattaaaacaaatttttatttggccagggctaattttaagaaacaatttttgttgtacccccctttttttgtgggatacaacgggtttcaaaaaaaacactcgttgggaatttataatttttcccgcctttccttattataaagggaacttacctggtgggcgggaacaacccataaggaagacattttcttccaacccaagggctcccgggttccaaggaggggaaatattttatataccccttttttggggataactttttcgcgcggataatctttaaaccactttatttgtataacttcct

SEQ ID NO: 579027 - DNA, 98 bp, Homo sapiens
gtatcggagatcggcacaacaggagacacaacagcccaggcgccctgctgcacaggctggggccctgagcaacacatgcagtggcttcctcctccccc

SEQ ID NO: 579028 - DNA, 1168 bp, Homo sapiens
tttttttttttttttgctttgtacttgagtttatttcacaaaaccacggagaaagatactgaaatggagctctttccagcctccaagcaaggaggccccagcagccagtctccagccccttgagccctttttgttaggcccacacccaaaagaggagaaccagtgtgtgcgcgaaggtacatggcaaggcacttttgaaaacatcccagtttaccgtggtgaaattgaacttactctgaaacagatgaaaagggacatgcaaatttgctgagcacatggaggtgtttgttagtaggtgaaaatcatgtcctgggtcctggcaatttcttcaagctcttttctgaccaagatatcctcctctgtctggttggcaaagatgagggacatcctggtcctgtcactggggtccttggtgatgtggcgaatgagctgcaacatgggtgtgatgcctgtgcccccagcaatcattcccaggtgatcggccagtgtttttttaggctcactcgtctggtctggtctgattccaagattccctggcccatggtaaaacaagcgtccccttggccctcgaaaaaagatggtctccccgattttcatgttctccaaatactgagtcatcttcccaccttcaggatattgggggtgtacatttttgaagtagatctttataattaggtccacaaagcctctgtcatcatcactggagacaggggtgtaagccctgaccaccaattcattatcgatttttgccaagagctggacatagttacctacaggaagccctaagacatggtccggcgaaggcagtccaaagcggaacctccgggtgttgtggctgattttctctttctcaatcaagggcagcgggtacttggcttcagggtcctgtaaggtgattggctctctcctcctggagttcatgctcttcaggaccaacacgagcacagtgaccccagtgacggtgatggtcaggagcagggacgggtccctacaaggccgccctgctcctctcccaactcaagcccgacagggaaagttgcctctcctcccgccgggtcactggagtctcagccttccggaatccgagccggcccgccccgctccccgcccttcgcggtcccgcccacgacctctccccacgcctcccgctccggcccccacctccgct

SEQ ID NO: 579029 - DNA, 953 bp, Homo sapiens
  misc_feature (55)..(55): n is a, c, g, or t
  misc_feature (69)..(69): n is a, c, g, or t
  misc_feature (72)..(72): n is a, c, g, or t
  misc_feature (193)..(193): n is a, c, g, or t
  misc_feature (197)..(197): n is a, c, g, or t
  misc_feature (239)..(239): n is a, c, g, or t
  misc_feature (253)..(253): n is a, c, g, or t
  misc_feature (278)..(278): n is a, c, g, or t
  misc_feature (290)..(290): n is a, c, g, or t
  misc_feature (346)..(346): n is a, c, g, or t
  misc_feature (363)..(363): n is a, c, g, or t
  misc_feature (378)..(378): n is a, c, g, or t
  misc_feature (389)..(389): n is a, c, g, or t
  misc_feature (419)..(419): n is a, c, g, or t
  misc_feature (425)..(425): n is a, c, g, or t
  misc_feature (497)..(497): n is a, c, g, or t
  misc_feature (682)..(682): n is a, c, g, or t
  misc_feature (691)..(691): n is a, c, g, or t
  misc_feature (709)..(709): n is a, c, g, or t
  misc_feature (719)..(719): n is a, c, g, or t
  misc_feature (756)..(756): n is a, c, g, or t
  misc_feature (762)..(762): n is a, c, g, or t
  misc_feature (796)..(796): n is a, c, g, or t
  misc_feature (813)..(813): n is a, c, g, or t
  misc_feature (855)..(855): n is a, c, g, or t
  misc_feature (858)..(858): n is a, c, g, or t
  misc_feature (870)..(870): n is a, c, g, or t
  misc_feature (874)..(874): n is a, c, g, or t
  misc_feature (882)..(882): n is a, c, g, or t
  misc_feature (911)..(911): n is a, c, g, or t
ttgttatctcctcccctttcttgattgctattccaaattcagggtggtaggtacnttctctctctctcnccncctgaccaccttctccctgttcagtgttttctcacaaagtaaattcaccttagatcttcccgatccttctggcagttaccaaggtagtttccaaactggcaggagataacatggtcatgantttncagctggtagttttcattaaactcaaaggcacagggaaactnttccattaattgcnagatacagtttaggaactgggtgangataggggacanttctttagagttcccatcgaggtggccacactttgggaaaacttgtggcccatggntatccattccttctctnttaagatcatgagtnctttgaatgtnctataaaatggatctaggaggatgctagcnacttancagatttgtgctgtgcggtcccatccatcagaacaatggacttagatactggccttttctaccttcactgcntttgttatgaaaattccagcttccataatagcttttatgtgttttaaccaccctgagctctccaggccgctaagaaattcactcattgttggagttttcaatttacaaacttccaagagtttctgcagattgctccgcattacatggatgttcttaatgcccatgattctgaagcgaatgttggnatagttgtnttcattttcatacccctncccagccgcncggttggccatggcatttaactttggtcttgtgtgtncaacanacataaactggctccctgggtttgtttggctaanggcctccaacaagagcncatcatctacacagcgagttttaaatccagaaagagggtggntanacggcaaaaggnagcnttgttctntttgtagaggtaggagagcccagggacangttctttacttctgaactttgaacttccaaccaccgttccca

SEQ ID NO: 579030 - DNA, 839 bp, Homo sapiens
  misc_feature (26)..(26): n is a, c, g, or t
  misc_feature (537)..(537): n is a, c, g, or t
  misc_feature (591)..(591): n is a, c, g, or t
  misc_feature (799)..(799): n is a, c, g, or t
aggggtaagaagataaaccctccaanaaaaacctttaacccgtggaaaaaccccctggagatatacacccgggggagccccctgttgttgtgttaaactttggggccacaaccggcaggggatgggtgttttccacagggaatattttgcctcctcacccaactttttggaggaaaaaaaaaattaacaaccttccctggtattggggacaaacatcctttggggcctgaaccaaagcagccccggggtttgttggtaccccttcagaagtggggcacaccctctttaagcacttccggggaaagtgttcaaccacccggccacatccgaagttgtcaaagaggtgtgacgcacccccctgtcctttcaagagaaaaaaaatgaaagagtggaactcccccccggcgggtaccgagggcatttggagtctttctccccatccccactgatcttttctgtggtttacaggcttaagacaaggacgccccgcggtgacgtgttgttcactttaccaatgtgtgaccgcggagtacagcnagtgccaccaccgtgtattctcctgagaatgaggagatatagaggggtactctntccacaactacccgcagagtctgtacgattttgtaataactcaggtgtacacaacgcgccatgagtgcccactatgttttgtagtaaacacaacgctcccctgagccgctgtagaaggtttgtgttagaaccaaaagaaatgccaacggcctcttcctagaacaaaaaaacagagtatcccaaagtataataaactacagaagaagcncataaaaatacaaaatagacgagaactagatcacacacaa

SEQ ID NO: 579031 - DNA, 1115 bp, Homo sapiens
ttagacacctgctctcgattgcccttaaaagcaggccatcccaaatcctttctccctcaatttctcacatttcccatctggagccagagccccaggcttaacccccacatctggtcctacaaaactaaaacaaaacaaagagacagagaccagtcctcaaagtgtcaaggttggtctgacccatggtgagtgaggcaatgaatgtcgtaccaatgggaggcctgtccagggtgtaccacaggtcgaactggtctgggtgagtcctggcaatttcttcaagctcttttctgaccaagatatcctcctctgtctggttggcaaagatgagggacatcctggtcctgtcactggggtccttggtgatgtggcgaatgagctgcaacatgggtgtgatgcctgtgcccccagcaatcattcccaggtgatcggccagtgtttttttaggctcactcgtctggtctggtctgattccaagattccctggcccatggtaaaacaagcgtccccttggccctcgaaaaaagatggtctccccgattttcatgttctccaaatactgagtcatcttcccaccttcaggatattgggggtgtacatttttgaagtagatctttataattaggtccacaaagcctctgtcatcatcactggagacaggggtgtaagccctgaccaccaattcattatcgatttttgccaagagctggacatagttacctacaggaagccctaagacatggtccggcgaaggcagtccaaagcggaacctccgggtgttgtggctgattttctctttctcaatcaagggcagcgggtacttggcttcagggtcctgtaaggtgattggctctctcctcctggagttcatgctcttcaggaccaacacgagcacagtgaccccagtgacggtgatggtcaggagcagggacgggtccctacaaggccgccctgctcctctcccaactcaagcccgacagggaaagttgcctctcctcccgccgggtcactggagtctcagccttccggaatccgagccggcccgccccgctccccgcccttcgcggtcccgcccacgacctctccccacgcctcccgctccggcccccacctccgct

SEQ ID NO: 579032 - DNA, 359 bp, Homo sapiens
ccatgtatcccatcatctcacagtcctcccttaacattcgggggttacaattcagcatgagatttgggtggggacatggtagccgaaaccatatcaccaaagctcatgtgacttttcagtattaagctgttacaatgaattgctcaatcttgcagaatatcctattttgtctttgcatctatgcagcctccgaaatactatgcactttatacagggcatgtctagaacaagcactccagtcttgtacctcggaatcctagccacaccagaggaatgtccttcaaaggttccacgttttgtcattgcatcgattaaaaaggtttctccgtatgctctggaggtactccccatgagtgtcc

SEQ ID NO: 579033 - DNA, 853 bp, Homo sapiens
  misc_feature (301)..(301): n is a, c, g, or t
gatagatttgagaccctggaacctgaagtatctcatgaagaaaccgagcatagttaccacgtggaagagacagattccagtgaaccagtagtagaagatgaaagattgcaccatgatacagatgatgtaacataccaagtctatgaggaacaagcagtatatgaacctctagaaaatgaagggatagaaatcacagaagtaactgctccccctgaggataatcctgtagaagattcacaggtaattgtagaagaagtaagcatttttcctgtggaagaacagcaggaagtaccaccagaancaaatagaaaaacagatgatccagaacaaaaagccaaaatgttacagaaagacgaacgcctaagacttttacacataacacttctgatcaagactattaacagctgaacttgatgctgcagaaaaactccgtaacacagggcgaacaaattgacggcaacgcagtgaactgcatctaaagaactagtacgcaaataccctcagagtccacgatgcaagatatgggaaggcgcaacctgctgagcgcatgactttgcgcctgacaacgcaggcagaacgtaatgaggtgctacgtggagccatcgagaactaacaagaggtggccatgcctaccttgatgtccctgcaagaactgcctgaagcctgagctttgacagcgtcgctcacgacagggcaaccaattatctaggtcataatgacgagggttcccctgacttacccctgacacgagattcaggttcaactaatttcccacatgactacgttcctttcacacaactgaacctttgggcgtggagcactaccatactatgcattaaggacgactacatga

SEQ ID NO: 579034 - DNA, 1098 bp, Homo sapiens
agactaaagccaattttccgtgcaagaaggctcaagaaccacacaagcaagcattgtgctaaggctggcaatgtgtttgcagcctcaactgcgagatccaagcaggatgctggcccattaagcagcatgcaagcaattttgcaacctgggcaggagcatcaagcaagcagaaagggccaagtgatccagttctacacactttgggatatttttcttcaattttcgaagagaacaatggtgaagccatagcacacagttacccgagggcacaaatacaatacagtgatattcttacccaaaaaaaacacccagaaaggaccacaataacaaccaacactgtgattggacggcacgcatattagtacacccctagaaagaaaagcttttttagcaaagccacaacctgtccgatatgggaaggcggaggacgaccaaaaacgagggtacaaactagcaaacagctgtctactaaccgcagatgatacacctcaatacagacacacccgcggggatcaaacaagcataacgtgcgaggaggagaacaaacgaaaagacatagaacaacacaccgcacggagggcgaaaacacagaaaacgaagtatcactgaaaaaaaacctaccccgaaagaaagaggccaaccaaagaggagaacacaaaacgggaggcgaaaacatacaaaaaccgagggcatctaccacacaccggagagcgacgacagggaaacacacaacaacgaccccccagaacgcgggaaacaaaaaacagaaaagaccaaccgcagcaccaacaacacaccaacacagcacaaaacagaagcaaaacagaaagaagcaacaacaagaaaaacagacaacaagagaaagggacaaaacggaacaaaaaaaaaaaccagaactagatggccgccagacgaacaacaagatacacaccacaacaacacaaaagcacagccaggagacaacaaaagagacgaaagcataaccagagtagagcactaatatgaaaacacaaaagccagaaagaaaagcacaaacaggtatagtaatcaacaacagcagaataatgaacaaacgagaatagacggagggacaaacag

SEQ ID NO: 579035 - DNA, 263 bp, Homo sapiens
gaatcaattcagtcatttttgccgcaccaacatggtttgactccccctgacttcttcatctgtcctgcctcctttcgttgctttcttgaggtctttttcttctcatacaggccatgttcttgcaagtctatgtttgggttcatttatctttgcataatccaggcaatcataaatcatgccaaagccagttgtctagcccaccaccaaaattagttctgaatccaaatacaaatatggcacatactgttggaaatggctgagga

SEQ ID NO: 579036 - DNA, 103 bp, Homo sapiens
tatggattgaattaataagtgttagtcatgatagcttgttcatgtgtgcgagatagtagtagtggttgtggtgctggagttaaatgttgagtagtaggaatgc

SEQ ID NO: 579037 - DNA, 410 bp, Homo sapiens
cggagagggtataaacgttgtctattatgtatcaactgaaaaattttattcaaaaaaaagtttttgaagactcatgtggctgcagatgttttcacattaggaataaagcttttacaggaccacctgtctccagctggctcccagggaccactgaaaacagctggctaccctcagaaagacaagatggtcttgttaataatttcaatggactctcgaagctcatcctccttggtcaccagcggaggcgcaaacctgataatgtcgccatgggttggcttggccagaagtccattatctcgaagtcgtagacacaccttccaagcatcccaatctttggtttctttaatgacaatagcgtttaataatcctcttcctcttacggcaggtacaacatcagaaggtagcttcat

SEQ ID NO: 579038 - DNA, 207 bp, Homo sapiens
aaaaaccccccccggggggggggcccccccccgcctttttttttcccggggggggggccccccccggcccttttttttttcccccggggggaaagggggtttttgttgggggattgggggcccggttttgggggggggggaaaaatttttttttttttcccccccgggcccccttttgctttttttttggggggggggggggtttca

SEQ ID NO: 579039 - DNA, 201 bp, Homo sapiens
gtcgactaccgccagaagctcacactgggtgtgagggggcctgaactcgcgctagggcaggtcatcgcacatatgctcagcgctataccgactggaggtaggctgagcctcacatgtcaacagggccacggaacgcaggaggcaagcgtgaaagctgcggcacaggatcagtggaagcttctggaccttgctcagagtcga

SEQ ID NO: 579040 - DNA, 203 bp, Homo sapiens
  misc_feature (40)..(40): n is a, c, g, or t
  misc_feature (159)..(159): n is a, c, g, or t
ccaaaagtagttgaacccacaaagttgggaaaaaaacagnggagaaaaagcagagcacctctcctcctcaaaaggattgcagttcctcaccagcaatggaacaaagttggacagagaatgactttgacgagttgagagaagaaggcttcaggcgatcanactacgagctacaggaggaaattcaaaccaaaggcaaagaagtt

SEQ ID NO: 579041 - DNA, 283 bp, Homo sapiens
tagtccctttgaaatcatatatggccaaacttctgtcttggggtctccacccttaccagactctgagccactcagatattacctcccctgcttaatccagacatggactcccattcgcgaagcagcaaataaggccgtgcctcgccctggtaacaccttattgtcctgtgaacgtaacggccgtacaggacacagaccgcgtttccagcacaaatccaacatgtaagcatcatggctacaagggaacatgagcctcaagtgcccagaggcctcaaagggccca

SEQ ID NO: 579042 - DNA, 369 bp, Homo sapiens
ctcgttgtatgtgggcgttgggtctgggaagcataggcatcagaggaaagcaagagcagtggatctgagaggagaggagttctgaggggccgtgagcctgagaggggctgagatgtgtgtctgagaatagatgacatggagaggatggtctgagcgggcacgggaggagatacggatgctggtacgatgcgggcctgagagtcagaatccagaaacaggaatgagactgcgcggtgtggtggcgcaggttacattccctgccccatagggttgatgggatatctgttattctgtgagagacagcttcgacttgagtatatgagagtgtagggggagtcagatctacgcacagagagcgggtcgggatac

SEQ ID NO: 579043 - DNA, 443 bp, Homo sapiens
gttacaattatcgacaacatcaggtgccccagaactgggcccaaaacacgtgccataattaccggcggcccctctccacggaatccacactacaaccaaacggtaacactcgacactccctccacacaacccactattacatactttcctacctccactccttggccgggcaggtccaaccgttcagcccttcggtgccggcctgaatgcatacctttccttcaaatccccattgggctgtggttgcctctatgaagtcttcccctaatttcctacaaatctctcccctccggtactgacactgcagctattagtccttaatctttatttctggtctctttcttcttttttttctgggatggagtttggctctcaaaggctgagtgcagtggcacgcatctggctcactgcaatctccgcctcccaggtttaagcgattctcc

SEQ ID NO: 579044 - DNA, 150 bp, Homo sapiens
caccgcggctccttaacccgaagtgcagtcgacgatctaatttcattacaaatagactttgctatttctattccgtgagatcagtctaaaagcatgagctcaggttaactgggcattttgtagggcgggttaaattctggaggcggtaac

SEQ ID NO: 579045 - DNA, 146 bp, Homo sapiens
ggccgtaagctctcactgctcgcctcacgggcggctccacttgcgctggtgatctgagccgcggtgtccgccgcggtcatgagctcaggtccgtcgctcaggcgatgtaatccttgccgtctaggctaactggttatacccgcgga

SEQ ID NO: 579046 - DNA, 160 bp, Homo sapiens
aactggggaagaacccagacgttgaccacaagcttcttgcctgatcgagaccgtgaggaggccgcagaatccggcttcgggaagcagctgccgcaccggagtgcggcaagccacagccaggagcccgcatcacgactgacgacgatcgagatcagccttc

SEQ ID NO: 579047 - DNA, 594 bp, Homo sapiens
ggggtagactctaagccatcactagttaccattgagaaagattttctggtttcttttctccaatcaaaataagatcataggattgatttattctttttcttaattgcataatcttactgaagcatgtcatattatttaaaatctcagaattagagttttattcctcagtataatagtaatattttactagaattagaatttaattttgggaatttgatcattcccaaaatattttcatgtgcattattttatttccaatgttagctttatgaggaaaatagattgtattctcttattttgtgtaatgctttcaggatatatattaatttattaatccacacaactgtttgagaagtctaacttacagatgagaaggaagcaaaaatagaaacgatgtaaagtagattaagttttaaaagggtgtgagtattgtgatgatatagcaggcaatgtcatggtacatccatttcaagaaagtacagctgaactttactcaggctgggaattgggaactagaaagttaggaactcaagtcacatattccctttaaaccctctccagaatctcctttttttgacgggttatctgcaactc

SEQ ID NO: 579048 - DNA, 138 bp, Homo sapiens
tggagtagtcatgcgtgcctcggtactgcatctcgctctggttagtgattcctgctcagctcagagagctggactacaggtatgtgccaacacacctggtaatggtcttatttttaagaagaaacgggaattccgcca

SEQ ID NO: 579049 - DNA, 376 bp, Homo sapiens
  misc_feature (279)..(279): n is a, c, g, or t
  misc_feature (323)..(323): n is a, c, g, or t
  misc_feature (342)..(342): n is a, c, g, or t
  misc_feature (371)..(371): n is a, c, g, or t
ttttgagacggattagcgtctgtcgcccaggctggagtgcagtggcgggatctcggctcactgcaagctccgcctcccgggctcacgccattctcctgcctcagcctcccaagtagctgggactacaggcgcccgcactacgcccggctaattttttgtatttttagtagagacggggtttcaccgttttagccgggatggtctcgatctcctgaccttaagttatccgcctgcctcggcctcccaaagtgctgggattacaggtctgagccacaccgngtcccatctgggaatttagatccaagcccagggagccagtgctncagcccacactgggctggngttgcgtgaaatgagtgaatggccagggncaggg

SEQ ID NO: 579050 - DNA, 265 bp, Homo sapiens
tcctgaagaatgggctgcccttacatattaattatatacttattcatgacagcacgcaacaattaaccatcaattaggcatatcatagtttacagtcgctacaaaaatcttataaataatcacaaagccattatccagatgttgccatagaaacagagactgtaaattctaggtagctgagatcctttctgaaacccatgttaagtcaatagaaatataatgcagggcattacactaagtttctggatctagtacactaaaaaga

SEQ ID NO: 579051 - DNA, 868 bp, Homo sapiens
  misc_feature (5)..(5): n is a, c, g, or t
  misc_feature (11)..(11): n is a, c, g, or t
  misc_feature (121)..(121): n is a, c, g, or t
  misc_feature (205)..(205): n is a, c, g, or t
  misc_feature (222)..(222): n is a, c, g, or t
  misc_feature (240)..(240): n is a, c, g, or t
  misc_feature (242)..(242): n is a, c, g, or t
  misc_feature (247)..(247): n is a, c, g, or t
  misc_feature (259)..(259): n is a, c, g, or t
  misc_feature (275)..(275): n is a, c, g, or t
  misc_feature (303)..(303): n is a, c, g, or t
  misc_feature (327)..(327): n is a, c, g, or t
  misc_feature (331)..(331): n is a, c, g, or t
  misc_feature (333)..(334): n is a, c, g, or t
  misc_feature (339)..(339): n is a, c, g, or t
  misc_feature (350)..(351): n is a, c, g, or t
  misc_feature (357)..(357): n is a, c, g, or t
  misc_feature (361)..(361): n is a, c, g, or t
  misc_feature (366)..(366): n is a, c, g, or t
  misc_feature (382)..(382): n is a, c, g, or t
  misc_feature (397)..(397): n is a, c, g, or t
  misc_feature (402)..(402): n is a, c, g, or t
  misc_feature (411)..(411): n is a, c, g, or t
  misc_feature (415)..(415): n is a, c, g, or t
  misc_feature (423)..(423): n is a, c, g, or t
  misc_feature (425)..(425): n is a, c, g, or t
  misc_feature (435)..(435): n is a, c, g, or t
  misc_feature (445)..(445): n is a, c, g, or t
  misc_feature (462)..(462): n is a, c, g, or t
  misc_feature (518)..(519): n is a, c, g, or t
  misc_feature (537)..(537): n is a, c, g, or t
  misc_feature (545)..(545): n is a, c, g, or t
  misc_feature (865)..(865): n is a, c, g, or t
gagtntcaggnatatggaccaaagccatgtaagtgtcaacaacctaaaaaagccttcagataccgcccctcctttagaacacaagaaagggatcacactggagagaaacccaatgcttgtnaagtatgtggaaaaacctttatttcccattcaagtgttcgaagacacatggtaatgcacagtggggatggaccttataaatgtnagttttgtgggaaagcnttccattgtctcagattntntcttntccatgataganttcacactggagaganaccatgtgaatgttaacagtgtggtaanattttctgctacccatcgaatacntaananntctcncactggagatnngccttntgantatcnggtgtgtgggatagcntttcatagtcccagntcctntcgtagacntganaggtttcncntgggagattnggcttttcantgttaggtatgtggaanagcattcacgtgtccccgttatgttcgtttacttgttagggcccactctaggaaanntctctatgattgttagcngtgtgggntagcattttcctctcttacaagttttcatacacacgttagattgctctctggagaaagaccttatgaatgtaagatatgtggaaaagacttttgttctgtgaattcatttcaaagacatgaaaaaattcacagtggagagaaaccctataaatgtaagcagtgtggtaaagccttccctcattccagttcccttcgatatcatgaaaggactcacactggagagaaaccctatgagtgtaagcaatgtgggaaagccttcagatctgcctcacaccttcgagtgcatggtaggactcacactggagagaaaccgtatgantgt

SEQ ID NO: 579052 - DNA, 914 bp, Homo sapiens
tcacagacgtgtggggcggcgggtgcgggaggcgttgctgcagtgcgtcgtgaccagcacgcgtctgcgatggtctcctgccgccgtcttgtgccccttctgcgactatattgatgtcggccacaagcggatcccctctcgtggtgcccatcggccagtggtccaaggcttcttccgcctttcgatgtctcgcgtctttgtcgcccttgcaggttcctgttgttgctccactagccctcaggcccctgtctgtccgactctcccgcgccccgttcctgttgaatcccgtttcgcagtcgtctggcggtatagccgcttggtggttaatccctgcccccccgtttctcgtgttgtgttgtgcgcggcctccctagtggtgtcgctccttttcaaatccgagcgggggcttcgggagccccccctgcctctccgaaactcaaggcgccccccgagggcctggaccctatggatcatcccggttctcgcggcggaattttttcgaatccgcccaacaagttgcctcccccgtacttctcttaggtccccccgtggcgccacttggtggacccccttgcagggtgcaccgcacccggggtgtacctccccgtcctcgcccccccactttaaaatactaccgccccgaaactcttgcaccactaggacgttccccacccatgtagccttcaacacagaatctcatttcccgagctgtctacaacaggacaccattacccccctaacacccaccccggggttaaaaacccgcccaactactttcgctattctctgcggagccaaaccaccaccgtttcactgacccccctcgctccatgaaatgattcccccctacaaaatttttaaaaggggcccctttttccccttacccccccctcaccccccttggggaaaaaaac

SEQ ID NO: 579053 - DNA, 238 bp, Homo sapiens
  misc_feature (12)..(12): n is a, c, g, or t
  misc_feature (202)..(202): n is a, c, g, or t
ctcccccacggnatctgacgaccggggtggggacggggacggacgacgactgacgtggctctactgctacctcttacgcggttcctttctctgccctttggggtaccccgacgacccgacccctacggacacggacacttctgcacgaccacgtcttgtgacacgcacccttttcacacggaccaccttgggtacccgacgnctcgacacttcgtacactccttgggtcctacgcgtg

SEQ ID NO: 579054 - DNA, 121 bp, Homo sapiens
caaaaagacccccaaaaaaaaaaaaccccccccaaaagagaaaaaaaagggaaggcccccccggggggggggccccttaaaaaaaagggaacccccggggggggggaaagggggcggggga

SEQ ID NO: 579055 - DNA, 121 bp, Homo sapiens
ctgcccacctgcatggcaagcattctgatggcacatggcccatgcagcccccatgcagtgcccccagcacactcatcttcttctggtctgttgcaactcaacaggcctgcacccacagcat

SEQ ID NO: 579056 - DNA, 134 bp, Homo sapiens
ccccattgctctaacaacctcttaattatttacagactcagaagatgctttttcaaagttgcattttctctgaagccacatgcattctttgcacaggcctcagaagtcttctaatgagactgcttctttttgtg

SEQ ID NO: 579057 - DNA, 553 bp, Homo sapiens
  misc_feature (81)..(81): n is a, c, g, or t
  misc_feature (100)..(100): n is a, c, g, or t
  misc_feature (114)..(114): n is a, c, g, or t
  misc_feature (388)..(388): n is a, c, g, or t
actctagagatccccaaagctctacttatgtgtaccagatggtctgtgctgtgaacacgggggatgagatgggcatgcttncatacaaatgtcaggtggncagtagagctctgnaaatcccagctcttaagattatatcagcgagacaagcactacactgtgccaaacactcttccaggcttgctctgtcggcgctgacctcaatggacaggccgtctatgcggcttgtcagaccatcttgaaaaggctggaaccctacaagaagaagaaatccagtggctcctgggaagactgggtcacagccgcctacatggacacagtgagcttgtctgccactgggttttatagaacacccaatctgggctacagctttgagactaactcaggnaacccccttcactacttcagctatggggtggcttgctctgaagtagaaatcgactggctaacaggagatcaaaagaacctccgcacagatattgtcatggatgttggctccagtctaaaccctgccattgatattggacaggtggaaggcgcatttgtccaggcc

SEQ ID NO: 579058 - DNA, 203 bp, Homo sapiens
agaaaagacatatagtatttacttcaagagtctaagagtggcagtgaggggatagcaccaggagatatcagctgtgagggctggagaaacagtgtaaaccggggagtgtaaacaagagcagggcatgtagttcagaatggtgaataggagtatgactagacaaaagatagtagggatgacaagtttttttggggcacagtcta

SEQ ID NO: 579059 - DNA, 297 bp, Homo sapiens
gagacaaggtttcactcccattgcccaggctgaagtgcaatgtgctatctcagctcactgcaacctccgcctctttgctcaagcgatctcctgcctgggaatacaagcatacgccaccacattcagccaattttcataaagacggggttttgccatgttgcccagactagtcttgaactcctgagctcaagtgatctgcccgcctcagtctcccaaagtgctgggattacaagggtgagccaccgcgcctggcctaaaagctgcattttctttctttctggtttttgagacagagtc

SEQ ID NO: 579060 - DNA, 157 bp, Homo sapiens
tccgcaccgtaagttctgtgtgtgggacctgcagaccagaagcactgtgactaggctatgtccgcagtatcccccacatgcacatcgaggggctgaaaaatctaacaagaataaaaacttgtcaagaagctggccaagaagtatgatgcgtttttgc

SEQ ID NO: 579061 - DNA, 262 bp, Homo sapiens
aggtgaaaggatctcgcttggctgggagggtaggctgcagtgacccgtgatggcaccactgcgctccagcctggcgaaagagcgagactctgtctcaaaaaaaaaaaaaaatttgagagacgcaaattatttgctggaagagggaaagggaactggttaggggagaatggattctaaattcttgaaggccaaacagatcgagaaagaaagagacagagaaaaaaattgaggttgagggtaggcaggaggacaaacaaaatgg

SEQ ID NO: 579062 - DNA, 285 bp, Homo sapiens
cgtgcttgaagaatactccaacacccgggaaagggaaaagcacaactacaatcgggctagtgcaagcgcttggtggcccatctctaccagaatgtctgtgcgtgtgtgcgacagccttctcagggccccacctgtggaataaaaggtactagtgagactggaccatgggtggtgacaggggacctgcttctccttcagtcctcccaggcccacgcaacctatgatacttatggggtcttcaactcatttcaacaccaggaatgtcattctcacaaacctctgtag

SEQ ID NO: 579063 - DNA, 468 bp, Homo sapiens
attatttacattcatcccacgtgcagaatacactcaccccctcctattattctgcagaattctcatttatagcatcagcttacagtccaggatattgtcatctaaattaggtccagttttggatgaggctcctcagatgtatgtagtttcttcagctccttgagtacattacttctctatgtgaagacctgtgaaactaaagaggcaaattgtttgccccacacataaccaagatgcaatgattggtcaggtgtatgataactagtgtagacattcttgttcaaacagagggaaaatgttggtacaaaggtgtcgttacgtcacaccatttttgaaattcagctgggcacaggttggtaattccttgattaaaatacaggtctggaaataattcattatggctcttagctcgtccttctgggcttttgtttccacaacaagaacaaaactccatctcaaaaaaaaaaa

SEQ ID NO: 579064 - DNA, 176 bp, Homo sapiens
tggggcgagtgttgggggtaaaagcccccccccccaaaaagtggaacagcccggagccttatgtgaaaggaccccgggtgttgtaaactgggacccggaagccaaactggaatcaaacgccgcctgtaaattgtatcttataacttattaaataaaacctttgccccgtaaaaaaa

SEQ ID NO: 579065 - DNA, 181 bp, Homo sapiens
agctgcagttgtctgtgagcctgagatctgcgccattgcactccaacttgttgcaacaagagcaaaactctgtctccaaaaacaaatggaccatgtgatcctctctccctttatggagccaaaattcaaccgatttcatttccctaaatctattcgacacttaaagcgggtgattagcatc

SEQ ID NO: 579066 - DNA, 993 bp, Homo sapiens
gattaactgggcatcatggtgggcaccgtgggatctcagctacttgggaggctgaggcgggagaatcgcttgagcacaggaggcggaagttgcagtgagcagggatcatgccattgcactccagcctggagaggagcgaaactctgtctcagaaagtatgaatattatatacagaataaaagaaaattacaagcaagagaagtacacacaaaacaaaccaaaaaacacgtaagaagccacatcataaccaaatgcctcaaaagcagtgacaagtataaaatgccaaaagcagccaatgaatcaaggcacattactttcggaaaaacagatatgaaaattactgcgtacttctaactaatcaaaaaattttcaagccaaatgcagtggaatgacatgtttgaagtgctaaatgaaaacaacaaattttgtttgcgtgttagcttttgagacgggatcttgctctatagcccaggctggagtgcagtggtgcaaccatagctcactgcagcttcatagtctcagcctcaggtgatcctcccgaattaccctcccaggtagatggaactctgcaggtgtgcaccatcatgacctggataattgaaagtagttaaggaagacaggagtctcgctattattgacagggcttatttagaactcctgggcatcatgtactctgtccatctcggctcccaaagtgcttgtataacaggcatgaaacagcataaccaagcaataagaagtactacatataggaagaaacagagagtgataaaaaaaaaataagacacagggtagataagaatcgtgaaccacaaagaggggaaaggaagcggggagcaacaagtgggatgcaaggaaacatgaggacgcgaaggagaacaaagagatacacccgaaagtaagagacacggggaaaagagaaaacaagggaatcgcaacaggcacaaacagataggaagaagggaaaaaaggaatacggaagaggcaaagaaa

SEQ ID NO: 579067 - DNA, 209 bp, Homo sapiens
gtggaaggtggaaggaagatggaaggcggaatgcggaaggcggaaggtggaaggtggaaggtcaaaggtggaagaaggtggaaggtggaaggtggaagaaggtcgaaggcggaaggtggaaggtggaaggaaagtggaaggtggaaggtggaagattggaaggaaggaaggaagattggaaggaaggaaggaaggaggaaggaaggaag

SEQ ID NO: 579068 - DNA, 416 bp, Homo sapiens
gcttctgcgggtcgcgtgtcggtgaccagcctgatcccactgatcatatgatctaactgctgacaactctgtcgaactgccatcaagacctgattgtgctacagcatgagtatgcagatgtgtgcataacgctcattgtgcaatctatcacgcgggctgagcagcatgatcctcagtgtccagcaatatggctcacacctagtggcagactctagcctggacaaggagcattataacgatgcacaacacctgcgtgactggtacaggacctacgcgaacagtatcgagcttgggtctcttgtcgcgtctggcatcattacacctatccatgaacatggtgaagaggctaatgtatgcagtcgctaccgcgagtcgctctgctaccaccatagaggtggactcactccagatgactc

SEQ ID NO: 579069 - DNA, 317 bp, Homo sapiens
  misc_feature (15)..(15): n is a, c, g, or t
  misc_feature (28)..(28): n is a, c, g, or t
  misc_feature (47)..(47): n is a, c, g, or t
  misc_feature (212)..(212): n is a, c, g, or t
  misc_feature (217)..(217): n is a, c, g, or t
  misc_feature (270)..(270): n is a, c, g, or t
aggtgagcacgattngtgaccccagggnccacgcggaaaacacccgntcagcctgaggactttcatgaacaagtcggaccagtcctacaccgtgacacccgataccgccgccaccttacgagtggacctcactgacgcagctgcagcgcgtggagatgtcgcgtgtgcgtcgcatattgggctgcgtcacgagaccaatcaggatgccgcancgctnggtatcgacgggtcaggacatcacgttgtccttgtcgtcgctgatggcgtgtnctcgactgagggagccgaggaatgcgccagggtcgcctcccacactg

SEQ ID NO: 579070 - DNA, 306 bp, Homo sapiens
cgcgatcgggttttttattattattattttgtcaatctctttggcttcagctggatggggggggcttggatcactgcaacctccgctctgggttcaagcgtcatgcctacctcaacactgggattacaggctccaccacacccactaattttttgtaaaagggtttgctgtgccaactggggggaactctgattaatgatccaccgctggctcaagtgctggaacaggtgtgagccacggcctggcaatatttaaatatctgtttgaattggataattcgaaacacaggagacgggcacccagtgc

SEQ ID NO: 579071 - DNA, 433 bp, Homo sapiens
  misc_feature (56)..(56): n is a, c, g, or t
  misc_feature (136)..(136): n is a, c, g, or t
  misc_feature (162)..(162): n is a, c, g, or t
  misc_feature (226)..(226): n is a, c, g, or t
  misc_feature (254)..(254): n is a, c, g, or t
  misc_feature (258)..(258): n is a, c, g, or t
  misc_feature (268)..(268): n is a, c, g, or t
  misc_feature (280)..(280): n is a, c, g, or t
  misc_feature (285)..(285): n is a, c, g, or t
  misc_feature (291)..(291): n is a, c, g, or t
gcgcgcgcggtgacgtgtataatggtaaccaggagattaagaaggaaaggtagggnaagggtgccgtgaaaggttctccctgagacccccaggagaggtgggggccggcttgcctgttaatttaatattaaattgnggatgggaatcgagaggaaaaagttnttcaggggatgatttctcagcctctcagcctgtacaagagaggctgagggcccggggccctcancagtcatagcggcgggactgtcgggaangggnagtcctcagntccctggatggncaggnggggangcccctccgccgcttcgtcccccacgcccctgagcgactcaaagccgccgacaactccaggggcacgctgctgccggacatcgggaggtctccacgacgacaatcgtcatcaaacgctgcggactcactctcatcacaggta

SEQ ID NO: 579072 - DNA, 715 bp, Homo sapiens
cggtggcggcgcatagctactgtataacatactattatacgaatctgatagatccaggcacagaatcgagtcgagacgccgcaagtccgtctgaggagctggctctagtagaatcgggatagctgtatttctttcactaggcattttacgtgacagcacggcaaaggggaacgagcccccttatataccagtcgatatctcgtgagaactgtgccgctctctattaacagtggactgtctcctgtccatctccttccccagtccctccctcacgtggatatgattacaatttgaaatgagatttgggtggggaacagagccaacatcatatcattcgcacccgtgggcccctcccaatatcacatgtcctttttacatttcaaaaccaaatcatgccttcgacaacagtccctccagagtcgttaactcattccagcattaacccaaaagtccaaagttcaaaagtctcatccaagacaaggccaagtcccttctgcctgtgagcctgtaacattaaaagcaagttagtgacttccaagatacaatgggagtacagacattggtaaatgttcccattccaacatgggagaaattggcaaaacacaggggctacaggccccatgcaccactgcactccactgtgcaagtctgaaacccggcagggcactccttaaatatcgtttcttacgtcggaaatggagtctcgtctgttgcc

SEQ ID NO: 579073 - DNA, 152 bp, Homo sapiens
cttagaggatcccagcggctgcctttttttggctacgtctggatgccttggcttcacacaatgaaccacctctcccgcagttcccaatggacttgtcatttcatgttcttattttatgacctgttttgtaaataaatgctgtttcccaatgg

SEQ ID NO: 579074 - DNA, 912 bp, Homo sapiens
gggcccgccttgggggccggtctacgtccctgttctcgctgagtccgcaatggtcctaaaggcagctccaaacagcagtctgaggaggacctgctcctgagaattcagccgaaattctctcggccagtgtcctcgggggctcttcttgccgaaaggcgtcaatggtgtcttgccatcccaattgtgttatacgtgggaatatgggcatattggatcttatacagtcgtggctgttttgtataggtgtgatggacccctagttaaggcaacatatttggggtaggcctttgaataacaagatttgtgaaaattgggttctcaagcacaaaacagaagagggagggatgtgtttccaaaagaaggtgattcgaaaaaatttctgaagactgataatagaaaagattgtctcgagaggggggacagggatgaaagatctttgtggaaaagaagaatgaggtgggttgattatagaagctaacgaacatttcccattctttttataacaaaactttctgttacccggtcgtggtcatgtgtggtcccttcttccatatggaagaatttcaagcccaagagtgtattccttaacgcgggtgactcatcttttgagaagtcaagaaacgcgtcgtccatttgtggttgtgactggtcggatatttagggaaggaaaaactggtcgtggagttcgctcaataagtagtgtgatttagatactttgctgggctttaaatacagtatggtaagatcttaagttagaagtagtcgtgactaggttcaaagtgtcttttaaaaagaaaaaaaatgttgggcggccgccgaagttataacttggggggcggcaattataagggtgcgtttcagacgcgcgtggggtccaaagcggcgggtaaattgggcggttaaacacaccgg

SEQ ID NO: 579075 - DNA, 1078 bp, Homo sapiens
gggacgccgtcgaagaagcatcgttaaaggtctctcttcaccctgccgtcatgtctaatgtcagagtctcctaagagagcccgaacagcgtgaggaagctcttcattgtgcagggttgagctgttgaaacaactgatgagagcctgaggagccatctcttgagcaatggggaacgctcacggactgtgtggtactgagagatccaaacaccaatgcgctccaggggctttgggttggtcacatatgccacttgtggaggaggtggatgcagctatgaattgcaatggtcatcacaaggctggatggaagagttgctggaaccgaatagacgctgtctccagagaagatttctcagaagaccaggtgcccagcttaactgtgatacatcacgatatttgtctggtggcattgatagacgaaaggacgacgtgtacatgatacatcgagactatagaggattgatttttgtagacagttatggtagagagagaattgaagtgaattgagaatctagtgactgtagccgatggcacgcttggcagagaaaaggtggcttctgggcttcttgttaagcttttgtaccagagcccactggacgttcccgtgggcactgaagagtttgtcccacttacacgacatagtagcccattacccttgttgaaaatgtgccccatcacactggtgtaaagttaaggaagaaaggcccctgttcaaaaagcgaagaagggattgggctagttgctttcaatcctagcccaaggggcaggtctgaacgtcggttcctgtaggacctttgtggtaggttgtgcccgtgggcagggtgggttcccgtggctgggaattgagcaattttcagggtctgtcgtgaggaacaacttccacgttgggtcgcggtgggtgcggcttttggggatgggcatagcccaggtggttgggtggtgtgattatttgttggcatgctagggcagttaggtacttacttggcatttagggtaatccgatataggaaaggcatgtgatcgcaaaggtggagataaacgtaataattggattgtggggaaattacacacaaaatcag

SEQ ID NO: 579076 - DNA, 790 bp, Homo sapiens
  misc_feature (56)..(56): n is a, c, g, or t
  misc_feature (114)..(114): n is a, c, g, or t
  misc_feature (116)..(116): n is a, c, g, or t
  misc_feature (133)..(133): n is a, c, g, or t
  misc_feature (144)..(144): n is a, c, g, or t
  misc_feature (171)..(171): n is a, c, g, or t
  misc_feature (186)..(186): n is a, c, g, or t
  misc_feature (188)..(188): n is a, c, g, or t
  misc_feature (212)..(212): n is a, c, g, or t
  misc_feature (223)..(223): n is a, c, g, or t
  misc_feature (233)..(233): n is a, c, g, or t
  misc_feature (235)..(235): n is a, c, g, or t
  misc_feature (238)..(238): n is a, c, g, or t
  misc_feature (245)..(245): n is a, c, g, or t
  misc_feature (251)..(251): n is a, c, g, or t
  misc_feature (253)..(253): n is a, c, g, or t
  misc_feature (258)..(258): n is a, c, g, or t
  misc_feature (263)..(263): n is a, c, g, or t
  misc_feature (268)..(268): n is a, c, g, or t
  misc_feature (272)..(272): n is a, c, g, or t
  misc_feature (274)..(275): n is a, c, g, or t
  misc_feature (277)..(277): n is a, c, g, or t
  misc_feature (280)..(280): n is a, c, g, or t
  misc_feature (283)..(283): n is a, c, g, or t
  misc_feature (291)..(291): n is a, c, g, or t
  misc_feature (298)..(298): n is a, c, g, or t
  misc_feature (309)..(309): n is a, c, g, or t
  misc_feature (313)..(314): n is a, c, g, or t
  misc_feature (316)..(316): n is a, c, g, or t
  misc_feature (323)..(323): n is a, c, g, or t
  misc_feature (333)..(333): n is a, c, g, or t
  misc_feature (342)..(342): n is a, c, g, or t
  misc_feature (355)..(355): n is a, c, g, or t
  misc_feature (360)..(362): n is a, c, g, or t
  misc_feature (368)..(368): n is a, c, g, or t
  misc_feature (371)..(372): n is a, c, g, or t
  misc_feature (385)..(385): n is a, c, g, or t
  misc_feature (389)..(389): n is a, c, g, or t
  misc_feature (393)..(393): n is a, c, g, or t
  misc_feature (437)..(437): n is a, c, g, or t
  misc_feature (466)..(466): n is a, c, g, or t
  misc_feature (470)..(470): n is a, c, g, or t
  misc_feature (485)..(485): n is a, c, g, or t
  misc_feature (494)..(494): n is a, c, g, or t
  misc_feature (497)..(497): n is a, c, g, or t
  misc_feature (500)..(500): n is a, c, g, or t
  misc_feature (507)..(507): n is a, c, g, or t
  misc_feature (525)..(525): n is a, c, g, or t
  misc_feature (563)..(563): n is a, c, g, or t
  misc_feature (567)..(567): n is a, c, g, or t
  misc_feature (771)..(771): n is a, c, g, or t
tcagagaaagaaaaaagaaactttccatcatactagaagaaacttggccgtaaggnttgggatctgtgctcaaactacacatgcaatgaggacaatattctgctaatacaattnanttgctgctgcatttgtntactgtttgtntaatattaacaattataaacagagcantgcaactagtatttngnacaatccttacagtgttattagtntcaggtacaanattttatttntnttnacaccantggttntntttgngtacntgggntttntnntnttnatnttaagttnttttttntatttaaggtnttgnnanttttctnaggagttttncccttgatnatattggcaatanttttnnntgttanatnnagcaaacctttgntgtntaantagtttgcagccagaatgagttcaaaaagtgttccttggtcaantttcaggaattcttggtcccaaacagggntatnatctgttcgcttttntttgttctnatnatnttcaggnggaggagggttatccttntggtgggtgcaccactgaatgaccttttttaatattgntgtnttcacatttggtagaggaattgggtcatcatctccttcatcatccattcccaaatcttccaacatggtcttaatagtcacagattgtttggcaatttccacatcaacttcaaatatctctccatcagaactctgcaacttaattgaaggcatggtgttcggtgttaaggagacggccggcgggaggctgacgagagccgggagngttacgaaggaagagaaaa

SEQ ID NO: 579077 - DNA, 958 bp, Homo sapiens
gggaggcggcgcggaggccgcggctggggttgagcctgccgtgaggccgcccccgtgcgggctgggccttctggcgtgcgcccctggtttctcctggggggtgatgagctgggagcgtgtctgggccgagctactgcgcacggtgagcccggagctgatcctggatcacgaggtggcttcactgccctgcttcccaggacaggagcccaggtgcaggccggagcccactgaagtcttcactgtcggacccaagaccttttcctggacaccctttcctgcggacctgtggggcccgggccgttcctaccggctgcttcacggggcaggagggcacctggaatcccccagacaggtcccttgcccagccgccccggcacctgatccctgcagtggcacccaagggtggaagcagcagccagtctgtggagggtgacggggccctgagcaagctgacccatgtgccagaaggagttcgaccccagtctttcaatgggatgtgccacgactttgaatgaccctggcacgtcacagggtgagctgtcatccacaggagagccggccacgcaagggatccaatgggcagattgacccatacacgtgcccaacgcaaagccaactgtgcagacccccaagtcaccagaagattcgagaacccagttcccaagcgcacaccgtcgagaaccggagcaattagcacaaaatccgggcattttcaaagccacacttgcatacttccttcagtttgcatgtatacacagcaagttacctgcagtagtaacagacttccccctcgtgatggagccccgcattaactcaccattttgaggtcaagaaagggcacacgtgtaaccggggccgctaggggaaacaggaagaatatcgggacatcaacatcggacacaactaggtccgtgccgagcggtatgcatatgggggtaaggaacagacacgggtcaca

SEQ ID NO: 579078 - DNA, 811 bp, Homo sapiens
  misc_feature (656)..(656): n is a, c, g, or t
  misc_feature (746)..(746): n is a, c, g, or t
  misc_feature (794)..(794): n is a, c, g, or t
  misc_feature (801)..(801): n is a, c, g, or t
gtgcaatgagatctaaatagaaacagcaaaaagtttaaaagcaggggcatgatattaaggcatagagtttttcttagttttctttttccttgtttgttggtttatgtagagttaagttgttatcaggttaaaataatgggttataagatagtattcgcaagcctcatggtaacctcaagccaaaaacaaacaaacaaacaacaacaaaaaaacacatagtggatacacaaaaaataaaaagcaagaaactaaatcatatccccagagaaaatcaccttcactagtggaggataggaaagaaagaaggaagagaagatcacaaaacaaccagaaaacaaataacaaaatggcaggagtaagtccttacttatcaataataacattgaatgtaaatggactaaactctcccgtcaaaagacagagactggctggatgaaaaaacaagacccattgattgttgcctacaagaaacacacttcacctatatagacacacacaggctgaaaataaagggatggaaaaaaatattccatgccagtggaaaccaaaaaagagcgggagtagttatatttacattacatacaatagatttcaagacaaaatctgtaagaggagccaaagaaggtcactacataatgataaaggagtcagttcancaaggtgatgtaacaatgtaaaatatatatgtacccaacactggagcacctagatatataaagggaatattattagacctaaagagagangccttgatacaataatggctggagaactttaaaccccattttcagcanttggacngatcttccca

SEQ ID NO: 579079 - DNA, 996 bp, Homo sapiens
gcaaagcgaggacggacagctcccagagggcgaggggtgcggtgtgcgtccgcttctcacctcaggtctcccttcggccccgctgccctccctcgcggctgggtgacagctgggtccggtccgtcgcgggctgcctggggtgcgaggatcgcgcaccccgtcttcgcgcgctgtgcctgccgcgccgcccctcgtcccgcccgtccgtcgtggtcttttttcctcgggtgctgcacgggtgctgatgccgagtcggtggcagcgaggacattttctgactccctggacccctgacacggcatgcaattctaccatcccgtcgcggggccggacgaatactccggcccaggatgcagaatgtgattaatactgtgaagggaaaggcacctggaagtggctgagtacctgaccccggtcctcaaggaatcaaagtttaaggaaaccaggtgtaattaccccagaacagcacgtggcagctggagatcaccctagtccaccacagtacaaacatggcaaatgggctacaaggggaacgaaatcgacaagtgaaggcatacctaccaacacggacaaacaatttaggacaccccacaaatgtacccgggcaaacagcggagcaacacacgatggcatatcagatgaatgggcacgcctaccagcgacagacgatgatgggagcgccgccggggcatcaaaatacaaccaggcatcaaggaaatcaccggaagcggtgaaaaagacacacggacaactcggacacagaggaaaaaagcacacaaaaggaagacagagacgcaaaaaacaggcgaccgcaaacaagacagaatcacgaacaacgcggcaccaagcagcaagacacaacgcagaacaagaagccggaacacagcaaacgaagaaccacaagagaacaaacgagacgcagaacgagaaccacgagaaaaaacgacaaaaaaaacaaacacagaagcaatgactgaagacacaacaccagacaag

SEQ ID NO: 579080 - DNA, 373 bp, Homo sapiens
gaagtcaccgcgtcggtactgtgccttggctgcggagcggcgccaattcaatttgcccgggtagatcgagcggttggattccggtcatctgcacggttgctgcaggaaatccagcgcgacagcgcgtgataatcctcgtcgacaacgaccgtcatcgcatcgtagcggcaggcgagcgggaagggcagggagaagcgatttttagcgatgctgccgcgcggtttgtcgacgatctcgagtttcgaacaatcaccacgtcattgatgaatttatagaagctttgcaccagcacgaagtccgcgccaattgcgggccagtgcttgagaaagggtggcactcaacaccagaggctgacggcacaggggggaagatg

SEQ ID NO: 579081 - DNA, 279 bp, Homo sapiens
tggctgctctagatgtgatcccattcaacttgcggtgacgcatcacgcctgtccaaagtcagcaaattttttaacattccttaggaatgggcttcgccctgtgccaattttaaaaagtcagacttcttcaggttacctaccatcactgtaggtagaaggatagggaagaccccacatgtaacagttagagaacttacatgataatggtaagcacctggtgtcagcccagtctctacgtccctcctcacagctccctcagcccctgggagtcctcacaca

SEQ ID NO: 579082 - DNA, 1396 bp, Homo sapiens
ggtggtgccactgtggtcgtgactgctgtttagcgtgtgccacgaggccgcccagtccccctcactgcttgagcctacgcactgccacctcttatgtgtgaacacagaaatccatggtttcactaatggatacgctgcgcccgatttgccacaataattgatattgattgtcgcgacctacgatgcactctcctctcctagtggacgtggtgcgtatgtgagtgcgttgcgctggagcgtagagaagtcaccattgggctgcacgtactgccgtactcccttcactcaatgtctcttacctgtattgtctggcgcaatctcctagagttgcctggcccgttgtggcgaagagcgacagcgttcgagggcaagagccgattgggacgtgatgcggcaaaggcatataattgatcgccaaaaagggggtaggacttcaccaatggcaccgcgagatatgagcgaagagggctaatctgtgtcctccggtttgtcccccgcggcataaactgtgcaaagcgtctcggtcctcggcgtggcttcgcgggggcatggcaccgagaacgtagccaggggacgatcatcctgggtccggtgttggacctggtgtcagttgggccagggttcggtggggctacgggcgccggggccctttatcaagcagggtccctgcgtcacttgggcaatggtccgttcgtcccgggccgagacattggggagccatcgtttcggccattgggtgaaggcctcaccaggaatgtgaagcccggtccctccttggtgtgggcattccgtttcgcgtgaaccccagctagcattgttcccccgcaagataccgccgagtgtatgagagcttccggaagcgctgcctacaaattttatcccttgggggagaagagatcgtttgttgcaccaacgacgcgagtgggctccatttaagggaacggttcaggcgactcgtcaaagtctacttcaaggcccaactggggcctagcggggatgtggagcgggttaggaagagtccgaatcctccacgacactagggggggaaaccgatagtgttgtcccaggggccgggttggccatggcccccacggcgaaagaagcacgacaagtacacatcccagtgttagaagcaggcggaaccaggcaaagtactccctttggatggcaacaaggccatgacgacctgtgaatcgcttgggggtcctgaacgggcttggccgacgtgtgacaccaccgcaaagagcgtctgtggtggcacgtgaggtccggtgaccattcccaactttagaaattgcctttgggactttggtgagtctgcagtaccttgcgggttgtcacccggggatctacaatataaacactcctggcatttggtcccccggtttttttccca

SEQ ID NO: 579083 - DNA, 775 bp, Homo sapiens
  misc_feature (59)..(60): n is a, c, g, or t
  misc_feature (73)..(73): n is a, c, g, or t
  misc_feature (86)..(86): n is a, c, g, or t
  misc_feature (90)..(90): n is a, c, g, or t
  misc_feature (112)..(112): n is a, c, g, or t
  misc_feature (118)..(118): n is a, c, g, or t
cgaggcactcaccatccccacctcacctcacctcacccccgccagcaacggatgaaggnnctgccggtggganccgtcggcccagngccnctgccccccgaggctgctagangtaggngttaggcatgtcccacccacccgccgcctcccacggcacctcggggacaccagagctgccgacttggagactcctggtctgtgaagagccggtggtgcccgtgcccgcaggaactgggctgggcctcgtgcgcccgtggggtctgcgcttggtctttctgtgcttggatttgcatatttattgcattgctggtagagacccccaggcctgtccaccctgccaagactcctcaggcagcgtgtgggtcccgcactctgcccccatttccccgatgtcccctgcgggcgcgggcagccacccaagcctgctggctgcggccccctctcggccaggcattggctcagcccgctgagtggggggtcgtgggccagtccccgaggagctgggcccctgcacaggcacacagggcccggccacacccagcggccccccgcacagccacccgtggggtgctgcccttatgcccggcgccgggcaccaactccatgtttggtgtttgtctgtgtttgtttttcaagaaatgattcaaattgctgcttggattttgaaatttactgtaactgtcagtgtacacgtctggaccccgtttcatttttacaccaatttggtaaaaatgctgctttcagcctcccacaattaaaccgcatgtgatctcca

SEQ ID NO: 579084 - DNA, 315 bp, Homo sapiens
ctcagctgcatagagtgacatgtgcctgtcgtcacactctactcaggaggctgaagctgggaggattgcttttgcccagagaggtgagggctgcagtaagctatgtttgtactccagcctgagcaacagaatgagactttgtctcaaagtagaagaagaaggagcaggagaggccgagggagagggagagggagagggcgaacagagacggagacgactcgggcacagggagaggaagaggaccccgaagaacgacactaccacacagaggaaggcagagagcaagaaggagaagagaagaccgagaacaggacg

SEQ ID NO: 579085 - DNA, 1092 bp, Homo sapiens
  misc_feature (59)..(60): n is a, c, g, or t
  misc_feature (73)..(73): n is a, c, g, or t
  misc_feature (86)..(86): n is a, c, g, or t
  misc_feature (90)..(90): n is a, c, g, or t
  misc_feature (112)..(112): n is a, c, g, or t
  misc_feature (118)..(118): n is a, c, g, or t
cgaggcactcaccatccccacctcacctcacctcacccccgccagcaacggatgaaggnnctgccggtggganccgtcggcccagngccnctgccccccgaggctgctagangtaggngttaggcatgtcccacccacccgccgcctcccacggcacctcggggacaccagagctgccgacttggagactcctggtctgtgaagagccggtggtgcccgtgcccgcaggaactgggctgggcctcgtgcgcccgtggggtctgcgcttggtctttctgtgcttggatttgcatatttattgcattgctggtagagacccccaggcctgtccaccctgccaagactcctcaggcagcgtgtgggtcccgcactctgcccccatttccccgatgtcccctgcgggcgcgggcagccacccaagcctgctggctgcggccccctctcggccaggcattggctcagcccgctgagtggggggtcgtgggccagtccccgaggagctgggcccctgcacaggcacacagggcccggccacacccagcggccccccgcacagccacccgtggggtgctgcccttatgcccggcgccgggcaccaactccatgtttggtgtttgtctgtgtttgtttttcaagaaatgattcaaattgctgcttggattttgaaatttactgtaactgtcagtgtacacgtctggaccccgtttcatttttacaccaatttggtaaaaatgctgctttcagcctcccacaattaaaccgcatgtgatctccaaagaaaaacaaaaaacaacaaccaacacaacaaaaaaaccaagaaaacccgcgcaccgccagaaaaccaggcagacccaagaaacacagggcgcaccgcgccgctgcagcaacgaacaaggaccgtagtgccgcaccgagcacgaaccaacgacgggagaacagggccaccacacaagacacaagcgacgacaaccacaaccgcaccagcggcaggggatgagacaccacgcgcaacgaacaggacaagataggcacgaaagcaacaagtcacagaaacacgaggggaggggcccagccagcgacaaacaacagccg

SEQ ID NO: 579086 - DNA, 387 bp, Homo sapiens
atttgccccccgggcccaaaattccgccccgggggccaagccgaaaaaatttttggggagggttttaaggggcgggggttttggtttaaaaaaaacaacctccccggttccgggaaattttgtttttgggtcccgggaaacatccatttggggttccaatttggccccagcctttggttcttccggccgggattttttttgggggcggggggggccgggttccacaccccagaaaaggagggccgggccgggttccttggggcccaaaaccgaatccacaaaggggggggccttcgcttgttccccccggagtttggtggggtcctccctcccgggaaaaaaattcccctttttttcccaaaggggaataaaaagttttccggggga

SEQ ID NO: 579087 - DNA, 983 bp, Homo sapiens
gatgtactgtagacataaatgaggtgaaagaaagtcctgcatatctaatataaatactcaggaaagatagatgatatagaacgcgtagttcagtacatacctcatcgctaacaaaagcgatgggagcagcagatgtttgaacctatggtctgtatatatacatgtctgttctccccaagtctataccattattattagctcttagatatttttagacctatctttaaagtcccatgattctctcattgccttttgaaatgccctgtatgatgttagaataattccatatcgttcatggggttgtctgggcacttgttcaggaaatatgagaggcagtaatcattttaggccgttttcatccctatttacatttggtcaccgggtttgagcgtaaacctttgctcaatcattaaaaacatgcttagctgtggttcgctttgaacgatcgtaccagatttagtagagggcagtaagaggcagttgaaaaaacgagagaggtcggggagaatgtggttaccatgagcatctttagatcataaggcagattgagacatgatacatccaaggtcattctccctgtactgtcctcttcatttagcatgaatagatgcttttgctgttcggaaacaattgccctttttggttgagacagggtctaggctcgtgttgcccaggctagagtggcagggattgatcttggtcacggaagcgtctgcgctgggtgtcaagggaattcagcacacaagtagtggatacacggatgagcaacagccggaaatgtgacatcggacaaaggggtccgccggggtcagcggtcaaaccgggccgtgatgtcgctagccccaaaggggggtaaagggcacaggcaattattaccagacggagaagtaaggaaggggatcataaaaccaagggagaacagagaaatacttgtagaaaaccacgcgggtacaacacctcgtatttggttcatatattatcgg

SEQ ID NO: 579088 - DNA, 590 bp, Homo sapiens
gatgtccaatgctcgcatcttacagtatcaaagtttactgttagatcagcctcgtttgactttctctcccacaaagtgtttcaatccagctacactacttcccgactcagactgcactattcctgctcatgactgtcaagaactgttagaaactatcgaaactggccgatctgatcttaaagctgtgcccctagaaaaggcagatgccgccgtgttcacagaagtagcagcttcctcaagcaggaagtaggaaaagccagtgcagttgttaccatggagacagatgtgttgtaagctcaagctttaccagcgaacacctcagcacaaaaggctgaattgatcgccctcactcaggctctccgataaagagtaaacgtattaacatttacactgacagcaagtacgcctttgctactgtgcatgtacataaagccatctaccaggaaagcaggctactcacctcagcagctagctgtgatccactgcaaaggacatcaaaaagaaaacacggccgtagcccatagtaaccagaaagctgctgaggaaagtttagaatttctcctggcagagatggtccacgagtctggctc

SEQ ID NO: 579089 - DNA, 1368 bp, Homo sapiens
tcaaaacagtgaggaaacattaaaaaaaaaagccctaaagcaaaaaaaaaaaaaaaaaaaaaaacaaaaaaaaaaaaaaaccaaacaacaaaaaaacgaaaaaaaaaaaaaaaaaaagaacaagacgaagagcgcaaaacacaagaacaataagacaaagaaacaaaaaaagagaaaacaacaagacgcaagagagacgagggcagagaaggagagggagcattcgtcgagcctatctaccatctctctgtataatgaaaactaaactaataatctcactaacaacacactaaagatacatactaaataaaaaaacataacaagtataatacagacaaacagagactagaaaaaaagacaataaacaacaaccaaaaaaaaaaacacatacacaaaacacaataaaaaaagaaacaaaagagaagaaagagagaacagaaacgagaagacaaaagacaaaaaatgagagcagagaaaagaaagaaaaaagagataacgaaaagaacaaagaaaaaagaggaagaaaaaacacgaggaagcaaaggaaaaaaagaccaatcgaaaactaagaaaaaggaaaaaaaaaagaaatagaatagaagaagcagacgagaaaaacaagacgatgacaggataacagatacaacaaacaagaggagaaaacacagaaaaaacagacatagcagcgcagacgctggagacaaaaaaaagaaacagagcagagaaaaaaagaagagcaacaaaagaagaacaaaagcgaagaaaagacaagacaagacagaaaacagaaagaagaagcaacaaaaaaagagaacaaccaaaaaacaaaaaaggaaaggaaggaacaaaaaaaccaaaaagaacacagagaaaaagacaaaaaaccagacagagaaacccaacaaggaaaaacacaacaacagcaaggacagaaaaacacaagcagagaaagaaaagcacaaaagaacagaaagaaagaaagaaaagaaagacacaaagagacaagcggaaaaatgaaaaccgacaaaggacaagagaaacaaagaacagaaaaaagagaaaagagagagaaagagcacacaaaacaacgaagaaacgacaaagaggagaacaaaaagacaaaaaagaaagacaacacgaacaaaaacacaaagaacaaacaagagaagaagaagcagaaaaaaaaaaagataaaaaaaaataaaaaaaaagaacaagaaaaataaaaaaaaaaaaagaaaaaaagaaaaaaaataaacaaacaaatataaagtaaaacgacaaataaaaataacaaaaaaaaaaactaacaatataaaaaacgacaaaaaacaaacagacaaaaaaatacaaaaaaaaaaagaaaaa

SEQ ID NO: 579090 - DNA, 328 bp, Homo sapiens
gacgaatcacttgaacacaggaggcagcggttgccgtgagcggagatcacaccattgcactccagccccgggggaacagagtgattctcctgccttagcctcccgagtagctgggattacaggcatgtgctgccatgcccagctaatttttgtatttttagtagagacggagtttcactgtgtcggccaggctggtctcgaactcccgacctcaggtgatctgcctgcctaggcctcccaaagtgctgggattacaggtgtaagacatagcgcctggcctactgctacttttttcttttgcttttgagatggagtcttgctctggtcg

SEQ ID NO: 579091 - DNA, 365 bp, Homo sapiens
aaaatgggaaaaaacccaaattttttgtgtttgggcccaggacccctttccctactccctagcacctgtggtccgtggcttagctcgggcaaggaaatgagagcccctgtgttgttaggttttttttgggaactcttagaaggccggagccccccccccccttccctgccttttttcccttttgcagcctggaatatggatgtgtggtctggatgtccaccccccccttttgggccctaaaaacaagggcgattgttttaggatgacccccccccagcccttagagtggccagaagggccggggggctgctgtgcccacccgggctgtttctttttaaagaaaaataaaattttttggggtttta

SEQ ID NO: 579092 - DNA, 257 bp, Homo sapiens
tctttgggacggcggcacggccccattatctcacctgacatcaccaaggtttgcagtacctcaacgagatcaaggacagtgtggtggccggcttccagtgggccaccaaggagggcgcactgtgtgaggagaacatgcggggtgtgcgcttcgaacgtcacgacgtcacccttgaaggccgacgccatccaccgcgggagggggccagattattccccacagcacggggctgcctcttatgccagtgtgctgaccgg

SEQ ID NO: 579093 - DNA, 471 bp, Homo sapiens
ccggtactgtaggcctatgtggaggtgcgacgccccttcacccatgtgccatgccccaggctgcttcccccacaccctccttgtcctccctagctcaggctcggtcagttctaagtttacctgagctcttttatttcagatgtaagacttacaaatttaagtttgtaaggacgaacttaaccaccatcttcccaaggggttatcaagatactcagaggaacctgaaaatgtatgtgtaaatactatttaatgaacgactgtacaaagtagaattcctaatgtattttttgtatgctttgcattgtatatggaagaacttgtgtcatcaagtatgtatcaatgggtagttaaagtttatttttaaaaccgtccaataccttttgtattatgtaacattcaaaagacaatgtactgtattgaaagtagtaagagacccaaaatgtaataaagtaataataactgacatgaaaa

SEQ ID NO: 579094 - DNA, 415 bp, Homo sapiens
  misc_feature (1)..(1): n is a, c, g, or t
  misc_feature (13)..(13): n is a, c, g, or t
nggttttctttcnggcctcctgcagagtccctggaagaaaatttaccaatctttcctgctttctatttttatgatgacaatcaaagcttgcccgaggaacacaatttgtgacttttaaaaaaatgatcaatgatgtccttaaaaaaatgtggtctgccaacctgtacaaaatggtcctatatttgtgaagagggacgtaagataaaacgatgttatacatcgatatgtatatatctgttgctatgtagacttggagaatactgccaaaatgtgtatgacaagctgtatcactgcctttgtttatattttttttaactgtgatattccccacaggcacgttaactgttgcacttttgaatgtccaaaatttatattttagaagtaataaagagaaaaatactgacatgttcccaaa

SEQ ID NO: 579095 - DNA, 892 bp, Homo sapiens
cgcgccgtgggggagtcgtgcgcaggcgcggacagcgctgcttccgcggcggttggggtggtggggccccgggcggcgttgaccatgacccagcagggcgcggcgctgcagaactacaacaacgagctggtcaagtgcatagaggagctgtgccagaagcgggaggagctgtgccggcagatccaggaggaggaggacgagaagcagcggctgcagaatgaggtgaggcagctgacagagaagctggcccgcgtcaacgagaacctggcacgcaagattgcctctcgcaacgagttcgaccggaccatcgcggagacggaggccgcctacctcaagatcctggagagctcccagactttgctcagcgttctcaagagggaagctgggaacctgaccaaggctacagccccagaccagaaaagtagcggcggcagggacagctgaccagaccacgggcagggcctgcctccgtgtgcccctcagctcagccccagcaagtgtgtgctcagagcatctttgttcttcacggcagcagctaccttccctcactgtctcaggtgccgagaggggcaggtgccagcctccactggcatcagtgacaagcccagggcacagcccacccgggggtcctcgcttcatgctcacacaggctatggggatggtgggctccaggtcagctctgcaaggggcttgtctctgtggcacccacactcctgccctgccagggaggctctggttgtctgagcaccatgggggccccctcaccttgtccctcctcagccagcagaggcccagggcaagggacaggaggacaggggttctccttcaccacagaacccaaacctcaggtctcacccctgtggcctgtgattatgaataaagattatctttg

SEQ ID NO: 579096 - DNA, 1179 bp, Homo sapiens
cgcgccgtgggggagtcgtgcgcaggcgcggacagcgctgcttccgcggcggttggggtggtggggccccgggcggcgttgaccatgacccagcagggcgcggcgctgcagaactacaacaacgagctggtcaagtgtgagcggcgcagccgggacggggaggtcgggagggccgcagggccgggttcccggctcgcagcggggtgcccctggacccgcctcgctgcgggcatcgcgcggctgagcagagccctccgtgccggaggccgggtgtccgtggcccgagccctcgctggctcgcaggccccgcgccgggcgctcgggggtggtgcctgactctggcttcctcgggtggaaggaggcccgccctccgccgccgcgctcctgccctgggcccacagcgccgcccctcccggcccccaggcatagaggagctgtgccagaagcgggaggagctgtgccggcagatccaggaggaggaggacgagaagcagcggctgcagaatgaggtgaggcagctgacagagaagctggcccgcgtcaacgagaacctggcacgcaagattgcctctcgcaacgagttcgaccggaccatcgcggagacggaggccgcctacctcaagatcctggagagctcccagactttgctcagcgttctcaagagggaagctgggaacctgaccaaggctacagccccagaccagaaaagtagcggcggcagggacagctgaccagaccacgggcagggcctgcctccgtgtgcccctcagctcagccccagcaagtgtgtgctcagagcatctttgttcttcacggcagcagctaccttccctcactgtctcaggtgccgagaggggcaggtgccagcctccactggcatcagtgacaagcccagggcacagcccacccgggggtcctcgcttcatgctcacacaggctatggggatggtgggctccaggtcagctctgcaaggggcttgtctctgtggcacccacactcctgccctgccagggaggctctggttgtctgagcaccatgggggccccctcaccttgtccctcctcagccagcagaggcccagggcaagggacaggaggacaggggttctccttcaccacagaacccaaacctcaggtctcacccctgtggcctgtgattatgaataaagattatctttg

SEQ ID NO: 579097 - DNA, 528 bp, Homo sapiens
  misc_feature (29)..(29): n is a, c, g, or t
gcgagtcctgagagcctcagcaacttgcncagggaaggctcagactctagccctggccgggcaaactccaagtcctctcacttaagaacaaccagtgcatcgtgtttactttctctttctctaccctagtgacattctcagaaagaggaaccgtcggaaggttccagggttttcttgatgtgggcatttcgaggtgttgacaaaaggacctctgtgacctttacttatggcctagtgcacacacttgtaagtggcccccatatctggtgccacacaggccagagtgcacttcccgctcctcttataatgccctcactaatgtgactgtaacttcattaactccaggccagattggatccttgtaccgactggtgagtaagcgaaccttcactacagacagctgtctttgctgatgactagctacttcatttttaaaattacggtgaatcaactatatgccaatattgaacaatgccttccttttttagcttcctgagcagcaaaataaaaactaaatcaaaaccaaaa

SEQ ID NO: 579098 - DNA, 777 bp, Homo sapiens
  misc_feature (2)..(2): n is a, c, g, or t
  misc_feature (18)..(18): n is a, c, g, or t
  misc_feature (21)..(21): n is a, c, g, or t
  misc_feature (24)..(24): n is a, c, g, or t
  misc_feature (57)..(57): n is a, c, g, or t
  misc_feature (60)..(60): n is a, c, g, or t
  misc_feature (109)..(110): n is a, c, g, or t
  misc_feature (144)..(144): n is a, c, g, or t
  misc_feature (148)..(148): n is a, c, g, or t
  misc_feature (157)..(157): n is a, c, g, or t
  misc_feature (274)..(274): n is a, c, g, or t
  misc_feature (416)..(416): n is a, c, g, or t
tnttctcaaaataccacnacnacnacaacaacaaaacttcctaggccagatgtggtngcnaatatgtataatcttagcactttgggaggccaaggcaggaggattgctnnaggcgaggagttcaagaccagcctaggcaacatngggnacccccatntctacaaaaatttaaaaattagcctagcatggtggcacgctctgtaatcccaaatacgcggtaggctgaggctgaggagggtggattgcttgagcccaggggtttgaggctgcagtnagccaaagtcacgccactgcattctatcctgggcaacagatggagaccttgtctcaaaaaaaaaaaattcctgacatcgctatgtattcccaactttatcatttgtctgcctgtttagttttgacttatgtttttttttttnccccctgtggacatgtagttgacggaaatcgtgaaggaactttaatattttatttaaatttcccaaaactaatcatgccttatgtgactaatcttcagtgataatatttcatctactgatatattttcttgaggtgtgtaattttcagtataccttaatcatttggtataaaaaagagagaggtttttgatatatgaatgctgttcttgtaaaaatcaatcttgacactttattttaaactttttattggtaatgacagtgggttttgtacatcatgattttcaatttaggatatctgtctaatttgttttttcagagtaactatattggaattcaataaaaatattcaaaatttttctta

SEQ ID NO: 579099 - DNA, 125 bp, Homo sapiens
cgattcaaagggacaagcaccaagacttgatgcctaagcaaagcttgcgatgccgtatgcaagcttgcgatgccgtatccaaagcttgcgatgcgggggtgactacctctagatgctctaccctg

SEQ ID NO: 579100 - DNA, 254 bp, Homo sapiens
gcggccgcctactactactaaattcgcggccgcgtcgacccctgtcctcctgtcccttgccctgggcctctgctggctgaggagggacaaggtgagggggcccccatggtgctcagacaaccagagcctccctggcagggcaggagtgtgggttctccttcaccacagaacccaaacctcaggtctcacccctgtggcctgtgattatgaataaagattatctttgtaaaaaaaaagtcgacgcggccgcgaat

SEQ ID NO: 579101 - DNA, 158 bp, Homo sapiens
gtaatgagctgaaagcttatatttacatgtcgctgaataagaagacaactttagtatggagctatggtatatatagtatctataagctattcagacatataaatctcttgatgaaatgcattccttcctcaatggcactagctgaaaatggagtgctt

SEQ ID NO: 579102 - DNA, 893 bp, Homo sapiens
accagcttgctagtcgggccgttttaatcgtcagaggcgctgcttcgcggacggtgtggtggtggggccccgggcggcgttgaccatgacccagcagggcgcggcgctgcagaactacaacaacgagctggtcaagtgcatagaggagctgtgccagaagcgggaggagctgtgccggcagatccaggaggaggaggacgagaagcagcggctgcagaatgaggtgaggcagctgacagagaagctggcccgcgtcaacgagaacctggcacgcaagattgcctctcgcaacgagttcgaccggaccatcgcggagacggaggccgcctacctcaagatcctggagagctcccagactttgctcagcgttctcaagagggaagctgggaacctgaccaaggctacagccccagaccagaaaagtagcggcggcagggacagctgaccagaccacgggcagggcctgcctccgtgtgcccctcagctcagccccagcaagtgtgtgctcagagcatctttgttcttcacggcagcagctaccttccctcactgtctcaggtgccgagaggggcaggtgccagcctccactggcatcagtgacaagcccagggcacagcccacccgggggtcctcgcttcatgctcacacaggctatggggatggtgggctccaggtcagctctgcaaggggcttgtctctgtggcacccacactcctgccctgccagggaggctctggttgtctgagcaccatgggggccccctcaccttgtccctcctcagccagcagaggcccagggcaagggacaggaggacaggggttctccttcaccacagaacccaaacctcaggtctcacccctgtggcctgtgattatgaataaagattatctttg

SEQ ID NO: 579103 - DNA, 1033 bp, Homo sapiens
gggcatgacccgttaagaggcagatatagtctagtacgagcgtgaatggacaggccgtcgcgggggtgcccggaccgctgcgggcatcgcgcggctgagcagagccctccgtgccggaggccgggtgtccgtggcccgagccctcgctggctcgcaggccccgcgccgggcgctcgggggtggtgcctgactctggcttcctcgggtggaaggaggcccgccctccgccgccgcgctcctgccctgggcccacagcgccgcccctcccggcccccaggcatagaggagctgtgccagaagcgggaggagctgtgccggcagatccaggaggaggaggacgagaagcagcggctgcagaatgaggtgaggcagctgacagagaagctggcccgcgtcaacgagaacctggcacgcaagattgcctctcgcaacgagttcgaccggaccatcgcggagacggaggccgcctacctcaagatcctggagagctcccagactttgctcagcgttctcaagagggaagctgggaacctgaccaaggctacagccccagaccagaaaagtagcggcggcagggacagctgaccagaccacgggcagggcctgcctccgtgtgcccctcagctcagccccagcaagtgtgtgctcagagcatctttgttcttcacggcagcagctaccttccctcactgtctcaggtgccgagaggggcaggtgccagcctccactggcatcagtgacaagcccagggcacagcccacccgggggtcctcgcttcatgctcacacaggctatggggatggtgggctccaggtcagctctgcaaggggcttgtctctgtggcacccacactcctgccctgccagggaggctctggttgtctgagcaccatgggggccccctcaccttgtccctcctcagccagcagaggcccagggcaagggacaggaggacaggggttctccttcaccacagaacccaaacctcaggtctcacccctgtggcctgtgattatgaataaagattatctttg

SEQ ID NO: 579104 - DNA, 174 bp, Homo sapiens
cccgactagcccgacagtgtgggggggggataacacgttggggattgggattttttttaaaaaaaatactggctcccccacaattgggttgcctggggggaacttggtctgcttcagcccaaaaggaatcaaaagatcaaaagcattttggaaaggccaaaaccgtcctgtggg

SEQ ID NO: 579105 - DNA, 908 bp, Homo sapiens
  misc_feature (17)..(17): n is a, c, g, or t
  misc_feature (49)..(49): n is a, c, g, or t
gaagttactgacctcantataggggcgaaccgcgccacttccactgcgngtgcgcgcttcgtactcattacattgttgccatgcgatcatctcaacgctcgcgcgtggtgtgggccggcgcgtgacatgaccacaggcgcggctgccaactacacacgactggtcagtgcataaggactgtgcaaacggagactgtggcgcagatcaggagaggagggacaaacacggtgcgaatgaggtgaggcagctgacagagaagctggcccgcgtcaacgagaacctggcacgcaagattgcctctcgcaacgagttcgaccggaccatcgcggagacggaggccgcctacctcaagatcctggagagctcccagactttgctcagcgttctcaagagggaagctgggaacctgaccaaggctacagccccagaccagaaaagtagcggcggcagggacagctgaccagaccacgggcagggcctgcctccgtgtgcccctcagctcagccccagcaagtgtgtgctcagagcatctttgttcttcacggcagcagctaccttccctcactgtctcaggtgccgagaggggcaggtgccagcctccactggcatcagtgacaagcccagggcacagcccacccgggggtcctcgcttcatgctcacacaggctatggggatggtgggctccaggtcagctctgcaaggggcttgtctctgtggcacccacactcctgccctgccagggaggctctggttgtctgagcaccatgggggccccctcaccttgtccctcctcagccagcagaggcccagggcaagggacaggaggacaggggttctccttcaccacagaacccaaacctcaggtctcacccctgtggcctgtgattatgaataaagattatctttg

SEQ ID NO: 579106 - DNA, 161 bp, Homo sapiens
gcttgcgggggcacacccaggcgtggatggcacgtgcctgcttggtacgctctgaacccagcgtccgctgtgcgttgtcctacgcacgggaaggtagtgcatccttgggcgggcgtcgtcgggggcaggctggctccagtgtgtgacaaatgtccaaagtc

SEQ ID NO: 579107 - DNA, 1065 bp, Homo sapiens
cgcgccgtgggggagtcgtgcgcaggcgcggacagcgctgcttccgcggcggttggggtggtggggccccgggcggcgttgaccatgacccagcagggcgcggcgctgcagaactacaacaacgagctggtcaagtgtgagcggcgcagccgggacggggaggtcgggagggccgcagggccgggttcccggctcgcagcggggtgcccctggacccgcctcgctgcgggcatcgcgcggctgagcagagccctccgtgccggaggccgggtgtccgtggcccgagccctcgctggctcgcaggccccgcgccgggcgctcgggggtggtgcctgactctggcttcctcgggtggaaggaggcccgccctccgccgccgcgctcctgccctgggcccacagcgccgcccctcccggcccccaggcatagaggagctgtgccagaagcgggaggagctgtgccggcagatccaggaggaggaggacgagaagcagcggctgcagaatgagatcctggagagctcccagactttgctcagcgttctcaagagggaagctgggaacctgaccaaggctacagccccagaccagaaaagtagcggcggcagggacagctgaccagaccacgggcagggcctgcctccgtgtgcccctcagctcagccccagcaagtgtgtgctcagagcatctttgttcttcacggcagcagctaccttccctcactgtctcaggtgccgagaggggcaggtgccagcctccactggcatcagtgacaagcccagggcacagcccacccgggggtcctcgcttcatgctcacacaggctatggggatggtgggctccaggtcagctctgcaaggggcttgtctctgtggcacccacactcctgccctgccagggaggctctggttgtctgagcaccatgggggccccctcaccttgtccctcctcagccagcagaggcccagggcaagggacaggaggacaggggttctccttcaccacagaacccaaacctcaggtctcacccctgtggcctgtgattatgaataaagattatctttg

SEQ ID NO: 579108 - DNA, 711 bp, Homo sapiens
  misc_feature (694)..(694): n is a, c, g, or t
atccctgtgctcttgatgtctctgcacaaagcttatggtttgatcaggatatattcacacagcgggagtcttcaccaggatatgagaatgccaagctggatcatctcttccaggacgaggtggccacggcacagcatctgcgtgaggagcagcagcggcagcagcatcagatggagcatgaacggcagcggctggtggccagcatggaggaggcgcggcggcggcagcatgaggccgacgagggcgtgcggcgcaagcaggaggagctgcagcagctggagcagcagcagcggcagcaggaggagctgctggctgaggagaaccagaggctgcgtgagcagctgcagctcctggaggagcatcaccgggccgcgctggcgcactcagaggaggtcactgcctcgcaggtggctgccacaaagaccctgcccaatggccgggatgcacttgatggccccgcagcacaggcagagccggatcacagcttcgatggcctgcggcggaaggtgtcagctcagaggctgcaggaggccggcatcctgagtgcggaggagctgcagcggttggcgcatggtcacaccacggtggacgagctcgcacggcgggaagacgtgcgccactacctgcagggccgcagcagtatcgcaaggctgttgctgaaggccaccaatgagaagctgagtgtttacgccgncctgcagaggcagctgg

SEQ ID NO: 579109 - DNA, 1292 bp, Homo sapiens
cgcgccgtgggggagtcgtgcgcaggcgcggacagcgctgcttccgcggcggttggggtggtggggccccgggcggcgttgaccatgacccagcagggcgcggcgctgcagaactacaacaacgagctggtcaagtgtgagcggcgcagccgggacggggaggtcgggagggccgcagggccgggttcccggctcgcagcggggtgcccctggacccgcctcgctgcgggcatcgcgcggctgagcagagccctccgtgccggaggccgggtgtccgtggcccgagccctcgctggctcgcaggccccgcgccgggcgctcgggggtggtgcctgactctggcttcctcgggtggaaggaggcccgccctccgccgccgcgctcctgccctgggcccacagcgccgcccctcccggcccccaggcatagaggagctgtgccagaagcgggaggagctgtgccggcagatccaggaggaggaggacgagaagcagcggctgcagaatgaggtgaggcagctgacagagaagctggcccgcgtcaacgagaacctggcacgcaagattgcctctcgcaacgagttcgaccggaccatcgcggagacggaggccgcctacctcaagatcctggagagctcccagactttgctcagcgttctcaagagggaagctgggaacctgaccaaggctacagccccagaccagaaaagtagcggcggcagggacagctgaccagaccacgggcagggcctgcctccgtgtgcccctcagctcagccccagcaagtgtgtgctcagagcatctttgttcttcacggcagcagctaccttccctcactgtctcaggtgccgagaggggcaggtgccagcctccactggcatcagtgacaagcccagggcacagcccacccgggggtcctcgcttcatgctcacacaggctatggggatggtgggctccaggtcagctctgcaaggggcttgtctctgtggcacccacactcctgccctgccagggaggctctggttgtctgagcaccatgggggccccctcaccttgtccctcctcagccagcagaggcccagggcaagggacaggaggacaggggttctccttcaccacagaacccaaacctcaggtctcacccctgtggcctgtgattatgaataaagattatctttggtaaaaaaaggaaaacagacaaaaagaaaacacaagggaacattattggaccgggggcggaaaaagagaggataaggaaggggccaagggggcgaacaggagaacccaagaac

SEQ ID NO: 579110 - DNA, 983 bp, Homo sapiens
cggcacgaggactacagtcgcttatcaccatccggaggaaagccgagctagcccgccacgctggggctctctgagaggcaggttaaaagtctggtttcatgaaccgcagagcaaaggagaggaaaatcaacgagaagaagttgcatgcagcaacaggccagcagcagccaccacatgccgcctccgccgcaacacagcctccccagcctcagccaggtcctctgagaagtgtcccagagtcccttgtagttccggtgtcttccctgcaagcctcagtgtctggctctgtccctttggggttctggtgggccaactgtgtgggggtgtgctaaaccccacctgtcacccgatgttgacccaccggggtgtctgccagcggcagagcaaatttccaggctttgatgccatgatgggagcgtggaactcttgcctagactcctcgagtgaggagaccagcgtctccgtccgagcgcaaataggcaataagacgcttacgagcactgtgatcctaatggatggataaacaatggtgaagctgaggtgactcaaccacacgcacgcgtggagcattagtggggtgtgcactgcgcagacacaaatattaagtcatcccccgacgatgttgttcaacgaacaaagtgcgcgcgcatcttgagtgtgttgtactatggccgcaatgaagggaaaccaagacacataccatccgtgtgagtggctttcatataccggacaggctgttctgaataagcagtttgtattggtactggagcctacacgaaatccacggcccttcaaatggcttcacatcaaccaatcaccatacaccttaccataggatctagaatcggtaggccacactcattgaatacagacctatgagtgatatgtcggaacttggagggggaacgcactactatgagtggccagatggactggttgcatgaacatgagccctccacagaacacatgacataatgcctaca

SEQ ID NO: 579111 - DNA, 105 bp, Homo sapiens
  misc_feature (36)..(36): n is a, c, g, or t
  misc_feature (72)..(72): n is a, c, g, or t
agtgccacccgaggccggggcagttttgttggcggnggcaggcgacggaccacggtggcatatgtgatcaangaagcgagccaagggcaactggtggtggcctga

SEQ ID NO: 579112 - DNA, 1863 bp, Homo sapiens
cgcgccgtgggggagtcgtgcgcaggcgcggacagcgctgcttccgcggcggttggggtggtggggccccgggcggcgttgaccatgacccagcagggcgcggcgctgcagaactacaacaacgagctggtcaagtgtgagcggcgcagccgggacggggaggtcgggagggccgcagggccgggttcccggctcgcagcggggtgcccctggacccgcctcgctgcgggcatcgcgcggctgagcagagccctccgtgccggaggccgggtgtccgtggcccgagccctcgctggctcgcaggccccgcgccgggcgctcgggggtggtgcctgactctggcttcctcgggtggaaggaggcccgccctccgccgccgcgctcctgccctgggcccacagcgccgcccctcccggcccccaggcatagaggagctgtgccagaagcgggaggagctgtgccggcagatccaggaggaggaggacgagaagcagcggctgcagaatgaggtgaggcagctgacagagaagctggcccgcgtcaacgagaacctggcacgcaagattgcctctcgcaacgagttcgaccggaccatcgcggagacggaggccgcctacctcaagatcctggagagctcccagactttgctcagcgttctcaagagggaagctgggaacctgaccaaggctacagccccagaccagaaaagtagcggcggcagggacagctgaccagaccacgggcagggcctgcctccgtgtgcccctcagctcagccccagcaagtgtgtgctcagagcatctttgttcttcacggcagcagctaccttccctcactgtctcaggtgccgagaggggcaggtgccagcctccactggcatcagtgacaagcccagggcacagcccacccgggggtcctcgcttcatgctcacacaggctatggggatggtgggctccaggtcagctctgcaaggggcttgtctctgtggcacccacactcctgccctgccagggaggctctggttgtctgagcaccatgggggccccctcaccttgtccctcctcagccagcagaggcccagggcaagggacaggaggacaggggttctccttcaccacagaacccaaacctcaggtctcacccctgtggcctgtgattatgaataaagattatctttgcaaaaaaaaaaaaaaaaaaaaaaacaaaaaaccagtgggcggccgcgccccgggccccccgaaaaagcttttcatagaacccactgcgcggtgtgggggccgcggggccccgagggggtaaaggggaaaccgtgggcgccatatacgcgtgtttctcctatgaggagagaatctccgcgggggctcaagagaacaatgaggcgcgcgtgggaattctctctcccccaaaatataaaacacaacgcgccgcgcgggaggcaacaccgcgagagcgcgttctctggacaaacaaacactccccaagagagtgggagcttctcgagagagggggctctatatatacgcggggactctcttatataaacacgagggggagagtctcacaaagcgagagagcgctctcgagatattctacaatatttatacgcgcccccccgaagagacgttgctgtggtgggagtaaaacagatcaacgtatagtgagatgaagaatatagaacaagtatcaaccatacacgttccatacaactgaccaataaataaaccctacgaataacatcactatatcacgatagacgtcagaaagatactaataatacaaaaatcaagtgcagaaataaacacaaaacaaacataccaaagatccagaatgaagacaacaaacaataaagaaaaacaagaaac

SEQ ID NO: 579113 - DNA, 1207 bp, Homo sapiens
cgcgccgtgggggagtcgtgcgcaggcgcggacagcgctgcttccgcggcggttggggtggtggggccccgggcggcgttgaccatgacccagcagggcgcggcgctgcagaactacaacaacgagctggtcaagtgtgagcggcgcagccgggacggggaggtcgggagggccgcagggccgggttcccggctcgcagcggggtgcccctggacccgcctcgctgcgggcatcgcgcggctgagcagagccctccgtgccggaggccgggtgtccgtggcccgagccctcgctggctcgcaggccccgcgccgggcgctcgggggtggtgcctgactctggcttcctcgggtggaaggaggcccgccctccgccgccgcgctcctgccctgggcccacagcgccgcccctcccggcccccaggcatagaggagctgtgccagaagcgggaggagctgtgccggcagatccaggaggaggaggacgagaagcagcggctgcagaatgaggtgaggcagctgacagagaagctggcccgcgtcaacgagaacctggcacgcaagattgcctctcgcaacgagttcgaccggaccatcgcggagacggaggccgcctacctcaagatcctggagagctcccagactttgctcagcgttctcaagagggaagctgggaacctgaccaaggctacagccccagaccagaaaagtagcggcggcagggacagctgaccagaccacgggcagggcctgcctccgtgtgcccctcagctcagccccagcaagtgtgtgctcagagcatctttgttcttcacggcagcagctaccttccctcactgtctcaggtgccgagaggggcaggtgccagcctccactggcatcagtgacaagcccagggcacagcccacccgggggtcctcgcttcatgctcacacaggctatggggatggtgggctccaggtcagctctgcaaggggcttgtctctgtggcacccacactcctgccctgccagggaggctctggttgtctgagcaccatgggggccccctcaccttgtccctcctcagccagcagaggcccagggcaagggacaggaggacaggggttctccttcaccacagaacccaaacctcaggtctcacccctgtggcctgtgattatgaataaagattatctttgtaaaaaaaaagtcgacgcggccgcgaat

SEQ ID NO: 579114 - DNA, 156 bp, Homo sapiens
gtatgagtgctgttttactcagtgaccagagtgagaagacatttccaaattcggtgtcttaagtccagaagattttgggcggtaccagggtttgtgtgtaattcctaaagggaataattgggatggcatggatgtgggcaaccggggccgtggaaa

SEQ ID NO: 579115 - DNA, 272 bp, Homo sapiens
tctgaaactataggcacgcaccaccatgcccgtttattttcttttgtatgagtagtagagaccaggcttcaccatgttagtcaggatggtctcgatctcctgacctcatgatctgcccatctcagcctcccaaagtgctgggattataagcgagagccaacacgcccagcccattttatgatcttataataaaatacctggagctagatactttatacagaaaagaggcttatttgtctcctaattgcagcggctgtaaagtccaagagcat

SEQ ID NO: 579116 - DNA, 704 bp, Homo sapiens
gtcgcccaggctgtagtgcaattgcgtgatcttggctcactgcaggctccgcctcctgggttcaagcaattctcctgcctcagcctcctgagtagctgggactacaggcgcatgccaccatgcacagccaaatttttttcgtattttagtggacgatggagtttcaccgtgttgcccaggctggtcttgaactcctgagctcaggcagtccgcctgccgtagcctcccaaagtgttaggattacaggccaccatgcctggcctaaactctgttatgtaacgtgatctcccagtgtaataactgcttttatttgctggtgttcgaaagtagttcagccaaacccatgacagcttcatgaattccaatcacatcttttcttcttccgcagccgtcagcttcagtcagaggaccccttcagacagccagtgtctctcctagacatgcccttttcggccatcgactgtcaaggaaccttacccattggtgcgaggtatgctcctccagcctccttctcagacatttgatccacccttggacttccatcccttagcaaggatctccagtacttcgttcaaattcattttcccatggagtgacattcccaatcgagggtaaggaaccgagatctcaattcgtacaaccattgccagctcgatcgcctcacaatgacaatgtcggctcggccatccttcacctgcacccag

SEQ ID NO: 579117 - DNA, 1333 bp, Homo sapiens
cgtgcgggtcgcgtgtcgggggggggtgcggcctggggggccctgtggcggccttccgctgcccgtcctggtgttctttgtggtcgcctccgctgcggtctcgtgggtgtcgcgctgtcggtcgctgtcgggcttctgtgtgcggcgctcttggccgggtgcctcggtggcggggctgtgtgtagcttctgggacgtgtcctttgggggcgcgggtcgtcttgcctttgcttgtgggtccgtggcgctgtctgaggccgtccgtgtgtcctcgtcccgggctcggcgcgcggttgggtgtttcctctgtcgtggcgtcttccctctgcgccgctgtccgggtctccgcgtgggtcggggggccggttgcttgtcctcccttcgctccttgccggtgctgtgccgtggcccgtcgtcggtctttgccttccccgcgttgtgtcggggcctcggcctggttgtcctttccgtcgtcgtgattgtgcgggctgtgcccgcgcttcgcttgttgcctgtggttttggttcgtgggtagctcgtcttgtgcgcttctccggcgcttcgcatcccactgcttgcggttctctcatccatcggcgtcctggggctgttatctagggcctccccagcgttgtcacctgtgcgtctcgcgttctcctgtctcgtccctggtgcttctgggcgcttgggttatgtgtgttgctttgccgctagtggtctgggtgtctcttgaggccgttgtcgtcgggccgctaggcgtagatgctctcttttgtcattccgtggttaacgtggtccgtcggggtggggctggggtatccccgtgtggtacgcgtgtcgcggttggtcctgggtctgcggtggtacttgcgtcctgtgattctgcgtgtcgtgccggttcctgtcgtgtgccggccccttcattcctgatccgtccggttagtactacggtgcctccggggttcacctgattgccagcttgtttcgggggcgctagctctgggttctttcatggggtgtgtgcagcgtgtggacgactgcacggtgactgctcgtccgagcggtggattgattctactgctgcacagtctctccgttgccatgctggaggtgtggcctggggtgtaatccccagcatgctttgggaggtgaggctatgccggatcacttgtgatcagaagtttgagaccagcctggccaacatggtgaaaccctgtctttactaaaaatacaaaaattagctgggtggggtggtgcatgcctgtaatcccagctacttgggaggctgagataagagaatcgcttgagcccagtaggtggaggttgttagtgac

SEQ ID NO: 579118 - DNA, 636 bp, Homo sapiens
gagcacgattcgcttccccgggggggcttgggttggggccccccccttattttttcacggttcggggggagcctttccgagagggttggtctttttaatgaagggggtcacccttggtttgagggtaagacacaacccgcccgtctccgggatttcaattctttccgtcttaaggattcaaaaccaggtgggggtttggcccccctcaggcaaggggggggcaggtttgccggggccttcccccagcctggtttttatacgccttaaaggcccctgggaaatggggcccccagattaaaagtttctttccttcccccccccggggccggggaaaaagaaacccttttttttttttgggggggggggggagccctttcctttgggggaagggccggggatggtttcccttccccaaatttggaaaggagaagattttttttttttcctttttttgggaccaaaacttaaaaggggggccccgggcccttttttttttgacccccttttttgttcccagggtcaaaaaggggtccttttttttgggggggttggggggggccctttaaggcccggggcgggggggggggggggggccccccccttccttttttttttttttaaaatggtcccccgcca

SEQ ID NO: 579119 - DNA, 318 bp, Homo sapiens
tcggaacgaggtaggacacacagcagcttatagacaaccgcaagctcatggagacgcaaatgggaccggttcaaagtgggggacacgagagaccaaaaccaaagcttacagcaaagagggccggggccgggcccagaaggtagatccggcccagaaggagacggaagaggtgggccaggggctcacgaataccatcgacaggctcaagatgcaggtggaccagttggagagtgaaggggagtcacggtcagtgcagacacgcaagaggaagggcgacaaggataagtaggacgggatggagggcttgaggcggcacat

SEQ ID NO: 579120 - DNA, 544 bp, Homo sapiens
  misc_feature (13)..(13): n is a, c, g, or t
  misc_feature (56)..(56): n is a, c, g, or t
  misc_feature (385)..(385): n is a, c, g, or t
  misc_feature (436)..(436): n is a, c, g, or t
actgcatgttgcnccgcgtttattagaggatcccccataagtccgatggggttacntggagtatagtagtccgcttggactgggtgaagtctaagcatgtactggctcggaggtggggtctggctccgaggtcgccccaaccgaaattttaaatggcaggttgtggtagtttaaggaccggtgggtttggtaaggtacggttggctttcattaatttaaagctccatagggtctcctcgtctggctgtgtcatgcccgcctcttcacgggcaggtcaatttcacgggttaaaagtaagagacagcggccaatcaacataggggggggtagatgagaattgcaagtgacttcctcctccggggaagataccatagccttagatggngaggtaaggagagagggagcccggtcttctgggccacactcccgggaaggnaatttcggtcatgtggagctgagaagggaaagagaggggagtgggttgcagcaaatgccacgtattctggctatcctaacggagtttaagcagatctccaatcaaggg

SEQ ID NO: 579121 - DNA, 322 bp, Homo sapiens
agacttaaatatcaagttttttaaaagttacgttattttggggctaggtgcagtggctcacgcctgtaatcccagcactttgggaggccaaggcaggcggatcatcaggtcagcagttcgagaccagcctgaccaacatggcgacaccccgtctctactaaaaatacaaaaaattagctggacgtggtggcgtgtgcctgtaatcccagctactcaggaggctgaggcaggagactagcttgaacctggaatgtagaggttgcagtgagccaagattgtgccactgtattccagcctgggcgacaaagtgagactccatctc

SEQ ID NO: 579122 - DNA, 895 bp, Homo sapiens
  misc_feature (12)..(12): n is a, c, g, or t
  misc_feature (76)..(76): n is a, c, g, or t
  misc_feature (90)..(90): n is a, c, g, or t
  misc_feature (458)..(458): n is a, c, g, or t
  misc_feature (504)..(505): n is a, c, g, or t
  misc_feature (671)..(671): n is a, c, g, or t
  misc_feature (679)..(679): n is a, c, g, or t
  misc_feature (682)..(682): n is a, c, g, or t
  misc_feature (686)..(686): n is a, c, g, or t
  misc_feature (695)..(695): n is a, c, g, or t
  misc_feature (717)..(717): n is a, c, g, or t
  misc_feature (770)..(770): n is a, c, g, or t
  misc_feature (786)..(786): n is a, c, g, or t
  misc_feature (805)..(805): n is a, c, g, or t
  misc_feature (889)..(889): n is a, c, g, or t
ttggtgaagtanagtatatgcttctctggtggcttgggggtgtgtagttggggcctaattcttgagccagtgaagngacacttgggattnagccctcaattgcagcactgaggcacgtggtgccgagaaacaatcctgagggggtccccaacccacctagtcactccttagtttgcagaggcactatctgcagagtcctgtgaaaggctgcagtgaagtcttgcatgagactccccatccagcggagttctccaagctgcagggtagagcgttgtgccaggagggtgtttgggctcatgaaacagtggagaggcgcagaggctcactgggaaaccttggcctcaccgggcctggattgggcatcggcagtgggcatgaagtgggggtgggattctttaggccagggtccaggacacttgggggatcgtaatgctgggggttttcggggaggaaccaanggtcacggagcctcctgtgctgcagtgctgggccataggtgcacanngtcaccgagccactgctggggaaggccggggctcaggtttgggtcctgggctgcgtcctgtggtggggtagtccaggctggccaggctgcagtgtctccgagggcagaccagtcgactcgatcgaacgaagggcctcgcaggaaagcgggcgccgcacgcttttcnagcgcagngtnagtnagtgggatngaagtaacatcgagcccccagnggccctgggccggggggtatataagcgggcgggcgggggccgaagctcgccangcacgcgcatactgtngatgggcatctaacaactngggggtgagggtcgggacatgggccagggcgtacggacgtcgcagggaactggcccatgccaagtgcttcgatcgtagtccttngccgta

SEQ ID NO: 579123 - DNA, 680 bp, Homo sapiens
caatggagaggaaagtcatgagataaagaaaaagttacatgcttgatttgtattgcagatagaggtctacatctgtggtgttctgtcatttcaagataaatgaactcagcataagagtcattgtaataaataaataaataagtaaataaataaagtaaagggaattcatgaagctatatctgaagctacactaacaggcccagaaaccttgcacatttggtgaaataccttttttattttgtattgaaaatgcatcttttggctgggtgcggtggctcacgcctgtaatcccagcactttgggaggccgaggcaggcagatcacaaggtcgggaattcgagaccagtctgggcagcacagtgaaacctcatctctactaaaaataaaaattaaaaaaattagccagctgtggtggcgggcgcctgtagtcccagccacttgggaggctgaggcaggagaattgcttgaatccaggaggcggaggttgccgtgagccgagatggtgccactgcattccagcctgggtgacagcgagacctcgtcttcaaaaaatatataatgaaacattttttaaatgaatggacttccctagtggtacaaaacttgtttaagactaactaaaaatctggtctgcattgggcagcggggggatctctagagtgactgaggctgaagctgga

SEQ ID NO: 579124 - DNA, 335 bp, Homo sapiens
ttggtcctggacactcgtgcgtgtgcacgtgaagatcggcgattatggtttgctcagtgtgggcattcggcgtgtgcacgtgaagatcggcgatttcggcatgctcagtgtggaccctcggcgtgtgcagtttggtcactcggcgttgcacacgccgaatgtccacacttaaggagtgcataatcgccgatcttcacgacacgccgaaggtccacactgcacacgccgagagcccatagtcgccgatcttcacgtgcacacgccgaatgtccaatgcgtagtcgccgatcttcacgccaagcgaccatacggcgtgctggagcaacccattatcg

SEQ ID NO: 579125 - DNA, 105 bp, Homo sapiens
accacgtgaaacttcttttatggttgaaaataccaggcatggttttgaaacacattctccaaaaacccttagatcctgaatgctttatttttttttaagtttata

SEQ ID NO: 579126 - DNA, 800 bp, Homo sapiens
ggggagaggctgtgtcaaagaatgaatggaacgcctactatgaggaggtggtgtacgtcctagaggagatcgagtacatgatccagaagctccctgagtgggccgcggatgagcccgtggagaagacgccccagatctcagcaggagctgagctctacatccactcggagtccacatgggcgtggtcctcgtgcatgtggcaccgtggagatcgttagccccttcaaccgtcaccgatcgcaggcgccatggatggtgcgccgagtcgcatgcgagggaaagcgcgagttgtgtccgtctaggagcccttcgtgtagctgaggtgagaacgatggcggagcacctgctgggcgtaaccatccattcccccctagttaacttgggaacaggggattcttggttccccatggttaatccaaatggggcggttgtccctgtgaagaaccgaggggagacggtgttccagaggtagcaggtttcgacctatatccgtgttacactggtgcagtcacggggtgtggggagtaagcatcatcatgaacggctgctgactagagcaaccttgaacccctgatcaacgctggagcttgggagggcaagagtccctgacgtacgtggacgagaactgtgacctgggacgtgggctgcctgacagcatcgcctgggggaaattcatgaacagtggccagacctgcgtggcccagactacatcctctgtgagccctcgaatccagaaccaaattgtgggagaagctcaagaagtcactgaaagagttctacggggaagatgctaagaaatc

SEQ ID NO: 579127 - DNA, 475 bp, Homo sapiens
cgcattcttcgatcagtcatggccgatcattcgcatgctggtcgtcgaccccgtcgacaggagcaagggactcgggcatgcgttgacgtcggaatgcttcgccagagcgcggcgcgaccgctgccggaccattgcgcttcacacgagccccatcatgacggtcgccttgccgatgtatctcaagatgggcttcagcaaggtccatgacgccccgcccattcatggcgtgccctacgccgtctacacgaaagtgctctgatcccgatgccgttcctgctggtcgactttccggtgttcgaccccgtcgcgctcgcgctcgggccgatcgtgatccgctggtatgcgctggcctatatcgtcggcatcgtgctgggctgggtctacgcccgctcgctgatcaagaaggaacggctgtggggcggcgaggtgccgatcacgctgccgcagctcgacgatttcatcctctgggtcacca

SEQ ID NO: 579128 - DNA, 1466 bp, Homo sapiens
  misc_feature (1330)..(1330): n is a, c, g, or t
  misc_feature (1337)..(1338): n is a, c, g, or t
  misc_feature (1341)..(1341): n is a, c, g, or t
  misc_feature (1344)..(1344): n is a, c, g, or t
  misc_feature (1346)..(1346): n is a, c, g, or t
  misc_feature (1350)..(1350): n is a, c, g, or t
  misc_feature (1355)..(1355): n is a, c, g, or t
  misc_feature (1358)..(1359): n is a, c, g, or t
  misc_feature (1363)..(1363): n is a, c, g, or t
  misc_feature (1380)..(1380): n is a, c, g, or t
  misc_feature (1383)..(1383): n is a, c, g, or t
  misc_feature (1388)..(1388): n is a, c, g, or t
tttgcttatcgtattttgtgctttatcttcgtcctggtcttttcctttctgctttccccctgtctcttctctcttgctgttcttgcttccttggtgccttctctgtgccttctctcttctctctcgttcttcgggcgctctatgattcctttcgtttcctgtgtcttgtggtgtctcttgtccctggttgtctttactccgtgcgctctttctctttcccatgtctccctgtttttcatttccgggtgtatagtctggtcgcgtttcttagccccctcttggttctgtacctccctttctcttttttccctccgttgcgttggctctttctttgttccccctgcttctgtgctttggtctgcttgctcttgtgcctggtctccctggtcgtcctctatctctttgtggtctcttcttgcgtgtgcttgttcttgttgctgtgctacccgttctctttgtttatttactactgtgtgtcttggctctcgtagtcgtgtcgtgctacttcgtgtcctatcctgttgctctgctagctgtcctgcgtgtttcttggtgtgtccttgtatcgtggcccttcgttgcttgtgtcgctttgcttgtatcgcgttctccccttgttggtctgtgctcgtcctgtgtcatggttcgtctctctgtcggacttcttccatgcgctggtgtctcccttttttcccccgtctccgtcctctggcccatgatcgcttcttcgtactgtgatgtgtcatccctgggatggcttctcttccttgtctctgtcactctccgttgcctcttgctcgcatgacggtgcttgcggagtgcgctgcgcccatgtcctcttggccctcatcacgctcgtccccctatgtctgcttactggctgacgccatctgatgctcctggtgcttgatcccttgcaccggttgtccttggtcttgtgtgtgtgccccctcacggtctccagtggccttctttgggatgggctggcccgccaatcgcctttcctgtgttactggcatatcattggtgatgtgggcattctcatctgcctctttgtcagctctcagccggcatcggtctcggagcttgacgctttggtctgtgcttcggtctcctgctgccatgccgtcacgatggatgcgcctacgctgctgctggtggccacacgactacttactgttggccttgatactgcgggcctgcacgacccctcagtttgtctcccttgttcctctgtggctgaggtgggagggggagggtggggtaggtcccccagcaagaaagagggacaggagcaccccaggcaggaccaaggagtcgggaggccctnccttctnnccnccntngtgngggcncanntgtntccccagagcccagcgntgncagantggattttgctcttggctttgcttttgcggcttcgttggagacagttttggaataaaatgtcccttgcaaaaaaaaaa

SEQ ID NO: 579129 - DNA, 307 bp, Homo sapiens
gggcatctagaggatccagactcggaccgttcttcctgtgtctgtgtgttgagcaactctaatcttccatgtctttgtgttgaacaactaaacttccatgtctttttgttgacaaactctaaccttccatgtctttgtgttgaacaactctccatgggtggtgcatctgaccctatcccaaaatggcttaagacgctcatctccttgactgtctgccatcccctcccaaaaataagtggaggctctgtcttttcctcctagtttgaggttctcttctcccagtgtctaaaatgatcaatatgcctag

SEQ ID NO: 579130 - DNA, 502 bp, Homo sapiens
cacgtgttccattatagtaattctccatggagtccagattcatcctggtggcgtccctttgtacatctcgcttttcttctggcatagttacttaggtctcgtaatctttgctttagcaatgtataaaccttcttcaaacagtttcttaaatatcatttcttcccgggtcctcattctcatcatttttgcacacaactgaactctataatcatcataatattttcgagcacgaacgatttgctgtcgattttcttttatctttgattgggtcaacctttgcctacgaatgcagtccttgaagtcttgcagtctcttgttatgttcatattctttcttgacaagggtagtaaggaggtcatgccttcttagggcttcttctatttcatcttggagtttcttctttgatcgattttctctacatgcttctttcttaagctgttcaacctgtgcaatttgctgtttccacatttagcttagtgttgggccagaaccacaaatatcg

SEQ ID NO: 579131 - DNA, 404 bp, Homo sapiens
tgctcgcagaggatcaccgagggtgcagcaattaatgtatatcattggaacaaagagagcaagggcatctgattaagcggcgattacagccggcaggaggacctatgggccagctgggttttactctagatgcagctgtcgtcccaccccagttctaccaccccacttcttccttcaccaacatgcaagttctttccttccctgccagccagatagatagacagatagggaaatggcaggcgcgcctatacgttgtacagtagttctatgatgtgaaaggggcagcacagtcattcaaacttgatccaacctcttggcatctacacaaagttaacacagctcccagaagtaaaataagaaggcaaggctggtgggaaggtacagggcatatgggctggccccgg

SEQ ID NO: 579132 - DNA, 109 bp, Homo sapiens
atctcctagacggacggggaatgtcttctttgtgagacactgagccacactaagaagccgcaggcttctcagagacggggcagacacatgcaatgagggatggtcagag

SEQ ID NO: 579133 - DNA, 1249 bp, Homo sapiens
tccgccatctcaggtctcttggctttgccaggacccatcgtagaaaactgatcgaccccgtttctgtaatccttatgggagaccaaccttgtgcctccgtggagatccatctcttcccagcctggaatacgcactggggaaggccaaggcctccaaaaagacgcgctgcctcctcgctccgcgattagggacttaatccggcaaggaacgtccacaacggcaggtagtaccagatctagcctctccgacaacctcgcttccttgcattcagcgcgggccttgaaaagatccggaacccattcactctctccgagagaaaaaatcgtgacgacagaatactaatagttcttactgcacgcaactcgccatagaccaacccacgttccctatctcgaagcttgactatcggccaggtactgcacctcccagttttacacctgagtcgcatttcataatacactagttacaccctggttgtacacaacacactgcacatgatttatggtgacaaatgctagcccctgtcttttctctaggtgtcctgtaaccttggaccaagtttgtgcttcatctaacgggcagccaacgcagaccatgacaaccccttggtagaagagccaaagaaagtgggcaaacaggacttgcgcttagcccttagaatcccaagctaatttccgcttggcccacgggttcctcccaacgcccttaagctgggttccattggggtccatttcgcgagacccactaagctttagctagactgttcaattcccgggcagagcgcgaattattcaccttatcccttggatctcttccgcaatgccatttcctacagcacaacttgagcctcaaaaggaatccagagcgataactttaaaatactcatacctggacgaattcttacacgggcccattgcaccccgcgtcattcattggattgtaactttataccaaaaagccacaaaaacaacctgcccctggtcggaacgacatgtcttcccctttcacatgcgatggccatcaatccaggttggcaaccgcctttattaggggatcgaccactaccgatgagtcaacaggatgaggacattcacgcattgtagagcactgccctgctcttagtagtgcgcattttcaagcgcccccccacaattaacaggtcttgacactcttaactacagccggcgtcgatacaactcctacatcatgcaacgtagacatccatacatcgtacaatgtggccgcaacc

SEQ ID NO: 579134 - DNA, 783 bp, Homo sapiens
tggaaatgagagggtcaggtcctttttaaacaaccagtggctcatgcctgttatcctagcagttcgggaagccgaggtgggtggatcacgaggtcaggagacggagaccatcctggcccaacatggtgaaacaccgtctctactacaatacaaaaattagcctggtgtggtggcacgcgcctataggtcccagctacttggtgaggctgaggccggagaatggctggaacccgggaggctgcgggcttgcagttgagccgagatggcaccaatggaactcccatgcctggaggcaggcagtgaggactccgagtcaaaaaacgacaaacaaagaaaaaaaacaacaggggggggacccgactcaaaaaaacaccacaacacaagagaggcacaaacacaaaagcatcagaaaaacaccaaccgggatttatcgtgaaacaaaaggcggcgcccacaagaagagggagaagaaataaacaaaagaaaggacacgggcccacgaaacactacacacaaaacctcgcgcgacctgggaacacaaacatcgggacagcacggcgcggaaaatcgaggggaacggacaaccaaaaaccaacaggcgcaggcaaacaactagagcgaagaacaccacaaacacgggtaacaacagccacaacgtgcacacacacacgcgaagacggaggccaagccgggtaacaccagacagcaaacaagcgcgagagcgaccattcgcgccacgagaaacaaggaccgagaagaatacacgaaggaccactgtataac

SEQ ID NO: 579135 - DNA, 295 bp, Homo sapiens
aagcactttgactggcaccaccaatcagagtgttgtgaccagtggtcttggatcatcttggtccttccagcacagcaggttcctaacctttaggggccagagacaaagcctgggccagaaaccagtcccccagagttagagcatgcagttcaggagtcctgagatgagcctgagcctcctaaaatattccagaaatgaaaccagtcagttgaacccaccttgtaccaaaaccaaaccctcaaggccatcaaatagaataaaataaaataaagctcagccacaggacatcaactta

SEQ ID NO: 579136 - DNA, 433 bp, Homo sapiens
tgcccagtaacttctgaccatttattttccagccaaagtcattaaccaaaccaattcagaaatggcagtgcttcccgaaagaataactataccttaattattaatgccacagtcagaaatgaagctggactcttctttgggtaaaggttggtgggagacagtagaaatgaggggtgtaatagaagctgagaagatatggtcaaagtctgagttaaagtttagagaggaaaagacagtttatcctggccctatttgtcaataaattatttgaatagttaaagtaaattttgtgagggatagagttataggttttctctcttgtattttcaaataaaataattcattctgatgttgcctgaccttgttgatttagtcttcatttgtcttatttcttttatagctctctagcctttcttttcccttttcttttgac

SEQ ID NO: 579137 - DNA, 1415 bp, Homo sapiens
agcggatggttgtgatgatcgccgatgtgaggggatttgaaccatcgtacaatcaatccatatgtgaccaatggaggagaagcagatcccgaaaagtacgagaggatacccgtcaagatagaaagactgaggcgcttcaatgacaaggagtagtgtcatatcctcaattaggtcctataggcagacggtaagttcatagagtcaagagggctaatgacgtccagtgttctgatttgagagacagacagtgtgacgtattgccatatgacggaaatcagaagaactccgctgagtacctatgtaagataagcctgcttcttgagactaacggaattaccgagtcaagccagccacagtaatctagaagggacttgaggaagtacggggggtgacccctctgattgacgtcggtgcgcatgcatggtttagtgcagcagtggcccttcaggtgaccgtgtcattcggtttcagtatgtctgggtgggaaggcctagataactggtcgcaatggaattcctgatcgaaagaaggggcggctagggcaagacgccttagaaggcacgttactcgcccgtgaaaaggacgctgggggcagggcacgttcaacaccttgcgattgatccccaatgggccccggtcatgcgtagggagacagttccccgtcaaagcacagggcgtatttggcccacgtgctggcatcatactgccattgtttcggccaagttcactcccgaaggactttatctggggaacggttggcccggtcccgttgtgtggccttggccgccgagggggggtcccatccaaaagagggccctggttgaccaggacggtttcgacctagacccaatcccaaagcatggtcattcgtcactagtctgggaggaaatccttttggcatggggacatcacatagggccctttgggattggctgaaccaggaagttggtaattcccccttttctttccacattatccgggaaattggaacggtgggggtctttttgtccccaacaataataaaacatatagcaataaagttgctttccacacgcaggttagaataccccggggcacaataaaagaggagccagagaaaccctactaccaaagacggaggggagagcctcctggtacaccacctgctgctagtgtgtttcgccccacttatacctagtagaacaggggagaataacattctccacacactcgttgtggtgggtaacccactactggtgtgacacactacgacgttcgctaacgccgtgggtagtgaaacaatgggtatatacgcggagccacgacattctaacccagcagatagacagacaaaccgagaagtagcacacaacaacacatcagatgtaatgacacgtaagagatgacacaaagacagatggacgaaagtagaggca

SEQ ID NO: 579138 - DNA, 216 bp, Homo sapiens
catgtggcgtttcgtggtactagatgcattagcgaaaaggttaaggtaagtttggttcgcgagtgaagtaatagttaagagctcagaaaaaatgtgcatgtgctgtagttttgtattaaatcagtcattgcatatgcagctagtatcaagtacaaacaggtagtttacctgtttatagtagtgtactaacaaagtctcccttgcgacttcagggtt

SEQ ID NO: 579139 - DNA, 178 bp, Homo sapiens
  misc_feature (128)..(128): n is a, c, g, or t
attatggatatgtctttggttacactagcttagtagactatacagtagttgaatttgtaaaagtatatgaacacctagtgagatttcaaacttgtaattgtggttaatagtcattgtattttcttgtngaaactgtgttttatgaattttaccctcccaaatcagacaaacaaaatga

SEQ ID NO: 579140 - DNA, 446 bp, Homo sapiens
  misc_feature (16)..(16): n is a, c, g, or t
cctggctctgaacttnaggatatttttaagctaagtgctaacacggtgtcactatcctaagttcagagccaggtctggctctgaagcttaggctcgtatctgttttcacattcagtcctgttgctgttatattgttttgattaaagtaaatgaagaaaatccagcattacagatagacggtggggtttatgtttatggtatatggtcttgatttgtgtgctgtatggtccgagatggattctcactctgtatgcgcaggttggagtacagtggagtgatctcggctcactgcaacctctgagtccctggttcaagctatcctcctggctcagcttcctgagtagctgggattacaggcacacaccagcatgcccagctaatatgtgtattatcagtagagacggagattcgccatgttgggcaggtcgtgtctcgaactcctgacc

SEQ ID NO: 579141 - DNA, 885 bp, Homo sapiens
  misc_feature (36)..(36): n is a, c, g, or t
  misc_feature (101)..(101): n is a, c, g, or t
  misc_feature (107)..(107): n is a, c, g, or t
  misc_feature (162)..(162): n is a, c, g, or t
  misc_feature (164)..(164): n is a, c, g, or t
  misc_feature (205)..(205): n is a, c, g, or t
  misc_feature (214)..(214): n is a, c, g, or t
  misc_feature (219)..(219): n is a, c, g, or t
  misc_feature (226)..(226): n is a, c, g, or t
  misc_feature (256)..(256): n is a, c, g, or t
  misc_feature (263)..(263): n is a, c, g, or t
  misc_feature (288)..(288): n is a, c, g, or t
  misc_feature (292)..(293): n is a, c, g, or t
  misc_feature (301)..(301): n is a, c, g, or t
  misc_feature (328)..(328): n is a, c, g, or t
  misc_feature (338)..(339): n is a, c, g, or t
  misc_feature (360)..(360): n is a, c, g, or t
  misc_feature (375)..(375): n is a, c, g, or t
  misc_feature (417)..(417): n is a, c, g, or t
  misc_feature (568)..(568): n is a, c, g, or t
  misc_feature (589)..(589): n is a, c, g, or t
  misc_feature (611)..(611): n is a, c, g, or t
  misc_feature (631)..(632): n is a, c, g, or t
  misc_feature (652)..(652): n is a, c, g, or t
  misc_feature (655)..(655): n is a, c, g, or t
  misc_feature (666)..(667): n is a, c, g, or t
  misc_feature (671)..(671): n is a, c, g, or t
  misc_feature (673)..(673): n is a, c, g, or t
  misc_feature (688)..(688): n is a, c, g, or t
  misc_feature (697)..(697): n is a, c, g, or t
  misc_feature (700)..(700): n is a, c, g, or t
  misc_feature (724)..(724): n is a, c, g, or t
  misc_feature (732)..(732): n is a, c, g, or t
  misc_feature (745)..(745): n is a, c, g, or t
  misc_feature (749)..(749): n is a, c, g, or t
  misc_feature (752)..(752): n is a, c, g, or t
  misc_feature (767)..(767): n is a, c, g, or t
  misc_feature (782)..(782): n is a, c, g, or t
  misc_feature (785)..(785): n is a, c, g, or t
  misc_feature (788)..(788): n is a, c, g, or t
  misc_feature (869)..(869): n is a, c, g, or t
gtgggggggagggggtgggaagggtggaacgggggngagaaattgtaggagtgcgaagaagaaggataaaagagtttaaggtggaagagtgattgagtgcnggtatntggagtatgaaaagaagagaagggaaaagggtggtggaggagatgggtcaaagancngagggaagatgtgtgaaggtggaaggaaatggagggtggtncagaaaagnaaagnagatagnagtggggtgaaaaagggtgaggtggagtgnaggttgntggaaggggatgggacagctccacntganntggatgtntgtggtattaatgagaaaaggatggtnataaagaggnnacagttagcaaaaacaatatnaaagaaacttgagtnaagatgattttgtgggggtgggaaaaagaggggggatttatntgaaggaatggaaatgatggagtttgagagactagtggtgagggtagtatgggtaaagatggagaaaaatcttgctgagtttggaagaaggggagaaaagaatttattaataatgtgtaaggagaaggagaaggtagagaaaaagggggangaggtgaaggggagggttgtngtgtgtgagaggaagggggagnggcgagatgtcgtggatgcnnagatggagatggtgagcccnttngagggagtggnnacangnttcaaggagcaatanaggacattngcnacggccctggacactaccagggangagctgcncgtgaggcccatntccntcnaggtggatggggagnagctcttagacgccntgnagnatgaactggtgaccactcagcgcgtcctgggagaacttgatgttggtgattgggaagaaaatgtggaggtgctggacttantgagcgaactcaagga

SEQ ID NO: 579142 - DNA, 252 bp, Homo sapiens
  misc_feature (1)..(1): n is a, c, g, or t
nctcttctccctgacaacaaaccttctccttcctgcaccttgaccttgggctttcagtgcccagaactgtgagaaataaatttctgtggtttataagccacccagtctatgatattttcttatatcagcccgaacagactaagagtacatatacaccatggaatacaccatatacaccatgcaaactaatgcaggaacaggaaactaaacaccacatgttctcacttataagaaagagctgaatgatgagaa

SEQ ID NO: 579143 - DNA, 124 bp, Homo sapiens
tctttcctgccagtgccgacagcaacggtcatcgattacaacgggaacgcacgctggatggttttaagaaatacctggagagcggtgcccatggataggggcaggggatagatagacgatctcg

SEQ ID NO: 579144 - DNA, 128 bp, Homo sapiens
gtccgcgggggacgaaaggcacccactgaaccgcgctggctgcgcgttccacaagcgttgcccgtatgcgacggcgcgttgcagcagtgaagagccgctgttgcgtcctttggataaccggcaggtgg

SEQ ID NO: 579145 - DNA, 491 bp, Homo sapiens
cacgcagtatctacgtgtgacatactcgagtataaagacatgtatgctaataacacatgagtgaggaggatggtaccctcagaggaaaacctgtcggagatcaaaggaagtgatccaaggcacatgtccccgacaagaataggagctttcttgcagcgtagaatagaccataacaagttgtaaaatggctgtctctgtctaagagcctgctaatatcctagagaggatttcgcatatcttatctctgatccttaaaagcactcttcaaggtaggcacaagccccactttacagatgaagcacatgaggtgaggacaggattcgcccgaagacacaaaaggcagtagatggcggaatcagaagtcagacccacatttgtcctggttccaagagcatgagacaaactttacagaagtacagacgcttccacacaaaacaaaccaggatggacccagaattgccacatgcctgtctgtacaacatggcgaacac

SEQ ID NO: 579146 - DNA, 989 bp, Homo sapiens
agcggtggttcttcgaaagagaagacaaagaataaaaatagaagcaaacttgggatctcttctacttataggtttggctcaagaccatgccaggtcaaaccttatctgggattctcacaaaccacgagaagaactgaccacgatactcttgaactctgaaatgagagcactttaatattgacagagaaccttggacagtgcaacatgctgactctccctgcgaacccacccactgacgcttctgacggcttaacactactgaggctgccctgcgcacgcacggacacacttcccacactacggcagacctatctacccctgacgcactttactaatcgggcaaggaaacgcactgagcacactgcacacgcaacagctgggattcaaactctacacgcagcaatcgcgtactgaccatcttttcttccaagtgcagccctcttactccactcggcccttgctctgccctccaccccgctcaaaaaacacggttcaccacccacttgcaaaagcttgcctcacacctgctcctctacccaaacgccccccctgtgcccctcaactctgcttctacctgcgccacggaattgcttcacccgcaaccaaaccctagccgcacccccttcttctaccacgcaactaacccccaaggcaactacttacttccaacttccgcgcaccacttgcttccaacgcaagcgaatagcgctgcccaaccgacgtctaacttacacacgaccccttctggaaaaccccccaaccgacacttaagcaggctcctccgcacacctcccccctccccctctaccccactcttcaaacccacacaaacgcgttttcggcaaacttccccccttattaccacaccttacccacgccaaccaccacaccactggccttttagcaccgctgggaccttctcttccaagcttcgggcaaccttgtcccagagtgaactgtgccaaacccttaccacagccaaaaagttc

SEQ ID NO: 579147 - DNA, 370 bp, Homo sapiens
  misc_feature (4)..(4): n is a, c, g, or t
cccnggtgcgaggaatgctgagtggatgataattgtgtgcgatgggttcgctgctttgtctatcactgtccgagccgaggttgtgggtagctcgatgggtgcttgtggtcgctgctggttgctgcctttgaagagctttcgcggcgggcgaaagacttaaaagcatttgcggtgaacgattccggggccggactcgtcgtactcctgcttcgagatccacatctgctggaaggtggacagcgaggccaggatggagccaccgatccagacggagtacttcctctcgggtggcgcaatgatcttgatcttgatggtcgatggggccagggcagtgatctccctcagcattcctcgcaacaggggtaccgag

SEQ ID NO: 579148 - DNA, 330 bp, Homo sapiens
ttctcagtgatgcccgtgccagttttacctggagtgtgctcttgggatctccagtagcatcagttgtcggcatgtcgtcatgctgtagggtttagggcaattacctctctgtcatcagagatcgctgtctggattactagtaggggccctcgggagtggagatttcctgctggtctgtggagctgtatctcttatggaaggatctgtgcccactctgtacacttgtgctttcgcctctaactgcagtgctgcttctggggcctggaccaccatgtgaggtatgattccctctcattatatataaagaatgttggtgttagtctgggaaaa

SEQ ID NO: 579149 - DNA, 150 bp, Homo sapiens
gcccaacttggtgcctcccaagatccccgatggagagagagagaactttgcatgacatccaccggaagcgcatggagaaggacctgaatgagttgcaggcgctgatgcaggcgcacttgcagaacaggtagaacagaggaggaggatctc

SEQ ID NO: 579150 - DNA, 313 bp, Homo sapiens
tacacaacctagggtcagtttctgcaggttgtaagccatttaccaagatagttgtaggtaagaagggcagatttattagagaaattgtgaaaatatgttgcagtgggcagctcagcagagaaggggctacctgcaaagaggcaagggctggaggaaagttttatagggtcctgctgaagggtgctacgtgtggaatgaggtcattgtgcccgcaggttgtttgtgattagctgtctctaacaattgttcatacaataattgttcattattgttctcaacttggggctctccccaacctggggacccttcctta

SEQ ID NO: 579151 - DNA, 264 bp, Homo sapiens
  misc_feature (95)..(95): n is a, c, g, or t
gatcatgtaagaaatcgcaaaattgagttgcatgaatccaccttcgatcccgcacttttgaactctgtcgtgactaggaacacctagctgatggncttgaaaccagcctggggtaacaaaacaagcccttgtatctaaaaaacaaaagggcaggtagataccagataaataatgttgcaggaagggggtgataaaatacagaaatgtgatacacaggaaaacctcaaatggtggttcaatgggttcccagtgtcttaatctgtg

SEQ ID NO: 579152 - DNA, 114 bp, Homo sapiens
  misc_feature (7)..(7): n is a, c, g, or t
  misc_feature (15)..(16): n is a, c, g, or t
  misc_feature (42)..(42): n is a, c, g, or t
  misc_feature (51)..(51): n is a, c, g, or t
  misc_feature (64)..(64): n is a, c, g, or t
gtatgangcattacnncttaaagaggaaccagagcttctgcncaactgtcnaccttgacaaatngtggactttggtcagtgaacagacacgggtgaatgcgtccgtcgaagttg

SEQ ID NO: 579153 - DNA, 284 bp, Homo sapiens
gtaatgtatcgcccaacactagatatgaatccattaacactgacatacaattgaccagctgttatagagccattcttgtatccctcgcaaggctgaaatagggggagacagagagaaacagacatggctagaatacacagctcctctagatggcattcctcgttaaaacacacctcataggtcagaagatgccactgactcactcctagcatttcagataaatatataaataacattaatacattaactgtctgcacacttgggtgttgggagataacactacg

SEQ ID NO: 579154 - DNA, 266 bp, Homo sapiens
  misc_feature (37)..(37): n is a, c, g, or t
ggacgagaaggcgtaaagtattcgatggagcatcccncttcggcgagtctcctcccgcctcaccacagaacaaattctgtacaacataaaacaagagtataaacgaatgcagaagagaagacatttagaaacgagtttccaacatgacagatccgtgttgcacttctgatgcacagccacatgcatttctcctcacgtggaccagcttcaccagggacttcatactgcagcatcctcaccattaaaaaaagaacagcccttattta

SEQ ID NO: 579155 - DNA, 1528 bp, Homo sapiens
gcccactccaccttattaccagacaaccttagccaagccattttacccaattaacgcatatggcgataaaaagattgaaacctggcgcaatagagtatatgtaccgtcgccgggaacagatgaaagacattgataaccaagcatgtatactagcacatggactgatcctcgctatgaccttgctgcactacatgaagttacacgtaggaatataatcgtttggcaaggatgagccatgagctaagaccctccgtaggatccagatcgacgctatcctggtgaacagctatcagcaggcactcccgtctatgtaggcacaacataagtagtggaaaggactgtactacgcgttaagacgcgcgaacgcacagctcaacgcaggagcctcgtggatggactcatgcgtgggctttggtaccgttcgagtaagcgaccgtcgtatgacgtaacccatgcttatgagactcttgccccaacaggaaaaccctgcatagagaatcactccttcgtttcgagacatcgtgaaagcgtgcttggatggtccccagacagtgaggtgaacaccaagacttcgtaatgcggcaccgaccttgaacgtgaagagaacatagcgcgttgcataacgcaccacgaggttaacccaagcatttttagaacgagcccgactagtatgagggtccgcttgagaacaggctgagtttccaacgcaaattctaaccaggacatacgcaagtttcgagcaggcttccgaatctaactcctctaaacgtcaacttctttgacaatacaaagtcctctccacacaagccactttatttataccttcgatcttcttcaccttccaacaagcgcccaaaattttggagcaaccccaaatttcataattccaaaccccccttaattcacgaaacacaggaaaatcttcaacaatttggctttcacggctacattacaagtttaaacgcaaattcgcacacacaaaccaatattcctaccccattccccagtccatttacaccgccccttcggccagttctaatgcacttctacacaacacccaatccttgaacatctcttggacccacacactttaaattacaatgaccaccacaaataattccatacatcaacaatcacgaaacaccaaagaccacatcgtccacaattctacatttttaacccctcttgcaaactttaggttaaaaatccctcatatacctaacacggaggcaccttggcattcccacttcaacggatcacctcgggggttagagacagacacaaaaggttacaatacacgggaaaaccttccgccgcacaagattccttttagccccccctaggacctgtgatattagccccaacaagcagtccgattgtacagcccattccttcaggccatttcaagcccaagctaatctcaagagaacgagcgacacccggggcattggaccccaaggcggacaaccaattggtcttacaacatgggagccgggtggggaagcccctaaatccctggttgcaaaag

SEQ ID NO: 579156 - DNA, 176 bp, Homo sapiens
  misc_feature (79)..(80): n is a, c, g, or t
ggatgcattcaagccgccaaggtagggaagccacatgcaccatcaggcccttgtttggggaggctttccgaggagctcnntggcatcactttagacgggcctttgcttcccaagccccgcaagccaagccaagccttgcatttccggggcacttcccgttgaacttactgtacaat

SEQ ID NO: 579157 - DNA, 142 bp, Homo sapiens
gcagctgctgctgcggcgactctgaggatcccagccaaggaaatggaataaacagaacgactcagatgatagcagacaggacattagaacagttgttatatctgtagtccatatttttaaaatgtagctgcagacaggacat

SEQ ID NO: 579158 - DNA, 208 bp, Homo sapiens
ctgcattggccgggaattgaacccgggcctcccgcgtggcaggcgataattctaccactgaacaaccaatgccttggaatacatagataaggctggaaatcgtatcataaagcttcatctccaagcatatttttcgctttgtgggctcagctacatttttcaccctaaaaaaagcagtgctttctccccgtcggggaattgtcgacgc

SEQ ID NO: 579159 - DNA, 246 bp, Homo sapiens
cagtagtgtttcttttgttgttgtttcttttttgttatttttccagaaaagggcttttggcgtggtcaccccagggtgtgtgggttgcgcggggggccacaaaaaagagggccacacagaggaaaccaaacacaatgagattaacaacagaaaaagcatgagacacaaaccacaacaacaaaacagaacacaacaaaagagaggaagaaatatcaagaggcgaatgagtaacacggagcaagaggc

SEQ ID NO: 579160 - DNA, 335 bp, Homo sapiens
agcagcatcatgagtgttatgaatctgatatcaaacctctgtattcactcactcattgttagatgtactagaagtgctagcgagtagtcagaggaatgtgtccctctcctcatatatctttcacagagctgattgtaatggtatgaagcaatgctactggaggtgtgtcacagcaactagatggtttccacatctgtcatcatgactcaagtgaatgctagcacaccattttcagtgagccctgtttacacagaagaacacatagttctattgtattctttctaatatgtacttagaaaaaatacacactggttaaccgcggacgctagcatgga

SEQ ID NO: 579161 - DNA, 276 bp, Homo sapiens
ggagttggaagtcgcagtaagctatgattatgccacggcactccagccggagtaagaaagagagcaagatcttctcttaaaaaaaaacaaacaaaaaaaactacaagaaaaaaacagtactctcaaagggaggtacgagatcagaacctggaaagtcagtgacggactaggggaataggaagtagtattggggctgacctgaagttgaggggaagggcatctacagtggagggaaagggtatgggcagagtcggggtcacgggttagggatgcggt

SEQ ID NO: 579162 - DNA, 153 bp, Homo sapiens
atggaggaggtgaaagattgcaactgaaaactataaaacatggctgaatgaaattaaagaagagctaaataaatagaaagacaccctgagtacatggataggatgatgtaacacggattaacaggctcagcttctacccagaagcaagtctac

SEQ ID NO: 579163 - DNA, 1328 bp, Homo sapiens
gaaggcaaaaccaaagaagttatcttcagtgtggagtgatgggtccgtgcaaaatgttcctgagtgggccgccctgatgcccatgatgatcccagacagagctaggcacccacctacagcctggacacacgctcggagcttgccttcttgccggctcaagctggagtgggtctatggctacctgtggcctgagactgccgggccaacctttattttgctgaccacctggggacgatagtgtacttctgtggcctccgtagccgtgctatacagcgtgcgaggagcagacgtgcagcgacactacctgggacacaacgatgcacatcaaatgcttggccatccacccagatatggtcaccatcgccacgggcacaggtggtcgggaaccacctaaggcaagcggaagccgctgccgccccacgatgcggcatctgggactcagatcacccctcatccacttacacgctgctgggcttggacggtgtccgacagagccgtgtgctagtgtgggctatctccaaatctaatggactgcaacctgcctgtgctgcacctgcatgacattccaactgatacacactgctctccgctagtcagactggggcaaatgacgacccacgtgctggctgtcaagtgctccaatgaaggctcgacatgctggcacactcaacccaagaaaccccaactgtgacttaatcaccctgcgcgcacagtctcaacactcaactccggacccatgggcatgcgaggcaaattgtagaagtggacaggcccccctggacaaacactaacaagccgacacgatagtgcgtggggacaacatctggcacggctgtccacatgtaccgggcaactatggtaaacacctctccaaggggctacacatcgtcaacgcttaaaaccgcgttagctgagccacccacagacgctagactaataacatcgagccgacgatgtataaggcaacacacacgcgaacacacgtacaaaaaaacaaaaagcgaagaacaaagaacagcactcccgaaccaactcgcgccgaacccaaaataccttccagtccacgttcaccacaatcaccatcaaccaccctcctatattctttaaatcaccactaaccttgaatttaaacaactagacacactaaatcaaacccatcacaccaatccaccaccctaactacaaaactacacaaacaccccaccatcctgacacctacaacctacaacctccctacaacacacatacactaaccatctaaccaaaacaccaacaccccctaacacccaacaaacacccaacaaacctcacaaccataataatccata

SEQ ID NO: 579164 - DNA, 159 bp, Homo sapiens
attttcgctggactgagcaattgtcccccaccactttactgccctttgctgaaggtgctgaacacctgtgccttctatcaggggcagacgggcgtgaggcttctgactcctggtggcctgtccgtctccactacccagaccatactagtgccgcacctg

SEQ ID NO: 579165 - DNA, 653 bp, Homo sapiens
cgattgctctacaacggctatcttccaatcaagttccccttctaaagcagcttaccctgtaaaaatgttaccattaccctggaaaaatattaatacagcatagccttaatttaatccgctcctttttagtcagcctgtcgccattttcagacgccagtataattaacatgcatgcaccacattctgcctatgctcaaactggcgattcacgcttcactgctacccctggctcctggccgcacctgtatctccacgcagcgctgcttcgctagcgctctctgagacgcttaccatgcctcacgccatcgcgataataacacccctaccctcgctgcaccgacctttccctatcatcttgtatttccggcctggccctcctcaacgctctcgtcacccgtcctgcttcccctcatccaccacctcgccgccgtctcgagcctcgctcataacccatgctccgcaacgctcctcttgctcccgccccccccgcacccctccttgtccccaccgcatgaccttcgctctccctcctcccctcctcctcattcccctcgccttccccctccctccttctttcaccccccttacctccttcctcgtcacccccctcccttcctttcttctcccccctcttcccccctgcctcctctccg

SEQ ID NO: 579166 - DNA, 330 bp, Homo sapiens
cgaacctccttcagaagattgttctacacctgtgctatggacatcctggaactgcccaaattggagagggagtagaacactcctggggtgatcttgaagactctgagacggacgatgatgaaggcagtggtgatcaagctatcattctagatggtataaaaatggacactggagtagaagtctctgatataggaaaccaaggtaggtgacactttatggcacacttattactatatatcacatacatctagtattaccgtatagttatatatatcatgcataatatgtcacctaccttggcttccaatatcagagacgggtaccgagctc

SEQ ID NO: 579167 - DNA, 243 bp, Homo sapiens
  misc_feature (41)..(41): n is a, c, g, or t
aaattttttttaaaaaaatttttttttccccgttccggggnaaaaggaggagggccagtccctttttttacctttttttccctaattttaatggggaagaattttgggaaaaagggcttttggtttcttttttttttcaaattaaaggaaaatggggtttagttgaggaagaaaacaacgttgtttattaaagttttttctttttttggccaattttatttaaaaacaggaattttttttcca

SEQ ID NO: 579168 - DNA, 169 bp, Homo sapiens
taaaaaagaaaccaaaccggagttaacaaggatatcggagctaatggtaaaccatcaaccagagggacccagggcagtataaagcatggaagcaagggagtataatctcacaattataaacccactataagacaaccattggataatcattggacaaatccctaggtat

SEQ ID NO: 579169 - DNA, 647 bp, Homo sapiens
  misc_feature (464)..(464): n is a, c, g, or t
ccagggtcttgctctgatgcccagagtacaggggcgcaatcatggatcactgctgccttgacctccctgggctcaagcgatactctcctgaaccaccctcctgccccccactgatgggactacaggcatgcgccaccatgcctggctaagatgtatatttagtgtagagacgaagtctcaccatattgcctacactggtctaggactcctgggctcaagtaatcctcctgcctcagcctaccaaagtgctgggattacagtgtgccactgcacctggcctggatggatccttaatgacttcaaatacagatttcaagtactccatagcatataaatccatgctcattcaagaccattaaaaaaaatcagaacagcttataacaattgttatatagcttctgcaaaaatgcaactcattacctgcacatgtccaccactggcatctctcatagtgcctacccacntgcatatctaatgtgacgtatacactgccatctctaatctggctagccactgccatatctgatataactcagccactgttgtgtgagaaggtttaaggccaatgtaactaatgaagaaaaatgtctttatatgcacctgcatttatttattcagaagatgtcacgaattcttgagtatgtgaa

SEQ ID NO: 579170 - DNA, 238 bp, Homo sapiens
tctgagacaaagtctcgttagcctgggctacagagcgagactccatctcaaaaaaaaaagaaatgaaggcagtcgggagtgcacctgaggatactgatgcttggagcctggagggccagaaaagcctcggagtgggtggcgttggcacggggcctggtggatccagggatttaaggctgaagggcgtggctgctggaggaacagcaagagagagagagacatggagaatggtgcaaag

SEQ ID NO: 579171 - DNA, 998 bp, Homo sapiens
tcgccgggaggctgccctgccgagttctgctgccagctgcctgaggcagcctcgctgtgccccatccctgtcccgccgggcactctggagtggcagctgcgccgtgatgtgccaatgtgttgcccctgctactgtgccctgtgctgtgtgctgatgctgatgctcgtgtgcttgcatgcatgcccctgcctggctggtgctgcactgtgcaacttttggagagtgctgatgcagcatgccccgtgcagcgtgtggctgtagcggcaatgaccccttggctcggggctcatcgtgctcctgggcagctggagcctgggggactggggcgccgaggcgtgcacatgctcgcccagccacccccaggacgcctttctgcaactccgacatctgtgatcctggtgccaatggtggtgcgggaagaagctggtaaacggaggtggcccttcggcacgctggtctacaccatcaagcagatgacgatgtaccgaggcttcaccaagatgccccatgtgcagtacatccatacggaagcttccgagagtctctgtggccttaagctggaggtcaacaagtaccagtaccttgctgacaggtcgcgtctatgatggcaagatgtacacggggctgtgcaacttcgtggagaggtgggaccagctcaccctctcccagcgcaggtggctgaactatcggaatcacctgggttgtaactgcaggatcacgtactgctatacctgacttgctttgtgacttccaagaacgagtgtatctggaccgacatgctctacaaattccggttacctgtgatagcagtccaaacacttacgccttgaatacgggcagacaggagcaggtaactggcagcttataacccgagggattggggaccccagggattaaaccactaatcaatagcgcacaaagaacccttatagcagaaacattgcccaacgaataataccacacataccagtagattatcactgtagagtactcttcaa

SEQ ID NO: 579172 - DNA, 126 bp, Homo sapiens
ccttaccactctataccaccctataccacctataccactctataccaccctataccacacgtgattgctgcttggctgttgtggtttactggtgctggtggtgtagcgctggtgtatcctgtagat

SEQ ID NO: 579173 - DNA, 233 bp, Homo sapiens
gcccagaggcgggtgcatcacaaggtaggagttcgacgaccagcctggtcacatggcgacaatccacgatctctactaaaaacaccaaaattagccggagtgtacgtgcctgtagtctcagactactatgagagagagctgaggcagagagaactcacttgaaacctgtggcaggcagaggttacagtagagccgagactggcgccatcttcactaccagccctggagcgaca

SEQ ID NO: 579174 - DNA, 600 bp, Homo sapiens
gagacgtgcaggtgctggtgagagaactcgcgtgcacgaaaagggtaatcggaaaatgatcgtcgtacttcgactagtaggactgctctcgggaggttgctcgacgcggaggatcgtcagctgataaattcacttcgaacttagaatgacaggacggacatgaaatggcctcatttgtaatgtactctttggggttagtttgattgttttttacatttataagcctgtttgggtactctgattacttgttagaagactcgtaagggttaaacaatccacattattacagattgtctgatttttacgaccagacaagaagattgaagctctaagtgcctgaaaacccttttctacagagtagttgtttacacttcccttctgagaaccatatgaaaacaaggaccttattggtctgttcaccattgttacccctagtctagtactctgtgtgtgtgtgtgtgtataacatatctaagtgagggacctttcattcacatgactagaatctaaacaaaaataaccggctttaatctaacaggtgcataaaaactagaggatacctaatatacttcgggcccatctgacttctgggtaaccttc

SEQ ID NO: 579175 - DNA, 380 bp, Homo sapiens
cccaaaaggggtttattgggatggttccccacttatcttgactcaaagggcttttagggctgcttaattacaggggcctgttgctggctgctgaaatagggggagctgttgggggaactggccacggacccggcagggggttgggtcccaacactggaagcctgggcttgcacagggcccctggaagggttttgctcctggccagggggaaccagggagcggaaaggcatatttcctggcttgggcttcaacagaaaccgggagttctgctcgggacttaaaggggacatttgttggggaaaataacccaaggggggtggttttgtttggccacacccggggctgcctcccccacagtctgttttttaaatgagaaaggg

SEQ ID NO: 579176 - DNA, 378 bp, Homo sapiens
ctctaaacccatttctcttcaatccaggtgacaaagggcaccagtgaatctccagacaactgaggtcctagagtctgttctcctggaccaagctcctctccaaactccttgcccatcacaccacattgactttactatgtccttcttctgtgaaggaaggctgtatggtgctatgcgtgggtgtggagactcaccaatccatcatgaggatttgttttgcaatgacagaggaaatctaccattgtgtattggcaagggtggggccctgaaaattcatccagtggtcttggatatcacttgtttttaaatctttttgttgaagcataatatacaagcaaaaaaatgcactaatcatatgtgtagaacctgatgaatttt

SEQ ID NO: 579177 - DNA, 950 bp, Homo sapiens
  misc_feature (612)..(612): n is a, c, g, or t
caaccggggctcctgggcaccacccacaaacagctcccccgcagccaaattgcgggggattatcacaacccccgcgacagtggcgcccctgttccaaacagggggagccaaccctctcccagggcgaccactacatacaccgtggcaccacgccccccacggagaacctaaggggtccgccccctgtggcaccaatcccccctaccgcaggggggccctccccccacgccggggattcaggatctccggtaccccacccgccgcctgtcattaccgcgagccagcgcctcctccccccgcgaagggccgaacaggccaggggccgcaactctccgcccccccccccgcacttgggagcagcggccccctctccttcaccacgtgccgggaattacttcacaacaccccaccggcttctcttagccctcttcggtgcaccacccgcgtcgtacacaccacaaccacgtttcagagagattcttcccccccccctcctgacttacatcagtagaaacaaaaagcccttctcttctcacccttacatagatagataaatagattcaaccacctccacgccacccccattgtttatcttcttgtctggccccccgntcccccacgcccctcaagaatacatactagtcttgcgactgtttaaccccccccctttttttccaatgctccaccaaccacccaacggcactttgttattcacaccacagtgcgatgtttcccaacgcaacaaacacaagccttctttcgcctcattggtcccccccattgcgagctcactcccaaaaaaacacaacaatcaacaatacagatagacttgtacatacattcctcactccctcgaccccgagcagaatttacacgcatttattagcaccccacccccccaccccctcaccccccccccccctccaacccaagtggcgcccaacaaaaca

SEQ ID NO: 579178 - DNA, 387 bp, Homo sapiens
agagtccgatggaggattcacaccaggatggggtatctcgcctatcaactgaggcgactccgagtcttggtttacataaacacaattcttccactgtacacaacaaaggacaaacacagtgtcatctaaaatgctacaaaggtttaaaactcaaaagagaaattttatagtactggctgcacaatgaaagcataaaagaaaaaaaataaaagcaatgtacatgttgccaagataacctgaaagaccaccttgaacggcaggcacaaccatggctgcgttaagactccacagatccgctattcggggacggatagcggatctgcaaggggaaaaaaattcggatcgcctcacttgatagtggacccagctcaaattccgaattatact

SEQ ID NO: 579179 - DNA, 560 bp, Homo sapiens
cgcatttcgagtgcttcgagattatcatgaggttgtctatctggagctctttccattagtttataacgtataggcattgatagctataaactttcctcttagtagtgcttttgctgtatcccataggttctgatatgttgtgtttctatttgttattggtatccaaaagtctttaaattttcttcttaatttcgttcatagagcgccagtggttgtacagtaaagctggtggctttatttctcaggtattggttcagatatccacaagtagcgtttgggttatttagtttcgtgtttttactatgatgagtggtgagaacaatatactgggatatgatttagatatttttacaagtttttggtctgggtatggtggcctaacatatggtctaggcagtggaaagtgctgagaagaaaaatgtatattctgcagcagtcagatgaaaggttctgtaaatgtcggtgagggccatgtggcctagagtatagtctaactcccatgtaacttcattgatttcctgcctagatgatcggtacgtaaatccaaagttccgatgaag

SEQ ID NO: 579180 - DNA, 777 bp, Homo sapiens
  misc_feature (345)..(345): n is a, c, g, or t
  misc_feature (417)..(417): n is a, c, g, or t
  misc_feature (527)..(527): n is a, c, g, or t
cacgtgtgtccaaccagtaagcagcattggaatgggtcattcggtttaaaaatgggccacggttccagtgggtgagaactcaagaacctaagaaaggtcaggttctaggaaattaaggcggaatttaggatttaaagccagtgggttggcccttgattggggcctattagtatcaagctcaaggtgttatcattgtccttgagtgagtattaggctcactgaaaataagctcacctcgcctgtccgcgatcacatcagactggcaataagctatcaagccaatcagctgtgatcatggcttggttggaagagatcatagccatggtgtcagtgtagcagcagtcntgtcatagaagcagcttgcaaggcagtcttctctagccgcattgcttgttatcctctcgtgaatacgtgtcncagtagtcatatgtgcacaatctctcttagtgacaatggtgcgtgctacagaggacgtcagcgcacatctgtacataacatgtggcatcaggatagtctaagtgtagcangctcggaataatgcagttttggtgcatgtgattttgtctgcattccatatattaggtttggctaatgtatgattagtaagagtaaggtcagctggggcagctcgtatttggaagcaccagagcatagattagatgtgttttcagagggtaaatttttattcggtattgattattttgaacgtgtaatagtaagtagtcattgtcagttcaggtatttatagttaaggctctttaactcgtagtaaggttg

SEQ ID NO: 579181 - DNA, 712 bp, Homo sapiens
  misc_feature (7)..(7): n is a, c, g, or t
  misc_feature (70)..(70): n is a, c, g, or t
  misc_feature (79)..(80): n is a, c, g, or t
  misc_feature (166)..(166): n is a, c, g, or t
  misc_feature (169)..(169): n is a, c, g, or t
  misc_feature (180)..(181): n is a, c, g, or t
  misc_feature (186)..(186): n is a, c, g, or t
  misc_feature (189)..(189): n is a, c, g, or t
  misc_feature (198)..(198): n is a, c, g, or t
  misc_feature (211)..(211): n is a, c, g, or t
  misc_feature (219)..(219): n is a, c, g, or t
  misc_feature (235)..(235): n is a, c, g, or t
  misc_feature (245)..(245): n is a, c, g, or t
  misc_feature (248)..(248): n is a, c, g, or t
  misc_feature (256)..(256): n is a, c, g, or t
  misc_feature (277)..(278): n is a, c, g, or t
  misc_feature (301)..(301): n is a, c, g, or t
  misc_feature (340)..(340): n is a, c, g, or t
  misc_feature (353)..(353): n is a, c, g, or t
  misc_feature (363)..(363): n is a, c, g, or t
  misc_feature (375)..(375): n is a, c, g, or t
  misc_feature (381)..(381): n is a, c, g, or t
  misc_feature (394)..(394): n is a, c, g, or t
  misc_feature (399)..(399): n is a, c, g, or t
  misc_feature (406)..(406): n is a, c, g, or t
  misc_feature (413)..(413): n is a, c, g, or t
  misc_feature (415)..(415): n is a, c, g, or t
  misc_feature (452)..(452): n is a, c, g, or t
  misc_feature (480)..(480): n is a, c, g, or t
  misc_feature (488)..(488): n is a, c, g, or t
  misc_feature (533)..(533): n is a, c, g, or t
  misc_feature (539)..(539): n is a, c, g, or t
  misc_feature (706)..(706): n is a, c, g, or t
gttccgngtccggttttcccgggttgttgtttgccggcctccatctgtcctggtccgttttgttgtcttntaggggctnntggctaccagcctgctgcctcggctgcgctacgtgctggaggtgacatacccagggcctgcggtggtccttgtcttcctggctgtnctnttccgcctggnncggcnttncctggtttntgccacaagggtnctggtgtnccctcggctgtttgtntcttttgttnganagttcttnccccccagttggtctcctgtnngggctgggcctacccactatgtnttttctttgttccctgtgcttctgccttgtttcttcttngtgtcctggcctntgctgggagntattttgctgcncggctnttgtgctgctttnttctncggtgcngcctgtncngcttccttgatgtgagatcacccgatatggccttgtnccctgagagaagctgagatgtctgtgcnccgaggcnctccgtctgtgggctgtggctgcctcctatggccagggcggttanctttanagggagctctacccagtgctgatgcgggccttgcaggtggtgccgcgggagctcagcacccacccacctcaacccctgtccatgcagcggatagcctcactgctcactctcctcacccagctaaccctggcagccggcagtacccctgctgaaaccatcagtgattnaaaaaa

SEQ ID NO: 579182 - DNA, 494 bp, Homo sapiens
  misc_feature (50)..(50): n is a, c, g, or t
  misc_feature (188)..(188): n is a, c, g, or t
  misc_feature (389)..(389): n is a, c, g, or t
  misc_feature (394)..(394): n is a, c, g, or t
  misc_feature (441)..(441): n is a, c, g, or t
  misc_feature (490)..(491): n is a, c, g, or t
acggatctgaacaaccggaaaacaaggtgctgcaggcacaactgaaacantcgctggagtctgaacgttccgtcgcaaccttgctggatgatgcctatgccagcgggcgagctaatgcggcgattggtttgctggcatctgctgataccgggcgtacttccgaaaatctgcaacacttggtagcggcnaccgctccggttgcagcaccggaaaaattcctgctgctccagtttctctgcctcagagcgatgaagctattgatgctgaattgctcgacatcttcctgactgaggccgacgaagtgctggcgtttgtccagcataccttgcctttgtcacgtgaagatgcggataatcaggaacatctgaccagcctgcgtcgttccttcnatacnctcaaaggcagcagccgtattggtggggctgaccgtatttggcgaanctggatggaatatagaacaggtcatgaatcttgtggttgttcagatccnntta

SEQ ID NO: 579183 - DNA, 192 bp, Homo sapiens
catgtgagagaaaaaaataaaaggcatcccaattggaaaagaggaaatcaaattgtccttgtttgcatatgacatgttttatatatagaaaaactaaagacttccctaaaaacctttagatttggtaaacaaatttaataatcagcatacaaaatcattagcatttttagacccccataatggacttcctga

SEQ ID NO: 579184 - DNA, 384 bp, Homo sapiens
tacaatcagctcggtaccctctactaaggcaataccacatacattcccctatgttttcttccaagaattttataagtcttccagttttacatgctaagcttataatacattattgatttgatttttgtatatcgtagaagatgtaaccactctaatctcaattttctgcatgtgtatctccaattttcccagcaccatttattaaaaagactgtcttttcctcaatgtgtgttcttggcatctctatcaaaaatcagttgcatattagtgagtgaatttatttctgggctctctgttctgtttcattgtccactatttccttatgtccttttttatgccattaccatactgttctggttactatagcttttggcccttatcgag

SEQ ID NO: 579185 - DNA, 263 bp, Homo sapiens
cggtccaaaagccatttctaccaaaaatacaagaatgagccagctcataacctggtctcataaataaataaataaagagacataaatgattgccagccattattccggaggcacaagatatataacttccccaattactcctgcatataacatcacaactgtagaacctgagattggccttttgagatatcttttcaggattttttcatgtctgacaccaggggctccacctggacctgccaactgcccctgtggccccaccc

SEQ ID NO: 579186 - DNA, 912 bp, Homo sapiens
gtccccccttcccttccctggggtctgggggtgacattgcacctggccctcgtggggtcgctgttgccaccccacgcggactccccagctggcgcgcacctcccatttgcctgtcctggtcagtgccctcacccaccttcccacctgaccatgccatggcgggctgcgtgtgtcttactggctgcgactttcgtctgcgttctgtgccctggtccttctgcgccttttctacgcatacactatgtggcctggtgtgcaccctgtcttctgctgttcatccatccttgtgtccgccatggtggcattctttctcggcttggtctccctgctcctggcctctgtggtctggttcatcttgtgtccatgtgacctgacctgtgtcagatgccctgtgcgtctcatgatactgttctcttctcttgacatttctttgtgtcgctcgcatatgtctactagtcccattcgtacacggcagtgtagtatcctgcctatttgcgctaactaaccaacgcatgccttcacagcacacggccagcatgcagcgggttcagccatcgccttgagtgagtgcacgcgcaagcatcaccccatctccatcctgccacgactggcctatgtgtcttggtctctccttcgcgtaatcatcatgtggtgtcttctctgttatcagtcttctggctgctgcaccttggcccagtgtgtggttgtggatccatggagcactcagcctattacttcctgaacttccgtcttttctgacctgcagtcccattatccctgcctcctttacctttatcggctcacttgtgtttccttcgattgccctgctgagcagcgcacacctgtcacttctgcctctgtgcgctcctcgcgccctcgtggcgtttcccctacgtcgacccttcgtctata

SEQ ID NO: 579187 - DNA, 362 bp, Homo sapiens
  misc_feature (8)..(8): n is a, c, g, or t
  misc_feature (40)..(41): n is a, c, g, or t
  misc_feature (192)..(192): n is a, c, g, or t
  misc_feature (203)..(203): n is a, c, g, or t
taaaaganttaaaagtggggccctctggataaaggaaatnngggagagggctgctatttgccttaaaaaacttgtggttcagctgggcgcggtggctcacacctgtaatcccagcactttgggaggccgaggcgggtggttcacgaggttaggagatcgagaccatcctggctgacatggtgaaaccctgtntctactaaaantacaaaaaattagctgggcatggtggcggcacctgtagtcccagctactcgggaggctaaggcaggagaatggcgtgaacccgggacatggaggttgcagtgagccgagatggtgccactgcacttcaagcctgggtgacaaagtgagactccgttttc

SEQ ID NO: 579188 - DNA, 231 bp, Homo sapiens
cttgtagccaaggccgaccatgtacacccacgggtcgacatcgacgtcgaccttggtcttgctgtagcccaaagcggtcgggccgttgacgctggccttggtgtcgatgtcgacgtaccagaccgaggcgttgaccagcaggttgtcggtgatcatgtagtccatgcccagctggccggcgatcccgatcgagtcctgcagtttcaggttgctgaagccttgctgcttgcg

SEQ ID NO: 579189 - DNA, 1020 bp, Homo sapiens
  misc_feature (279)..(279): n is a, c, g, or t
  misc_feature (283)..(283): n is a, c, g, or t
  misc_feature (292)..(292): n is a, c, g, or t
  misc_feature (317)..(317): n is a, c, g, or t
  misc_feature (365)..(365): n is a, c, g, or t
  misc_feature (378)..(378): n is a, c, g, or t
  misc_feature (399)..(399): n is a, c, g, or t
  misc_feature (595)..(595): n is a, c, g, or t
  misc_feature (624)..(624): n is a, c, g, or t
acctacatactcttcatctgtcagcccgattctctagcagtgaatggagttccgtgaagtgctgtgacctgacagcgtagacaagagtacgtatggctattagtacaatgtactgcagaagcgcaccacagcggtgagtatggaccacccataagcgagagtctcacctgacgaaatgcaccttttctggcagtagtactgccacagtaacatcagatcgttcattgctatctccatacgatggatgtcaacccataacagagacacggcgacgcaaanctcntctaagccnactacgtacgctctgtcatcacaantccgatccgtgctccacggcggcaacaccgtctacagtcttcactctncacactattaccnagcctctataatcgtcacgtnatagcaactcacgcactcgctcacgcacatatgaccacaacacacgcacttagtagggacgacatcgtacaaagatcatatgtcgccattcccataagtaggtagttgcttaacgacaactatcagccttgacgatggggacatcgcggaacataatcgaccaaaattggcgcgtacttggcattctagggtcganagagtttcaacccttatggcacgggaccncccatccacggacgctgcacctctggttgcaaagaggacgttaaagcgcccttacgaagccaggcactcactttgacacagggacacctcgttctgtggcggcacgaacagctgttataaccaaatagtttatcgtatcaggtcacccaactaagtaaataagtttgtctaaataaccttttgtgagtttcccttttacaagtgagcacaacgacaagaaatgaccagcaacgtcgaactattcaattaaattgggacattacgataattaataattaaatcaagttattgtacgtcgagaccttgttgacacaaatagattattaggttaaggagtaagacacgtccatgtggatgtagaacaaagtgagaagcattaatgtacttcatacctgc

SEQ ID NO: 579190 - DNA, 946 bp, Homo sapiens
ctgtggagcatgacaggcttaggggaagcttggggactgtgtccaagagcccgctcctaagaaccatcaccacgcactcagccaatctggttctgggccctgattttgcgcacacctccatcgctgttaagcgccattctctgaccccatagggagtggcaatgaagatccctctcactcatgagaagcgaaggctggtatttagcttgtttgatatgtcatacgagacgacgaatagtgagagaacagaacaacacgagcctgagatacacgcagcaagcaggacatgctgaacaaatacgtggagtggatgacaagggggagcctaaggcatttatgacgtctgaaagaaaatgttcagtagctgaatccgcccagtgatagcctgtgggcacgagcagcaagggctgccatgggatactggtacccatctacaaagatctctattacataaacgactgcttctgactaggagaataaacctcgttctgggatctcctgtaagtgaataagcagtttgatgtgcgtaccagtccctgagtctatctcccagtggggtgtgtccagaagcaggcagattgacaggtgttttgccccctccactcgagaagccctgcacgtgcccttcaggataagatggggggcatactctgagttgctaggcagagatcaatccaaccaactagctgggagtcagaaccatgtggataaggaatgtgctctcgggacacacccacaaaaacaaactgttcgggctcggccgccaaatttaaacaaatggtgccgggcccaaggaaggaacggcagggtccaagaacggacagaggggggtcccaaaacccgggccggctgggcacaaaggcggcagtacgagcgggcaacacccgcggaaggggggggaccaacacacaagcgggcaacaggccaccactgggtcgcgccatca

SEQ ID NO: 579191 - DNA, 1689 bp, Homo sapiens
  misc_feature (334)..(334): n is a, c, g, or t
  misc_feature (483)..(483): n is a, c, g, or t
  misc_feature (700)..(700): n is a, c, g, or t
  misc_feature (1057)..(1057): n is a, c, g, or t
  misc_feature (1098)..(1098): n is a, c, g, or t
  misc_feature (1378)..(1378): n is a, c, g, or t
gggcttcagctggtggtttattggacatacaggtaggctctatagcaacaggccgggaggtgtgctgtgcagaagtgtggggagaaaatgtggaaggggtggaggggtggagtgtgttgtgcgtgcaggaacagctgtgagtgtggacggggtggggacagggtgcaaactgtggaagaggccttaagagagcttaaaagaagcaagttagagggccgagggggccagaagtctcggcttctcagagtggaacacaacgatgcccgagtgtgccctatagagggccctataacttcttgtggcgtggcgtggttctcgtgtgacaccccaaagnccgagggttgtgggaagtctccctctgtgggccactcccaaattttttctctataagaggaacactgtggcaacgagagagtttcaccaccacgagggaacagagggaaagcctgtgtgtcaacccctctcttgggcccactctggtgnctctcccagagggggggcccctccagagttccaagacaaatttcctctccctttcttctcccctatgtgagattgtgggggtggggccccacaaagtgaagtggggccaagaccagaaggcgcctctgggggcggtgtgtcccccactatagacagacagagggcgtgtggccacaaacacacgagccccgagtgtgttccccagtgtgagagcgcngttgtgaactcttttcttatcccctgggggggttcccacaacaccatacccagtgtgcccagcgttataacaggcccacaagagtgtggaggctctcctaaacaaagcgcgtgtggggccggggcccaaaaaagtgggaagtgggggcgcctgggggggcacaaaaggggggggggggtgcgcgcacaccagggggcgcccctggcgcagggcaagggggggccccgtgggggcggctccccacttcacacggcggccacaggggggatcacacacaaccacgggcccaatgtgggggtggtcgcgggggcgtctccataaaagaaatcccgggcgaaaaggcggagcagaccggcntaccataaagaaggtatcatcaccgcctcggagaggggggnccccccaacagcattattaaggcgccggataacccccaaagcgcgttttctcttggggtccaccacacgcgtgtgggtcccccaaatatagaggagaacgccgccggagactatataacgagcacagcaacagggaggtccgcgacgccgtcttacaacaccacgcgccgcccgcgaactcttgcgcgacaaaccccggtgctgtacccttgtggggaacccctcgggtcgggaagaggaagcccctacattcgcggctgcgggtgtgggccaccatacngtggggcgacaccatccccccccagacgaggattaatacaggtctccaggggacgatatacacacactcaccggcgctactaccggtgtgggacccaccccactatctcgacgcggcacacaatgtctcggatgatagtaactacaccactacatgtacgcatgcaactgcacaggcagcgagcacgccgagagggacagacgcgagcgcgcgagctccacagccagctgcaccgcaaccatcgcgtcagacacgcaaacagatatgcaacgatccaccaccatacgaatgcatacctccagcgctcgcag

SEQ ID NO: 579192 - DNA, 554 bp, Homo sapiens
acactggacccaagaaggtcatccggaacctggcacctggtagtaggcagcagatcaggtctaagcagcacaacatccaacatggccagccgaaccaggacgtgagatgagatgggtagaacatgaacatcgcctgcatacccgaaaagctcttccctgcaatatggatgtcatgcctgaagatcagcgatgggcgagcccaaccactcgtctgctagatgacatgtgatggctcgcaagacagcccatatctttatgtatgccccgtgagttcaagtccatgccaccaccgactgatactgaggtggatccctgcatccatcaacaagaatgtgcagggagcatgtggaacaaaagaagcagctttacctactagttgcttatggtctctctgcctggacactcacttttgcagagactcgacagtctctggaatggagtgtgggtccaccttaggctctgacttcctaatgtaggaggtggtcagcaggcactctcctgggccttaaaggatgcggcctcatcctcagcccgcgctcatgttgtgatcctgg

SEQ ID NO: 579193 - DNA, 415 bp, Homo sapiens
  misc_feature (58)..(58): n is a, c, g, or t
  misc_feature (218)..(218): n is a, c, g, or t
cttttccccccccgttgggaggagttggctcttaaaaatgtgtgtgatttaagtggtngggcagggggtttccgccacagaagggttgtggttttttggttgcgggggttcaaagatttcccccggaaaaggctccttttttgggttttcgggggggggccccggggggggccccccccttttgttttgaccagcatttgggggggggcacccaaggnttgaaaaaggggggccccttttttttggttggggggcccaggggccccgcggtgggcttttccaaaaaaaccctttgccgggtggggggggaacccccccctttttattttttttttttttttgggggggggggggggcccctttttttggcccgccggcttttcccccccccttttttattttctgtttcccccca

SEQ ID NO: 579194 - DNA, 149 bp, Homo sapiens
atgaatttcaatgtatccgttagcttaactaactaagatcttgctgatatcagagaagggcttctgggcaggctgagcacttgtggtgtgcaacatggtaactctgattaagagaaaccctgagtataacttgggcaatgaaagaacaa

SEQ ID NO: 579195 - DNA, 172 bp, Homo sapiens
acaacgctgacctcttctacaacgctgaccttcttccacaacgctgacctcttctacaacgctgacctcttccacaacgctgatctcttcctatttcttttgcataactcataaaataactaagcattcaggaaagacatatgggcaggaaataggcagagatcagcgttgt

SEQ ID NO: 579196 - DNA, 276 bp, Homo sapiens
aaaatcatggttgactcaggacccatctatgataaaacctatggtggtggagcactcaggttgtttggcttttctcaagaaatggcgtccttctctgacctgaactaccaatgtacagatccctaatcatcaaattgtccattgaaagactgatcataaaccaatgctggtattgcaccttctggaactctgtgcttgagaaaacccccagaatcactgatactcggcttccttcttttatgagcttgaattattggggactcctataacgtgcga

SEQ ID NO: 579197 - DNA, 505 bp, Homo sapiens
gctgttctagaggagtctcaacgtcagcacctcctgtggtcaagcgatactcccacctcaggtttcctgagtagctgggactacaggcgcatgtcaccatgcctgtctaattttttggttgttgttgttgttgcgataaggtctcgctgtattgtccaggctggtctcaaactcctgagctcaagctatcctcctgccttgggctcccaaagtgctaggattacaggcatgagccactgtgcctggcctagtatgggtcattagtattagtaatcattcctaaatgtatatgtaaacatttatttcagtgttaaatattgaagtgtttggtctttatttagaagtttgatgttgtgttttatgaccagaaatatgctgtgaacttacttctttcttatagcagttagcctatgggaaaatgggtttggttctacattattttatttaaagtcataatttccaagatcctatcaactccattaagtgaggacttactgtactgtag

SEQ ID NO: 579198 - DNA, 414 bp, Homo sapiens
  misc_feature (57)..(57): n is a, c, g, or t
  misc_feature (112)..(112): n is a, c, g, or t
ggttaacctggggtttataccccataaagacaattccccaggggataggaaaaattncccccttttccttccagcctagaagaccccccggcacccaacacacccctcaccncccttccttgaaaatataaagtgatgggacagggtgcggtggcctcaagtctgtaatccctagtgctttgggaggctgaggcagatggatcacttgagacccaggagtttgagaccagtgtggtgaacatggtgaaacccttctgtactaaaaatacaaaaactagccaggtgtggtggcacatgcctataatctgtaatcccagcgacttgagtggctgaggcatgagaattgcttgaacccgggaggcagatgttatagtgagctgagatcatgccacagcactccagcctgggatacag

SEQ ID NO: 579199 - DNA, 328 bp, Homo sapiens
ataaacataacaacaagatgttatttaattgcctattacgatctctttctctctcagacacacacacatgtgatgtatgcacaagacacaggcaagcattaacaaagcagtggcctgggcatggcggctcacagctataatcctggcatcttgggacggctaggcaggcggatcacctgaagtcaggagttcgagaccagcctggtcaacatggtgaacccgtgtctccactaaaaatacaaaaaattagctgggtgtggtggcacacgcctgtaatcccagccactccggaggctgaggcaggagaactgcttgaacccaggaggcg

SEQ ID NO: 579200 - DNA, 361 bp, Homo sapiens
gatccacacccggcactatgaagctgtatcgccgctgtaagctggaggagatgggcttcaaggacaccgaccctgatagtcaaacccttcagtttacatggagacatatgaggccacataaggaggacgagttcctaggggaactccagaagaaaagaagaggagatgagacagaatgttcgtccagcgagtcaaagagaatagaagtcggaggctcagaagaggccgagaaagagctgcgcgagaagttggtagccgtcttgaagcaaactgtcgccaggacggagaggaataaactggaggatatggaagaaatccctggatgatgagagtgaatgctttcacatgcaaatggaaagac

SEQ ID NO: 579201 - DNA, 459 bp, Homo sapiens
  misc_feature (247)..(247): n is a, c, g, or t
  misc_feature (254)..(254): n is a, c, g, or t
aggcccacggccagggcgggatccggggatttggggggccgtgggggccgcgggctgggagcatctctaggctccttggctaccagaaaagaagctatgcttcaaagaaaatgcaggacaaagggggggtggacatgagagccccccgaatgcccacgcagaacccagctgttcagcggtctctttttagagaaatagaagtttgtcggcaaaaacagccagggcgttggcagcagggttagaacanctgcctnaggctcctccctgaaggacacctgcctgagagcagagatggaggccttctgttcccggcggattctttgttttaatcctgcgatgtgctttgcttgttgcggggcggatgatgtttcccaacgatgaattttacatccaaagggggataggcccttggacccccattctccaaggcccggggggggggtttcccatgggatgtga

SEQ ID NO: 579202 - DNA, 457 bp, Homo sapiens
gttttggtgggcgatgccgttcgtgtgtgcgcgcgtcattctggctcattctagtgcccttcgggcctcgtacttccttgcccgtggtgtagacgcgggctctagctgcttgtcttgacctgaccttggcgcgtacaactcggtgagtgcgtgcttcttggcgtccatcagactggagtcacgggtctgtcccaccacgaccttgacgggtcccttgttgttcttgggcactggctgggatttgatgactggcttcagttttccttttttgaaagcagtgacaaactcgcggagggtgtcagagtcaaactcctctggctccatggcgaacttcttcccactctcgtccaggatggcggcattgacatcctccccactcccgctgagccccaggtccttcacctccccagcatagtcctcttcgtccgcaatggcaaaggtgtactcagggaagtcc

SEQ ID NO: 579203 - DNA, 806 bp, Homo sapiens
ggcatgcgctgggtcagacctgccagtctaggttgctggattcccgtagatcgctgggcatttgtcgtgcaagcccttcaatcacgggcgcatgcttgtggctggctcactgctccagtaggtctacacgctctggctagcattgctagttgcaacgtgctagcgcttgctggcaaccatcagaatgccctgtgctggtgtgtgtgtgatactgcaacgcggaactactaggcccgattccagcgacgaactatagccgcgcgctggggcacttgatgcggagcgtccttctcgatgaccacagggggacacccagctacagaccatcggatggtccgccatgcacagcacatggaaactgtcatcctaaatgtgggatagattatcttgatcataccgaatccctgaatcaagctatcacattactttataacccatagatgcccgggtcacaataggggcgtcgacaccaaggattagcgtggaagcaattggccttgcctaggtcgagcaggcgtggagagagcctcgaaccagtcgctatagacccctggagaggacacactcagacctttgggcatttcctactagggatcagggcaaataccttcaaggggtagcccatgcgtgacacattcgagttacaagggaccccaagaaactcttcctctccaattgactccactggaacacacagagacaatcaatgcgacgcattggaagcgtaatggcgaaacactaatcctgtacctgattgaactaacaacgaaggcgccccttaagcccattccatggaggagcgtggc

SEQ ID NO: 579204 - DNA, 770 bp, Homo sapiens
  misc_feature (124)..(126): n is a, c, g, or t
  misc_feature (128)..(128): n is a, c, g, or t
  misc_feature (130)..(132): n is a, c, g, or t
  misc_feature (239)..(239): n is a, c, g, or t
  misc_feature (328)..(328): n is a, c, g, or t
  misc_feature (330)..(331): n is a, c, g, or t
  misc_feature (334)..(337): n is a, c, g, or t
  misc_feature (341)..(341): n is a, c, g, or t
  misc_feature (343)..(343): n is a, c, g, or t
  misc_feature (348)..(348): n is a, c, g, or t
  misc_feature (354)..(354): n is a, c, g, or t
  misc_feature (356)..(356): n is a, c, g, or t
  misc_feature (360)..(363): n is a, c, g, or t
  misc_feature (366)..(366): n is a, c, g, or t
aaagcacactgcaacacattcaaggaggaatgataggcaacttcatgaacatttaccagcaagaggggacaagaggactgtggaagggtgtgtcccttactgcgcagagtggctgctattgttnnntntnnncttttctccagcggcctcaggttcttgttacaactgagtccgggttggaggaggtgtggggccgctgccgccaggaaaaacagcactggaggcaatgtttctataantcaaagaagagacagtgtgagaatgtcagccctcaactggaagccgtttgtgtacggggggctggcctccatcactgctgagtgcggantnnccnnnngatntnacagncacggnancctnnnncancatcaagataggcacttaccagagcttgaagcgactattcattgaacgcccagaagatgaaactctaccgataaatgtgatatgtggaattctgtctggagtcatatcttcaaccattgctaatccaactgatgttgtgaggacacgtatgatgaatcagagagtgcttcgagatggcagatgttctggctacacaggaaccctggattgcttgttacaggtgttgccttaatgaagcaaagacacttatcgtattcatccacctgacatcttgggaaatagtggtactctgaatgatatctctaccactattgcttctttatttgtgacctgttcaggagcccacatggcacggaagcaacagaccgtaattggaattaaatctaattttttcctcactcaaa

SEQ ID NO: 579205 - DNA, 290 bp, Homo sapiens
gctctcatggttacaattctcatctgagcaggaggaagcacgacacggagtgagagaactaaagaaggtgttggcagacaagccttgtgagcgcacacattggatccagtcctgcaagcagaggtggcgatttgttaaagggccaacagtatccaacgttagggttggagcacgggtgctgggacctggggcactgtgggactgggacacttttatgttaatgctctggacttggctccagagactgctccagagttggtgacacagctgtcccaatgacccctctgagt

SEQ ID NO: 579206 - DNA, 167 bp, Homo sapiens
  misc_feature (77)..(77): n is a, c, g, or t
aagatggaatctcactgtcaacccagcctggagtacagtggtacgattttagctcgttgcaacctccgccttccagnctcaggtgatcctcctgccttagcctcctgagtaactgggaccacaggtgctcactacacccggctaattattttttgtatttttggtaa

SEQ ID NO: 579207 - DNA, 1052 bp, Homo sapiens
  misc_feature (124)..(126): n is a, c, g, or t
  misc_feature (128)..(128): n is a, c, g, or t
  misc_feature (130)..(132): n is a, c, g, or t
  misc_feature (239)..(239): n is a, c, g, or t
  misc_feature (328)..(328): n is a, c, g, or t
  misc_feature (330)..(331): n is a, c, g, or t
  misc_feature (334)..(337): n is a, c, g, or t
  misc_feature (341)..(341): n is a, c, g, or t
  misc_feature (343)..(343): n is a, c, g, or t
  misc_feature (348)..(348): n is a, c, g, or t
  misc_feature (354)..(354): n is a, c, g, or t
  misc_feature (356)..(356): n is a, c, g, or t
  misc_feature (360)..(363): n is a, c, g, or t
  misc_feature (366)..(366): n is a, c, g, or t
aaagcacactgcaacacattcaaggaggaatgataggcaacttcatgaacatttaccagcaagaggggacaagaggactgtggaagggtgtgtcccttactgcgcagagtggctgctattgttnnntntnnncttttctccagcggcctcaggttcttgttacaactgagtccgggttggaggaggtgtggggccgctgccgccaggaaaaacagcactggaggcaatgtttctataantcaaagaagagacagtgtgagaatgtcagccctcaactggaagccgtttgtgtacggggggctggcctccatcactgctgagtgcggantnnccnnnngatntnacagncacggnancctnnnncancatcaagataggcacttaccagagcttgaagcgactattcattgaacgcccagaagatgaaactctaccgataaatgtgatatgtggaattctgtctggagtcatatcttcaaccattgctaatccaactgatgttttgaaaattcggatgcaagcgcaaagcaacaccattcaaggaggaatgataggcaacttcatgaacatttaccagcaagaggggacaagaggactgtggaagggtgtgtcccttactgcgcagagggctgctattgttgttggtgtggagctgccggtctatgacatcaccaagaagcatcttattctctcaggcctgatgggagacactgtgtatacccacttcctctcaagcttcacctgtggtctggcaggggccctggcctcaaaccctgttgatgttgtgaggacacgtatgatgaatcagagagtgcttcgagatggcagatgttctggctacacaggaaccctggattgcttgttacaggtgttgccttaatgaagcaaagacacttatcgtattcatccacctgacatcttgggaaatagtggtactctgaatgatatctctaccactattgcttctttatttgtgacctgttcaggagcccacatggcacggaagcaacagaccgtaattggaattaaatctaattttttcctcactcaaa

SEQ ID NO: 579208 - DNA, 967 bp, Homo sapiens
  misc_feature (124)..(126): n is a, c, g, or t
  misc_feature (128)..(128): n is a, c, g, or t
  misc_feature (130)..(132): n is a, c, g, or t
  misc_feature (239)..(239): n is a, c, g, or t
  misc_feature (328)..(328): n is a, c, g, or t
  misc_feature (330)..(331): n is a, c, g, or t
  misc_feature (334)..(337): n is a, c, g, or t
  misc_feature (341)..(341): n is a, c, g, or t
  misc_feature (343)..(343): n is a, c, g, or t
  misc_feature (348)..(348): n is a, c, g, or t
  misc_feature (354)..(354): n is a, c, g, or t
  misc_feature (356)..(356): n is a, c, g, or t
  misc_feature (360)..(363): n is a, c, g, or t
  misc_feature (366)..(366): n is a, c, g, or t
aaagcacactgcaacacattcaaggaggaatgataggcaacttcatgaacatttaccagcaagaggggacaagaggactgtggaagggtgtgtcccttactgcgcagagtggctgctattgttnnntntnnncttttctccagcggcctcaggttcttgttacaactgagtccgggttggaggaggtgtggggccgctgccgccaggaaaaacagcactggaggcaatgtttctataantcaaagaagagacagtgtgagaatgtcagccctcaactggaagccgtttgtgtacggggggctggcctccatcactgctgagtgcggantnnccnnnngatntnacagncacggnancctnnnncancatcaagataggcacttaccagagcttgaagcgactattcattgaacgcccagaagatgaaactctaccgataaatgtgatatgtggaattctgtctggagtcatatcttcaaccattgctaatccaactgatgttttgaaaattcggatgcaagcgcaaagcaacaccattcaaggaggaatgataggcaacttcatgaacatttaccagcaagaggggacaagaggactgtggaagggtgtgtcccttactgcgcagagggctgctattgttgttggtgtggagctgccggtctatgacatcaccaagaagcatcttattctctcaggcctgatgggagacactgtgtatacccacttcctctcaagcttcacctgtggtctggcaggggccctggcctcaaaccctgttgatgttgtgaggacacgtatgatgaatcagagagtgcttcgagatggcagatgttctggctacacaggaaccctggattgcttgttacagacatggaagaatgaagggttttttgctctctataaaggcttttggccaaattggttgagacttggtccttggaatatcattttctttgcgacatacgag

SEQ ID NO: 579209 - DNA, 833 bp, Homo sapiens
cccacgcgtctgaaagagtgaagaggctcatgctgaagattcgagtcattgtatcactacatgtccgtgcaagcaacgtcaaatgatataacgtctcatctggagatcaatttgggagaccttggccgcccaggacgtggcggcaggggaggacgaggtggacgtgggcgtggtgggcgcccaaagcgtggcatgaggaccgacaagtcaagtgcttctgctccatgatgtggatgatccatgaggcattcccagctctggcttaacgtggagtgccataagacaaccctggttcctttgtgaacccttcgtgttcaaagcgttgggcatgcttaaggattccaaacgactaagaaattagaacaaagaaaagagctgtcatgtcataccattcacacctaaagacggaatttaatctggcttctaaaagatgaacttctcccgctacacagaacggtaacacacatatggtagctcagtgtggtatttagaaatgtatggtagcagggatgttttcataattttcagagattatgcattcttcatgaatactttgtatagctgctggcgaaatatgcattgccaacacttgaaatatacggttgtgaacacgttgtgtaaccagtttttaacagctatccagcttcatgggaggttcggacattacagggatttaacgacagttccccccaataacaaactgttcttaacatattggacatacctggtttaaataccgtgtttgcatattcacacagtggcaactgggaccttgttcaccttctggttgtcaattttatgctgggtggactctacccttttggttttaccgc

SEQ ID NO: 579210 - DNA, 418 bp, Homo sapiens
  misc_feature (62)..(62): n is a, c, g, or t
  misc_feature (65)..(65): n is a, c, g, or t
  misc_feature (81)..(81): n is a, c, g, or t
  misc_feature (132)..(132): n is a, c, g, or t
  misc_feature (146)..(146): n is a, c, g, or t
  misc_feature (163)..(163): n is a, c, g, or t
  misc_feature (165)..(165): n is a, c, g, or t
tgattcacctcgttcccgaactaaaacttctgcgctttaggaaaaaagcaagcgttccaatntgngaggccctcccccacnccgtcccttcccaggagaagaaagaaagggctttgtgtgtgcggtgagggntccgttcatcgagntcaaaaatgcacagcgncngggggcccggaggcgtggggcgccgggccctgcccaccccttttccccgggccggcggcgagtcgggaagctggtgcgggaaccggggccacggggcgccgcggcccggcagccaggaggaagaggatgctgcgccgccggggaccagagggcggggccgggccgcgcggacctcggcgggacccagcgggcccgggcgggcgcaccagccgccctttgtcctccgcctccgggtcgcgggggccgcggccgc

SEQ ID NO: 579211 - DNA, 138 bp, Homo sapiens
gctggatgcgtcgtgggccagtatcggagccttgcagcgacaaaggccagaggcgtggtggtgcagttcgacggggaaacagtgagcagaacatcgagtgtgggggcggctatgtgaaggtggttcctaatagtttgg

SEQ ID NO: 579212 - DNA, 471 bp, Homo sapiens
  misc_feature (41)..(41): n is a, c, g, or t
  misc_feature (83)..(83): n is a, c, g, or t
atccccaaggccccacccccggtctgtggaaaaattggctncccacgaaactggtcccgtggtgccccaaaaatattggggtnatggttgttcctagggtgtagacctatgaaaaagatatgccattgtcctcccatgaacctaaaaggcaaggtgattttaaacaatttagatgcccaaacaaagaaacccaaaagcttcccaaagtaataaatgatagagaaaggaaattgttacatcatgtgcccaaattagaagcaaatctaaacttcttatcatgtactccaccatctgatttgtataagtaattggggaaagaaaaactcacaatataaaacaagattgactagttctagcagatgacacctgtaaatagaatttttactagttgaaattctgatgtgaaatgaagccattattattatcacaataaagtgttctttttagttctttttttaataaaaaaaaaaa

SEQ ID NO: 579213 - DNA, 435 bp, Homo sapiens
attcagagtagccctagttctcacaacactatctgaattttctacatatcacatcacagactaatattgtttataccagtcttgtttcctcctaataaaatataagtgccatgaaagaacagaccttgtcttttcctaaacaggtcctgacacctcttagatcctcagtaaatctttgttacatgaatgcatttgagctttcactctcttggtctgaccttcccacaatgatttcccaagggcttcacatcaggatctacaggtaagaagaggattaaggaaggccaacttgacccttcggaatgggatccacaagggatgggcaccggggatttaacacgaatttggggtagaaataagggcctcttgggcgttaagagagccatcaaacaagggcgccttttttttcttaatccgggccctgtgtccggtcct

SEQ ID NO: 579214 - DNA, 650 bp, Homo sapiens
  misc_feature (322)..(322): n is a, c, g, or t
  misc_feature (325)..(325): n is a, c, g, or t
  misc_feature (408)..(408): n is a, c, g, or t
  misc_feature (427)..(427): n is a, c, g, or t
  misc_feature (435)..(435): n is a, c, g, or t
  misc_feature (444)..(444): n is a, c, g, or t
  misc_feature (475)..(475): n is a, c, g, or t
  misc_feature (478)..(478): n is a, c, g, or t
  misc_feature (563)..(563): n is a, c, g, or t
  misc_feature (578)..(578): n is a, c, g, or t
aagagatgcagagggaggaaatacagaagctgatgggccagatacatcagctcagatccgaattacaggatatggaggcacagcaagttaatgaagcataatcagcaagagaacagttacaggatctgcatgaccaaatagctgggcataaagcatccaaacaagaactatagacagaactggagcgactgaagcatgagttccactatatagaataagatctttatcaaacaaagaacacattgcaaagcataattaaagatcgagactaataaattcaaaaactcaagaatcagcttaccaataaaactttaagcaatancantcagtctgaattataaaatctactgcatcaactaacatagactctcatccataaacagaccatgctggagagtctcaacacanaaaagaactccctagtctntcaactgnagcacctcnaacaacagatgaactccacctctagaaatantantaatgggtcttcaattaatatatcttgaattgacaatggttaatgcacttctctacgaaatagtcctattctttgtaatacacanaaactaatctagcangaatgtactgaaaaattttcaaaactactagttcaatgtatcaatttataattcccctggaatttttctccg

SEQ ID NO: 579215 - DNA, 127 bp, Homo sapiens
aagtccgggaaggcgaagaacagaatagagaagatagggaaattagaagatattcacacacttttagaagaaaaaagattaatttaaacctgtaaagtaggcagctcaagaaaaaagacaagctagg

SEQ ID NO: 579216 - DNA, 135 bp, Homo sapiens
gtccgtctcccgcctcccggagaggatccggagactggaggaagagctccgcagctgaagtccgattccaacgggccggaggaggaacggaagcttcaagaaacttggaaggcctttgaaggaactcaagcaaaa

SEQ ID NO: 579217 - DNA, 187 bp, Homo sapiens
  misc_feature (18)..(18): n is a, c, g, or t
  misc_feature (20)..(20): n is a, c, g, or t
  misc_feature (46)..(46): n is a, c, g, or t
  misc_feature (160)..(160): n is a, c, g, or t
  misc_feature (171)..(171): n is a, c, g, or t
caaagactccctgatttntnattggttaaggaagcaaagctttgtntaaaaacttggggtccgcagaaaggaacattaaggtctggccaggcccctcaggaagaaactgagagcaaagaatggaggtcagagtttagtccctggtgttcccccttatctnacgtctgtttnaatccatttggtgggg

SEQ ID NO: 579218 - DNA, 258 bp, Homo sapiens
agatgactaatattggttacatcccacatgatatagcaaaatcttctaaacatcctcttcaaaaattggtgctgaatatcttccatttccccttcagatcctatctctctctacccttctccaccctgtctgtgccttaggaggttgacctgcattgaccacattcattagggcttcctgtctgtggtcaatggcaacattgatagcagagagcaacgagcagggcttgcagatccccgtggctcatatatacctgac

SEQ ID NO: 579219 - DNA, 171 bp, Homo sapiens
tgagtcatcaactgacaatgcagtgtacatgccagggcagctggacatgtgcggtccttctcctgccggggctatgtatcatatggtcgctccttcagctattattcccctgacatatcagcccccaagtatagatctgatgcaatttgacgggcaaaagaaaaaaaaaaa

SEQ ID NO: 579220 - DNA, 685 bp, Homo sapiens
cttgatctgcacccgcatgtagctttatctgtaccgatcacaagcccacggcatcgccctgaggacgcggctccacgatctacagggtctaacgggcggtcctccgcgacgattctgactacgacgctctctggccaggctgtaagatctgaatggacatctactgggactttactcgactacatcatgaacatgacctctgactggcttgagagttctgggagagttttctttgtcgaaagtgaacatgagtgcttttctcactttcggagaagatgtttaaatagtgctgttgtaacttttaatagtcctgtgtatcattcaactatttttcttgcagtaccgaggcacattcgaaaagatggaattgaagtcgctttgcttaacgctgagtgaatataaagagtagtttgcagctgtgtggtagtggattaattagcagccttagctctgaggtgtctgggtctagagttacttatttttaccaagcattttcagcctccattctggatgctgtctacacttaacaggtcttagctgtttactttttagagaataatattgttcattgcattgctgaggattatgaacctatttttgcagaaggacctgcacataagtgcatctgtgaatccggcttaaaaaaatggattcttttttgagtaaaccttattatctgcttagt

SEQ ID NO: 579221 - DNA, 901 bp, Homo sapiens
gggggcgggacgcagcgcccactaagtaagggaggcgggtgcatcggagtttatttatattagttgttaatcaaagaaaaacatatacatagttaaaaagaaatcaaataatgctcgcgggattggtagtgaaaaccatcaaacctctgccttttctctacccaccccgatttcatttttccagagacaatcacttttaacccttagcagtttcttattgtagtttttgttttgttttggtttggtttggtctgaaaagacatgtgtatactgcttgttggggacttttctacaacagaccttgatggggttgccggcattacacaatctctcttatgtgccatccttcgaatggtgtggaggtatttgttttaaagtcggggtgtgaaaattacataaggatgacgaactttgtatgggtgatttggttaactgttaaatatacggtcgggcttgtgagatggaataggtctgcggggagtaagacgtgaagggggggagtagaaaaagaagaagtgtcagatcggtaatgtgtgtccctgctcttctgaaagaaagagcgtgcgtaggttatagtggaaacccgtagtgtctctcgacgcgtcttcatggaaatgtgttggctggagtgctgacggagagagatgttcgtgtaaccgtgttgtgggtgggcggtacgtgtgttatggcgcccgttcaacttagttgtatggtcgtgggggggcgttgtggttgacgatgcgggttttatgacaaccgtagcttgtgctaccgcggcacggtgctgtttgttcgcgcacttagagatgcaagtgtttgaatttttgtcattcgtggcggacctgcgccatcgagggactcgcggatgacttgtgatagcgctaatctgtgttctttcgcg

SEQ ID NO: 579222 - DNA, 275 bp, Homo sapiens
ctaaggacttaggcaatcttctgctgcttgtgctgtaaccctcaccagcctgggcagcagcaagaaactatttattaaaaacttaagatgggccaggtgcggtggctcacacctgtaatcccagcattttgggaggccaaggtgggtggatcacttgaggccaggagttcaagaccagcctggccaacatgatgagacctccgtctctactaaaatacataaattagccgggtgtggtggcaggcgctctgaaatcccagctactcaagaggctg

SEQ ID NO: 579223 - DNA, 858 bp, Homo sapiens
aaacactggttgaaagccttaacaatagactaaaccaaccagaagaaagatttcagaacttgacgactaatctttcaaattaacccaatcagaaaatgggcgaataggaacagctccggtctacagctccccaacggtgacgacagccacaagaagggtgattctggatttcccatctgaaggtccggggttcatctcactaaggaatggccacaaaatgggcacaggtcagtgggtgcgcgccacatgcgtgtaccgaagcagggggagggattggctccctcggggaagcgccagggggtcagggagattccctttcctaatctcaagaaagggggtgacaggagggtacctggcaaaatcggggtcactccccaccggaatattgcgccttttctgacggggcttaacaaaacgggcacaccacggagaattatattcccggaacctgggctcagaaggggccctacagccccacgggagtctccgcctgaattggtaaacacaagcagtcctgagaaatcaaactggcaagggaaggcagcggaagggtgtgggggaaaggggcgccccggccatttggcccaaggcttcccttaaaggataaacaaaagcgaagccaagaaaacctgggacctggtggtgaaaacccaacaacaaggtcacaagggaggcctggccgtggcccctggtagagggcacccccttggggggggcaggggacccaaacgcaaacgaacagtgaacccttgtgtcgaactataagggtcccggtcagacagacttgaagacagcgagggttttccaatacgacactggtgatttgtgacgggtgaagggcccccagtgggtccggcc

SEQ ID NO: 579224 - DNA, 262 bp, Homo sapiens
  misc_feature (2)..(2): n is a, c, g, or t
  misc_feature (5)..(5): n is a, c, g, or t
  misc_feature (22)..(22): n is a, c, g, or t
  misc_feature (24)..(24): n is a, c, g, or t
  misc_feature (47)..(47): n is a, c, g, or t
  misc_feature (50)..(50): n is a, c, g, or t
  misc_feature (58)..(58): n is a, c, g, or t
  misc_feature (96)..(96): n is a, c, g, or t
  misc_feature (116)..(116): n is a, c, g, or t
  misc_feature (134)..(134): n is a, c, g, or t
  misc_feature (142)..(142): n is a, c, g, or t
  misc_feature (182)..(182): n is a, c, g, or t
  misc_feature (189)..(189): n is a, c, g, or t
  misc_feature (200)..(200): n is a, c, g, or t
  misc_feature (203)..(203): n is a, c, g, or t
  misc_feature (208)..(208): n is a, c, g, or t
  misc_feature (219)..(220): n is a, c, g, or t
  misc_feature (224)..(224): n is a, c, g, or t
  misc_feature (251)..(251): n is a, c, g, or t
  misc_feature (253)..(253): n is a, c, g, or t
antgnagcccagggaggcggancnggccccagaaggacacccgcctngantttcccgnagcccggcccgggcccttgggagcagaacagcctttgnaggttgacaggaggggaccntgcgagcagacgcgcgcnccacacancagccccgccccggccttttgggagccggggggcagaggnctcggancccaggagggnctntctanccacagctctnnaatnttcaagagcaacaggaatgtacacatntnaggggccag

SEQ ID NO: 579225 - DNA, 113 bp, Homo sapiens
tgaagatggcatgaatgatcaggatttaccaaactggagtaatgagaatgttgatgacaggctcaacaatatggattggggtgcccaacagaagaaagcaaatagatcatcta

SEQ ID NO: 579226 - DNA, 200 bp, Homo sapiens
gcatggaaggtacctggttgtgctgtgggaatcactggcccctccttggtttaaaaagcacaacacatcatacatatttaccatgaccagaagcgctggccccaatgtctccccacatctggtcgaggggaacctcgctggccatgcccacaaatgagagagaggagagagcctgccccagaacagagaaccacacgggt

SEQ ID NO: 579227 - DNA, 280 bp, Homo sapiens
gacgttggcttgatcattactaatatggaacgttacctggcgttagatcgtcgtgatacatgttagttttacccttgtgaaaatgtgttgccgcaatgataatcctgtctcagtacgagaggaaccgcaggttcagacatttggtgtatgtgcttggctgagtgagccaatggggcgaagctaccatctgtgggattctgactgaacgcctctaagtcagaatcccggccaggcggaacgatacggcagcgccgcggagcctcggttggacttatccgag

SEQ ID NO: 579228 - DNA, 534 bp, Homo sapiens
  misc_feature (46)..(46): n is a, c, g, or t
  misc_feature (108)..(108): n is a, c, g, or t
  misc_feature (320)..(320): n is a, c, g, or t
  misc_feature (368)..(368): n is a, c, g, or t
  misc_feature (379)..(379): n is a, c, g, or t
  misc_feature (447)..(447): n is a, c, g, or t
  misc_feature (450)..(450): n is a, c, g, or t
aggacggtaatgagggcatgtgagatgacatgacatacatcatgtntccccattactgcagctcatatacaccaatatgtgttgtaaacgagtgaagtgtgcttgtancccctcattgcatgaggtattgatcaagtagaagatcgtgcttacgtaggttgcgattggtgtgatatggattttagccatatgttgttattagatacacaggtttcaattagcatattttttgcattgtgtagttagatttagtgggttgtggagattcatgattagatgatgtgtgtcgatttccccatcgacgccaacatctcttgttngaggtttgcatctagcacatgtggtgcttaaggagtattagagggttnggcttagcatngctcacatgtttgattaaccctttgtgcattcatagagagggaacccatcaacttagggtttccctangtntcattagttaattgttgctcttagatatcgtggatgaattatgtggtatattattcatggttcctaatgtttcacctaggtatt

SEQ ID NO: 579229 - DNA, 212 bp, Homo sapiens
gcggagcgagccgagaggacccgagtggggccgaggccagtagccccggggcctgagcagaggccgtagcttgcgccggacccgggccaggcggagccaaagatgccggctctgctgcgcggccccgcaccgggtccgcgggctagcctgtacagctctcgtcccgttcccgcatacgtgcgtgctggtcggtgcgtgaggcggcccggtat

SEQ ID NO: 579230 - DNA, 305 bp, Homo sapiens
cggtcctactttccacaggctcattcaagaacaaaaattttggttgatagaagtccaatgtattgcctttttactctatggatcatttcctttatgtcatgtctccacttaagactaggtcatgaacgttttctcctaaaattttcttccgaaagttttagttttacatgttacatttgagcctataatccattttgagttaactttttataaaaaggatgatacttaggcagggtttttttttccttttgcctatgaatatccaactattccaacaccatttgctgaaaagactatcgttcctc

SEQ ID NO: 579231 - DNA, 510 bp, Homo sapiens
aggatattaggcgcgtactgagtggtcaccaaccgattcgaccagttatttgacgacagaatcggaccccttcgaggtgctgaagtgcagcagagaacacgaaaaaagaagccggcggggacggtgttgggggccctggggccaagagcgcagctcaggccgtggaccagatcaaatccaacgcggaaggcaaacagctgcgcacggagtcccagaaagaccgcaagaacccgctgacccccagctgttggcgtggttgacaagacagaggagacgcagccgcccgtggtgctaaagaaagaaggactaagaccgagttggaagaagacctgatcaacaacttccaggggtgaaggggccaatacttgatagaagaccagaaaggcgaccacctcgtgaacgaagatacgaaaagccactttgaagacaggggtgaaggaggcgcatttaaggtggatagacgataattgaccgacctatcgaggtcgtggtgacctggcagaggcgagg

SEQ ID NO: 579232 - DNA, 129 bp, Homo sapiens
tctcactccagtctgtggtgccggtctcccaagttcagtcaggctgtgccatgcctgagagcccccacaaagacggagcatgcggaatagggtggcagctcaagccctaacatacagggatcctgcggc

SEQ ID NO: 579233 - DNA, 113 bp, Homo sapiens
tacgggtagaggataagtagagacagatagggaccagagactcctcctgaaggactcctacctagacccctggtgatagtggtaaccaagatgatggtcctcagcagcaccac

SEQ ID NO: 579234 - DNA, 436 bp, Homo sapiens
acatgtagtcaaacagttatcttttccttgagggatccaattataaatggtttatatttatagctcaaatttacaggcagtgaaaagaaaaagaggaaggaagaaaccccatctcagtgcaatccatgtacagccaccacgaaacaatgagaatgtaatacattcataagcacaagtgaagtgaagagcatggcagacacacagatgcaactgtgaaagttccttttcttaagaaatgcaaggcagcaggacttcttaattacttacttgaagaaatattagacaaagttcattcaatgccagaaacactcatggatgagactacttcagaatcagactatgaagaaatcgggagtgcacttttagactgtagattgttcgacgacacatttgtaaattttcacagcagccatcgagcaaaaaaatacatgcatct

SEQ ID NO: 579235 - DNA, 80 bp, Homo sapiens
accgaggacacggccgtgtattattgtgcaagagatggcagccgagggaccagccggattttgatgtttggggccaaggg

SEQ ID NO: 579236 - DNA, 433 bp, Homo sapiens
  misc_feature (378)..(378): n is a, c, g, or t
  misc_feature (388)..(388): n is a, c, g, or t
  misc_feature (427)..(427): n is a, c, g, or t
gttggaaagggctgggattttcagaatagactttcttatatatctagggtagaaataagtaaaaattcctgaagatttgtcattgcccttctccacatatgttaagcattatcttctctttcagtctgattttaccagtttagaatgccaaaagggacatagcttaactggtgggcttttttgacctgcctgtgtttggagggcacggtctttcaacctgccatactgaaactcctgtgtaggacatcttgacacctttatgggttcaggattaataggaaccttattttagccttccatcccccatagtttcacggtctctagtttatttgactccggaaaatggacttccattttttgaggggtgaggacttaccnttcaggcccntccccttgttataaggagttttaggtgttgggccggggnctgggt

SEQ ID NO: 579237 - DNA, 186 bp, Homo sapiens
tccactccgcagaccagcacaacctcttcccctacaactagcacaacctcagctcctacaaccagcacaacttctgcccctacaaccatcacaacctccactccacagaccagcatatcctctgcccctacaagcagcacaacctctgctcctacagccagcacaatctctgcccctacaaccagc

SEQ ID NO: 579238 - DNA, 385 bp, Homo sapiens
taatttcagtgcgcgggaacgggcgtgaagtggttatgattgcatggccactcggtctgacaactcaccaacggtggagcagatcctggaggatgtgcggggtgcgccggcgaggatccagtgtatcaccatcctggccccggaagacccccagttcccttcaggataggatggaggatgcggaggccccgggagagcagtctaccagcaaagccgggcctacgtaggctagccaaccagacggcttgcaagcaggcgggccacgtgctgaggcagaggtgtagagcctccatgcagcagagccggacgaggacctggagacgggaggttaggcccagatagaagcaggcagcattaaccggcagccgaggctgactcctacaag

SEQ ID NO: 579239 - DNA, 252 bp, Homo sapiens
gggggttttttttttttgggagggggggttccccaaaaaaaagctttttttaaaagtggggccccctttaaaccccctttgggtatagggggccttgcttttccaaagccctaagggcccggtttcccttttgggggggggattttttttcccggggggggtttgttttgttttccgggccccccggggaattgttttttttttttttttttttttggggggttaccccccaaaaaaatttgttaaaaccca

SEQ ID NO: 579240 - DNA, 1048 bp, Homo sapiens
cagtaacacataggggcaggtgggcaggcctccgccctcctcccctactccaggcccactgagtctcagcccaggagccaccgagatctcccaagcaccatggtccgataccgcgtgaggagccgtgagctgaacgctcgcacgaggtgtactacggcacgtcgatgttgcatggtggcaacgagcaatggatcaccacggccacgaggagcaagggctgagcccggagcacgtctaggtctacgagaggatccatggaccagtctcactaatagggcgcagagcacggctctcgaacggaaggctgcaccgtgaatccacacggcggcatggatcgttcctgcagaaggctgcatcaagacgcatccgtgcaggcaccggaggaggccctcgcacgagggcctgcatgacccccaggaagagcaacattggcgagcaaaggcaagcatacacgctatcccgtgggagcccccctcgggcgcccacaggcatgagagagattaagagaaaaaaatcgtttgccgcgaccaatcaaccacacgtggaggtcccataggcaaactttcacccttacgagtcacatattgcttccacagtcccacccaagcgtgcgacagctttacgggaagacagaggatccagcgcttggctcccagacgaataagcaacccggcacgactgtgaggggcacaaataaggcaaaaggtttccgcgcccgttcaactaattcccaaggcgtttggcctgtccgaaataggcgccccttggggaggttttggggcgccgtgacccctggactagggcaaaacagtggccccccctgaagcacaaacggaaaattccagtggcacgcctgtggtacacacttggcaagacccaacaggaaaaggggttcccaagcccagttgtgcctcccgatggcataacagtagtgcgctgttgtggaactcggaaacgggcgaacccaaccaccacaacatgataaacaacaaaccagaccaacaaccaccactgggctcacgatcaaatccggcaccaaaagactcgg

SEQ ID NO: 579241 - DNA, 1361 bp, Homo sapiens
  misc_feature (387)..(387): n is a, c, g, or t
  misc_feature (400)..(400): n is a, c, g, or t
  misc_feature (425)..(425): n is a, c, g, or t
  misc_feature (488)..(488): n is a, c, g, or t
  misc_feature (533)..(533): n is a, c, g, or t
  misc_feature (541)..(541): n is a, c, g, or t
  misc_feature (562)..(562): n is a, c, g, or t
  misc_feature (571)..(571): n is a, c, g, or t
  misc_feature (573)..(573): n is a, c, g, or t
  misc_feature (586)..(586): n is a, c, g, or t
  misc_feature (601)..(601): n is a, c, g, or t
  misc_feature (650)..(650): n is a, c, g, or t
  misc_feature (669)..(669): n is a, c, g, or t
  misc_feature (691)..(691): n is a, c, g, or t
  misc_feature (696)..(696): n is a, c, g, or t
  misc_feature (709)..(709): n is a, c, g, or t
  misc_feature (731)..(731): n is a, c, g, or t
  misc_feature (747)..(747): n is a, c, g, or t
  misc_feature (757)..(757): n is a, c, g, or t
  misc_feature (759)..(759): n is a, c, g, or t
  misc_feature (780)..(780): n is a, c, g, or t
  misc_feature (845)..(845): n is a, c, g, or t
  misc_feature (901)..(901): n is a, c, g, or t
  misc_feature (936)..(936): n is a, c, g, or t
  misc_feature (1014)..(1014): n is a, c, g, or t
  misc_feature (1019)..(1019): n is a, c, g, or t
  misc_feature (1036)..(1036): n is a, c, g, or t
  misc_feature (1044)..(1044): n is a, c, g, or t
ggcaggtggagagagctctgtatgtagcacctgctgctaatggccattggtatacaacgttagatccggtgtgcttgggacgtgctcgtcttggctcatgtgtgcatgcgtgctgcatcgggctcgcatagtatcttatccgcgctacatgatgtgtcctgcactgcatcatcctgcacaagacccgtactgatgcccgacactcagtctgctctggcattccttggcgtattatcgcctcctggggtatcagcttggagactctctgagcttagtcttgcgcaccataaccatagctcgaggagcgcgatctctcacccgaacgtcccagaccggtagccgagataccaccatcgacaagagagccaggagcaatagagtaaattngcccggccgctgntcaccactgctcgtatcataccatnttgcactttctaaactcctatcaagcccatggcgctgagtagccaaaaagcgcatacggtgcnattgcgacctctttcgcaacagcaagggtattgcttaggtagctnttggagangaacctcagagacttccagcngcccactcntntgctcttccttcngcccatggaggaaantaaacttatttgtgtgatcccggcgcggcacggatccttaagtgaatcnctaccaccctacggctgantgtaagcttcctctataaatcncttcncccgtcctctccntgatgacggtttggtgtgattngccaacttccgtactntgtcgtgtgncnggtcggtaatggcctcggtcncgttcactcggtgtgcaataggcgttgactgtgcgaacacgtcataccgccgaagaaccatggtnctttggcgcccggaggagcaaaggcgctttcttcaatgagcaatcggccccgatgnctcgccacgaagagagactttcgaacacacgaatngctgcccaggagggcatgaactcgaatgacctaaccaggtggcaaggctggtgtgcctccgaacacccaaggaacttntattnccaaccccaatggaatngcctccancctacatccctaaccatctactccccctgtctccgatgaacatagtgtattgcaacttcgaactagaaagcacgtgcctttggtccttgaacccttcttgtgttttccccttgttgccatgtttctgacgggttggagaacatacagcacatgcggaaaatgggcacgatacaaaagcgaaatgaaagggacgagcaccgttccggggttaaacaagggcccagggccaggaggtaatatttagggaaaatcctttaaccaactaacgtggctgcttgggacaaactcgggcaaaggtattccttgggcgtggttga

SEQ ID NO: 579242 - DNA, 278 bp, Homo sapiens
tatgatatcgtgaggaagtatttcgagagagactattaataaattttattaagtataaggtgatcattgctctattattagttatggtcatctctatactgtgttaattataaattaaaatttagcataggtatatacatatagggaaaacacatgtcatcatcagggttccatcatggtctgcaatttcaggccaaccactggcgggctccagagctcatctcctctgctttcccacagcgggggccctatcgtcatcctcatactcccacctcagg

SEQ ID NO: 579243 - DNA, 1495 bp, Homo sapiens
  misc_feature (529)..(529): n is a, c, g, or t
  misc_feature (604)..(604): n is a, c, g, or t
ttttgatgatggcggatagctgtcaggagacgtctcgtgcgcgtcgccatggtccgacgaaaagtcccaaggaacggagtcacagactgacgaacaaccgactcactattaacttcgcaacggtggccgcgggcagcgactgggtctctgtcgcgtgcagctttaacgacttaaccgaggcatacaccaccgttaggctacaacctacattgataaggcctacttgtgcaatcgaaccagcggcacttgttccacactgacgagctagaactccacaacttccggatgcttgagcgcggccaacccaaatccacactggagaaccaagacagcgaccctgtgccacaggttgtgcaacatggcacgagactgcacaccgactatcgaaccttgacatgttgtcccgcaaccgacgcaacgcaccgggcgcacgcgtcgctcgtaccctggaccatgcaggggacacccttcgccctctcagtctgtacactctcacgcacaacgtcctggattaccgtgtactacacgncgaagcctacacggaagttctagctactttccgttgcacaacttccacggcacacaaacccttggccaacacagngctcggcggctctagccccagctccgaaccaacgttcccttggggacccgtaacataaacccccggcgtacatacggcttctgtacgccattcgataattcatcctttattgcacgttcgtgtgccccgcgcccgccgtgttgcgccgcgccaaagtcgtcccccgtgtcttgtaacttgcgcgccttaaggccacgtttacgcacggcggcgctcacgaccccggtaggggcgctcaattcagcttggttgggcccgacacaacagcggcccgtgtgttacgcttctggccacgacgtgcgccccactgcgctccgtcgcactctgtgctgctccgccaccgggcgggcacacgctccgtggtgtccccccctgccgctgcgcgccgctcagtagcccttcagcatgagaggacacagttcaggacggaccactctacccaccatcagccgcgcggggcaccaacacccgcgcgtcacatcacggggtgcgcgtccaccaacactaacatatctcacccgccggcaacaacttccccgaacggagcagcccaacaccaatctgttccacacgcccccgccccaattcttcacgcaccacccaatcaatcaagcgacctgggcaccacatgctgcacgccccctatactctccagcacccgcctcgctgtcacacgctcagcgcacaactcgactactccgcgcacgcttggaacaacatgctacaacacactcttacgaagcaccaaccaatctaaccgcttgcgcttctcccacagagcgtaacaccacctcaacacagcacgccacaccgccctcagcaccctaaacgcgaccaccatcgtggcggaaccatcacccgctggcttatacaacgcgggggccgccaccc

SEQ ID NO: 579244 - DNA, 148 bp, Homo sapiens
cggtcctacgcatatcgaattatcatatattcgattttccgtatgcgggagaagtgaacatgagcgagctcatcacccccaccgtcctgtttaaaagcttggcagatgccactcgaaccaaaataacgctactcatcgcccgcgaggg

SEQ ID NO: 579245 - DNA, 444 bp, Homo sapiens
  misc_feature (2)..(2): n is a, c, g, or t
  misc_feature (9)..(9): n is a, c, g, or t
  misc_feature (41)..(41): n is a, c, g, or t
  misc_feature (80)..(80): n is a, c, g, or t
  misc_feature (95)..(95): n is a, c, g, or t
  misc_feature (116)..(116): n is a, c, g, or t
  misc_feature (130)..(130): n is a, c, g, or t
  misc_feature (148)..(148): n is a, c, g, or t
  misc_feature (230)..(230): n is a, c, g, or t
  misc_feature (254)..(255): n is a, c, g, or t
  misc_feature (300)..(300): n is a, c, g, or t
  misc_feature (360)..(360): n is a, c, g, or t
  misc_feature (368)..(368): n is a, c, g, or t
anggcaggngacaactgaacggcccccggaagggaagctgngggcggtcaaaacccccggggtccagtccctggaaatancctacagaaacatcnggagccctgttgaacaaaaanggcaatcaccttanacctgtgttaaattaaanagttgactgacagttaccccttcctctctgtttactcctaccccaataaatatgaagggctgtagaagctcagggctcttgntctctagaagcaaagagcccccgnncccttcttgcaaacagatacttttgtctttgactccatactccantcccgtgttcgtcctcctccattcagtcccatattggccaggctggtctcaaactcctgntcttgtgntctgccaaccttggcctcccaaagtgctgggattacaggcgtgagccaccacacccacccaagaacagggtttgtt

SEQ ID NO: 579246 - DNA, 899 bp, Homo sapiens
gacggaagaaccaggagttggcgtgaccatggggaagcaaaagaaagcagaggaaggtatgcgaccatgaatgcgaatgcttagtctcagagatcagatggtcttcccagcaagaggatagattaaaacctacaaagaacgaaaatgaaggatcccagcgtcattaaatggaccaagaggaagttccccaacagccttcctgcttattgttccaactataatagcacgagtctgggtgccaccattagcacatcgcatcgttgatagccagactttatcaacgttttccatagaaagccaaactggagcttagtgcgagtcaatgatggactgtctgtgatgccaagtgtatcccatgtataaccgatagtgtaaggggctgaagttgagaaattggggcggaagtatcgagtggctctaaggattgccagaggatccaaagattcgtaacgattacgcagtgtacacactaaggaacctatgcagatgaatgcttagtgacagagagtaactcagcgtaagtgttacatcgtggccacgggttgaccgggacctgggaaaggaagaatccgtaagatgtcctggagtccctatcatgtacatttctaaccatagatacgaacatggatcggatgccagatgattgtgggagccctcgattctaaattcttacaatgacacagattccgtctggcttaatttcgagcaagtgactactgggttgcaaggttatgtacacaaaatgttagcggggagttttacggaatcagaagagatgatgagtcacagggcagatattaattataccggtggacaagaccagaagaataaaattaaaggatggagcctgaacagagttaagtacacttaagcaatatgtgaagccggggatgagggaa

SEQ ID NO: 579247 - DNA, 145 bp, Homo sapiens
gctgaggtaggctggggtcctgaaggctttgatcttggtccttctcccatggtaacggatcagttcatctctctgtccctcaggtcctggatttctctctggggcagtcaggctggcccctagcaggaagagagtcatcctggag

SEQ ID NO: 579248 - DNA, 1035 bp, Homo sapiens
gctatactaagcccaatgatgggtgctaatcgtggagcgtagcactggaaggtgtactaccaggacaagctctctgagccagcggagagctccgcttcgagattggcgagggggatgaacctgtgatctgccgttatggtctgtgagagcggccacttcgagcgcatgtgcacgaccaggacgaacagttccatcgtgatacctcaagcccgaggctatgtctctgggcagtgtcgggcacgcgaaaagttcgcaaagattcgcgcaccaaagattgcttgacggctggaacagtatgaccttacatcgcatcaaggagttttgtgaccaagcggcgccgaacgggaaggtcctatgggcgcagaactcgacacgttcgacgtacatctagggaaggcgtgagaaagcatgtagacaccgcaatgatgcttgcaacacaggatgacagaggctgcgacctgggtgttacctatcgacaagtgcacagggtacaagtacaaaagtcacaggcctgtatacatcacgagagtaataaagtgactgactcggatgagtcgtctgagacatgggaagttactggagatcctaagtcttttccttcagcacaagtgggatgtgaccaaggcgactcaagtaaatacgccgtccacggtgtcccccgtatgcggtaagcttggaggcctttccttcaacatcgtcgacacggacatgggggcctaagttggttggtccacttcgcttggcaagaacgccttaactaagggggcgctttccattccgtggcctggggcaactcttggaaagacagccgttgcgtagcacacggacatttgttgccctaataagtataaccctgggaaaaccaatggcgggtgcaacatacctgtaatgcaagagcggggggcgcccattcaatatccctggcgacagggctgtgaacgaaggaggcaccgcgcatgtccttgaagaaccgcgtgccaaatgtggagccgtttttagaaaatcccttggccacacggggtacccgttgtagtt

SEQ ID NO: 579249 - DNA, 236 bp, Homo sapiens
taggactcgaagcactggggagaaaggattaatgttactgaattttatcttcctgtttttttctgtctttacctactggcgttatgattacgtaagccccatgtctaccatttcgtactattgtttcagagactccactggtggagaggttacacgcattatagaaacatttggaataatagcaagggtggaactgggtacgcctggaaactcacccagttgcggagtaccgcagc

SEQ ID NO: 579250 - DNA, 267 bp, Homo sapiens
ccttcaaaatgtacttccttaattaaaaatacttaaattgctacaaaatgcaattatcagagccataaatgagtcatatatatatatagttttgcgctggtggagggtcttgccttgatgtgaatggctcctgactggtcagggtagtggtggctgaagattgaggtgattgtgacaatttcttaaaataagacaacaatgaagtttgctgcattgatggactcttccttttatgaaagatttccctgtagtatgtgacgctgtgta

SEQ ID NO: 579251 - DNA, 151 bp, Homo sapiens
ccggtaccgtatgtatagctttcattagtctgctagaatatttaataagttatcttaaagatttaaataaccattaaaatgcaacaagtttaagtaaaataattgactggtctagctattttctttttcttttccaggtaataagctaccc

SEQ ID NO: 579252 - DNA, 299 bp, Homo sapiens
gtcactctgccagtacagggtcagtccaagggccatccccgtcacctcgttcacacacactcacatggaagtgattccgatatacagtaaattggaatacatccacagtcgcgctttcgcataccacccctggactttccgatctgaggggcaataggctggtgggccagtggtccaatcactcgtcccttttatccgcgccactctgcagcaatgcctgaatgcagtcccacagagccttggcgctagtgtgtgagtggtcacggtgtgtgctctcggacagccccatagccacagcc

SEQ ID NO: 579253 - DNA, 622 bp, Homo sapiens
gccagtcgccacccgcgtccgcatccggcaccatgcgcgaagatcgtgcacagtccaggctgggccaatgcggcaaccagatcggctgccaagttttgggaggtcatcagcgagtgagcatgggatcgaaccccacaggcagttaccatggatgacagttgactctgcgagcttggagacgaatcaacagtgtactacaattgaggctgctggtaacaaatatgtaccatcggtgccatccgtggtgtgatcttggagccctggcacctagtggactctgtcaggtcatggaccccttcggaccaagatacttctagatccagatcaacgtatctgtgcttcggccgatggagtggcagccgggaataactgggccaagggccactacacagtagggagccgagctggttcgactcgtgtcctggatgtggatgaggaaggagtaccgagagctgtgactgtctccagggcttaccagctgagccactctctgtgcggggcggcgacggggtccgggatgggcaccctgctcatcagttgagatccgggaagagtacccatgaccgcatcatgaacaccttcagctgtcatgccctcacccaaggtgtcagacacggtggtg

SEQ ID NO: 579254 - DNA, 299 bp, Homo sapiens
  misc_feature (132)..(132): n is a, c, g, or t
  misc_feature (135)..(135): n is a, c, g, or t
  misc_feature (138)..(138): n is a, c, g, or t
  misc_feature (174)..(174): n is a, c, g, or t
  misc_feature (176)..(176): n is a, c, g, or t
gaaaaaaaaaaaaaccccgccccccggggggtgggggggggtcttctcttttttaacacccctccgggggagaagggggggggccgggggggtttttttttcctccctgtgggggggggtgttggccccccncanccnaagagggcctttcctttcccccgggtttatttttgngnggcgccgggccccccccccccccgggtttttgggggtgggggggggggtttgggggccccccccttttttttttttccggggcccccgggggggtttttggccccccccccccccctttttga

SEQ ID NO: 579255 - DNA, 1336 bp, Homo sapiens
tgtgtgtttggggggaggtctttttttttttccgcctcacacaaaaaacatatttctctctctcttgctgtgttgtgtgtgtgccaaaaaacacacactggtggagaggggtaagagagggtggggggagagaacaatattattaaaaagaagagggaattttctctctttttctccagagagaggtgatattataaaaaagagagagatataagagagggaataatattattaagagagagtagagtgagggaggagccacagcgtgtgtgagaacacgcgtgtgaggaagaaaaatatttccttttttgagagcttagtggaggagagagaaataatatattatatatataaagatcttctgcgagagaacataaacgagtgggagaaacctgcgaggagggaagatggatataatttctccccccacaacaaagagccccgcgcagagaagagtctcccaacaataatactccggggggggtaacacaccaaggcagggaggggtgtggaacagaggggagaaaaacaagaagaaaaaattcttcgtgagagagaaaaaacggcggggcagagagacccaaccaaacagggtgcgagaattccacgaaagaggggggagacacaccaaaaacccgcgagaacaaggggcccataaatgaggagggagaaacaaaaaaacaccctacagagaggcggtgcagaaagaaaacaatgcatctgaggcaacaaaaaagcgggagagcagacgcgggtggaggcggcgcatcgcaccagaaaaaagcgcggggaagaggacctacacaaccagaaggggaccaccctaacaaaaacacccgggggcgacagaaaaaactagtggccaacacacaagagaacacgacaagaagaacacacggggagtaaaccccaacgagagaacccttccgagagagagagagaagagaaaaccaacacggggggaaacgagggcgacagaaaacaagacgacaaagaaggcggcccccaaagacaacccccagcggcgaaaaaaagagcgcggagaatgaaaagcggcgagagttcatatacaccaaaagacgaggacaagagagacccccacagaaaagagaaaacggggtacaaaccaccaggagttcgaggggaagatgtggaagaaacaatattcgagacctaaagaaagaagcgagatatcaatagagatagtgacgcacacaaaaaagaatcaacaaagagacgactgaagaggacaacaaaggggaggagcgatacaccgacaagtgggcggtacgagatgagagaacgtatcgcaagggtggcaatgaagtgggaatca

SEQ ID NO: 579256 - DNA, 158 bp, Homo sapiens
ctcggtgtgtgaggagttaggccacatgtcctcagttaccggcttcagttataccttttcatcttcctgtttatcattttcatcatatggatcgcccagggagtcgtatctgtatgtattaaggcccgtgtggttgccggggtcgatctggcggccgc

SEQ ID NO: 579257 - DNA, 398 bp, Homo sapiens
ggctatacacatgatgatagctcagtaactgattttttaaaaacatgagtttaaaacaaaatggatatcaaaaattaaaaaacacttggttaaaaatttctatgctgctttttgatatatcaggaaagattaatatttataatttctaatttataaattaagacattctattcacttgaccttttaagcaaagtttttataagtaagccacagtaggccatgaactacattagttatctgatagtagagtgttctcagagaatttatttttctacaaaattatttaggatgtaggtaaaggaaaattgctttactcagtgcaggttgggggtgtagtggggctgttggactttggaatactttattaaggctctacttttttttttttggggggggta

SEQ ID NO: 579258 - DNA, 180 bp, Homo sapiens
aagcagagacggggtttcgccatataggccaggctggttttggactcctgacctcaagtgttcctcctgccttggcttcccaaagtgctgggattataggtgtgagccaccgtgcgcggccttgttcctctcttatagtgctgcacctctaatttttttcttcccttctgtcgtcttctc

SEQ ID NO: 579259 - DNA, 225 bp, Homo sapiens
  misc_feature (22)..(22): n is a, c, g, or t
  misc_feature (26)..(26): n is a, c, g, or t
cagggaaatttttttttaaaanggantttcccggagggccccccgggtttttttttcccccctttttttacccaaaggcctttttttccctttaaaaaaaaaaaaaaaaaaaaagggctttcttttcagttttttttatgggaaaatccccccggggtccaaaaaaaaaattttgaagtttttatgtcagggaagttttttttaaaaaaaaaattgtaaacccca

SEQ ID NO: 579260 - DNA, 406 bp, Homo sapiens
ttgagtgagtcttatcctgagtcctacttgattgcactgtggtctggaagatgtaatgatttctacttatcttcgcatttgctgtggaatgttttacttccaattatgtggtccattacagaataagtgcaatgtggtgctgagatgaatgtatattctgtagatttggggtggagagttctgtaggtgtctattaggtctgctaggtccagagctgggtacaagtcttgaatatccttgttaatttgtctgtctcgtcgatctgtctaatattgacagtggggtgttgaagtctcccagtattattgtgtgggattctaagtctctttgtatgtgtctaagaacttgctattaccaatctaggtactcctgtattgggtgcatatttcttgcggatgagttcact

SEQ ID NO: 579261 - DNA, 132 bp, Homo sapiens
catgagagctggagaggctagcctcaacagtgcgctgtcgggctagtcggggctgtcgggctagtcggggctgtcgggctaagtcggggctagtacgggctacgtcggggctagtacgggctagtacgaggc

SEQ ID NO: 579262 - DNA, 1340 bp, Homo sapiens
  misc_feature (1078)..(1078): n is a, c, g, or t
  misc_feature (1245)..(1245): n is a, c, g, or t
  misc_feature (1299)..(1299): n is a, c, g, or t
  misc_feature (1330)..(1330): n is a, c, g, or t
tcacagtcttttttgcccacgggtttttccctaaatgaaaccgtcatactaacaggggctatttaccatcccaacgactaggacaaacaggaaatgattaagagcactgtcacattaaaaacgctcatcttagtcgcaaagcaagtctcgcaattaagcactaaactttgtaaacagtgattctaagcagctttcacatgaagttatccacacgacattacgcactcaagcacggtttatcgccatcccgccttgactgttaccttccgatcaagtggacttaaacacgattcagcaagactgtcagttcatcataaggcttgtggatgcgtatcatcatcgccgcgtaccggtcgaccatcacaggtccccactattattgatgaattctctaaaatcccacattgactaccacctcggcggaatctgcattcggttctatcggccgatgagggatctctacaagagcgcgttgcttgtgggaattacgtctatttgcaaactgccgcatccggcggacataataattgcgccatcaaccagaatcatttagctaaaaggcatctcgcaacggcggttcattcccgtcaaatcagcgccttaacccctacacatgttcactaacctctctttaccaggctcgctaataaagcacaggcgtttcccccaaccaatatatcacagcctcggagagatctcccctctcacacgtgcgcctccttctttccaaagctgctgcagaacccactctactgatactcaggagaacaaccgtgtaacacctgacaacatcggcccttatagctccacatacatcgggaccttctacctagtcttatctaccgcacgcattctactactggggcctcgcgactccctcacccgcgttacggtcaaagcctttcaactgcagctgcgtcctctcaccctcttcgtgctcaaccgcgtatcccacagtacacacggactagtccgtccctcagtcatatgacacctactacacgttatcacggcccacctcagcgcctaagcgcatacccatcccaatatccgcgctttcgcacccacttccgcccantactctactacaccgcatcagccccttattcctgaatcgcgcatgtctcacttgcatataacactcaactctatcaccatgagagcatgccgctatctctacaacactcactacgtcataatcgtgacttctctgacatcataccatgcgctcactcgcgctctgtngtgtgaacactcctatcttctctctcctacgctcctgcaccgtctgctctatgnacctatcacacagtgtcctcacttaccatcngtgactctct

SEQ ID NO: 579263 - DNA, 143 bp, Homo sapiens
cgggggcgaggggctgcggaggcagctgacccggaaacagcgtatcactgagaccgagtcgccttatcaggagctcaggggtcacgaggtcgcgatgtctacatgcgacctcaacacacagcaggcccgtattacaaactgag

SEQ ID NO: 579264 - DNA, 119 bp, Homo sapiens
agtaacggacgcagaaatagctggaatacggtaaagatagggtcagataggaccaaaagcagcaggataggtagggagataggctaccatatctagaagctagcataaagctaccatac

SEQ ID NO: 579265 - DNA, 1431 bp, Homo sapiens
  misc_feature (1233)..(1233): n is a, c, g, or t
tagccctgccgcccgcctgtgtgtccccagagccatggagagagccatgtctgatccagaatggccaatgctggcagagcatggcctgaactgctatgatgtgaccatggcatgccttcatgaaatgtgctgcctgtggagaagtgtgctgatggagctctcctgctgaagagctgaaaccttgctctcagtagcctataagaactgtggttgggctgtgccagatggtgctgcctgtgagtgtgttgcttgtccaggtcatttgatgcagcaaaatgcaactgatgtgatgtgtgctctgggcatgtgacgcaagtggtgccctgatgtgttgctggttgacagtacctgtgtgaagaatgtggtgggacgaccttgaaggctccaagtgggctgttgttgcaagaacaacctgatcgcattgtgtggcccattgccttgtggaccaagggaccaacactatacagttcaacagtgtggaatgtggcccctggtgggaacttgcactgaatgcatgccctgtgatgtcctatcaatagcccattagacatggacattgacatggtggggaagaccataatctaaacctggcagttaaacagcgatttggtgaccaccctggaacggtgaggttagtggccacagacacccctaggtgtgtttggacacgtggaaccgatatggaagatgtgcctggcgactttccgcagtaattggcagccttaccaactggccccctggtggcttctaatgggcccctttaagcgctatagtgaatggtggcccaggttggagaaccggagttccaaatgggccaaatggacatgcgtggatgtgaactttgcgccatggcctacgataccacctaaatagagcgtcgccgtagataccacttgctcactttggctgaggccccttttgtggcacccccgttagaagaagcctatatatattccccaggagtacatttttcaccaaccgttcaacctgaataggaaattcctgtggctcccaaacaacaatgggcacccccccctcggaatagtgaaatgtgtgccacaagatgctctcccatttcctatatggggcccatacgatgaaccgccaagccgttattataccaggaactagagatgaggaccccaatttggtgcgccttatgagatctccctttaggcagagcgcactccctccttttcaagtgcctgcatagaggcaccttaccccctttcnaaccaagatatgtggaacagataggagaacgacccctttcctgattcactgtgtgcgcaggcactttagcgctttaggcgggactagaaaagcagaacccctttgggacaagcatttgtttagggaacctagttgtgcccgggagcaaaaacctgatccctggtggagcggagaaacgacaacagtgcggagggcgcg

SEQ ID NO: 579266 - DNA, 142 bp, Homo sapiens
  misc_feature (58)..(58): n is a, c, g, or t
  misc_feature (62)..(62): n is a, c, g, or t
  misc_feature (97)..(97): n is a, c, g, or t
  misc_feature (111)..(111): n is a, c, g, or t
  misc_feature (114)..(114): n is a, c, g, or t
  misc_feature (117)..(117): n is a, c, g, or t
  misc_feature (125)..(126): n is a, c, g, or t
  misc_feature (133)..(133): n is a, c, g, or t
tgactccacctccaagttatgccatggccgcttccagaccatggaggagaagaaagcnttcntgggaccactgaagaaagaccgaattgcaaaggangaaggagcttaatnccnggnacagattnngcagttngtgggtctc

SEQ ID NO: 579267 - DNA, 480 bp, Homo sapiens
  misc_feature (22)..(22): n is a, c, g, or t
  misc_feature (41)..(41): n is a, c, g, or t
  misc_feature (213)..(213): n is a, c, g, or t
  misc_feature (437)..(437): n is a, c, g, or t
  misc_feature (445)..(445): n is a, c, g, or t
gcaggagaacctcttgaatctnggaggaggaggttgctgtnagctgagatcgtgccactgcactccagcctgggtaacaagatagaaactccgtctcaaaaaatatagatatacatgtatagactggctgaatggattaaagtacaggacccaactctatgttgcctacaagaaactcacttcacttgtgaagacacatatagactgaaagtnaagagatgaacaaagatattctatgcaaatgaaacccaaaagtgagcaggaatagctatacttagataaatcagactttaagtcaaaaactataaagagagacaaagaaggtcattatataatgataaagtgatcaatttaagcaagatggtaaagcaattcttaatatatatgcatccaacactggggcacccagatatataaagtaaatgttattagttctnaagggggnggtagattccgatacgataatagttagggaattta

SEQ ID NO: 579268 - DNA, 116 bp, Homo sapiens
tgtcctgcgggtcttacgtgttggcgcagtagagtgttggaagccgagagatgtttcccagttcccagacggtctaatgttgaggacgagtgctcgtcccatcgaacgctccgtcc

SEQ ID NO: 579269 - DNA, 150 bp, Homo sapiens
acgttctatagcactagatagagcgatagctccatgtgcagtgatatcaaccatctcgttaccaacgttcggaggccaagttccgcggcgtcacaatttgtgaccataatgcggaggaacgatctggcaagtgaagtctacatgacacgt

SEQ ID NO: 579270 - DNA, 1387 bp, Homo sapiens
  misc_feature (225)..(225): n is a, c, g, or t
  misc_feature (255)..(255): n is a, c, g, or t
  misc_feature (311)..(311): n is a, c, g, or t
  misc_feature (318)..(318): n is a, c, g, or t
  misc_feature (375)..(376): n is a, c, g, or t
  misc_feature (382)..(382): n is a, c, g, or t
  misc_feature (396)..(397): n is a, c, g, or t
  misc_feature (402)..(402): n is a, c, g, or t
  misc_feature (405)..(405): n is a, c, g, or t
  misc_feature (411)..(411): n is a, c, g, or t
  misc_feature (428)..(428): n is a, c, g, or t
  misc_feature (437)..(437): n is a, c, g, or t
  misc_feature (458)..(458): n is a, c, g, or t
  misc_feature (485)..(486): n is a, c, g, or t
ttcaccggcaccttgcgtcggtcgcgccgcgggcctgctcctgccgcgcgcacccccggggcttcggctccggccgggtcgcgcccagtttcctgccctgaggccgcgggcagccgccgccatggtgtgcctaccgtctcccagcccaacacgggtgaagtgctccggggacgggtcggcgccccgatgcatgcccgtgccctacggttctccgccatgcagggntggcgcgtctccatggaggatgctcacaantgtattcctgagctgacagtgagacagccatgttttctgtctacgatggacatggngggaggnagttgccttgtactgtgccaaatatcttcctgatatcatcaaagatcagaaggcctnncaaggnaaggcaagctacannaaggnttnagaagnatgccttcttggtatgnacgccaaanttgaccactgaagaagtcatnaaagagctggcacagattgcagggcgnnccactgaggcatgcaagcatgcacacacacagcacaagacagtagcgtgcatgcacagcatgcatggtggccccacaagccaggcggcctgccacctgctgcccggacagcaggcgtaccaagtgcaactaaagcgccacgcaacgtgcgcgacacgacaacggagaccaaacaacagacagcgcaggggcaacgaccaccgaacaagcacagcacgtgactggcaagatgagagaaacaagccgaaggacaaccagcggcacccaaaggggaactcgaagagcggcacagcaaccaggcgcccgaagaggacgcacacggaacggccacaactccattcacgagggcacacactgggcaccaccagggccacaggggcgacaacaccagaccaaagagccacaccaagagccggaacaggacgggcacgagacggaaccaaggcacagagaaccggatcgagccggggacagcccccacaagcgcagacagggagcagcgcacacggaggacagcaacagacaaggcaggaggaaagggagcgcgacacagcaggccgagggagcgcgcggggcagcgtcgggacctcccatcgtggcgggaggacgaagcaagaggacgacgggagacgggaccgagtggaccgacagaaacggagacacgggaagacggaggggcgaggagaggacgacgaggcccggacggaagcagaggcgaccaggggagcaaaaacgagacgcacaaaggcggcagcgagacggaggaaaggaggggggagaacaggcggggagcgagaccacagaggagggacacgcagacgacgcaggagagaaggcaggggagggccgagccggagcaaaagcaaggagaggaaagagcggcgggaacgagcgcgagaact

SEQ ID NO: 579271 - DNA, 826 bp, Homo sapiens
  misc_feature (225)..(225): n is a, c, g, or t
  misc_feature (255)..(255): n is a, c, g, or t
  misc_feature (311)..(311): n is a, c, g, or t
  misc_feature (318)..(318): n is a, c, g, or t
  misc_feature (375)..(376): n is a, c, g, or t
  misc_feature (382)..(382): n is a, c, g, or t
  misc_feature (396)..(397): n is a, c, g, or t
  misc_feature (402)..(402): n is a, c, g, or t
  misc_feature (405)..(405): n is a, c, g, or t
  misc_feature (411)..(411): n is a, c, g, or t
  misc_feature (428)..(428): n is a, c, g, or t
  misc_feature (437)..(437): n is a, c, g, or t
  misc_feature (458)..(458): n is a, c, g, or t
  misc_feature (485)..(486): n is a, c, g, or t
ttcaccggcaccttgcgtcggtcgcgccgcgggcctgctcctgccgcgcgcacccccggggcttcggctccggccgggtcgcgcccagtttcctgccctgaggccgcgggcagccgccgccatggtgtgcctaccgtctcccagcccaacacgggtgaagtgctccggggacgggtcggcgccccgatgcatgcccgtgccctacggttctccgccatgcagggntggcgcgtctccatggaggatgctcacaantgtattcctgagctgacagtgagacagccatgttttctgtctacgatggacatggngggaggnagttgccttgtactgtgccaaatatcttcctgatatcatcaaagatcagaaggcctnncaaggnaaggcaagctacannaaggnttnagaagnatgccttcttggtatgnacgccaaanttgaccactgaagaagtcatnaaagagctggcacagattgcagggcgnnccactgaggatgacgatgacaagaaaaaggtgtgatgaagatgatgtggcacactgaggaggctgcactgcttgcgtgaagaaggctaccatggactattgaagagctgtgacacgctacgggagactgtcacaggccctcccacaagcaatccgggcgtggccgcagacaaggtcaggcccatggaggcagactggataataggaatcttcaaaaaatggccagcaagccacaggctcccaaccacggacggcgcactgagccgacccggagggctgtcactgaagcattaacctgaacagaaaggaagagaaaaagcaggagaaaccaaacaacagcg

SEQ ID NO: 579272 - DNA, 501 bp, Homo sapiens
atcccagcactttgggaggctgaggcgggcggatcacgaggtcaggagtttgagaccagctcacatgtggtgaaacctgtttggtaaatacaaaatagctgggctggggtgctgcctgtatccagtatcggaagtgagcagaaatcattgaatcaggaggcgaggtgcagtgagccgaatgtgccaagatccagctggcaatagagtgagactccatctcaaagaaaacaaccaaacgatgggcaatgcaggccgggcttgggggtcagccggtaatcccagatttgaggagtccggtgggttgcacccaaggtacggagtcaaagacacgcctgcgcaacattgatgaacccctgttctacaaaaattcacaaaaattagcggggcgtgttgaggcgccggagtcccagcaaacaagggagcatgaaggcaggaactttgcttgaccccaggaggcaaccgttggagtggcgtgagacacaccgcactggatccagcctg

SEQ ID NO: 579273 - DNA, 354 bp, Homo sapiens
  misc_feature (265)..(265): n is a, c, g, or t
  misc_feature (312)..(312): n is a, c, g, or t
  misc_feature (329)..(329): n is a, c, g, or t
ctattcaagtgcaaggatatcagaaggtttttttttatttaaaaaatttttttttcgagatggagtttcactctgttgcccaggctggagtgcaatggcagcttactgcaacctccacctcctggttcaagcgattctcctgcctcagcctcccaagtagctgggattacaggcacgcgccaccacacctggctaattctatttagtagaaatggagtctcaccatgttggtcaggctggtctcgaactcctgacctcaggtganccacccaccttggcctcccagcgtgctgggattataggcatgagccnccaggccggccccaggnttttatattaagccttcttgctctc

SEQ ID NO: 579274 - DNA, 120 bp, Homo sapiens
tattgcgcacgatacgggctgaaggtgggctgtctcgggaagggtgagttgaccagcgcaccatactgagctcatcagtgtacctgcatgaggcgaccaggactcctgatgctgtgtaag

SEQ ID NO: 579275 - DNA, 196 bp, Homo sapiens
gagaatatgagtgccatgcatccaatccccaagggacagggcttcagcatcagcaaaaattacagtggttgatgcgttacatgagataccagtgaaaaaggtgaaggtgccgagctatatacctacgagaatgatgttaggctcgatggggtaaaaggaggcatgggtactgacagtacctagtgtgtgcctgatt

SEQ ID NO: 579276 - DNA, 903 bp, Homo sapiens
  misc_feature (25)..(25): n is a, c, g, or t
  misc_feature (123)..(127): n is a, c, g, or t
  misc_feature (175)..(175): n is a, c, g, or t
  misc_feature (182)..(183): n is a, c, g, or t
  misc_feature (211)..(211): n is a, c, g, or t
  misc_feature (242)..(242): n is a, c, g, or t
  misc_feature (245)..(245): n is a, c, g, or t
  misc_feature (264)..(266): n is a, c, g, or t
  misc_feature (278)..(278): n is a, c, g, or t
  misc_feature (281)..(281): n is a, c, g, or t
  misc_feature (303)..(303): n is a, c, g, or t
  misc_feature (305)..(306): n is a, c, g, or t
  misc_feature (309)..(309): n is a, c, g, or t
  misc_feature (311)..(311): n is a, c, g, or t
  misc_feature (323)..(323): n is a, c, g, or t
  misc_feature (329)..(329): n is a, c, g, or t
  misc_feature (332)..(332): n is a, c, g, or t
  misc_feature (336)..(336): n is a, c, g, or t
  misc_feature (341)..(341): n is a, c, g, or t
  misc_feature (348)..(349): n is a, c, g, or t
  misc_feature (354)..(354): n is a, c, g, or t
  misc_feature (356)..(357): n is a, c, g, or t
  misc_feature (362)..(363): n is a, c, g, or t
  misc_feature (372)..(372): n is a, c, g, or t
  misc_feature (377)..(377): n is a, c, g, or t
  misc_feature (388)..(388): n is a, c, g, or t
  misc_feature (390)..(390): n is a, c, g, or t
  misc_feature (396)..(396): n is a, c, g, or t
  misc_feature (400)..(401): n is a, c, g, or t
  misc_feature (409)..(409): n is a, c, g, or t
  misc_feature (414)..(414): n is a, c, g, or t
  misc_feature (433)..(433): n is a, c, g, or t
  misc_feature (452)..(452): n is a, c, g, or t
  misc_feature (494)..(495): n is a, c, g, or t
  misc_feature (513)..(513): n is a, c, g, or t
  misc_feature (570)..(570): n is a, c, g, or t
  misc_feature (644)..(644): n is a, c, g, or t
  misc_feature (716)..(716): n is a, c, g, or t
  misc_feature (818)..(818): n is a, c, g, or t
  misc_feature (829)..(829): n is a, c, g, or t
  misc_feature (886)..(886): n is a, c, g, or t
cagtgagggtctctctcttcctctngtgctcttgctggaggctggtggtccagagaggtcttactcctataggaggcacatgtgggaccatgagagtccaccaccctgtagctgtagccaaannnnntgtaataccaggaaatgagcttaaaaaagtagtcgttaaaggcaatancaacaannagcagtcaaagagtggagagagtgaggngtacagctgattagaagtaagaaagaagaanaantaggatgcaaagtagtagnnnaaaaaagccctnaanggggccctccgaaacctgcatnannacntncttaaaaaaatnaaaaanggnaggnttttntaaaaannaggtnanntccannaataaaacnttggnaatagggaaangnaagganatannaataaaantaaantaaaaaaaaaagataaaantaaaaaaaaaattaaaaanaccaataaaaaaaaagaataaagtaatggagaaaaccgcgannataacaccacaatatccnggaggaaatccaaagtcttctgggtggcagttatggcatggactgtggtcatgagtncttccacgataccaaagttgtcatggatgaccttggccaggggtgctaagcagttggtggtgcaggaggcattnctgatgatcttgaggctgtagtcatacttctcatggttcacacccatgacgaacatgggggcatcagcaganggggcagagatgatgacccttttggctccccctgcaaatgagccccagccttctccatggtggtgaagacgccagttgactccacgacgtactcagcgccanatctgccccanttgattttggagggatctcgctcctggagatggtgatgggattccattgatgaaaancttccgttctcagcctt

SEQ ID NO: 579277 - DNA, 430 bp, Homo sapiens
tgaaaaaaaaggtcttgggggtgggcgggatttgatctgtcctcattctctgcgcctttcgcagagcttccagcaccggtatgttgggccagagcatccgtaggttcacaacctctgaggtccgtatgagccactatgaggagggccctgggaagaatttgccattttcagtgggaggggagtgggcgttactagctaacatgggtctgaaccttggatctgcatttgctacaccctttcttgcactaagacaccaactgcttaaaacataaggaggtttcagttccttcattgaacagatatgaagagcattttaagaggtgcagcctctggaagtggatcaaactagaactcatatgccatactagatatgtttgtcactaaactgatgacgcgggccaaaataggggggtctatcctgaaaccatgt

SEQ ID NO: 579278 - DNA, 1066 bp, Homo sapiens
  misc_feature (428)..(428): n is a, c, g, or t
  misc_feature (580)..(580): n is a, c, g, or t
  misc_feature (670)..(670): n is a, c, g, or t
gggcaggtgccatgggcccgcttgaggcacactgtaggggacgcgagtggctgggccatggtgcggcgctcgggccgccgccgccgtgtgccttcggcggggtcctcggcctcttcaggcagacgcacgccgcctcaggacgctggggcttggggagctgctggaggagttctcgccgtgactcagtaccgggccaatggatggcagcgggaccggcggttctaatgcgttgacgccgcattgaggaatgcatgatcgtcttggtacgccttgttttgagtcagaggacttacatgatttccaagctggtagatttcctacacatcgagcgaatcgtgcgtgcatatctggatgggaccggacttatgcacccaggtcatcgacttcaggtggtctaccatgggcaggtacttgcaggaagctctctngcaaggaacgcgacgcaaaaggtaccaacaggtgtcctgtaagaggtttagcctgatttaccgaagggtgccatacccaaagttgtggccaaccgatctccgtcgtatctctcgagcgctgtgctatagaccaggatgacatcgcgaccccnggaggtggcctagcgcaccgaagaactagcgccaattccgctcggttgcgccgcgaccgatatcataatctcccttgtgttgtccaccanaggggggcttcacaattcgccaacctaccggtttgtgccccacggggtgttccgggccacgccaagcagtccttgaggcccttgtttcgaagcgtgaagcgcggcacggcagtttccgtgcgctaaattggcgcacccgccacctacacagttgggtctcaaccaatatgcttccaattgcggcgttggtcaaccttagcggagcgccgcggtcgtggttgccggcggaacgcttattcgttgcacttgaccctcgtggggttgggaaccggagccccatttgcctaggttgcccgccgtggaacccgtatcccccccacggcgggatggcggccaaagccgtgggagcttcggtttgccgcctttcccttctccccgggacacagcccctgtggc

SEQ ID NO: 579279 - DNA, 256 bp, Homo sapiens
ctgatgcccatgtccaatgtgaggatggccttggtacagggtcggccattctcacctcgtctcagccctggtgagcccgtacactccacttggagtctggatggacacatgggccagggggtctgaagcagcctcactcttaacttcgtgttcaacactccatggaaaccccggactgggacacaggcggaagcctatggagagccgaatcagtgtttgtgaagaggcaggactggccggagtgatcaaacatagg

SEQ ID NO: 579280 - DNA, 266 bp, Homo sapiens
gatgtagatcgagctgcatgtcttcatccttgtcactggccggtcatctcagtgcctcctggcttggaaaaacccttgcgggatggttgctttggactcactgttcaccaggtgaatgaggacagaacttcttgaagtactccatttgttctcattctcatcaattttcctctggtcataaatccttacaaactgatctcgtccacccactgcaaactggtgggtataggcaggattcacatagatagttacaggggtaccgagct

SEQ ID NO: 579281 - DNA, 8232 bp, Homo sapiens
gcctccacacggctccgtcgggcgccgcgctcttccggcagcggtacgtttggagacgccgggaacccgcgttggcgtggttgactagtgcctcgcagcctcagcatgggggaacatggcctggagctggcttccatgatccccgccctgcgggagctgggcagtgccacaccagaggaatataatacagttgtacagaagccaagacaaattctgtgtcaattcattgaccggatacttacagatgtaaatgttgttgctgtagaacttgtaaagaaaactgactctcagccaacctccgtgatgttgcttgatttcatccagcatatcatgaaatcctccccacttatgtttgtaaatgtgagtggaagccatgagcgcaaaggcagttgtattgaattcagtaattggatcataacgagacttctgcggattgcagcaactccctcctgtcatttgttacacaagaaaatctgtgaagtcatctgttcattattatttctttttaaaagcaagagtcctgctatttttggggtactcacaaaagaattattacaactttttgaagacttggtttacctccatagaagaaatgtgatgggtcatgctgtggaatggccagtggtcatgagccgatttttaagtcaattagatgaacacatgggatatttacaatcagctcctttgcagttgatgagtatgcaaaatttagaatttattgaagtcactttattaatggttcttactcgtattattgcaattgtgttttttagaaggcaagaactcttactttggcagataggttgtgttctgctagagtatggtagtccaaaaattaaatccctagcaattagctttttaacagaactttttcagcttggaggactaccagcacaaccagctagcacttttttcagctcatttttggaattattaaaacaccttgtagaaatggatactgaccaattgaaactctatgaagagccattatcaaagctgataaagacactatttccctttgaagcagaagcttatagaaatattgaacctgtctatttaaatatgctgctggaaaaactctgtgtcatgtttgaagacggtgtgctcatgcggcttaagtctgatttgctaaaagcagctttgtgccatttactgcagtatttccttaaatttgtgccagctgggtatgaatctgctttacaagtcaggaaggtctatgtgagaaatatttgtaaagctcttttggatgtgcttggaattgaggtagatgcagagtacttgttgggcccactttatgcagctttgaaaatggaaagtatggaaatcattgaggagattcaatgccaaactcaacaggaaaacctcagcagtaatagtgatggaatatcacccaaaaggcgtcgtctcagctcgtctctaaacccttctaaaagagcaccaaaacagactgaggaaattaaacatgtggacatgaaccaaaagagcatattatggagtgcactgaaacagaaagctgaatcccttcagatttcccttgaatacagtggcctaaagaatcctgttattgagatgttagaaggaattgctgttgtcttacaactgactgctctgtgtactgttcattgttctcatcaaaacatgaactgccgtactttcaaggactgtcaacataaatccaagaagaaaccttctgtagtgataacttggatgtcattggatttttacacaaaagtgcttaagagctgtagaagtttgttagaatctgttcagaaactggacctggaggcaaccattgataaggtggtgaaaatttatgatgctttgatttatatgcaagtaaacagttcatttgaagatcatatcctggaagatttatgtggtatgctctcacttccatggatttattcccattctgatgatggctgtttaaagttgaccacatttgccgctaatcttctaacattaagctgtaggatttcagatagctattcaccacaggcacaatcacgatgtgtgtttcttctgactctgtttccaagaagaatattccttgagtggagaacagcagtttacaactgggccctgcagagctcccatgaagtaatccgggctagttgtgttagtggattttttatcttattgcagcagcagaattcttgtaacagagttcccaagattcttatagataaagtcaaagatgattctgacattgtcaagaaagaatttgcttctatacttggtcaacttgtctgtactcttcacggcatgttttatctgacaagttctttaacagaacctttctctgaacacggacatgtggacctcttctgtaggaacttgaaagccacttctcaacatgaatgttcatcttctcaactaaaagcttctgtctgcaagccattccttttcctactgaaaaaaaaaatacctagtccagtaaaacttgctttcatagataatctacatcatctttgtaagcatcttgattttagagaagatgaaacagatgtaaaagcagttcttggaactttattaaatttaatggaagatccagacaaagatgttagagtggcttttagtggaaatatcaagcacatattggaatccttggactctgaagatggatttataaaggagctttttgtcttaagaatgaaggaagcatatacacatgcccaaatatcaagaaataatgagctgaaggataccttgattcttacaacaggggatattggaagggccgcaaaaggagatttggtaccatttgcactcttacacttattgcattgtttgttatccaagtcagcatctgtctctggagcagcatacacagaaattagagctctggttgcagctaaaagtgttaaactgcaaagttttttcagccagtataagaaacccatctgtcagtttttggtagaatcccttcactctagtcagatgacagcacttccgaatactccatgccagaatgctgacgtgcgaaaacaagatgtggctcaccagagagaaatggctttaaatacgttgtctgaaattgccaacgttttcgactttcctgatcttaatcgttttcttactaggacattacaagttctactacctgatcttgctgccaaagcaagccctgcagcttctgctctcattcgaactttaggaaaacaattaaatgtcaatcgtagagagattttaataaacaacttcaaatatattttttctcatttggtctgttcttgttccaaagatgaattagaacgtgcccttcattatctgaagaatgaaacagaaattgaactggggagcctgttgagacaagatttccaaggattgcataatgaattattgctgcgtattggagaacactatcaacaggtttttaatggtttgtcaatacttgcctcatttgcatccagtgatgatccatatcagggcccgagagatatcatatcacctgaactgatggctgattatttacaacccaaattgttgggcattttggctttttttaacatgcagttactgagctctagtgttggcattgaagataagaaaatggccttgaacagtttgatgtctttgatgaagttaatgggacccaaacatgtcagttctgtgagggtgaagatgatgaccacactgagaactggccttcgattcaaggatgattttcctgaattgtgttgcagagcttgggactgctttgttcgctgcctggatcatgcttgtctgggctcccttctcagtcatgtaatagtagctttgttacctcttatacacatccagcctaaagaaactgcagctatcttccactacctcataattgaaaacagggatgctgtgcaagattttcttcatgaaatatattttttacctgatcatccagaattaaaaaagataaaagccgttctccaggaatacagaaaggagacctctgagagcactgatcttcagacaactcttcagctctctatgaaggccattcaacatgaaaatgtcgatgttcgtattcatgctcttacaagcttgaaggaaaccttgtataaaaatcaggaaaaactgataaagtatgcaacagacagtgaaacagtagaacctattatctcacagttggtgacagtgcttttgaaaggttgccaagatgcaaactctcaagctcggttgctctgtggggaatgtttaggggaattgggggcgatagatccaggtcgattagatttctcaacaactgaaactcaaggaaaagattttacatttgtgactggagtagaagattcaagctttgcctatggattattgatggagctaacaagagcttaccttgcgtatgctgataatagccgagctcaagattcagctgcctatgccattcaggagttgctttctatttatgactgtagagagatggagaccaacggcccaggtcaccaattgtggaggagatttcctgagcatgttcgggaaatactagaacctcatctaaataccagatacaagagttctcagaagtcaaccgattggtctggagtaaagaagccaatttacttaagtaaattgggtagtaactttgcagaatggtcagcatcttgggcaggttatcttattacaaaggttcgacatgatcttgccagtaaaattttcacctgctgtagcattatgatgaagcatgatttcaaagtgaccatctatcttcttccacatattctggtgtatgtcttactgggttgtaatcaagaagatcagcaggaggtttatgcagaaattatggcagttctaaagcatgacgatcagcataccataaatacccaagacattgcatctgatctgtgtcaactcagtacacagactgtgttctccatgcttgaccatctcacacagtgggcaaggcacaaatttcaggcactgaaagctgagaaatgtccacacagcaaatcaaacagaaataaggtagactcaatggtatctactgtggattatgaagactatcagagtgtaacccgttttctagacctcataccccaggatactctggcagtagcttcctttcgctccaaagcatacacacgagctgtaatgcactttgaatcatttattacagaaaagaagcaaaatattcaggaacatcttggatttttacagaaattgtatgctgctatgcatgaacctgatggagtggccggagtcagtgcaattagaaaggcagaaccatctctaaaagaacagatccttgaacatgaaagccttggcttgctgagggatgccactgcttgttatgacagggctattcagctagaaccagaccagatcattcattaccatggtgtagtaaagtccatgttaggtcttggtcagctgtctactgttatcactcaggtgaatggagtgcatgctaacaggtccgagtggacagatgaattaaacacgtacagagtggaagcagcttggaaattgtcacagtgggatttggtggaaaactatttggcagcagatggaaaatctacaacatggagtgtcagactgggacagctattattatcagccaaaaaaagagatatcacagctttttatgactcactgaaactagtgagagcagaacaaattgtacctctttcagctgcaagctttgaaagaggctcctaccaacgaggatatgaatatattgtgagattgcacatgttatgtgagttggagcatagcatcaaaccacttttccagcattctccaggtgacagttctcaagaagattctctaaactgggtagctcgactagaaatgacccagaattcctacagagccaaggagcctatcctggctctccggagggctttactaagcctcaacaaaagaccagattacaatgaaatggttggagaatgctggctgcagagtgccagggtagctagaaaggctggtcaccaccagacagcctacaatgctctccttaatgcaggggaatcacgactcgctgaactgtacgtggaaagggcaaagtggctctggtccaagggtgatgttcaccaggcactaattgttcttcaaaaaggtgttgaattatgttttcctgaaaatgaaaccccacctgagggtaagaacatgttaatccatggtcgagctatgctactagtgggccgatttatggaagaaacagctaactttgaaagcaatgcaattatgaaaaaatataaggatgtgaccgcgtgcctgccagaatgggaggatgggcatttttaccttgccaagtactatgacaaattgatgcccatggtcacagacaacaaaatggaaaagcaaggtgatctcatccggtatatagttcttcattttggcagatctctacaatatggaaatcagttcatatatcagtcaatgccacgaatgttaactctatggcttgattatggtacaaaggcatatgaatgggaaaaagctggccgctccgatcgtgtacaaatgaggaatgatttgggtaaaataaacaaggttatcacagagcatacaaactatttagctccatatcaatttttgactgctttttcacaattgatctctcgaatttgtcattctcacgatgaagtttttgttgtcttgatggaaataatagccaaagtatttctagcctatcctcaacaagcaatgtggatgatgacagctgtgtcaaagtcatcttatcccatgcgtgtgaacagatgcaaggaaatcctcaataaagctattcatatgaaaaaatccttagagaagtttgttggagatgcaactcgcctaacagataagcttctagaattgtgcaataaaccggttgatggaagtagttccacattaagcatgagcactcattttaaaatgcttaaaaagctggtagaagaagcaacatttagtgaaatcctcattcctctacaatcagtcatgatacctacacttccatcaattctgggtacccatgctaaccatgctagccatgaaccatttcctggacattgggcctatattgcagggtttgatgatatggtggaaattcttgcttctcttcagaaaccaaagaagatttctttaaaaggctcagatggaaagttctacatcatgatgtgtaagccaaaagatgacctgagaaaggattgtagactaatggaattcaattccttgattaataagtgcttaagaaaagatgcagagtctcgtagaagagaacttcatattcgaacatatgcagttattccactaaatgatgaatgtgggattattgaatgggtgaacaacactgctggtttgagacctattctgaccaaactatataaagaaaagggagtgtatatgacaggaaaagaacttcgccagtgtatgctaccaaagtcagcagctttatctgaaaaactcaaagtattccgagaatttctcctgcccaggcatcctcctatttttcatgagtggtttctgagaacattccctgatcctacatcatggtacagtagtagatcagcttactgccgttccactgcagtaatgtcaatggttggttatattctggggcttggagaccgtcatggtgaaaatattctctttgattctttgactggtgaatgcgtacatgtagatttcaattgtcttttcaataagggagaaacctttgaagttccagaaattgtgccatttcgcctgactcataatatggttaatggaatgggtcctatgggaacagagggtctttttcgaagagcatgtgaagttacaatgaggctgatgcgtgatcagcgagagcctttaatgagtgtcttaaagacttttctacatgatcctcttgtggaatggagtaaaccagtgaaagggcattccaaagcgccactgaatgaaactggagaagttgtcaatgaaaaggccaagacccatgttcttgacattgagcagcgactacaaggtgtaatcaagactcgaaatagagtgacaggactgccgttatctattgaaggacatgtgcattaccttatacaagaagctactgatgaaaacttactatgccagatgtatcttggttggactccatatatgtgaaatgaaattatgtaaaagaatatgttaataatctaaaagtaatgcatttggtatgaatctgtggttgtatctgttcaattctaaagtacaacataaatttacgttctcagcaactgttatttctctctgatcattaattatatgtaaaataatatacattcagttattaagaaataaactgctttcttaata

SEQ ID NO: 579282 - DNA, 445 bp, Homo sapiens
tgcatagttacacagaaaacctcatctgcctaaaaaggagaaaatgaagcatagaggagaggttattttttcattaagtcaacaaatgtttgagccttaggcaccgttctaggtactaagtatatagcaatgagtaaaacggtctctccccacatagatatatattcttgggggaaggagaatgatgaacaaatatttcatataatatcaagtagtactaagttttatttaaaaagcagggtaagggatagaaagtttgaagaagttgggttcagggaagccctctctgaggaaatagttggagcagaggtttgagccagttgggaaagcaagccaaaaatatatctggaagaaatgctttcaagctgcagtgctaggacatgcaaaaactttgagttgggagcattctggggaaattcaggagacacagtggcaagaagaaaag

SEQ ID NO: 579283 - DNA, 1863 bp, Homo sapiens
gtaattagctgggctcagtggcacactcctgtagtcccagctacttgggaggctgaggtgggaggatcacttgaccccaggagttggaggctgctgtgagctatgatgacaccactgcactccagcctgggcaacagagtgagacccttggcatcatactcagatccttccaactgctaggatgaagcatacagacaagtgcccactctggatataggtgttggtgttctctttctgtttctatgggtccagtctgtgttcttttgtaagatgtctgggcaagccagaccaaagtctcctatttttacttgctgatcagggccatgaagaaaaatatttctaggcttcagatctctgtttacaatacccatgttatgtatgtaaaacacaccttccactaaatcttgaaaattttttgttgcaacactggccataaggacaggcaaacttgcccacacactcttggccctgtttgtttctctcagctagccagtcccacagctggagcttgcacacctgcatctggatgtgcagcatcaggtggtactgcacctcgatccccaacaagttgaagttttctttggaagattcctcagtggatgtgaaattctcctctaggagggaattacacctgagcagcaggggctgtttcacaattgaccaggtagacaaaccagccaggccattttcctggagctccagggatgattcatattcactggtgtctcttaagacggaattgatggtgtagttcacagcttgttgttctgattttgagtgtcagattctgcaaagggtttttcttttctgaggtgagctccgcgaagataatgggtgagctgctattttcaccatttttaacaccgtattggtatctgtctgcttggtcggagaacacttccagaaatggcaactgaacggaagctctgtctgcttgtggttggaccacttgaacatgttctgtccacgcagtgtgataacgaatgatattagggtgctgaagacctgccagcaccttcattccccgtagttctttcatgtaatgtgtttctgttgcacccttaatcaggattttttaaattgcataatactgaccatctaatttattcctgaccttgtatactcttccatatccaccttttcctaagatggcaagttcttcaaattcatttaagtaacgtgaagtttgtgcttcaaagggtacttcccttgatctgattttctggatatgagaaatagcctcacaaggatcctgatgaactctctctttagtggacctcattaagtgagtaatagctctgtggtgatgtagtctcaatgagctaaacttgtcacaagtgaaagaagacagcagccccattttgataaaggtctggcaaagtaacttaaacacctgtcttgaatgaactgggtttggttcacgcacatggctcaagtgcttcaccaaagaaataagcggcagctggtttgcaactgcaaaagggaaagttggctgttgtaggggttattttaatacctggagttctgctggaacataagtcatatttggagtccaggctcttggcggaaaagtcgatggcagatggcacagcaacagtctccaccccgtggccctcctctttgtgctcgtgggctgcagcgcagcccaccagcccacccagcaccacctctgagaattattcttctaataacgttattcttccttttgcattcagatatgcttaagaaattgtacagttccaagtagctcacttagaacacccatttgcatgtactaacataatgtaaatattaggcagtacagcattgttatttgaatattcattgaaatgtttaagtcctaaacacttccaaagcagattt

SEQ ID NO: 579284 - DNA, 651 bp, Homo sapiens
aaaatttatttttcaagaattgtaatgtgtaaataattccctggtatttcacgtagtccaaaaacatgtccaagcagttaatgttgaatcaatcttgcgagcctccaaatcagtatcacaagctaactgtatttgtttaatttcttcttttcctgtatttgctcttacaaaaggggtattggtcagtaaaatggtattaacatttattaaatgtcaaaatataaagaaaggtagtaattccaaattattaacatctgtttttggttttatgtttcttctttttaggccaagacccatgttcttgacattgagcagcgactacaaggtgtaatcaagactcgaaatagagtgacaggactgccgttatctattgaaggacatgtgcattaccttatacaagaagctactgatgaaaacttactatgccagatgtatcttggttggactccatatatgtgaaatgaaattatgtaaaagaatatgttaataatctaaaagtaatgcatttggtatgaatctgtggttgtatctgttcaattctaaagtacaacataaatttacgttctcagcaactgttatttctctctgatcattaattatatgtaaaataatatacattcagttattaagaaataaactgctttcttaata

SEQ ID NO: 579285 - DNA, 838 bp, Homo sapiens
gatgatacctgctcatacgacgtcatggactcgttcctggaaaagttccagagccagatttagtgatggcggctttcatgaggaccattgtggataaggaattatgacctaggtccccgcgtatatatgtctagagcgctatctggagattgatcctcatagaagcaatcctggactttgtgctatttctccacgtcccatttagttgagggactgaaggatgcgtgctccatgacatgaagctagggccaatgagctataacagatgacgggcaatgattactttaaagaaaaatgactagcaagaaagctgtaagtttccatacactgaagggcttaccacgaagaaatgtgcagatcctgatttgagatgctgtcctttataccaagccgggcagcagcactcgtactatctgggcaatattcagtatctggtctcaactgatgtgacagcatgccagaaagctaaaaccctgatcacctcaaagcacataatacacgaggtgccttatgccatctggaactgaaacactttgccgaggccgtgaactggtgtgatgagggactgcaacatagatgccaaagagaagcagcttctggaaatgagggctaaagcagataagctgaagcgacatgaacagcacggactgtgcaggcaaagacaaactcgaaaagcaacagaagcggcgaagggaactcaaactgagggctacacacacagagcacacaaggctcaccaatactacggcacacccgacagcagccaggcaggcttcagcgcacaactcagaaaagctagagagacaaaccagaactgacgccagcaaagcgacccaac

SEQ ID NO: 579286 - DNA, 430 bp, Homo sapiens
  misc_feature (24)..(24): n is a, c, g, or t
  misc_feature (26)..(28): n is a, c, g, or t
  misc_feature (31)..(31): n is a, c, g, or t
  misc_feature (33)..(33): n is a, c, g, or t
  misc_feature (37)..(37): n is a, c, g, or t
  misc_feature (39)..(39): n is a, c, g, or t
  misc_feature (57)..(57): n is a, c, g, or t
  misc_feature (60)..(61): n is a, c, g, or t
aaaaaaaaataaaaaaaaacaaangnnntanangaananaaaaaaaaaaaaaaacancanntaggccaagacccatgttcttgacattgagcagcgactacaaggtgtaatcaagactcgaaatagagtgacaggactgccgttatctattgaaggacatgtgcattaccttatacaagaagctactgatgaaaacttactatgccagatgtatcttggttggactccatatatgtgaaatgaaattatgtaaaagaatatgttaataatctaaaagtaatgcatttggtatgaatctgtggttgtatctgttcaattctaaagtacaacataaatttacgttctcagcaactgttatttctctctgatcattaattatatgtaaaataatatacattcagttattaagaaataaactgctttcttaata

SEQ ID NO: 579287 - DNA, 120 bp, Homo sapiens
  misc_feature (71)..(71): n is a, c, g, or t
gatggtggcacagacatcactctccctgacggggaccaggagcctggatctgggatcagcaggcggacgtncccagctcatggcaaaactggcagaaggcgctggaaatccaactggcca

SEQ ID NO: 579288 - DNA, 249 bp, Homo sapiens
ctgtgtaacgacggcagtgcctcatcatagctggtacgctgtaaactgcgggcatgcctcaaactacgcgtatcagtgatccaccgcggcctcgaggagtcgcccgtggctgaatcgtagtagaaactaggcatccaggctgaggagatcatgatgctcaagaagcagctctattgcatctacgccaagcacaccaaacagagcctgcaggtgatcgagtccgccatgaagaggggatccggctgtctg

SEQ ID NO: 579289 - DNA, 565 bp, Homo sapiens
  misc_feature (29)..(29): n is a, c, g, or t
  misc_feature (471)..(471): n is a, c, g, or t
  misc_feature (476)..(476): n is a, c, g, or t
  misc_feature (478)..(478): n is a, c, g, or t
  misc_feature (482)..(483): n is a, c, g, or t
  misc_feature (488)..(488): n is a, c, g, or t
  misc_feature (534)..(534): n is a, c, g, or t
  misc_feature (539)..(539): n is a, c, g, or t
aggatcgagctcggtctactttcacaggngaaataaattgaacttaaatacttaaattgacacttttaaattttatcttataagtctttaattactcaactttttttatgatctagtatctactgtggattatgaagactatcagagtgtaacccgttttctagacctcataccccaggatactctggcagtagcttcctttcgctccaaagcatacacacgagctgtaatgcactttgaatcatttattacagaaaagaagcaaaatattcaggaacatcttggatttttacaggtctgaagttaatatagtgaatttaataatgaaaattaatgtggccagtcttttatgtttatgttgttcattttattgaatgttttatatgctatgcttagaagcttatagattagtggggagagataaacatcaatttggtataatattttaagtacagtaacacacatgtaccntgagnangganncttanctcatccatgtggaatagggtgggagatggaagcggatgagccagnggtcnggaatggcttcttggagatggtgtct

SEQ ID NO: 579290 - DNA, 361 bp, Homo sapiens
ctggcccagaatcctcaatttaaatgtatctgcaaagtctctttttccatgtaaggtaacattcacagtttctctttttctttcttcttcttttttttttgtttttgagagggagttttgctcttgttgcccaggctggagtgcagtggcacggtctgggctcagtaccacctctgcctcccaggttctagcggttctcctgcctcagcctccctagtagctgggattacaggcatgtgctacaacacctggctaattttgttttgttgttgttgttgttgttgttgtttttggagatggagtctcactccactgcactctagtttgggcaacagagccggactccatctcaaaaaaaaaa

SEQ ID NO: 579291 - DNA, 345 bp, Homo sapiens
  misc_feature (1)..(1): n is a, c, g, or t
naaaaaaaaaaaaaagaaaagaaaaaaaaaaggaaaaagtttataatttgtgcatttcaggccaagacccatgttcttgacattgagcagcgactacaaggtgtaatcaagactcgaaatagagtgacaggactgccgttatctattgaaggacatgtgcattaccttatacaagaagctactgatgaaaacttactatgccagatgtatcttggttggactccatatatgtgaaatgaaattatgtaaaagaatatgttaataatctaaaagtaatgcatttggtatgaatctgtggttgtatctgttcaattctaaagtacaacataaatttacgttctcagc

SEQ ID NO: 579292 - DNA, 8371 bp, Homo sapiens
gcctccacacggctccgtcgggcgccgcgctcttccggcagcggtacgtttggagacgccgggaacccgcgttggcgtggttgactagtgcctcgcagcctcagcatgggggaacatggcctggagctggcttccatgatccccgccctgcgggagctgggcagtgccacaccagaggaatataatacagttgtacagaagccaagacaaattctgtgtcaattcattgaccggatacttacagatgtaaatgttgttgctgtagaacttgtaaagaaaactgactctcagccaacctccgtgatgttgcttgatttcatccagcatatcatgaaatcctccccacttatgtttgtaaatgtgagtggaagccatgagcgcaaaggcagttgtattgaattcagtaattggatcataacgagacttctgcggattgcagcaactccctcctgtcatttgttacacaagaaaatctgtgaagtcatctgttcattattatttctttttaaaagcaagagtcctgctatttttggggtactcacaaaagaattattacaactttttgaagacttggtttacctccatagaagaaatgtgatgggtcatgctgtggaatggccagtggtcatgagccgatttttaagtcaattagatgaacacatgggatatttacaatcagctcctttgcagttgatgagtatgcaaaatttagaatttattgaagtcactttattaatggttcttactcgtattattgcaattgtgttttttagaaggcaagaactcttactttggcagataggttgtgttctgctagagtatggtagtccaaaaattaaatccctagcaattagctttttaacagaactttttcagcttggaggactaccagcacaaccagctagcacttttttcagctcatttttggaattattaaaacaccttgtagaaatggatactgaccaattgaaactctatgaagagccattatcaaagctgataaagacactatttccctttgaagcagaagcttatagaaatattgaacctgtctatttaaatatgctgctggaaaaactctgtgtcatgtttgaagacggtgtgctcatgcggcttaagtctgatttgctaaaagcagctttgtgccatttactgcagtatttccttaaatttgtgccagctgggtatgaatctgctttacaagtcaggaaggtctatgtgagaaatatttgtaaagctcttttggatgtgcttggaattgaggtagatgcagagtacttgttgggcccactttatgcagctttgaaaatggaaagtatggaaatcattgaggagattcaatgccaaactcaacaggaaaacctcagcagtaatagtgatggaatatcacccaaaaggcgtcgtctcagctcgtctctaaacccttctaaaagagcaccaaaacagactgaggaaattaaacatgtggacatgaaccaaaagagcatattatggagtgcactgaaacagaaagctgaatcccttcagatttcccttgaatacagtggcctaaagaatcctgttattgagatgttagaaggaattgctgttgtcttacaactgactgctctgtgtactgttcattgttctcatcaaaacatgaactgccgtactttcaaggactgtcaacataaatccaagaagaaaccttctgtagtgataacttggatgtcattggatttttacacaaaagtgcttaagagctgtagaagtttgttagaatctgttcagaaactggacctggaggcaaccattgataaggtggtgaaaatttatgatgctttgatttatatgcaagtaaacagttcatttgaagatcatatcctggaagatttatgtggtatgctctcacttccatggatttattcccattctgatgatggctgtttaaagttgaccacatttgccgctaatcttctaacattaagctgtaggatttcagatagctattcaccacaggcacaatcacgatgtgtgtttcttctgactctgtttccaagaagaatattccttgagtggagaacagcagtttacaactgggccctgcagagctcccatgaagtaatccgggctagttgtgttagtggattttttatcttattgcagcagcagaattcttgtaacagagttcccaagattcttatagataaagtcaaagatgattctgacattgtcaagaaagaatttgcttctatacttggtcaacttgtctgtactcttcacggcatgttttatctgacaagttctttaacagaacctttctctgaacacggacatgtggacctcttctgtaggaacttgaaagccacttctcaacatgaatgttcatcttctcaactaaaagcttctgtctgcaagccattccttttcctactgaaaaaaaaaatacctagtccagtaaaacttgctttcatagataatctacatcatctttgtaagcatcttgattttagagaagatgaaacagatgtaaaagcagttcttggaactttattaaatttaatggaagatccagacaaagatgttagagtggcttttagtggaaatatcaagcacatattggaatccttggactctgaagatggatttataaaggagctttttgtcttaagaatgaaggaagcatatacacatgcccaaatatcaagaaataatgagctgaaggataccttgattcttacaacaggggatattggaagggccgcaaaaggagatttggtaccatttgcactcttacacttattgcattgtttgttatccaagtcagcatctgtctctggagcagcatacacagaaattagagctctggttgcagctaaaagtgttaaactgcaaagttttttcagccagtataagaaacccatctgtcagtttttggtagaatcccttcactctagtcagatgacagcacttccgaatactccatgccagaatgctgacgtgcgaaaacaagatgtggctcaccagagagaaatggctttaaatacgttgtctgaaattgccaacgttttcgactttcctgatcttaatcgttttcttactaggacattacaagttctactacctgatcttgctgccaaagcaagccctgcagcttctgctctcattcgaactttaggaaaacaattaaatgtcaatcgtagagagattttaataaacaacttcaaatatattttttctcatttggtctgttcttgttccaaagatgaattagaacgtgcccttcattatctgaagaatgaaacagaaattgaactggggagcctgttgagacaagatttccaaggattgcataatgaattattgctgcgtattggagaacactatcaacaggtttttaatggtttgtcaatacttgcctcatttgcatccagtgatgatccatatcagggcccgagagatatcatatcacctgaactgatggctgattatttacaacccaaattgttgggcattttggctttttttaacatgcagttactgagctctagtgttggcattgaagataagaaaatggccttgaacagtttgatgtctttgatgaagttaatgggacccaaacatgtcagttctgtgagggtgaagatgatgaccacactgagaactggccttcgattcaaggatgattttcctgaattgtgttgcagagcttgggactgctttgttcgctgcctggatcatgcttgtctgggctcccttctcagtcatgtaatagtagctttgttacctcttatacacatccagcctaaagaaactgcagctatcttccactacctcataattgaaaacagggatgctgtgcaagattttcttcatgaaatatattttttacctgatcatccagaattaaaaaagataaaagccgttctccaggaatacagaaaggagacctctgagagcactgatcttcagacaactcttcagctctctatgaaggccattcaacatgaaaatgtcgatgttcgtattcatgctcttacaagcttgaaggaaaccttgtataaaaatcaggaaaaactgataaagtatgcaacagacagtgaaacagtagaacctattatctcacagttggtgacagtgcttttgaaaggttgccaagatgcaaactctcaagctcggttgctctgtggggaatgtttaggggaattgggggcgatagatccaggtcgattagatttctcaacaactgaaactcaaggaaaagattttacatttgtgactggagtagaagattcaagctttgcctatggattattgatggagctaacaagagcttaccttgcgtatgctgataatagccgagctcaagattcagctgcctatgccattcaggagttgctttctatttatgactgtagagagatggagaccaacggcccaggtcaccaattgtggaggagatttcctgagcatgttcgggaaatactagaacctcatctaaataccagatacaagagttctcagaagtcaaccgattggtctggagtaaagaagccaatttacttaagtaaattgggtagtaactttgcagaatggtcagcatcttgggcaggttatcttattacaaaggttcgacatgatcttgccagtaaaattttcacctgctgtagcattatgatgaagcatgatttcaaagtgaccatctatcttcttccacatattctggtgtatgtcttactgggttgtaatcaagaagatcagcaggaggtttatgcagaaattatggcagttctaaagcatgacgatcagcataccataaatacccaagacattgcatctgatctgtgtcaactcagtacacagactgtgttctccatgcttgaccatctcacacagtgggcaaggcacaaatttcaggcactgaaagctgagaaatgtccacacagcaaatcaaacagaaataaggtagactcaatggtatctactgtggattatgaagactatcagagtgtaacccgttttctagacctcataccccaggatactctggcagtagcttcctttcgctccaaagcatacacacgagctgtaatgcactttgaatcatttattacagaaaagaagcaaaatattcaggaacatcttggatttttacagaaattgtatgctgctatgcatgaacctgatggagtggccggagtcagtgcaattagaaaggcagaaccatctctaaaagaacagatccttgaacatgaaagccttggcttgctgagggatgccactgcttgttatgacagggctattcagctagaaccagaccagatcattcattaccatggtgtagtaaagtccatgttaggtcttggtcagctgtctactgttatcactcaggtgaatggagtgcatgctaacaggtccgagtggacagatgaattaaacacgtacagagtggaagcagcttggaaattgtcacagtgggatttggtggaaaactatttggcagcagatggaaaatctacaacatggagtgtcagactgggacagctattattatcagccaaaaaaagagatatcacagctttttatgactcactgaaactagtgagagcagaacaaattgtacctctttcagctgcaagctttgaaagaggctcctaccaacgaggatatgaatatattgtgagattgcacatgttatgtgagttggagcatagcatcaaaccacttttccagcattctccaggtgacagttctcaagaagattctctaaactgggtagctcgactagaaatgacccagaattcctacagagccaaggagcctatcctggctctccggagggctttactaagcctcaacaaaagaccagattacaatgaaatggttggagaatgctggctgcagagtgccagggtagctagaaaggctggtcaccaccagacagcctacaatgctctccttaatgcaggggaatcacgactcgctgaactgtacgtggaaagggcaaagtggctctggtccaagggtgatgttcaccaggcactaattgttcttcaaaaaggtgttgaattatgttttcctgaaaatgaaaccccacctgagggtaagaacatgttaatccatggtcgagctatgctactagtgggccgatttatggaagaaacagctaactttgaaagcaatgcaattatgaaaaaatataaggatgtgaccgcgtgcctgccagaatgggaggatgggcatttttaccttgccaagtactatgacaaattgatgcccatggtcacagacaacaaaatggaaaagcaaggtgatctcatccggtatatagttcttcattttggcagatctctacaatatggaaatcagttcatatatcagtcaatgccacgaatgttaactctatggcttgattatggtacaaaggcatatgaatgggaaaaagctggccgctccgatcgtgtacaaatgaggaatgatttgggtaaaataaacaaggttatcacagagcatacaaactatttagctccatatcaatttttgactgctttttcacaattgatctctcgaatttgtcattctcacgatgaagtttttgttgtcttgatggaaataatagccaaagtatttctagcctatcctcaacaagcaatgtggatgatgacagctgtgtcaaagtcatcttatcccatgcgtgtgaacagatgcaaggaaatcctcaataaagctattcatatgaaaaaatccttagagaagtttgttggagatgcaactcgcctaacagataagcttctagaattgtgcaataaaccggttgatggaagtagttccacattaagcatgagcactcattttaaaatgcttaaaaagctggtagaagaagcaacatttagtgaaatcctcattcctctacaatcagtcatgatacctacacttccatcaattctgggtacccatgctaaccatgctagccatgaaccatttcctggacattgggcctatattgcagggtttgatgatatggtggaaattcttgcttctcttcagaaaccaaagaagatttctttaaaaggctcagatggaaagttctacatcatgatgtgtaagccaaaagatgacctgagaaaggattgtagactaatggaattcaattccttgattaataagtgcttaagaaaagatgcagagtctcgtagaagagaacttcatattcgaacatatgcagttattccactaaatgatgaatgtgggattattgaatgggtgaacaacactgctggtttgagacctattctgaccaaactatataaagaaaagggagtgtatatgacaggaaaagaacttcgccagtgtatgctaccaaagtcagcagctttatctgaaaaactcaaagtattccgagaatttctcctgcccaggcatcctcctatttttcatgagtggtttctgagaacattccctgatcctacatcatggtacagtagtagatcagcttactgccgttccactgcagtaatgtcaatggttggttatattctggggcttggagaccgtcatggtgaaaatattctctttgattctttgactggtgaatgcgtacatgtagatttcaattgtcttttcaataagggagaaacctttgaagttccagaaattgtgccatttcgcctgactcataatatggttaatggaatgggtcctatgggaacagagggtctttttcgaagagcatgtgaagttacaatgaggctgatgcgtgatcagcgagagcctttaatgagtgtcttaaagacttttctacatgatcctcttgtggaatggagtaaaccagtgaaagggcattccaaagcgccactgaatgaaactggagaagttgtcaatgaaaagatggcaagttcttcaaattcatttaagtaacgtgaagtttgtgcttcaaagggtacttcccttgatctgattttctggatatgagaaatagcctcacaaggatcctgatgaactctctctttagtggacctcattaaaggccaagacccatgttcttgacattgagcagcgactacaaggtgtaatcaagactcgaaatagagtgacaggactgccgttatctattgaaggacatgtgcattaccttatacaagaagctactgatgaaaacttactatgccagatgtatcttggttggactccatatatgtgaaatgaaattatgtaaaagaatatgttaataatctaaaagtaatgcatttggtatgaatctgtggttgtatctgttcaattctaaagtacaacataaatttacgttctcagcaactgttatttctctctgatcattaattatatgtaaaataatatacattcagttattaagaaataaactgctttcttaata

SEQ ID NO: 579293 - DNA, 320 bp, Homo sapiens
gcggccgaagtgctgtactgtaggctgcctgagagggtcaggcttgacgtggcaaaaggatcagtagatagcctgaacgaaacagtctgatgcacatggatctgaaccttcgaaaggatcaccaccaaatggatcgatttttccaaaaggatcatccttgacaaggatcactgccaagcaaaaggatcagactggaacaaaatccaagttagtatctgcaactaggacctgtcagcgtaacttgcagtctacacttaaatggatcttcctctttgagaatgtctattattagtcgagttcagaacaatactttatgcagt

SEQ ID NO: 579294 - DNA, 8178 bp, Homo sapiens
gcctccacacggctccgtcgggcgccgcgctcttccggcagcggtacgtttggagacgccgggaacccgcgttggcgtggttgactagtgcctcgcagcctcagcatgggggaacatggcctggagctggcttccatgatccccgccctgcgggagctgggcagtgccacaccagaggaatataatacagttgtacagaagccaagacaaattctgtgtcaattcattgaccggatacttacagatgtaaatgttgttgctgtagaacttgtaaagaaaactgactctcagccaacctccgtgatgttgcttgatttcatccagcatatcatgaaatcctccccacttatgtttgtaaatgtgagtggaagccatgagcgcaaaggcagttgtattgaattcagtaattggatcataacgagacttctgcggattgcagcaactccctcctgtcatttgttacacaagaaaatctgtgaagtcatctgttcattattatttctttttaaaagcaagagtcctgctatttttggggtactcacaaaagaattattacaactttttgaagacttggtttacctccatagaagaaatgtgatgggtcatgctgtggaatggccagtggtcatgagccgatttttaagtcaattagatgaacacatgggatatttacaatcagctcctttgcagttgatgagtatgcaaaatttagaatttattgaagtcactttattaatggttcttactcgtattattgcaattgtgttttttagaaggcaagaactcttactttggcagataggttgtgttctgctagagtatggtagtccaaaaattaaatccctagcaattagctttttaacagaactttttcagcttggaggactaccagcacaaccagctagcacttttttcagctcatttttggaattattaaaacaccttgtagaaatggatactgaccaattgaaactctatgaagagccattatcaaagctgataaagacactatttccctttgaagcagaagcttatagaaatattgaacctgtctatttaaatatgctgctggaaaaactctgtgtcatgtttgaagacggtgtgctcatgcggcttaagtctgatttgctaaaagcagctttgtgccatttactgcagtatttccttaaatttgtgccagctgggtatgaatctgctttacaagtcaggaaggtctatgtgagaaatatttgtaaagctcttttggatgtgcttggaattgaggtagatgcagagtacttgttgggcccactttatgcagctttgaaaatggaaagtatggaaatcattgaggagattcaatgccaaactcaacaggaaaacctcagcagtaatagtgatggaatatcacccaaaaggcgtcgtctcagctcgtctctaaacccttctaaaagagcaccaaaacagactgaggaaattaaacatgtggacatgaaccaaaagagcatattatggagtgcactgaaacagaaagctgaatcccttcagatttcccttgaatacagtggcctaaagaatcctgttattgagatgttagaaggaattgctgttgtcttacaactgactgctctgtgtactgttcattgttctcatcaaaacatgaactgccgtactttcaaggactgtcaacataaatccaagaagaaaccttctgtagtgataacttggatgtcattggatttttacacaaaagtgcttaagagctgtagaagtttgttagaatctgttcagaaactggacctggaggcaaccattgataaggtggtgaaaatttatgatgctttgatttatatgcaagtaaacagttcatttgaagatcatatcctggaagatttatgtggtatgctctcacttccatggatttattcccattctgatgatggctgtttaaagttgaccacatttgccgctaatcttctaacattaagctgtaggatttcagatagctattcaccacaggcacaatcacgatgtgtgtttcttctgactctgtttccaagaagaatattccttgagtggagaacagcagtttacaactgggccctgcagagctcccatgaagtaatccgggctagttgtgttagtggattttttatcttattgcagcagcagaattcttgtaacagagttcccaagattcttatagataaagtcaaagatgattctgacattgtcaagaaagaatttgcttctatacttggtcaacttgtctgtactcttcacggcatgttttatctgacaagttctttaacagaacctttctctgaacacggacatgtggacctcttctgtaggaacttgaaagccacttctcaacatgaatgttcatcttctcaactaaaagcttctgtctgcaagccattccttttcctactgaaaaaaaaaatacctagtccagtaaaacttgctttcatagataatctacatcatctttgtaagcatcttgattttagagaagatgaaacagatgtaaaagcagttcttggaactttattaaatttaatggaagatccagacaaagatgttagagtggcttttagtggaaatatcaagcacatattggaatccttggactctgaagatggatttataaaggagctttttgtcttaagaatgaaggaagcatatacacatgcccaaatatcaagaaataatgagctgaaggataccttgattcttacaacaggggatattggaagggccgcaaaaggagatttggtaccatttgcactcttacacttattgcattgtttgttatccaagtcagcatctgtctctggagcagcatacacagaaattagagctctggttgcagctaaaagtgttaaactgcaaagttttttcagccagtataagaaacccatctgtcagtttttggtagaatcccttcactctagtcagatgacagcacttccgaatactccatgccagaatgctgacgtgcgaaaacaagatgtggctcaccagagagaaatggctttaaatacgttgtctgaaattgccaacgttttcgactttcctgatcttaatcgttttcttactaggacattacaagttctactacctgatcttgctgccaaagcaagccctgcagcttctgctctcattcgaactttaggaaaacaattaaatgtcaatcgtagagagattttaataaacaacttcaaatatattttttctcatttggtctgttcttgttccaaagatgaattagaacgtgcccttcattatctgaagaatgaaacagaaattgaactggggagcctgttgagacaagatttccaaggattgcataatgaattattgctgcgtattggagaacactatcaacaggtttttaatggtttgtcaatacttgcctcatttgcatccagtgatgatccatatcagggcccgagagatatcatatcacctgaactgatggctgattatttacaacccaaattgttgggcattttggctttttttaacatgcagttactgagctctagtgttggcattgaagataagaaaatggccttgaacagtttgatgtctttgatgaagttaatgggacccaaacatgtcagttctgtgagggtgaagatgatgaccacactgagaactggccttcgattcaaggatgattttcctgaattgtgttgcagagcttgggactgctttgttcgctgcctggatcatgcttgtctgggctcccttctcagtcatgtaatagtagctttgttacctcttatacacatccagcctaaagaaactgcagctatcttccactacctcataattgaaaacagggatgctgtgcaagattttcttcatgaaatatattttttacctgatcatccagaattaaaaaagataaaagccgttctccaggaatacagaaaggagacctctgagagcactgatcttcagacaactcttcagctctctatgaaggccattcaacatgaaaatgtcgatgttcgtattcatgctcttacaagcttgaaggaaaccttgtataaaaatcaggaaaaactgataaagtatgcaacagacagtgaaacagtagaacctattatctcacagttggtgacagtgcttttgaaaggttgccaagatgcaaactctcaagctcggttgctctgtggggaatgtttaggggaattgggggcgatagatccaggtcgattagatttctcaacaactgaaactcaaggaaaagattttacatttgtgactggagtagaagattcaagctttgcctatggattattgatggagctaacaagagcttaccttgcgtatgctgataatagccgagctcaagattcagctgcctatgccattcaggagttgctttctatttatgactgtagagagatggagaccaacggcccaggtcaccaattgtggaggagatttcctgagcatgttcgggaaatactagaacctcatctaaataccagatacaagagttctcagaagtcaaccgattggtctggagtaaagaagccaatttacttaagtaaattgggtagtaactttgcagaatggtcagcatcttgggcaggttatcttattacaaaggttcgacatgatcttgccagtaaaattttcacctgctgtagcattatgatgaagcatgatttcaaagtgaccatctatcttcttccacatattctggtgtatgtcttactgggttgtaatcaagaagatcagcaggaggtttatgcagaaattatggcagttctaaagcatgacgatcagcataccataaatacccaagacattgcatctgatctgtgtcaactcagtacacagactgtgttctccatgcttgaccatctcacacagtgggcaaggcacaaatttcaggcactgaaagctgagaaatgtccacacagcaaatcaaacagaaataaggtagactcaatggtatctactgtggattatgaagactatcagagtgtaacccgttttctagacctcataccccaggatactctggcagtagcttcctttcgctccaaagcatacacacgagctgtaatgcactttgaatcatttattacagaaaagaagcaaaatattcaggaacatcttggatttttacagaaattgtatgctgctatgcatgaacctgatggagtggccggagtcagtgcaattagaaaggcagaaccatctctaaaagaacagatccttgaacatgaaagccttggcttgctgagggatgccactgcttgttatgacagggctattcagctagaaccagaccagatcattcattaccatggtgtagtaaagtccatgttaggtcttggtcagctgtctactgttatcactcaggtgaatggagtgcatgctaacaggtccgagtggacagatgaattaaacacgtacagagtggaagcagcttggaaattgtcacagtgggatttggtggaaaactatttggcagcagatggaaaatctacaacatggagtgtcagactgggacagctattattatcagccaaaaaaagagatatcacagctttttatgactcactgaaactagtgagagcagaacaaattgtacctctttcagctgcaagctttgaaagaggctcctaccaacgaggatatgaatatattgtgagattgcacatgttatgtgagttggagcatagcatcaaaccacttttccagcattctccaggtgacagttctcaagaagattctctaaactgggtagctcgactagaaatgacccagaattcctacagagccaaggagcctatcctggctctccggagggctttactaagcctcaacaaaagaccagattacaatgaaatggttggagaatgctggctgcagagtgccagggtagctagaaaggctggtcaccaccagacagcctacaatgctctccttaatgcaggggaatcacgactcgctgaactgtacgtggaaagggcaaagtggctctggtccaagggtgatgttcaccaggcactaattgttcttcaaaaaggtgttgaattatgttttcctgaaaatgaaaccccacctgagggtaagaacatgttaatccatggtcgagctatgctactagtgggccgatttatggaagaaacagctaactttgaaagcaatgcaattatgaaaaaatataaggatgtgaccgcgtgcctgccagaatgggaggatgggcatttttaccttgccaagtactatgacaaattgatgcccatggtcacagacaacaaaatggaaaagcaaggtgatctcatccggtatatagttcttcattttggcagatctctacaatatggaaatcagttcatatatcagtcaatgccacgaatgttaactctatggcttgattatggtacaaaggcatatgaatgggaaaaagctggccgctccgatcgtgtacaaatgaggaatgatttgggtaaaataaacaaggttatcacagagcatacaaactatttagctccatatcaatttttgactgctttttcacaattgatctctcgaatttgtcattctcacgatgaagtttttgttgtcttgatggaaataatagccaaagtatttctagcctatcctcaacaagcaatgtggatgatgacagctgtgtcaaagtcatcttatcccatgcgtgtgaacagatgcaaggaaatcctcaataaagctattcatatgaaaaaatccttagagaagtttgttggagatgcaactcgcctaacagataagcttctagaattgtgcaataaaccggttgatggaagtagttccacattaagcatgagcactcattttaaaatgcttaaaaagctggtagaagaagcaacatttagtgaaatcctcattcctctacaatcagtcatgatacctacacttccatcaattctgggtacccatgctaaccatgctagccatgaaccatttcctggacattgggcctatattgcagggtttgatgatatggtggaaattcttgcttctcttcagaaaccaaagaagatttctttaaaaggctcagatggaaagttctacatcatgatgtgtaagccaaaagatgacctgagaaaggattgtagactaatggaattcaattccttgattaataagtgcttaagaaaagatgcagagtctcgtagaagagaacttcatattcgaacatatgcagttattccactaaatgatgaatgtgggattattgaatgggtgaacaacactgctggtttgagacctattctgaccaaactatataaagaaaagggagtgtatatgacaggaaaagaacttcgccagtgtatgctaccaaagtcagcagctttatctgaaaaactcaaagtattccgagaatttctcctgcccaggcatcctcctatttttcatgagtggtttctgagaacattccctgatcctacatcatggtacagtagtagatcagcttactgccgttccactgcagtaatgtcaatggttggttatattctggggcttggagaccgtcatggtggtcttttcaataagggagaaacctttgaagttccagaaattgtgccatttcgcctgactcataatatggttaatggaatgggtcctatgggaacagagggtctttttcgaagagcatgtgaagttacaatgaggctgatgcgtgatcagcgagagcctttaatgagtgtcttaaagacttttctacatgatcctcttgtggaatggagtaaaccagtgaaagggcattccaaagcgccactgaatgaaactggagaagttgtcaatgaaaaggccaagacccatgttcttgacattgagcagcgactacaaggtgtaatcaagactcgaaatagagtgacaggactgccgttatctattgaaggacatgtgcattaccttatacaagaagctactgatgaaaacttactatgccagatgtatcttggttggactccatatatgtgaaatgaaattatgtaaaagaatatgttaataatctaaaagtaatgcatttggtatgaatctgtggttgtatctgttcaattctaaagtacaacataaatttacgttctcagcaactgttatttctctctgatcattaattatatgtaaaataatatacattcagttattaagaaataaactgctttcttaata

SEQ ID NO: 579295 - DNA, 720 bp, Homo sapiens
  misc_feature (9)..(9): n is a, c, g, or t
  misc_feature (26)..(26): n is a, c, g, or t
  misc_feature (47)..(47): n is a, c, g, or t
  misc_feature (51)..(51): n is a, c, g, or t
tggtatcangcttaatgactttcgtntctgacgtatgcagtatttcnctangtcaccaaccatgtgccgctccctcctgggccagggccccaccatttcctttttgtctcttctttgatctttttctttttctttgggtttttttttttttgagacagttctctcactgtgtcatccaggctggagtgtggtggtgccaccatggctcactgcagccttgaccctctgggctcaagcaatgctcccacctcagcctcctgagtagctggactacaggtgtgcaccaccatgcctggctcatttttaaattatttgtagagatggggtctccctgtgttgcccaggctggtctcgaactcctgggctcaagccattcttccaccttggccgtcctaagtgctgggattacaggtgtgagccaccgtacttagccttccactttttgggcaaggaaaagggagacacactgtgggccactgagcctctggaggggcctggtgaggaagacaagttgtgggaagcctgtgtctcattgcatgactccgggggaaaggcacattctttggggttaccagcctttaattagtaattctgggctaagctgattccagtggttaaaatgtttttccgtcaatatttccaactacatttttacccgaaagcttaaatattaaactctgggggtcctatagaatgtagtatctccccaattaatgtgcg

SEQ ID NO: 579296 - DNA, 8551 bp, Homo sapiens
gcctccacacggctccgtcgggcgccgcgctcttccggcagcggtacgtttggagacgccgggaacccgcgttggcgtggttgactagtgcctcgcagcctcagcatgggggaacatggcctggagctggcttccatgatccccgccctgcgggagctgggcagtgccacaccagaggaatataatacagttgtacagaagccaagacaaattctgtgtcaattcattgaccggatacttacagatgtaaatgttgttgctgtagaacttgtaaagaaaactgactctcagccaacctccgtgatgttgcttgatttcatccagcatatcatgaaatcctccccacttatgtttgtaaatgtgagtggaagccatgagcgcaaaggcagttgtattgaattcagtaattggatcataacgagacttctgcggattgcagcaactccctcctgtcatttgttacacaagaaaatctgtgaagtcatctgttcattattatttctttttaaaagcaagagtcctgctatttttggggtactcacaaaagaattattacaactttttgaagacttggtttacctccatagaagaaatgtgatgggtcatgctgtggaatggccagtggtcatgagccgatttttaagtcaattagatgaacacatgggatatttacaatcagctcctttgcagttgatgagtatgcaaaatttagaatttattgaagtcactttattaatggttcttactcgtattattgcaattgtgttttttagaaggcaagaactcttactttggcagataggttgtgttctgctagagtatggtagtccaaaaattaaatccctagcaattagctttttaacagaactttttcagcttggaggactaccagcacaaccagctagcacttttttcagctcatttttggaattattaaaacaccttgtagaaatggatactgaccaattgaaactctatgaagagccattatcaaagctgataaagacactatttccctttgaagcagaagcttatagaaatattgaacctgtctatttaaatatgctgctggaaaaactctgtgtcatgtttgaagacggtgtgctcatgcggcttaagtctgatttgctaaaagcagctttgtgccatttactgcagtatttccttaaatttgtgccagctgggtatgaatctgctttacaagtcaggaaggtctatgtgagaaatatttgtaaagctcttttggatgtgcttggaattgaggtagatgcagagtacttgttgggcccactttatgcagctttgaaaatggaaagtatggaaatcattgaggagattcaatgccaaactcaacaggaaaacctcagcagtaatagtgatggaatatcacccaaaaggcgtcgtctcagctcgtctctaaacccttctaaaagagcaccaaaacagactgaggaaattaaacatgtggacatgaaccaaaagagcatattatggagtgcactgaaacagaaagctgaatcccttcagatttcccttgaatacagtggcctaaagaatcctgttattgagatgttagaaggaattgctgttgtcttacaactgactgctctgtgtactgttcattgttctcatcaaaacatgaactgccgtactttcaaggactgtcaacataaatccaagaagaaaccttctgtagtgataacttggatgtcattggatttttacacaaaagtgcttaagagctgtagaagtttgttagaatctgttcagaaactggacctggaggcaaccattgataaggtggtgaaaatttatgatgctttgatttatatgcaagtaaacagttcatttgaagatcatatcctggaagatttatgtggtatgctctcacttccatggatttattcccattctgatgatggctgtttaaagttgaccacatttgccgctaatcttctaacattaagctgtaggatttcagatagctattcaccacaggcacaatcacgatgtgtgtttcttctgactctgtttccaagaagaatattccttgagtggagaacagcagtttacaactgggccctgcagagctcccatgaagtaatccgggctagttgtgttagtggattttttatcttattgcagcagcagaattcttgtaacagagttcccaagattcttatagataaagtcaaagatgattctgacattgtcaagaaagaatttgcttctatacttggtcaacttgtctgtactcttcacggcatgttttatctgacaagttctttaacagaacctttctctgaacacggacatgtggacctcttctgtaggaacttgaaagccacttctcaacatgaatgttcatcttctcaactaaaagcttctgtctgcaagccattccttttcctactgaaaaaaaaaatacctagtccagtaaaacttgctttcatagataatctacatcatctttgtaagcatcttgattttagagaagatgaaacagatgtaaaagcagttcttggaactttattaaatttaatggaagatccagacaaagatgttagagtggcttttagtggaaatatcaagcacatattggaatccttggactctgaagatggatttataaaggagctttttgtcttaagaatgaaggaagcatatacacatgcccaaatatcaagaaataatgagctgaaggataccttgattcttacaacaggggatattggaagggccgcaaaaggagatttggtaccatttgcactcttacacttattgcattgtttgttatccaagtcagcatctgtctctggagcagcatacacagaaattagagctctggttgcagctaaaagtgttaaactgcaaagttttttcagccagtataagaaacccatctgtcagtttttggtagaatcccttcactctagtcagatgacagcacttccgaatactccatgccagaatgctgacgtgcgaaaacaagatgtggctcaccagagagaaatggctttaaatacgttgtctgaaattgccaacgttttcgactttcctgatcttaatcgttttcttactaggacattacaagttctactacctgatcttgctgccaaagcaagccctgcagcttctgctctcattcgaactttaggaaaacaattaaatgtcaatcgtagagagattttaataaacaacttcaaatatattttttctcatttggtctgttcttgttccaaagatgaattagaacgtgcccttcattatctgaagaatgaaacagaaattgaactggggagcctgttgagacaagatttccaaggattgcataatgaattattgctgcgtattggagaacactatcaacaggtttttaatggtttgtcaatacttgcctcatttgcatccagtgatgatccatatcagggcccgagagatatcatatcacctgaactgatggctgattatttacaacccaaattgttgggcattttggctttttttaacatgcagttactgagctctagtgttggcattgaagataagaaaatggccttgaacagtttgatgtctttgatgaagttaatgggacccaaacatgtcagttctgtgagggtgaagatgatgaccacactgagaactggccttcgattcaaggatgattttcctgaattgtgttgcagagcttgggactgctttgttcgctgcctggatcatgcttgtctgggctcccttctcagtcatgtaatagtagctttgttacctcttatacacatccagcctaaagaaactgcagctatcttccactacctcataattgaaaacagggatgctgtgcaagattttcttcatgaaatatattttttacctgatcatccagaattaaaaaagataaaagccgttctccaggaatacagaaaggagacctctgagagcactgatcttcagacaactcttcagctctctatgaaggccattcaacatgaaaatgtcgatgttcgtattcatgctcttacaagcttgaaggaaaccttgtataaaaatcaggaaaaactgataaagtatgcaacagacagtgaaacagtagaacctattatctcacagttggtgacagtgcttttgaaaggttgccaagatgcaaactctcaagctcggttgctctgtggggaatgtttaggggaattgggggcgatagatccaggtcgattagatttctcaacaactgaaactcaaggaaaagattttacatttgtgactggagtagaagattcaagctttgcctatggattattgatggagctaacaagagcttaccttgcgtatgctgataatagccgagctcaagattcagctgcctatgccattcaggagttgctttctatttatgactgtagagagatggagaccaacggcccaggtcaccaattgtggaggagatttcctgagcatgttcgggaaatactagaacctcatctaaataccagatacaagagttctcagaagtcaaccgattggtctggagtaaagaagccaatttacttaagtaaattgggtagtaactttgcagaatggtcagcatcttgggcaggttatcttattacaaaggttcgacatgatcttgccagtaaaattttcacctgctgtagcattatgatgaagcatgatttcaaagtgaccatctatcttcttccacatattctggtgtatgtcttactgggttgtaatcaagaagatcagcaggaggtttatgcagaaattatggcagttctaaagcatgacgatcagcataccataaatacccaagacattgcatctgatctgtgtcaactcagtacacagactgtgttctccatgcttgaccatctcacacagtgggcaaggcacaaatttcaggcactgaaagctgagaaatgtccacacagcaaatcaaacagaaataaggtagactcaatggtatctactgtggattatgaagactatcagagtgtaacccgttttctagacctcataccccaggatactctggcagtagcttcctttcgctccaaagcatacacacgagctgtaatgcactttgaatcatttattacagaaaagaagcaaaatattcaggaacatcttggatttttacagaaattgtatgctgctatgcatgaacctgatggagtggccggagtcagtgcaattagaaaggcagaaccatctctaaaagaacagatccttgaacatgaaagccttggcttgctgagggatgccactgcttgttatgacagggctattcagctagaaccagaccagatcattcattaccatggtgtagtaaagtccatgttaggtcttggtcagctgtctactgttatcactcaggtgaatggagtgcatgctaacaggtccgagtggacagatgaattaaacacgtacagagtggaagcagcttggaaattgtcacagtgggatttggtggaaaactatttggcagcagatggaaaatctacaacatggagtgtcagactgggacagctattattatcagccaaaaaaagagatatcacagctttttatgactcactgaaactagtgagagcagaacaaattgtacctctttcagctgcaagctttgaaagaggctcctaccaacgaggatatgaatatattgtgagattgcacatgttatgtgagttggagcatagcatcaaaccacttttccagcattctccaggtgacagttctcaagaagattctctaaactgggtagctcgactagaaatgacccagaattcctacagagccaaggagcctatcctggctctccggagggctttactaagcctcaacaaaagaccagattacaatgaaatggttggagaatgctggctgcagagtgccagggtagctagaaaggctggtcaccaccagacagcctacaatgctctccttaatgcaggggaatcacgactcgctgaactgtacgtggaaagggcaaagtggctctggtccaagggtgatgttcaccaggcactaattgttcttcaaaaaggtgttgaattatgttttcctgaaaatgaaaccccacctgagggtaagaacatgttaatccatggtcgagctatgctactagtgggccgatttatggaagaaacagctaactttgaaagcaatgcaattatgaaaaaatataaggatgtgaccgcgtgcctgccagaatgggaggatgggcatttttaccttgccaagtactatgacaaattgatgcccatggtcacagacaacaaaatggaaaagcaaggtgatctcatccggtatatagttcttcattttggcagatctctacaatatggaaatcagttcatatatcagtcaatgccacgaatgttaactctatggcttgattatggtacaaaggcatatgaatgggaaaaagctggccgctccgatcgtgtacaaatgaggaatgatttgggtaaaataaacaaggttatcacagagcatacaaactatttagctccatatcaatttttgactgctttttcacaattgatctctcgaatttgtcattctcacgatgaagtttttgttgtcttgatggaaataatagccaaagtatttctagcctatcctcaacaagcaatgtggatgatgacagctgtgtcaaagtcatcttatcccatgcgtgtgaacagatgcaaggaaatcctcaataaagctattcatatgaaaaaatccttagagaagtttgttggagatgcaactcgcctaacagataagcttctagaattgtgcaataaaccggttgatggaagtagttccacattaagcatgagcactcattttaaaatgcttaaaaagctggtagaagaagcaacatttagtgaaatcctcattcctctacaatcagtcatgatacctacacttccatcaattctgggtacccatgctaaccatgctagccatgaaccatttcctggacattgggcctatattgcagggtttgatgatatggtggaaattcttgcttctcttcagaaaccaaagaagatttctttaaaaggctcagatggaaagttctacatcatgatgtgtaagccaaaagatgacctgagaaaggattgtagactaatggaattcaattccttgattaataagtgcttaagaaaagatgcagagtctcgtagaagagaacttcatattcgaacatatgcagttattccactaaatgatgaatgtgggattattgaatgggtgaacaacactgctggtttgagacctattctgaccaaactatataaagaaaagggagtgtatatgacaggaaaagaacttcgccagtgtatgctaccaaagtcagcagctttatctgaaaaactcaaagtattccgagaatttctcctgcccaggcatcctcctatttttcatgagtggtttctgagaacattccctgatcctacatcatggtacagtagtagatcagcttactgccgttccactgcagtaatgtcaatggttggttatattctggggcttggagaccgtcatggtgaaaatattctctttgattctttgactggtgaatgcgtacatgtagatttcaattgtcttttcaataagggagaaacctttgaagttccagaaattgtgccatttcgcctgactcataatatggttaatggaatgggtcctatgggaacagagggtctttttcgaagagcatgtgaagttacaatgaggctgatgcgtgatcagcgagagcctttaatgagtgtcttaaagacttttctacatgatcctcttgtggaatggagtaaaccagtgaaagggcattccaaagcgccactgaatgaaactggagaagttgtcaatgaaaaggccaagacccatgttcttgacattgagcagcgactacaaggtgtaatcaagactcgaaatagagtgacaggactgccgttatctattgaaggacatgtgcattaccttatacaagaagctactgatgaaaacttactatgccagatgtatcttggttggactccatatatgtgaaatgaaattatgtaaaagaatatgttaataatctaaaagtaatgcatttggtatgaatctgtggttgtatctgttcaattctaaagtacaacataaatttacgttctcagcaactgttatttctctctgatcattaattatatgtaaaataatatacattcagttattaagaaataaactgctttcttaataaaaaaaaaaaaaaaaaaaaaaaaaaaaaaaaaaaaaaaaaaaaaaagggggggggaaaaaaaacggggggggcagtgcgacacaagggtcctgggtaaaagggggcgacccaaaaatgggcaagaaaaaatagacggcaagagggacccaaaagaaacaaagaaggacaagggaacacgagcaaccggagaacataggagaagacacccaacgatggggagaaaaaaacggacacaacgcacgagagagagacagcggcaaaaagacagggaagtaaacacgcaacagagaacaaaggaccagacagaatacaaacagg

SEQ ID NO: 579297 - DNA, 2995 bp, Homo sapiens
gtgactagaggacccgggatgaggaagtcactatgacagggctattcagctagaaccagaccagatcattcattaccatggtgtagtaaagtccatgttaggtcttggtcagctgtctactgttatcactcaggtgaatggagtgcatgctaacaggtccgagtggacagatgaattaaacacgtacagagtggaagcagcttggaaattgtcacagtgggatttggtggaaaactatttggcagcagatggaaaatctacaacatggagtgtcagactgggacagctattattatcagccaaaaaaagagatatcacagctttttatgactcactgaaactagtgagagcagaacaaattgtacctctttcagctgcaagctttgaaagaggctcctaccaacgaggatatgaatatattgtgagattgcacatgttatgtgagttggagcatagcatcaaaccacttttccagcattctccaggtgacagttctcaagaagattctctaaactgggtagctcgactagaaatgacccagaattcctacagagccaaggagcctatcctggctctccggagggctttactaagcctcaacaaaagaccagattacaatgaaatggttggagaatgctggctgcagagtgccagggtagctagaaaggctggtcaccaccagacagcctacaatgctctccttaatgcaggggaatcacgactcgctgaactgtacgtggaaagggcaaagtggctctggtccaagggtgatgttcaccaggcactaattgttcttcaaaaaggtgttgaattatgttttcctgaaaatgaaaccccacctgagggtaagaacatgttaatccatggtcgagctatgctactagtgggccgatttatggaagaaacagctaactttgaaagcaatgcaattatgaaaaaatataaggatgtgaccgcgtgcctgccagaatgggaggatgggcatttttaccttgccaagtactatgacaaattgatgcccatggtcacagacaacaaaatggaaaagcaaggtgatctcatccggtatatagttcttcattttggcagatctctacaatatggaaatcagttcatatatcagtcaatgccacgaatgttaactctatggcttgattatggtacaaaggcatatgaatgggaaaaagctggccgctccgatcgtgtacaaatgaggaatgatttgggtaaaataaacaaggttatcacagagcatacaaactatttagctccatatcaatttttgactgctttttcacaattgatctctcgaatttgtcattctcacgatgaagtttttgttgtcttgatggaaataatagccaaagtatttctagcctatcctcaacaagcaatgtggatgatgacagctgtgtcaaagtcatcttatcccatgcgtgtgaacagatgcaaggaaatcctcaataaagctattcatatgaaaaaatccttagagaagtttgttggagatgcaactcgcctaacagataagcttctagaattgtgcaataaaccggttgatggaagtagttccacattaagcatgagcactcattttaaaatgcttaaaaagctggtagaagaagcaacatttagtgaaatcctcattcctctacaatcagtcatgatacctacacttccatcaattctgggtacccatgctaaccatgctagccatgaaccatttcctggacattgggcctatattgcagggtttgatgatatggtggaaattcttgcttctcttcagaaaccaaagaagatttctttaaaaggctcagatggaaagttctacatcatgatgtgtaagccaaaagatgacctgagaaaggattgtagactaatggaattcaattccttgattaataagtgcttaagaaaagatgcagagtctcgtagaagagaacttcatattcgaacatatgcagttattccactaaatgatgaatgtgggattattgaatgggtgaacaacactgctggtttgagacctattctgaccaaactatataaagaaaagggagtgtatatgacaggaaaagaacttcgccagtgtatgctaccaaagtcagcagctttatctgaaaaactcaaagtattccgagaatttctcctgcccaggcatcctcctatttttcatgagtggtttctgagaacattccctgatcctacatcatggtacagtagtagatcagcttactgccgttccactgcagtaatgtcaatggttggttatattctggggcttggagaccgtcatggtgaaaatattctctttgattctttgactggtgaatgcgtacatgtagatttcaattgtcttttcaataagggagaaacctttgaagttccagaaattgtgccatttcgcctgactcataatatggttaatggaatgggtcctatgggaacagagggtctttttcgaagagcatgtgaagttacaatgaggctgatgcgtgatcagcgagagcctttaatgagtgtcttaaagacttttctacatgatcctcttgtggaatggagtaaaccagtgaaagggcattccaaagcgccactgaatgaaactggagaagttgtcaatgaaaaggccaagacccatgttcttgacattgagcagcgactacaaggtgtaatcaagactcgaaatagagtgacaggactgccgttatctattgaaggacatgtgcattaccttatacaagaagctactgatgaaaacttactatgccagatgtatcttggttggactccatatatgtgaaatgaaattatgtaaaagaatatgttaataatctaaaagtaatgcatttggtatgaatctgtggttgtatctgttcaattctaaagtacaacataaatttacgttctcagcaactgttatttctctctgatcattaattatatgtaaaataatatacattcagttattaagaaataaactgctttcttaata

SEQ ID NO: 579298 - DNA, 809 bp, Homo sapiens
ggaggacatgaatagtcgccaggcttggtggctcattgcgtctcccaaggacagaggagatcgttggtgtttcaaggccccgcggtcattatctcgtccggaccctgcggatagagttcttcactaccataacaaggagggatatgataggcggtgcagttggatataatctcctttagaaacaaatggaaattaagcttatgatacccatgcagtaggttcaggacttggaaactcatggatcttgacaaaacacaagcagaaaccaatgtctcagcgttcaactgcttgtatcaacatgtcagcctgtgttactatctataccgagatggtcactcaagctcaactggaaataacagtacaacagctaatggctcatttggatgctatcaggaaagacatggtcatcctagagtaaaagtgaattggcaaatctgagagcagagaatgagaacatgaacctggatttagaccaagtcaaggcagacgaactgaatggcatgaaaccagtcgcaatcacgagcagatacatacactggatatcagcttagaacggagcagagtaacagatatgtatacagactcagggaacaagcgaacttatggaaagcgaacgtagcagaatttacacaaaaaggatactcaaaccacaacgtctcatctccagagaccaagtaactaaccactggacgctgaacattgcttcctctacaaacccgtgcacggacatctaacaaaacttgcagacaattcgttatcttggagagttcggtgttacttgcctgggcattgcattggcactcactcga

SEQ ID NO: 579299 - DNA, 408 bp, Homo sapiens
caaggcgggtggatcacgaggtcaggagatggagaccatcctggctaacatggtgaaaccccgtctctactaaaaatacgaaaaattagccaggcgtggtggtgggcacctgtagtcccagctactcaggaggctgaggcaggagaatggcgtgaacccggaaggcggagcttgcagttagccgagatcatgccactgcactccagcctacatgacaatgtgacactccatctcaaaaaataataataataacaatataagaactagctgggcatggtggcgcatgcatgtagtcccagctactcctgaggctcagtcaggagaatcgcttgaacttgggaggcggaggttgcagtgagctgagctcataccactgcactccagcctgaacagagtgagatcctgtca

SEQ ID NO: 579300 - DNA, 273 bp, Homo sapiens
taggaagcatttcccatttttattcataaaatttttacttaaaattgcaaaagtaaatttacagaggcccagggaacaaaacaggaaatgaaatgttccaaactttcccaaaagtttcaaaaaaaccccccctagcctcaaaatctccggttaaaccggggttgcccaacagggtctatttattcctgcattttctcaataagttcttctttatattggcctttctcttttccaacttggccaaacttggctttgcgttcaaaaatttttttc

SEQ ID NO: 579301 - DNA, 153 bp, Homo sapiens
gtggcccgggaagcgcagcaggtggtgaccccgctcatggtggccgacaccaggtggttgcggtccccgtatggtgggggtggtcagcttcagggtgcggaagctgatgtcatactgggcctcgttatcaatggagtaggtttcatctgtgtt

SEQ ID NO: 579302 - DNA, 549 bp, Homo sapiens
tgagacagagtctcgctctgttgcccaggctggagtgcagtggcgcgatctcagctcactgcaagctccacctcccaggttcacaccactctcctgccccagcctcccgagtagctgggactacaggcgcccgccaccaagcccagctaactttttatatatatatattgccaggagagatggggtttcaccgtgctagccaggacggtctcgatttcctgacctcgtgatccgaccgtcgagacctaccaatgtgctgggattacaggcatgagccaccgcgcacagcctaagttttgtatttttagtagagacggggtttcatcatgttggccaggctggtctcgaactcctgacctgaggtgatccacccagctcggcctcccaaactgctgggattatgggagtgagccactgcgcccggcccaactgttttgttgtccaacctctactcttctggcactgcttcctccccaccactctgtttacatgttatagggaggcagccatttgtacacaaattatctgtccacccttgccacagctggt

SEQ ID NO: 579303 - DNA, 203 bp, Homo sapiens
tttcgtatgaggttcgaacacgggaaagctcacccgtggccggatacggtacacgcattgacagattgagtagctctttctcgcattccgtgtgtatgtgtgtgcattggccgattctttagttgtgtggtagcgattatgtctaggttaattaccgaataacgagacctcactaacgtaacccagtgtgtaccgaggctcgt

SEQ ID NO: 579304 - DNA, 365 bp, Homo sapiens
  misc_feature (34)..(34): n is a, c, g, or t
ggtcgtctagagatccacgatcggctagtcatgnaaatatgatctgtagcttaaagaaaatccagttatacaagacttcagatgaacattcagggacgtgatcagagcttcaagtgtgttgctcactttattataggcagattcaggtaggctaagaaagaagagtgttcccattgagacatgatctaagaatagccttctatagaggcaaattatgttctgtagaaactagctagccagccaccaagatgttaccaataaaggattccttgtactagcaactaaccatgtttaaaaggtcttagccagaattacaaaaacaaaacatttagagtaatacttatgaatacaagcataattggttc

SEQ ID NO: 579305 - DNA, 436 bp, Homo sapiens
aggttggcggagggaactccacaccattgatgactaaggtcaagctgggcagattctgaatgctgttacagttcacgagatcactgtccatactcattctcctgggcccctttggcctgcagaagagcactcattttctggtggtgcacattgagcatagatgtgccttgtgtcctcgattggcattagctcgtatcgagggactatctcatagtcctagctgcgttgctgtggttcccggctgctggtgtacgttccttgctaggtatccaggtctctgcatatgaactcgaccgggtcttcatttcttccttcagaatctgccggccaattcctaatttggagcttgtgcgatgtgcggtcaaaatcatcctcctctcctccagacgagaaccttctggctcggggcactttgggggacccatggtaggtccag

SEQ ID NO: 579306 - DNA, 710 bp, Homo sapiens
tagtaaaacaacctagtctttaattggcccaaggccggtggtggcaagcacgggggccccaaaatcttccaaaagggaaggggaggaggggcaaagcacggggcctaccagggtgcttgcctggccccgtccgtggtttccgtgcaggaggtgtgggaagggagagaaaagggacatttcgacggccatcaagttatctcccacagttttcagccactatatccaggtgggtggaggaggaaacgtgtaggacacacgcatcccccacaggcttcatactgacatagatccaaggtttaacttaattccctcaccctcagtctctatacccccagcaaaagtgagacgtgtaagacagcacgggggagggtcttcaggagcccactcgggtgtggccgtggagaagcgggggcaggccagacaggggttcaaggagcgtaggggagagtggggaggagaccaggaggaggctggcggcacatgaggagggacagacaagactgtgaacgtgagagcgatggagaggacaagcacggcaaagacaccacatatcagaggaggaaccaccaaaacgtgagggatacacaaataccgtgaatacgcaagggaggggagacaagggcagaaaacccacacaaacaggttacaaaaacaaggtaaacattgaagagaagaaaaaacccacccagacaatggcgaatcaagacaag

SEQ ID NO: 579307 - DNA, 488 bp, Homo sapiens
cgtgccgaggatccccgtcggtcgggtgtgccgggagcaggagtcagagctggcagagagtctcgggaatcaggccaacacggacaaaggcaaagaaaagaaggaccaaggcctccaggaagtcggggataatgtgagatgaccaaacctaagaaggatgggtgtacctgaggaagaagagaaatgtaaatgtggggaaaacatatttgagggaataataaaagttctccagccttgctagagaccgggacatccaaatagaagaagctcaaagaacacctgggaagttcatggcaaaaagttaataacctatgcacgtagtcatcaggttatctaaagtcaagatgaaggaaaaaatctgcatcaggtaacatataaaggaaaacctatcagattaacagcagacttctcagcagaaaccttacaagcgggaaaggattggtgccctatctttagcttccttaaacaacaaaacgataaacagccat

SEQ ID NO: 579308 - DNA, 209 bp, Homo sapiens
cagagttcaaacagtgccacatcatcataggacgccccgtgcgctgtcacctttcaccccacaaggccaacatttttctgtggctttagcaatggggccgtgcgcttcttcagcctggaggccgctgaggtcctggaggaacacacgtgccaccgaggagctgtcaccggcctgaccgccacccctgacagccgcctgctcttcagctc

SEQ ID NO: 579309 - DNA, 698 bp, Homo sapiens
  misc_feature (319)..(319): n is a, c, g, or t
  misc_feature (346)..(346): n is a, c, g, or t
  misc_feature (368)..(368): n is a, c, g, or t
  misc_feature (371)..(371): n is a, c, g, or t
  misc_feature (380)..(381): n is a, c, g, or t
  misc_feature (384)..(385): n is a, c, g, or t
  misc_feature (400)..(401): n is a, c, g, or t
  misc_feature (405)..(406): n is a, c, g, or t
  misc_feature (408)..(410): n is a, c, g, or t
  misc_feature (412)..(413): n is a, c, g, or t
  misc_feature (418)..(419): n is a, c, g, or t
  misc_feature (423)..(423): n is a, c, g, or t
  misc_feature (431)..(431): n is a, c, g, or t
  misc_feature (436)..(437): n is a, c, g, or t
  misc_feature (443)..(443): n is a, c, g, or t
  misc_feature (445)..(445): n is a, c, g, or t
  misc_feature (448)..(448): n is a, c, g, or t
  misc_feature (450)..(450): n is a, c, g, or t
  misc_feature (456)..(456): n is a, c, g, or t
  misc_feature (460)..(460): n is a, c, g, or t
  misc_feature (462)..(462): n is a, c, g, or t
  misc_feature (466)..(466): n is a, c, g, or t
  misc_feature (472)..(472): n is a, c, g, or t
  misc_feature (482)..(482): n is a, c, g, or t
  misc_feature (486)..(486): n is a, c, g, or t
  misc_feature (501)..(502): n is a, c, g, or t
  misc_feature (520)..(520): n is a, c, g, or t
  misc_feature (532)..(532): n is a, c, g, or t
  misc_feature (540)..(542): n is a, c, g, or t
  misc_feature (560)..(561): n is a, c, g, or t
  misc_feature (567)..(568): n is a, c, g, or t
  misc_feature (580)..(582): n is a, c, g, or t
  misc_feature (604)..(604): n is a, c, g, or t
  misc_feature (641)..(641): n is a, c, g, or t
  misc_feature (670)..(670): n is a, c, g, or t
aacccattgctaatttgtacgccttaaaaacctgtaactttaattttccattgacccacttctttttgtgaaaagccaaacagattttaaattgggttttcaataaaaaaagctcatttgggaataacctgcccttttctcccaaaaaataaccttcaaggcaaagcatttctttaagcctttttaggagagtatacctttaggtactaatgaaatggccaggtaatacgcaattgttcttataatgcaacttattttctataaaatgtgtttaccaagccaaaattatagattgtagaattctgaaaggtcaatttcntggattcacttctcaggaatttttttnaagttaatttgggaaattacancanttcactttnntgnnagtctttgccacatnngacnnannnannctgtnntttntacatttnaagcnnctgttntnggntntgtganagtncntgtnttattnaagcacaacngggnttgcactaaagaatnntcattgtaataacactanttggtagcctancttcatannngtattcttaattgcacannaagtcnntaatttgtcacnnnggggttttgaatgtttgctttnagtgttggctatttctatgttttataaaccaaaacanaatttccaaaaacaatgaaggaaaccaanataaatatttctgcatttggaaaaaaaa

SEQ ID NO: 579310 - DNA, 150 bp, Homo sapiens
cgcgggactagaggatccattgcgaggagctctactgtcagaaatcatggtggtactcatcacggcagtgctactacagacactgaagaaagatcatccaacatggataaatacctggttcttatcagatgtttgagaagtaatagagta

SEQ ID NO: 579311 - DNA, 347 bp, Homo sapiens
atactatgagatccctggtgaacatgtgactcattcactgagaagaggctacatattcaggctgtaagggtctagaaactgagaggccaagtcctggtaaagatacatttgacagacgtctctttcttactcctagctacagttagtgggactcttgccggcacctcgttgctggtcatttactccacagccttcacatttcagtccttgacgttccgatccccagcgcatctcaccacagtaatcacagcaagtcggagctttgtcagcctgtacatcgcgcgtctgtggacgaatctggaagtcttctactgtggctaaagaggtgtgagccaccgttgccaggt

SEQ ID NO: 579312 - DNA, 256 bp, Homo sapiens
cagccctttgggaaaccaaggggggtgggtccccttaaataaggggtttgagccccttctggccaacatggggaaaccccgttttttctaaaaatacaaataattggccacctggggggggagggccccggtaatcccagcttctttgggggtttaggggggaaaatcgctttaacctgggaggggggggtttcaaaaaaccgagggggggcccttgctttcccccctgggccacaagagtgaaactccttttcca

SEQ ID NO: 579313 - DNA, 278 bp, Homo sapiens
gagagtttaaagataaagagagtgaaggaggctgggtgcggtgggtcacacctgtaatacccagcactttggcgaagccagtgcaggcggatcacctcaggtcaggagttcgagaccagccttaccaacatggtgaaaccccgtctctactaaaaatacaaaaaaattagcagggtgtagtggcacagtgcctataatcccagctactggggaggctgaggcaggagaatcgctggtaacctgggaggccgagtctgccgtgagccaagacggtgccg

SEQ ID NO: 579314 - DNA, 96 bp, Homo sapiens
agagtggctcttagagaactacggcacgtatgtaggatgtggtcgtgccgtcgaaatgtctgtacggatcctcaaccaataaaatctcagtttatg

SEQ ID NO: 579315 - DNA, 837 bp, Homo sapiens
tggaaagttccagccggtggggaggaaaagaggtatcttttaaaatagagatagttccttttttccctcaatctaggcgggggtcactatgggggtgcaaggatttcatggtgggctagatcacatttggtataatcaggtatcctctgggtgtgcgggatagagatttaaatccgtgattttctccataaaacagtgagtattaagaaataattgccgggttgggagaaacgggagaaatcaccctttagggaagaaaccacgggaaatttcggttaaccaccaagatatttaagaggtgtacaatagtaggctgctcaaccaaatgatggaaggacagagtcgaagggaaaaaacggggagacggtcaaaaagtgacgcaaagaacgcctcatacaatgtcaaactcggtaaaaaaaccacataaatggtaaataaaggcccttcatccactggactacaggccgcagatggtctagaagctaaggacagcaattcctctgacaaaggcacaagtagatattgacaccagggggtggaaaactacgggccccgcggccggatttgacccagcctgataggagtggtggcaacagtagcacggatgtcacattgaaaggaagtcattagaggcaacagctttgtggtccgggaagtttacgatattagtcacgggccgtggacgcagggtggccacacccggtttaccataacttgtgaatcacaaaaaattaacttgggcgaggtcaacaaaccaaggtcgcaggggaggtacccaacccataggggcgcacaaacagaaccgcaaaagcaaaaaattggcgggcaaaaaaaaag

SEQ ID NO: 579316 - DNA, 814 bp, Homo sapiens
ccacgcgtcgctgaggtaccgcccgcgcgagcacacacaggacacacacacacacacacacacacacacacacacacacacatatcttccaggacccatcccctgcgtggcagctccgaagagccagagagagacagagcgcggacgccgcgggaggcagtgccgtggaccccatcgtgcccagggaagacgacgggacgcccggtgtctggtgagggctgcagaggcagggccaggccggtgcccgtgcccgtaagggacgaacaaaccctctcagcgggccctcgtgggccaccgagagcccaacaggctctccgtgcgtggccccagctatgatttcagagtcgaagtccaccgcgcgaattgttgtgacagcggaaacagagtcgccagaagagtccaaaagtcgtgcaagcacaaatattagcaatacccacaggaagaggggcaagcacggacatctaggagacgcagcggatggatgccacccacaacaggagctcggacaccagcaacatgatgcacgaacaaaagtggaagcgagcacatataacagacggacagaccagagactaaggagacacacagggaaacaaggggacgtcttgagaaacaacaacggcacagaacaacggacacaggaaaataatccgccacggaaacaaggtccaaggaacctctgaagacaatgaagcgatgaaatcaggggcgacgtagcgcgacagagaggagacacgatcgacatacaaaatgcgacgtaacgactcgagaagacaacaaagaacgagcgcgatggagaccagcaccgcccccc

SEQ ID NO: 579317 - DNA, 219 bp, Homo sapiens
cctgacgacgtgcctgtgacattacctgacagcacaggcacttccctgtcatcagagagtatcttgacgcctggcggggagttcatcaacagcagggaggaagcaaaacgtgtcctttcaccagctggcagccttgaccttaccatggacaaccccgcagcacaaaaagagtgacggcggaggaggcttccaaggcagatgaaaaaattgagctggtaa

SEQ ID NO: 579318 - DNA, 176 bp, Homo sapiens
aggggggggggccccccctttgtttccctccggtttgggccaaataaaaggggccggtttttccttccccttttaaaatgattgtaagtttcctggggcccccctaaaagcaaaaggtgttgggtttcctgtcccttttatgggcccgggggccaattaaccctttttttttttta

SEQ ID NO: 579319 - DNA, 126 bp, Homo sapiens
tgtgctgctcctatatcgccgacgcgtgtcaccatcggccttgcgctgtacggctgattatccccctgtgtcacccggtcatgcgagtgcttggaacaggagggacgagggagtcggatcaagagc

SEQ ID NO: 579320 - DNA, 1320 bp, Homo sapiens
cataaagcacaggaaagacttcaggaagaggacaaatatgacaaagaagaatataggaaacaaattaaggcaaagcatcgggagaaaagactgaacgaaagggaagccagcaagagaagccaacaagagacaagcaaaggccaaagatgaagaggcagcctttctggataggcagtgatgatgcatgatgatgatgcatgatggatttgatccaagcacactcccagatccagataaatcaccagacagctctgaagactcagactagctgaacgatatggcaaacataacaatacacgctgactacccacagcaagcaagccaggggatgacagaagaggagcacaccagtgcaagtggacagacgtgggacacaccaaacgtcataacacacgacacacgacaggccaggctgcggacaaattatacgcacgccatcacgcgcactaccgcgccctggtcttcagccaagaggatgacacgcagacgggctcgtcaccactctgcattcagacaatctccaagcgacttacgcctacaccatatcccttgagcgggccacggcgcataacatacccttatggacaacaactttgggctcaatggaccatgcagtacgagccacaacaaggttgcaacacaacagaacggaataccggccgacgacaacccataaccgcccaccaataaatgacacacaactaccccacaaaagagggcacagagcagaccaaggggagaacaaaaaggcgacaacccggaaatcacacaaagcatccgccacacatacacaagcgaacaaccgcacacctgccgcccaaaacaacatgaagaccacacctccacagacaccgaacgacacagcacataaaacaccaacgaaccaaagaaaaacaagagcaaccagacacgacggaccctggacagaaaccagaccccaagtcgaagcacccacccgtgcaccaccgaaaacacaggcccccgaggcacaaaacgccacaaacaccgcgagcacgcaaggtccagcggaacgaaggcgcagacagaccagcagacacaaaaacgaaaccgaaagcccgacaacacagctccagagcccggggaaacctttccgccgagcacacatgcaggaccgaacgacgagccactcacacgcggcggcgacccaccgcacgaaatcacaagaaaagcggccccacgatccgcaagaccacaaaccgaccacccgcaccaccccagcacgaggaagagcagacgcgagacagccacgcaacgccggagtacgcccccaccgcacacgcgagagagcacaagacaaac

SEQ ID NO: 579321 - DNA, 218 bp, Homo sapiens
  misc_feature (38)..(38): n is a, c, g, or t
  misc_feature (65)..(65): n is a, c, g, or t
  misc_feature (88)..(88): n is a, c, g, or t
  misc_feature (94)..(94): n is a, c, g, or t
  misc_feature (117)..(117): n is a, c, g, or t
  misc_feature (177)..(177): n is a, c, g, or t
aaacaaatggtcattgatgtccttcaccccgggaaggngacagtgcctaaggcagaaattcgggnaaaactagccaaaatgtacaagnccacancggatgtcatctttgtatttggnttcagaactcattttggtggtggcaaggcaactggctttggcatgatttatgattccctnggttatgcaaagaaaaatgaccccaaacataggcttgcaag

SEQ ID NO: 579322 - DNA, 616 bp, Homo sapiens
  misc_feature (462)..(462): n is a, c, g, or t
  misc_feature (581)..(581): n is a, c, g, or t
gagacagagtcttactctgtagctcaggctgcagtgcagtggtacaatctgggctcactgcaacctgcatctcccaggtccccattcaggaaagtttcctgcctcagtcccccaggtagctagcattacaggcatgcaccaccatgctcagctaatttgtgagtttttagttgagacgtggtatcaccttgctggccaggccggtcttcgaactcctgaccttgtgatccaccttgcttggccatccaaagtgttgggattacaggcaggatgcaccacacctggacgtctgttaaaacagagaaatagacctgctgaatatgccgatgagagtattaattggaatctgcatagcaatcgactgaccattgccttgaacatcacagggcatctgagtggccagataagaccatcacgttctattcatgctgataggcttgcaatggcatatagtactagctngtggatcctgctacttctagcttagagtgtatgcctgcgtactctgatgtaggctgaaccacatgtgctgatgatatgatcatgacgaagcatatgatctgagaggagctctgagagcntttcactagtgacactactagactgcatgttagag

SEQ ID NO: 579323 - DNA, 433 bp, Homo sapiens
agaggatccccgccagcactgtaggcagtagctttagctgtattggttggtctcctgtgaccatcatgaccttaattccagcactatcggacatgtgcccacggaatccggaacggccgcccgtggaggggcaatcatggagatcagccccacagagcacagttcatcgatagggaaatccatatcgtcagtgtcagactggaacccttcaggaaatcgatctgctggcatgcaggggtggcagtgacctaggattcgaactccgaggccccccagctccaaataggcgttctgaaaggcgtctttcagctcctcatccaggggctgctccttgccgtggaggaggatagagctgcaacggtctaggatcctttctggggcgcccttcatcaccaacaggtgttggggctccgatgtgttggggataacatca

SEQ ID NO: 579324 - DNA, 611 bp, Homo sapiens
  misc_feature (326)..(326): n is a, c, g, or t
  misc_feature (329)..(329): n is a, c, g, or t
  misc_feature (331)..(331): n is a, c, g, or t
  misc_feature (338)..(339): n is a, c, g, or t
  misc_feature (350)..(350): n is a, c, g, or t
  misc_feature (354)..(355): n is a, c, g, or t
  misc_feature (362)..(362): n is a, c, g, or t
  misc_feature (367)..(367): n is a, c, g, or t
  misc_feature (371)..(371): n is a, c, g, or t
  misc_feature (376)..(376): n is a, c, g, or t
  misc_feature (391)..(391): n is a, c, g, or t
  misc_feature (393)..(393): n is a, c, g, or t
  misc_feature (406)..(406): n is a, c, g, or t
  misc_feature (413)..(414): n is a, c, g, or t
  misc_feature (416)..(417): n is a, c, g, or t
  misc_feature (424)..(424): n is a, c, g, or t
  misc_feature (426)..(426): n is a, c, g, or t
  misc_feature (428)..(430): n is a, c, g, or t
  misc_feature (432)..(432): n is a, c, g, or t
  misc_feature (437)..(437): n is a, c, g, or t
  misc_feature (449)..(449): n is a, c, g, or t
  misc_feature (456)..(457): n is a, c, g, or t
  misc_feature (460)..(460): n is a, c, g, or t
  misc_feature (462)..(462): n is a, c, g, or t
  misc_feature (498)..(498): n is a, c, g, or t
  misc_feature (510)..(510): n is a, c, g, or t
  misc_feature (512)..(513): n is a, c, g, or t
  misc_feature (515)..(515): n is a, c, g, or t
  misc_feature (527)..(527): n is a, c, g, or t
  misc_feature (530)..(530): n is a, c, g, or t
  misc_feature (544)..(544): n is a, c, g, or t
  misc_feature (547)..(547): n is a, c, g, or t
cggtccccatgcacacttcgttccccatgcacagttcggtccccatgcacagttcggtccccatgcacagttcggtccccatgcacagttcggtccccatgcacagttcggtccccatgcacagttttaggatggacatgtttttcttatctcttgggtatataacaaggagtggaattgccagatcaaatggtgattctgtgtttaactttctgaggaactatcagctgcttcccaaagtggccatcccattattctcatattatttttatttgtttattatattttgagagtgtctcgctctgtcaccctggctggagtgcagnggngngatctcnnctcactgcaanctcnncctcccnggttnaagngattntcctgcctcagcctncngagtagctgggantacaggnncnngccaccncncnnngntaatnttgtatttttantagagannggntntcaccatgttggccaggctggtctcaactcctgacntcaggtgatccncnngncttggcctcccnaantgctgggattacangcntgagccactgtgcttgctgctatacttacttttaaaggaacctttgatcacactgtgctgggag

SEQ ID NO: 579325 - DNA, 336 bp, Homo sapiens
cggtccccatgcacacttcgttccccatgcacagttcggtccccatgcacagttcggtccccatgcacagttcggtccccatgcacagttcggtccccatgcacagttcggtccccatgcacagtttggtccccatgcacagttcggtccccatgcacagttcggtccccatgcacagttcggtcgccatgcacagctcggtcgccatgcacagcgcggtcgccatgcacagttcggtccccatgcacagttcggtccccatgcacagttcggtccccatgcacagttcatggcttgttcggcagcaacctgaatgctttacagccctagagccta

SEQ ID NO: 579326 - DNA, 948 bp, Homo sapiens
  misc_feature (54)..(54): n is a, c, g, or t
  misc_feature (72)..(73): n is a, c, g, or t
  misc_feature (78)..(78): n is a, c, g, or t
  misc_feature (187)..(187): n is a, c, g, or t
  misc_feature (216)..(216): n is a, c, g, or t
  misc_feature (228)..(228): n is a, c, g, or t
  misc_feature (259)..(260): n is a, c, g, or t
  misc_feature (306)..(306): n is a, c, g, or t
  misc_feature (311)..(311): n is a, c, g, or t
  misc_feature (313)..(313): n is a, c, g, or t
  misc_feature (379)..(379): n is a, c, g, or t
  misc_feature (381)..(381): n is a, c, g, or t
  misc_feature (393)..(393): n is a, c, g, or t
  misc_feature (396)..(396): n is a, c, g, or t
  misc_feature (432)..(432): n is a, c, g, or t
gtcagagagctgggatcatggtagagtggaaccctcctttactcctctcggagngccctggccttacccaannctggncgggctcccactccttgaagtatttccacacttccgtgtccggccggccgggggagccccgcttcatctctgtgggctacgtggacgacaccagttcgtgcgcttcganaagacgccggagtccgaggatggtgccgngggcgccgtggntggagcaggaggggtcagagtattgggaccnnggagacacggagcgccaggacaccgcaacagattttccgagtgaanctgcngnacgctgcgcggctactacaatcagagcgaggccgggtctcacaccctgcagtggatgcatggtgcnanctggggcccganggntgcttcctccgcgggtatgaacagttcgcctacganggcaaggattatctcaccctgaatgaggacctgcgctcctggaccgcggtggccaacggggctcagatctccgagccaaaacgtccaatgatgcctctgaggcggagcagccagagagcctacctggaagacacatgccgtggagttggctccacaaatacctggcagaagggcaaggagacgctgcttcactgaaagccccaaagacacacgtgactcacacccatctctgacatgaggcacctgaggtgctggccggcttctaccctgcgggataacagtgaccggccgcaggcaccgaaggccaaccaaggaaacgggcccgggaacccgccgcaggactgacttccaacggccagccggggggcccgacacccacaatccgcccgcgcacggacggtccacccgccggacgacggccgcacaccacggaagacgcccgacggcgacagaggcagacacgcgggaacaaggacacagaggcgacagagcatcaccaccaccaccaacacggca

SEQ ID NO: 579327 - DNA, 353 bp, Homo sapiens
  misc_feature (311)..(311): n is a, c, g, or t
cggtccccatgcacacttcgttccccatgcacagttcggtccccatgcacagttcggtccccatgcacagttcggtccccatgcacagttcggtccccatgcacagttcggtccccatgcacagtttagtattaatgcatctttggtcactcctctagatctgctcagatagcttccatgctttctacccacttagcctgctttacatacaaacaggatattctgacatcatattttttgtatttgtttatagtctctctccctaaaacgttcctcaaatgtatcaaacagactccgcgcttagaacccgngaaatggctattattttctgcctgcgacagtctcccctcctt

SEQ ID NO: 579328 - DNA, 479 bp, Homo sapiens
  misc_feature (194)..(194): n is a, c, g, or t
  misc_feature (197)..(197): n is a, c, g, or t
  misc_feature (199)..(199): n is a, c, g, or t
  misc_feature (206)..(207): n is a, c, g, or t
  misc_feature (218)..(218): n is a, c, g, or t
  misc_feature (222)..(223): n is a, c, g, or t
  misc_feature (230)..(230): n is a, c, g, or t
  misc_feature (235)..(235): n is a, c, g, or t
  misc_feature (239)..(239): n is a, c, g, or t
  misc_feature (244)..(244): n is a, c, g, or t
  misc_feature (259)..(259): n is a, c, g, or t
  misc_feature (261)..(261): n is a, c, g, or t
  misc_feature (274)..(274): n is a, c, g, or t
  misc_feature (281)..(282): n is a, c, g, or t
  misc_feature (284)..(285): n is a, c, g, or t
  misc_feature (292)..(292): n is a, c, g, or t
  misc_feature (294)..(294): n is a, c, g, or t
  misc_feature (296)..(298): n is a, c, g, or t
  misc_feature (300)..(300): n is a, c, g, or t
  misc_feature (305)..(305): n is a, c, g, or t
  misc_feature (317)..(317): n is a, c, g, or t
  misc_feature (324)..(325): n is a, c, g, or t
  misc_feature (328)..(328): n is a, c, g, or t
  misc_feature (330)..(330): n is a, c, g, or t
  misc_feature (366)..(366): n is a, c, g, or t
  misc_feature (378)..(378): n is a, c, g, or t
  misc_feature (380)..(381): n is a, c, g, or t
  misc_feature (383)..(383): n is a, c, g, or t
  misc_feature (395)..(395): n is a, c, g, or t
  misc_feature (398)..(398): n is a, c, g, or t
  misc_feature (412)..(412): n is a, c, g, or t
  misc_feature (415)..(415): n is a, c, g, or t
cggtccccatgcacacttcgttccccatgcacagttcggtccccatgcacagttcggtccccatgcacagttcggtccccatgcacagttcggtccccatgcacagttcggtccccatgcacagttttatgtactgaaattattatttgtttttgagacacagtctcattctgtagaacaggatatagtgcagnggngngatctcnnctcactgcaanctcnncctcccnggttnaagngattntcctgcctcagcctncngagtagctgggantacaggnncnngccaccncncnnngntaatnttgtatttttantagagannggntntcaccatgttggccaggctggtctcaactcctgacntcaggtgatccncnngncttggcctcccnaantgctgggattacangcntgagccactgtgcttgctgctatacttacttttaaaggaacctttgatcacactgtgctgggag

SEQ ID NO: 579329 - DNA, 375 bp, Homo sapiens
  misc_feature (10)..(10): n is a, c, g, or t
  misc_feature (48)..(48): n is a, c, g, or t
ggcaaaggtnctggaaaaccaagggcctagaggcctggacagaggccncagcacagcacacccatattttacctttaggcagcaagagcaactcaccaccagccttgggcccagaagcatgccctgtctccctgcccagtcccccggaagcctccacactcaagggccctccacctgaggcagcagaatccacaggaatgacccagctcctcccccacaggttacaaggggagagtggcccttccctcacaagtccgacatctccaggcccccactgaactccggggacctctactgactgcttgctgggacagtcaccagggttggggggaagggccacaaaatgaaaccattaaagacccttaagagccaaaa

SEQ ID NO: 579330 - DNA, 177 bp, Homo sapiens
ggcggagcactgggggtggctcagctctgttggaggcggagttccaccatcatgtacaacaccaactcctcctccagcaggaagagctacaagcactgaagtgctgcgccagtctcagtaccacagctctcaggcccctctctggctgcagagacctctcctcaggttagctgtcct

SEQ ID NO: 579331 - DNA, 621 bp, Homo sapiens
ctctacaggatccttaaggtggttgtgggtagggggcagcccaagtggcagccgtcctggcccagcatcgtgtggccctgagtgttcagcttcaggaggcctgcttcccacctggccccatcaggctgcaggtcacacttgaagacgctgcctctgccgcatccgccgcgtcctctgcacacgttgccctgcaggtccacccccactgcactgttgcagctctccaggagcaggtgttctcagagctcggtttcccgccagccgtgcaacgctgggtcatcggacggtgcctgtgtgtgcctgagcgcagccttgcctcttacggggttcggcaggatggggaccctgctttcctctacttgctgtcagctcctcgagaagccccaggtcagtcctcgatgggggtggggtgtgggaggtggggtgcagccccacagtcctgagctccaccccctcagccacaggacctagccctcagcacccccagaagatggacggggaacttggacgcttgtttcccccatcattggggctacccacaaacacctgcgcaggtggttgtgggtttcctaacacagaatgcgtgtagacgactccttagcacctgggttatcatcttgt

SEQ ID NO: 579332 - DNA, 408 bp, Homo sapiens
  misc_feature (37)..(37): n is a, c, g, or t
  misc_feature (42)..(42): n is a, c, g, or t
  misc_feature (50)..(50): n is a, c, g, or t
  misc_feature (169)..(170): n is a, c, g, or t
tgatgctgtggtgatcaccgatccttattacgcccanactcnacgatggntatgatgggtacaacaggtctataatcaaaccttataatgctggtgaatttcacattgaaaggctggttatggcacacatcaactccataatcccagacacctggaccactccatactnncctaacagatccatagaagacgcaatctcaattgcactccacactgtcctcgctcacctagtgtgtttttgtgattcttttttgtaacctttattctttctgtctctgggtgtgactgtgactgtgtctgtctctgggtgtgggtgtgactgtctctgggtgtgactgtgtctgtctctgtgtgtgactgtgtctgtctctgtctctgtgtgtgactgtgtctgtctctgtgtagggt

SEQ ID NO: 579333 - DNA, 1158 bp, Homo sapiens
  misc_feature (70)..(70): n is a, c, g, or t
  misc_feature (104)..(104): n is a, c, g, or t
  misc_feature (307)..(307): n is a, c, g, or t
  misc_feature (688)..(688): n is a, c, g, or t
ggcgcgcagggcgagcgtaggggcgctgggactgcgggttgactttggggtccattgatttatagttccntttggcgtgtatgtctccagtcgagagaattccngggcttgctggtgagctctcacgaagtcaatccatgctccatagaacaagtacttgggcctggattgtacaacgcacaacatgatggtagctgtgcgaaatggtactaatcttgctcagcgaggttcttggcgcgatgacgttttagggtaccgtcatgagtcttccggctagcaggagaagctctcgaaggcttgtgtgccnttatagtgcatcagggcaggaactcttaatagatggacgtgcgcgccttgagactggggcggaggcattttacttgagaagggtagtggactctttatcacgagacgatctacaacccagtcgatacgctattgggctaacttgcgcaccttgccattaagcgccgggactcgctcagtaacgcgcatccagtggcgctgtgggctcacgacccctcacgataggggcaacatcgcagcagctttagggagctgcgcgatgtaggtcagattttgagtagagaattcttcgttagaagccaaacatgatctatgcgccgatttccatcaccaaggcccgagcatgggcccgaaagcctcttggggagccgtcatgactccnttccgtactctgtcgccagccccccaagggcccgggcactcgcgttcccagtgtcatcttatgcgctggtgtctgtcgcggcgtcctttgagtttgacgcggcggccaattagcagacacctttggtctccggcggaatatctttcggtccacaagttttggggtgggtgctttccgaaatggttctcaacactgaagggtcacgccggcaggggttcctagtagcgaataggactcctccgttggggagccccacgcgacgaaagtaaattgagaatcgttgccgtccgctccgttgtggtaaaattccttcgcccacgaatgcgaaatctccgggagggataaagagccgtggacatacagccggttatcacggaaaggaacaccgccaaaattaggtggccccatgaatcgaattctttgggtagatacgaggccggggtccgctggtggaattggaaagtttggtg

SEQ ID NO: 579334 - DNA, 1845 bp, Homo sapiens
  misc_feature (29)..(29): n is a, c, g, or t
aatgccaggctgtacggagcggggtgcgncgtgtgggcgtggcgggggctggggtctgcgggcgaaggtggtagcccattggaggtcccgggagcgaagtccagctgccgttaggcgctgggatagtcgcacgctggatgcatctacgtccgccgagcccctggggcgaagaggccgcgtccgccttcagttgtggccggtgcttcgccccctgacccttcgcccccaaagaccagctctaacgtgagcgcctcggccgccctgccccagcctcgtacacgccgccagcctcgcccagccggtgtccggagaccctcgggccgtgtccatttgtgggcaaagccagcggggcaggcttggccagagtgcaccactcggcgccgtcccaggcccgacgctctgggcgcgcccggaaccccaggttcgcggcccgtgtttccgaccggcggagggggctcagcggcccgatcccacggaagcgcgctcggaggggtgggacccggccggaccggagatggcgccgccagcgggcggggcggcggcggcggcctcggacttgggctccgccgcagtgctcttggctgtgcacgccgcggtgaggccgctgggcgccgggccagacgccgaggcacagctgcggaggctgcagctgagcgcggaccctgagaggcctgggcgcttccggctggagctgctgggcgcgggacctggggcggttaatttggagtggcccctggagtcagtttcctacaccatccgaggccccacccagcacgagctacagcctccaccaggagggcctggaaccctcagcctgcacttcctcaaccctcaggaagctcagcggtgggcagtcctagtccgaggtgccaccgtggaaggacagaatggcagcaagagcaactcaccaccagccttgggcccagaagcatgccctgtctccctgcccagtcccccggaagcctccacactcaagggccctccacctgaggcagatcttcctaggagccctggaaacttgacggagagagaagagctggcagggagcctggcccgggctattgcaggtggagacgagaagggggcagcccaagtggcagccgtcctggcccagcatcgtgtggccctgagtgttcagcttcaggaggcctgcttcccacctggccccatcaggctgcaggtcacacttgaagacgctgcctctgccgcatccgccgcgtcctctgcacacgttgccctgcaggtccacccccactgcactgttgcagctctccaggagcaggtgttctcagagctcggtttcccgccagccgtgcaacgctgggtcatcggacggtgcctgtgtgtgcctgagcgcagccttgcctcttacggggttcggcaggatggggaccctgctttcctctacttgctgtcagctcctcgagaagccccagccacaggacctagccctcagcacccccagaagatggacggggaacttggacgcttgtttcccccatcattggggctacccccaggcccccagccagctgcctccagcctgcccagtccactccagcccagctggtcctgtccttcctgcaccttcatcaatgccccagaccgccctggctgtgagatgtgtagcacccagaggccctgcacttgggacccccttgctgcagcttccacctagcagccaccagaggttacaaggggagagtggcccttccctcacaagtccgacatctccaggcccccactgaactccggggacctctactgactgcttgctgggacagtcaccagggttggggggaagggccacaaaatgaaaccattaaagacccttaagagccaaaa

SEQ ID NO: 579335 - DNA, 1916 bp, Homo sapiens
  misc_feature (29)..(29): n is a, c, g, or t
aatgccaggctgtacggagcggggtgcgncgtgtgggcgtggcgggggctggggtctgcgggcgaaggtggtagcccattggaggtcccgggagcgaagtccagctgccgttaggcgctgggatagtcgcacgctggatgcatctacgtccgccgagcccctggggcgaagaggccgcgtccgccttcagttgtggccggtgcttcgccccctgacccttcgcccccaaagaccagctctaacgtgagcgcctcggccgccctgccccagcctcgtacacgccgccagcctcgcccagccggtgtccggagaccctcgggccgtgtccatttgtgggcaaagccagcggggcaggcttggccagagtgcaccactcggcgccgtcccaggcccgacgctctgggcgcgcccggaaccccaggttcgcggcccgtgtttccgaccggcggagggggctcagcggcccgatcccacggaagcgcgctcggaggggtgggacccggccggaccggagatggcgccgccagcgggcggggcggcggcggcggcctcggacttgggctccgccgcagtgctcttggctgtgcacgccgcggtgaggccgctgggcgccgggccagacgccgaggcacagctgcggaggctgcagctgagcgcggaccctgagaggcctgggcgcttccggctggagctgctgggcgcgggacctggggcggttaatttggagtggcccctggagtcagtttcctacaccatccgaggccccacccagcacgagctacagcctccaccaggagggcctggaaccctcagcctgcacttcctcaaccctcaggaagctcagcggtgggcagtcctagtccgaggtgccaccgtggaaggacagaatggcagcaagagcaactcaccaccagccttgggcccagaagcatgccctgtctccctgcccagtcccccggaagcctccacactcaagggccctccacctgaggcagatcttcctaggagccctggaaacttgacggagagagaagagctggcagggagcctggcccgggctattgcaggtggagacgagaagggggcagcccaagtggcagccgtcctggcccagcatcgtgtggccctgagtgttcagcttcaggaggcctgcttcccacctggccccatcaggctgcaggtcacacttgaagacgctgcctctgccgcatccgccgcgtcctctgcacacgttgccctgcaggtccacccccactgcactgttgcagctctccaggagcaggtgttctcagagctcggtttcccgccagccgtgcaacgctgggtcatcggacggtgcctgtgtgtgcctgagcgcagccttgcctcttacggggttcggcaggatggggaccctgctttcctctacttgctgtcagctcctcgagaagccccaggtcagtcctcgatgggggtggggtgtgggaggtggggtgcagccccacagtcctgagctccaccccctcagccacaggacctagccctcagcacccccagaagatggacggggaacttggacgcttgtttcccccatcattggggctacccccaggcccccagccagctgcctccagcctgcccagtccactccagcccagctggtcctgtccttcctgcaccttcatcaatgccccagaccgccctggctgtgagatgtgtagcacccagaggccctgcacttgggacccccttgctgcagcttccacctagcagccaccagaggttacaaggggagagtggcccttccctcacaagtccgacatctccaggcccccactgaactccggggacctctactgactgcttgctgggacagtcaccagggttggggggaagggccacaaaatgaaaccattaaagacccttaagagccaaaa

SEQ ID NO: 579336 - DNA, 665 bp, Homo sapiens
cgcacgagggcgcaaacgctataataaggtagaagataggcggctggccagggccgtgagtcttgggagtcatgtggctgcatagggcactccaggaaccgtagatagcccgctggtgcgcacggacagcctccctactatgaccaacggacatgttcccggggccctatcctaggaccccagaagaacgggccgccgcagcaagaagtataatatgcgtagtggaagactacgaaccttacccggatgatggcatggggtataggcgactacccgaagctccctgaccgctcacagcaatgagagagatccatggtatagctagggaccagccgggcctgaggttgaactggggtgaaccgatagcactggcacctaagacatgtacaacaggaaccgtgtggatacatccccctaacctgtttcttggccatgtcatagtgtatgcagctcttcggtttcctggctttcatgatattcatgtgctagggtagggggacgtgtacccctagtctaccagcctgtgggaccaaaagcagtatccttacaataatctgtacctggaacgagggcggagatccctccaaagaaccagagcgggtaggtcactatgagatctgaggaggcttcgtagagctttgggtcctctaactaggactccctca

SEQ ID NO: 579337 - DNA, 119 bp, Homo sapiens
caaatgtcgcggagaagcgattgggagggtcgacagacaccagaggggtgtgcagacattaggacgaggagcgaggcgaggcgcgatgtaaggagaagaaacgggggcggctttgcagt

SEQ ID NO: 579338 - DNA, 1913 bp, Homo sapiens
  misc_feature (29)..(29): n is a, c, g, or t
  misc_feature (1886)..(1886): n is a, c, g, or t
  misc_feature (1902)..(1902): n is a, c, g, or t
  misc_feature (1907)..(1907): n is a, c, g, or t
aatgccaggctgtacggagcggggtgcgncgtgtgggcgtggcgggggctggggtctgcgggcgaaggtggtagcccattggaggtcccgggagcgaagtccagctgccgttaggcgctgggatagtcgcacgctggatgcatctacgtccgccgagcccctggggcgaagaggccgcgtccgccttcagttgtggccggtgcttcgccccctgacccttcgcccccaaagaccagctctaacgtgagcgcctcggccgccctgccccagcctcgtacacgccgccagcctcgcccagccggtgtccggagaccctcgggccgtgtccatttgtgggcaaagccagcggggcaggcttggccagagtgcaccactcggcgccgtcccaggcccgacgctctgggcgcgcccggaaccccaggttcgcggcccgtgtttccgaccggcggagggggctcagcggcccgatcccacggaagcgcgctcggaggggtgggacccggccggaccggagatggcgccgccagcgggcggggcggcggcggcggcctcggacttgggctccgccgcagtgctcttggctgtgcacgccgcggtgaggccgctgggcgccgggccagacgccgaggcacagctgcggaggctgcagctgagcgcggaccctgagaggcctgggcgcttccggctggagctgctgggcgcgggacctggggcggttaatttggagtggcccctggagtcagtttcctacaccatccgaggccccacccagcacgagctacagcctccaccaggagggcctggaaccctcagcctgcacttcctcaaccctcaggaagctcagcggtgggcagtcctagtccgaggtgccaccgtggaaggacagaatggcagcaagagcaactcaccaccagccttgggcccagaagcatgccctgtctccctgcccagtcccccggaagcctccacactcaagggccctccacctgaggcagatcttcctaggagccctggaaacttgacggagagagaagagctggcagggagcctggcccgggctattgcaggtggagacgagaagggggcagcccaagtggcagccgtcctggcccagcatcgtgtggccctgagtgttcagcttcaggaggcctgcttcccacctggccccatcaggctgcaggtcacacttgaagacgctgcctctgccgcatccgccgcgtcctctgcacacgttgccctgcaggtccacccccactgcactgttgcagctctccaggagcaggtgttctcagagctcggtttcccgccagccgtgcaacgctgggtcatcggacggtgcctgtgtgtgcctgagcgcagccttgcctcttacggggttcggcaggatggggaccctgctttcctctacttgctgtcagctcctcgagaagccccagccacaggacctagccctcagcacccccagaagatggacggggaacttggacgcttgtttcccccatcattggggctacccccaggcccccagccagctgcctccagcctgcccagtccactccagcccagctggtcctgtccttcctgcaccttcatcaatgccccagaccgccctggctgtgagatgtgtagcacccagaggccctgcacttgggacccccttgctgcagcttccacctagcagccaccagaggttacaaggggagagtggcccttccctcacaagtccgacatctccaggcccccactgaactccggggacctctactgactgcttgctgggacagtcaccagggttggggggaagggccacaaaatgaaaccattaaagacccttaagagccaaaaaaaaacaaaacaaaaccaaaaaaaaaaaaaaaaaaaaaaanaacaaacaaacaacanaaacnaacaaa

SEQ ID NO: 579339 - DNA, 151 bp, Homo sapiens
atgccatctgccagctggtggcaggctaaagagcctagccaattgtgggcgtcactaacacgcaaaaacagggggtgctgtagaccggctgacggacaccagcagatacacggtcctcccacaagcgagcgcttcgatgagcagcggcaat

SEQ ID NO: 579340 - DNA, 1990 bp, Homo sapiens
  misc_feature (29)..(29): n is a, c, g, or t
  misc_feature (1963)..(1963): n is a, c, g, or t
  misc_feature (1979)..(1979): n is a, c, g, or t
  misc_feature (1984)..(1984): n is a, c, g, or t
aatgccaggctgtacggagcggggtgcgncgtgtgggcgtggcgggggctggggtctgcgggcgaaggtggtagcccattggaggtcccgggagcgaagtccagctgccgttaggcgctgggatagtcgcacgctggatgcatctacgtccgccgagcccctggggcgaagaggccgcgtccgccttcagttgtggccggtgcttcgccccctgacccttcgcccccaaagaccagctctaacgtgagcgcctcggccgccctgccccagcctcgtacacgccgccagcctcgcccagccggtgtccggagaccctcgggccgtgtccatttgtgggcaaagccagcggggcaggcttggccagagtgcaccactcggcgccgtcccaggcccgacgctctgggcgcgcccggaaccccaggttcgcggcccgtgtttccgaccggcggagggggctcagcggcccgatcccacggaagcgcgctcggaggggtgggacccggccggaccggagatggcgccgccagcgggcggggcggcggcggcggcctcggacttgggctccgccgcagtgctcttggctgtgcacgccgcggtgaggccgctgggcgccgggccagacgccgaggcacagctgcggaggctgcagctgagcgcggaccctgagaggcctgggcgcttccggctggagctgctgggcgcgggacctggggcggttaatttggagtggcccctggagtcagtttcctacaccatccgaggccccacccagcacgagctacagcctccaccaggagggcctggaaccctcagcctgcacttcctcaaccctcaggaagctcagcggtgggcagtcctagtccgaggtgccaccgtggaaggacagaatggcagcaagagcaactcaccaccagccttgggcccagaagcatgccctgtctccctgcccagtcccccggaagcctccacactcaagggccctccacctgaggcagatcttcctaggagccctggaaacttgacggagagagaagagctggcagggagcctggcccgggctattgcaggtggagacgagaagggggcagcccaagtggcagccgtcctggcccagcatcgtgtggccctgagtgttcagcttcaggaggcctgcttcccacctggccccatcaggctgcaggtcacacttgaagacgctgcctctgccgcatccgccgcgtcctctgcacacgttgccctgcaggtccacccccactgcactgttgcagctctccaggagcaggtgttctcagagctcggtttcccgccagccgtgcaacgctgggtcatcggacggtgcctgtgtgtgcctgagcgcagccttgcctcttacggggttcggcaggatggggaccctgctttcctctacttgctgtcagctcctcgagaagccccagccacaggacctagccctcagcacccccagaagatggacggggaacttggacgcttgtttcccccatcattggggctacccccaggcccccagccagctgcctccagcctgcccagtccactccagcccagctggtcctgtccttcctgcaccttcatcaatgccccagaccgccctggctgtgagatgtgtagcacccagaggccctgcacttgggacccccttgctgcagcttccacctagcagccaccagaggtaccagaggtggcacaggcaggggaggtggggggcagggcagaatccacaggaatgacccagctcctcccccacaggttacaaggggagagtggcccttccctcacaagtccgacatctccaggcccccactgaactccggggacctctactgactgcttgctgggacagtcaccagggttggggggaagggccacaaaatgaaaccattaaagacccttaagagccaaaaaaaaacaaaacaaaaccaaaaaaaaaaaaaaaaaaaaaaanaacaaacaaacaacanaaacnaacaaa

SEQ ID NO: 579341 - DNA, 319 bp, Homo sapiens
ttgttggttgtagtgagctgagatcgcgtctccactccaggctgggcaacaaagcaagactccgtcttaaaaaaaaaaaaaaagaaaaaaaagaaaaagaaaatggtttcttccacccagccatactctcatagccactttacaaaagggcaacacaatcaaaattttatggccgtccagcagtaaaagctcagaaggagaggaaaaataggccacatacattttaagctaaataagtggaggtcagggtccatacggagcagcaatcccatattctcatacctcttcatacctcttcagtgtgaaccaagcaaccctg

SEQ ID NO: 579342 - DNA, 1922 bp, Homo sapiens
  misc_feature (29)..(29): n is a, c, g, or t
aatgccaggctgtacggagcggggtgcgncgtgtgggcgtggcgggggctggggtctgcgggcgaaggtggtagcccattggaggtcccgggagcgaagtccagctgccgttaggcgctgggatagtcgcacgctggatgcatctacgtccgccgagcccctggggcgaagaggccgcgtccgccttcagttgtggccggtgcttcgccccctgacccttcgcccccaaagaccagctctaacgtgagcgcctcggccgccctgccccagcctcgtacacgccgccagcctcgcccagccggtgtccggagaccctcgggccgtgtccatttgtgggcaaagccagcggggcaggcttggccagagtgcaccactcggcgccgtcccaggcccgacgctctgggcgcgcccggaaccccaggttcgcggcccgtgtttccgaccggcggagggggctcagcggcccgatcccacggaagcgcgctcggaggggtgggacccggccggaccggagatggcgccgccagcgggcggggcggcggcggcggcctcggacttgggctccgccgcagtgctcttggctgtgcacgccgcggtgaggccgctgggcgccgggccagacgccgaggcacagctgcggaggctgcagctgagcgcggaccctgagaggcctgggcgcttccggctggagctgctgggcgcgggacctggggcggttaatttggagtggcccctggagtcagtttcctacaccatccgaggccccacccagcacgagctacagcctccaccaggagggcctggaaccctcagcctgcacttcctcaaccctcaggaagctcagcggtgggcagtcctagtccgaggtgccaccgtggaaggacagaatggcagcaagagcaactcaccaccagccttgggcccagaagcatgccctgtctccctgcccagtcccccggaagcctccacactcaagggccctccacctgaggcagatcttcctaggagccctggaaacttgacggagagagaagagctggcagggagcctggcccgggctattgcaggtggagacgagaagggggcagcccaagtggcagccgtcctggcccagcatcgtgtggccctgagtgttcagcttcaggaggcctgcttcccacctggccccatcaggctgcaggtcacacttgaagacgctgcctctgccgcatccgccgcgtcctctgcacacgttgccctgcaggtccacccccactgcactgttgcagctctccaggagcaggtgttctcagagctcggtttcccgccagccgtgcaacgctgggtcatcggacggtgcctgtgtgtgcctgagcgcagccttgcctcttacggggttcggcaggatggggaccctgctttcctctacttgctgtcagctcctcgagaagccccagccacaggacctagccctcagcacccccagaagatggacggggaacttggacgcttgtttcccccatcattggggctacccccaggcccccagccagctgcctccagcctgcccagtccactccagcccagctggtcctgtccttcctgcaccttcatcaatgccccagaccgccctggctgtgagatgtgtagcacccagaggccctgcacttgggacccccttgctgcagcttccacctagcagccaccagaggtaccagaggtggcacaggcaggggaggtggggggcagggcagaatccacaggaatgacccagctcctcccccacaggttacaaggggagagtggcccttccctcacaagtccgacatctccaggcccccactgaactccggggacctctactgactgcttgctgggacagtcaccagggttggggggaagggccacaaaatgaaaccattaaagacccttaagagccaaaa

SEQ ID NO: 579343 - DNA, 915 bp, Homo sapiens
gtggtcttcgcgttggccgcggggcccccggtagccgggtcctctttgttcctcccccaagtgggggtttttccctcgttggggaacgacttgttcccaggggccccttacccggggggccccccccccggttgtagtgggccacgagtcccgcccctggcacttggggaaccccttcggaaggctgcttacaagggtcccgcgatacctgtttcggacgcggtcatggccgttcttcggaccaacgcccgtcctgttgccgtgtgggcgtcttgtaactctccctccaaggcccaatgggttgcctctagtacacgccctgatctcaaaagacgaggggccctcccccccgtggcacaggacaaatgcgtgaaaacagggttctgctcatccagcagggcaatactcggcggcacggtccccgcggatgatggaaactacccaggccacgccctacagggcggcctacaccaagaacaggacttcaagtcaccaccaagcgtgggtcagagaaatcatcggtacaacgcctgcccccccgcctgggagcgcgcccccacacaatagggtgcgcgccaccacacagggcgtccccgcgtggcaccaggtttgttgacacccggtgtccggtgattaccccaccctccggggctctcgattcgccctgggggggggtgcgttcttacgcattaccccccctcccgcctcctttttgttttgttactataggctcttgtcaggggcccattactggcttcttgggttttctcggagatgcccaaaagagacagaaaccttgatcccacggacaaggagtagtcggtgatctggtaggagcggggagaacaaggttatgctgctcttgtgcgtgtgaaaaaacaagggaaacaaagaattgccccttaccacaaaaca

SEQ ID NO: 579344 - DNA, 151 bp, Homo sapiens
tagcaagcaaggattacacacacttattttataaaccagcacacaaaggtttaaaacagttttgaaaataagtttgctgtcttgagtcaagggaatccgctcctgcagcaggaggttcaagttctttcttcaaagagtcatcagaataact

SEQ ID NO: 579345 - DNA, 1732 bp, Homo sapiens
  misc_feature (29)..(29): n is a, c, g, or t
aatgccaggctgtacggagcggggtgcgncgtgtgggcgtggcgggggctggggtctgcgggcgaaggtggtagcccattggaggtcccgggagcgaagtccagctgccgttaggcgctgggatagtcgcacgctggatgcatctacgtccgccgagcccctggggcgaagaggccgcgtccgccttcagttgtggccggtgcttcgccccctgacccttcgcccccaaagaccagctctaacgtgagcgcctcggccgccctgccccagcctcgtacacgccgccagcctcgcccagccggtgtccggagaccctcgggccgtgtccatttgtgggcaaagccagcggggcaggcttggccagagtgcaccactcggcgccgtcccaggcccgacgctctgggcgcgcccggaaccccaggttcgcggcccgtgtttccgaccggcggagggggctcagcggcccgatcccacggaagcgcgctcggaggggtgggacccggccggaccggagatggcgccgccagcgggcggggcggcggcggcggcctcggacttgggctccgccgcagtgctcttggctgtgcacgccgcggtgaggccgctgggcgccgggccagacgccgaggcacagctgcggaggctgcagctgagcgcggaccctgagaggcctgggcgcttccggctggagctgctgggcgcgggacctggggcggttaatttggagtggcccctggagtcagtttcctacaccatccgaggccccacccagcacgagctacagcctccaccaggagggcctggaaccctcagcctgcacttcctcaaccctcaggaagctcagcggtgggcagtcctagtccgaggtgccaccgtggaaggacagaatggcagcaagagcaactcaccaccagccttgggcccagaagcatgccctgtctccctgcccagtcccccggaagcctccacactcaagggccctccacctgaggcagatcttcctaggagccctggaaacttgacggagagagaagagctggcagggagcctggcccgggctattgcaggtggagacgagaagggggcagcccaagtggcagccgtcctggcccagcatcgtgtggccctgagtgttcagcttcaggaggcctgcttcccacctggccccatcaggctgcaggtcacacttgaagacgctgcctctgccgcatccgccgcgtcctctgcacacgttgccctgcaggtccacccccactgcactgttgcagctctccaggagcaggtgttctcagagctcggtttcccgccagccgtgcaacgctgggtcatcggacggtgcctgtgtgtgcctgagcgcagccttgcctcttacggggttcggcaggatggggaccctgctttcctctacttgctgtcagctcctcgagaagccccagccacaggacctagccctcagcacccccagaagatggacggggaacttggacgcttgtttcccccatcattggggctacccccaggcccccagccagctgcctccagcctgcccagtccactccagcccagctggtcctgtccttcctgcaccttcatcaatgccccagaccgccctggctgtgagatgtgtagcacccagaggccctgcacttgggacccccttgctgcagcttccacctagcagccaccagaagggccacaaaatgaaaccattaaagacccttaagagccaaaa

SEQ ID NO: 579346 - DNA, 980 bp, Homo sapiens
gggcggggggataagagaccacacagtcgtctggaatccgctgacatcatacatagtctaccccttgcttgaaggatcccgatgaaagagtctcacaatgtcaataagcgaatggcatacgcatcttgccgtaatcgcactagaagcctgatcctcacattatccgctgcagtagatcttacctgcatggcagatcaaaccgaatgagcgccctcggtaggtaataccatgtctccatctcgtccaatcacaggacctcgctgaacatgtgtgtcagcggggccttcattccctatgatcgcccgcggacgtacgtcgactggacatatgtgctgcctagaatcttcactctgggggaggggtcacctctacagatggggtacatcatattcctctactacgttctatagggacctttgccaacaagtactactctgcaccgccacgtggggtcacactattttgatcgcatctgtactagtcgaagacactggccctagacctacgacgcatgtaactcgcacccacagggaatataattactaaactgggggatgaaactgctctgatgtcatagatgatgccacgaaagcgtccctgtagcgaagagtaatcagctacgtcccctagctatgaaggggactgcgcatgacatatatcgagaggcatatacatgccctctaagcatattgtagcagtagcacagatgaagggtataggtgcgtgcagccaggatttaactagtatgggaactctcaattcacttcgagaaaatatcctccagtgtgtgtttaagctgtttccccaaggttcttcggaaagccttaaacacgaacctcaatatccgtggttcctcgtctagagagagaacagggtctctgctaaccacggtgtgggggagctcttccgtttcacacatccggtttggcaacatcaggggacaggccgcctaaaaaggatcggccttgacacacaggccg

SEQ ID NO: 579347 - DNA, 1800 bp, Homo sapiens
  misc_feature (29)..(29): n is a, c, g, or t
  misc_feature (1773)..(1773): n is a, c, g, or t
  misc_feature (1789)..(1789): n is a, c, g, or t
  misc_feature (1794)..(1794): n is a, c, g, or t
aatgccaggctgtacggagcggggtgcgncgtgtgggcgtggcgggggctggggtctgcgggcgaaggtggtagcccattggaggtcccgggagcgaagtccagctgccgttaggcgctgggatagtcgcacgctggatgcatctacgtccgccgagcccctggggcgaagaggccgcgtccgccttcagttgtggccggtgcttcgccccctgacccttcgcccccaaagaccagctctaacgtgagcgcctcggccgccctgccccagcctcgtacacgccgccagcctcgcccagccggtgtccggagaccctcgggccgtgtccatttgtgggcaaagccagcggggcaggcttggccagagtgcaccactcggcgccgtcccaggcccgacgctctgggcgcgcccggaaccccaggttcgcggcccgtgtttccgaccggcggagggggctcagcggcccgatcccacggaagcgcgctcggaggggtgggacccggccggaccggagatggcgccgccagcgggcggggcggcggcggcggcctcggacttgggctccgccgcagtgctcttggctgtgcacgccgcggtgaggccgctgggcgccgggccagacgccgaggcacagctgcggaggctgcagctgagcgcggaccctgagaggcctgggcgcttccggctggagctgctgggcgcgggacctggggcggttaatttggagtggcccctggagtcagtttcctacaccatccgaggccccacccagcacgagctacagcctccaccaggagggcctggaaccctcagcctgcacttcctcaaccctcaggaagctcagcggtgggcagtcctagtccgaggtgccaccgtggaaggacagaatggcagcaagagcaactcaccaccagccttgggcccagaagcatgccctgtctccctgcccagtcccccggaagcctccacactcaagggccctccacctgaggcagatcttcctaggagccctggaaacttgacggagagagaagagctggcagggagcctggcccgggctattgcaggtggagacgagaagggggcagcccaagtggcagccgtcctggcccagcatcgtgtggccctgagtgttcagcttcaggaggcctgcttcccacctggccccatcaggctgcaggtcacacttgaagacgctgcctctgccgcatccgccgcgtcctctgcacacgttgccctgcaggtccacccccactgcactgttgcagctctccaggagcaggtgttctcagagctcggtttcccgccagccgtgcaacgctgggtcatcggacggtgcctgtgtgtgcctgagcgcagccttgcctcttacggggttcggcaggatggggaccctgctttcctctacttgctgtcagctcctcgagaagccccagccacaggacctagccctcagcacccccagaagatggacggggaacttggacgcttgtttcccccatcattggggctacccccaggcccccagccagctgcctccagcctgcccagtccactccagcccagctggtcctgtccttcctgcaccttcatcaatgccccagaccgccctggctgtgagatgtgtagcacccagaggccctgcacttgggacccccttgctgcagcttccacctagcagccaccagaagggccacaaaatgaaaccattaaagacccttaagagccaaaaaaaaacaaaacaaaaccaaaaaaaaaaaaaaaaaaaaaaanaacaaacaaacaacanaaacnaacaaa

SEQ ID NO: 579348 - DNA, 1877 bp, Homo sapiens
  misc_feature (29)..(29): n is a, c, g, or t
  misc_feature (1850)..(1850): n is a, c, g, or t
  misc_feature (1866)..(1866): n is a, c, g, or t
  misc_feature (1871)..(1871): n is a, c, g, or t
aatgccaggctgtacggagcggggtgcgncgtgtgggcgtggcgggggctggggtctgcgggcgaaggtggtagcccattggaggtcccgggagcgaagtccagctgccgttaggcgctgggatagtcgcacgctggatgcatctacgtccgccgagcccctggggcgaagaggccgcgtccgccttcagttgtggccggtgcttcgccccctgacccttcgcccccaaagaccagctctaacgtgagcgcctcggccgccctgccccagcctcgtacacgccgccagcctcgcccagccggtgtccggagaccctcgggccgtgtccatttgtgggcaaagccagcggggcaggcttggccagagtgcaccactcggcgccgtcccaggcccgacgctctgggcgcgcccggaaccccaggttcgcggcccgtgtttccgaccggcggagggggctcagcggcccgatcccacggaagcgcgctcggaggggtgggacccggccggaccggagatggcgccgccagcgggcggggcggcggcggcggcctcggacttgggctccgccgcagtgctcttggctgtgcacgccgcggtgaggccgctgggcgccgggccagacgccgaggcacagctgcggaggctgcagctgagcgcggaccctgagaggcctgggcgcttccggctggagctgctgggcgcgggacctggggcggttaatttggagtggcccctggagtcagtttcctacaccatccgaggccccacccagcacgagctacagcctccaccaggagggcctggaaccctcagcctgcacttcctcaaccctcaggaagctcagcggtgggcagtcctagtccgaggtgccaccgtggaaggacagaatggcagcaagagcaactcaccaccagccttgggcccagaagcatgccctgtctccctgcccagtcccccggaagcctccacactcaagggccctccacctgaggcagatcttcctaggagccctggaaacttgacggagagagaagagctggcagggagcctggcccgggctattgcaggtggagacgagaagggggcagcccaagtggcagccgtcctggcccagcatcgtgtggccctgagtgttcagcttcaggaggcctgcttcccacctggccccatcaggctgcaggtcacacttgaagacgctgcctctgccgcatccgccgcgtcctctgcacacgttgccctgcaggtccacccccactgcactgttgcagctctccaggagcaggtgttctcagagctcggtttcccgccagccgtgcaacgctgggtcatcggacggtgcctgtgtgtgcctgagcgcagccttgcctcttacggggttcggcaggatggggaccctgctttcctctacttgctgtcagctcctcgagaagccccagccacaggacctagccctcagcacccccagaagatggacggggaacttggacgcttgtttcccccatcattggggctacccccaggcccccagccagctgcctccagcctgcccagtccactccagcccagctggtcctgtccttcctgcaccttcatcaatgccccagaccgccctggctgtgagatgtgtagcacccagaggccctgcacttgggacccccttgctgcagcttccacctagcagccaccagaggtaccagaggtggcacaggcaggggaggtggggggcagggcagaatccacaggaatgacccagctcctcccccacaagggccacaaaatgaaaccattaaagacccttaagagccaaaaaaaaacaaaacaaaaccaaaaaaaaaaaaaaaaaaaaaaanaacaaacaaacaacanaaacnaacaaa

SEQ ID NO: 579349 - DNA, 210 bp, Homo sapiens
cggtgacgtagattcctctccgcagcatatggaggttcccaggctagggatctaatcggagctgtacttgccaagcctatgccagagccacagcaacatcggatctgagccgcgtctgcaacctacaccacagctcatggcaacgccggatccttaacccactgagcaaggccagggatcgaacccacaacctcatgggtcctagttaga

SEQ ID NO: 579350 - DNA, 518 bp, Homo sapiens
  misc_feature (357)..(357): n is a, c, g, or t
  misc_feature (365)..(365): n is a, c, g, or t
  misc_feature (424)..(424): n is a, c, g, or t
cacaacgctgactcttcccaacctgcactcgcgtgggaacgagaagacactcattggaggagtcggccgagcaggcacagcggtgtgacgagactcgcgtgggaagaagaagacactcctggaggagtcggcagagcaggcagaccaaggagttcatcttctcggagctgctgtccaacctgtactcgcgtcggaacctgcagacacttgtggaggagtcggcagagcaggcacagcggtgccgatgagatggctgcttctcagagctgtctgtccaacctgcactcgacgtggaacgagaagacactcgtggaggcgtcggtagagcaggcagaccaaggagttcatcttctcagngctgctgnccaacctgtactcgcgtgggaacgagaagacactcgtggaggcgtcggcagagcaggcngaccaaggagttcatcttctcagagctgctgtccaacctgcactcgcgtggaacgagaagacactctggagcgtcgcagagcatgcgacagtag

SEQ ID NO: 579351 - DNA, 976 bp, Homo sapiens
catatcagagcacttgatcgcgctacgagaagtaccccatgagggtccaactgtgtgcacttgctggggtcagatccagatgaccgaggaggtcggggatatatctccgtcgaaggggcctggtgtgacagccttatgggctaagatatttgctgagagatgtagatcatgcacgatggccatcacgtggtgtgtctagaagctcgagccagctagtgactggagggctatgactgggtggccatgagccgggaatgtgatcatccggatgtcctcagtgcgcgcaactacttcggttgtcatcgtcgtggtaaccaagactgtctacttctatgtggaacactcggagagataagcttctataacagtgacttccttgactttggcagtgttgacccgcaggcgctctgcgtaggacggctgaggccaccactgttcacctgcggtacggttaacgcgccacgaccttaacgtttcgctgtaggtgaacacttgtcgcaacaactcagtcaggaagtatttgccagtgagaaccataatcattcgagcctacgctggaaacggagggggaagacggcatacaagtaaactcacatcgcgtgtccacgacactgacgccggtcacaacctcatttcaacacaaaatccgggatcatacagcacttgggaccccaaacacggcatgcggcccacgcatagcaaaccagcgacaggcgctccgggacagtcagacagcccggggacccacgctcaagacacgcaacccagccagctctggccctggccgcaagccgaccacgctcgggccaagagacacctagcccgccggcaacaggcgaacagcggcgagggtacaccagcccacctcgggcagcagaccggccgacgaaccgagacaggcaccacaccagcgcagaactacgacaagccccaccacgaacaccgccccgccgcccgccgcaggcacgcccccacg

SEQ ID NO: 579352 - DNA, 383 bp, Homo sapiens
tggtcttccccatctgtggcagctaaaacaaaaatcactcaaaatattcaggtttacttgtaagctctctctcatagggagctgccatacctcacagtccaaagtgtttcctatagatcagttaacattatcacgtgacatgtaatggcaatttaattatgcagcaaaaatgcattcagagaaagaaaaataaccttacaggtgtctgtatcaccttggtatacacaatggcttaagtaactcgtgctttaaaacattggtcactgggcataaaagtgcttatgctctgtataggaatgtcacagtgcaagatgctgtttagcccagcgcaacaaaggttatttaacaattaattgttggtgacaacaaaacaaaacaacaaa

SEQ ID NO: 579353 - DNA, 197 bp, Homo sapiens
tttttaaaaggggggggggttttttttttgaaatttcccaggggcttaaaaattgttttaaaaaaatttttaaatttggtccaattttttcattccccctttcattaaaaaggtttgcaaaaaaaatttaattttgggccccttaaaaaattttttggtggggtttacctgttttaaaaaaaacttttttagtttta

SEQ ID NO: 579354 - DNA, 346 bp, Homo sapiens
cgaacatgttaaccaaggctataagaatctgaaattagacccattcagaagaggtaaggaaatcgtatagttaacagatggacaagacataaccttccttaccttcactatacctcaatccatcactacacacatctactgcttaacaaaacttcctccctcctttactttctccctccctcctcctttctccttcccctctctattcctccctacccccgtctattccttcctccctttccttcccttcctccctttcctctcttcttcttgctctgttgcccagcatgcagtgcagtgacctgatcatggttccatgtaacctcgaactcttgagctacacagg

SEQ ID NO: 579355 - DNA, 249 bp, Homo sapiens
tgacgccttagctggcaagtaaaccccagcgcttagttcacattgctgattttgtgcactacttatcttcgccagctccggcttaggcaaccgctagcctgatatgacctgcaggagcagcatgagcttgagcccgactcgaaagccctcataaatgttctcgagctgtgcgcctgacttccgcagatgagagttgcaccatgccgagaagggctagcgctgctgcttactacaggccgggtgcagcag

SEQ ID NO: 579356 - DNA, 823 bp, Homo sapiens
ggagaataacgtgtgcttccaactgccacctgtgacggggtaggcgtgtcacaaagctgatgggcgaggaggccctgtgcgtgggtggcgacaagtcagacccgataccttaataaccccgcggacgaggacctatgcctatgctctgcggattctgccctaacgacctggctgcgtgatccagcctgtgccataaacccgcggagaaggctgccatggcaccgtgcatcatctcctcgcccattgctcagcgccgggcctgaggacctggtagccgccgctcaaatcggaggtgcctccgaattagtaaatcagaatacgtaagcaggaacgttcactcatcaggggtacgctctatggcacgtagagggcgcagagcaaaccatgtcacgccatccaatgaccaccagctggtcaggtcaacaacccctctggttaaaactcaagcaaataaagccgcttcctgtcattaagcatctcagaggaagcggccctccctcgatgggctcttagacccagagaagcccgcgctatcttggacccaccaagtcgaggcccagccttcctgctgccatcatactctgcttctccccagaggaacttagggatttcagccctggcttttaaagaaaaacgaaataccgataagccacaaggaccaatgtaggtattctccccggcccatcttcaaggtctcagcgactgaggctggaagatgatatggattggaacacgatgaaatctttgcttaatctttttaaaaagctgctgtggttttgctggtacactaagaattgtgatttgcattgtacggtttaggacc

SEQ ID NO: 579357 - DNA, 194 bp, Homo sapiens
aaaattgggggtttgaccccttttttttttatttacttttggtaaaaaggcttttaaaaaaaaaaaaaaaaaaaaaaaaaggggtggggggccaaaagccaacccattttccctgcctcaaaaggttttgggaagttatccccccccgtttgttgggtttgttttccactgttaaaaaaacctttgacccggta

SEQ ID NO: 579358 - DNA, 293 bp, Homo sapiens
acgaggatccccgacacgaggctgcgggcgagccgagctggctggagtggcgacgaccttcgggaaatgctgggctgcggggggtttgggccacccatcccggtagagcccggtcctcgacgaccatctgttccctagcccatggcggacaccatgctggacggctggggcagaccgaagcagaggctggaggaggcgtgcacgggcgtcggagtgatcaggatgcgtacggagtgcttgaagggcgggaggcggcccacaggtgccatgtgtccagccacggcagttgcact

SEQ ID NO: 579359 - DNA, 160 bp, Homo sapiens
ccccccccccccccccccccccccctttttttttttggggggagaagggggggccccccccccccaatattgtttttttgcggggggttttttcggggttttttggggggggggggcccccccttagggttttttttttttttattttgggcccccttta

SEQ ID NO: 579360 - DNA, 191 bp, Homo sapiens
  misc_feature (174)..(174): n is a, c, g, or t
tgctgacgccattaaaccgcagtaatatggcatgtgcagcaacatggatggacctagaaattatcatgctaagtgaagtcagtcagacagtgagacaccaatatcatatgcactcacttatatgtggaatctaaaaaaaggacacaatgaacttctttgcagaacagatactgnctccgtgggctaatttt

SEQ ID NO: 579361 - DNA, 289 bp, Homo sapiens
  misc_feature (36)..(36): n is a, c, g, or t
agagtgttggtgcattgcgccggtgtgctccccgtnagaccgggccccttcatatcatggtgtggccgaattgtcctgtgttcctttgcaatgtaacccaaagggtatcattctggtttgtgggtacagacccttcaaaaaatcacaccacttacctgctgtctgaggtgcaatcagtccatgaagaatgggacaaggaaccgggatcaactaatgccttcttgtctaaatgacacaaactctcggaatttgttaacgaatctcttgccacacgttgcaccacaccgat

SEQ ID NO: 579362 - DNA, 937 bp, Homo sapiens
  misc_feature (937)..(937): n is a, c, g, or t
gaaggtccaggtgtagcctgaagcttaaacaatcaggaggaccatctttataagagaatacaatgattaggcagagtcttgtgaaggggctcgagtaagctaggggtcttgaacttaattaaacatcagcttcccagtaaatctgctcctggggtgtgtaaattggaattactcttttggacggcaatgtgataacacctgggtaaaatgacaatgtgcttatcccctgtgacccaacaagtcacatcctccaagtgtctctgggagacatttccaacaggtaactacagaggcaaatatgagaatgttcttagcaatgctgtctgcaatagctagaggcagcaaattggaactatccaaagtgtctattaacagaagactgggtaaagcaaagtcaacatgttataaatctcagaacatcaatgttgcctggaaaagcatgtggcagaaggatacgtactgtaatgctggcattttcataaagtgcgaaaacatgtgaaacaatgccatgtgtagttcatatgtgtgcagtaaagtctaacctgtgcttggaagtgaacatcacattcagtctacaggtggcctggaggacggcgggagaggagagaatcagcatacggagggtgtctaaggaggcttagatggccaatctggaaagctttcaattttcgttagtacgtaacaggcaacccaggcaagtattagcaatggcaacggtgggcaaaagtatgtatgtgcccgcaaagaaggatagctcctcgggggttgaacgttcacggggcatatgtggagaatcattcacacacctttagcggcagcggggctagcatcggggtggcccccaatacattcgttttccccaaacgttatacgcctgtgccacggggttgcagctacaaaccacagcgcacgaaagaatagtcggattgttggtgcn

SEQ ID NO: 579363 - DNA, 110 bp, Homo sapiens
cattttctattaggagaaacgaaacaaacaaaataaaccactccagaaaaagggtccagagaagagcactgtagaaagtccaccagctgagcgccggcggatcacgaaga

SEQ ID NO: 579364 - DNA, 2119 bp, Homo sapiens
gaatggtgacaggtgacaacatcaacacagcccgggccattgccaccaaatgtggcattctgacacctggggatgacttcctgtgcttggaaggcaaagaattcaaccggctcatccgcaacgagaaaggcgaggtagagcaagaaaagctggacaagatctggcctaagcttcgggtcctggcgcgatcttctcccactgacaagcacaccctggtgaaaggcataattgacagcactgttggggaacaccggcaggtcgtggctgtcactggtgatggcacaaatgacgggcctgctctgaagaaagcggatgttggttttgccatgggcatcgcaggcacagatgtagcaaaggaggcttcagacatcatcctaacagatgacaacttcaccagcattgtgaaggcagtgatgtggggacgaaatgtctatgacagcatctccaagttcctgcagttccagctcactgtcaatgtggtggccgtgattgtagccttcactggagcctgtatcactcaggattccccattgaaagctgtgcagatgttgtgggttaatctgatcatggacacttttgcttcattggccctggccacagagccccctacggaatctctgttgaagcggcgcccctatggccgaaataagcctctgatctcacgcactatgatgaagaacatcttgggccatgcattctatcagctcatagtcatctttatccttgtctttgcgggtgagaaattctttgatattgatagtgggaggaaggcacctctacattcaccacccagccagcactataccattgtttttaacaccttcgtgctgatgcagctcttcaatgaaatcaactcccgaaagatccatggagagaagaacgtcttttcaggcatctaccgcaacattatcttctgctctgtagtcttgggcacattcatctgccagattttcatcgtggaatttgggggtaaacccttcagttgtacaagcctcagcctgtctcagtggctgtggtgtctcttcattgggattggagaacttctgtggggccagttcatctccgcaatacctacccgatccctgaagttcctgaaggaggctgggcatggcaccaccaaagaggagatcaccaaggatgccgagggactggatgagattgaccatgctgagatggagctgcgccgaggccagatcctctggttccggggcctgaaccgtatccagactcagatcgacgtaattaacacattccagacgggagcctcttttaagggagtcctaaggcaacaagaccgagtgtgctctgctaggctttgtcacagatctgaagcaggattatcaggctgtgcgtaatgaagtgcccgaggagaagctctacaaggtgtacacctttaactcagtgcgcaagtcaatgagcaccgtcatcaggaatcccaacggtggcttccgtatgtacagcaagggcgcctctgagatcatcttgcgcaagtgtaatcgaatcctggaccggaaaggggaagcagtgccattcaagaataaagccagagatgagctcccataactgaattggcctttggtccatgttttctccccatatgtatatatgccatatgtgaatatgccatatatatgtgccaacaaatctatctacgttgttcttttcaaattagcacgcagataggaattttgagtttcttcttcttttagtaactagtataacaagcactggtatttttgtacaaaaaagaaaaacaaaagattgactattgtggtctgcatgacataaacaaacaaatggtgatatcaaagcaacgtataccccagtccagtgtgtgttgccataatttgcaattcagcttaacagtgcacccaatctatatttgcattttgatattatttaagctctatgtacaaggttttgcatgtatttatatggttcttagggaaaaaaaatgctataaactgcaaatctgaaattcaaatgtgttgttccactgagaccagaagaagaagaggagttttaaaagggataatttgttggagccaataaagctttttgctgatgaacagaaaccaatactgctgtgcactgagaataaaaactcatgcccccttgt

SEQ ID NO: 579365 - DNA, 141 bp, Homo sapiens
tgatactcttaaacgggacccctaatgggggccccccgtttttcaacttggtcggtaaagcccgttaaccgtctcgggtgaggggtggaagccaagggggtggccccttgggctctgccggttcacgtcccccttccccct

SEQ ID NO: 579366 - DNA, 749 bp, Homo sapiens
atcccccgaatggagaccgaggcgatgttctgggcggaagcgcggcgatctcgcgggtccggcgacacccgagccgtgaggcggacgcgaggtcctgctacaggagcggtggatggggcatcctgctagattcgggtctgtgggcagaatggagtttaggactcagtggactcggactcaatgagtagaagcccctgtcaagatggagaagaatgcggagataagagatgaaagcctctcttggggccagaaaccgtgggtgaccactgggactgaggtcttgctttatgtgggacaagtctgtaggatgcgctgatcagataaggctgcagcttttagccagaatagaaacccacttctgatcaaggaggagcctcgtgcgatgttgaatgtatgccaattttctgaccatatatcactgaggaccatgaagctcgtcagcacctggcttcttgtgcttggtgggtttagctctgtgggaaacggcacctgggtgacaaggctggggacgagagcttgggaaagaggccccgttgccccagactgctcccacctgactttcgacggtggaatttctcttcaactgtggtggagtacgaatatatagtggcttatcaggggatacttcacaggccaaagctagaaacctcaatttatgtcaagtgctctgaaaagcagtgacgtggacaaactggagaataatacctcggaaaacccatccagtgagtaccctatggaattggggggga

SEQ ID NO: 579367 - DNA, 365 bp, Homo sapiens
ggcataataatagtccatgggcatgcagatgcatctacgagagaaacagcagtagtggttatcaaatcttttaacgagttaggggcagaggctttctaattatttttgagacagagtctcattctgtcacctagcttgtgcagtggcatgatctcggcttactgcaacttctgcctcccagactcaagcaatcctcccacctcagcctccagcgtagctgggaccgcaaacgtcaacaccacacccagctaatttttcgcatattaggtacagacggggttttgccatgtggcccaggctggtgtcactgagctaggcaatccacccaccttggtttcccaaagtgctaggatacagtagggaga

SEQ ID NO: 579368 - DNA, 1178 bp, Homo sapiens
atctaaccaaaaagtcttggttttatctgtaatccattgaaaagagttgttcttagtactccagggttgcattgattgctacaacagtcactaatattggctataacacattatcaaagtggttctggtgctaggtcaagaacattttcggtatgtatcagtgagttcagtctagtggatagaagtcagttgttgtaaattcacggtggctttgatgtttcacgtgtaggatggatctagagagactcgtaccacattgtgcaaattaccgtcgtaccaccctaactgttctatacggagaagagcacaaagtacgagtcaagctgtgggctacgattaaccgagcattcaaactagttctcgtgtggctagcgtgtctacgcgaggacacatttgtgtctgcgctcgtgcgtagttagcgcaatcgtgctacgtagccagagatacatctccaacacatctagtctcaatcatccgctagccctataatcattgcgcacagggttccctaagtaagcgcggtaccgtgttgtcaaccagtcggtcttctgctatatatcctagatctgagacgagacgagagacgcgaaataaacagaggagcacaactcgcacaattacatacacataagaaaagaccgagagaaaaaagaaatgtggacccaggagaggtcccacaaaaaaagcatacgttgaaacacacgtgcagagacagaggcgcacacgaagaatatcgagagaacagcaccatcaatgaagcacaatagagcactacagtaagctacatcaagggcacagaaccaaccatagtgacacaccagaggggcgcccaagatgcaccccaaagctcacacaaccaacagccgacggcgagaaattaacaattagagaaaaaacctacagaacgacagaacaactctaacacacaggcgagcacaacagagacatcacaacacaccggcagagaagactaacaaataaaaacaaatggaaaaagcgaccaaggcggcacgcaacaaccagacaccaacacagcaagcgcgacgccaacaagagacgcaatgtgaaccccctggctgacggaaacaaaacgcgacaacacacagccagacgaacaaagaaacacagaaagcggcaagaacagccaccgacggaggcacatacgaaccccccacgac

SEQ ID NO: 579369 - DNA, 152 bp, Homo sapiens
cccaggctggaatgcagtgacacaatcagcgctcaccgtagcctcaagccatcctcccacctcagcccctcaagtagctgggactacaggcacatgccagcatgatagggttttaccatgttgcccaggctggtctcaaactcctggactca

SEQ ID NO: 579370 - DNA, 148 bp, Homo sapiens
  misc_feature (27)..(27): n is a, c, g, or t
  misc_feature (29)..(29): n is a, c, g, or t
  misc_feature (77)..(77): n is a, c, g, or t
  misc_feature (112)..(112): n is a, c, g, or t
ggtatgggttcgcgtactcaagggtanantccgcgtgggggcgggctgaaacccttgtgttcccacgttgcgaagcngagtagctggcggggctgggcgcgccatcacctgntgcggatgtttaggggttctgccgggtttcgcgggc

SEQ ID NO: 579371 - DNA, 715 bp, Homo sapiens
tgcagtggctcatgcctagcaccttgggaggccaaggcaggcggatcacctgaggtcaggagttcaagaccagcctggccaatatagtgaaaccccatctctactaaaaatacaaaaattagccgggcatggtggcacgagcctgtaacaccagccacttgggaggctgcggtcggagaaccgcctgaaccccagaggtggaggttgcagtgagccgagatcgcgccactgcactccagcctgggtgacagagcaagactctgtctcaaaaaaaaaaggaacattcatcaatcatgcagaatatccaaaaaaaaaaaaaaaaaaaaaaaaaaaaactcttgttgtgcggccgcccttgggcccctggagaaaggcttttataaaaccacttcgcgtgtggggcgcccggggccccccatgtaagggtataggtgtaaccggtgggccactaggcgcgtgtttcaccaagagaggagaacccgtgggcccatagaacaatgggggcggcggggattcttccaacacatattataaaaagacccgcgggggggggacaccgcgagaggcgtgttttgggacgaaattccccggaggggggggggcttacgggggggcgcgatcacccggggggctcttttttcacagggggaggtgtctccagagaggggaggccctggtatttaaattttcgcccgggaggtcggtggggggggga

SEQ ID NO: 579372 - DNA, 843 bp, Homo sapiens
  misc_feature (843)..(843): n is a, c, g, or t
taaacaaccccggtcctggggtgggggggggtctaaaactaagtggagatgatatcattaaggggggaaggcgcttggggaagtaggccttatttctcatgggtccttccgaacagggaggaattggaagtaaatagaaaccgaccgtggattactccgggtctggaactcagatcacgtaggatctttactctgttggaacaaacggaacctttaatagcggttgcaccatggggatgtcctgatccaacatcgaggtcgtaaaccctatggtggatatggactctagaataggatggcgctgttatccctagggtaacttgtccgtgggtcaagttatgggatcaatggagtcatagtagtctcgcttggacttgggtgaagtcttagctatgtactgggctccgacaggtggggttcctggctccgaaggtcgcccacaaccgaaattttacaatggcaggtcgggaagttcaggaccggtgggggtctggcacaggctaccggttggcctccactaaatacaaggctccataggggactcacccgacctcgcggagtaatgcgccacgctctctcacagagggacaggcacaatgtccacactggttcaaacagagtagggccctggcccagacggccctccacacaacaaacccaaaaaattcagaccggccaactgtctttggacgcactgaaaggcggggggccaacgcactagattggtggtcacgatcatgggggtatccccacccgtgggtacaaattgggcgctgcatgatgtcatcaacctgctgtagtgcggaaacgaccacaacacacactgactggtatgacaccacn

SEQ ID NO: 579373 - DNA, 621 bp, Homo sapiens
  misc_feature (179)..(179): n is a, c, g, or t
  misc_feature (200)..(200): n is a, c, g, or t
  misc_feature (210)..(210): n is a, c, g, or t
  misc_feature (216)..(216): n is a, c, g, or t
  misc_feature (231)..(231): n is a, c, g, or t
  misc_feature (243)..(245): n is a, c, g, or t
  misc_feature (262)..(262): n is a, c, g, or t
  misc_feature (321)..(321): n is a, c, g, or t
gggtatatgtcaatggaggtattattttataatactttgcattgacatgaagtgggttcatgggggaaaaccatgagctgtgaatatatgcttgtttgctaccaatgttcacagctcatggtagcaaacaagcatatattcatttcaaaactttccttgcttttagcagagagaagccngtatatgttacatgtgtgacnttcagtagtntaaagngatgtttcaaaaaantgttgcatgttnnngatgcaatttgggaaantgtttacttcacaatgtagtcattcataaaaaattcatgaaaatactgaacatatgttngaggatttttcttttcctttttaaatttttttattttttctgagacggagatctgctcttacgcccaggctagagtgaagtggcgcgatcttggcttactgcaacctccaccccccaggttcaagcgattctcctgcctcagcctccggagtagctgggattacaggcgcccgccaccacgtccggctaatttttgtattttcagtagagacggggttttgctatgttggccaggctggtctcaaactcctgacctcaagtgatccaccttgctcggctctccaagtgttggataccggt

SEQ ID NO: 579374 - DNA, 1383 bp, Homo sapiens
  misc_feature (36)..(36): n is a, c, g, or t
  misc_feature (199)..(199): n is a, c, g, or t
  misc_feature (431)..(431): n is a, c, g, or t
gattttcccagctgctagcccaattaaacctgtctngccctttgggggcagtcccaaaaaaaaaaacaaaaaaaaaacaaacaaaaacatattttggggcgcgcgcgcttcgggcccttcagaaaacttttctaaacacctttcgtttggggcgcgccgcgggcccccaattgggtaaagggcgaccatgggccataancgagtggttcaccaataggggagagactccggggcaaagagagcacaagagtggctatgggaagttctctccacgcagcaatataaaacacaacgcggcagggagagggaaaacacccagagaacgcggtttcatgagcacaaaactctccacaagagtggagaggtactcagaggaggagccaacaagacaggggagacctctcatcacaacagcaaggaggaggctccanagaacggagagagggccaacgagaaaatcatataaagaattaacgagccccaccgagcctcgggggggaaagaacgagaaaacaggaaaaaaaggaacgaacagaaaacaacgaaaagaaagagaaaagaagacgagggcgagcaagaagacaagagagaagaaacacgacaaagaaacgaaacgagagcaagcgaaccaaaacaagacagagacaaaccggagcaacagcagaaataagcagacaagaacagaagaaaaagagagagaacagaagcacacgacaagagagcgaagaagagacagagagaaacgaggacagagaagatagaggagaagagaagaaagaagaacagaagaagaagagaaaagaagaacagaaagacaagagaacgacagaacaagaacagaacggagaagacagaagaaagtacagaacaagatgaagataagagacagaggaagagacagaacgaggacactgaacaaacaagataagagacagagcaaggagaacatacagcacaaggagacagagacgaagagagcaagaagagagagcagaaaggaaagaagagaagaagaaagaagaaaagagaagaacgaagagaagaagagaacaagaacgcagagagcgcgagaagagcgagcgagagcaagagacagacagagacaagaaagaacagagagaagaagagagaagaagcagagaagcgagaggaggaagcagagaaagatagcagggagacagcagagagagaagcacgagaccaaagagaggagaagagagaacaagacagaaagggagaagaagagaaagacagaaaagaaacagcagagaaatagagaatagagagagagaagaagacggtaagagagaagtcacagaggagaaagagaaaaagacaagagggatacaagaaggcgcaagagagcagagaagaaagagagga

SEQ ID NO: 579375 - DNA, 1051 bp, Homo sapiens
cggcctgggcgggagacagggaacggctcctctccggcgctctgcggagcgagaattagctgatcgctgaggctcagttggagttgcacccggcgtgtgtggcgtgaatcttgggatcactgcgactgtatgcatcctgggttcaagtgattcttctgcctcacgcctcctgatgtaagctgggactacaggctagcaacataagcacggtccagcgtgcatatgatcagacaggatggcaatgaatggtggcgaggacgtggcgccacaagtgagactcacgttcggcccctatgccgtgggaaattaaggccttgtaaataccagacacggttggggaggacagaggatcctaagctccatcaaccattgtacacgactcctgagtaaatgcctcgctatacaaaactttggaccattcgagtaccctaccagataccacagtgcaacccctgcaaatgcagcccatgggagttaatcctgctgacaagaatccacaacgtcctgtaaaatgctggccaaaagtgacgacgagccaataagcaagaaagaaaaacgcacgaaacgctgaccatacttcctacccagagatagactaatttgggtcctgtcgggggaagaggctcatatgccacctggatgaagcacttgcatgtgccatgaggtcgactagggaccagggatgtgtgagaccggagtccacagagcatctgacttggacaagcaactatctggcgcgagagtcacctgtatcattctgttttcatgctgctgtattgacgtagccaagactcgtgcaagtccaaagcggttccatgggcctgccgtgccactatgggcttgggaggcttgcgatcatcggtggatgggaaccccttctccagtcgttgaggccccgaaattttggcaccggaaacggagccctattaagccctaatttcgggcctcctttggaaaaccgcccgtgttcattctccctgggccccccaaaggtttgggacacccctgattgggccgacattaccgggaccaccaaaaatttttgaacccg

SEQ ID NO: 579376 - DNA, 183 bp, Homo sapiens
aaaatatgataatagatccacactataacttaatttaaattgggaaatcaataactgagtgtggggaaagaaaaaagtttttgcatatgcttgaagttaaattgttatttttttaaaaaaatactgttaaaactgtaagatattttattgtggttaccatgggacctacataaaatgtcgacg

SEQ ID NO: 579377 - DNA, 388 bp, Homo sapiens
ggtcgacagacctgcaagcttcattcatggtagatgacccacagaggtgcactactttttgtcttctatgctgtattttcactctacccttcctatgtttagctatgtttggatatacaaatattaccatgttacagttgcctgcagtattcagtacagtcacatgctgcacagattggtagcctaggagcaacaggctatgccatagagcccaggtatgtaatgggctgtaccatttaggtttgtgtaagtacactctatgatgttcacacaatgacaaaatcccctaatgatgtgtttctgagaacgcatcactgtcattgagcatcgttgtgtattaattcattttcaagctgctgatagagacatacccaagactgggcaattt

SEQ ID NO: 579378 - DNA, 336 bp, Homo sapiens
tttttccctgggcaaaaaaaggtttcccccccttttaggggaggggcattaaattttttttgccccctttttgtcccctttgaggggcctttaaaatggaaaaatcagttggggtttcagtgaatcatggtcccctgtatttattgttagaaaaaccctaagggtgggggaaaatattcatttgggttcggggttggctgaaacccctgggttggggggttgggggagaaataatggggagtcggggaaattttgggggttttttttttttttctttttggttcccagttgtgacaggttttgttcaaaggagaaccaataaagggataacccata

SEQ ID NO: 579379 - DNA, 440 bp, Homo sapiens
atcacctcggcccgtgatgtagaagctgcagtgagctgagactgagccactgcactccagcctgggtgacacagcaagattctgcctcataaacaaaaatacaaaacaaaagaaaataaagaggctgatgtggttttatagatgtgaaagacactgatgatatactgctacatgaaaagaacatgttacatgatcctcctgcttttatttatttatttacttattgtttttagagacagggtctcactctgtcgcccaggctggagtgcagtgccacaatcacagctcactgcagcctgaaactcccgggttcaggcagttctcatgcctcggccacctgagtagctgggactgcaggcatgtaccaccacacccagctaatcctgtttttataaagagatggggtatcaccctgttggccaggctggtctcaaattcct

SEQ ID NO: 579380 - DNA, 439 bp, Homo sapiens
gatttaaactcagatatttcagactccaaagtccacatcttccattgtatcataatttttcttttttgttctgatttagatcctgtaaataaacaccttagctagaggtagccaacaccttgttgaatgacgttactgcaagatagtgactacttaggggagtaaattaaatgggatttttggttcagctgattccattctgcctccagcaatgttctccttctgtacagatatcagcagctgcagataacctgggtttataaagccgatcattaaactgaaaagttacctgcattaaaatgaagttatctgcccatgggattctccttttagtttgcaaacacacccaccccgtatgtctgcagtttatatttaaaaaatttgttaatggacaactctgtgtttccttctgacctggagataaagaatttcagggcca

SEQ ID NO: 579381 - DNA, 242 bp, Homo sapiens
tttaggggggggggggtattttatggggcccaagccccctcatggtggaaatgagcaattttaaaatttgccccctgattgattaaataaaaaaacaggcaaaaaacaagatttttttccctcccagatgttggaaccccttggtttttaaaaatgaaatgttgaaaccttaatttttttatcaaacccagccttttgagatcagtcttttttaaaaaaaccggttttcttttatccgctta

SEQ ID NO: 579382 - DNA, 141 bp, Homo sapiens
cacacatctacaggagatggtgaacttcagccccatggcccgggaaggactcacggcgccggagtggcatgaagctggtagggactcatcttgcatggcaccgccggccagacactgaccaaggaccagtattggtcacta

SEQ ID NO: 579383 - DNA, 323 bp, Homo sapiens
ctacatgacactgcgccgacagctgtattaataactcttgaaaacgagaagcagcataaatcgcctttactaggggagtcgacaaattggcggatatcatagaatgaagcattattcattgctagacctaagtagctctcaggccacaaaaagaacatgtggacagttaaatgcctattgctaagcgaaactctacatactctatgcgtccaattatatgatattccggaaacgtgacttgcgctatagcaaaactattagagtctgctgcaaaagcacgcaatcctgagtaggtgaagtaccgccaattgtctagcagggcg

SEQ ID NO: 579384 - DNA, 292 bp, Homo sapiens
gggagtagttaagatagcaaattcagagtctttgctaagggggggcattgcctttttgacataggcactcctgggtcttaaaaataaaatctggcacatacttatggtggtttttaatatatggccaggctgtgccaggaggattttttacctatattgaaaacctaaggtatgacccaccacctcaaggattcattgaggcaaatgaatgtggtgaggatttggaaatgaaggattttgcacagtggtggaatccacatttttggatgatgatgggacccattctcctatg

SEQ ID NO: 579385 - DNA, 251 bp, Homo sapiens
agggaagggagaaaaattaactcactagtacaggggaaaagcctgaggattcaagaggcccagaaatgagtctgttagtcaaattgctgtggttgtgttttgctataacttgttttgcattttggatagtcgtaccttgaaaagcatagtatactgttttagcagttcgctactagccatagttccctagctacttctgtcaaaattgggtttccagtttattcttaggcttaggagtaataccacttaat

SEQ ID NO: 579386 - DNA, 123 bp, Homo sapiens
  misc_feature (75)..(76): n is a, c, g, or t
gcgcgactgtctcggtcccacgtgtgccagttgctacgatggaagttaaagggaaaaagcaattcacaaggaagnnttacaaaggcagcacaaggcaaaaaacaagttttcattaaaatatgg

SEQ ID NO: 579387 - DNA, 438 bp, Homo sapiens
  misc_feature (194)..(194): n is a, c, g, or t
  misc_feature (426)..(426): n is a, c, g, or t
  misc_feature (435)..(435): n is a, c, g, or t
tgagacagagtctcactctgttgcccaggctggagtgcagtggcgcaatcccggctcaccgcaacccctgcctcccgggttcaagcgatccccctgcctcagcctcctgagtagctgagatcacaggcatgtgccaccatgcccggccaattttgcaccttcagtagagaagaggcctcaccacgccggccagntgatctcgaactcccgacttcgtgatccgcccaactcggcttcccaaaatgctgggactgcctggcctcaaataaacaattctttggctaattctggaatttgtgtcagatgctgtgggatacttttattcctgatcacatttaacacaaaacttagtgtttatatactgtaaacaacataaattacatattgtaaaactctaggatcataaattgctcaatccatttcttnttgttcttntaa

SEQ ID NO: 579388 - DNA, 921 bp, Homo sapiens
gggctgaactgaacagctgggactatgcttgagccatacccagcttataaaagccccagtggcagcatgcatctgaatcagtcagaaaagatatacgtaagaagaaactgaatgtgaagctggattccttacaaaggaaaaacgaaagatcactattgtaactataccaataattactatattatgtgatgcgaacaaaatgcatagatatgaacaatcaatctaggtatgccgggagcggcaggtggctcatggccttgttgaatcccagctaacgtgttgggaggcctgaggctacgggtgccttctacgacctgtaaatcgcgcagccactttaggtaagctgaggcgggcggtatcaccatagaggtcgacgtagtaacgagtaccagcctggcctagagatgaaagaaactccaatctctactatatagataacaatgaattagccaggtatggtggcggcattgcctgtaactcccacgctacgtccgtgggaggctgagcgcgaaggagaccgtaattgctgtgaacctggggagcgcggagggttggcaaagggacgtcctgagatgcagcagccacttggtttctcacagctctagggggcatactgaggacgacgaaaatatctgtcatcatggacataaagtaggaagaatagctgtttaggtacatcaccatcagacataacacagagtgccccagtgggctgtcatagcttgccagggatgctagccataaaaagcagagggtagggaaaggctggaccctttggtggcaagtcatgcgagtgaacgctcgaccccaaggggtcggctgagtcactggaggagggggataatcccgacggatctccccgaaatgggaggacggcacccaccttgcaaagtacgcccccgtgaaaggttgcactataag

SEQ ID NO: 579389 - DNA, 485 bp, Homo sapiens
gaagacagagtctcgctctgttgcccaggttggagagcagtggtgcgatctcagctcactgcaacctctgcactccagcctgggtgaaagagccagactatgtctcaaaaaataaagtaaaataaaagaaatgctaacaatcatctgagcctatagtgaatcataatctttttgctggtagatggtcttgcctcaatgttgatgactgctagtggtggtttgctgaaggctgggatggctgtgcaatttcttaaaataaaaggacaattaagtctgccacactgattgactcttcctttcttttgctttcggttgttggggggcggactcccccttgagatagagtctcactctggaacccaggctggaaaagggaaactccgcctcttatatcataaatagaaaaattccctgggcatagtggcatgcacctgtggtcccagctactcaggaggctaaggcgggagtttcaccgaagcccaggg

SEQ ID NO: 579390 - DNA, 108 bp, Homo sapiens
cgtaacacgattcagaggattgatctctactcagccaggttctactcctttagcgtccttcaagatactatcccgggaggagacagaaagtcatggtagctattcctc

SEQ ID NO: 579391 - DNA, 200 bp, Homo sapiens
aattagggtatttcttccgtcatcttaggccaggatccgaaatctcaattatttatacgccatatggggcatgatgtcaagcccttcaagagatgtcattcggtctaaagagggataagggcgaagcccccgcggcaagaaagcggcaattaagataagtaggaaggaagacgccgcaataagcaggagatcacacggcc

SEQ ID NO: 579392 - DNA, 1220 bp, Homo sapiens
cagaatgagactctatctcaaaaaaaaaaaaaaaattgatttcagtggggtggattgctccttattaggttagccaaacacatttgatttaccgtggtagatctttaaggaatagaaattcaaagttagagcacgttcagcaagagcctcttgggtctcactccactcattttaaaaccagtattatttcagtagcttgaaggaaagagctctcccgtgagttcagcctggcaaaaggttctaattttttataggattgccactactttctcttccttaaattaatccattcttggagaacgtgtcagtgagtttagcaccagcgggctgtggagaattcagtagaagtgggcctcaacttagaacatgtgtttctggttctggcagacatttattttccattctcccagtccttctgtgccacgtgttccccacttgcaggcgaggtggtcgcaacctctagtgggcaccttcagaggagggtttcgtgccaatctttctccccacgttgtgcaagttagcttgtggcttcccctctcgtggcctggggtgccatttgggcagttttggcgcgctaatgtcccaccttccttaaagtgggcgctacctggagggaaaattcatcttttcagggccctggtccagatgtggtcctcgtggcaagtaggctccctaataagttacttcaactggtcgggggagatttttcttgtcccaccttttcttaaaaaaaagcgcttgtttatttccattttcccaattcgacatccattcgcggctttgtggtcccccctcatttctggtctatattcccttctatccttctccttgtgggtcagatcctcctgtggcccgttggccaacccccccgaaataatttttgtggtgttctccaccacacattttttcgtgggggcgtggggcctgtgggggcgggcctcacacacccctgtgtaattcgcccaggccgctttgggtgggaaagcggccacaaggggtggggggggggaaccactcctggagggggtccagcgtgtttttggagcacccccgtccctgtggtccacccttgtggtgtagaaccccccgggcgtctcttcatctttagagatttccgaacccattagccgggggccggtaggtgggcgggggacccctgataatcccttcgactaatccgggagggctctacgggcgcgagacactggcgagtgaatccg

SEQ ID NO: 579393 - DNA, 326 bp, Homo sapiens
aaaggagggaaagttccagcagtttcatgagatgcagtattgagtgttctagttcctggaattagttggcagagaaaatgctgcctagtgctacagatgtacattaaataccagccagcaggaggtgatcatagggcacagccagttctgacagttttttaggggcctggatattttttgatggaaaagattatattgccaaatattaaggagctcagctataaatgcctccaggatcagaggcactatgatgtagtactttagtgttctgtcctctatcagtttacaggggcatcccctccatgtcaggttctacagttgcctag

SEQ ID NO: 579394 - DNA, 591 bp, Homo sapiens
ttggggctccattcaggtgcggggctcaaggagggcagctccctcttccggtgagctgggccttagctcatctgagaggatcagcttccgtagctgggtcccacgggagtgtcgtggagtggaaatgtgcatgtctgaagaataggccccaagcaacagggcacacgggagggacaagttaaggctcgggcggcaacggtggactatgtagggcttaagggcatcacccacgtccacatccatgtggatgtacatgtaaagcaacgggggcagatagaagtccacgtcctcgtggcgaaagcagaagagccggttgccaatgtaggctggtactcaaggctcctgggagtaatacgggtatgaaagtggcagggagatgtcaaacagtttggactcaaacagcccaagaagccaagacggttaagctgagtggtacggccgccgtctactggctccttgggctgtgcctgagtgcacagggggccccatctcatcttcctcctccctgatctggggcaggtggatcatctaggcaacggatctcagtgaccacaccatccccattgcccactccaggggggtgcctctgtt

SEQ ID NO: 579395 - DNA, 172 bp, Homo sapiens
aagcctggtcgatatggtgaagccctgtttctgctcaaaatacaaaaaaattagccaggtgtggtggcaggtgctgtagtcccagctgctatgggacggctgagcgagaagacattgcttgaacccctggaggcagcaggttgcatgtgagctgacggtcacgccacatgca

SEQ ID NO: 579396 - DNA, 718 bp, Homo sapiens
ttgtggtggaagcccaaccccgcggggcggagggtccatgacggggagcttgcactgcgagagatgaaggggttgcactaagatgaaacccatcacttgatcacaagatctaactcttgatggcccatcggccaaacgggcaaaaacatccgcgttaacaatcgccattcatgacattgaaaggatgccctgttgtctacatattggcacactccgacatttaaggaagacttatgctctaatttggaaaaagcctttgtattgttctcctgggacaactttgtcgaagagaaaactggttgttatgtgtctaggaaagagagaaaaggctgagaaataaaatctgttttcttgagaaataagcttcagaccctgcaaggaaagttcaacattctattgagtataaaatcttataagttggcacctgaatacacatcattgctctctattctcaaaacaatcatggatgtgagagatgactacctcttgtagctaatggttctgcatcaagagcacatgtccacgttcattggcagtaccattgaagagtactgacatgatcatgtggaatacatgagcagttaatcataaattacggtactctataaacagatgtacatgaggaaatactgttcctgctagaatatgcgcatatccttgtataatcccaatgtgatgatggtcacttagtctgctcatcaagttccttaagagagca

SEQ ID NO: 579397 - DNA, 270 bp, Homo sapiens
gacgcatcacggtcagagctgttcctgatgtaacatcgagatatcctgaaaggagctattcttggtctcttcctccttggataaatgtcttgatgatctcctccttcttggcctggaggcgctcttcacggcgcttcgggtacttttggctaagacctgcggcctcagcctggtcagccaggagcttcttgcgtgccttgtctgcctctcagtttgtggatgtgtcccatgagaatccgctttgttaatgaacacattccccttcacctt

SEQ ID NO: 579398 - DNA, 180 bp, Homo sapiens
tcgacatactgtacatcatggatcatatctatatcctgtagttagatagttgtggcaggcacctgtagtcccaactgctctggcaggctgcaggcagtaagaatcaatatgaacccaggaggcagaggttgcagttagccgacaatcgtgccactgaaatccagcctgggcagcagagcg

SEQ ID NO: 579399 - DNA, 124 bp, Homo sapiens
agccccaggggtttcccccctgcccatggagtaaagcccgagatcctggcccttatgccagttttgacctggcatccccctaccccgagcccatgcagtttgggaacatgccgccttctctcca

SEQ ID NO: 579400 - DNA, 311 bp, Homo sapiens
tgctgctcctcttcacccaactacggaggagatctgagcacagagtccgggtcgggtcacaagctccgtctcggaggcctaatcaggatctgactgtcctcgaaaataaacggggaaaacccacagctgaaacaaatcgaggggctggtgaaggagctgctggagagggagggactcacagctgcagggaaaattgagatcaaaattgtccgcccatgggctgaagggactgaagagggtgcacgttggctgactgatgaggacacgagaaacctcaaggagatcttcttcaatatcttggtgccgggagc

SEQ ID NO: 579401 - DNA, 942 bp, Homo sapiens
tcgcgctgtaggaagcaacaacctctcctcttcgtttccgcatcagatcggaagtccgcgaagaaggaaccgatgcgtgagatgctctcgcatccacgtgggccaggctggtgtccatgatggccatgcctgctgggagcctctagtgcctgaaacacgggatccagcccgatggccagatgccaagtgacacagacacattgggggaggagatgattccttcaacaccttcttcagatgagacgggagctggcaagcatgtccccgggcagtgtttgtagacttggaaacccgcggtccattgatgaagtgcgcactggtacctaccgcagctcttccagcctgagacaacttatcacaggcaaaagaagatgctgccaataactatgcccgagtgccgctaacaccattgccaaggagatcatgtgacctcgtgtggacccgaattcgcaaagctggtcgaccagtgcacgggtctccaggctgctaggtttccacagttttggtggggagaacgtggttctgggttcacctcgctgctcatggaaacgtttctcagttgattatggcaagaagtccaagcctggagtctctattgacccggcgcccccaggtatccacagcttgatagttgaagccctaacaatccatcgtcagcaacaggacaacctggagcactcgtgattgtgccctcatgggagacaatgaggcacctaagacatctgggaaaacgcgcgaaatgagggatcaccgagactacctggaaagggaagggcaaggggccccccaccggccccgaaatggggggccgagtgtgacggagaatccaaccacggggccaccgggcacacccgggaaagccgaacagggaaaccacaaaaggcgggcgacacccggctggcccacggggatcccgcgaagtgcgcgcggggcaacagggac

SEQ ID NO: 579402 - DNA, 200 bp, Homo sapiens
ctgctgagggactccctgctatgcctttctgaggcaactggcacaagtgtcatcgtaggggtacctcctgatttccaaaacctctcaatgacccctatgctgctactgactggacgtacctggaagggagctgttcttggtggctttaaaagtaaagagtgtgtcccaaaacttgtggctgattttatggctaagaagct

SEQ ID NO: 579403 - DNA, 473 bp, Homo sapiens
aagcagtggtatcaacgcagagtgcccattatggccggggggggcgaaaaaaaaaaaaaaaaaaaaaaaaaaaaatttttgggccgccgcgcaagaaagttttaaaaccatttttttggggccccgggccccatgttaactgtggccagagctgtggtacccgaaagaaaaatccggcgcatggacactgacgtgcgtggtggtttttccacaaccaaataaaaaaaaagagcgcccggggcgggacacaccgcgaacggtgtgtttggaacaaatccccaagatggaggtcccggagagggcacacataacggcgtctctacaccaccgggcgggcttccagagcaagaggcgcatgatcaaaatttgaggcccccccgcggggagaaaagaaccgagcaagactatacagaccacaacgagcaacaagagaaacacaaagacaacacgacaacgacaacaacgcacaacaa

SEQ ID NO: 579404 - DNA, 609 bp, Homo sapiens
acgaggtgctggctgaatggggggcgccatgccagaggcccggcaccccgcacaggcgcctctgccctgcacgtggctgctgccaaggggctacattgaggtgatgaggttgctccttcaggctggctacgaaccagagctccgggacaggggacggatggaatcccctgtcacgcagcggcacactggggacgtggaggatgactgacggctgctggcgagacatggcggggtgcatggactcactgacccatgcggggccagcgtccctgtgacctggcgatgaggaagtactgacgcctgttggaggaactggcccggaaacaggaggaccttcggaaccaaacagaagcttcccagagccggggcacggagccccaagcgcctctagcagacaaacacagaaggagctctgctgtgtcgtcctgagcagtcgcgagaacgatttcccctccaggaacttgtacaaaggagcgccggcctggtggggctgggggggccccccatccaggacgccgatgagggggaaagatggtccaccgaacacaccgcaaaaacagaaacccactggagttcctccagacagaccagcactacacatccgtggca

SEQ ID NO: 579405 - DNA, 369 bp, Homo sapiens
ccttctttcagctcccccaacagtgagcatgcttcccaaaaaattacaacatcaaaaccaggaatgtccccgcatttactattaccagggttgcaattggttcaattttcccataaaaacatgtttgtccaaaagaagggaaactgtgaatttattccatgcccccaataaactttgcaagaagtttaacccacataggtttgcggcactgcaaaattgttcatgggtttatgtagccaatgattttttgccttgacaatcatgtatacaaatcaaaatttctatcaaaataataataaaattaaaaacttcctgttttcctccaataaaaacaattaatcccctttcaaaaaaaaattaataaaaaca

SEQ ID NO: 579406 - DNA, 858 bp, Homo sapiens
  misc_feature (443)..(443): n is a, c, g, or t
ttttcggcgctgcgcctggctcttttctctctccccgtgcggcaccaccttgaggtcccgggctccccccccgttgtcgacccccgttccgggcccccgtggggtcccctttggccgcccccgcccccccctcgagaattcccgctgggtcgagggaatattcacggggtcgccaacttttttcagcggacctattctgtcctcccggtgtttctgtctgaatttaccgagggggcctttaccgtcctcctccgctccacttcggggattttcaagcctgcccgtcccgggttactcagacgccccaacgcctttactgcggcccatgcttgattgcggggcagccctctacatcgagatccccggcggcgcgcttccccaggggacccaggaccagctttcgccggtctccctggagttcttctgaggggccctgcgagccngagcccatgtccttctcatttgcgttcccccagaaccccggggaccgagccccccttgctctccggaccctcagcgtttttggcctttgagattgtgagaccgcgggcatcccctctgtcccccagagacccgcacgcttgcttcatggccgacacgtttcgagagagatttttccggagacagaggagcgattgggccccctcgcgggctgggcatccggcccctcggggcccccccctgtcagacccggtgggttggaaccctgcagactcgctccttttccctgggtttgtcccccatttttattgtgccaataaccctccctcccaattagcggggtattttttgaagtttaaaattttgtttttgaaattcgaaatatttgcttttattttaaaaaaaatttatatttta

SEQ ID NO: 579407 - DNA, 220 bp, Homo sapiens
ggctccccaaaaaggtttccttcttgggggcccctgggtctcccgcccctttgttttttttcaaaggggggtttttttccccccttttttgtgtgggggggcacaaaaaagggtcccggtcccccacccaaagtaacaggcaaatgaagttgttttagacagagaccttgtctctcaatgcatttggtcaggggggcataaataaaggatacaggctcca

SEQ ID NO: 579408 - DNA, 178 bp, Homo sapiens
cgagagagagcgaggagcaaatagcagaggtcaaggaggccttctccatgtgtgacaaggatggccatggcactatcaccaccaaggagttgacgacagagatgagatccctgggacagaacccctctgaagcagagctgcaagatatgatcaatgaggtgcatgcatatggtaacgg

SEQ ID NO: 579409 - DNA, 449 bp, Homo sapiens
ccagtatctgtgtcgccgccgcccgcggcgtccccggtttggtgttgcggcgcccaccttcgggaggatcagtatctggcaccaattctgacccagtcatttgtgatcccgtggctcttgtgatatgctgaagatttccaggcagtttgtagtggaacaccatcccgcggtcccagcgtctaagttcaagcgaccagtataacacaacgaacattgcccttgggtccaaacttctggttggaagcggaaccctgggttaagttttccttgggaaacgttggggccccaaaacgaagatcaatactgacaccagaatggcagctactctcaagtcattaaaacttgtaagataccgagcattttgcagtccttctgcctttggtgcagtccgaagtgtgtcatactggaatgtgagcagcacacagcatgggggacaggaccctccagac

SEQ ID NO: 579410 - DNA, 203 bp, Homo sapiens
ggggggtttttaacccccccccccaattttttagggggggcccccgggataaaaataaacggggcccttcctagggaagggaaaggggaaaaaggtccgggggtttttccccccggttccccccccccgggggttttttttaaggaaggtttttttttcctaggaaaagccaaaatgggaaaccaaaaccccccctttgttta

SEQ ID NO: 579411 - DNA, 113 bp, Homo sapiens
agctacctagacgggtgtgctcttattagcagtacttaggtagctcgtcgggtttcgggggtcttagcttgggttctcctagcaaagttatatctagttaattcattatgcag

SEQ ID NO: 579412 - DNA, 221 bp, Homo sapiens
  misc_feature (213)..(213): n is a, c, g, or t
ggccaagcagcaccacccgaacaaatcctccaatcagtccacgcaccatgcccaacaccaattctccaatcagaccacgcaccatccataacacaaatcctccgatcaggccacgcaccatgcagaacacatatcctccaatcagttcacgcaccatgcccaacaccaatcctgcaatcagtccacgcaccatccccaacacacatctaccgngggcttat

SEQ ID NO: 579413 - DNA, 363 bp, Homo sapiens
ctccacccgacggggaggcaataaaaatctacataggaagacaaatctatttaaaaaaaagttttaataagatagcacaaaagcgagatgaaaaatactttttattaattatgagccccagccgggcatagtggctcattcctgtagtaatcctagcacttagggaggtcaaggcaggaggattacttgagctcaggagttcaagaccaccatgggcaacatagcaagaccctgtctctttaagtatgagttccaacttttctctatctgtaaatgtgaatttttattttttttttttttggagagggggtttacttttgaattccaagttcttgggttttttttaagggttgcctaaaggcc

SEQ ID NO: 579414 - DNA, 824 bp, Homo sapiens
ggccaattctcgcactcgggttcttccgccgatccgccgtcgtgttactctgccggtcgtaagtggacagaagagatcgccgcgctggtcattgagaatggttccggcatgtgcataagctggttgagctggggacgacgctctccgaatcgtgttatccttccatcgtcagggcgccccatacacacagggcgatcaatggtggtgcatggagccacgtaatggacgtacctacagtgggcgacagaggccgcatgatgcgaacgctgtggtgaatcctggagcctgtaagtatccccgacttgagcactggcatcgtgcagccaactgtggtacgacgatggtacgcaagatactggccgagcacagcaccgtatctatcaatggagcttgcgtcgtaggcctgcgggaggacgcgacccagtgcgtgctgaccgaggaccccgccgtggaaaccccgaaggtccggacagaggagacgatgacctcagattatgtttgagaccttcaataacccggttcatgtacgtggccatccaggccgttgctgtccggctctacgccattctgtggctgcagccactggtcattgtcatggactctgcgagacgtgggtcagccacatcggtgcccatctagcgaggtgctacgcccatcgcccctacgtcgcgatccttgcgtctgggaccctggcttggcgcgggacctgaccagaggtacctcgatgaatgatcctcaactgagcgagggctacgagcttcaccgaccgacggccgagcgggaaatcgtgcgcgaagatcaaggagaagcatgttgctacgtcg

SEQ ID NO: 579415 - DNA, 328 bp, Homo sapiens
caataaatcttgctgctgctcaaaaaaaaaaaaaaaaaataaaggggggcccccccacaaaacccctttgccccccggaaaacgtttgctttttaccctttaaaaaaaaaaccgggggggtgtaaaaaaaaaaaaaaacccccccctttaaaaaaaattggtggggaaaaaaaaaaacctttggggggggcccaaccgggaaaaaaaaagggccctttggggaaaaaaagccctttccaaaaaagggaaccccccttttttttttttttaaaaatggggggggggggggccccttaaaaatccccctgggggcatccaattttggcct

SEQ ID NO: 579416 - DNA, 108 bp, Homo sapiens
  misc_feature (20)..(20): n is a, c, g, or t
ttcttaaccggcgtcctttntttgtttgggacaagaacccacccacacccatattatgattcaactctactatagtaaatgcccccttccgcgaaacacttcatccgg

SEQ ID NO: 579417 - DNA, 823 bp, Homo sapiens
gtaactgcttccccccaggctggtgaaaaagaatgagtgaagctgctgatgaggtcttcaaagacatcatggagtccagccctgtgtgctcagccgcactgatcaaacctcggtggaggtcacagtggcctgctcgggctccccaaagaaagtgaaagggcagtgcttagggaccctgctgcagctgagccagtgacaccacagcaaagcaggctcaggtgcacagggggcacagaagggccccgcgagagtccaagtgaggaggcacaagcactcctctgagtcgccaggagggacaggggaaatcgtccaggtcaaacctgccccgccgccccacagcagcctctgcagggaaggctggaggaaagccctacgcagagcccgagccaggaggcggcggggaggcagtcctgggcgcacaagacacaaagccacgagtctggttgatgctgtgaacagtgacgctgccaagaccagccagacgggagagggcctcaaaaagcgcgtgctcccgagcactccaaagcacagaccgccaagccgccggggacccaatcaggccagcaccacgttacctccaaagttgcactcacgcatcatcggccctggagagagaccagccgtacttccaactgacctacatcgcttctcatataacccgagtgtccctctggaaaccagccagcataacagcggatagcagcggcgccaatcaccaatgtcaatggccatgcacaccaccggacgcgtagagcccccaatcatacgacatctgacacaaatgacagcacgtcatagcagaaggacggcacaactacaaggt

SEQ ID NO: 579418 - DNA, 247 bp, Homo sapiens
ccgttagatcatacttattttcagttcttgtacatttgtgtttttaacctgtaatttattatttaagttttaattaatgtctgtattgaaacgtaaagagtgtcagatgcttttctcttgatggtcattgtctttctttctttttttttcttcccaccactaccacggcatatggaagttcccaggcctgggataaaactgaaccagagctgcaacccacacaacagctgaagagtctcacggaagc

SEQ ID NO: 579419 - DNA, 782 bp, Homo sapiens
  misc_feature (13)..(13): n is a, c, g, or t
  misc_feature (66)..(66): n is a, c, g, or t
  misc_feature (227)..(227): n is a, c, g, or t
  misc_feature (229)..(229): n is a, c, g, or t
  misc_feature (234)..(234): n is a, c, g, or t
  misc_feature (249)..(249): n is a, c, g, or t
  misc_feature (308)..(308): n is a, c, g, or t
  misc_feature (349)..(349): n is a, c, g, or t
  misc_feature (392)..(392): n is a, c, g, or t
  misc_feature (394)..(396): n is a, c, g, or t
  misc_feature (399)..(399): n is a, c, g, or t
  misc_feature (401)..(401): n is a, c, g, or t
  misc_feature (423)..(423): n is a, c, g, or t
  misc_feature (431)..(431): n is a, c, g, or t
  misc_feature (444)..(444): n is a, c, g, or t
  misc_feature (448)..(448): n is a, c, g, or t
  misc_feature (481)..(481): n is a, c, g, or t
  misc_feature (489)..(489): n is a, c, g, or t
  misc_feature (491)..(491): n is a, c, g, or t
  misc_feature (504)..(504): n is a, c, g, or t
  misc_feature (509)..(509): n is a, c, g, or t
  misc_feature (512)..(512): n is a, c, g, or t
  misc_feature (527)..(527): n is a, c, g, or t
  misc_feature (529)..(529): n is a, c, g, or t
  misc_feature (552)..(552): n is a, c, g, or t
  misc_feature (554)..(555): n is a, c, g, or t
  misc_feature (745)..(745): n is a, c, g, or t
gcaaaaacaatgnaaggagcctttccagttatcttgagttgcagctctgtagtttcttgaggccanacacactgtattttacaagtcaaaatataatttacattaatcactatgttaatgagtatgtaaaacattcttttgcattgatgaattttgtatctgcttccattaaaagcataacagccatagttgttgcgtgttatttttaaaactatttgtcacaaagngnggggnggtaccacataacgnggtaacttttggttagtaatccagctgagaaacagcttgcccataaaaataacatcagngtattttatgaaaaattagcaaacaataggtatattaaccnccattttcagtcttttataaaaactattcacatctattaaaanannnccnangggacttcagccaagattcagngcctttcnacgggattccccntacnagatgcatccggaggggccctagtttactttcnccaatcananagccaccaggganttaanacnggaatatttaggggnanaaccggggagggcaattatacangnntaacttcatatgggggaggggaaaacaaacccggaaattaaacaatttggcctcatgtcctttagttttcccaaggcttccttgaaaaacatctagctcttggccaggcacggtcgctcacgcctgtaatcccagcactctgggaggccaaggcaggtggatcattaaatgaatggacttggtgatatantactaacaagcacgacctgaattctgggagtaagtgg

SEQ ID NO: 579420 - DNA, 355 bp, Homo sapiens
cgatgtgtaaataacaagatgcatgtcaaccctgggtaatagtggcccccagaaacaacccgcctgtaactcccccttccccagtgttattcaaggcacatggttgggatctccaaaaattgtgttcttataacgttgccgttgtccaacacagaatatattcaactcagaaagtatatcaccccctattggacagtgtgtgacaggcagacactatagtttatgaggtactcttgaattcagcaaaatgaccaaaacacgcacttgccggctggttctctacagatatttcacatcagataaaaattcagagagtatacccagaataaataatatgacagtgggtgggctatcg

SEQ ID NO: 579421 - DNA, 485 bp, Homo sapiens
agcctgatatcctgcacgttgagaagctgaagtgggatgatggcttgagcgcaggagtttgatgatcagcctggtgcgatactagacagactccatctctagtaaaaaaattatgcaagcatggtggtgtgcagctgtattcccagctctctaggaggctgaggtgggagtatcgtcataagcctgggattcgaggttgtcgtgagctcgtgatcacgccattgcactccagctgtagtgacagggtttaaatcagatggcctatacttgtgctggcgtaatttattttgtattatttcatttttatctcctttgttggcttattaaccctacctccattttcattttttgttgtttctcttaaaatttctagtgtacatctttagacttgtcacacttttatgtaatattctaccacttcacaggtagtagaacaacttagcaacagcacacactttcctgtctctttggctcttctgatgcag

SEQ ID NO: 579422 - DNA, 344 bp, Homo sapiens
ccgagcggaacagcgaggtgctcaagtttttatcatacttccagagaatctttttcttccatctcttctatttttggcctggcttggctgggaacatggttggtggttctccagtttcatgtccttattagggaaggcatttgagtggaggataggactccctgagtgtcctccacattggcttgtgactttgctgttgaagactagactgagcacattgaagaacggcaggagctgctccataccgcgcacggtgcagatggtgagcagcaagtgccctggttcccaacccaatgtgctccctgagtggtcttcctctggatgtttctttgcttgttccgctg

SEQ ID NO: 579423 - DNA, 740 bp, Homo sapiens
cggctgatgcagctgtagcggctgagaaggaggtcggctcagcctgttggctagtttgaggagctgctgcgcctcaaacgctaagtccctccttgtggtccatttctgggcactatggactccacagtgtgcactgatgaacgtaagttttggctagaggttagcattaatgaactcccttcaatgtttcatattggtgaacctgggaagcgtgataggctggttgcctgagaggtagtctggacgaaagtatgacagattagcctctgttcccacgttttctgtattttcaagaattctcagtaaaatcgaccgattagatggtgcacatgccccagagttgaccaaaaaagctcatgcagacatgcatctagtggctccttcctagccagtgctaatgaactatcttgaaagaagatctcaaccttcgcttgagagaagattgactcatgctgccccctgtcatgctgtgttatgacaggaactcctcaagaaccacgctgtggtttcagcaatgcagatggtggcaacattcttcacagatcgataatattcagttgtagcagtttgtgatatcttctcagatgaagaggttcgactgggactcaaagcctattccagtatggcctacctatcctcaggtctatgtttctggagagctcataggaggacttgatgataagttaaggagctagacgcatctgaagaactacgatacaaatttgtcccaaaagctccca

SEQ ID NO: 579424 - DNA, 451 bp, Homo sapiens
  misc_feature (77)..(77): n is a, c, g, or t
  misc_feature (311)..(311): n is a, c, g, or t
tccgtagggggggggggttttcccccctcttggcgcgggtcctttttttccctcaaggagggggcctctccctctcnggggggggggggggttctctcacccgccccgggagggtttttcccggggttttttcccccagaacccctccccaaaggggtttttttttgggcgcgggggggccccagggggggagagtccccccctttttttccccccccccccctttttttccccccctttttaaaggccccccccgggggggccctttttgggggggggggggccccccccccccccggggggggtttttnggggggtttttcccccccccccaagcccccttccccttggggggggggggggggggggttttttcccccccttgggccaagggttttttgggccccccctttttgggggtggggaaaaaaaaaaccctttttccccccca

SEQ ID NO: 579425 - DNA, 475 bp, Homo sapiens
tgtcggtggcatgtgatgtctgctgcttagactgatctgtgcattagcagggcaggtcatgatgacttcttggatcaggaacgctacatagatcagtaggatattcaactcgcaggatgtcgcagcccaggatagcaaggctgatcttctgaagccgaaggctcttgccacgccatgatgcgcatgtcgctgagataatatgattgcctctgactgatgacaacttctgagtcagcaacttggtctggccattggcaaggtacgtgtggcgggccaaaatggcagctttaggggaccacaattcgtgaacatgtaatctcaaagtccagcatggatggaaatctcatcaccttcacagaatcgttttctgtcaattcgagcagagacagacacccgcccatcaggaatgaacatgcaggaaacttccttatctttttaagcagacacaggtgccattaaatcaggggtatagcca

SEQ ID NO: 579426 - DNA, 568 bp, Homo sapiens
ggatggtcggctgcctggggacattgtcaccacgtcgccatgacggctggtccccacaggaccagctgggaggactggttgtgctgctggagaagggctggagaaggcaatggcatgctgccgctttgccagtccctagaagtcgcggtgcaggtgatggtgggagccgcgcctccagcgggcaggccgggagtgtactaccatggggcgctgtgcctccgcttccaggcccagcacatcgccgtggcggtgctctacctggccctgcaggtctacggagttgaggtgcccgccgaggtcgaggctgagaagccgtggtggcagatttataccatggacacagagatcccctaaggtcctggcccaggcctgcccaaagagaagccacatctgcgtttgtcctttgagaggactttgactacaatacaggcatgacatcaatgaaaggaaagtcatgaaatcgatgagactgaatccctacggatttcttaaaagccagatttgtagggagaatgaatgtgcaacgtggctgaaatctattttgtgtaataaaaggtgatacaagtca

SEQ ID NO: 579427 - DNA, 321 bp, Homo sapiens
  misc_feature (40)..(41): n is a, c, g, or t
  misc_feature (45)..(45): n is a, c, g, or t
  misc_feature (106)..(107): n is a, c, g, or t
  misc_feature (279)..(279): n is a, c, g, or t
ggcacgaggtaaaggactaaagaaaagctgctccataganncacncgagcgctgctggttgcccatttttatggttatttcttgattatatgctaaacaagaggcnnattattcatgccacccttttttagaccatattaagtaacttcctggcattgcatggcatctgtaacctgtcatggcgctggcgggagtgtggcagtgaggacgaccaagatcactctggtttgccatcttgggttttggtgggttttgggctgccttctttaccgcaacctntttttatcagcaaagtctttacgacctgtatcttgttgatga

SEQ ID NO: 579428 - DNA, 557 bp, Homo sapiens
ggcttgagctacactgtgatcgtacattctatacttggcctatgtgctgctcgcacctgaacatagctggtgcttatgccgagttatttgcgatgagtaaatatttagtttctttttcttcatatttataatgttgatctggcatcctcgaggctgcagctttattagcgttataacttactcatctctatcttaccagcaggctctgtattgttgagattcgcaattgttttgcttttccattggtggaattgaccataatcagttttttaattacataagatgcctgttatgctatttgggggcagcatcgcatgttcatattcgcaagcagtcacatttgtactgtagttcacataacaccgccaactgacgtattctgtagcctatatttttcatagagctcatgagcatttactgtacttgcttgggtcttgccaagatcatttatgccgctgcatagccaacagtgtcttcataccaaaattaaaggtgcgttacctatactgtggcattggaagttgtcagtaacattcacaggtattccatacggtgca

SEQ ID NO: 579429 - DNA, 157 bp, Homo sapiens
tccctcaggaagcgagattgggccagcgggcgtgtgacccaaggcgagcatgcaggggggggaataagtgaaccggaaggtgttaacgcacctgtgggggggcttagggtctgggtccggggcggttcttggggctcacagcctgttccggtggggg

SEQ ID NO: 579430 - DNA, 238 bp, Homo sapiens
  misc_feature (187)..(187): n is a, c, g, or t
  misc_feature (204)..(204): n is a, c, g, or t
tatactacccaccagccttatggcacacagagggctaccgggacacagagtatatatgaactaaaaatctccagcagtgatgttggcattctggtcattccacccttctttttttggcactactctgttgggaacatgttcagggtatctggagtggggttatacgttaggtgatatgggattaganagtggctggtcacggcnttactatttatggtatggtaagggatgtctcgtg

SEQ ID NO: 579431 - DNA, 535 bp, Homo sapiens
  misc_feature (108)..(108): n is a, c, g, or t
  misc_feature (136)..(136): n is a, c, g, or t
  misc_feature (263)..(263): n is a, c, g, or t
  misc_feature (266)..(266): n is a, c, g, or t
  misc_feature (268)..(268): n is a, c, g, or t
  misc_feature (365)..(365): n is a, c, g, or t
ggcggagtgtgttagtcttccagagggaggctggtccccaaggaaacaaagcctgtgtgcgggcagcaactgtgtgcgggcctgggggttgcatgtgtcacctggagntgggcactaaccatccaaccgccgcatncttgtttccacccctgggccggggctttggcccccaaagtgtttaggaaagctttctccctagatcgcactgtgggctggggccctggagggctgctttgtgttaataaaattgtaaggtttgcccnccncncctgttgccggcatgggggtagtattaacccccccccccatttgttcccagccccggaaaagggggtgctcaggtggaggtgtggggtatgcacctnagctcctgctttgcgcctgttgttttgccccaacgcgaccgctgcccggctgcccaaaggggtggatgcctgccggtccccgagcaagcctgggaactcaggaaaattcccaggacttgggagattttaaattttaagggccattttttttaataaaaggggcctttgga

SEQ ID NO: 579432 - DNA, 579 bp, Homo sapiens
taccgagatgggtcatgctaaagaagacaaagtgtagggattacaggtgtgggcgacgcacccagccaaatgacactgattttttaaattaatttacagatcagtacaagccagtgatttttatttttttttggtaggagtccacctgaagtattttgtcagggttcccttatgtggtctttccactgtgttacttaatccgtggttattcccggtagccaagaaatgtgggaacacgatgagcctaaggataagccatgcgtggcaaaaatgcatccataggggatgtagggggcttcatccgtgcagcacaggaggcagtcccgggttgccatgtcaccatactagttaagtggggccgtgttgtgatcaccgggttaggggtggtgtttaaccagtgttcctccattcctgtggattccataaagatgactctgtggtcctgtgggacttattactggatcgcttaagaacccagggcctcccattgggagcaccagaccagtggaaatagggctaaaggggaagaccccttgaaacctggaaggtgttactcggtggagctaagtaatggtggtg

SEQ ID NO: 579433 - DNA, 204 bp, Homo sapiens
  misc_feature (6)..(6): n is a, c, g, or t
gtatgnaatgttacatatttcattttaaaacctaactcatttactttattgatgaatcaaatttccatcgaataagaaaaaacatactgatttatctattgaatttaggagactgactgttatttttaaaaagttagaagcatcctgatgatctaaggacacacacacgctcagaacttttgctcatgtgatagttcctttcca

SEQ ID NO: 579434 - DNA, 180 bp, Homo sapiens
ctccacacagcactaggggcagttttctctggaggagaagagcctgtcgctgaataatcatgcaatacttttcccacttcatcagatcaggaaatcccatctaccctttatgagttctcatggaaagtacccacatttgcaaccccctggcctgactttgtaccttgttgctgtgtggag

SEQ ID NO: 579435 - DNA, 399 bp, Homo sapiens
  misc_feature (22)..(22): n is a, c, g, or t
  misc_feature (164)..(164): n is a, c, g, or t
aaattagtttaaattgaaaatncctgtttcccagaattttaaaatttccttaaagttgagagacatccataaggacagtagttctccaaatttttttggtctcaattacttttttagtctttcaattttttattaataaaaaaaatgtggctgagcatgggttntcacgcctgtaatcccagcactttgggaggccgaggtgggtggatcacgaggtcaggagttcaagaccagcctgaccaactggtgaaaccccatctctactgaagatacaaaagttagctgggcatggtggcacgcacctgtagtcccagctactcaggaggctaggcaggagaatcgcttgaacctgggaggcggaggttgcagtgagttgagatggggccactgcactccagc

SEQ ID NO: 579436 - DNA, 1280 bp, Homo sapiens
ggtgctgctccgatggcgaacgtgctcgcgccccggcgtcgggcgagaggcgagtgtgtggacgtagaggccagcttggtgcatcgcgacggaggtagagattgcggagcgactgggtcgtggttgcgtctgagagcagacccagcatccggtgcctggacaggcagacggccactcgtgggagggacagatgggaggtgagagggtgacagtagtagtaatgttttgagctgagtgtacgtgactcccctgggaggcaagccttgcactcttgcgcacaggcgggcacaggctgtagatgcgatgatcacacgatggtgctgagcgtggttgcgggaataatccgggtgcgccatgggaattaacaatctgacgtcgcatggaaggcgtcgaaacgaatggacaagactgatggcgcaagcgcaaggctgctgtcaatccgcagcaggaaaggtacaaagagacttctctgtatctcaggatgactacctcatgtcgggaggagtgtctaacactcttgatgggtttccatcagtagcgtatgtatggggaagaaaatcctgggctgggaagagggtggatagatgagaagttaatagatgtgccagagagtaaaaatattgtaatgaatttgtgtgaaaggggggccctggaatttactaaggaaacaggttgtatataggtttaggagtgagggagtgttcgaaaggtcccgtggttaggtcgccgaggaaaagtgagataaaggggttaaatttgggagggccggtaagagagggggttcaaaggaaggaacgccttagctggattcggattggatgtaccgtattttggaatgggggaaagtccgagagtgtggagggtatcaataggtctctttccgattaaggaatttaaattatcactgttaagttagttacggggggcggcagggagaaagaggtgattccccaaggggggaatcgtaacacgtaggttaagaaagtattaaaggttgttcccgcttgggtacgtactttgtggattccggaggaccaatagggggaaaggggttataacaggcacggattggcaaaagaagatgtaatggcattagggataggttcggcgaagagtttttctattggacaattcaaaggtggcctatggaggtgagtgaaaagttccgaaaaggaaatagaaggagagtaacagattgggcggcaagggaggggggtttggaaaccgtaggggcaacagggtagggcgaattgggggttctagagaagagagggatttga

SEQ ID NO: 579437 - DNA, 321 bp, Homo sapiens
  misc_feature (264)..(264): n is a, c, g, or t
gcttagtatactacaaaattcaattggcctatataaaaataagatagtaatattccttatatattttggatattaaatcctttactagggatttgattcgcaaatttttttcccccattctgtttctgtaggctctttgacattcttttgctttctcttttggaaaccaggtcttagtctgtagcccaggcttgagtaccgtggtgtgatcatcgctgactacagcctcgactttcctgtgttgtttccttctacaccacccanctcagcctcccaggtaaccaggactacaggtgtacactaccatgcctggcaaatcac

SEQ ID NO: 579438 - DNA, 123 bp, Homo sapiens
cactggcggcacgcgactgcaggtgctgtggcacccgtgcacgcagatgcgcgagcacccgcacaccctgccgctggtaccgatcgcccgcggtgaagtgcgcatggttgatcgaccacgatg

SEQ ID NO: 579439 - DNA, 890 bp, Homo sapiens
atcgaggacgcgtcacgtgtgtgctaggtgttctcacatctagtgatgactgctgtgcgcaccggcgatcgcactgacagtgtttctgtacctgctccgactgtccttagcgatgtcctgtacatccggcgatatctcccagtctatactaatctactagtctccgcaatactgaaaatcgatctactatcgaataatggtgtatgtgttgcaaggtgcatgctgtgtctatcaagactcagttcgccagctatggcagagaatgtaggacccactcactagtggattctcccaacaatcacatttaggggtgtgccgtacaacaatcactgctccacaacttgcttgctatatgccctcagagctactattggatcacttgtatgaaagatgtaaatgactctatgagtgattaggagtctggaatctgagaaatcctttattgcaatgatatgttggctgatttggatggagagtggtgcgtgagaacaaggtcaatagagagttgaatcaacattaagagagtgtaagtatcattgatctcacgataacataattgtcaaggaatggatcaaagcctataaagttctgctcgttcagaggcagaataaatccctgtgttagtgggggatgtcaacaactggggatactgcatgatgaatacgcctttattgattgccagtacatgatggcgagtctgacagtgcccctgattgcaaccccaagtgactgatttgaccatcaattaaaagctccgcgatggaagaatgggattatcggctggttgagccctgggagggacggtcataccatagtgttggcgcgccgatttgcattgcttacatgtatgggcattcaaatgaaagccctgatgggggcgtgatataact

SEQ ID NO: 579440 - DNA, 735 bp, Homo sapiens
atagctgttctgaggatccccactacagtagctatgccaagctttaaagaaaatcaagtggctccttctgcatataaacaggaaatgtattgctttacagtaaacattcacatacatcactcttcgtgtacttttcaggaaagaagtacaaaagcagtgccctattcacatgtgtggtttcacagaacttaagaagagttctgcaaaacccgagcccaagcagaagtgtattaattcgttctcacactgctataaagataccacctggatactgaataattataaacaaagtggtgtttagttgactcacagttccacatggctggggaggcctcaggaaacttccaatcatggcgagaaggggaagcaggcacctctgtcatggaggcaggcaggagagaaagtgaaaagcccagaggaaagccatttataaaaccatcagatctcctgagaactctctcactatcacaagaacagcatctaggaaactgccaccatgatccaatcacctccctccctccacacgtggggattacaattcaaaatgagatttgggtggggacacagagccaaatcatatcacagacagagtaaatttgtcctttcttttgcctttttattcttttgggaccctcaatgtgctgcatgatacccacctcattgatgagggagatcttcggtctactgattcgaatgctaatctcttctgaaaatagcctcacagatacctcaaga

SEQ ID NO: 579441 - DNA, 275 bp, Homo sapiens
cactggctgctttgtggcctatacctttgcttttttttttggtgtggagcctgagtctcgctcctgtggcaggagctggagcgcagtgtatgcattcctggctcacggcaacctcccccttccgggtacaggcggttctccggcctcagcctcctgagtagctgggattgcaggtgtgcgccaccacacctgactaattttcctgtatttctgtttagtggagatggggttccgctgtgttggccgggctggtcttgagctcctgacctcaggtg

SEQ ID NO: 579442 - DNA, 148 bp, Homo sapiens
  misc_feature (73)..(73): n is a, c, g, or t
agcagctgatgaacgcgctggagtgaagatgatcttacttcaggacggatctcagcatacgcatttgccaaanctctccgcatcattggggctccttacaaagtgcagcacgcctgtgagatggtgatggccatcctccgtgaacgtg

SEQ ID NO: 579443 - DNA, 178 bp, Homo sapiens
gcattcggcagagacatccctgaaatgtgcacatttgctgtttgaggcatatattggcaccctgggtttggggtgcggattgaggtatgggaaggcaggctgtcttcatgttagagcatgcccagcagcagcatgagtgtcatcagaggcttgtggagggtgtttgctatgtgatggg

SEQ ID NO: 579444 - DNA, 1060 bp, Homo sapiens
cacaaggtgtcgtgaaaactaccccttaaaagtccaaaatgggaaaggaaaagactcatatcaacgattgtcgtcattggacacggtactattcgggcaagtccagccactactggagcatctgatctactacaatgcggtggcactcggacaatagagaaccatatgaaaaaatgagaagaaggaggctgcgtgatatgggaaagggctccttcaagtatgcctgggtctggtgataaactgtaagacgctagagtcgatgaacgtggttgatcaccacttgatactcgtcctgtgttggcacagatttgtaggaccagcctacagtaactgatgctgactagtcataagagtgccccaggtacacgaggagaacttggattcaagaagagcaagtggacttaccaggggagcgatctacagggccttgactggttgctagttccgtgatctggtttgctcgctaggtgctttggtgaacttatgagagctgagtatactccaaagaatggcgcagacctcttataccccatgccctccttggcattaccacacctgggttgtgaaacaaccgtaacttgtctggtgttgacaatacatggccttcctacgtgagccacgccttacagagcagaaaagatatgagcaccatggtctacgtagtctggatactttacattgcgaaatagtaggctacaatcgcgggaccagcagcactgtgtgccaaatttctgggttgggatggggacaacttggtggaagcgaagatgctaacatgcctggtcgaaggatggaaggcagccgcatgtgggatggccggtaaccctgctgttggaggacggaggtctacacggacttgtgcaatgaagaccggaggcggcgtcccggagggtccaccatgcggatgggggtccctggcagggggacctgttccacccgaagggagccctcccgcatcaccgagaaaatgggagacaaccacacatcggggggacccaaaagtgaatgaggaggagaacaacatagaggaaaaacacacataaacggaacaaaaagcaaa

SEQ ID NO: 579445 - DNA, 107 bp, Homo sapiens
ctctagaggatgcccgctttggatgcggcctattttgctgtaacttctgtttaaaaacaaaccaaaactagccaggcatggtggctcacgcttgtaatcccagcact

SEQ ID NO: 579446 - DNA, 210 bp, Homo sapiens
cccagcatgtatgcgcatgatctgagacggaggacactgatacgctcatgctcatactcgctacgacagactgaagcgatgcagagaagtgctgggccgcagtcaatacttgtgccagctgtgccgactggagcaaggaaggaagatctctgggctaagagcaccctgtacttgggctctaatgctagggccttgagcgcttccaagagc

SEQ ID NO: 579447 - DNA, 164 bp, Homo sapiens
  misc_feature (73)..(73): n is a, c, g, or t
  misc_feature (158)..(158): n is a, c, g, or t
tcctccagggaaaggggcacacatatctgtcctgtcaccaaggcaaagctggaaggtctgcagacctacccancatgctgctggtgtcgtagtcaccaaccacagggcatcattctcgccatgagaattcatgtacatgtctagcatgtgaaccatcntaaggg

SEQ ID NO: 579448 - DNA, 567 bp, Homo sapiens
  misc_feature (41)..(41): n is a, c, g, or t
ctagaggatccccgtgataggcgacatttcaaaagggggtngcatagaccccggtatcaaaagatgtgtgtaatggaatattttaaaagacagttccccagagggcagcccagtggagaaacatttttaaaaagagaggaaaaaaaaaaaaaaaaggctacgggggggataactttatttcctattaaataacccaaaaaaactatggggcactccccctcgcatcaaggggtcatataaagctcaagcagcagcacatcgggacgcacccatcaatcctggattctggagtcagggcaccagagggctccatggttggagctccagggaaagcagctgggacaagagtgcctttaatcctaagaatatccattaataacccgggcaagccaactcagtcattcggctacacccaaaggattgacccaccacagtgaagctggtcattaaaatacaacatcagagattgggccaagattgggtacctctgaagccaagagcttagaaattataagccacttaaaaccatatctggtccctgcataaaagggtatcacaagccagata

SEQ ID NO: 579449 - DNA, 1324 bp, Homo sapiens
cggttggcttcgtggtcaccttcttgtgcgctgcactctccactcttggtggtggcggctactccaccatatagtgtggttttctctcctgggggtcagtcgcgtttgcacactgggtcgctctgtgttggtacatcacactctgtagtggtgggcgtcacacacaacaatgtgtttgtccggtgtgtctcctgctggggggcttctccccatactcaccctgtgctaccttgcgctttccccgatactctggtcttcgaggcacccctgttaccttcatcaccccgtgtttgcttacatgtgttccggcttcctaatcttgtggggccttccgcgctggagggctcagcacacctaccttcttggacacgtgaccccttggatcaagccaggccctcgaatgtgtcagtaccttgctggtatggtaccagggatgccgcgcaagggcctcgcaacatattctcacatctgctgggatgcccatcggttacacatcacgggacatacaccatgcaggatcccggagttcctgctgtatgcagcacgggatctccatgctgatggtatccaaacacagagacccactgggaacaaatgagacacaatatagactactgagacactgtgtgtacagtaggaccattgcactcacacccatctggtagaggagcccccggtataccaagcgagccagtgtgtgttcagacacacacatcacagcattgactcggctaatctgaggcccttccagtagctcggcagcagcttcccacgctcctccccaccaaatccggggttctagagttaatggatgtggcgatgtgtcagttataatgcctcagtcgtgactcctcaacttcagcagcaatttgagcgcggatgagaggggaagagcgagtctgccttttggaggcccccattgcacctgcagcttgtgatgccctgtccccttctctcctgtcctcaccatatgcccggatctccattctacctcgccctgctatgcaagtgcccctgtggctttgtcgcacaacccacgctcagccactagaagcatgcagctggggtacgagagtcaatcttgaagaatgcatcgaagtcagcgtctctccattccagaaacgacaccccactcttcgtttgggcgtataatgtggaagctggtttcagccctggaccctccactgaggagaggatgtagacaggtgggcaccaattctctacgaggcccttcgcaggcactggagaaggcattttacacacacacaacactatacacacacacacacacacacacatatcacatattcacgggccctgctga

SEQ ID NO: 579450 - DNA, 852 bp, Homo sapiens
  misc_feature (25)..(25): n is a, c, g, or t
ttgtattttagatcgcttacgtatnataaataaacaaactatattctagctttattctggtaggacttctggcgatgaacagaagcttccggtaaataagggccccgtcggcaatacagcatactgctgtcacaagtgcaaacaactggaaagaaagacaagtgttactgcccaaaccatggaccccactcctgtcattcacacaagttttaagtggtctgcctaccagattcctctcttgctagggtactcggattgctccctgtgcttcatctaatactaactgggagagacttcatagatcatctcatttcttctcattgctaagctttctatatacttgcctatacaaagagaaaacacccttaagggagcagaaaaataataaagctatgtgggctctgaaacagataaatgaatatcccccgaatatagacataatttaattatattttagacttgttttgcatcttacagtatataacgacttagcttacgacgttctggtattaactgttatattcaattactttctttatgtttatcgttgtgtgtgataaaataattaatcgatgctatgcttttttgttctttttatttcacttggctgtgagctgttatcttacgtgtcaaattgtttattgtaatgtagtaatttatgtacatcttctaaagttaagacacagctcagaaacgtcacgtttctgttttaagcgcgagagatctttttatcaaaattcaatgttgttcatgtaccaaaattgtctcttttgatattccgcctgatatgtcatagtatatatattgttctgtagtaatagattctaggtggatttgcacttgtttgttttt

SEQ ID NO: 579451 - DNA, 626 bp, Homo sapiens
  misc_feature (55)..(55): n is a, c, g, or t
cagtgtggaaacttgttctttcactctgcaataaatcttgctgctgcgcactttntgggtccacactgcctttatgagctgtaacactcaccgggaaggtctgcagcttcactcctgaagccagccagaccacgaaaccagccagaccacgaacccaccgggaggaaccccacggggaggaacgaacaactccagatgcgccgccttaagagctgtaacactcaccgggaaggtccacagcttttctcctgagccagcgagaccacgaacccaccagaaggaataaactccgaacacatccgaacatcagaacgaacaaacttcggacacgccgcctttaagaactgtaacactcaccgcgagggtctgcggattccttcttgaagtcagtgacaccaagaacccaccaattccggacacgataggagaggtctacaaggcatttctgacttccctaatacaaaaaaaaaaaaaaaacggaatcccgggtagggaagaaacagccagaacttccaagttcccgtgaattaaaagccgtgagaaattcagtggttaccctttaggaattcacattcccattcgtagtcagtgtcttatagtccaaaaaaccagagggtggggtgtta

SEQ ID NO: 579452 - DNA, 364 bp, Homo sapiens
atcatgccacaaggtaagcctgaagactagaaagaggagaaagaacagccttagaaagaagtggctaaaaatggaggacaaacacctattcagaaggaggacataccaatgtaatgaagagcgtgactaaataagtcaaaataatagatctagacagaagagaataaagaacccatgaaagaggttttgaaagaaactccgcctcaggaagtctagaaggaagttcagaaggaagaggtcatattattacttttaaaatccagaaagagggaataacactcgatgtcttagggctggagatgacacttgagtgtcatctccggttccagttcccatgtcgaggtcagcgttgtggggatcctct

SEQ ID NO: 579453 - DNA, 148 bp, Homo sapiens
tgactgtcaaggcattctatggttcgtagtcaatcacactgaaatccggaggctggtgtgagaactcacgagcggacaccgtgcatttaatattttttgcacacccacacagcaggccaaagtggtcaggcactctcctaacacagac

SEQ ID NO: 579454 - DNA, 412 bp, Homo sapiens
tgaagtgccaattggtgtaaaataagatggacgtacttctgctcatagtctagaaatgcttggtgcaggctggtggggcagtctgctggtgtagtcatgtggagacctgagggttcccattatgtttctcggccatctcctaaaggtgtgtgtcttcacctacacggcgatacaagttcagctctgtatgtgtgcggcccttaggaaagggagaataggaaagaggcgggtgagcagtttcctttgacacaaatgttgtccccttgattcatatgtccaagtgttaactcgcgcagctaactcaggatgtgaccttatttgaaactagggtcattacagatataattaaggtgatctgggcgtagggcgggcctctaatccaatgtgactggtgtccttataaaaagaggca

SEQ ID NO: 579455 - DNA, 398 bp, Homo sapiens
tcgatcctagaggatcagcagttgcaggtcatgcctcagacaagattgaaaacttggtgccggttaaagatcgaattcattaaaattagctttattgcagatgtgcttgcaagtctccaggggaactttaaacctcagcaaacagaattttttgtggtgccaggagagactgcacgggcgttttacagagcctaagaatctccttactgacaaaccagatttgggaatttcctacttacaattatggtcccatttgaagctggacagtattccattaaattacagctgtgtgacgattcctaagtgtaggaaggcctgtgaaacattacactgcagttaattgggtgggcctaaggactaagtaattttcctcctgctgaagtttaaagtctatagta

SEQ ID NO: 579456 - DNA, 264 bp, Homo sapiens
tgggtggatcacctgaggtcaggagtttgagaccagcctggcgaacatggtgaaaccctgtctctactaaaaatacaaaaattagccagatgtggtggtgggcacctataatcccacctactcgggaggctgaggcaggatcgtctcttgaaacctggaggcagaggttgcagtgagatgagatccaccactgcactctaacccaggcgccaagagtgaaactcttgacccacaaaaaaaaaaggagggaaggaaaatgaaaaa

SEQ ID NO: 579457 - DNA, 970 bp, Homo sapiens
ccaccaacatactcccatctgtgaaaggaaagagggaggtaaggaatacctgtccccctgcacgagactcattgacctgaggcccttctctccagacccctggatgcagccatcacagtccttaccagcagagcaccttagacagtccctgccactggactaactagaacattaggaccactgaggcccagagggcctgcaagggagatgagtgagagcacagaccctgaccctagagagaccacaaatggaaatgggcagagcagagaacatcccatgaaggccaccgcccaggactcagtcacatgagacaagcaccgggcatcatgccaacccatcacaccgcaaaaaagacgggacgagagagaggcatccaagaacaaacatagtaccagagaaagcccaagagaaaaaggcatcaaaggacgcagcccacaatacacatgaacttgctctaacagaagacaatccaatgcaagggacaagcacaggcacacaacgaaccaaagaaagagtacacaacaccccaaagacaacggccaagatttccatgtgcacatgaagagcatgagacactcacccactacacaacccatcatcatacgacagaccacatggcaaaaaaccaacgtggatcatacaagaccccagcccagaaagaaaccatacaatccaaataccacacaattaaggataacacaacaaccgacagacacgaggagcgaacggactttaccccatgaactggatacacccaaaggaactccccacatcgaacgactaacatgacatgggacccgaaaccacgggaaaaaggatggcacgggacacaatgggcccaagcggcaggtagcaggcataaacgataaggagagaacccatataatagagcacacaacagcgcacaaacatgccagtggatgagtcacaaccagcaggaacggcacccacaagaacacggagacagaca

SEQ ID NO: 579458 - DNA, 108 bp, Homo sapiens
tgtactgtcgatttgggaataaggtatctgtctcatagaatgagtatggaagagttccctccttatcactttttgtggggaccagtttgtaattaatcagtataagtc

SEQ ID NO: 579459 - DNA, 200 bp, Homo sapiens
tgtggtttgagtctgttacgaaggacctaaggcacatggctggtgatctttgcgtcatagacacgggtaagctcatggtgtaactcctccttagctgtaggtttccaggcttggcacagaggtaagggcagaatgttgggggtccctgtggatctccccaaaaacttcctccagggcaggatttcccacccagtgccagg

SEQ ID NO: 579460 - DNA, 193 bp, Homo sapiens
gctctggctggatgcgtccccctgattaggccaatctgtgctctcgtcagcctgcgcctggctctgcccctccaggacaggtatgggatggggctcactgttgtttgggctgagtacccccctccagtgaggcaccctgcagcagatagcatgtactgcgtgaccgacgcagggtggctgtgacagcagcaat

SEQ ID NO: 579461 - DNA, 178 bp, Homo sapiens
tcttaatgacagcatcgcaggtgcacacatcacagatgatgcccgcgtccatcttgaggccgtcaggagaaggaaggtttcagatggatgttgcccattctggatcctccgagcagctggcacacgtgacgtcaccatccacgatgctcaaagggcccgcagcatcgcccctgagatt

SEQ ID NO: 579462 - DNA, 665 bp, Homo sapiens
catgtggctcacacctgtaatgccagcactatgagaggctgaagtcaggaattcgagaccagcctgaccaacacggcaaaacccaatctctactaaaaatacaaaagttagtggtgcatggtttctactaaaaatatttaaaaattagccaggcgtggtggcgggcacctgcagtcccagctactcaggaggctgaggcaggagaacggtgtgaacccgggaggcggagcttgcagtgagccaagatcgcaccactgcgctccagcctgggcaacagagcgagactctgtctcaaaaaataaaaataacaatactaaactacaataaaaataaagaatcgggtcaggcacagtcgctcacacctgtaatcccagcactttgggaggccaaaggcagcaggatcactttagccccacgaattcaagaccaggctggcaacacagcaacatctcatctctagaaataaaacaaattagccagttgtggtagcacatgcctgtggtccagctaactaaggaggctgaggcaaggagacatggcttgagcacaggcggtgaggctgccagtgcaccaatggaatcggtaaccaacgcactcccagccctaaggtgacaggagcaaaacctggttattcagacaacaacaaacaaccaaaacaacccaac

SEQ ID NO: 579463 - DNA, 474 bp, Homo sapiens
  misc_feature (28)..(28): n is a, c, g, or t
taatatcggggcgaataaacccaagagnttaattttgggaagtgaataaagagggctttgggtggggaaaaaaaaaaaaaaaaaaaaaaaaaaacacatgtgtgtgtgcggcggcgcccttgggcccccgcgaaaaagtttttgtagacacacttcgcgttgggggcggcgggggccccggtagggagaagaggaaacatcgagggtcacacaacgtgggttcctcgaggagaaaacaccgcgggctccacggcaagacgggcggcggggaaatctcctccaccaataataaaaagaagcgcgccgcggggaggacaccgcgcggaggggtcggctgagcaaagacaaccaccgacgagagggcaatcttccggagagagcactcaacggcgggaccattctcaccaacacaagggagctcaccgaagaggaagctcggcgaatatatcacaattgacggccccgaagatggag

SEQ ID NO: 579464 - DNA, 239 bp, Homo sapiens
cagaaggggctgaagactgtgggaccgagagactagcagacgcacttaaaatgcattatagctcgttcctcgctggagagagagaggtggtggtgtacttaatggtggaactgccgcctccaacagagctgagagccacccccaagtggctctgcacactgctggaactagaagccaccatccaagcgccaacgaccacgtgccataggacgtagctgcattccatccacaccaggacc

SEQ ID NO: 579465 - DNA, 988 bp, Homo sapiens
agttatttgatatgggtaaagcgagtgggagtaccaagatgtcgtggatcgtaatgatattgtacaagtgttgttataagtaaaagtggacatgaataaaattcagaatcaatgagtgcgtaaatacggaaatgcttctgatgattgagccatggttgatgaagagggtgatgcaagagacgaatgaattatcctgagggagataaagagacaattgatcaggaaaatgcaggatgtgtaaacttttcacttaggaatttctcggttggtatttgctatcgcccgatggtcgttgtgtaacacaaaatagtgatcgatggacgagaaagagaccaacttgaagaaactggaacaacgatatcgcaataggcgagaaacgtggatggatacttgtaggaaatgccgggtgggcagaaatagccacgacacttgtgtcgtgctagagcttcctcgttgaccaagtaatctcccactatcttaaatccgcgaacttgactcgagtaatgaactacaacggcgattttgcggccgcggaaggaggactagccttctgacttaatccactacagtttgtcgaattctaaatcgcatatattgggtccccaatttcacctttgcttgctgaattcgcatttttaacacttttcccaagggcccaacaatgaccaagataacgtgaatggctcgtggaaacattgacacacgctttgggtccttccaacaaaatttaatcaaaacaccaaaaatttgggaggggagagacgtaaagcaattgggcctccattgtacaaggtctatcaagggattatcacaagcaaggtctttttcaaaaaaactaagaggagaaattcaaaaaaggggctgaatggaaggcttggaaacattgggggttgggctggtaatcccaagttaaaacttgggaaatttctggtagttaagtgtggtccttatcaaagaaggggcaaggctctttggcattaaagcgaag

SEQ ID NO: 579466 - DNA, 159 bp, Homo sapiens
gcttcgagttgccctcatttaataaatattatagtagcatataccatctcacttctaggaatactagtatatcgctcacaccgtcatatccgtccctactatgcctagaaggaatagatactatcgcgttcattatagacaactcgaaagccccaagcg

SEQ ID NO: 579467 - DNA, 819 bp, Homo sapiens
agcgggcgagcgcgcgcggaccgcgcacaggcggcggagccggtatgggcccgcctgaccctgggcgccgcgccgcacgatgcaccagcctacagccaggactgaagcttcaaggatggctgaccatggaccctgcagggacatcagccccacttccagtcaaatggtgagtccttcagtgcacgcgtggtgctgtggattatcctctcatcattccatgtacatccccttgagacgtgagtgtaagtgttcgctcatgctacgtctcagctggccctacctattggcgcgagcgagctgattgccttacctccatgagctgtggatgcctcatccgtatagcgcaaattggctccctcctctctctcaattccatcgatgggcaactgtgcgctccgtgtcattggcgaattggtagtcactgggaggccgtgctgtaccatggtgcccgagaagtaggtgtccctgctgtgcctaccatgattttcaaggacccgtaacccggcgtatcactggcgcccatgggttgatgcactgtgccacgctagccgcacatctatcttcactgcgcttatgtaccagaactgaacggccttccctgctgtggtcgcagccctgaccttctgacgctctacgcacccatggtggctggcgcgctggtccgtctgggcaccgtgactgtgatcaggcccctgggagcttatgcgtgacacagctgccggctcagcatgtgtcgtaccgggagctgggtgcctgtgttctgaactgcagttggctcacgggtggctggttgctcacttgtggctgggcttggggccc

SEQ ID NO: 579468 - DNA, 747 bp, Homo sapiens
tgtgcatctaaaaatattttaataaatactcaagtgctctcagagaaaaaaaaaaaaaaaccgggcttttctactattaagattacactggaagtggctttaaattccaatcatcttaggatcttgggtgacatcacagtggtggcatatttcccactggtcacgagacatccagtgctggctaacagtggatcatggcccagtggtctcccaccactaaccagtcccaatcttgatttaaaacgaccaaaatatgcatatgtcctcggggaattacatactgggctattgggaaagaaacctctggtgcttcgggtgacaacacattcaagacatcgacacatcgtggcattcgggccgcagagaccgtgagcgggcgagggggtactggcggccccctttttgtaacattacccaacagtgcggtgctccaaaaacctcaactgccaatcgccaattatgacgaaaaacctctccgtttaatagtcagccgttttgttaccaagcacaaagatcggttgtgggggccacaatgtttttgccgcccgcaaaaagggacaaacgtttcgcgtgattaacgacaacggctctgaacggtagtgtttatgacgaagtaactaagcaaatttctctcttgccaaagcctacttaccgcacgctggtgggggagtctaacttatactccccctataacaggcggggggaaaacgccccatcatgtacacctcatctcctgtgggggaagca

SEQ ID NO: 579469 - DNA, 319 bp, Homo sapiens
  misc_feature (291)..(291): n is a, c, g, or t
cctcttggaatattcagcctaaaaacctcatagggctatgaattcccccgaaattttcatttgccatcaggccgagcttttaaaaaaaaattgttctctaaccaggattgtaacaaaagtgtaaaaactgtttcaaagttgaaagttggtggggcaaatatgtaaataatgaactgtatttttacaatgatccccgcatgactatttccccccctttttaaaccccaaatctgttttccaaaaacgtcccccgcctttttcctgtggtttcttaatccagtaattgtattnctgcccttaaaggatgccgtttttttta

SEQ ID NO: 579470 - DNA, 956 bp, Homo sapiens
  misc_feature (3)..(3): n is a, c, g, or t
  misc_feature (67)..(67): n is a, c, g, or t
  misc_feature (112)..(112): n is a, c, g, or t
  misc_feature (175)..(175): n is a, c, g, or t
  misc_feature (185)..(185): n is a, c, g, or t
  misc_feature (234)..(234): n is a, c, g, or t
  misc_feature (262)..(262): n is a, c, g, or t
  misc_feature (265)..(265): n is a, c, g, or t
  misc_feature (282)..(283): n is a, c, g, or t
  misc_feature (285)..(285): n is a, c, g, or t
  misc_feature (342)..(342): n is a, c, g, or t
  misc_feature (347)..(349): n is a, c, g, or t
  misc_feature (372)..(372): n is a, c, g, or t
  misc_feature (382)..(382): n is a, c, g, or t
  misc_feature (386)..(386): n is a, c, g, or t
  misc_feature (395)..(395): n is a, c, g, or t
  misc_feature (403)..(403): n is a, c, g, or t
  misc_feature (407)..(407): n is a, c, g, or t
  misc_feature (418)..(418): n is a, c, g, or t
  misc_feature (430)..(430): n is a, c, g, or t
  misc_feature (435)..(435): n is a, c, g, or t
  misc_feature (439)..(439): n is a, c, g, or t
  misc_feature (445)..(445): n is a, c, g, or t
  misc_feature (450)..(450): n is a, c, g, or t
  misc_feature (460)..(460): n is a, c, g, or t
  misc_feature (477)..(477): n is a, c, g, or t
  misc_feature (485)..(485): n is a, c, g, or t
  misc_feature (488)..(488): n is a, c, g, or t
  misc_feature (510)..(510): n is a, c, g, or t
  misc_feature (528)..(528): n is a, c, g, or t
  misc_feature (534)..(534): n is a, c, g, or t
  misc_feature (567)..(568): n is a, c, g, or t
  misc_feature (576)..(576): n is a, c, g, or t
  misc_feature (579)..(580): n is a, c, g, or t
  misc_feature (582)..(583): n is a, c, g, or t
  misc_feature (586)..(586): n is a, c, g, or t
  misc_feature (594)..(594): n is a, c, g, or t
  misc_feature (878)..(878): n is a, c, g, or t
  misc_feature (918)..(918): n is a, c, g, or t
ggnccaggcagccgagccgtccgaacagctgggctgggagcagcggaacccggagctgggaatcggnagccgggcgcggggagctgcgcaaccggggcggagcacgcgagcnatgatgtcgacgtacaagcgggccacgctggacgaggaggacctggtggactcgctctccganggcgacgcanaccccaacggcctgcaggtgaacttccacagcccccggagtggccagangtgctgggctgcacggacccaggtgganaancggctggtggtgttganngnacttctggcggcaggactggtggcctgcttggcagcactgggcatccaataccaaanaaaannnccctctgtgtgcctgaacgaacntgtgtctcantgancaactccancttgaacnccanggaccccacantggacccctgcnatganttcntcagcnacgcntgtaggggcnttatcaaagccaacccngtccctgnttnccactcacgctgggggaccttnagcaacctctgggaacanaatcangcaatcatcaagcacctcctcgaaaactccacnnccagcgtnagnntnntanagagaaangcgcaagtatactaccgtgcgtgcatgaacgagaccaggatcgaggagctcagggccaaacctctaatggagttgattgagaggctcgggggctggaacatcacaggtccctgggccaaggacaacttccaggacaccctgcaggtggtcaccgcccactaccgcacctcacccttcttctctgtctatgtcagtgccgattccaagaactccaacagcaacgtgatccaggtggaccagtctggcctgggcttgccctcgagagactattacctgaacaaaantgaaaacgagaacgtgctgaccggatatctgaactacatngtccagctggggaagctgcttggccgcggggacgagga

SEQ ID NO: 579471 - DNA, 359 bp, Homo sapiens
ctggtgtaattagaggatccgtggcgtgaggtagtcatatgtggttattatttgaggtgtgtccttcaatacctagtttattgagaatttttagcatgaagggaaactgaatacattgaaagtcttttctgtatctgctgagataatcatgtggttttttgtccttagttctgtttatatgatgaatcacatttattgacttgcatatgttgaaccgatcttgcatcccagggataaagcctacctgatagtggtgtattagctttttgatgtgctgctggattcagtctcccagtattttgttgaggatttttgcatctatgttcttcaaggatattatcctggagttctcttttatt

SEQ ID NO: 579472 - DNA, 441 bp, Homo sapiens
  misc_feature (54)..(54): n is a, c, g, or t
agtaagtaggagaagaaagcaaaggttctctgagagcccatgactcttcttagngaagacttagtaattaataacaccaataggtaataataatattgatcattcatcaagcacttgccaagagtcaggcactatcctaacattaccctttggttcaggcactattattttttccattttacaaaggagtaaattaagactcagagagattaaatgacagagccgggttctaacacaggccgagctgcatgcaacacctatgctttcaatttctatactcactccatcaatttgcttttcttggcttctggaccttgacaaagccgctctctcagtctgtacttgttagggtcctccagagaaatagaaccaatatatacatatatgtactccacaacataggatggggttacatcccaataaatgtatcataatatcaac

SEQ ID NO: 579473 - DNA, 253 bp, Homo sapiens
agacacagtaacaatcaacaaaatgaaaaggcaatgtacagataaggagaaaatatttgcaaaccatatatcaggcaaggttttaatattcaggatttaggaagaactcatacaactcaatagcaagacaacatataacctgattaaaaaaaagtggggaaaggacttgaatagacatttcttcaaagatgacagaaaatgaccaacaggtatatgttgtcttgcatttgagcttgtgtgttctttggttaat

SEQ ID NO: 579474 - DNA, 434 bp, Homo sapiens
ctgctactaatcacagagaaaaatgtgaagaaggaggagaagaggaaggctagaagcctgagcaagtgagggtagaaccttttgggactggcctttgaagctctggccagggatggggtgggggccaaaaggacagagcctggtatgtcttcatagtcattgagaatgtggagataccagttttgggtggggggtgatcaccaggggacctagggagatccccttcccaccccctaagttggctacagagtcaatcctgccccctctcctatcacttggtgctaacaagcacttcagtagggttggtgcccagggtaggaatgagagtcctcaggtatgaattgagtttgtatttctagaaccctgggtttttacatgtttggtctttttttgttttggtttgtcaccctcgataaaggaagtatattcatcca

SEQ ID NO: 579475 - DNA, 673 bp, Homo sapiens
  misc_feature (317)..(317): n is a, c, g, or t
  misc_feature (335)..(335): n is a, c, g, or t
  misc_feature (527)..(527): n is a, c, g, or t
  misc_feature (531)..(531): n is a, c, g, or t
ctggagggcagtgtgggcctcccggatggcggcgactcggtttgcgcgtctcgtagccgggctgccggccggggtgtgttggggtggcgtgggtgagtgcggccggcctggcttacgggaatgcccttccgtccgtttggaaatcccatgggaccatgtggcgcccctgccctctgggcagtgtggatggggctgatgtgcctggagctgtggcccatgcttgcctctgctggtgatgtgctgatgtatgtgtgaaactgcactgtgtgcatgttgcttgagaatgcctgtcttgtgctaggtaggttgtgcttgtnagctttcctgtgttgatncacatgctgacagtttatgtgtgaaacctattgtggggaaaactttttctagccttggttgttttagggttgagagccctgtaaggtgagcagtgagattggctgccgatgtggcccagatggggtcctgtaagcagctttgggtttacttctggttttaacaagtggtaacctttttgtgcagatcgcatnactnttcctcatggagagttagtggccagtttacacgagtggagtctctgtggacgtcttggcctatggtatcccccacctggagcacgagtgcgagtgcgacacagtacatttggtagctatcggagacgacgtctcaaggccgt

SEQ ID NO: 579476 - DNA, 347 bp, Homo sapiens
  misc_feature (13)..(13): n is a, c, g, or t
  misc_feature (213)..(213): n is a, c, g, or t
  misc_feature (266)..(266): n is a, c, g, or t
  misc_feature (270)..(270): n is a, c, g, or t
  misc_feature (306)..(306): n is a, c, g, or t
tttcggaacaggngattgcactgggggccatggtcatgcctgtaattccagcactttgagaggcaaagacaggtaggtcactggagctcacgagtttgagaacagcctagccaacagatgggagctacttttcccagcctttattttctttttcttgttttttttttgagatggagtcttgctctgtcgcccaggttggagtgcagtggcagntcctcagctcactgcaacctcctcctcccaggttcaagcaattctcctgcctnagtntcccaagtagctgacactacagttgtgtgccaccanacctgggtaatttttttgtgtttttagtagagactgggttt

SEQ ID NO: 579477 - DNA, 694 bp, Homo sapiens
cagcaatgttctagagtctggtctttccctttcctgcagcttcgggtccttggacctttcctgtatcctattcacttgggagtgtctgtcagcttgagcaccagttgttctggtgtgtcatttgattctacttgtagcataatcatttatacgagctattgggaggttccaaaccctacctagatttgtgtaggtgatgtatcaaattgagcaatataccgtctcatctgaaaatagtagcacacagccatatataggatatcacttttgctaaggactgtttcttcacattgagcagagcaggcatataatggtggcttatttagtctaaggtctttcatttctttatacctgattttcaacataacacgcaatgtggatgtcgagtagtgttgaagaatggtgctgcgtcctgacaagtgtatgttaactgtgttacattttgctatctgcagaattcatttctctacttactgaaccttttcctaacgttaaacactgtctttcgaagtctcgcttatttctcgaggaatacgttcgtctgtaactagaccctatgcacccttttacatagttactctctggaacaaggagggatttcatgtagatgaactaggaaatgcatactcacataagccacaaggttctacggcagaaagccccttggaattctgtgaccaacaggagcaagaac

SEQ ID NO: 579478 - DNA, 975 bp, Homo sapiens
gctccaggtagcaatgatgagacccttttatctgctgttgcagtgctttgcacacaagctctgcgcccaatcacagggcaagtctccgctgctgtggcaaaagaaccctgctgttgtggcttaacacatctcaacccctctgcaaaggcttacatggtcacagatgacgacatcaggaaccaggacgagcgagtacagccaagtaccgcacagacacattggcacacgaagccactgactggcagaccatctgtgtcgcgatgctgcctgactacagaagcacgcatgcgactactggcacacactgcgacacgcgccagactgaagcctaagaactactgattcaggtaacctctgcgaacggacttttacaccacagcagaaacactttcctaagacaattggaaccaaacaaatgtttccactgtggccttcaggccttgtaaggcaaacaccacaattggtacccagagccacatacgacgcttcttgttaactaaggcacttaacccaaatggccctttcacagcatgttacttgtcgcgatcgctatactactctagttacttcaaaacacaattcatgttcgcattcagggaggtccttaggaactttagcacattaaggccttttgggtaaagtatttcaggcagggaccccctaagacatgaaggcttgagcctattgggaatggccagggttgcaacatcctacctggaaaatggttcgcaccttaccgtttacaaaccatttgggtacccccccacaggttctcacataatgaaaacaagtattcagggaaattcttaactacattttatcccaggttaaaggactaatggtgcacttaccactggtgattctaccccatattcgcaaaaccttaattgccaaggggcccacctggatcacattcttcccaatcggacctgttacgcgacccttaaactggactaatattacactatagcacca

SEQ ID NO: 579479 - DNA, 342 bp, Homo sapiens
tttcagggggccctggaaaatgggggttcctgtcccccgggcccttttccccctgggggaagggggggccaaggaaaattttttgcggggccccccccccgccctttgggggggtgggggggcccccccttccccaggggcccccgtcctttaacccaacgggggggtgggacattaaacccaagggtgggggggggttttaacccccccgcccccgggcttggggggccccttggccccgaaatttggggggcccggggcgggggaaaaaattttggccccttgttttaagggggggggggaaacaagggggcccccctttaattggtttttttttcccca

SEQ ID NO: 579480 - DNA, 1280 bp, Homo sapiens
  misc_feature (263)..(263): n is a, c, g, or t
cggacgcgtggtgtacaggaccgggaacttccaggcgcggttcaccaaggtaggcagggacccttgtcctacgtatgagatactgttgactgtcctccgcggagcccacgggtctcatcagcaatcctcgggctcagcaggtccccgtatgctcgaccaaggtgcgagaccaatggtgggatagggatgacgacgtacccaggaaagcgtctaagaggcagggtgcagtacctgaatggagcgaggcaggctcggcgggggcngccgatggtatgtgggccctcgtgaacctggtgattgatcttccaggggtctccttgcttgcggaccaggagtctggcgcttcccatctcgaccaattggccatccaatggattgcaccatcagcttagcatacggattaagtcctctacgtgatttcgttgccatcaacatgccatctgtggagggctcaagtggactagccgctcggatcgccacacttcgttgggcttcgctaagcattggcacggtgtgacgcactggaatcgactcatggcacgcttggcttgtaagtaccgcatgtgcttggagctcatcatgtgcgtccactccacttggggggccctatgagcagagtgtccgacgaaagcacctatcaagaatgtatgaagcatttagacgcacatgggatggcgctaggtaggacggtgagcgtgatagggaggacttgtgagtggaatcagttgacgggaccatactgcagaatgtaaagaacttcggggatgtagttacgacatctatgtaagattaccctggagaatgttgacgtgatccgcgaatggatggctagggggagaatagctgtcgagatcttcccctgggccgccacaagacccgtcgctataatcgacaagggacaaccagggtttgcgaacagctcttagtcaaccggagggagacccaataaagttccataccatgacacacagtggacccactacgttatatttgattggccaccctggggaaaaggtccccgagggcttggggggaaccccttacagcgtttaggaggacacggggtcacacaccggtggatcccggtaaataccataagctgtcgcgcgctatccctatagctatccgccaagcctgggtcccagctagaagggaccacagagaggctcttacagcaagacacaagcactccatacaagaacgagacgcacttcaaacgacgacataaggcgggaggggcgaagaaaaaaccacatctagagggggaacacagaaggcag

SEQ ID NO: 579481 - DNA, 174 bp, Homo sapiens
tggtactctaaggaccaagctccaacaagaaggcttagattgatcatttgttctattctactaggaatatccctattcttaaggtctcagtgtactattgtgatgtgtacctgtgcttatttcattccctaggtgatcagctctgatcaactgctgctctcttgttgcgagctt

SEQ ID NO: 579482 - DNA, 318 bp, Homo sapiens
  misc_feature (132)..(132): n is a, c, g, or t
ctaaccagattatcagctagaattggtttgagcgtgggcgctggcgtgaagaccactgcactttgaggaagttgatgtgtcactgctctgggcatattctcaagctcttcttgtattcctccaggcaggtanagtagaactcgatgaagaacttggtgcggctggcttgtcttcacaatggcctcgatgctctcaaactcacgtgtaggcctggtctgaagtctttgagagccctttcttggagatgacactgggcaggtacctccaccctcgaaatgtcccaacagacggggccaatggtcagcctggtgcacgcat

SEQ ID NO: 579483 - DNA, 172 bp, Homo sapiens
  misc_feature (9)..(9): n is a, c, g, or t
gacactggnctgcaacaactctcgttggcaaatgccaacaactgacaccctggaggatatgaacagccagctcaactcattcacatggtcagatggagaacatcaccactatctctcaagccaacgagcagaacctgaaagatctgcaaggaacccacgcgggtaccgagct

SEQ ID NO: 579484 - DNA, 209 bp, Homo sapiens
gggttataggatgtaccactgcttcccagcctgcgcagacagagcaagaccctgtctcaacaaagaagtaaaaaaataacaatagatgtgggctgatggaccaccctgttgaccctgacatgttcgaaagactgttgtgagggacaacatggcctatatcgctagtgcctaggcactcccatacgcgacaccgctaaggcaacttactt

SEQ ID NO: 579485 - DNA, 195 bp, Homo sapiens
agagcaagactctgtctcaaaagacaaacaaacaaacaaaaaaccaaaaacccaccaatgcctggctaggtgcggtggctcacacctgtaatcccagagctttgggaggctgaagcgggtgggtcacttgaggccaggagttggagaccagcctggccaacatggtgaaaccctgtctatactgaaagtacaaaa

SEQ ID NO: 579486 - DNA, 1083 bp, Homo sapiens
  misc_feature (553)..(553): n is a, c, g, or t
ggaaatgaccagttgctaagaatgcaggtgttgaaggatcttggatagttgagaagattatgcaaagttgcctcagagagttggttatgatggtatggctggagattttgtgaaatatggtgggtagagaaaggaatcattgtacacgcgaacgagagatggttgctcgaggacacatgggttctatttggagatggcttagcgtgagatgatgtggacttctgctgattatactagatgaaggaagaggttagctcctaggaaaattccgaaataaagagaaggagctctgagatttgggtcgcactaggtgtggggcataggatgagggtggcgcaataggtcacggccttgcaatagtcactgattcatacacgtccagaaggtaatcccgtttgtgaccctaattagttaagattcgcctacttcgagtagagggtaagcgtcgctacacggagaagtgtatcgcggccctacgcacaagtgacagcattgcaaatttaactagatcacaggggtccgcgtaggaaaaagtgggagatggacaaacaangagcctaggtgcggggggatagattacctagggtcatcaaaagccatctacattacgttgtgacaaggcgcggtatgccagtttttaaggactatacacactttctttatacgataagggggtgcctcacaataggctctcgtctggtaggcgtcccaaataaggcccgtccactggaagtactacaagtttccaaggttggggaggctatcctcttatactggtgacaagtggacgattaaaaaaccactttgtgcggtgcaactatggtgcctctgagaatcgatctgggagctggtacacccaaaaagaaaggctcgagagggtgaacaccccctttcggtaatctaggaacattaagttcaataaactttttacatagtgtccaacctagggagggaggggactccctttttcacaaacttggaactttaattaaccgtagttcccaaacatccataccacgcgcatggtaagtcgcacgatcggcgcattggacccaactcgtatcctaggacatcgtgtacacc

SEQ ID NO: 579487 - DNA, 839 bp, Homo sapiens
ggacgcgtgggtcgatccacgcgtcgcaggcttgggtgatcctctctcctttgcctccgcaagtagccaggcatacaggtgtgcccccacacccaactccgcataattgctttggtgtttttcaaagcttgtaatgcatcagtcaggctgcaggtgggcaaatcacaaggtccagcagttttttagcatggggtgcagcacagcaccaattcctgttttttttcactgatttaaaattttgcagcacaagtctcactgtcacccaggttggggtgcagtggtaggatcatagctgtgctgcagccttgatctcccaggatcttgcctcagcctcccgagtagctgggactgcatgcttgtgccaccacactcggttaatattctgtacgagatggggtctatgctatgttgcccaggctggcttcaaaactcctgaaacttaaaaagcctcctgttcagctaccgggcacgaaaatcaccttcatgcaaccaccacctcgagcagatggcagcctaggtccccaaaggagcaacggccagacaagttgcgcgaggcaccaggccacggcgcacacggacacgaagacggcccactcggggcacacgacggaaaaacacgcataccaccacgccccccggccgaaacacggggactcacgggggtgcccagggcaacaggaccaggacggcacgcgccctcccaggagaccaactggtgggcaccacaggtggaagcccgaacgcgtgcagcaccacggcaccgggacaccgccaccaacaccagacgccactacaccgcgtacaccctgggaccccacgatagaagccaacaccaagcc

SEQ ID NO: 579488 - DNA, 432 bp, Homo sapiens
  misc_feature (164)..(164): n is a, c, g, or t
tcgaattcgacggtttctcagctacaacagccatgccctgtgtggctttgaagttacagaggggaggctgcagagtggcagaatgggaccctctagcgctctactctagcatcttttcttgtaaagcgtaaaattatccctgaactacgtttattttttaaaantaaccattccatttgccgggcacggtggctcacgcctgtatgtccagctacttgagaggctgatgcaggagaatgggagtgaaccccacgaggtgtagctctcacgtgagcgtgtagaactcgggcaattgaattccaggcctgggcaacagaagtgagactccgtctaaaaaaaaaagaaacagcaacatgtcaatgcttttggtgttaatttataacagttttcaaattattcaattaaaaataccagtaggtccttttattctga

SEQ ID NO: 579489 - DNA, 556 bp, Homo sapiens
agaatgctaaaaacagtcccccaatctcttctgacttgtaaagtttctgctgagaagtctgctgttagcatgatgagttatatgaccctttctctagctgtctttaagattctttcttttgtattgaccttggaaagtctgacggctatgtgctctggggatgatcatcttgtacagcaggaagagtcattctcaccctcgatcttagcaaccttagcatatgatttttattcccttgcttaaattaataacttttaccttttcgctttaagaaagcactttacagcttctctggcatatctgaattgctagcatcattacacttgtgctttggggccattagtaagataaaggttacttgaaaacaagcactgagatacagtgacagtccgtgacaactgagatggctactaagtgactaatgggtggggagaatttaagcatgaatatgccccacaaagcaagaattcacatcatggatgctactcaaaatagtgggtaatttaaaaacttatgaattggttattttctgaattttcccattaatatttttaga

SEQ ID NO: 579490 - DNA, 518 bp, Homo sapiens
  misc_feature (169)..(169): n is a, c, g, or t
  misc_feature (171)..(172): n is a, c, g, or t
  misc_feature (174)..(174): n is a, c, g, or t
  misc_feature (475)..(475): n is a, c, g, or t
  misc_feature (481)..(481): n is a, c, g, or t
  misc_feature (483)..(485): n is a, c, g, or t
  misc_feature (492)..(493): n is a, c, g, or t
  misc_feature (515)..(515): n is a, c, g, or t
gagagtgacagggctgtgcgctctggggcacctcatgcagacgggagtagggaggctgttttttgcgcgtgcatatggcggtggcgggtggggggaagggggagatcctgctgactggccgcccaagttggggggcgagctcggtggtgacgcgcggccctcacgtgancnngngctgcgagcgacgcagccttcggtgcagtcgtcactcgcgtctggctaccagctccccgctgccctgagctcggcgggctggcattcggcccggggaaaagcggagcaggtctgcgaggctaagtgtctccgcggcgcacctcgcggcgagaatccggaggagaaggagactgcaaggataggcccaggaaaacgaagagatggagcagcctatgcagaatggagaggaagaccgccctttgggaggaggtgaaggcaccagcctgcaggaaatcgacggggacaggctcgccgacttgcncctaantnnncgatggnncatacccaataggcagatcaantga

SEQ ID NO: 579491 - DNA, 108 bp, Homo sapiens
acggtggtatcatgggtcaagcaggcttttgccaatttattcaacacgtaaatggtggcggggtgcagtggctcacccagccaaccgtggactagtgggtacggagct

SEQ ID NO: 579492 - DNA, 1008 bp, Homo sapiens
  misc_feature (169)..(169): n is a, c, g, or t
  misc_feature (171)..(172): n is a, c, g, or t
  misc_feature (174)..(174): n is a, c, g, or t
gagagtgacagggctgtgcgctctggggcacctcatgcagacgggagtagggaggctgttttttgcgcgtgcatatggcggtggcgggtggggggaagggggagatcctgctgactggccgcccaagttggggggcgagctcggtggtgacgcgcggccctcacgtgancnngngctgcgagcgacgcagccttcggtgcagtcgtcactcgcgtctggctaccagctccccgctgccctgagctcggcgggctggcattcggcccggggaaaagcggagcaggtctgcgaggctaagtgtctccgcggcgcacctcgcggcgagaatccggaggagaaggagactgcaaggataggcccaggaaaacgaataaatagaagcagcctatacatgaaaaagaagaaataccgtccctaaatagaaagaaaagaccaccaaccgacatgaaaaacgacaaaaacaaacacaccaacaaccccaaaaaaacaaaaaccagacccaaaatacagaacaagaaaaaaataaaaatacaaaaaaaaaataaagcagtaaggaggagaagagagaaagacagaagaaaagctagaggagagctaactaggggaaagaaagagagacgaacggtaaactgagagagggggaagtcgacgacgaaaaaacagccaaaaccagacagaaaggaagatgtgtacctgaaaagccgaaaactaccctaatgcatgatgaaacagaaatagagagaacgaagataaacccactaagagggcgaagaggccaacgagaaaagccaaagaaaagcgagaacgaaagaccataggacgaaaagaaccccaagaagaaaatgccagagagacaagtaaggacagagaggaagtcaggtgagacgaagggaaggaatatctaaatagcgacaggagaagtgtgcaagacagcagaattgaggcacccaaagagtaaatgaaaaagagagagctaaaaaagcaagtgaaagatgcaagaaggagaga

SEQ ID NO: 579493 - DNA, 874 bp, Homo sapiens
  misc_feature (169)..(169): n is a, c, g, or t
  misc_feature (171)..(172): n is a, c, g, or t
  misc_feature (174)..(174): n is a, c, g, or t
  misc_feature (608)..(608): n is a, c, g, or t
gagagtgacagggctgtgcgctctggggcacctcatgcagacgggagtagggaggctgttttttgcgcgtgcatatggcggtggcgggtggggggaagggggagatcctgctgactggccgcccaagttggggggcgagctcggtggtgacgcgcggccctcacgtgancnngngctgcgagcgacgcagccttcggtgcagtcgtcactcgcgtctggctaccagctccccgctgccctgagctcggcgggctggcattcggcccggggaaaagcggagcaggtctgcgaggctaagtgtctccgcggcgcacctcgcggcgagaatccggaggagaaggagactgcaaggataggcccagaaaaacaaccagaaaaaaaaaatctcagtccatggccaaaaagtatttcaccagtgacaaaacgaacgaggattgggacgcaggccccttatgttgcacgacaagtgggacggaaggagcaaacgaaacccgggccccccttgtgtggaggccggaaacgggggcaacgcggctttggaacaacggcgggccgcaaacccccaaaggtcctcctttggcaacgcaggaacacaatctccggaaccnggtggcggcgggaacccaagggcctcttcctggccccggaaacactttttggccgcccccccttttaagattgtgttcgtccgcaatgtggggtggggccccaattttatctcgccgcaaaaagtataacggcgggcgaccaggaaatccgacatgtttggaacctttgggggcggaacattggcggagtcattggtggcacacgcaaatttggggacacgccaactttgacacattaagtttgggggaacaaccgacagtgttat

SEQ ID NO: 579494 - DNA, 334 bp, Homo sapiens
caaacacgcatctgtcagcttgtatcaccaaccacttggctgagtgcagtcagtgttcttcccagaccaggccagaaaaaaatgagatacgattctgagaaaagtcttaagactacaccagtcaggctgggcgcggtggctcacgcctgtaatccccgcactttgggaaggccaggcgagtgttcatgaggtccagagatccagaccctcctggcccacatggtgaaaccctgtctcttctaaaaataccaaaattagctgggcatggtggcgtgtgcctgtagtcccagctacttgggaggctgaggcaggagaatcacttgaacccgggagg

SEQ ID NO: 579495 - DNA, 469 bp, Homo sapiens
  misc_feature (63)..(63): n is a, c, g, or t
  misc_feature (469)..(469): n is a, c, g, or t
catagacccaaaggaagacaaatctgtaggtcgtgcacctggcccatatacaagaaaaatgangcaaacactgctgcgcacttttggataaggaatcactttcagagaatcctactttggagtacctgttctatagggagaactgagggaactgcacattcatccaatactcagatgtggatttcacgggtgctccagtgcaaagaaactacctgtctagcattccaggcattatggattatctgactccagaaaaagaacgcgtacaggaagatcttgggctgctgcaataccacatttgcggagaagaagaggtcgtcttccaagaagagcactccagactcagaactcagcaattgtaaaagatgatgaaggccaagaagattatcagtttgatgaactcaacacagagattctgaataacttagcagatcaggagttacaactcaatcatctaaagaactccatn

SEQ ID NO: 579496 - DNA, 935 bp, Homo sapiens
  misc_feature (169)..(169): n is a, c, g, or t
  misc_feature (171)..(172): n is a, c, g, or t
  misc_feature (174)..(174): n is a, c, g, or t
  misc_feature (455)..(455): n is a, c, g, or t
  misc_feature (488)..(488): n is a, c, g, or t
  misc_feature (892)..(892): n is a, c, g, or t
  misc_feature (898)..(898): n is a, c, g, or t
  misc_feature (900)..(902): n is a, c, g, or t
  misc_feature (909)..(910): n is a, c, g, or t
  misc_feature (932)..(932): n is a, c, g, or t
gagagtgacagggctgtgcgctctggggcacctcatgcagacgggagtagggaggctgttttttgcgcgtgcatatggcggtggcgggtggggggaagggggagatcctgctgactggccgcccaagttggggggcgagctcggtggtgacgcgcggccctcacgtgancnngngctgcgagcgacgcagccttcggtgcagtcgtcactcgcgtctggctaccagctccccgctgccctgagctcggcgggctggcattcggcccggggaaaagcggagcaggtaagggctccggggcccgtgagccccggccatgccagcagcggctgaccgacctcggcgacaggcgcagaacagcgcagggggtccccgccagctttctccacaccccaacatgcttgggaacacagaggcccccagggatggggaagcaggggcggctgggtttccaggngcggcagagccaccaagagcgatggaaacccanccccgagtccctgcaggaaaacagcgaacaccgcggggggctgggcgttcgagggtggggtgggggtggggggcgggagacgcggggcgctggcagcgaggggagcccgggctcggagcacggaaagggccgggcggcggcgggtcttcgctagcgttccgctgcagcagccccgacccccccagaaccgcgcaccccggctcgacatgcaggtctgcgaggctaagtgtctccgcggcgcacctcgcggcgagaatccggaggagaaggagactgcaaggataggcccaggaaaacgaagagatggagcagcctatgcagaatggagaggaagaccgccctttgggaggaggtgaaggcaccagcctgcaggaaatcgacggggacaggctcgccgacttgcncctaantnnncgatggnncatacccaataggcagatcaantga

SEQ ID NO: 579497 - DNA, 120 bp, Homo sapiens
cagcggtgttctcgcgcttccgaacgggggcttccggctcggctcgcggggacttttcacgaggtttggcgacgcgccgggccccaagatcaaggccgaagagatcgggagcccgcggga

SEQ ID NO: 579498 - DNA, 394 bp, Homo sapiens
gatgtacgagtgcaattctattatcatccctcctctcttgtgcctccttcacgttttatcaaattttcttacagttcgatgattgcccttctgttaaataaacttgaaatagagtttagcctttataggtatttaaaattcatcttgattttatttcatgataagttaaggttaacttataccttaaaatggaaatcaataatgatagcaatagtaagattttaaacaaaggtcacacataactatacagttaaaattatgactatatcaactggttttgagtatgcataaatcattcataccacagaattaaccacgcatgtatggaagagcatgttttattaaaacacctaattatttaatgttttaaataaaacagtttcattgtcacatt

SEQ ID NO: 579499 - DNA, 1168 bp, Homo sapiens
  misc_feature (46)..(46): n is a, c, g, or t
  misc_feature (53)..(53): n is a, c, g, or t
  misc_feature (1097)..(1099): n is a, c, g, or t
aagaaatattagggattcgcttcttaatgaaaaacaacacaaaagnctttgantataccaacctcagttattcaaagactccatcaccagagagaaagtcagattgtcactttggggagtcctctgccctgtatatatcccatattctttcagataagtgaaattagcatgcctgggtattacagttgtttatgccatactactataaatacttctaagagaagatttatcttgacttaagacttggaattttgttaaattaatgcacaaatgtatatgaccataacttaacgatgatttgtatattagctgagtcaagtggcatatataaaagcaatgaaggtttcttggacattctacactgaaatgtttagaatgtttaaaaaatttatctttctattttccaatagtgtggtaaatgtaaagtgcttagcactttgcgtgacacatggtagggcctcaaaaaatattagctattatcattataaaccagaggccctgttatgtggcagtttgtatctctctcttgactaatagaagcactttgcagatgatatgtcacacaatctagaaaggtagtgcttaaaggaatagacttatctccttattttacaaatgaggacattgaggccctaggaagttaaatgacttagacaaaatcacaaaggtaaagtggaaagcccaggagaaatcccctggccttcagcctgctgtgatttctaccaactatagattagaacttttcagacaagtggcacctgcaagtgtcttcgagcaaggcctcaacctccagcacagctcttgccacctgcaaacaccagggaagagcaagattgagttacatggcttggaagaagagtgaaacacctcgcaagacccagagaaaactccacatccatttgcagctaattttaaagcccaaataaaagcacaatctttggaatcactctatctttggtcaggcaaatgtttaaagagcaatattatatacatctagggtaagaacaattcattaatttagatgaatgaattgtcaaaaggttgttttgcctgtaaatgtgagtaaattgaatatcaagtcatcatgaaatgtaaannnctggcctcgttggcctcagcggtggagctctgcggccgtactcatactattagatatgatgatctgagc

SEQ ID NO: 579500 - DNA, 350 bp, Homo sapiens
  misc_feature (263)..(263): n is a, c, g, or t
  misc_feature (271)..(271): n is a, c, g, or t
  misc_feature (313)..(313): n is a, c, g, or t
aaggatcaattcccatcggaaagatgtcctttatatcctggaaaagagaaacctccctatcatccttccaaattttttgtcaaattcaaaaaaccgacttcctcagaaacagatgtcaatgactcaatatatgaagataacttcttgggagctccgttccgcagagttgaagatatatcatcaggccaacctgatatctggttttttccttacccagatagtatggaagatcttcaaattcgatattatcggaaagcaaaagnatttatgntcaagcgtgttcaacggagatgattgttttctaactcgcagnaaatccatgccacatttttggacatcctccaacggta

SEQ ID NO: 579501 - DNA, 1163 bp, Homo sapiens
  misc_feature (1092)..(1094): n is a, c, g, or t
ctcaccaagcttataagagagagtgcgggggagaggaaggggctagggtattacaacctcagttattcaaagactccatcaccagagagaaagtcagattgtcactttggggagtcctctgccctgtatatatcccatattctttcagataagtgaaattagcatgcctgggtattacagttgtttatgccatactactataaatacttctaagagaagatttatcttgacttaagacttggaattttgttaaattaatgcacaaatgtatatgaccataacttaacgatgatttgtatattagctgagtcaagtggcatatataaaagcaatgaaggtttcttggacattctacactgaaatgtttagaatgtttaaaaaatttatctttctattttccaatagtgtggtaaatgtaaagtgcttagcactttgcgtgacacatggtagggcctcaaaaaatattagctattatcattataaaccagaggccctgttatgtggcagtttgtatctctctcttgactaatagaagcactttgcagatgatatgtcacacaatctagaaaggtagtgcttaaaggaatagacttatctccttattttacaaatgaggacattgaggccctaggaagttaaatgacttagacaaaatcacaaaggtaaagtggaaagcccaggagaaatcccctggccttcagcctgctgtgatttctaccaactatagattagaacttttcagacaagtggcacctgcaagtgtcttcgagcaaggcctcaacctccagcacagctcttgccacctgcaaacaccagggaagagcaagattgagttacatggcttggaagaagagtgaaacacctcgcaagacccagagaaaactccacatccatttgcagctaattttaaagcccaaataaaagcacaatctttggaatcactctatctttggtcaggcaaatgtttaaagagcaatattatatacatctagggtaagaacaattcattaatttagatgaatgaattgtcaaaaggttgttttgcctgtaaatgtgagtaaattgaatatcaagtcatcatgaaatgtaaannnctggcctcgttggcctcagcggtggagctctgcggccgtactcatactattagatatgatgatctgagc

SEQ ID NO: 579502 - DNA, 1168 bp, Homo sapiens
  misc_feature (1097)..(1099): n is a, c, g, or t
atatgagaaatagtgagattttaatattctagtcagaagaggggcatgttagttattacaacctcagttattcaaagactccatcaccagagagaaagtcagattgtcactttggggagtcctctgccctgtatatatcccatattctttcagataagtgaaattagcatgcctgggtattacagttgtttatgccatactactataaatacttctaagagaagatttatcttgacttaagacttggaattttgttaaattaatgcacaaatgtatatgaccataacttaacgatgatttgtatattagctgagtcaagtggcatatataaaagcaatgaaggtttcttggacattctacactgaaatgtttagaatgtttaaaaaatttatctttctattttccaatagtgtggtaaatgtaaagtgcttagcactttgcgtgacacatggtagggcctcaaaaaatattagctattatcattataaaccagaggccctgttatgtggcagtttgtatctctctcttgactaatagaagcactttgcagatgatatgtcacacaatctagaaaggtagtgcttaaaggaatagacttatctccttattttacaaatgaggacattgaggccctaggaagttaaatgacttagacaaaatcacaaaggtaaagtggaaagcccaggagaaatcccctggccttcagcctgctgtgatttctaccaactatagattagaacttttcagacaagtggcacctgcaagtgtcttcgagcaaggcctcaacctccagcacagctcttgccacctgcaaacaccagggaagagcaagattgagttacatggcttggaagaagagtgaaacacctcgcaagacccagagaaaactccacatccatttgcagctaattttaaagcccaaataaaagcacaatctttggaatcactctatctttggtcaggcaaatgtttaaagagcaatattatatacatctagggtaagaacaattcattaatttagatgaatgaattgtcaaaaggttgttttgcctgtaaatgtgagtaaattgaatatcaagtcatcatgaaatgtaaannnctggcctcgttggcctcagcggtggagctctgcggccgtactcatactattagatatgatgatctgagc

SEQ ID NO: 579503 - DNA, 566 bp, Homo sapiens
  misc_feature (481)..(481): n is a, c, g, or t
agcagaccagtcacaagcaaaggtcatggcaacagttttgggatgctcaaggcattttgcttattgactttcgggagggccaaagataataaaatctgcttattatgagcgtgtttttgagaaagccaaaattttagcagaaaaatgcccaagaaaactgcgccagagtcctttcccactatgacaatcctcctgctgattactcacataacataaggaaaattctgcaaaagtttggatggaaaatcactaggcattcccctcatagacccaatttggctgtttctgacttccttttgttttgtaatctttaaaaaaaatagtgggcgctcattagtctgcaggtaagaatgtaaaaacgactacattggaatggttaaattcccaggattctcagttctttcaggatgaactaagtggctggtatcatcacttacaaaagtgtcttgaacttgatggaacttatgtggagaaataaagnttatattttttattcttggattttaattcctttggccaaaaacttttttgaagtcctctggtatgcatcatctcagatagttacc

SEQ ID NO: 579504 - DNA, 210 bp, Homo sapiens
agagcggaaaggtcctccatagtatgagagaaaccctccactaaacctggagtgactattaatggaatgccccccacccctcatccagcacactttggaggacccgtagtacattaaattctatgccccaaaaaggtgaaggagatcgaacccccccaggctggttttccaagcccaaccccactggcctcccctgacttttaccaaaaa

SEQ ID NO: 579505 - DNA, 728 bp, Homo sapiens
tctcggctcactgcaacctccctgcctgattctcctgcctcagcctgccgagtgcctgcgattgcaggcgcacgccgccacgcctgactggttttcgtattattttatggtggagacgtgggtttcgctgtgttggccgtggctggcctccagactcctaaccgcgatgtgatcctgccagcctacgtgcctccgtgaggtagcctgggattagcaagacggtagtctaggttacactacagtgctcaataggtgcccagtgctggatgtgcatgtgcgcgtgatctacggctcagctacaaccatccacctaaccagaccgcctagccttaggcctacccgaaatgtgcctgagatatgcacgcctactagcccgtgccgcgcaccccttctaaggaagctgacggagcgtctctagcctaggccgccacatacgtcgtgaggatgtataggacgcccctacttgcctgagctagccacagatcgtggaagagtgacggaagcgtctttgcgccggccgccatctccatctaggaagtgagcgagcgccttcttcccggacgccatcccgatctaggaagtgaggagcgtactcttgcccgagcgcccatcagtctgagcctgtgggcgagtgccttttggcccgccgccccgtctgcgatgttgaggagcgcctactgaccggtcgcgacccgtctgtgagtgaggagcgtatttgccagcgccca

SEQ ID NO: 579506 - DNA, 1168 bp, Homo sapiens
  misc_feature (1097)..(1099): n is a, c, g, or t
aaacagataattcctagtaaataaataccaaacacaacaacaagaacttaggtgttaacaacctcagttattcaaagactccatcaccagagagaaagtcagattgtcactttggggagtcctctgccctgtatatatcccatattctttcagataagtgaaattagcatgcctgggtattacagttgtttatgccatactactataaatacttctaagagaagatttatcttgacttaagacttggaattttgttaaattaatgcacaaatgtatatgaccataacttaacgatgatttgtatattagctgagtcaagtggcatatataaaagcaatgaaggtttcttggacattctacactgaaatgtttagaatgtttaaaaaatttatctttctattttccaatagtgtggtaaatgtaaagtgcttagcactttgcgtgacacatggtagggcctcaaaaaatattagctattatcattataaaccagaggccctgttatgtggcagtttgtatctctctcttgactaatagaagcactttgcagatgatatgtcacacaatctagaaaggtagtgcttaaaggaatagacttatctccttattttacaaatgaggacattgaggccctaggaagttaaatgacttagacaaaatcacaaaggtaaagtggaaagcccaggagaaatcccctggccttcagcctgctgtgatttctaccaactatagattagaacttttcagacaagtggcacctgcaagtgtcttcgagcaaggcctcaacctccagcacagctcttgccacctgcaaacaccagggaagagcaagattgagttacatggcttggaagaagagtgaaacacctcgcaagacccagagaaaactccacatccatttgcagctaattttaaagcccaaataaaagcacaatctttggaatcactctatctttggtcaggcaaatgtttaaagagcaatattatatacatctagggtaagaacaattcattaatttagatgaatgaattgtcaaaaggttgttttgcctgtaaatgtgagtaaattgaatatcaagtcatcatgaaatgtaaannnctggcctcgttggcctcagcggtggagctctgcggccgtactcatactattagatatgatgatctgagc

SEQ ID NO: 579507 - DNA, 549 bp, Homo sapiens
  misc_feature (9)..(9): n is a, c, g, or t
gtcgactanaagacgacagaaggggagggaaagcattaggagatatacctaatgtaaatggcaagttaatgggtgcagcaaaccaacatggcacatgtatacatatgtaacaagcctgcatgttgtgcacatgtaccctagaacttaaagtataataataataaaaaagaaattaaaaggggtaagaaaaaaaaagtttaggacaacatgctcaccaacaaatttataataggactatcagatggagaggagagagagaaaggagcagaagtatttgaagaaagaatggctgaaaatgtctcaaatttgatgaaaaacattaatctacacatccaagaaactcatccaagaaactcaacaaactgaaagtaggataaccacagatatccatacccagacatatcatagtcaaactgtcaaaagccaaaggtgatgaacaatctcgtgctgaaataaatattgaatggcattttttttcttttatttctcacgtttcagtgttctggcttctatcttttgggggccttaggcaattcaccagcttctggg

SEQ ID NO: 579508 - DNA, 806 bp, Homo sapiens
atttctgtctcttgcttcaacattgtatgagaatggaaacaaaatctcgttattactcttcatttcacactacttccgaattgtcccttcgcgtatatcctactctcgattttgtcaagcactcacgtgtgatccattcattctcgagtgcatcattatagactttttaggatgaccctgtccatacatcggattttttgtaggttagcttccattcttcgattcagtacaatccattgagccttccgagatttcgtcgagaattatttcaatccggaagattggggtgtcaagacccgtgaacatatcggatcgaattgggtatctgacagggactactagaactaactcctctactaggagccttcgtaattgtcgtgagacagtgcattgaatgtaggcattcattggacacaaggcatgttgcatgctcaatttcatttcacggtgaaaacctggcacagtaaggaggagaggcacgggggggcttaaagtaaaacgtgctatctaggaaagaaatagcttaaaaaccaggacgatggttcgagactgacagacttctacgttactcgatggggcatctaactaagggccacgtgtggatatgattgcaagatgaggagttaaaaaacgcccattatgccagtagaaagtgcaaggcgaaatgggttcgtgcattgaaaatagccttgatccaagtgccccattttagcattctatccaagccccggggattggtgtcctggtcggagtcgactcatctctgatgatcttccattggcagatcactattgccatagaatgag

SEQ ID NO: 579509 - DNA, 1173 bp, Homo sapiens
  misc_feature (1102)..(1104): n is a, c, g, or t
acctcgccgcatctcagagatgatacttgtatcgagagacgaacagtgccttagatgttaacccaacctcagttattcaaagactccatcaccagagagaaagtcagattgtcactttggggagtcctctgccctgtatatatcccatattctttcagataagtgaaattagcatgcctgggtattacagttgtttatgccatactactataaatacttctaagagaagatttatcttgacttaagacttggaattttgttaaattaatgcacaaatgtatatgaccataacttaacgatgatttgtatattagctgagtcaagtggcatatataaaagcaatgaaggtttcttggacattctacactgaaatgtttagaatgtttaaaaaatttatctttctattttccaatagtgtggtaaatgtaaagtgcttagcactttgcgtgacacatggtagggcctcaaaaaatattagctattatcattataaaccagaggccctgttatgtggcagtttgtatctctctcttgactaatagaagcactttgcagatgatatgtcacacaatctagaaaggtagtgcttaaaggaatagacttatctccttattttacaaatgaggacattgaggccctaggaagttaaatgacttagacaaaatcacaaaggtaaagtggaaagcccaggagaaatcccctggccttcagcctgctgtgatttctaccaactatagattagaacttttcagacaagtggcacctgcaagtgtcttcgagcaaggcctcaacctccagcacagctcttgccacctgcaaacaccagggaagagcaagattgagttacatggcttggaagaagagtgaaacacctcgcaagacccagagaaaactccacatccatttgcagctaattttaaagcccaaataaaagcacaatctttggaatcactctatctttggtcaggcaaatgtttaaagagcaatattatatacatctagggtaagaacaattcattaatttagatgaatgaattgtcaaaaggttgttttgcctgtaaatgtgagtaaattgaatatcaagtcatcatgaaatgtaaannnctggcctcgttggcctcagcggtggagctctgcggccgtactcatactattagatatgatgatctgagc

SEQ ID NO: 579510 - DNA, 997 bp, Homo sapiens
  misc_feature (46)..(46): n is a, c, g, or t
  misc_feature (53)..(53): n is a, c, g, or t
aagaaatattagggattcgcttcttaatgaaaaacaacacaaaagnctttgantataccaacctcagttattcaaagactccatcaccagagagaaagtcagattgtcactttggggagtcctctgccctgtatatatcccatattctttcagataagtgaaattagcatgcctgggtattacagttgtttatgccatactactataaatacttctaagagaagatttatcttgacttaagacttggaattttgttaaattaatgcacaaatgtatatgaccataacttaacgatgatttgtatattagctgagtcaagtggcatatataaaagcaatgaaggtttcttggacattctacactgaaatgtttagaatgtttaaaaaatttatctttctattttccaatagtgtggtaaatgtaaagtgcttagcactttgcgtgacacatggtagggcctcaaaaaatattagctattatcattataaaccagaggccctgttatgtggcagtttgtatctctctcttgactaatagaagcactttgcagatgatatgtcacacaatctagaaaggtagtgcttaaaggaatagacttatctccttattttacaaatgaggacattgaggccctaggaagttaaatgacttagacaaaatcacaaaggtaaagtggaaagcccaggagaaatcccctggccttcagcctgctgtgatttctaccaactatagattagaacttttcagacaagtggcacctgcaagtgtcttcgagcaaggcctcaacctccagcacagctcttgccacctgcaaacaccagggaagagcaagattgagttacatggcttggaagaagagtgaaacacctcgcaagacccagagaaaactccacatccatttgcagctaattttaaagcccaaataaaactggcctcgttggcctcagcggtggagctctgcggccgtactcatactattagatatgatgatctgagc

SEQ ID NO: 579511 - DNA, 173 bp, Homo sapiens
cccgttatgagacagaagggaggaaattagaaaagaattagaggctgggcatggtggctcacacctgtaatcccagcactttgggaggccaaagtggtggatcacctgaggtcaggagttcgagaccagcctggccaatgtggtgaaaccccatctctactaaaaatacaaaa

SEQ ID NO: 579512 - DNA, 1021 bp, Homo sapiens
ggtgccagaaagcgcaagcagttgctaacccagtgggacaggcggattggaaaagcgggaaggtcctggcccagagcagtgttagacacttccctctgtgatgcatgaaaatctggggtgtctgcattgctgatggcctggtttggtgtcctgaactgtgtgcaggccgaatttcttcacctctattggtgcacatgactgatcctgatttactgccaagagaatagagctggtgtcgaagtctctgaagagagctatcatccttgtggaggaagtccaagaccttttccaagattcaaggagctggggccaacaaagatggaacggccttgactagtcaagtcagctgctgatgctgagggctacctggctcaccctgtgacatgcctactagaagctggtgacagacgagtaaacactagactgggctgctggctggacgtgaccttgtcctgcaggactcagcgtgcatggtgttatctggcaacctctctgtgcagcggaagttcttccccaagctgagttcaggacgagataggagctgtcaaaggcctgtatgagacttcagcgacgacgatacagggctggacccaggcacaagttccagaggggaacttccaggaaccaagtaccaggcaatgctgagtgtgggatgactgctttggggaatgggccgctcggggcctaccaagtgaagggggacctatcaaccatacgggtggttgtgggattggacccacggttgctaacaagcaatttgaggccaggtgaggtaaggccaccaccaaccaaatcaccggtttgtcggaataaactccaataatctcgctttccagttgggttgcattggcaccgggccctggagacctcaaccgacgactgtcttcccttgaccaaccaaaaaagttgagggaactgcggaattggaccgcttaaggaatgagcttgagaaaaaaatcccgcctttggcggcaacagaaacaggacgaatcacccataaagagacggcacagagatacgc

SEQ ID NO: 579513 - DNA, 1001 bp, Homo sapiens
  misc_feature (46)..(46): n is a, c, g, or t
  misc_feature (53)..(53): n is a, c, g, or t
aagaaatattagggattcgcttcttaatgaaaaacaacacaaaagnctttgantataccaacctcagttattcaaagactccatcaccagagagaaagtcagattgtcactttggggagtcctctgccctgtatatatcccatattctttcagataagtgaaattagcatgcctgggtattacagttgtttatgccatactactataaatacttctaagagaagatttatcttgacttaagacttggaattttgttaaattaatgcacaaatgtatatgaccataacttaacgatgatttgtatattagctgagtcaagtggcatatataaaagcaatgaaggtttcttggacattctacactgaaatgtttagaatgtttaaaaaatttatctttctattttccaatagtgtggtaaatgtaaagtgcttagcactttgcgtgacacatggtagggcctcaaaaaatattagctattatcattataaaccagaggccctgttatgtggcagtttgtatctctctcttgactaatagaagcactttgcagatgatatgtcacacaatctagaaaggtagtgcttaaaggaatagacttatctccttattttacaaatgaggacattgaggccctaggaagttaaatgacttagacaaaatcacaaaggtaaagtggaaagcccaggagaaatcccctggccttcagcctgctgtgatttctaccaactatagattagaacttttcagacaagtggcacctgcaagtgtcttcgagcaaggcctcaacctccagcacagctcttgccacctgcaaacaccagggaagagcaagattgagttacatggcttggaagaagagtgaaacacctcgcaagacccagagaaaactccacatccatttgcagctaattttaaagcccaaataaaagcgtggcctcgttggcctcagcggggagtttgcggccgatattttcacgccaacaatatcttgcgcgcactct

SEQ ID NO: 579514 - DNA, 1027 bp, Homo sapiens
cggctccggtcggagacaatcgcgctgagcgggcgccgcagcgggagcgggagccggagctgcgaggcgcggcgcagagctggggctgcgcggggccgggcgagcgggaccaggcgggagccatggaccgctagggcccggcctagccccgcgatgccgccggcgagtggccccagcgtcctcgcgcggctgttgccggctgctggggcttgctgctcggcagcgcctcccgggctcccgggcaagtcgccgcctggatgccccccagcccgcaggagatcctgatcaagggtgcaggtgtatgtgaggcgggggatgctggtgcccctgtggcccggggcctcagtggatgtgtttgggaaccggactctgctggcagctggcaccaacagactcagaggggttgtggccacccttgcccctcagttatcgctttgggcaccttgggtgctggtcactggctgcccgccctgggcttccttcaccgaaagtcctgtgccctgggccgtgttgaccaaggcttgccctttgtattgcgtctgtcgaggcctctaccttgctccctggagcggccgggcccacgctcatcctcttgtgagggacccttggtgccgcatttcttccttagggctctcccggttgccccgctcccaggccctttggttgccatgttccagcgccgggcttgccggcctgccttgtcagctcccacgtacaggccaggctcttggccgtcaccttaccgccttggccaggcacccgagcagcggaaattgcggggcttttcccctgcctttccttggggcaccttgatggcctcccagctcagggcacatggcttccttggcttggagcttgaattgccccgtgaggtgcttttgaaccggttgcaacttgctgacaaggtaaatggggaccagaagggtgccggctactcagtgcccccaattcaactgtacctggccggtgccctacggaaaactctgcctacaaggtgtggcacaagattccagcctgcaaattgacc

SEQ ID NO: 579515 - DNA, 267 bp, Homo sapiens
  misc_feature (48)..(48): n is a, c, g, or t
  misc_feature (55)..(55): n is a, c, g, or t
  misc_feature (96)..(96): n is a, c, g, or t
  misc_feature (181)..(181): n is a, c, g, or t
  misc_feature (227)..(227): n is a, c, g, or t
  misc_feature (265)..(265): n is a, c, g, or t
gttggatatttagaggacattatcatggatgacgagttccagttattncagaganatttcatggacaagtactacctggagtttgaagacacagangagaataaactcatctacacacctatttttgatgaatacatttctttggtagaaaatacattgaagacagctgctgcagcggatncctgagttcaacatggcagccttcaccacaacattacagcaccatnagggtgaagtggctggtgacatattccgacatgctgcnca

SEQ ID NO: 579516 - DNA, 658 bp, Homo sapiens
gcatatgaatgatctgctgcagtgctctgagccctaggattcatctttcttttcaccgctaggtggcctgactggccttgtattagccaactcatcccttgacactcgtgctacacgacacgtactacgttgtagctcacttcccgctatgtcctatccataggagctgtatttgccatcataggaggcttcattcactgatttcccctattctcaggcgtacacccttagacccaaacctacgcccaaatcccatttcgactatcatattcatcggccgtaaatctaacatttctttccccaccaacacatttttcggcctaatccgggatgccccgagcgttatactcggaactatccccgattgcatacacccaccactggaacactcctatcatctgtaggctcaattcatttcttctatacacgcccgtatatattaataattttcatgaatttgagaagccttcgcttcgaagcgacaaagtcctatatagtagaagagaccctccataaacctggagtgactatatggatgccccccaccctaccacacattcgaagaacccgtatacattaaatttagaccaaaaaggaaggaatcgaacccccccaagctggtttcaagccaaccccatggcctccatgactttttcca

SEQ ID NO: 579517 - DNA, 187 bp, Homo sapiens
cgctcggccctcacatttactattgatgatggctgtgtgcgtccaggtgtctggtgcgtgacagtggccatggcagacgcctgattaaaccatagcccagtgtaaagggcagggcacacgcttggagtccaagcatttgctgatgcattactcattattcccaaggttcttgctcagcaactctggt

SEQ ID NO: 579518 - DNA, 585 bp, Homo sapiens
  misc_feature (59)..(59): n is a, c, g, or t
  misc_feature (190)..(190): n is a, c, g, or t
  misc_feature (210)..(210): n is a, c, g, or t
  misc_feature (212)..(214): n is a, c, g, or t
  misc_feature (230)..(230): n is a, c, g, or t
  misc_feature (234)..(234): n is a, c, g, or t
  misc_feature (236)..(236): n is a, c, g, or t
  misc_feature (255)..(255): n is a, c, g, or t
  misc_feature (260)..(260): n is a, c, g, or t
  misc_feature (290)..(290): n is a, c, g, or t
  misc_feature (299)..(301): n is a, c, g, or t
  misc_feature (382)..(382): n is a, c, g, or t
  misc_feature (384)..(384): n is a, c, g, or t
  misc_feature (448)..(448): n is a, c, g, or t
  misc_feature (456)..(458): n is a, c, g, or t
  misc_feature (462)..(462): n is a, c, g, or t
  misc_feature (464)..(464): n is a, c, g, or t
  misc_feature (467)..(467): n is a, c, g, or t
  misc_feature (471)..(471): n is a, c, g, or t
  misc_feature (476)..(476): n is a, c, g, or t
  misc_feature (480)..(480): n is a, c, g, or t
  misc_feature (482)..(482): n is a, c, g, or t
  misc_feature (497)..(497): n is a, c, g, or t
  misc_feature (500)..(500): n is a, c, g, or t
  misc_feature (503)..(503): n is a, c, g, or t
  misc_feature (517)..(517): n is a, c, g, or t
  misc_feature (550)..(552): n is a, c, g, or t
  misc_feature (579)..(581): n is a, c, g, or t
  misc_feature (583)..(583): n is a, c, g, or t
tttattaatattttaaaatatgaaaactgtaaaacatagtttttttgttaacacctgangactgttcaagtaggtacagcatcttcatacaaacaatttgaaagaagaccaagtttaagtaagaatcttatgacatgtaaggaataacattgatgaagctattctttaaatagttgcattcatgtctaangtccatttcgctttctaaancnnnaaggtacattcttgcntctngngaccattttcttgacattncagcnaatcgctattggtgatagccccacttctcntagctcgtnnnccttatatttgttacacaatgtaataccaaagttataactttatcccaaaataattgtgttgaccatgtttcccttgcccntnctccctttcccgatccccccccccccgcttcgtctgtttttttgtttctttctttgtgttgctngttttttnnntctntnttncgcntgttntttngnggcgttgcgttgggnggnggncttccctgtttggnggccaatcttcagattgtttcttgtcctctagnnngttagttgagaggtactattgatggcnnntntt

SEQ ID NO: 579519 - DNA, 197 bp, Homo sapiens
tggagaagggagtctggccctgtggcctaggcgggagtgcaagggcgcaatctgggtccatggcaccctccacctccggggttcaagcaattctcatgcctcagcctcgcgagtaagctgggaattcacgggtggccccaccaccggtaaatccaccaccggccgggctaaattttgggtaattaggcaacataagg

SEQ ID NO: 579520 - DNA, 98 bp, Homo sapiens
gaaaagcatttgtagttaagatgaaaagttgtctatttatcagatccaggcgcctcaacttcaccggatcacctcgcactcgtctttggatctcgtgt

SEQ ID NO: 579521 - DNA, 116 bp, Homo sapiens
gaggagacactccagagctgcccaggaaggggtttgaacggctgtataacgaccccctaactcccctatccatgcactcacgttctcttacgctgggtccatccctctctggctgt

SEQ ID NO: 579522 - DNA, 566 bp, Homo sapiens
ccccccgtgtggggtttttccctttttaacacaaggggcctcttgtggtgtttccgagacgggggggtagaatgtttctccccccccagagggaatgggggtttttttgggcccccctttcccccttgggggtgggggtggggacccggccggtttttttttggggggggcctctcttcccccccccaatggggggggtgggtgtggtaaaccccccctataaaggaaggcgggggcgggggttttctcctaaaaaatttgggacccgtttttccccttggggggggttttccccgggggtgccccccccccccccttttttgggggaccccccccctttctatgggggtttttcccccgggggccccccctttggggggggccttggaaaaataaaaaaaggggggggggggtttcccctttttgggccccaaaaaaccccccccccccccccgggtgggggggaattccccccctgggggggggggggggccccccccccccccccccccccccggggggggggtttttggggccaaaaattttttttttccccccccccccca

SEQ ID NO: 579523 - DNA, 305 bp, Homo sapiens
actctacgagtatccccgcctggagctcaggatcctcagagacatcttaacgcttcaacatctgccgccaagtttccatggtagttacaggtgacagcaggtacagatcgaagtctccacattaacaaccctccattaacccgtggactcttctgaaaggcctccatcaaacactgccggagtccgtcaacaggagtttgtttggttttcaatagcagtgttttcgtttttcgcactaccgtcctttgttcctccctgtccgtctggagagagccgtcacatcttgggatgcttgttctggatct

SEQ ID NO: 579524 - DNA, 848 bp, Homo sapiens
gcttcgctcgccgctcgcgcgaagatagaagcgctgcgggaagcagggacagtggagagggcgctgcgctcgggctacccaatgcgtggactatctgccgccgctgttcgtgcaatatgctggagctccagaacagctaaacggagtcgccacaccactgttgtgtgctggatcgcagcgctggcctttccttatgaagaagaacaccaaacttggattctcactgtgcattttatcttcagacggctcctattttaatcctctcgtcaaaacctgacgggatctgcagggaactcgtgtgacctaataattgtaaaagacgtcactaaatgtggtggcaaatcttccaaaagactacatgataacctccaaaatatggtccccgggatggatgttttgccaagtcattgttggataagcgagatggtagtacaatttgtcagacaggtttgattgatcttctgtacaagtttttcaaatatttctgaaggcttgagtaattattccatcatagaccaaattgtgactatgtggatgaccttgttggagtgcgtgaaaagaaaactcatctaaggatctcacacaaaatccattcaagaagccagaacccaggctcttttactcctgaagaaattctttaggaactttttaatagatcccatggttggctttcaaggacttggtagtggctctgaactacgtgcttgtggggcttcctcaccattagtctgggaaagatccagagtcggggtcaaaaccatttatgtacccgtgtgagcagcccttgaagaaggggcagatgaagggaaaacccggaaccgcaaggggccgcagcccagtccaaaggg

SEQ ID NO: 579525 - DNA, 205 bp, Homo sapiens
tgccctttagattctaccccaaattgttaccattaattaaacacattttatttttaaaataactctatctgattgggggctcttctctgtcaatctggttttctcttataaaacaagtcaactctcaacagcctacgttattaagggaaaatgtaattaaatgcagaagtagtctatttgccaacaggtccttccaggttcttcc

SEQ ID NO: 579526 - DNA, 682 bp, Homo sapiens
acccccccctgcacctttacaagtccacgggcaagaagtcccaggaatcccgggatttgattaagttgtggaccagcagccttattgacctttccagactttccaccccaaatcacaagaatatcatttttttagcaccacaccaccacgatttcaaaaattgcccacaactgggaagtaaagctctcctcagcaaatgtaaaagaacagaatttatacaaacttatctctcagaccacagtgcaatcaaactagaactcaggattaagaatctcactcaaagccgctcaactacatggaaactgaacaacctgctcctgaatgactactgggtacataacgaaatgaaggcagaaataaagatgttctttgaaaccaacgagaacaaagacaccacataccagaatctctgggacgcattcaaagcagtgtgtagagggaaatttatagcactaaatgcctacaagagaaagcaggaaagatccaaaattgacaccctaacatcacaattaaaagaactagaaaagcaagagcaaacaattcaaaagctaccagaaggcaagaaataactaaaatcagagcagaactgaaggaaatagagacacaaaaaacccttcaaaaaatcaatgaatccaggagctggttttttgaaaggatcaacaaattgatagaccgctagcaa

SEQ ID NO: 579527 - DNA, 273 bp, Homo sapiens
ggatgatagcccagagcgcgggccatgcgtgaagcgtacgtgcccattcccgtgctggttacgcgcaccagcagcgtgccgttttcactgcgggtgcccgcgaacaccgggctgcccatgcctttaagcttcgtgtcgcttcgagtccgagaacgattcggccacgaagccggagccgaaagttaccacgccgtcggccgggaacactccctggggtggcacgcggcaaatgtgtccttcccgtaacgtctcggtgggaacgaggccttcgat

SEQ ID NO: 579528 - DNA, 402 bp, Homo sapiens
  misc_feature (119)..(119): n is a, c, g, or t
  misc_feature (290)..(290): n is a, c, g, or t
  misc_feature (301)..(301): n is a, c, g, or t
  misc_feature (323)..(323): n is a, c, g, or t
  misc_feature (340)..(340): n is a, c, g, or t
cacgaggccgtggctgtccccacaggcagccaagcaggcgggcgccgggttacccgatgtcagggtcacgatccaggagacgatgccgaccgatatcaggtcctggtgggagcatcaanagaagatgccgttggccggactgttcgtcggcaaccatcagcgaaagactgctgcgatcgaggaagtcggcatcatgagcggcttgcggttcgtcccgcaaccgtggcggggacgcgcactggtggtgctgagccacctcaacaaggatgatccccggctgtggccgcggntcatcaccggngacttgaccatccgccacctgnagtgcacccacatgtcnatcgtgcgcgagccgcatatcggcgccgtggccgccatgatcgacgaggtgctgggccacta

SEQ ID NO: 579529 - DNA, 541 bp, Homo sapiens
gcatcacattcaaatgtagaagggcggtgagcacagcgaccccatgcatctccagagaccctgccccatcactctgactcttactagcgtggtgtgcgaccctaggcaagtcatttgatttctctagactcttagttgtttaatgtatcactatgcctgccattgttcacttgctagcagataggcttgggtccctccagcttcgggatctgagaaccggccccctccccgggttaccatgccggtcagcctctgaggtcagggggatgccatctttatctggtcgttgcttgagctgtgttgtgtaccacatccaggctgctgtgctccggccacatccatggaatcaatactcagatcgggaaggcaggaaaagcaggctaaggtactgggacccgagggacaaggggatgtgggttctggaggggaaggggatcctgggccgtgtcttggggccgaacgggatgcggagcaggaggttgtcctggggtccagtccagaagctacgggtgtgaggatgctgaagtctggcagccacatg

SEQ ID NO: 579530 - DNA, 277 bp, Homo sapiens
atttgaggaattccccatgaccccaacgacctacaaaggctctgtggacaaccagacagacagtgggatggtgctggcctcggaggagtttgatcagatagaaagcaggcattgacaagaaagcggctttaggtatctgaagcagatagagagaaggccccttacttcagcattttcttttctgcacttataagatagatcaaagactttaaaactttcgatatatgctctactggtatttactacaaacttcaaaagaggaaccaggatggacaac

SEQ ID NO: 579531 - DNA, 309 bp, Homo sapiens
cgggtcataattgaaaaacttttttcaaaggggtttcctagaaactcctaccagcagtaaccaactcaaggaaaactgttatagattgaagatcatttaaactacttgggaaagaaagactcccatattttttccttcctttgctttgtttttggggactcattgtcaaggatgaaatgttccatttagcttttaagtgaaagcctttgggcattcattcaattttttttaaacaaacttgactccttttgttttttgtcccaagccccttgtcatgtcccatcaataaagtcccctgggttcccccca

SEQ ID NO: 579532 - DNA, 127 bp, Homo sapiens
ggagaacatcatgtgtgtcaacaagacgggcaccaggatcaagctcatcgactttggtctggccaggaggctggagaacgcggggtctctgaaggtcctctttggcaccccaggtcctcttctctcc

SEQ ID NO: 579533 - DNA, 195 bp, Homo sapiens
gccccagtaaattaaagcattacccaggatttatcaggattttttaaacaccccggccctttttaaaatctttggttaggcagtcaaatttttgtctggaagattaaaaggttttacggccctccctttttggacaaatctggattggattaatttttggaagcaatttttcaaatatttaaattatcccggcca

SEQ ID NO: 579534 - DNA, 147 bp, Homo sapiens
tcgaatcgacggtttctctcgtactgtagcaggattaccatggcaacaacaccacgccctggtaatttttgtatttttagtagaaacagagtttcaccgtattggtcaggctggtctcgaactcccaacctcaaagtgatccacctg

SEQ ID NO: 579535 - DNA, 9046 bp, Homo sapiens
ccttgtttgtgtgctaggctgggggggagagagggcgagagagagcgggcgagagtgggcaagcaggacgccgggctgagtgctaactgcgggacgcagagagtgcggaggggagtcgggtcggagagaggcggcaggggccagaacagtggcagggggcccggggcgcacgggctgaggcgacccccagccccctcccgtccgcacacacccccaccgcggtccagcagccgggccggcgtcgacgctaggggggaccattacataacccgcgccccggccgtcttctcccgccgccgcggcgcccgaactgagcccggggcgggcgctccagcactggccgccggcgtggggcgtagcagcggccgtattattatttcgcggaaaggaaggcgaaggaggggagcgccggcgcgaggaggggccgcctgcgcccgccgccggagcggggcctcctcggtgggctccgcgtcggcgcgggcgtgcgggcggcgctgctcggcccggccccctcggccctctggtccggccagctccgctcccggcgtccttgccgcgcctccgccggccgccgcgcgatgtgaggcggcggcgccagcctggctctcggctcgggcgagttctctgcggccattaggggccggtgcggcggcggcgcggagcgcggcggcaggaggagggttcggagggtgggggcgcaggcccgggagggggcaccgggaggaggtgagtgtctcttgtcgcctcctcctctccccccttttcgcccccgcctccttgtggcgatgagaaggaggaggacagcgccgaggaggaagaggttgatggcggcggcggagctccgagagacctcggctgggcaggggccggccgtggcgggccggggactgcgcctctagagccgcgagttctcgggaattcgccgcagcggaccggcctcggcgaatttgtgctcttgtgccctcctccgggcttgggccaggccggcccctcgcacttgcccttaccttttctatcgagtccgcatccctctccagccactgcgacccggcgaagagaaaaaggaacttcccccaccccctcgggtgccgtcggagccccccagcccacccctgggtgcggcgcggggaccccgggccgaagaagagatttcctgaggattctggttttcctcgcttgtatctccgaaagaattaaaaatggccgagaatgtggtggaaccggggccgccttcagccaagcggcctaaactctcatctccggccctctcggcgtccgccagcgatggcacagattttggctctctatttgacttggagcacgacttaccagatgaattaatcaactctacagaattgggactaaccaatggtggtgatattaatcagcttcagacaagtcttggcatggtacaagatgcagcttctaaacataaacagctgtcagaattgctgcgatctggtagttcccctaacctcaatatgggagttggtggcccaggtcaagtcatggccagccaggcccaacagagcagtcctggattaggtttgataaatagcatggtcaaaagcccaatgacacaggcaggcttgacttctcccaacatggggatgggcactagtggaccaaatcagggtcctacgcagtcaacaggtatgatgaacagtccagtaaatcagcctgccatgggaatgaacacagggacgaatgcgggcatgaatcctggaatgttggctgcaggcaatggacaagggataatgcctaatcaagtcatgaacggttcaattggagcaggccgagggcgacaggatatgcagtacccaaacccaggcatgggaagtgctggcaacttactgactgagcctcttcagcagggctctccccagatgggaggacaaacaggattgagaggcccccagcctcttaagatgggaatgatgaacaaccccaatccttatggttcaccatatactcagaatcctggacagcagattggagccagtggccttggtctccagattcagacaaaaactgtactatcaaataacttatctccatttgctatggacaaaaaggcagttcctggtggaggaatgcccaacatgggtcaacagccagccccgcaggtccagcagccaggtctggtgactccagttgcccaagggatgggttctggagcacatacagctgatccagagaagcgcaagctcatccagcagcagcttgttctccttttgcatgctcacaagtgccagcgccgggaacaggccaatggggaagtgaggcagtgcaaccttccccactgtcgcacaatgaagaatgtcctaaaccacatgacacactgccagtcaggcaagtcttgccaagtggcacactgtgcatcttctcgacaaatcatttcacactggaagaattgtacaagacatgattgtcctgtgtgtctccccctcaaaaatgctggtgataagagaaatcaacagccaattttgactggagcacccgttggacttggaaatcctagctctctaggggtgggtcaacagtctgcccccaacctaagcactgttagtcagattgatcccagctccatagaaagagcctatgcagctcttggactaccctatcaagtaaatcagatgccgacacaaccccaggtgcaagcaaagaaccagcagaatcagcagcctgggcagtctccccaaggcatgcggcccatgagcaacatgagtgctagtcctatgggagtaaatggaggtgtaggagttcaaacgccgagtcttctttctgactcaatgttgcattcagccataaattctcaaaacccaatgatgagtgaaaatgccagtgtgccctccctgggtcctatgccaacagcagctcaaccatccactactggaattcggaaacagtggcacgaagatattactcaggatcttcgaaatcatcttgttcacaaactcgtccaagccatatttcctacgccggatcctgctgctttaaaagacagacggatggaaaacctagttgcatatgctcggaaagttgaaggggacatgtatgaatctgcaaacaatcgagcggaatactaccaccttctagctgagaaaatctataagatccagaaagaactagaagaaaaacgaaggaccagactacagaagcagaacatgctaccaaatgctgcaggcatggttccagtttccatgaatccagggcctaacatgggacagccgcaaccaggaatgacttctaatggccctctacctgacccaagtatgatccgtggcagtgtgccaaaccagatgatgcctcgaataactccacaatctggtttgaatcaatttggccagatgagcatggcccagccccctattgtaccccggcaaacccctcctcttcagcaccatggacagttggctcaacctggagctctcaacccgcctatgggctatgggcctcgtatgcaacagccttccaaccagggccagttccttcctcagactcagttcccatcacagggaatgaatgtaacaaatatccctttggctccgtccagcggtcaagctccagtgtctcaagcacaaatgtctagttcttcctgcccggtgaactctcctataatgcctccagggtctcaggggagccacattcactgtccccagcttcctcaaccagctcttcatcagaattcaccctcgcctgtacctagtcgtacccccacccctcaccatactcccccaagcataggggctcagcagccaccagcaacaacaattccagcccctgttcctacaccaccagccatgccacctgggccacagtcccaggctctacatccccctccaaggcagacacctacaccaccaacaacacaacttccccaacaagtgcagccttcacttcctgctgcaccttctgctgaccagccccagcagcagcctcgctcacagcagagcacagcagcgtctgttcctaccccaaacgcaccgctgcttcctccgcagcctgcaactccactttcccagccagctgtaagcattgaaggacaggtatcaaatcctccatctactagtagcacagaagtgaattctcaggccattgctgagaagcagccttcccaggaagtgaagatggaggccaaaatggaagtggatcaaccagaaccagcagatacgcagccggaggatatttcagagtctaaagtggaagactgtaaaatggaatctaccgaaacagaagagagaagcactgagttaaaaactgaaataaaagaggaggaagaccagccaagtacttcagctacccagtcatctccggctccaggacagtcaaagaaaaagattttcaaaccagaagaactacgacaggcactgatgccaacattggaggcactttaccgtcaggatccagaatcccttccctttcgtcaacctgtggaccctcagcttttaggaatccctgattactttgatattgtgaagagccccatggatctttctaccattaagaggaagttagacactggacagtatcaggagccctggcagtatgtcgatgatatttggcttatgttcaataatgcctggttatataaccggaaaacatcacgggtatacaaatactgctccaagctctctgaggtctttgaacaagaaattgacccagtgatgcaaagccttggatactgttgtggcagaaagttggagttctctccacagacactgtgttgctacggcaaacagttgtgcacaatacctcgtgatgccacttattacagttaccagaacaggtatcatttctgtgagaagtgtttcaatgagatccaaggggagagcgtttctttgggggatgacccttcccagcctcaaactacaataaataaagaacaattttccaagagaaaaaatgacacactggatcctgaactgtttgttgaatgtacagagtgcggaagaaagatgcatcagatctgtgtccttcaccatgagatcatctggcctgctggattcgtctgtgatggctgtttaaagaaaagtgcacgaactaggaaagaaaataagttttctgctaaaaggttgccatctaccagacttggcacctttctagagaatcgtgtgaatgactttctgaggcgacagaatcaccctgagtcaggagaggtcactgttagagtagttcatgcttctgacaaaaccgtggaagtaaaaccaggcatgaaagcaaggtttgtggacagtggagagatggcagaatcctttccataccgaaccaaagccctctttgcctttgaagaaattgatggtgttgacctgtgcttctttggcatgcatgttcaagagtatggctctgactgccctccacccaaccagaggagagtatacatatcttacctcgatagtgttcatttcttccgtcctaaatgcttgaggactgcagtctatcatgaaatcctaattggatatttagaatatgtcaagaaattaggttacacaacagggcatatttgggcatgtccaccaagtgagggagatgattatatcttccattgccatcctcctgaccagaagatacccaagcccaagcgactgcaggaatggtacaaaaaaatgcttgacaaggctgtatcagagcgtattgtccatgactacaaggatatttttaaacaagctactgaagatagattaacaagtgcaaaggaattgccttatttcgagggtgatttctggcccaatgttctggaagaaagcattaaggaactggaacaggaggaagaagagagaaaacgagaggaaaacaccagcaatgaaagcacagatgtgaccaagggagacagcaaaaatgctaaaaagaagaataataagaaaaccagcaaaaataagagcagcctgagtaggggcaacaagaagaaacccgggatgcccaatgtatctaacgacctctcacagaaactatatgccaccatggagaagcataaagaggtcttctttgtgatccgcctcattgctggccctgctgccaactccctgcctcccattgttgatcctgatcctctcatcccctgcgatctgatggatggtcgggatgcgtttctcacgctggcaagggacaagcacctggagttctcttcactccgaagagcccagtggtccaccatgtgcatgctggtggagctgcacacgcagagccaggaccgctttgtctacacctgcaatgaatgcaagcaccatgtggagacacgctggcactgtactgtctgtgaggattatgacttgtgtatcacctgctataacactaaaaaccatgaccacaaaatggagaaactaggccttggcttagatgatgagagcaacaaccagcaggctgcagccacccagagcccaggcgattctcgccgcctgagtatccagcgctgcatccagtctctggtccatgcttgccagtgtcggaatgccaattgctcactgccatcctgccagaagatgaagcgggttgtgcagcataccaagggttgcaaacggaaaaccaatggcgggtgccccatctgcaagcagctcattgccctctgctgctaccatgccaagcactgccaggagaacaaatgcccggtgccgttctgcctaaacatcaagcagaagctccggcagcaacagctgcagcaccgactacagcaggcccaaatgcttcgcaggaggatggccagcatgcagcggactggtgtggttgggcagcaacagggcctcccttcccccactcctgccactccaacgacaccaactggccaacagccaaccaccccgcagacgccccagcccacttctcagcctcagcctacccctcccaatagcatgccaccctacttgcccaggactcaagctgctggccctgtgtcccagggtaaggcagcaggccaggtgacccctccaacccctcctcagactgctcagccaccccttccagggcccccacctacagcagtggaaatggcaatgcagattcagagagcagcggagacgcagcgccagatggcccacgtgcaaatttttcaaaggccaatccaacaccagatgcccccgatgactcccatggcccccatgggtatgaacccacctcccatgaccagaggtcccagtgggcatttggagccagggatgggaccgacagggatgcagcaacagccaccctggagccaaggaggattgcctcagccccagcaactacagtctgggatgccaaggccagccatgatgtcagtggcccagcatggtcaacctttgaacatggctccacaaccaggattgggccaggtaggtatcagcccactcaaaccaggcactgtgtctcaacaagccttacaaaaccttttgcggactctcaggtctcccagctctcccctgcagcagcaacaggtgcttagtatccttcacgccaacccccagctgttggctgcattcatcaagcagcgggctgccaagtatgccaactctaatccacaacccatccctgggcagcctggcatgccccaggggcagccagggctacagccacctaccatgccaggtcagcagggggtccactccaatccagccatgcagaacatgaatccaatgcaggcgggcgttcagagggctggcctgccccagcagcaaccacagcagcaactccagccacccatgggagggatgagcccccaggctcagcagatgaacatgaaccacaacaccatgccttcacaattccgagacatcttgagacgacagcaaatgatgcaacagcagcagcaacagggagcagggccaggaataggccctggaatggccaaccataaccagttccagcaaccccaaggagttggctacccaccacagccgcagcagcggatgcagcatcacatgcaacagatgcaacaaggaaatatgggacagataggccagcttccccaggccttgggagcagaggcaggtgccagtctacaggcctatcagcagcgactccttcagcaacagatggggtcccctgttcagcccaaccccatgagcccccagcagcatatgctcccaaatcaggcccagtccccacacctacaaggccagcagatccctaattctctctccaatcaagtgcgctctccccagcctgtcccttctccacggccacagtcccagcccccccactccagtccttccccaaggatgcagcctcagccttctccacaccacgtttccccacagacaagttccccacatcctggactggtagctgcccaggccaaccccatggaacaagggcattttgccagcccggaccagaattcaatgctttctcagcttgctagcaatccaggcatggcaaacctccatggtgcaagcgccacggacctgggactcagcaccgataactcagacttgaattcaaacctctcacagagtacactagacatacactagagacaccttgtattttgggagcaaaaaaattattttctcttaacaagactttttgtactgaaaacaatttttttgaatctttcgtagcctaaaagacaattttccttggaacacataagaactgtgcagtagccgtttgtggtttaaagcaaacatgcaagatgaacctgagggatgatagaatacaaagaatatatttttgttatgggctggttaccaccagcctttcttcccctttgtgtgtgtggttcaagtgtgcactgggaggaggctgaggcctgtgaagccaaacaatatgctcctgccttgcacctccaataggttttattattttttttaaattaatgaacatatgtaatattaatgaacatatgtaatattaatagttattatttactggtgcagatggttgacatttttccctattttcctcactttatggaagagttaaaacatttctaaaccagaggacaaaaggggttaatgttactttgaaattacattctatatatatataaatatatataaatatatattaaaataccagttttttttctctgggtgcaaagatgttcattcttttaaaaaatgtttaaaaaaaa

SEQ ID NO: 579536 - DNA, 385 bp, Homo sapiens
gctatacgaagaattacaatcaagcatatcttaagtactgaaaaacgaaattgtatgccgtacatggcgtgctcacaccttgagtccaagcactttgggaggccgatgctgacgatcatgaagtcaggagagcgagaccattctgggtaacacggacaaaccagaggtctactataaatatgattagccacaggtgcgtgaagactcctgaagacgaagatactcggaaggctgaggcaggtggtgggcacctgtgaagcagagcttgcagagagcctagatcgagctactgcactacagactgggtgacagagctagactctgtctgagctacttatatattttggtcattatacagtctgggcatgtacgatcaggcaagttg

SEQ ID NO: 579537 - DNA, 4335 bp, Homo sapiens
ccttgtttgtgtgctaggctgggggggagagagggcgagagagagcgggcgagagtgggcaagcaggacgccgggctgagtgctaactgcgggacgcagagagtgcggaggggagtcgggtcggagagaggcggcaggggccagaacagtggcagggggcccggggcgcacgggctgaggcgacccccagccccctcccgtccgcacacacccccaccgcggtccagcagccgggccggcgtcgacgctaggggggaccattacataacccgcgccccggccgtcttctcccgccgccgcggcgcccgaactgagcccggggcgggcgctccagcactggccgccggcgtggggcgtagcagcggccgtattattatttcgcggaaaggaaggcgaaggaggggagcgccggcgcgaggaggggccgcctgcgcccgccgccggagcggggcctcctcggtgggctccgcgtcggcgcgggcgtgcgggcggcgctgctcggcccggccccctcggccctctggtccggccagctccgctcccggcgtccttgccgcgcctccgccggccgccgcgcgatgtgaggcggcggcgccagcctggctctcggctcgggcgagttctctgcggccattaggggccggtgcggcggcggcgcggagcgcggcggcaggaggagggttcggagggtgggggcgcaggcccgggagggggcaccgggaggaggtgagtgtctcttgtcgcctcctcctctccccccttttcgcccccgcctccttgtggcgatgagaaggaggaggacagcgccgaggaggaagaggttgatggcggcggcggagctccgagagacctcggctgggcaggggccggccgtggcgggccggggactgcgcctctagagccgcgagttctcgggaattcgccgcagcggaccggcctcggcgaatttgtgctcttgtgccctcctccgggcttgggccaggccggcccctcgcacttgcccttaccttttctatcgagtccgcatccctctccagccactgcgacccggcgaagagaaaaaggaacttcccccaccccctcgggtgccgtcggagccccccagcccacccctgggtgcggcgcggggaccccgggccgaagaagagatttcctgaggattctggttttcctcgcttgtatctccgaaagaattaaaaatggccgagaatgtggtggaaccggggccgccttcagccaagcggcctaaactctcatctccggccctctcggcgtccgccagcgatggcacagattttggctctctatttgacttggagcacgacttaccagatgaattaatcaactctacagaattgggactaaccaatggtggtgatattaatcagcttcagacaagtcttggcatggtacaagatgcagcttctaaacataaacagctgtcagaattgctgcgatctggtagttcccctaacctcaatatgggagttggtggcccaggtcaagtcatggccagccaggcccaacagagcagtcctggattaggtttgataaatagcatggtcaaaagcccaatgacacaggcaggcttgacttctcccaacatggggatgggcactagtggaccaaatcagggtcctacgcagtcaacaggtatgatgaacagtccagtaaatcagcctgccatgggaatgaacacagggacgaatgcgggcatgaatcctggaatgttggctgcaggcaatggacaagggataatgcctaatcaagtcatgaacggttcaattggagcaggccgagggcgacaggatatgcagtacccaaacccaggcatgggaagtgctggcaacttactgactgagcctcttcagcagggctctccccagatgggaggacaaacaggattgagaggcccccagcctcttaagatgggaatgatgaacaaccccaatccttatggttcaccatatactcagaatcctggacagcagattggagccagtggccttggtctccagattcagacaaaaactgtactatcaaataacttatctccatttgctatggacaaaaaggcagttcctggtggaggaatgcccaacatgggtcaacagccagccccgcaggtccagcagccaggtctggtgactccagttgcccaagggatgggttctggagcacatacagctgatccagagaagcgcaagctcatccagcagcagcttgttctccttttgcatgctcacaagtgccagcgccgggaacaggccaatggggaagtgaggcagtgcaaccttccccactgtcgcacaatgaagaatgtcctaaaccacatgacacactgccagtcaggcaagtcttgccaagtggcacactgtgcatcttctcgacaaatcatttcacactggaagaattgtacaagacatgattgtcctgtgtgtctccccctcaaaaatgctggtgataagagaaatcaacagccaattttgactggagcacccgttggacttggaaatcctagctctctaggggtgggtcaacagtctgcccccaacctaagcactgttagtcagattgatcccagctccatagaaagagcctatgcagctcttggactaccctatcaagtaaatcagatgccgacacaaccccaggtgcaagcaaagaaccagcagaatcagcagcctgggcagtctccccaaggcatgcggcccatgagcaacatgagtgctagtcctatgggagtaaatggaggtgtaggagttcaaacgccgagtcttctttctgactcaatgttgcattcagccataaattctcaaaacccaatgatgagtgaaaatgccagtgtgccctccctgggtcctatgccaacagcagctcaaccatccactactggaattcggaaacagtggcacgaagatattactcaggatcttcgaaatcatcttgttcacaaactcgtccaagccatatttcctacgccggatcctgctgctttaaaagacagacggatggaaaacctagttgcatatgctcggaaagttgaaggggacatgtatgaatctgcaaacaatcgagcggaatactaccaccttctagctgagaaaatctataagatccagaaagaactagaagaaaaacgaaggaccagactacagaagcagaacatgctaccaaatgctgcaggcatggttccagtttccatgaatccagggcctaacatgggacagccgcaaccaggaatgacttctaatggccctctacctgacccaagtatgatccgtggcagtgtgccaaaccagatgatgcctcgaataactccacaatctggtttgaatcaatttggccagatgagcatggcccagccccctattgtaccccggcaaacccctcctcttcagcaccatggacagttggctcaacctggagctctcaacccgcctatgggctatgggcctcgtatgcaacagccttccaaccagggccagttccttcctcagactcagttcccatcacagggaatgaatgtaacaaatatccctttggctccgtccagcggtcaagctccagtgtctcaagcacaaatgtctagttcttcctgcccggtgaactctcctataatgcctccagggtctcaggggagccacattcactgtccccagcttcctcaaccagctcttcatcagaattcaccctcgcctgtacctagtcgtacccccacccctcaccatactcccccaagcataggggctcagcagccaccagcaacaacaattccagcccctgttcctacaccaccagccatgccacctgggccacagtcccaggctctacatccccctccaaggcagacacctacaccaccaacaacacaacttccccaacaagtgcagccttcacttcctgctgcaccttctgctgaccagccccagcagcagcctcgctcacagcagagcacagcagcgtctgttcctaccccaaacgcaccgctgcttcctccgcagcctgcaactccactttcccagccagctgtaagcattgaaggacaggtatcaaatcctccatctactagtagcacagaagtgaattctcaggccattgctgagaagcagccttcccaggaagtgaagatggaggccaaaatggaagtggatcaaccagaaccagcagatacgcagccggaggatatttcagagtctaaagtggaagactgtaaaatggaatctaccgaaacagaagagagaagcactgagttaaaaactgaaataatccaggaggtggaggctgtagtgagctatgattctcggcacagcagtccagcttgggtgacacaag

SEQ ID NO: 579538 - DNA, 186 bp, Homo sapiens
taagtagcgccatgaatatcctgtattgagacatatattcaagcccagattctctatttgaactcctgatgtactgacaagagattctaaacattctgtgttgcacaggtacactgactatttcagagatttgaacgaaccccgggcaaggtctggagtgttaatggaagataccgcccaaaccca

SEQ ID NO: 579539 - DNA, 240 bp, Homo sapiens
atgtccgacctataacgcgctaccggtttgcataagtaatcatgattgtctggagttggagattcaaaatctgctgttcacatcccggcgtaacgtcttgtctcgaacgagccctagctgtccacgtagttcgaccagccagtttgccaaggaggtgccgcccaagttacttcaagcacaacaacatggccagcttcgtgcggcagctcaacatgtatggcttccggaaagtggtccaca

SEQ ID NO: 579540 - DNA, 314 bp, Homo sapiens
ggctttctaattttaaccattcagtaggagtgcaagaatagccagcttccgttttacatatgttcttagcatatttaagattaagtgcatatccctcttcaaaaaatgtcttttttttttaaaggattttaatattcctttaaaagaacatttatcatgcaagcattaataacccaagaatgtctgacctctaccctttacaacagtttagggtcctaggaagtccgtttaaaggtcattactcatcatctgtcagtaaaaggattggaagaatatttgcatcaataggacaattctgaaatatctcttagtcc

SEQ ID NO: 579541 - DNA, 470 bp, Homo sapiens
tgggaggaggagtcttgctctgtcacccaggcgggagtgcaggggcgcaatctcagctcattgcaacctccacctccggggttcaagtgattctcgtgcctcagcctcccgtgtagctagatattacaggcttgtaccattgcgcccgggggctcattaacatttggtattagcaaaaatgggggtggggggctggctgatctctctgcactccctcccctcacattttggggtacctacaagggtggctacttgatgtttaataggggctgtacccccacataacccctaaggagggcatggaaaacacctgtgttctcaaggaaaagccgtgagattaaaggacttagcgagagttggccacggtgaggaattcagacttgggttctgcctctgactctgttgtccctgaatcagtactggagttcccgtgtcctcacttggtccagtggagaggcaggggaagccga

SEQ ID NO: 579542 - DNA, 297 bp, Homo sapiens
atggcaacaatgaggagaacaatagacaccaatgccttctggagggcagaaggtgggaggagggtaagggttaaaaaactacctgtcagcttactgtgctcattacatactgtgactgaagtcatttgctacaccaacacccctattgacacgctaatttagaccatgcttacaatacctagcactcgattcacccatgaacctcaaaataaaacgttaaaacaaggaaacaataataacaacaggactacacctattaaacacatgttcttaaactttctatcctttataggagct

SEQ ID NO: 579543 - DNA, 103 bp, Homo sapiens
ctgaggtactggaacagttgaggcaagaatctgaacaagcgttgcatcattacatgctttccgagcatactgaatctgattccgcagttgttctgcttcttga

SEQ ID NO: 579544 - DNA, 358 bp, Homo sapiens
agcggattgccgccgtcgcaccggtcggagctcctctctcgcgcgtctctcctccgatggagctctgggcgccgccgacgccgccgctgccccgaaccctgagcggggccgccccggctcggaggaaccgcgccgcccacgtccagaggagctgcagacgcagccaggagcacctctgtccgcggcttgcgtggcagcagtgctcctgcgggaaccgagacaacgtcgcgcgtcatactctgcgctggtgtcccttggagccgcgccgccgtgcgggcaccacctgggctctcgaccgacaccaggggcaagcaggcgcgaggcaccaaccctgcccagaacccgacaatgcctcccc

SEQ ID NO: 579545 - DNA, 473 bp, Homo sapiens
agacaccagtcatgacgcctcccacagtgctgggattacaggatgtgatcacactgtgtcggccaaatatcgatagtattctaagcacaagtattatatacttctctccagtaacaacttgactgctcaacacacaggaaatgcattttccttttatcagctgaagtcaattcactaccatccgctagataagcagatcaagttttattttagggtaggtgatctaaacaatgccacaatatgaaatttggaatcaaccaatatatattgcggatatgctttatgacatgtgtaatatcacgtgtattacttcacttattcctcacaacaacccgtgaagtaagtattaccaaagcctatgtgtagatggggaaacttaagatacagtaacgctatataacttgtgtcacgcttgctgagctgacagatgggagaatcaggacacaagtctggtttctaaggcatcctccttc

SEQ ID NO: 579546 - DNA, 141 bp, Homo sapiens
ggggtgggaggctgatgattatttgacaaagtgagttatgaagactggtgggcaggagtagtgaggttgtctgagccagtgtctgatgtgcccagctgggaagctgatgaatagctgagattctgtagctgaggaccatcg

SEQ ID NO: 579547 - DNA, 258 bp, Homo sapiens
  misc_feature (123)..(123): n is a, c, g, or t
tatgttctgcggatcccgtaatctcgagagttgtgcaggatggtctcaatctctgactcaggtgatccgcctgccttggcctcccaaagtgcttggattacaagcatgagccactggcacctnagccccctttttttttttggagagacagagtctccctctggtggcccagcctgggagtgcagatggcacgatcttgggctcactggcaacctctaactctcccagcttcagagcgattggtcctggccttcagct

SEQ ID NO: 579548 - DNA, 180 bp, Homo sapiens
agaagggttgaaaggcaaagctttgggccaaaaacaggggttggggggtcccccctcaagtttggacccgtttccgtggttgtaacaaaggatcggaggttgggttcctgattaaacttccctgtgtgttttctatctgggatcccagtttttgaagacaacttgctttgtttcacccta

SEQ ID NO: 579549 - DNA, 423 bp, Homo sapiens
agggggggatggtggcctcctggtgtgggggttccaggcccatgttttccttcggcacggcgcgggtagaggtctccaagaggttctgcctcggcaggaggcttctgcctgaaacaggggggggcggtaggggcggatccttccccatgggttaatcttccggatgctgatctcctgatagtgagttctcatgagatcgggtggtataaccgagtgtggcacctctttcctctcggtgtcttcttcctactcctgccatatggaacatctcatggtcactgggccttcgggtatgagggggaggcttccttagtcctcccagaagcagaagccattggctgccttacagccggcagaaacatgagccaattaaacctctttaaaaaataatattacagaaaattcggtcggtagaagggagcc

SEQ ID NO: 579550 - DNA, 856 bp, Homo sapiens
  misc_feature (598)..(598): n is a, c, g, or t
  misc_feature (629)..(629): n is a, c, g, or t
  misc_feature (638)..(638): n is a, c, g, or t
  misc_feature (686)..(686): n is a, c, g, or t
  misc_feature (701)..(701): n is a, c, g, or t
  misc_feature (742)..(742): n is a, c, g, or t
  misc_feature (770)..(770): n is a, c, g, or t
  misc_feature (777)..(777): n is a, c, g, or t
  misc_feature (796)..(797): n is a, c, g, or t
  misc_feature (807)..(807): n is a, c, g, or t
  misc_feature (827)..(827): n is a, c, g, or t
  misc_feature (834)..(834): n is a, c, g, or t
tttcatggagaaatggaatcacacttcaaatgatttcatttgttgggtctgcttcccccaaatcaaactggaatatttctcttgtgccttatcatcctcatattctttctggcctcggtgggtaactcggccatgattcacctcatccacgtggatcctcgtctccacacaccgatgtactttcttctcagccagctctcccttatggacctgatgtacatctccaccaccgtccccaagatggcgtacaacttcctgtccggccagaaaggcatctccttcctgggatgtggtgtgcaaagcttcttcttcctgaccatggcgtgttctgaaggcttactcctgacctccatggcctacgaccgttatttggccatctgcactctctctattatcctatccgcatgagtaaatgatgtgtgtgaagatgattggaggctcttggacactggggtccatcaactccttggcacacacagtctttgcccttcatattccctactgcaggtctagggctattgaccatttctctgcgatgtcccagccatgttgctcttgcctgtacagatacttgggtctatgatatatggttttgtangtacagctctctctccttttccctttcattnggcatcacntcttcctgtgggccgagtcctatttgctgtctatcatatgcactcagnggaggggagagaaangccttcaccaccatttcacacatttactgtagtgatctttnactatgcacttttgtctacactatctcngcccagnatctccgctcaccagctgnngacagatctngcagtctctacaccatcctnaccccangcccatccatatctcagctgag

SEQ ID NO: 579551 - DNA, 1252 bp, Homo sapiens
gcagaacacatggtgtcgtgaaaactagccctaaaagccaaaatgggaaacggacaagactcaatatcaacattgtcgattcattgagacacgtacgattcgggcaagatccaccactactggccatctgactctactaaatgtcggtggcatcgacaaaacgaaccattgaaaaaacttattgactgaacggaggcatgctgacgactgggacatgcggctcctatcaacgtatgcctggtgtctgtaggataacatctgacagactaatggccgtgaacgtgaggtataccctacattgatacttctgcctctgtgagagactttggaagacgacaaagtgagataacctcatgtggaacttcctacagtacgcatgaccctcaatggaacaaccatgacgcactttatagtttccaaacaaagcacatagcatctcaccagggggcagcatacttgccatggcctagaacctaggtagctagtctcattcgtagtataggttagccttagcatggggatggatcccgagtgaaagtctccgaagacgtgggatcctctctcgacggggacattcggggcgaatggaacgcaacgaggaagcgaaggtgccgcgtccccatggacgtgacgaccacgtgacagatgtgcgaaccagagaccatcgtgagaaccgggatgacggacgacgacaatgggagtgcccaccaacgaagtgcagaccaaagcaggagcaagacacaaagaatatagaaggggacaaatgggaagaaagggaacagggaccagccaaagcaaaaaccagtgacacggaaataggcaggcggcagcgaagaaaaccccacggacgacaagaagtagacaatagagggagcacaaagacgaacaaggcgaagagaaacagaggcgaaccgagaaagaggccttgcgaacgccaaaagagggcataaaacagagacacaaggcaaatcaaagagggagaaagaaagagagacaccgagaaaggagcaggcgaagaggcacaagcaaggtaggcagccggcagcagaagaaagggatctaggaagaggaagtgcgaaccacagaagagagaccaaacgaggaagacagaggacgaagagaagacgacagagaagcgcacaagaaaaacgcaggcacaggacactgggacgggggggcgagaggagagaacgactaagagaaagcgagagcagagagaaagcaggaggcagaaaaggaacaaggaacggaa

SEQ ID NO: 579552 - DNA, 207 bp, Homo sapiens
  misc_feature (29)..(30): n is a, c, g, or t
  misc_feature (139)..(139): n is a, c, g, or t
cccaaaccacccaccaaactgccgagccnnatgggacaattacaacaacgtggccacggtccccaccacggagcatatcccgagtcctgtggcttaggcccatctccaggggtagagcaggtccctccagcacctcttncccctgctagctaccctcctgccacctccacgaacaagcggaccaacttgtagtaggccaactcggag

SEQ ID NO: 579553 - DNA, 377 bp, Homo sapiens
  misc_feature (53)..(53): n is a, c, g, or t
  misc_feature (66)..(66): n is a, c, g, or t
  misc_feature (81)..(81): n is a, c, g, or t
  misc_feature (142)..(142): n is a, c, g, or t
  misc_feature (188)..(188): n is a, c, g, or t
  misc_feature (191)..(191): n is a, c, g, or t
  misc_feature (210)..(210): n is a, c, g, or t
  misc_feature (242)..(242): n is a, c, g, or t
  misc_feature (244)..(244): n is a, c, g, or t
  misc_feature (278)..(278): n is a, c, g, or t
  misc_feature (280)..(280): n is a, c, g, or t
  misc_feature (377)..(377): n is a, c, g, or t
gtgatagaaaggaatccacccccaccaagccaaccatggagctaaaaacaganacaacaagaaggncaaaactggccactncctgccccaccccttcacagcccaaagcagaaaaaggtctgctctactctcaaggtgagtnacaaagagccggtactgtttctgcccctggcataccctgagaaccnatntaacttctgtagtgctcancccctgtgcccttcctgggcctgatccacatntntcaacacacacactccctctcacagtctccaaanancactgcagagcctagctgcatctgccaagttcaaagaggaatttttcacattttctcacttccaatctccatcttccttcctctgtctcccactctn

SEQ ID NO: 579554 - DNA, 254 bp, Homo sapiens
gctctgtcaggcgtatctattgaagccttcagtagagcagaagggaagctttcctgccacccggtacatccttacgcagattgactaccaaccttataaagtctcatagaagtgggtactattgtatcatcatgtgttataacaatttgtagttactttctattttccttattaattgaataccatttgagagcagagtaaatgtcatatttatttctcttacttgttcaacagtctgtttttttttctttttt

SEQ ID NO: 579555 - DNA, 457 bp, Homo sapiens
gtggagccttttctgggcctgccaatggcccaatcagcacacacttcttccccgctgaggtccataaaaaccctgggctcagccagagcagcgcagagaatagccagaggatgaagatggtagagacgaggggacaggatgaccagctgcagagagcagtaccctctctgctgatagctggagacggtggggtgaccagctacagagaggagtaccttctccgctgaaagctacagagaccacctgccagcagagaggagctacactctgctgcgagcttcagagacctgcagagacattggaatgacttgcctgcggagaggagccactctctccagggcctcctctctgttgagagctgaatgcttgagctcatgggacaatctgtctccagagaggagctacccactcctctgagctcttctaacactaaataaaactcctcttcacccttcaa

SEQ ID NO: 579556 - DNA, 675 bp, Homo sapiens
ggtgttctgtcccagtgcggtgactcctcttaatttccccactgctctctgtgagtgagaaatttagcctatgctccaatcaaattactgtacccttcgacatgtactgttacagctttctgtgcagagatgactgtccaactgcaacaagcctacgattgaaatgaaaactctattgttacctctgagttgtgttccacggaaaatgctatccagcagatcatttaggaaaaataattctatttctagcttttcatttctcagctgtccttttttcttgtttgatttttgacagcaatggagaatgggttatataaagactgcctgctaatatgaacagaaatgcatttgtcattcatgaaaataaatgtacatcttctatcttcacattcatgttaagattcagtgttgctttcctctggatcagcgtgtctgaatggacagtcaggttcaggttgtgctgaacacagaaatgctcacaggcctcactttgccgcccaggcactggcccagcacttggatttacataagatgagttagaaaggtacttctgtagggtcctttttacctctgctcggcagagaatcgatgctgtcatgttcctttattcacaatcttaggtctcaaatattctgtcaaaccctaacaagaagcccgacatctcagttggatcct

SEQ ID NO: 579557 - DNA, 760 bp, Homo sapiens
tctggcacttgctggacatgtcccctaccctcttcccaagaggagccgtcccacatttgggtagttagtacccaggactggttggactgatcgggttagggaccctagagggttaagtggaacaatcagacgtatggggctgcaatgccctgttctggcaatcatccgcatcgtacccagcgtggggtggtttctgattgtgtgctcatgcctggttgcataatttggtttttaacccacaaattgtgattattttttaagaaagccaaacagatttgggcaggagttagaataagtcccggaggcctgggcttctctgttcttggccctccgtaagtctccctccgaaggaggagcgccctgagggaggaggaggatctcagcgggcctctagccggttccagatgcagtctggggagtgggctgaagggtgaacgggctggaaggctgtgggtccactctccctatctgaggaggcagtctgcagactcgaggccctaagtagcactctttgccctgtggcctctcccttttccccccttctggttggaggagggagaagtgggaagtagcttggcgaactggtctgtccaccataaatgttccccatctgttccttgggcggcctctgggcagagtctcctggccaggcttgtgtagagatgggcctggtccacagggacctgaagggagaaaccctttgcctcgggaggaggtgcccctaccgtgttacgggccgggcccgccccccttacggggg

SEQ ID NO: 579558 - DNA, 532 bp, Homo sapiens
cagcagcatagatattacggagtaaaatgctgccagttttgtgttattgactgtatttcaataatgacagaaaaaatgttatgaagcccagggtcctaaatctttgcggtagctgatcaaataatctctgaccaaacaatagtattctgtcctattagtcactcactaattcattaccattttcaaacaagttctctaagtcttacttaaacttagtacttcttgaagaacagattataacaatacgggctcaaaatatctccaaatatatttttttcctaaaatgcataagctggtaatagcaatcataacaacagattccatcactgtagctgcttagaaaagatgctcatatctcaatggattcttccaataatcctgtgaaagtaggcaaaattagaattactgccacatttaatagccaagggtcagatatatgaaattatacacttaagatcatagttagtcagggaacatccagaaacagaacccagatatttagactcccagtttagtgctctttccaacaaac

SEQ ID NO: 579559 - DNA, 1195 bp, Homo sapiens
gccctttctgcctgtttgcatgtgtgggtatgtctgtaggatattttcctgaactgggaacactgagtccaagtcagtaattttggtagacattgccaaactcttctccatcagggtagtggcattttatcatctaccagtgatggagaggagtgcctgttttcccagagtatgttgtaaacttgtggatttctcctgatctgataggttaaaggtggtatctgtgtctgcttatgatgacataaaaagatgttctgaggtcagaacatcttttcttaatgttatagaccatttgattttcttatgaagtgtctctttatgtcctttacccattattctgtagggtcattgagcttctcaatttctttacatactagggagagtagcctttcatctgtgattaagagttgaaatattttctccagttgtcattggaccgtgtttgtggggttttttccaccatgtggaagttgtttttacataatcaaattaatcaatcttgccttttatggcttctagatttgagttataggtagaaagcccttccctactcgaaggttataaagaaatttacctgttattttctgagtatttttacagctacatattttatacatgattttttcttatttgttgagagctcctcttgttgtatggtatgaaagaatgatctttttttcctaaatggctatccagtggtcccagtggcaattatttccttttttacacccctgatttaagatgctacttttatcatatgctaaatgccttgtatatatttggatttattccgaacttcctatgataaatagtactttggaagagagaaataatctgatgctcaaagacatctagccagaaggagagtacaaaggcatatgcttgattacgtatcacaaagatgccatgaagatggagggttgttgagtgtggtgtcgtcacgcttatctaggagagagacctgaggagacgcacagactcgcagatctaagatagtcccgtcagcacggggcttacgctgatccgcgcttggggccgggggggtcactaaggccttgaccgctgccacagtgaaccttttggttaggcaaatgcggaagggcgcgatcaggcggcggagaactgacacgggggggcaccccccggggaggactaaaaagacatcgggtttaaggcttcctgcactctcattatc

SEQ ID NO: 579560 - DNA, 775 bp, Homo sapiens
gccctttctgcctgtttgcatgtgtgggtatgtctgtaggatattttcctgaactgggaacactgagtccaagtcagtaattttggtagacattgccaaactcttctccatcagggtagtggcattttatcatctaccagtgatggagaggagtgcctgttttcccagagtatgttgtaaacttgtggatttctcctgatctgataggttaaaggtggtatctgtgtctgcttatgatgacataaaaagatgttctgaggtcagaacatcttttcttaatgttatagaccatttgattttcttatgaagtgtctctttatgtcctttacccattattctgtagggtcattgagcttctcaatttctttacatactagggagagtagccttttccacttcctggttggaatttacaagcaagttttttggaaaacaaacacaacttttaaaattttttcttctacccttttcccccccaaagggttttcttggggtcccccattttgtgggggagacccccggggtggattctacacatacggcattgcgagggagaggacggactatatcacaaattgttccccccaaaccccccaaattgtgtttgtggggccaacaaaggtttctctcgggcttgttctctttaacccaatttcacatttccccaacaattttcctaaatttccccaaaatttccttttgggccgcttttttttatataggggctttttccttaaagaaatctctcgggaagtttcatcaaggttacagcaca

SEQ ID NO: 579561 - DNA, 446 bp, Homo sapiens
  misc_feature (14)..(14): n is a, c, g, or t
  misc_feature (35)..(35): n is a, c, g, or t
  misc_feature (53)..(53): n is a, c, g, or t
aaaatgactcaggntgggacacctagctagcctcnatgatgaggctggccatncagaaagaccaagtgattagaggatgagagggttggaactttcaaccccacccaccaaccactaggaaaagtggaggccgaaggagtccggagatcaaactgtaagactcttgaacaatgagatttgatgagcttctgagttgctgacatgtgtaggtgctgggagggtggctggccaagagagggcatggaagctctgtgtccccctttctataccttgccctatccatctccatctggcattcatcagtatcccctctaatatactggataaaaaaccagtaaatgggtgaggtgcagtggctcacttgtaaccccagtgctttgggaggcccaggcagaagcatggcttgaggccaggagttccaggccagtttgggcaacatagtgaga

SEQ ID NO: 579562 - DNA, 359 bp, Homo sapiens
gaaccgcgctgcgtaatcttgtgtatcccgggtcagaatggttgtgtaactcattgatggtcctggcgatggtaggtgatgcagctgctggcagcctaacggatgtctccatggtgtagttaggtgtgcttgagtcgaagatgagcgcctcctgtatgagctggtggtcgccctccagctgatcaatctttggcttgtagttgacgatgctcctctcatactgccgcaggtggtgagctggtcctccagggtcccatgcatcttcaatggagaatctcccgatctcctccatcttggcttggatccaggggctcgatgacattcggctggggtccaaattggttgagaagcctctcatt

SEQ ID NO: 579563 - DNA, 368 bp, Homo sapiens
ctccacagcatgacttgtgtgcagcaggagtatgagaccctctgggcaaagaattaaagacaaatgcgggtcttgcactgtcacccaggctgcagtgcggtggctcaatcacagctcaccacagcgttgaactcctgtgctcaagcaatcctcccacctcagcctcctgagtacctggagcacagtgcctttgtgagctgtgacactcatggtaaaggtctgtagcttcatttctgaaaccagcgagacccccaacccaccaggaagaacaaacaactctagacgcggtgccttaaaagctctaacactcaccacgaaggtctgcagcttcagtcttgaaccaccgagaccacaaaaccaccagaaga

SEQ ID NO: 579564 - DNA, 184 bp, Homo sapiens
atctggggacacttggtggacagcagatgtgccttccattcatcatcatcatcatgagacccagcttctgtacacgggggtccccggcacgaggcacgatcccgtggtgtcatctaaacaaaactaaggcagaaggcttacggaagagtacgaagaattgggaaggccttacatatcgtagctt

SEQ ID NO: 579565 - DNA, 1171 bp, Homo sapiens
  misc_feature (50)..(50): n is a, c, g, or t
  misc_feature (104)..(104): n is a, c, g, or t
  misc_feature (119)..(119): n is a, c, g, or t
  misc_feature (145)..(145): n is a, c, g, or t
  misc_feature (155)..(155): n is a, c, g, or t
  misc_feature (171)..(171): n is a, c, g, or t
  misc_feature (173)..(173): n is a, c, g, or t
  misc_feature (177)..(177): n is a, c, g, or t
  misc_feature (179)..(179): n is a, c, g, or t
  misc_feature (227)..(227): n is a, c, g, or t
  misc_feature (274)..(274): n is a, c, g, or t
  misc_feature (278)..(278): n is a, c, g, or t
  misc_feature (290)..(291): n is a, c, g, or t
  misc_feature (321)..(321): n is a, c, g, or t
  misc_feature (329)..(329): n is a, c, g, or t
  misc_feature (351)..(351): n is a, c, g, or t
  misc_feature (378)..(379): n is a, c, g, or t
  misc_feature (383)..(383): n is a, c, g, or t
  misc_feature (450)..(450): n is a, c, g, or t
  misc_feature (532)..(532): n is a, c, g, or t
  misc_feature (575)..(575): n is a, c, g, or t
  misc_feature (602)..(602): n is a, c, g, or t
  misc_feature (607)..(607): n is a, c, g, or t
  misc_feature (636)..(636): n is a, c, g, or t
  misc_feature (655)..(655): n is a, c, g, or t
  misc_feature (704)..(704): n is a, c, g, or t
  misc_feature (717)..(717): n is a, c, g, or t
tacccaagctccagtggttccatactggcgcctgcctggtttaggcattntcatctacctgctgaaacagagtgctaatgatttcttcagctattatgacagtnatcgacagagtgtcngcacagccacaaaatgcagagcagcnccccccagangagacaaaagagtggngncagncngcgacgcccgccggtgttgacaaaacccccaccgcccagaaaaatggnctagcaagacggcgcttggtgaaggtgatcaacaaccgagctaaacngctncccctttgttcnnttatcatagagacccgcccatttatccttnggcgccanctggagtactacttgttacatngcatgcccacggatccccaagaccccnnattngccccgagaaccttgtttaaaagcagaagaccgcaagatccccccgccccagaaaccaatctagatnttagaagtgggctggctatagtgagccaacatgatttagaccagcttcaggctgatgcaaccaacgcttttggagaatcacnacaaaagaaacttctggacattgaaggattatattcaaaagtncgatctcgatatagtttcatacaggcncttgncagacgtacccgtggcctcttgaggatancaaggaactgagagcccgngcttatgctcttctatgagagagatgaattggggagaattgtctccatnttatagattagtntctttctaaattatgaccaaaaatattttgctatttctttctttgtatatggacatctttgctgtaaacttcttccctattcatcctcactagtaaaataatactttaaaaacaaaaaaaacaaaaaaaaaaaagggggccgcaaagtccccgaggccagacggaccattgccagggcccaaggagcgtaaacagcacgccgggtaaaagggaaggaaacggacggacaccggaagaaccctttaatttggtggggggggtgaacaatatgtgggaacaaaatatacccatcaggaagaatttaaaagctcttacaggaaaaattatacacattttaaagggtgatatatcacgggtgtaaaaattagcgtgatatattgcgatgcagctggaaaagtttgggataatggaatttttgattaggaaaattttataccgtgacatatatacaggg

SEQ ID NO: 579566 - DNA, 573 bp, Homo sapiens
ggaggagctcagctgctcacgtaatgagatggcgcccttctagtgaggccttctgcccctggcacctgcttcaatttgtcctccacagcactgattggcatgccacaagctggtccggtctgtctgtctcatgtttgtcttgtgctcggttaggcgcaacggcgggttagtgcctagcacaccagcatataatgagatgctggatagaattgtggtgcatattgattgtactcaagcaccaccgggtccgtgagagtgggtgtcgacctggagactttctggagatgcgcgtctcgctctgtatcgcccaggtctcggacgagtggatatcgggactgatcttggcgtcactgcaaagactccaactcctgggttcaaggcgatcctcctggctcagacctcccgagtagctggtgatccacaggtgggtgtacaccaaagccagctcagtattgtcattacacgcagtagatggggtctcgaccatttcgcccaggctggtctaggaaactcctgactatcaaattacctcaatctgcctcagactcagcaaagtgctggcattacacggcg

SEQ ID NO: 579567 - DNA, 296 bp, Homo sapiens
ggtggtgatacgatggcccggaaggaatccattgtttagtttacagcacagagatctttctctcaatgggaattgtgctcttggttacagcaataagtgaaggaaaaaagatcttgcccttttgaagttctgaggggaggtgtagggtgtccatgttagtacggttggataggatatgctctcatggtaacgcgtccaagttggaatggtcttccagtctccatggcatccacatgctactggcgttagttccagatcttgaggaagctatcccaggaccctgtcgccacagccat

SEQ ID NO: 579568 - DNA, 254 bp, Homo sapiens
  misc_feature (33)..(33): n is a, c, g, or t
  misc_feature (103)..(103): n is a, c, g, or t
  misc_feature (112)..(112): n is a, c, g, or t
  misc_feature (193)..(193): n is a, c, g, or t
ttgtgtgggacttcgatgccctgttaccggttntatccatcctggtttccaactataacccaaaggaatttgtaagtggtgttcagaattatttggaaaacanttggcttcnacatgagaaagctcctaccgaagaagggaaaaaagagctgctgttcctaagtgacgcgatcccctcgctgctggagcggcnctgtgcctacctctaagccaagatcacaaaaaagagacgctcacagtgggcttctgctttg

SEQ ID NO: 579569 - DNA, 251 bp, Homo sapiens
  misc_feature (6)..(6): n is a, c, g, or t
cgtgcnacaggccactgggttcagcagcagagcatcgcattcttgcgggcacatgggttggcacttcggctgcttgtcgtgatggtaaaggaccacgtcagaggcgtgctcaggccccctgtcaggttgaccaaggtgctgtggccaaacttatggatcttgaagacacgattattgatgtaggtgacaccatagatgttatcctcaaagacgtcgatgctgacggggtgacttaggcctcgtttgctgtc

SEQ ID NO: 579570 - DNA, 378 bp, Homo sapiens
  misc_feature (6)..(6): n is a, c, g, or t
  misc_feature (28)..(28): n is a, c, g, or t
  misc_feature (53)..(53): n is a, c, g, or t
  misc_feature (55)..(55): n is a, c, g, or t
  misc_feature (59)..(59): n is a, c, g, or t
  misc_feature (63)..(64): n is a, c, g, or t
  misc_feature (71)..(71): n is a, c, g, or t
  misc_feature (73)..(73): n is a, c, g, or t
  misc_feature (82)..(82): n is a, c, g, or t
  misc_feature (90)..(90): n is a, c, g, or t
  misc_feature (149)..(149): n is a, c, g, or t
  misc_feature (170)..(170): n is a, c, g, or t
  misc_feature (193)..(193): n is a, c, g, or t
  misc_feature (257)..(258): n is a, c, g, or t
  misc_feature (290)..(290): n is a, c, g, or t
  misc_feature (329)..(329): n is a, c, g, or t
  misc_feature (368)..(369): n is a, c, g, or t
  misc_feature (373)..(373): n is a, c, g, or t
tttctntttgtaaggacttgtgcctctngggagacgtccacccgtttccaagncngggncacnngcatctncngagtgtgcnggggtctnggaggcaggtcccgagccccttgtccttcccacggccactgcagtcaccccgtctgcgncgctgtgctgttgtctgccgngagagcccaatcactgcctatanccctcatcacacgtcacaatgtcccgaattcccagcctcaccaccccttctcagtaatgacccnngttggttgcaggaggtacctactccatactgngggtgaaattaagggaaggcaaagtccaggcacaagagncggacccagcctctcactctcagttccactcatccaacnngggncctca

SEQ ID NO: 579571 - DNA, 856 bp, Homo sapiens
  misc_feature (413)..(413): n is a, c, g, or t
aaaaaagaaaaaaatagaaaaaaaaaaaaaaaaagctgtgatctctatcagaacttcctttcaacgggtcctcccctccaagcagaccacctgttccccttctatcccagctcaaaagcagctgacccaactcagaaattcttctttctccttacaggattgaagtgtgccttttgtgaagttggttatttttaagcccgagaagtttaattttttctacacaacattatttctccagaacattcttttatagtcttttataattggctcttagaattacttattaagaagaatgaccattgacaattttctctagaaaccgtggtagcgtgtgtgttgtttgtgttggcggggggggttgcgtgaaggggaggggaaagttgaagtctccacgaggaaagccttgttccccncaaacgagggtgttgtgcacttgctctctgacacaacacccgtgggtggcatttgctgcgagggttccgaggcctcccgtaatataggacagagattccatgaacttaatgtcattgtgttctcccactcatttttggaccccagtttgggcaactgtttctgcacatggtgtgtggcttcaacaacttttagggaacacaaagtagatttaattttcatctctattcatttctggatgggttgcacaagttttgtctaggaggtccccatttttctccttgaaagggtgactatccgtgtgcacttcgtgctcctccacattattgccatacattttggtgtaacagggcggtactggctgggggaaagccaggtaacaagaaaccctaaaaaccttgggtattaagaaaccgtgctggcttaaactcttcctttccaactg

SEQ ID NO: 579572 - DNA, 860 bp, Homo sapiens
gctgtactggtgcggtatacctgagatatagtcgactgataatgctccgctcgtgaacggctggactaatggctgccagcttaccgctgaataccttacctggcatagcattaaacaccacttccgcatcgtcgccaggagccagtcgcagcaaggagttctgacggaactgcgccacgattagtcgtttctgatcgggtataaacaccatcaccgagacgtaacggagcgacagctggcataggtaccctggacagaatcagtacctgggtcacataaccatcgctcggcgcacgcactatcgtctgctcacaggttatattttgcttccagcgagctgtgctttcaggctggcgcattttgacaatgttcacccaacaccaggctatccagctggtctggatctggattatgtaccgccgaccgatgacttacactgtgatgcttcctgcgacagataattttgccgcgccacatcgatatcgcgtctgaaaacgggtaaccttacgcctggctgaccagtgcgtaacgctgatactctatagcgaattatccccgacgtggcacttatgctgcatgagtattcgcacgcatctcatctaactctgcgaccaccgccccagctgtatattgtcctgcagataaacgaatatccgccaatcagccgatccaacccggcgcctgaataacgcgtagggtccagtagaactagcacataactttataaaatcagcgactatacttatccgccacttcaatcagacaaccaggacactgtatgacaccagaatagaaaacccgcattaagacataaaggctaggacgttatagaccaccactgacagctaaaaatttcaccg

SEQ ID NO: 579573 - DNA, 122 bp, Homo sapiens
gaatgcagatcgagagcctgaatgtagagctagccgtacatgacgaaggaatcatgaagaggatataatggaatttatgcagaccagagtggtcggccaggtcaacgtggagatcgatgcca

SEQ ID NO: 579574 - DNA, 346 bp, Homo sapiens
ccagaagacgccgctacacaaatggagtctcgctctgtcgaccaggctggagtgcaatggtgcgatctcggctcactgcaatctccgcctccgggtgagaggtgaagccagctggacttcctgggtcgagtggggacttggagaacttttctgtctagctaaagatttgtaaatgcaccaatcagtgctgtgtctagctaaagtttgtaaacgtaccaatcagcactctgtaaaaatgggccaatcagcactctgtaaaatggaccaatcagcactctgtaaaatggaccagtcagcaggatgtgggcggggtcaaataaaggaataaaaagctggtagccgaaaa

SEQ ID NO: 579575 - DNA, 1214 bp, Homo sapiens
gccttccccgcgagcggacgcggcagcgcctctgtctcgctttttcttatttttcccccctttccccttttcgttttttattatttttctgttttctttttcttcctccttcccccccttttaagccaatttccccttccggaaggcggatgttccccgggcgcaagggcgcaagagccgggtctcaacccgcgcgcaacaacagacgggtaccctggaacagagcggaatgtggcagccacaagaggccggacaccgagaacacaccataaccggagagcataacaacgcgcgcagcagagaggggcaaaccaacggtgcgcagagaagcaccaacgcgagtggaaaaagcacaacagggcgccgtgaaacacagggcgtgcgagaagaagcagcgacgaaaaaagcagagatggaacaaccccaacagagagacccacatagggcagacaaaagaagagaggaccgggaggcaagaacccacacggaagagacaaacaaccaaccaggacgcaaagtgagataacaccgagcaccacacaacacgaaaaaccattctacaacaaaaaccacgtaatagagggcagaccgcagacgagtagagaaccacccacacagctaccaaacaacagacacgacgacacacgaccaaaagaacctcaccaccaaattcaacacacaacaccacgtagaccaaaaggagagaaacaaaccgggcgcaccacccccgaggagggaaacacgacggagagagcaaggcccacccagcacccacaacgacagcggaacagcagagagcaaggagaggaagaacaaaaaaaacaagaaaagcggcagcaccagaaccacagacgtaaaagacagcaagaagaacacacaagcaagcatgcgaaacaactagacgcccacgacacacaatgacgtaggaacaacttaagacaggcgacactaagaactcaccacactggcagacagaccgaaagacagcacaagcgtgggacacccccacgtggccacacaacaaacagagagacgaaagacgaccacaaccgcaacacagcccacggaggaacacaagcaaacaccgcaacaggatgaggcaccaaaacacaaagcagaaacaacaaccagagacaggcgaatagctaacagacgcaacagaggaagaagagaccaaacagcgagaaagccaaacaactgagaaagcaaggaag

SEQ ID NO: 579576 - DNA, 1107 bp, Homo sapiens
ccccccgcgtatatatcccttgcaacaatgccccactcgttcgtcattctattgtttaaagcggtgtcctacgacgcctacatatctcttatcaacaccccgcccctctgagacactgctacgtgtaccctacctcgttccccactcaccggtgctgctcggttaaccaatccgacttaatttcctttgttaactaccttattgcgatcgtttttctcctcgtacacaactgactttggaagtgctaacaaccccctgcaagatggccctcattacctggacaacgggatcgtccacattgcaactgctcggaataatgtcctccaaatttcgtccttggtgtggcaataaccctcggttacctcttcgtatacatgcgcgggtttgcccttttgggtaactctcggccactcacacgtgaaatcgcttcccaaaaacgcttcgtgtcagtctcacgtttgctgcattacgcgcgcagtgtcctctcctaagtggcacgctcaggtgcatcgccctaacctcttattttacgccggtactctaagtgcacctcgcaactccagcgaatacacactctcggtccaactagtcacccatgatccactgcctatatcactctccatacggtgcatgaactcgcactcgattcgacgcgaacgctcctcgacttcgaggcatatgtcttggtgaacgcatacaagctcagagccttacactggatggtaactacgtcatgccgatcgggttaaagctcatatacgacacggacgcctcttggacagagattgatacgttcataaccctgtgtccatacatgaccaatcaatggcctccgtgaagcatattcaaataacgcactcgggcgcgtgaatcaccataactggcgaaccttgcgcgtcgactcgaatcctgtatcagagtacatctgagtgagagctactgcaatgccctatgcctcatcaatcccttgcctttgtactcttcagtcactcctcacttattctaatttcccaaccccctcccaacttgtttgtgtgatctcagaatctgtgccaagcatgacactgggacaaagggagaatattataccccctggtgagtcagcct

SEQ ID NO: 579577 - DNA, 520 bp, Homo sapiens
  misc_feature (125)..(125): n is a, c, g, or t
  misc_feature (129)..(129): n is a, c, g, or t
gcccaacttgctgtatcagaagtttgtgaagatggctacattgacttcaggtggagagaagccaaacaaagacttggagagctgcagtgatgacgacaaccaggggtccaagtccccaaagattntgantgatgagatgctgctccaagcctgtgaggggcgaacagcacacaaggctgcccgtcttgggatcacaatgaaggccaagcttgctcgcctagaggcccaggagcaggccttcctggctcgtctcaaaggccaggaccctggggcccctcaactgcagtcagagagcaagccccagggtcctggccaagcttgctcgcctagaggcccaggagcaggccttcctggctcgtctcaaaggccaggaccctggggcccctcaactgcagtcagagagcaagccccccaaaaaaaagaaaaagaaaaggaggcagaaagaggaggaagaagctacagcatctgaaaggaatgatgcagatgagaagcacccagaacatgctgagcagaacatcag

SEQ ID NO: 579578 - DNA, 387 bp, Homo sapiens
  misc_feature (232)..(232): n is a, c, g, or t
  misc_feature (237)..(237): n is a, c, g, or t
  misc_feature (311)..(311): n is a, c, g, or t
  misc_feature (317)..(317): n is a, c, g, or t
  misc_feature (366)..(366): n is a, c, g, or t
cacggtttttgtacagcaccaaagcctgcgagtttttcggctcggcagcttcccagctgcgtgcctgccagtagcgccaacggttggtggtggccaggtcctgtgggagtttgcgggtcaactggtaggcgtcttcccagcgcgctaggcaaaccagcaggcgcagacgccacctcggaaaccgtattgtcgcgcaactcggggtcgtacttggtcatgacctccagcgcgngcggngtcgaagcgctttggccagggtcaagccgatctcgcgggcaatcgagactttttcgtcacgggagaagtgcatnctgctngcgtaaaccgtcgagcagcgacatggcttttgttccggatcctgcccgngccagggaacgcaggcccagg

SEQ ID NO: 579579 - DNA, 501 bp, Homo sapiens
  misc_feature (13)..(13): n is a, c, g, or t
atgaaaccagccncccaggccagttgaccaaaatgcagacccataaccaaatccacattagccctaactgacttttgacaaaagtgccaagaacacacttggggaaagtacaccctcttcaataaatggtgctgggaaaactggatattcatatgcagaaaataaaactaggcctctatctttcaccatataaaaatcaactcaaaatggattaaagacttaaatgtaagatccaaactataatactaccagaagaaaatataggggaaatgagtcaggacattggtttgggcaaagattttatgaacaaaacttcagaagcactggtaatgaaagcaaaaatggacaaatgggcatatatcaatctaaaattgctctgcacagcacaggaaacaaatgacaaggtaacaaccaacagaatgggagaaaatattcacaaattatccatctgaccaggagtgaataatcagaatatataaggaattcaaacaattgaatagc

SEQ ID NO: 579580 - DNA, 82 bp, Homo sapiens
atccaaaatgtgtgattccatttatatgaaatgtccagaacagggaaaacctattttagacaacagagacacacagtcgatc

SEQ ID NO: 579581 - DNA, 100 bp, Homo sapiens
gagctataggtgatccatcccccacattggtggcatctttcccaatatttctccttgatgacattcttcaggtagtggtaaaactctgcgtcgcatgcgc

SEQ ID NO: 579582 - DNA, 175 bp, Homo sapiens
aggaacttcttaaccaacacttgacacatgttctcttcccccacaatgaaggaggtcctgctatgatatcgcgttggcactgccgcagtagagagagccctagacattctacgtctgcagacttctgtacactgctgacatctttgctatatgtcgcatttaagtgccatttccc

SEQ ID NO: 579583 - DNA, 361 bp, Homo sapiens
tttccccccttttttttccggggaaagggccccctgttcccggggggggttggggggctaaaaaaaacctcccgatttaaattttttaaatttggccggtttcccaacccggggaaaaaaaaaaaggggggggtttggctgggggaacccctcccggttttccttgttttataaaaaaaaagggggcccctaaggggggcctggttcccctttccccaattttggttaactttgggagggcccttttttgggaataactggaccccggtggaaaattgggcccggttttaaagggtgggtaatgggggggggggggggggggttccttttttaaaaaaaatttttttcccgccccctttta

SEQ ID NO: 579584 - DNA, 709 bp, Homo sapiens
  misc_feature (17)..(17): n is a, c, g, or t
  misc_feature (19)..(19): n is a, c, g, or t
  misc_feature (21)..(21): n is a, c, g, or t
  misc_feature (27)..(27): n is a, c, g, or t
  misc_feature (52)..(52): n is a, c, g, or t
  misc_feature (111)..(111): n is a, c, g, or t
  misc_feature (127)..(127): n is a, c, g, or t
  misc_feature (474)..(474): n is a, c, g, or t
  misc_feature (494)..(494): n is a, c, g, or t
  misc_feature (502)..(502): n is a, c, g, or t
  misc_feature (518)..(518): n is a, c, g, or t
  misc_feature (562)..(562): n is a, c, g, or t
  misc_feature (597)..(597): n is a, c, g, or t
  misc_feature (604)..(604): n is a, c, g, or t
  misc_feature (613)..(613): n is a, c, g, or t
  misc_feature (619)..(619): n is a, c, g, or t
  misc_feature (660)..(660): n is a, c, g, or t
  misc_feature (667)..(667): n is a, c, g, or t
  misc_feature (686)..(686): n is a, c, g, or t
  misc_feature (701)..(701): n is a, c, g, or t
cctaaaagaaacagctngngnttgcgntaagtttagtagacagtagatcacnataattatcttcatcgtccacataaagcatctgttattagttacttgctgtgaatggcnaattgcttctcttccnaaaaacctgtcatttctgaagtgagaaaggaagggggatgggtacgtatgtggtagttaaagacattaaggggcatgaaattacccagtaatggccttctcttctgataatggctttagtgttcaaatggtattgaagctacgccaccaagctcattaggaataatgaatcctggaagaatttaagcacaacagacagtgacttctaaacacaagtcttcctatcataagatccaaaccaggttgggtttcatattcagtttagtcttgtttctaactggctcctatccccagctttttccatccttcctcacctcctgtcacaccacttgaacctgggaggttgangctgcagtgagccaagattntgccactncacttccagcctgggntgacagagcgaaacttcagctcaaggaaaaaacggccaggggtnggtgaggaaatcatttaaccaaatccctcaatggntaagggntaaaacttnaatccngggggttttggctcccagagcaggagggtacacaatagttncattggnattactgtggatgttttgnttttgccccgggggnttgcaccc

SEQ ID NO: 579585 - DNA, 98 bp, Homo sapiens
  misc_feature (35)..(35): n is a, c, g, or t
  misc_feature (85)..(85): n is a, c, g, or t
cggcatcctgtggtataggggaagcgcctccgggncctggaatccctaccgccgtccctttgggtttagcacgatgagctcaatngcacgggtatgac

SEQ ID NO: 579586 - DNA, 481 bp, Homo sapiens
ttaaaaaattaccctggctgggtgcagtggctcacacctgtaatccctgcactttgggagaagaggcaggaggatcacttgagcccaggagttcaagactagcctgggctgtagtgagaccgtgtctctactaaaaataaaaaaaattagcccgatgtggtgacacatgcctgtggtcccagctacttgggaggctgaggcgggaggatcccttgagccccagaggtcaaggctgcagtgagctgtaattgtgccacttcactccagcctgggtgacagacaccctgtcccaaaaaagaaagaaaaaaaaaaaaaagagtaccttgatagcatgtacatatgttggagtctcaggaatggactatctagacttataaatggatatattgtcacctagctcattggtttcctatgcacttgatagtgtgagtcacacgcctgtaatcccagcactttgggagccaaggcaggtggatctcgc

SEQ ID NO: 579587 - DNA, 234 bp, Homo sapiens
gcgcccgctgcggggcctccgcgccttgtgttgcgtgctgcttcttccttctcgcagttcttcattctgtcgggcggttaaagtacttaaattccaccttatgttatgaagtttccagcaattgtttgtgtagcaggctttctgcagactttatagacttcacaacaaatttcttctgtacctattggaagcctgtacttttgacttatcagttaaccatctttacctgttttg

SEQ ID NO: 579588 - DNA, 627 bp, Homo sapiens
ccgggcgcggtggctcacgcttgtaatcccagcactttgggaggccgaggcgggcggatcacgaggtcatgagatcgagaccatcctggctaacacggtgaaaccccgtctctactaaaaatacaaaaaaattagccgggcgtgatggcgggcgcctgtagtcccagctactcaggaggctgaggcaggagaatggcgtgaacccgggaggcggagcttgcagtgagccgagattgcgccactgcacttccacctgggccacagagcgagactccgtctcaaaaaaaaaaaaaaaaaaaaaaaatgatgtaaaaaaaaaaaaaaaaaaaaaaaaaaggaaaagaaaaaaaaaaaaaaaaaaaaaaaaaaaaaaaaaaaaaaattaaaaaaaaaaaaaaaaaaaaacatgcggccgaaattggggctaattgggccaattggccctatggggggccgattaacaattaactggccgcggtttaacaacgtcgggactggaccctggggttaccaatctaattcgctctggaggaaatccccttttcgccagtgccgtaataccgaaggggcccgaacggatggcctttcccaacaggttgccaaccctgaagggcattgcttgggcct

SEQ ID NO: 579589 - DNA, 225 bp, Homo sapiens
  misc_feature (110)..(110): n is a, c, g, or t
  misc_feature (152)..(152): n is a, c, g, or t
taaaaaaacggggtctcagggtgtctccaaaaggggagtacaggggcacaatcagggctcagggcagcctgaaactccagggcttcaagttgatcctcggtgctgtgagncctccttcagaaggggggaattgcggggtgcatgtgccaccnacacccagtttagttttcaaaattattgggataaagcagggggttctggttagtgtggcccaggggggttctc

SEQ ID NO: 579590 - DNA, 190 bp, Homo sapiens
ctgaaaccacgatctgtcctcacttctcaggtggtcgtggggccaaatatcacgctgcctgagggctcggtgatctctttgcaccccccagatgcagaggaagatgaagatgatgccgagctccccgatgattataggggtgcacaaggaaaggagaaagtcaaggtgaacgtcacattcagcagggagg

SEQ ID NO: 579591 - DNA, 464 bp, Homo sapiens
aattgggacttaggagttttgattttgataagaaactgggataattttctgaactttttttcctctgtatcacatttatttactatttttaaaaactttgacatttaacacttgggacaacatttattataaatgattagaaaaattcttagaggtttgtctacccacagtgtcatggaatcttctctgaatactaatccataaagttccctgtagtaattggtcagaatgatctttctgaaccatttgaaaacttgttctagatcagttgcttatatatagtaggattttactttttcctgtttttgttctactatatgcttataatacctggaggaatacttactaatgaggtagtaaccatctctgatggtgggtttctgggggaatttttgtttttgtctgttttctatatgtgaaatcttttgtagtatgtatttttcttaattgaagagaatatgatt

SEQ ID NO: 579592 - DNA, 541 bp, Homo sapiens
cagggagtgcaggacggcagatgaagctgtgagtctacaccgtgaggtctggtgttgtgctttgctggaaatcatggaggagaagcaatgtgtgtacctgattctggagatacttagagacaccatcgcaagctgcgagtatggaaatatggaagtgaggcttggggaaaatcgggacccagggtggactttgggagcctcctaccttatgaacgtgcaggtcacggacgccagagtgtgacggtgtgcatgtcgggagacacggacggcaaaggaaacgccacatttggaactggaggacgggtcggaagaccccagaaacggccctgtttagagtccagagaagagctgcctggtgcagttccctaaatgcccagagctgagagttcccaggacaatgtcccacgtgttgctgaacaccaggggggttgggactcccagctggaggcagcgaggggcgcctggtggcccttgattcctgggagcaggcagagccctagggggtcacggcggacgctggtgagacagcgcagggatgccg

SEQ ID NO: 579593 - DNA, 319 bp, Homo sapiens
  misc_feature (1)..(1): n is a, c, g, or t
  misc_feature (215)..(215): n is a, c, g, or t
  misc_feature (232)..(232): n is a, c, g, or t
  misc_feature (265)..(265): n is a, c, g, or t
  misc_feature (269)..(269): n is a, c, g, or t
nggaagtcgggcatggtggctcatgcctgtaatctcagcactttgggaggctgaggcagaaggattacctgaggcaaggagtttgagaccagcttagccaacatagtaagacccccatctctttaaaaaaaaaaaaaaaaaaaaaaaaaaaaaactttagaactgggtgcagtggctcatgcctgtaatcccagccagcactttgggaggctganatgggaagatcacttgngcccagaattagagataagcctatggaaacatngcangacacttgtctctacagggggaaaaaaaaaaaaggaaactgacccttaaa

SEQ ID NO: 579594 - DNA, 137 bp, Homo sapiens
cccccccccgggggggggggggtttttttttggggggaaaaaaaaaaaaaaaaaaaaaaaaaaaaggaaaaagtggaaaaggaaaaaaaaaattaaaaaattttaaattacccatgggaaaaaaaagggattaaaga

SEQ ID NO: 579595 - DNA, 210 bp, Homo sapiens
cgagaaataggctgggctgcggcatgttcacacgctgccctcccatactacttgggaggctgggtgcaggagaatcgcttgaacccaggaggcgggtgttgcagtgagtcgagatcgcaccagtgcgctccagcctgggccacagagtgagactccgtcttacagaaaaaaaaaaagacagacatgaaaaagagaaccagctcagggatc

SEQ ID NO: 579596 - DNA, 391 bp, Homo sapiens
tggtctccctcaaatattatctccaaaggtaagaataaggatgcatcatgtgccacatctacctacaccgcaacaaagtaactatcgagaactgctgtgtccaccaccaatcaatgaggatggcttccgatgtcaatgccacccaatcataccacactctttcccatcaaaatagccataggattactggaacatctcctcccattacatggcgacttcagcacctggctgtatttccctcttctccattccctgcatcatcctatgacttttccgagacgctggtctcatgatttcttaaaaacatctactttgccatccatattagcaacttctttggatacatcttcatttttctttcctctgtctcttttagtaatggtcattcaac

SEQ ID NO: 579597 - DNA, 895 bp, Homo sapiens
  misc_feature (556)..(556): n is a, c, g, or t
  misc_feature (596)..(596): n is a, c, g, or t
gcggagtggcctggcaggccccgtccgttgctaggaatcgccccgtaatcgcgtctgcgcccgtgcgtgtagcggccccaagacccgcgccgccgtctgtccgcgttgcgggggcggggaggttcggggcgccaggagccgtggcggcgggaagatgctgggcggctgctgtggcacccggcagggctcggcattggccggccgcgcgccgttctatcggctcctgccgctgcgtggtgtcgcattgcctgcatgcacgcgcctgtcctcgagttttccgagtcgctgtagcgaggagggcttgacgggcgggacgaaggcgcgatcgtagttctgaggacgagtagaacccgagtgtgggtaggcctcctgccgccgcgcgtcgtccggatgatgcgggtcaagcgccctgtgacgcccccgctcggggaatcttcgcgggccgacagcccgcgcaactcggggcgggtgacgcgaggtggccgaggggagcacgtacgaggggccgacgccggttaacaaacatggtaaaggtgcggtgggtctgggggaggcnttgggggcccgggggcgcctgacggcagcgtcaccccccntttggtgcgttccctgccaccccatggggcccagcccatggggggcgaacacctgcggagttggctaacaaagtggtcgcggactggcctggcataggctggcaactcggggattcaggacgtaccttcggttcagcccatcattttacttttgggttcgccacctgaaggttcctcggtgcgtaccgaatagaggcgttggccaggcctcaattattgtcccgaggcctgctgtcattgtgggggatgcgcagggggtgaagccacaatttccttcatttttccttggtaagttgaac

SEQ ID NO: 579598 - DNA, 305 bp, Homo sapiens
tgagacgccaggagctctccaggaagcacctggtctgtaaaatagagatggccccctgcaggcctaaggcacataccatgagctcataccctgacagcacttacgaaagaggcctaagctggccgggcactgcgtctgacgcctgtcatgccacctctttgggaggctgagtcgggcaaatcccacggtccggagttgaacaccagcctggccaacatggtgaaacccaatgtttactgaaaatacaaaataattggccaggtgttagggcacgagcctccaattccacctcttttagaggcttt

SEQ ID NO: 579599 - DNA, 306 bp, Homo sapiens
tcagactgggagtgcttcctaacggaactggaagaggctacaatctagtagacgcaagtgatgctttccatgacaaccgtaggtctcttgcaaggaatctgccctcagacagccaggacttgggtcaacctggcatcgccgcaggatttcatgtcctcacacgaggcatttccccaccttgacaccaggcaatgtagttcgcatattttactgtcccatggttatctgattagggttgggccaacgaattttatagacctttttaaccctctgaacaagacgcttaagttttatcatccttttttt

SEQ ID NO: 579600 - DNA, 207 bp, Homo sapiens
acgcttacgtgctgacaggttcacacaggcagcgaggtgctttgaaacgcccaggacattgtggccaggtttcacattggccacggttattatgtccatcagcagcaagctgcagaacaaggagcatgtgattgaggccctcgactcactgacgggcttccggatgtgctgcccccactcttaatactcaccaataaattctacttc

SEQ ID NO: 579601 - DNA, 816 bp, Homo sapiens
cgctgaggaggcgcctgagccgtgcagcgctgcgggggaggcgccgtgctgatgctgggggcccatggcccatggtaacacctagccgagctgtatgacgccgtgcccatccagtccagcgtggtgtatgttcctgcccatccccatcaagtggtgaggacccagactgagtccagcacgccccctggcattcctggtggcagcaggcagggcccgccagtggacggcactgcagccgagcctcggcccggcgccgagtccctgcaagatgcccagctccgccgagctcggaagaagctgtgcctgaggacttcagcgtttgggaacaatccttggggaaggctctttttccacggttgtccgtggctcgagaaacttggaacctccagagaatatgcgaccaagggccaaatcatccgtgggaacagcgcagtacgttctccagagcgtgctcacggagaagtccgccttgtaagagttcagacctttgggctcttggatgcctaagtataccagcgttgtggcaaggagtcccaagcaattccgagcttggaaacgagtatcttatattgcagaaagatcattaagttggaatatgacgtttccgagaaaagattcttccataagtgcaagagaactcgtgggagaaaaatagggggcaagcatgccacaaaggcggaaagcgctggtgacgagacaattggaccggatacgggacctcataaagagcacaacaccgcgactatcagagtcccgacaacgtgggcgcaaccctgcaccagacagagagacgcccagaagattcccccgctaacc

SEQ ID NO: 579602 - DNA, 122 bp, Homo sapiens
gtggttgagaatgagtgtgaggcgtattataccagtagccgcctagatcttaatagtactgcggcaagtactattgacccagcgatgggggcttctgacatgggctttagcggagtcataag

SEQ ID NO: 579603 - DNA, 93 bp, Homo sapiens
ggaataagttggttttcacaagacatcacaagatacgtgtgtacccaacaatttctgatctctgctgatcttttgcttagacgttaacttgat

SEQ ID NO: 579604 - DNA, 760 bp, Homo sapiens
cgcctgtaaagtgatgtccaagtgggcggagagccgtccctgctgccgccgctcatgttctacagagcctgactgtccgtgccgcctggcacatgctgcgcgctggctggggcagctgctcgtccccccgcgcccccggcccggacacttgtgctgtggtgccacgatggaccctgcaagcatgcactgtgcgtgtccccctggcgttcctgtggctgtgttctgtgccgcctgtgctgcggacctcggcgggagttggggctgtgggtgggcgggcgtgctgtgtggggcgtgacatgccggtggtgctgcacttgtggcccccctggccatggcggcgaatggtggacctgagcacctccaccgactgtgaagtgatggcgaaatcctttcttgaagggcctgagtgacaagcagcgggaggaacattacttctgcaaggactttgtcaggctgaagaagatcccgacatggaaggagatggcgaaaggggtggctgtgaaggtggaggagcccagggtataacaacggacatgcagctcaatgagaaaaatctccctgctccgcaggcgacatcaccaaaggctggagtgtggacgccattcgtcaacgcctgcaacagctcctgctcggagtgcggtggcgttggacggctgaattcatcgggccgcgtgccctgttaccgaagattgctggacctgagagctgtagacttgcaggcaagatcacggcggttcggtccggccagtacgtctcaccg

SEQ ID NO: 579605 - DNA, 217 bp, Homo sapiens
cggcacgaggagcatgtacaactgcacaataaattgcacgtagatgtacagagagaaagggaacggtgaacacaaaattctggacagtgatgacctctgagatgcggaagtccgggaggggctgcaccgtgcttggatgctgggatcctctgtgtcttccacagagccctagtgcctgttattatttgtagaattaaatgttaattatacaaaaaga

SEQ ID NO: 579606 - DNA, 334 bp, Homo sapiens
agagagagagagagagagagagagagagagagagagagagagagcgagagagagagcgagagactgagcatatcgtgagcctgttctttatagagctacttgtgtaacggttgccatactggtcacacatctctactacttcatacattactgtgttttccattcaaattgctctgcctgggttccggacagcagagtactcccttacttggtctcctttgctgcttctgctatcacttcatatgctgacatcttgtctgcctctgcttgttgtattgcttcctttccactactatcctccctctccttgtcatgctgattgcctcttttccct

SEQ ID NO: 579607 - DNA, 183 bp, Homo sapiens
ggaagttatacaacactacaaaccaagtcagagcctaacaggcattatacaacacatacaaagcaacctctgaccaacaggtgtctatacaacactacaaaccaatcagacccaacaggcatctatacaacactccacccaacaagagcaggatagatattcttcgacactttgcatccagag

SEQ ID NO: 579608 - DNA, 201 bp, Homo sapiens
gttatcgttttttggggatgttgtgccaacaataaaaaggacccgggtttttttttttggccttaaaaagaaaggaccccccccacaggtggggtgggggcgatccccggctgtttggcatgttccccccgggagtgccgggcaggagcatgggggggttggttgtttccttcctaataaaataaacccgggtccccctta

SEQ ID NO: 579609 - DNA, 406 bp, Homo sapiens
gttttctctcagcctaggaatcagcccaaagtgaaagcttaatgtcttctcaggtcttttctgagcatgtgccttgcctgcatgtgtgtggcttgctaaactcccccatatacagggttgcttttgaatgccttaatttccagtcttgccccagcttctcccccaggctttaaattgcctgctatatgtctgcctccataatctcttgccccaggaatctgtggctcagtagttgccttacagtggttatgagcagtgtccatagcttttcccacctgacttctgagttaggaaaaacagagatgaatgcttcatgctagtccttcaggtatttccccaggtggtttggaacagccacaagcaataatttaccaataaagtctgctctgcttcctccagtttaaag

SEQ ID NO: 579610 - DNA, 198 bp, Homo sapiens
tttaaacagatggcttggggtctataagacaaattgtttgaaaatctgaatgtaggtactatctacctcatcagctagaacaaagaaagtctagatcatcatagtttgttgtgtagctggcatctcacctcataactttaataagaaaggttctcaagtttgtcttataaaccacaagccatgttagagattcggtca

SEQ ID NO: 579611 - DNA, 115 bp, Homo sapiens
  misc_feature (81)..(81): n is a, c, g, or t
  misc_feature (100)..(100): n is a, c, g, or t
aaaggcgcaaacaaagaaaaaataatgtatatttttaagtatttgtccttgaattgttagctccttgttaaacaaacaaanggagagaaaatcccgaggnaagttttcctgggat

SEQ ID NO: 579612 - DNA, 333 bp, Homo sapiens
ctcatcaagaccattttaggggttatgaatttggctaacagtgtcaaaagggtcatgttcctggggactgagaatatggtgtgatgacctcacaattgttaaatccagaccttgtttaacaatcgccagtgtgtatctagccccatttcaggttgcagagagagcactctattatttggataatgaatacatcatgagtttgatagaagaaaactctaacgtcatccctcccatcatgttttcagccttataggatttcaaagaccaattgaatccgctattttggcgttgggacaagtgttgaaggcattatggaatgaccagaccatgttg

SEQ ID NO: 579613 - DNA, 281 bp, Homo sapiens
ggctcccgagtagctgggataacgggcacgtgctgcatgccaagttaatttttggtattttagtagagacggggttcaccatgttggtcgggctaagcttgagattcgtggcctcaggtgatccacccggtttggcctcccaaagtgctgggattacaggtgtgagccaccatgcctggccccaagggtgtgtattgaagttaggtcaggattaaggggaatcaagaggctgaactacctcctaatgcaggcttgtccaacccacggcctgtagggtgcat

SEQ ID NO: 579614 - DNA, 151 bp, Homo sapiens
gctacacatagctcgcaatgcaaaccacttactaccaggccattactgtgtacactggagagcttgagctcacactacaaagatcagaggacctacagagagggctcattggttagaggaccatggcttaccttacctgcctttgacccat

SEQ ID NO: 579615 - DNA, 867 bp, Homo sapiens
gttgccccgtggccgcccgggccccggcttggctgagctgggcatgtgcggcctggctgccctgggagctgggccattgactgatgctgctgccgcctgctgctggtgcctgcctgacgccggcctacgatgctgctgctgagaatgacaccggcgcccgccgagggtcagtgctgctggacttctgtgagcttctacggtggtgctggccggagactggcccagcgggccgaactgctgtggcctgcctggcgcggtggcttcggcgtggaccacggcaggtggctggagcagagctgccggcgtgctccatcttgcgccaagcagcatgcgtgggagtgctggctggtgctttgcttgcatgtggccgaggcaccgtggctgctgctactgcgcttgtgttgccagcgcatatctgcgtgcctcttccgaccacattcaggcaatgcttggactgtgctggctgtcgcgcttccttggtgcatgcttgctgggcctgaccttgcttggaggcgcttgcatgtgcccctcaagcctggttggatgggggggccggaccgtccgggacagttgacttgggtgttgcttgaacatggaatagctctcaggaattggttttcctccgggttcctgaaaccctagagagggggttacctggccattcaccggttgtgactgcgcttccagaaaactcagttgaaggcttgaggcttgtgcattccttgtaacagacctgggattgggcatgaagcgcctgggttgggcccttcccggacggtgtacactccttttctccctgtgcgacccctgtggagccctggtcgtttgccgttgctggttgggactctccggaacatccagggcacg

SEQ ID NO: 579616 - DNA, 596 bp, Homo sapiens
aattcgcggccgcgtcgacagaagacgacagaagggtgggcaggggggacagagtctcgctctgtcacccaggctggagagcagtagcgcgatctcggctgactgcaacctccgactccccggttcaagcaattcttctgccccaccctcctgagtagctgggactacaggcgcccgctgccacgcccggctatttttttgtacttttttagcagagacggggtttcaccgtgttgcccaggctggcaacccgcccaccttggcctcccaggtaggattacaggcatgagccaccgcgcctggccaattttgtattttagtagagatggggtttcactatgttggccaggctggtctggcactcctgacatcgtgatccacccgcctcgccctcccaaagtgttgggattacaagcatgagccatcgcgcccggccatcttgtttccacatttcaagctgcaaaggcagggcttgggccagctgttcagaaattaattagtttactaagagacgtcagattcccctgctctcatgtcactagtgaggtcttatacacacacataattgttcagcgtgctgactaaacgtggtgttg

SEQ ID NO: 579617 - DNA, 216 bp, Homo sapiens
aaactaatagggtggggtttttgttttgttttggggttttgttttgtttggttttacattttagttactgaacccttccaaggttatgtagaaagaaccctttttttgtccccaaaatagccaagagaatgcggtcaatattggggtactgtaatgtgaatttatgggggggaaaacaattttttgttccccttattaaacccttagggtccttta

SEQ ID NO: 579618 - DNA, 467 bp, Homo sapiens
  misc_feature (5)..(5): n is a, c, g, or t
  misc_feature (7)..(7): n is a, c, g, or t
  misc_feature (37)..(37): n is a, c, g, or t
  misc_feature (40)..(40): n is a, c, g, or t
  misc_feature (332)..(332): n is a, c, g, or t
  misc_feature (339)..(339): n is a, c, g, or t
  misc_feature (380)..(380): n is a, c, g, or t
  misc_feature (428)..(428): n is a, c, g, or t
  misc_feature (442)..(442): n is a, c, g, or t
attgncnttgcctgaaatgacctagccggctatcganggntcagccagcactccacaaagcaataaccattgacttacccctacaccaagcttggcgacatgtgctcggccagatcagagattgctgcccttcagaggcaccctcttcaggatcagagctttgtttctgagtaagagcaactagtattggctgggttgtgaggcccaagagctctaacttgagaaaatgccccaaatctaaacctttatccactgcccagcatgacatctgccataggttgaagcgttgtgggtcctgtgctacttgggacaggtgagagaaacaggtttgnaagccgnataccacagacccacagttcccgactccctccctggctggntcccgcgggtggccggcccctcatcctttcctaggctgggcctgtggnttcctacctttccntggttctcatgctcccaaagggtgt

SEQ ID NO: 579619 - DNA, 275 bp, Homo sapiens
tcgcgaacgtccgtaacaacgccactctgctaatactaagctaccgtgacgcctaccccttcgctggtgttctagctagtaggagtcggtatgcctcaatcccttctcgttcatgccttgagcgagcaagtcccgtctgttgtctagggggcaagaagccgcaatcccttatttccgcaccccaacctcttatctctgcaccccaatcccttccgagccccaacctcgtatctctgcaccccaatcccttatttccacgccccgacctcttacct

SEQ ID NO: 579620 - DNA, 116 bp, Homo sapiens
cgaaaacattcggagcgggggacatagcggatcgcttcacacggccacgttggtattgcagcttaccagctggctatgcgatataaagagaattctaaagtggattccattggggg

SEQ ID NO: 579621 - DNA, 614 bp, Homo sapiens
gggcttgggttcctgggtcggcagcccgggccccgaaggacctgggtgggcgcggagttgggcccggggtggtcgtgggctccccttgtcttcggctacgtcactgaggatggggacacgtgagtgaaccttaggctgccaaacggagccctaggacccggcgtcccattcctcattaatttctgatccctgaggcttggtaacctcatactcctaaatttgacttccgatggtgaacttcctgacctctaacccccgagtcctaacttttaacaaaaccaattttctatctagctatgatcctaacccaatcattttttcccttcttttcttgaacaatgattttcagctcctggaatccccattgtatcccctgataccccaaacctgactccagtcctgagacttttgttagaactggggcttttcctgacttttaccccccaaaaatgatctttgatttttagttcccgatttgagccctagagtttgatttccgaaattaaaacttggtccctgactttaagatcctgttttttgagcagggtttttcaaattttaaattcaaagagagagaaggtaagcttttttatgttgaattcctaattaaagta

SEQ ID NO: 579622 - DNA, 4143 bp, Homo sapiens
ccgctccacctctcaagaattccctggctgcttgaatctgttctgccccctccccacccatttcaccaccaccatgacaccgggcacccagtctcctttcttcctgctgctgctcctcacagtgcttacagttgttacaggttctggtcatgcaagctctaccccaggtggagaaaaggagacttcggctacccagagaagttcagtgcccagctctactgagaagaatgctgtgagtatgaccagcagcgtactctccagccacagccccggttcaggctcctccaccactcagggacaggatgtcactctggccccggccacggaaccagcttcaggttcagctgccacctggggacaggatgtcacctcggtcccagtcaccaggccagccctgggctccaccaccccgccagcccacgatgtcacctcagccccggacaacaagccagccccgggctccaccgcccccccagcccacggtgtcacctcggccccggacaccaggccggccccgggctccaccgcccccccagcccacggtgtcacctcggccccggacaccaggccggccccgggctccaccgcccccccagcccacggtgtcacctcggccccggacaccaggccggccccgggctccaccgcccccccagcccacggtgtcacctcggccccggacaccaggccggccccgggctccaccgcccccccagcccacggtgtcacctcggccccggacaccaggccggccccgggctccaccgcccccccagcccacggtgtcacctcggccccggacaccaggccggccccgggctccaccgcccccccagcccacggtgtcacctcggccccggacaccaggccggccccgggctccaccgcccccccagcccacggtgtcacctcggccccggacaccaggccggccccgggctccaccgcccccccagcccacggtgtcacctcggccccggacaccaggccggccccgggctccaccgcccccccagcccacggtgtcacctcggccccggacaccaggccggccccgggctccaccgcccccccagcccacggtgtcacctcggccccggacaccaggccggccccgggctccaccgcccccccagcccacggtgtcacctcggccccggacaccaggccggccccgggctccaccgcccccccagcccacggtgtcacctcggccccggacaccaggccggccccgggctccaccgcccccccagcccacggtgtcacctcggccccggacaccaggccggccccgggctccaccgcccccccagcccacggtgtcacctcggccccggacaccaggccggccccgggctccaccgcccccccagcccacggtgtcacctcggccccggacaccaggccggccccgggctccaccgcccccccagcccacggtgtcacctcggccccggacaccaggccggccccgggctccaccgcccccccagcccacggtgtcacctcggccccggacaccaggccggccccgggctccaccgcccccccagcccacggtgtcacctcggccccggacaccaggccggccccgggctccaccgcccccccagcccacggtgtcacctcggccccggacaccaggccggccccgggctccaccgcccccccagcccacggtgtcacctcggccccggacaccaggccggccccgggctccaccgcccccccagcccacggtgtcacctcggccccggacaccaggccggccccgggctccaccgcccccccagcccacggtgtcacctcggccccggacaccaggccggccccgggctccaccgcccccccagcccacggtgtcacctcggccccggacaccaggccggccccgggctccaccgcccccccagcccacggtgtcacctcggccccggacaccaggccggccccgggctccaccgcccccccagcccacggtgtcacctcggccccggacaccaggccggccccgggctccaccgcccccccagcccacggtgtcacctcggccccggacaccaggccggccccgggctccaccgcccccccagcccacggtgtcacctcggccccggacaccaggccggccccgggctccaccgcccccccagcccacggtgtcacctcggccccggacaccaggccggccccgggctccaccgcccccccagcccacggtgtcacctcggccccggacaccaggccggccccgggctccaccgcccccccagcccacggtgtcacctcggccccggacaccaggccggccccgggctccaccgcccccccagcccacggtgtcacctcggccccggacaccaggccggccccgggctccaccgcccccccagcccacggtgtcacctcggccccggacaccaggccggccccgggctccaccgcccccccagcccacggtgtcacctcggccccggacaccaggccggccccgggctccaccgcccccccagcccacggtgtcacctcggccccggacaccaggccggccccgggctccaccgcccccccagcccacggtgtcacctcggccccggacaccaggccggccccgggctccaccgcccccccagcccacggtgtcacctcggccccggacaccaggccggccccgggctccaccgcccccccagcccacggtgtcacctcggccccggacaccaggccggcccccgggctccaccgcccccccagcccacggtgtcacctcggccccggacaccaggccgcccccgggctccaccgcgcccgcagcccacggtgtcacctcggccccggacaccaggccggccccgggctccaccgcccccccagcccatggtgtcacctcggccccggacaacaggcccgccttggcgctccaccgcccctccagtccacaatgtcacctcggcctcaggctctgcatcaggctcagcttctactctggtgcacaacggcacctctgccagggctaccacaaccccagccagcaagagcactccattctcaattcccagccaccactctgatactcctaccacccttgccagccatagcaccaagactgatgccagtagcactcaccatagcacggtacctcctctcacctcctccaatcacagcacttctccccagttgtctactggggtctctttctttttcctgtcttttcacatttcaaacctccagtttaattcctctctggaagatcccagcaccgactactaccaagagctgcagagagacatttctgaaatgtttttgcagatttataaacaagggggttttctgggcctctccaatattaagttcaggccaggatctgtggtggtacaattgactctggccttccgagaaggtaccatcaatgtccacgacgtggagacacagttcaatcagtataaaacggaagcagcctctcgatataacctgacgatctcagacgtcagcgtgagtgatgtgccatttcctttctctgcccagtctggggctggggtgccaggctggggcatcgcgctgctggtgctggtctgtgttctggttgcgctggccattgtctatctcattgccttggctgtctgtcagtgccgccgaaagaactacgggcagctggacatctttccagcccgggatacctaccatcctatgagcgagtaccccacctaccacacccatgggcgctatgtgccccctagcagtaccgatcgtagcccctatgagaaggtttctgcaggtaatggtggcagcagcctctcttacacaaacccagcagtggcagccacttctgccaacttgtaggggcacgtcgccctctgagctgagtggccagccagtgccattccactccactcaggttcttcaggccagagcccctgcaccctgtttgggctggtgagctgggagttcaggtgggctgctcacagcctccttcagaggccccaccaatttctcggacacttctcagtgtgtggaagctcatgtgggcccctgaggctcatgcctgggaagtgttgtgggggctcccaggaggactggcccagagagccctgagatagcggggatcctgaactggactgaataaaacgtggtctcccactg

SEQ ID NO: 579623 - DNA, 186 bp, Homo sapiens
ccctccagccagagatattccaactttgcaataaaactttccttcacacagaaacatttgcagcctgcggtaggctcccccttcctaaacccttaaatgcccttagtttgtaaaagaatgtccctgaccgaaatcggccagaagcccctttcaggtttattcccaaaataaacctgtttttgttga

SEQ ID NO: 579624 - DNA, 1738 bp, Homo sapiens
ccgctccacctctcaagaattccctggctgcttgaatctgttctgccccctccccacccatttcaccaccaccatgacaccgggcacccagtctcctttcttcctgctgctgctcctcacagtgcttacagttgttacaggttctggtcatgcaagctctaccccaggtggagaaaaggagacttcggctacccagagaagttcagtgcccagctctactgagaagaatgctgtgagtatgaccagcagcgtactctccagccacagccccggttcaggctcctccaccactcagggacaggatgtcactctggccccggccacggaaccagcttcaggttcagctgccacctggggacaggatgtcacctcggtcccagtcaccaggccagccctgggctccaccaccccgccagcccacgatgtcacctcagccccggacaacaagccagccccgggctccaccgcccccccagcccacggtgtcacctcggccccggacaccaggccgcccccgggctccaccgcccccccagcccacggtgtcacctcggccccggacaccaggccgcccccgggctccaccgcgcccgcagcccacggtgtcacctcggccccggacaccaggccggccccgggctccaccgcccccccagcccatggtgtcacctcggccccggacaacaggcccgccttggcgctccaccgcccctccagtccacaatgtcacctcggcctcaggctctgcatcaggctcagcttctactctggtgcacaacggcacctctgccagggctaccacaaccccagccagcaagagcactccattctcaattcccagccaccactctgatactcctaccacccttgccagccatagcaccaagactgatgccagtagcactcaccatagcacggtacctcctctcacctcctccaatcacagcacttctccccagttgtctactggggtctctttctttttcctgtcttttcacatttcaaacctccagtttaattcctctctggaagatcccagcaccgactactaccaagagctgcagagagacatttctgaaatgtttttgcagatttataaacaagggggttttctgggcctctccaatattaagttcaggccaggatctgtggtggtacaattgactctggccttccgagaaggtaccatcaatgtccacgacgtggagacacagttcaatcagtataaaacggaagcagcctctcgatataacctgacgatctcagacgtcagcgtgagtgatgtgccatttcctttctctgcccagtctggggctggggtgccaggctggggcatcgcgctgctggtgctggtctgtgttctggttgcgctggccattgtctatctcattgccttggctgtctgtcagtgccgccgaaagaactacgggcagctggacatctttccagcccgggatacctaccatcctatgagcgagtaccccacctaccacacccatgggcgctatgtgccccctagcagtaccgatcgtagcccctatgagaaggtttctgcaggtaatggtggcagcagcctctcttacacaaacccagcagtggcagccacttctgccaacttgtaggggcacgtcgccctctgagctgagtggccagccagtgccattccactccactcagggctctctgggccagtcctcctgggagcccccaccacaacacttcccaggcatggaattcc

SEQ ID NO: 579625 - DNA, 2255 bp, Homo sapiens
ccgctccacctctcaagaattccctggctgcttgaatctgttctgccccctccccacccatttcaccaccaccatgacaccgggcacccagtctcctttcttcctgctgctgctcctcacagtgcttacagttgttacaggttctggtcatgcaagctctaccccaggtggagaaaaggagacttcggctacccagagaagttcagtgcccagctctactgagaagaatgctgtgagtatgaccagcagcgtactctccagccacagccccggttcaggctcctccaccactcagggacaggatgtcactctggccccggccacggaaccagcttcaggttcagctgccacctggggacaggatgtcacctcggtcccagtcaccaggccagccctgggctccaccaccccgccagcccacgatgtcacctcagccccggacaacaagccagccccgggctccaccgcccccccagcccacggtgtcacctcggccccggacaccaggccgcccccgggctccaccgcccccccagcccacggtgtcacctcggccccggacaccaggccgcccccgggctccaccgcgcccgcagcccacggtgtcacctcggccccggacaccaggccggccccgggctccaccgcccccccagcccatggtgtcacctcggccccggacaacaggcccgccttggcgctccaccgcccctccagtccacaatgtcacctcggcctcaggctctgcatcaggctcagcttctactctggtgcacaacggcacctctgccagggctaccacaaccccagccagcaagagcactccattctcaattcccagccaccactctgatactcctaccacccttgccagccatagcaccaagactgatgccagtagcactcaccatagcacggtacctcctctcacctcctccaatcacagcacttctccccagttgtctactggggtctctttctttttcctgtcttttcacatttcaaacctccagtttaattcctctctggaagatcccagcaccgactactaccaagagctgcagagagacatttctgaaatggtgagtatcggcctttccttccccatgctcccctgaagcagccatcagaactgtccacaccctttgcatcaagcctgagtcctttccctctcaccccagtttttgcagatttataaacaagggggttttctgggcctctccaatattaagttcaggtacagttctgggtgtggacccagtgtggtggttggagggttgggtggtggtcatgaccgtaggagggactggtcgcacttaaggttgggggaagagtcgtgagccagagctgggacccgtggctgaagtgcccatttccctgtgaccaggccaggatctgtggtggtacaattgactctggccttccgagaaggtaccatcaatgtccacgacgtggagacacagttcaatcagtataaaacggaagcagcctctcgatataacctgacgatctcagacgtcagcggtgaggctacttccctggctgcagcccagcaccatgccggggccctctccttccagtgcctgggtccccgctctttccttagtgctggcagcgggaggggcgcctcctctgggagactgccctgaccactgcttttccttttagtgagtgatgtgccatttcctttctctgcccagtctggggctggggtgccaggctggggcatcgcgctgctggtgctggtctgtgttctggttgcgctggccattgtctatctcattgccttggtgagtgcagtccctggccctgatcagagccccccggtagaaggcactccatggcctgccataacctcctatctccccaggctgtctgtcagtgccgccgaaagaactacgggcagctggacatctttccagcccgggatacctaccatcctatgagcgagtaccccacctaccacacccatgggcgctatgtgccccctagcagtaccgatcgtagcccctatgagaaggtgagattggccccacaggccaggggaagcagagggtttggctgggcaaggattctgaagggggtacttggaaaacccaaagagcttggaagaggtgagaagtggcgtgaagtgagcaggggagggcctggaaaggatgaggggcagaggtcagaggagttttgggggacaggcctgggaggagactatggaagaaaggggccctcaaaagggagtggccccactgccagaattc

SEQ ID NO: 579626 - DNA, 648 bp, Homo sapiens
ttgcattaaccccatttggtcccgtataagcgggggttgcgccttgtgtgttccccgcccccgtggtttcttaacgatctgaggggcgccccccgggcatgccggtggtgtttacgcgccccctttttggggggcggtttataggcacagcgcttgggccccctttgggtttatcaccccccctcgcgtcagacaccccgttattggctgtcttcgtcttgaaatttatgtggggtacaatcttcgtctctatagccatattatttagctgaaccagagaaaaatagactgtctcaacccacaaatgcttccacgtttattatttcacaccaatacaccccatttttgcgaatacccccacataaactcaccccgcctcatttctttattccctcccccctaaacgtttcactcccttcttttttccgcgcgctcgtcataaatacatcccccgcattcattccacaaacactaacggcgcctccccacatagcgaaacaagggcacacccacaatattctctgctccacgaataaagcacgcccccctgttaaacatttaatatgtccccccccccgccccccccagaaatagaagaatcatttttttcatcacaaacataaacaaataaaaaaacaaatcataaca

SEQ ID NO: 579627 - DNA, 1646 bp, Homo sapiens
  misc_feature (135)..(135): n is a, c, g, or t
  misc_feature (208)..(208): n is a, c, g, or t
  misc_feature (264)..(264): n is a, c, g, or t
  misc_feature (429)..(429): n is a, c, g, or t
ctcttgcatccgacagacatcatctctcttgtttgtcttagatgttattatcttttatatctgttgttgtttgtcaatacttgttcattcttcttcttcttactgtgttttattgttacatcatttgctgttggngaataaatattcgtttgcgagatactccaccattagctttctgttggatataattctatcgctccacgtttgngttgtggtggccgccccacgataataacatttcctctcttcttgtttggtggcctnctatatttatatcttccctcgtgtttttgtcatacaaccacattagtcccccaccttttattagagtattctcccactaagttccccacgcctttgtggttattactccttctaaacatcattcctgtgttgattattctcacacgagcacgactgttgtttttntcgccccctataattgtaaccctgttgtcttgtgtcccggctgtcccaatatattctccatgttgtaaattatcctttggccgccaccacagaattacccgttgtttccccccctcttgagccaaatccctgggatgtttaaaatttgtctcgcgcgttgtgcgcttttttggtccatgtgcggttgtccctccccccaacttttgaaaattaaggtttatccgttggaaacccttattaatcggccaaccgttggatgtcctaataaattgtggaatgtttttcacacgtcgccacacggttggtgaatggcgaccgccaatttgatgttctcccaggtggtgggacccaccccccttggtgactcccagaggtgttccccgaatgttagatcttgggaaaaagggggtcacattttggcgcaatttgtggtcccgcccatatagtttaacttcccaggagatatgtgcccacaatagtgaataacagattctctgcacatattttaccccccaggttttggagtttcttccgtggtgctcgcacttttgcacaaaatttgttgaagattttataaaattctatatcggtgtgttacacttttttgttgtatacacaccttataacagtggagatcgcgtctattacaaaggtggcgcacaggtgaaatttatgagcgacgcacactctatggggtgttgttttgagaagacgcacatttctcggcaccacattttggttatatactaacacgcacacatcctttgcttgcagatataaagtaataacatctccacgcggtgtgcgtgcacactccacatggaacacacacatggtatgttaacgcacacgcgtttataaatttagcacattctctttcttatacctcgaatacgttttcacctcactttaatatatccacgctatggagagagacctcgttctaagaatgttggggcacgcttctattgactcttaaagttctgtaaccacatcgttaataacctcgaaatttagtacccctagttttgttaacgctattaggattttctaatagaacttactccccctgcctccccacgccttaatgtttcttttaatgaactttctggagtcctgaggctccctttgcacgtctgaaaaaaggtaattgccacgtcagaactgtgtactgatgatataaagcctcctggtagccaataaaaagttgtccctta

SEQ ID NO: 579628 - DNA, 374 bp, Homo sapiens
  misc_feature (34)..(34): n is a, c, g, or t
  misc_feature (38)..(38): n is a, c, g, or t
  misc_feature (72)..(72): n is a, c, g, or t
  misc_feature (117)..(117): n is a, c, g, or t
  misc_feature (137)..(137): n is a, c, g, or t
  misc_feature (164)..(164): n is a, c, g, or t
  misc_feature (174)..(174): n is a, c, g, or t
  misc_feature (178)..(178): n is a, c, g, or t
  misc_feature (180)..(180): n is a, c, g, or t
  misc_feature (370)..(370): n is a, c, g, or t
gggccggagctgcggggagggagttggcgcctangcangctccatccccgactctgcagtggactcggccgnagaatcggggtcccgggctcctggaacttgtcccccccaggccgnggcgaggaggtcactgcagncggtgggacccgggccgggggcgggtnactggaaccngganangcgggaaggaggaggggatcgggcccaagggacacgaggtgggtcgcgggaccccgatatctcgggacaggcgtcttgccgcttccgggcccagccgccccctttcgacacatacttcgatgcatgagacaatggggggtgtccttttgttcgttcctgggcggggaaccccgggccccacccccaattncaag

SEQ ID NO: 579629 - DNA, 135 bp, Homo sapiens
gcggccgcctactactactactgctcgaattcaagcttctaacgatgtacggggacatgtgcaataagctctccataagtaaataaagtttaagttgtagtcatttttttcccacacttgtgtggaatgaaaaaa

SEQ ID NO: 579630 - DNA, 563 bp, Homo sapiens
  misc_feature (362)..(362): n is a, c, g, or t
  misc_feature (439)..(439): n is a, c, g, or t
aattttagtgttaaaaaattgttcgtatcctgaagggagggattattggagagaatgaatgatgtaggatgaacttgtaaattcagttttcggcagagtctaaaattaagtgatgattggcacttaatgaagctactaaaatttatgtagattttaatgtctcattagtaatcgcatctgtatctggttttataaaagtaatgaaattgaagacctgtacaaatacagaatgaatgaagcaaattctgctaacatcatgttgaatgttttctcagaaaaagaggaaatacgaagagaagagatttgttttgactgtgatttaccctcacccccatggatactttctttacttcctacctttnttctttttcttttccttctaaagattctggcaatgggtgtttcagtgttttttaagcttaatatttctggtactcanttatgtaaagtgatttctgaatgttaaaggagatttctttttaaatatattttcacttatttttagctttatgatgagaatcttattttttaaatctgtaacttgttatggctacatgattagt

SEQ ID NO: 579631 - DNA, 2231 bp, Homo sapiens
gatgtgggcacgcctcagagccagaagtttatggctcccacctgctcaatctgacaggaagcttctgctccccagttctccccagccactgtggtctacagattccaggaaacccatccccctgtgacctcagggtgtgctctgttctccaccctagggaccagaaggagccaggagtaaagaactggcttacttggccgccactgggaaattctgggtaattcgagacgccctggaatttggacccactccgctgataggtggtgggcagggttctagggaacacaagaggcggagccaggtggcttccctgtgctggcattcttggctctctctctctctctttctctctctctgtctctctctctctctctgtctctcagccttgaagccgtttccctctgcgattcatgtaagtgtgactcgatttcagggaaagggaactcgcgtgggctgaggagaccggagtggacgggctggggaaggcaccgtgatgcccgcaaccccgtccctgaaggtggtccatgagctgcctgcctgtaccctctgtgcggggccgctggaggatgcggtgaccgttccctgtggacacaccttctgccggctctgcctccccgcgctctcccagatgggggcccaatcctcgggcaagatcctgctctgcccgctctgccaagaggaggagcaggcagagactcccatggcccctgtgcccctgggcccgctgggagaaacttactgcgaggagcacggcgagaagatctacttcttctgcgagaacgatgccgagttcctctgtgtgttctgcagggagggtcccacgcaccaggcgcacaccgtggggttcctggacgaggccattcagccctaccgggatcgtctcaggagtcgactggaagctctgagcacggagagagatgagattgaggatgtaaagtgtcaagaagaccagaagcttcaagtgctgctgactcagatcgaaagcaagaagcatcaggtggaaacagcttttgagaggctgcagcaggagctggagcagcagcgatgtctcctgctggccaggctgagggagctggagcagcagatttggaaggagagggatgaatatatcacaaaggtctctgaggaagtcacccggcttggagcccaggtcaaggagctggaggagaagtgtcagcagccagcaagtgagcttctacaagatgtcagagtcaaccagagcaggtgtgagatgaagacttttgtgagtcctgaggccatttctcctgaccttgtcaagaagatccgtgatttccacaggaaaatactcaccctcccagagatgatgaggatgttctcagaaaacttggcgcatcatctggaaatagattcaggggtcatcactctggaccctcagaccgccagccggagcctggttctctcggaagacaggaagtcagtgaggtacacccggcagaagaagagcctgccagacagccccctgcgcttcgacggcctcccggcggttctgggcttcccgggcttctcctccgggcgccaccgctggcaggttgacctgcagctgggcgacggcggcggctgcacggtgggggtggccggggagggggtgaggaggaagggagagatgggactcagcgccgaggacggcgtctgggccgtgatcatctcgcaccagcagtgctgggccagcacctccccgggcaccgacctgccgctgagcgagatcccgcgcggcgtgagagtcgccctggactacgaggcggggcaggtgaccctccacaacgcccagacccaggagcccatcttcaccttcactgcctctttctccggcaaagtcttccctttctttgccgtctggaaaaaaggttcctgccttacgctgaaaggctgaagtggggcgcgcgaagggcggcgaagcggagacggcggctctccgggatccagctccgcccctggccagtgtgcggcccgggggctccctgtgcccgcgtgaggcgagagaacaggggacttgagtctcgaacagcggttgtttttactttatttatcttaggccctcagctccctgacgtcctgagcctccctgtgacgctctggccttctctgcacctcagagtgcagaaccacagacggcttcggctgtgcctagggcaacagccaacctaggagccagcgggctttcggggaaaaaaaagaaaaagacatctaaaataaaatgtttaaactgtttc

SEQ ID NO: 579632 - DNA, 378 bp, Homo sapiens
gacggtgagcagatggttgggctaacttagagcagagggacagcttttcattggagactggaaggaaatgaggatgaagggagcttacagagtgggccaataaagtaagggagggtgccatgatggcctgtttgctctgaagggaagatcaggtgtctgctggacaagcagagtagggaatttggtaaagagttgggaaaaagtgatgaaggcctccaaaagctgttgagaaaaatgagagaggaagctgatcaagaacatttaaaaggttgcctggcctaattaagggcccaactaagaatggttgccacaagcttaaactggcttagtctgcacagttgtggttacacagcatccctcagcagtctgatggaatat

SEQ ID NO: 579633 - DNA, 367 bp, Homo sapiens
agttgttcaagcaacatcaccatcaaagaaatataagttaataccataatgtgatattactacacctccatgcatggatctttccacattgcttatgggtaatagtatgaccactctggaaaatggtttagtggtttcttacaaaactaataatacacctactatactattcagcaatcatattactgggtgtgtatctcagagaaatgaaaacatacatccatacaaaaacctgtacatgaaattcgttcatagcagagctgttttcaatgatcaaaaaacagaaacaacccaggtgtttggttaataggtgaatggttaaaaaaattatggtacatccataccatggaatactactcagtgatta

SEQ ID NO: 579634 - DNA, 145 bp, Homo sapiens
gggacacatgacaaattataaccaagcataatatagcgaggactaacccctataccttctgcataatgcattaactagacataactttgcaaggagagccacactaagacccccggcaccagacgagctacctcagaacagctaa

SEQ ID NO: 579635 - DNA, 366 bp, Homo sapiens
  misc_feature (3)..(3): n is a, c, g, or t
gtntcatacacggatcccgacctagacgtacacaggacatttgagtttatcaaactgaatgttgtccagagtttgaatcaaacccctggacttttttgtgtgacgttctcttaggaagctttcattgatggtagaatagtttcgttcctcggtccttttagatacatgtctcatcttagacaattctttttgaattttatacttttatgtttatccttaaaataactgtggtagcgtaatatattttactttcagttatggctagctcggatagactcttactgagaagtagttctatgggtgtattattacattgctatttatcctgtttgacttaaacagtgaatcactgttttacttctagtt

SEQ ID NO: 579636 - DNA, 164 bp, Homo sapiens
ctccaggcgctgttgggcactcgggacataagccaaatgctgattaaattgtggaaggagaattctttgtagatggatctctctcacttaattccgaccatactgctgctataaggtcaagtatagccttggttcctctacctctgcagttcaaccctgtgtag

SEQ ID NO: 579637 - DNA, 628 bp, Homo sapiens
  misc_feature (25)..(25): n is a, c, g, or t
  misc_feature (241)..(241): n is a, c, g, or t
  misc_feature (243)..(243): n is a, c, g, or t
  misc_feature (251)..(251): n is a, c, g, or t
  misc_feature (253)..(253): n is a, c, g, or t
  misc_feature (279)..(279): n is a, c, g, or t
  misc_feature (299)..(299): n is a, c, g, or t
  misc_feature (303)..(303): n is a, c, g, or t
  misc_feature (305)..(305): n is a, c, g, or t
  misc_feature (311)..(311): n is a, c, g, or t
  misc_feature (313)..(313): n is a, c, g, or t
  misc_feature (344)..(344): n is a, c, g, or t
  misc_feature (346)..(346): n is a, c, g, or t
  misc_feature (370)..(370): n is a, c, g, or t
  misc_feature (374)..(374): n is a, c, g, or t
  misc_feature (378)..(378): n is a, c, g, or t
  misc_feature (421)..(421): n is a, c, g, or t
  misc_feature (515)..(515): n is a, c, g, or t
  misc_feature (538)..(538): n is a, c, g, or t
  misc_feature (561)..(561): n is a, c, g, or t
  misc_feature (627)..(627): n is a, c, g, or t
atcagaaaagccaattgcagcaagncataaggcacattagtttgtatgtatactgtgctagtttagaaaacttgggaagaagattcagaaaagagttagaattgtggcacacaattttatgcagttcgtggagactgatggtgtctccactgggagtctcaccacttctctttagactgttccgaagctgcatggtttttggtgcattatatcaggatattttcatctggacaatggagananggatattnanactttaataaagtatgaaaaaaatanccatagccacttaaattaanaaangncatcantnagatcgaaataataagattctttcatttgtntngttggattaatttcactaactganttcnaggngtgtccaggatattttggggatgtcgtgtctggaaaatctganattgggttaaatgaaaggccatttgggtctatctggatatcagggatacaatcataatcactctatatggaagctgagtgatataggaggaatnatagttgcaatgagataagagtnataaaaatcagaaaaggtaactnttacaactgacttggctagggaagggatgggtagttgagcccttctgtctactctatgtgtctgtnc

SEQ ID NO: 579638 - DNA, 518 bp, Homo sapiens
tcagcctcccaaagtgctgggatcacaggcgtgagccactgtgccctgcctcctccatcactttcttcaggggaaagagcatcatatagcatctttgggaagagcattcatgggaagccactgaagaattgtaagcaggagtggatgacatctgtgtttgttggagatcgccttagaggagaatagtttcaggttgctgtgtcacacaaccaagtgatactatttacatagaaaaagtgcaaaatagccttaaataagagcaggtaagacagggcaggaagacttacaggaggctactgaaatgagctgtctctgcagtaggattagggaagagggaatgaaaagaagtatttaagcagggagaatttacgagactagtatggaggaggaggaggtgtgcacagagatttgtaggtgtgataggagaaaggcggactggtaagtttcttccttaggcatcttgagagaaagatggcaccatttcctaaaacagggaatagaggcagaagaacagttta

SEQ ID NO: 579639 - DNA, 758 bp, Homo sapiens
gctcactgcagaccttcgagtcgtacttgctcttcgagggcgagaatgaagatcaccattaagaaggacaccgagatggtacctcaatgcactgtctagttcaccattcaaccaaagaagactcacatactggtgaaacatccattaaatcacaacatctcataaaagacccgccacagtgcatcatatttgctggactacgaatatgtccctctcaatcctcgttatggtagtcacgaaaggagtccatacatcccggatgtgccacgagcgacggccaaggaactacaggctcgccgcaaggcaagcactttatacggctaacgctcaatgtacccggaccgcgtccatccagcgtgaagcttgtcccctgtgctatgaggagcgatgcccgcatgttccgcggtgtggccctaataaagagatgacccataggccaaggcaaagggcacactgtgacgggctaaggtgtggtccgaatgaacgcgggggcgtcattgctgttcgaggccctgtttgacgccactcggttttggcctaaagcgttgttgggtctttgtaactcacctaccgggggttaccaatgtgataagtcgaaacaaccccgcacgcggacgaaagccggggtcgcctggagcttcaagcctaaggtgcgcaacttggggttaccctggcacccatgttggtctatgtgggcacaggaacgcccacccccatttgccaaagagactcccccccctttgagggaaaaccccaaa

SEQ ID NO: 579640 - DNA, 427 bp, Homo sapiens
actgggctagctgatagcctacgaggatagtgatgactcgctacagtctacgctgcaagagtcgaccatgcagaatcaaaacgagaggagaatagtttcaggttgctgtgtcacacaaccaagtgatactatttacatagaaaaagtgcaaaatagccttaaataagagcaggtaagacagggcaggaagacttacaggaggctactgaaatgagctgtctctgcagtaggattagggaagagggaatgaaaagaagtatttaagcagggagaatttacgagactagtatggaggaggaggaggtgtgcacagagatttgtaggtgtgataggagaaaggcggactggtaagtttcttccttaggcatcttgagagaaagatggcaccatttcctaaaacagggaatagaggcagaagaacagttta

SEQ ID NO: 579641 - DNA, 171 bp, Homo sapiens
  misc_feature (87)..(87): n is a, c, g, or t
  misc_feature (127)..(127): n is a, c, g, or t
tagactactcctgaggaacacatctacatacagatctacttcctctatggaaagctacccatcatatctcagtcacctggtgacttnccaaatactaaagatatttcggagcattcctgacaacccnctttcttaagaacgagtgagggaaacgtcattttggttctttca

SEQ ID NO: 579642 - DNA, 403 bp, Homo sapiens
ctgtgaggaaaggtattcctgctaatgctaggctgccaatggtgagggaggttgaagtgagaggagaatagtttcaggttgctgtgtcacacaaccaagtgatactatttacatagaaaaagtgcaaaatagccttaaataagagcaggtaagacagggcaggaagacttacaggaggctactgaaatgagctgtctctgcagtaggattagggaagagggaatgaaaagaagtatttaagcagggagaatttacgagactagtatggaggaggaggaggtgtgcacagagatttgtaggtgtgataggagaaaggcggactggtaagtttcttccttaggcatcttgagagaaagatggcaccatttcctaaaacagggaatagaggcagaagaacagttta

SEQ ID NO: 579643 - DNA, 1028 bp, Homo sapiens
  misc_feature (102)..(102): n is a, c, g, or t
  misc_feature (146)..(146): n is a, c, g, or t
  misc_feature (151)..(151): n is a, c, g, or t
  misc_feature (184)..(184): n is a, c, g, or t
  misc_feature (218)..(218): n is a, c, g, or t
  misc_feature (220)..(220): n is a, c, g, or t
  misc_feature (226)..(226): n is a, c, g, or t
  misc_feature (239)..(240): n is a, c, g, or t
  misc_feature (243)..(243): n is a, c, g, or t
  misc_feature (245)..(245): n is a, c, g, or t
  misc_feature (248)..(249): n is a, c, g, or t
  misc_feature (255)..(255): n is a, c, g, or t
  misc_feature (302)..(302): n is a, c, g, or t
  misc_feature (305)..(305): n is a, c, g, or t
  misc_feature (307)..(307): n is a, c, g, or t
  misc_feature (321)..(321): n is a, c, g, or t
ccacgcgtcgccacgcgtcgctggctccagttctagtgactcagagggctctagccttcctgtgcaacctgaggtggcactgaagagggtccccagccccancccagccccaaaggaggctgttcgagagggacgtcctccggagnccaanccccagccaaacggaagaggcgctctagacagnttccagttccagctcctcctcttcatcttcactncntcctcnctcctcctcctcnntcntnacnncctccntcttcctcttcttcttcttcctcctcatcttcctcctcctcgtcgtnttncntccacttcccctgnctaagcctggccctcaggccattgcgccaaaacctgcaagcccccaagaagcgcacacccctggacgagacggaggtgagatgcatgtacttgcactgacgttgaacacggatggagcatggcgggcagtgcacctctgtcccacgcacgacagaggagccacctgaggcaatggtgaacgcctcaccacagacttggcgactggttacctcaaccgctggaccctttgacgaccccattcctagcgtcagctgagacggcagcgaagcggcactctggcttcctaccatacggtcccgcaccaatggcgctacggattcggcacacacacagggactacattgggcccgaaagcgctgccatggccggcacattccaacaacgtcgagacggccaaccaagagcgacagggaacgcaaggggagggggtaccgttgagaaaggacaccattaacgcctcactcgcccataccgcattcaaaaccaaacaattaaagcgcaggggatttcacacaaagggagtatagtattaaagacctagtcgggactacgtccccccactgattcagagcataacattggagaacaggcagggacgtcactggcgttctctagtgacaccaacgacagaatccgatatccctataaacatcacacaggaatcagataccttgaacgcacccacaactgggccagtacctacccca

SEQ ID NO: 579644 - DNA, 211 bp, Homo sapiens
cacccctgatgcatcttattttctattgtaatgcacgatgcagtaagcattctcttaattcttccgcaaagattacgatacgatttaaacgttacctcgtctatcgctccggatgcaaaaatcagcttgagccagctctcggtttcggcacactccttgcgagcaatttcaaattttgaatgcatatccgcaaggctttggggatattgag

SEQ ID NO: 579645 - DNA, 720 bp, Homo sapiens
  misc_feature (102)..(102): n is a, c, g, or t
  misc_feature (146)..(146): n is a, c, g, or t
  misc_feature (151)..(151): n is a, c, g, or t
  misc_feature (184)..(184): n is a, c, g, or t
  misc_feature (218)..(218): n is a, c, g, or t
  misc_feature (220)..(220): n is a, c, g, or t
  misc_feature (226)..(226): n is a, c, g, or t
  misc_feature (239)..(240): n is a, c, g, or t
  misc_feature (243)..(243): n is a, c, g, or t
  misc_feature (245)..(245): n is a, c, g, or t
  misc_feature (248)..(249): n is a, c, g, or t
  misc_feature (255)..(255): n is a, c, g, or t
  misc_feature (302)..(302): n is a, c, g, or t
  misc_feature (305)..(305): n is a, c, g, or t
  misc_feature (307)..(307): n is a, c, g, or t
  misc_feature (321)..(321): n is a, c, g, or t
ccacgcgtcgccacgcgtcgctggctccagttctagtgactcagagggctctagccttcctgtgcaacctgaggtggcactgaagagggtccccagccccancccagccccaaaggaggctgttcgagagggacgtcctccggagnccaanccccagccaaacggaagaggcgctctagacagnttccagttccagctcctcctcttcatcttcactncntcctcnctcctcctcctcnntcntnacnncctccntcttcctcttcttcttcttcctcctcatcttcctcctcctcgtcgtnttncntccacttcccctgnctaagcctggccctcaggccatggaccccaaaggctgcaagcccctacagaagccagcgcgcaccatggagagcggaggtcccgacagcacacccggaacgccaatagactaccctcagggaccatcatacggtcccgtcagctactcgcctgatggagcgttcggcccgaacaccactcggcacacccaagcaccatcaacccaacggggaaacccaagccagaagcaagaccaagacaagatggaaagcagcagaggtacaccgggaagcaagggcccaaacggtggggggaacaagcacgcatcccacacaggacaaaaaggcagaaggcgaggcgcagcaaacaatagaacacatcgaagacacaagaagaacaaacgacgaactacaagggaac

SEQ ID NO: 579646 - DNA, 123 bp, Homo sapiens
gtcgactctaaggatccggcatcctggaccttctccacacacacacacacacacacttgcttcttctgcatcgggaactggaagccagcctaggtgtggtggctcatgcctgtaatcccagca

SEQ ID NO: 579647 - DNA, 891 bp, Homo sapiens
  misc_feature (657)..(657): n is a, c, g, or t
tcccggccaaaaaggtgcttaaggtttttaaggggtccaaaatttccgggcaaaaataaggggatctgagggtttcttttcaaacctaggatttgcggggttgaaaacgcatgggcagggggcggtggggccccaggggttggccttcagagggccggtcgttccaggggaagacgcagcagcaggagaaagacgcctcaggagaagattgaccccttcaggggatgtggcttgtgtcctctcctcaccaaggggggcctgtgaagccgggttccctcacattctcccttcaagaacacagtaaaatctgctcgctaacaggagacacagctgctcacaggagaggcgcacgccccgggtctgggccggagaaggtcttctcacatccatgtctggtcaggagaatggccggggtgtccccacagcggccaatgttggttgggttgagaggtgtccaggtctacaacagcaggggtgtggggttgggggccaacaaggagggttgcgcgcgcagatcgtagatgtgacacgcagtctggcaagaagctctcgcccggaaaccccttgttgggttgggccacacaggggggtctgagaaaagagtaagatctggcccacttcattgagaggcgagacacccggctaaatatactccgngatataaaaaagtgtctcattgagaccaaaaccgagaattaatctctcagggagggaaacaccaagttgtggctcatatggattggtcctttctacaccccccggggagaaaggcgcacgaccaggcttgccgtaaaaaccaggaaaattcgccgggaaaaaaaccttacggcaaaattttgtaccaaagaccaagcggggttggtcatcttttcggattgggaatcaagaacc

SEQ ID NO: 579648 - DNA, 371 bp, Homo sapiens
acgctgtatttcaaccgcaacccttgatagaaaggagtacgcagccccgaattaataccaagtagaagggcaatgcttttcagcattaaacatgcaaggtgacttaaaccagcttaaagtttagtttaaaagttgtaggtgataaaacatatttgacggcgcacttttaaaaagagattcaaaccgcaaggtgattcaaaagaccttgcaaatcccatgacgccagggcgcaattgacgtgatttcaaagcctcagttacacgcatttactcaaacgccagacgcaaaatggcaaagattcaattagggcagtggtcaggcatgcaaaccaatttgggcagcaagcatagcaagttctgcacagtggcaaa

SEQ ID NO: 579649 - DNA, 271 bp, Homo sapiens
cacgatggcgcgtcacgccggagcacagagcctcgccttttgctgatccgccgcccgtcacacccgccgccagctcaccatggatgatgatatcgccgcgctcgtggtcgaaaacggctccggcatgtgcaaggccggcttcgcgggcgaggatgccccccgggcggtcttcccctccatcgtggggcgcccccaggcaccagggcgtgatggtggggcatgggtcagaaggatacctatgtgggcgacgaaggcccagagcaggagaggc

SEQ ID NO: 579650 - DNA, 119 bp, Homo sapiens
gttagggtgcactcgggtgggccctgacatgcatggagtccccgcataaaggtggcccctgcaggagtcaggcctggtctcacactcaataaagacctgactgaagatgcacaaatgga

SEQ ID NO: 579651 - DNA, 170 bp, Homo sapiens
attgtagagaaggctccaaaagccaggatgcctgatctggaacagaggaagtacctagtggcctctgaccttactgttggccagtactacttccttatccggaagataatccacctgagaactgaggacgccttattcttctttgtcaacaacacaccacaacaaaccaa

SEQ ID NO: 579652 - DNA, 161 bp, Homo sapiens
tgtaagcggagcatcagtagcggacgcggtcacgcctgctgggggtatgttgtgttgcctaggcttgtctaggaactcctgggctcaagggatcttgtagccttagcctcctaaagtgctgggattataggcatgagtcactgtacccggcctgctccgct

SEQ ID NO: 579653 - DNA, 134 bp, Homo sapiens
  misc_feature (5)..(5): n is a, c, g, or t
cgaanaccttcagcgccgctgactgcatcacgccgctgactgcatccaacgccgcctgactgcatccaacgccgcctgactgcatccaacgccgcctgactgcatccaacgccgcctgactgcatccaacgccg

SEQ ID NO: 579654 - DNA, 800 bp, Homo sapiens
aggctcaaaaaaaaaaaaacccattggcagaggcagtttggccaacacaagggctctttcaagccgactttcacaaagagagccggactggtaagtgggcttctggtctctttagagccaagaaaatagtaattaggtgggcctagatataggaagggcagaataagcacttactcccccggccttccaagatgcaagaggagaagcaggccaaccctcaataaattggcaagcctgaagagaagtggatcttagagaaagcagagaacagaatgggcactggggatagacatctggactctattcagcccggtagtctggtgatctgggagagtccagttaaggtaacccagatttttggacaaccgccttcctggtgagccaaagttttctcattacccctccactgggggaagcagctgaggcccaggccttgtgctccctggggaaattctcttctctccatcttccggttgcatgggccatgttactggtgccaaagtgtcttaattctgtgtcccatctattctcaggggcctggaacccacataggagtcgggggggagggatggcatgggtatcatgcacgtagtagatccgggtggtgtgtatcatataagagagacgcctccccttatagtggtcgacgcagccgtcctccctgaccagggattggaaataaacaccatggctctgttactgtaaacataaacagacacacacaaagacagaagccacaaaaacaaagacaaaacactaacacacaaacaacaaaccaagagcaaccacagcgcggggcc

SEQ ID NO: 579655 - DNA, 312 bp, Homo sapiens
cactacctagcctacgtagagcaccataggctcccaggccacgcacgttacccgcacaggggctactcatacccctagacagcccagctaccaagcaacagacaccccagcggcctgtactactaccagcggagcaaagagcctagagcccgcagcctagctagggctaatacacgcagccgcgccctacataggcctgccccagctagtaccctatgcaggacgctacaccagctactagtagctaggtggcactgcctggctaccacagggaccatgagctacacgccctagctaccaacccctactacc

SEQ ID NO: 579656 - DNA, 447 bp, Homo sapiens
cacgaggggcccgatgagcgccccgccagtccgatcgaaccgacgaaacgaaggagatctgtcgtgatcgacgtcaacgtgatcgaaacgtcctcgctgggtgaccgcagctacctggccaccgacggggaggtggcggtggtggtcgacccgcagcgagacgtggaccgggtcctggccctggccgggcggctcggggtgcggatctcgcacgtcgtggagacccacgtgcacaacgactacgtctccggcgggctggagctcgcccgcctcaccggcgcggcctatgtgatgtcggcgcgcgacgatctggcgttcgcccgcaccggcgtggtcgacggtgacgtgctggaggcctcgccgcggctgcggctgcgggtgctggccaccccggggcacaccttccatcacctgtcctacgtgctggagggcccggacgggccgcag

SEQ ID NO: 579657 - DNA, 135 bp, Homo sapiens
cccgccggatatgtgtctcatcactgatctgccttatcgctgtagtgagctgaagaaggacacaggacaccagcgcccatctgagcggataagaagaacctggaacagacggtgaaggacctgcagcatcgtctg

SEQ ID NO: 579658 - DNA, 270 bp, Homo sapiens
ttataatatttttggaacttttctgtgagtttaaaaccacttcaagataatattttaacacaaactttaaacagaaagaagaaaaaaagagaaaaggtagaaaaatacactaacatttctaacattatcgagagagagagagagagaaatacaggtgcagtggctcatacctgtagtcccattatgctgggagatcaaggcaggaggatcccttaggtccaggagtttgagactagcctgggcaacatagcaagacctccatctctacag

SEQ ID NO: 579659 - DNA, 363 bp, Homo sapiens
  misc_feature (124)..(124): n is a, c, g, or t
  misc_feature (164)..(164): n is a, c, g, or t
  misc_feature (310)..(310): n is a, c, g, or t
cctggtactgcaggtgcacctatgattggttatccaatgccaacaggatattccccataaggctttagaaggaaatggaaagggctggttttcaaaaatgctctttaaaatgggggttatctgncaagaaagttatttaaaaaacatgggaattgcaaaaatgnctgcagggcaccagtaattatggggccctttttcgctatttaaggtggaaatttttctacattcctgaaacaatttttagggtttttttggcctagaaaaagcaggcagggttttccccaaagtaaatggccagtggttttaaatncaataaattaaggcaatggatggccttccaataaaaaatatttgaaggctgga

SEQ ID NO: 579660 - DNA, 790 bp, Homo sapiens
  misc_feature (1)..(1): n is a, c, g, or t
naaagaaacaaaacttgagttccaccccgtggccgtccgtttataactaagtggtcccccggcctccaggattaggtctaaagaagttcttggtttaacaatggccttccgccccgcccgttgttaccgttattgtaaaccaagcggtacccaaattttggcttctgcaaggtgtcacctgatgccaggattcgcttttttgccctgggcggaaaaaagcaagaagtgaataagtttccgcttggtggccacacggtgtcagattaatatagcaacttgtctcttgaagccatgaagctcgcccgaaattagtgccaataagccatcggtcaaaagttgtgacaaagatgtctccaatatctgggtgcggctcgccccctttctacgtcatccgcatcacaaatatgttgtcctgtcttgtggataacaggctccatacaggcatgcgatgtgcctttggaaaccctcagtgcactgtggccaaagttcacattggccaagttatcatgtccatccgcaccaagctgcagaacaagcagcatgtgattgagtccctgcgcaaggccaagttccagtttcatgcccgccataagagtctcatctcaaacaagtgaggtttccacgagttcaatcttcatgaatttgaagacatggtggcttaaaatcggctcatcccacatggctgtgtgggtcaagtacatcaacagtaatggccctctgcacaagtggcgggccctgcactcatgagggcttccaatgttccgcccccctcttaatactccccaatatg

SEQ ID NO: 579661 - DNA, 262 bp, Homo sapiens
  misc_feature (205)..(205): n is a, c, g, or t
  misc_feature (241)..(241): n is a, c, g, or t
tgaagacatactaaaatatacattctgaaatattacagaaccgtcattttatccattgtcctcattaatttgcaagagctatccatatgattgtaataacctatgaccttcggcaatttttaaaaattaagttaatcactgtaaaaaatgtttgtttttaccaaaaagctctaatttctcaaatatcttactgggcttccagganaaatgttttgctaatgtttacctgtaggggacaagnctctcaggaaggtggaaatct

SEQ ID NO: 579662 - DNA, 1012 bp, Homo sapiens
ggcaatacgatatagctaccgcaagggaaagatgacacattactagccaaagcactaagtatagcacggactaacccctataccttctgcatcatgaagttatcgtagaaataagctttgcacagggatgaggccatcacgctacagcacgccccgaaagcagagcgagctatctatatgaagcagcataaaagagactcacccggtctatgtagcaaggatagtgggaagatttataggtagaggcgaaaaagcctaacacgatgccaggaagatatgctggattggtccgagggattagaagactctgacgttgcaaatctctcacaatttagtcccaacgagatatccgctctaatatgcaccctgtggtcagagatctgatagctaggttaagtcccagagagtaggagagcacgctgcttctcgggaacaaccttagggtaaaaatggaaaccttgttgacaagggacgaagtaagaatagaaagtgtttagaagctagcacaccatgtcagatcatgtgaccctttagaaatacgactatgtcccactccaaactgtaaggggaaaataaggccgattgaccaatggggctccaagaagaaaccatacttaaacccttaaaaaatagtcctcggataacattgaatagatcctgtgaaaccgtcccgttcaagcaagcccccaaatctgttgggaacgctaaaatccgttaagtgctagccaccgttaattagggaaagggaaaccttaaaatgggtttgaaggttaatatacacggttaaaaaccaatttgaaagagaaccaatatttcctccacatacccccgggcaattaaaaggccccttgtccggtttccacggacattctcacacacaaacccaacgtggtaaaaccgtggacccaaatttcacacgccaaggcgcccccaaaattaattacgttaccacaattgccaaaacgcccaaaatcgaaaggttcccaatttaattttaaaccccccgttccag

SEQ ID NO: 579663 - DNA, 202 bp, Homo sapiens
ccgtggtggaggcagccttaggctgtgcccgcgacaggggccctgcatgctgagcaacagactcaccttagcaggctgcacgggctcctctccacgggagccttcaccgccggggctgtgagcttgagcaggggttggtccccgccctgccctgataaccacacgtcaaggcctggggggtcaccgcgtgtcaccagagcag

SEQ ID NO: 579664 - DNA, 129 bp, Homo sapiens
tctatcatactatacaactcgtgggttcagctagttcgaagggcctagagaatcgatatcatagtacgtagtatgtgggggagcagcttctgatgctgcgtctgagggcttggctcctgagaccgtccg

SEQ ID NO: 579665 - DNA, 565 bp, Homo sapiens
  misc_feature (184)..(184): n is a, c, g, or t
cgggagatcgggccagatgaagcccttctacactgtgggccagacgcaggcctggaggattgaaggtccttcagctgccactgtaatgggggttgggctggcccccctgccagggagcccaggcctgggcctaaaaaaccagtataaagccagggcccctgccactgcttctttttttccctgntgccacttttccagtcctggaaatactttgtcccactcttgctttattcagtttcaggtcaaccctcccaagcacacaccccgtttcccttggaatccctgaggggtagaaggggccagaaaaaacgcttataaaaccagaggccctttgagatcatgtgagtcccccatggcaaggaaccagttccagggagagtcaggttccagctagttagggctgccagcctagggctttgggcctacccctccctaagcccatggagaggtcccaaatgggccgggcccgggcaaatgggccccaaaaaattttggcgaaggtcggtaaagggttaagctgttgtctgccctctttcatcataaagtcccttttttccccggccta

SEQ ID NO: 579666 - DNA, 696 bp, Homo sapiens
  misc_feature (547)..(547): n is a, c, g, or t
  misc_feature (643)..(643): n is a, c, g, or t
  misc_feature (648)..(648): n is a, c, g, or t
  misc_feature (696)..(696): n is a, c, g, or t
ttcaagatgcttgtaaatgatatcaaccgtttatttagtccacccctgaagaactgagggtcctgggaactgaaccatatcaatgcaatcttttctacattattaactgaagaaaaatgggtactttttaaactttttttttttaagattaggaaacaaaaagaagtcagaaggagccaaatctggactgtaaggtgcatacctaatggtttcccatcaaaactcttacaaaatttctcttttttgatgagaggaatgagtagaggcattgtggtgcagaagtctctagtgaagctttcccaggcatttttctgccgaagctttggctaactttctcaaaacactcataataagcacgttatcattctttgttccttcagaaagtcaacaagcaaaatgtcttgagcatcccagaaaactgtttccatgatctttgctcttcatctgtctgcttttgctttgactgaatcacttctgcctcttggtggccattgccttaattgtgctttactatcttcaggattatactgggaaaagaatgctttangtatcctgggccctacttgttgaaaaatttccattgaaaagctctgcttttgcaagctgatcggggaatgcaagtgggtttttgggtaccccatcnaagtnggaaaggtttactcaaactttaaattcctcaagtcaaaaaattggttn

SEQ ID NO: 579667 - DNA, 793 bp, Homo sapiens
  misc_feature (30)..(31): n is a, c, g, or t
  misc_feature (284)..(284): n is a, c, g, or t
  misc_feature (300)..(300): n is a, c, g, or t
  misc_feature (371)..(371): n is a, c, g, or t
  misc_feature (412)..(412): n is a, c, g, or t
  misc_feature (414)..(414): n is a, c, g, or t
  misc_feature (442)..(442): n is a, c, g, or t
  misc_feature (462)..(463): n is a, c, g, or t
  misc_feature (478)..(479): n is a, c, g, or t
  misc_feature (485)..(485): n is a, c, g, or t
  misc_feature (488)..(488): n is a, c, g, or t
  misc_feature (490)..(490): n is a, c, g, or t
  misc_feature (493)..(493): n is a, c, g, or t
  misc_feature (495)..(495): n is a, c, g, or t
  misc_feature (517)..(517): n is a, c, g, or t
  misc_feature (523)..(523): n is a, c, g, or t
  misc_feature (535)..(535): n is a, c, g, or t
  misc_feature (566)..(566): n is a, c, g, or t
  misc_feature (631)..(631): n is a, c, g, or t
  misc_feature (647)..(647): n is a, c, g, or t
  misc_feature (656)..(657): n is a, c, g, or t
  misc_feature (659)..(659): n is a, c, g, or t
  misc_feature (667)..(667): n is a, c, g, or t
  misc_feature (680)..(680): n is a, c, g, or t
tttacaaatattcgtgttcattttctggtnnagcatgctatatttagaaactcatggggagaccttagactttgtttaatcctttatgtttcaacctttaaatgttccattcttatagtattactttaaatcaattctaaaactgaacttgtttgttacataaatgtcgcaggcaaaaataacactacttatagattttacctattatggtaaaaaataggaacatatgtcattctttttttttttttttttggagaacagagtctcactctgttcgccaggcntggagttgcgtgggcncaatctcggctcactgaacctccgcctccggggttcaatcgattctccgtgcctcagcctcctgagtagcngggactacgggtgtgtgccaccacgcccagccaattttttngntattttagtagagacggggtttcaccantgtgggccaggagggtctcnnatctccggacctcgnngatctngcncngcntnagctcccaaaggtgcggggatnacaggnttgagccaccgngccgggcggtcattcattctggcaacaagcntttatggagcacctacggtgtgctcacagtaaagaaacgtgatcttatcccagtagaggtagatnttctgaaaaagaatanttcttaaanngnttaaaacnggggtcccacccnaggcacagaccagtaccagtcgtggcctggtatggaccaggcaccacacgggtgaccgtggtaagtgaacagtcaactgtattaagtgctcccaaagatgataaggcgaaatg

SEQ ID NO: 579668 - DNA, 228 bp, Homo sapiens
  misc_feature (25)..(25): n is a, c, g, or t
  misc_feature (35)..(36): n is a, c, g, or t
  misc_feature (83)..(83): n is a, c, g, or t
  misc_feature (194)..(194): n is a, c, g, or t
tccagcaggataacccctccctttnatggcatttnntctctcagacaaggcgaccagccagctcctgttggagacagattggnagtccattttgcagatctgcgacctgatccgccaaggggacacacagtgagttagcggggcctgtgccctgatgcggaggagcagccgtgcactaagctgggctcgcttgngtgcccgttggggctccacgacgtagctgaccgt

SEQ ID NO: 579669 - DNA, 215 bp, Homo sapiens
ctagagcatccccaaaagcccattgaagatcctttagaggcagagactcagcctatagtttgaaatgtcagactcattgaaagaagaatggacggactattaaggaagccagacaaaggacgccccaggtgaggatgaggaggaagatggcgtcagcgaagcggtcagactagaggaacctaaggaagaggatcaaggagaacgctagttggcag

SEQ ID NO: 579670 - DNA, 1769 bp, Homo sapiens
gggcaggtcccacggaggggatgctgcggccaggctccgtggggtggggcaccctgcgacgggctgctcctcttcccagggccaccggtgagactctcagtgcacagagtgcggttctgtgtggaggtgtgggatgcatctcctggccctcccgtagtggggtgcaaccccaagtgaagaccccgtggctcatgtcaagtgccctcagggctggggctgcccacccgcctgcctgggccgtcttgacaccggagctgcctgcctggatgttggagcgcccagtggattgagtgggaagtgggcctgggtgcttacaggcgatggggtcaccagagcccacccaggggcctcgcctgtcccccattctcattccaaactctgggaggcggtacaaggtcgggagggccagcggggctctctgccaccaggactcacttccgcccatcttggaactgggcctcactttcctgcgagcttctgctgggttctcagtgcccaccagcagctcctttgctctccctgagcccttgaggtcactctgccttgggaatggggagggtttgggtctcagcctcacgctcacggtcctggcttggattttaggcctcagtggcactctgggagcgcttgtgctcttcatggttgccactgggattttccaggaggctctgtggcatttgctgttgctctctttttctgtggaagctctgccttgcttttttttttttcccttttttctgctctgtaggtgcttgagggcggagttgcagatccagcagagactcgatggcactctctcactggatctgatgcgacttgagagcgatggggagacaggatgtgccgcagagtcctcggtgctgcagggtgcacagctgatcgccgtggcctcctcggaccccgcggcggcgggcgtggatgggtcgccactccagggcagcgacatccaggttcagtacgtgcagctggcgccagtgagtgaccacacggccggggcacagacggccgaagccctgcagcccacgctacagccggagatgcagctcgagcacggggccatccagattcagtgagcggtgcccatggcaccaggagcccctcgccggctccgcctacggcccggcccccacgcgccctgctctcacggcctcggcacaggcagcggctgcacgtgttctgctgaagtgcgtctgaaggccgctgcctccgcggggaacagcatcctatcaactgaaagagcagccgccgccgcccccagccggagacccctttcgtttgagtcctgctgttggtgtcggagcacgaggggaggcacggtgcggagagcgtcgcatatgcgcgggaaatcaagaactatgatatttttctgtttaaacagctttttttaatttgctatggtgtttataacaaaaaagaaaatttgaaaaaaaaaatcccaggggagtagcaggagccctttgctgtgtgctctgtccagtgtcatgagacgggagccctttgctgtgtgctctgtccagtgtcatgagacgggagccctttgctgtgtgctctgtccagtgtcatgagacgggagccctttgctgtgtgctctgtccagtgtcatgagacgggagccctttgctgtgtgctctgtccagtgtcatgaggcaggtgtttgcaaagccagctctcggttccgatggggtattgctgacctacttttctaggggaaatgctcttaaacactgtaattatgcatttctaatgaaataaaatgtatttatgaccac

SEQ ID NO: 579671 - DNA, 294 bp, Homo sapiens
gcagatagaagcttatagtgaggaatgacacgggctctcctcttaccgccatcttggttcctgtgtagtgcctgctgggaacgggacttctaaaaggaactatgtcttggaaggctgtggtccaaggccatttttgctaggtataagcggggttccggaaccaaagggagcacacagctcttcttaaaattgaaggtagttacgcccgagatgaaacagaatactatatgggcaagatatgcgcttatgtatataaagcacagaatcacacagtcactcctgatggcaaaccaa

SEQ ID NO: 579672 - DNA, 121 bp, Homo sapiens
agctggtacctctccacttccctgactctgggaataactaatatttaatgcaggtaagatgagaagcaatggggtctcagttctagtgaatacagtgctagttgattgtcctggggttgtt

SEQ ID NO: 579673 - DNA, 127 bp, Homo sapiens
tccctggggagaccccggatgaggagggaggtccacccaacatggctgtccttgggaagacttgggtcatcacaaattgtgttccatggtatatgtgggtggaaaaatatggtttcaagatttgtca

SEQ ID NO: 579674 - DNA, 1643 bp, Homo sapiens
gggcaggtcccacggaggggatgctgcggccaggctccgtggggtggggcaccctgcgacgggctgctcctcttcccagggccaccggtgagactctcagtgcacagagtgcggttctgtgtggaggtgtgggatgcatctcctggccctcccgtagtggggtgcaaccccaagtgaagaccccgtggctcatgtcaagtgccctcagggctggggctgcccacccgcctgcctgggccgtcttgacaccggagctgcctgcctggatgttggagcgcccagtggattgagtgggaagtgggcctgggtgcttacaggcgatggggtcaccagagcccacccaggggcctcgcctgtcccccattctcattccaaactctgggaggcggtacaaggtcgggagggccagcggggctctctgccaccaggactcacttccgcccatcttggaactgggcctcactttcctgcgagcttctgctgggttctcagtgcccaccagcagctcctttgctctccctgagcccttgaggtcactctgccttgggaatggggagggtttgggtctcagcctcacgctcacggtcctggcttggattttaggcctcagtggcactctgggagcgcttgtgctcttcatggttgccactgggattttccaggaggctctgtggcatttgctgttgctctctttttctgtggaagctctgccttgcttttttttttttcccttttttctgctctgtaggtgcttgagggcggagttgcagatccagcagagactcgatggcactctctcactggatctgatgcgacttgagagcgatggggagacaggatgtgccgcagagtcctcggtgctgcagggtgcacagctgatcgccgtggcctcctcggaccccgcggcggcgggcgtggatgggtcgccactccagggcagcgacatccaggttcagtacgtgcagctggcgccagtgagtgaccacacggccggggcacagacggccgaagccctgcagcccacgctacagccggagatgcagctcgagcacggggccatccagattcagtgagcggtgcccatggcaccaggagcccctcgccggctccgcctacggcccggcccccacgcgccctgctctcacggcctcggcacaggcagcggctgcacgtgttctgctgaagtgcgtctgaaggccgctgcctccgcggggaacagcatcctatcaactgaaagagcagccgccgccgcccccagccggagacccctttcgtttgagtcctgctgttggtgtcggagcacgaggggaggcacggtgcggagagcgtcgcatatgcgcgggaaatcaagaactatgatatttttctgtttaaacagctttttttaatttgctatggtgtttataacaaaaaagaaaatttgaaaaaaaaaatcccaggggagtagcaggagccctttgctgtgtgctctgtccagtgtcatgagacgggagccctttgctgtgtgctctgtccagtgtgcaggtgtttgcaaagccagctctcggttccgatggggtattgctgacctacttttctaggggaaatgctcttaaacactgtaattatgcatttctaatgaaataaaatgtatttatgaccac

SEQ ID NO: 579675 - DNA, 1868 bp, Homo sapiens
gggcaggtcccacggaggggatgctgcggccaggctccgtggggtggggcaccctgcgacgggctgctcctcttcccagggccaccggtgagactctcagtgcacagagtgcggttctgtgtggaggtgtgggatgcatctcctggccctcccgtagtggggtgcaaccccaagtgaagaccccgtggctcatgtcaagtgccctcagggctggggctgcccacccgcctgcctgggccgtcttgacaccggagctgcctgcctggatgttggagcgcccagtggattgagtgggaagtgggcctgggtgcttacaggcgatggggtcaccagagcccacccaggggcctcgcctgtcccccattctcattccaaactctgggaggcggtacaaggtcgggagggccagcggggctctctgccaccaggactcacttccgcccatcttggaactgggcctcactttcctgcgagcttctgctgggttctcagtgcccaccagcagctcctttgctctccctgagcccttgaggtcactctgccttgggaatggggagggtttgggtctcagcctcacgctcacggtcctggcttggattttaggcctcagtggcactctgggagcgcttgtgctcttcatggttgccactgggattttccaggaggctctgtggcatttgctgttgctctctttttctgtggaagctctgccttgcttttttttttttcccttttttctgctctgtaggtgcttgagggcggagttgcagatccagcagagactcgatggcactctctcactggatctgatgcgacttgagagcgatggggagacaggatgtgccgcagagtcctcggtgctgcagggtgcacagctgatcgccgtggcctcctcggaccccgcggcggcgggcgtggatgggtcgccactccagggcagcgacatccaggttcagtacgtgcagctggcgccagtgagtgaccacacggccggggcacagacggccgaagccctgcagcccacgctacagccggagatgcagctcgagcacggggccatccagattcagtgagcggtgcccatggcaccaggagcccctcgccggctccgcctacggcccggcccccacgcgccctgctctcacggcctcggcacaggcagcggctgcacgtgttctgctgaagtgcgtctgaaggccgctgcctccgcggggaacagcatcctatcaactgaaagagcagccgccgccgcccccagccggagacccctttcgtttgagtcctgctgttggtgtcggagcacgaggggaggcacggtgcggagagcgtcgcatatgcgcgggaaatcaagaactatgatatttttctgtttaaacagctttttttaatttgctatggtgtttataacaaaaaagaaaatttgaaaaaaaaaatcccaggggagtagcaggagccctttgctgtgtgctctgtccagtgtcatgagacgggagccctttgctgtgtgctctgtccagtgtcatgagacgggagccctttgctgtgtgctctgtccagtgtcatgagacgggagccctttgctgtgtgctctgtccagtgtcatgagacgggagccctttgctgtgtgctctgtccagtgtcatgaggcaggtgtttgcaaagccagctctcggttccgatggggtattgctgacctacttttctaggggaaatgctcttaaacactgtaattatgcatttctaatgaaataaaatgtatttatgaccacagcagccttacgcttttcctcctgcgagacggttcgccagagagtgcctgtccctggggggttgggctcgctggccttcaggccacgctgctgccctct

SEQ ID NO: 579676 - DNA, 1912 bp, Homo sapiens
  misc_feature (1690)..(1690): n is a, c, g, or t
gggcaggtcccacggaggggatgctgcggccaggctccgtggggtggggcaccctgcgacgggctgctcctcttcccagggccaccggtgagactctcagtgcacagagtgcggttctgtgtggaggtgtgggatgcatctcctggccctcccgtagtggggtgcaaccccaagtgaagaccccgtggctcatgtcaagtgccctcagggctggggctgcccacccgcctgcctgggccgtcttgacaccggagctgcctgcctggatgttggagcgcccagtggattgagtgggaagtgggcctgggtgcttacaggcgatggggtcaccagagcccacccaggggcctcgcctgtcccccattctcattccaaactctgggaggcggtacaaggtcgggagggccagcggggctctctgccaccaggactcacttccgcccatcttggaactgggcctcactttcctgcgagcttctgctgggttctcagtgcccaccagcagctcctttgctctccctgagcccttgaggtcactctgccttgggaatggggagggtttgggtctcagcctcacgctcacggtcctggcttggattttaggcctcagtggcactctgggagcgcttgtgctcttcatggttgccactgggattttccaggaggctctgtggcatttgctgttgctctctttttctgtggaagctctgccttgcttttttttttttcccttttttctgctctgtaggtgcttgagggcggagttgcagatccagcagagactcgatggcactctctcactggatctgatgcgacttgagagcgatggggagacaggatgtgccgcagagtcctcggtgctgcagggtgcacagctgatcgccgtggcctcctcggaccccgcggcggcgggcgtggatgggtcgccactccagggcagcgacatccaggttcagtacgtgcagctggcgccagtgagtgaccacacggccggggcacagacggccgaagccctgcagcccacgctacagccggagatgcagctcgagcacggggccatccagattcagtgagcggtgcccatggcaccaggagcccctcgccggctccgcctacggcccggcccccacgcgccctgctctcacggcctcggcacaggcagcggctgcacgtgttctgctgaagtgcgtctgaaggccgctgcctccgcggggaacagcatcctatcaactgaaagagcagccgccgccgcccccagccggagacccctttcgtttgagtcctgctgttggtgtcggagcacgaggggaggcacggtgcggagagcgtcgcatatgcgcgggaaatcaagaactatgatatttttctgtttaaacagctttttttaatttgctatggtgtttataacaaaaaagaaaatttgaaaaaaaaaatcccaggggagtagcaggagccctttgctgtgtgctctgtccagtgtcatgagacgggagccctttgctgtgtgctctgtccagtgtcatgagacgggagccctttgctgtgtgctctgtccagtgtcatgagacgggagccctttgctgtgtgctctgtccagtgtcatgagacgggagccctttgctgtgtgctctgtccagtgtcatgagtacgggagccctttgctgtgtgctctgtcccagtgtcatgaggngcaggtgtttgcaaagccagctctcggttccgatggggtattgctgacctacttttctaggggaaatgctcttaaacactgtaattatgcatttctaatgaaataaaatgtatttatgaccacagcagccttacgcttttcctcctgcgagacggttcgccagagagtgcctgtccctggggggttgggctcgctggccttcaggccacgctgctgccctct

SEQ ID NO: 579677 - DNA, 1828 bp, Homo sapiens
gggcaggtcccacggaggggatgctgcggccaggctccgtggggtggggcaccctgcgacgggctgctcctcttcccagggccaccggtgagactctcagtgcacagagtgcggttctgtgtggaggtgtgggatgcatctcctggccctcccgtagtggggtgcaaccccaagtgaagaccccgtggctcatgtcaagtgccctcagggctggggctgcccacccgcctgcctgggccgtcttgacaccggagctgcctgcctggatgttggagcgcccagtggattgagtgggaagtgggcctgggtgcttacaggcgatggggtcaccagagcccacccaggggcctcgcctgtcccccattctcattccaaactctgggaggcggtacaaggtcgggagggccagcggggctctctgccaccaggactcacttccgcccatcttggaactgggcctcactttcctgcgagcttctgctgggttctcagtgcccaccagcagctcctttgctctccctgagcccttgaggtcactctgccttgggaatggggagggtttgggtctcagcctcacgctcacggtcctggcttggattttaggcctcagtggcactctgggagcgcttgtgctcttcatggttgccactgggattttccaggaggctctgtggcatttgctgttgctctctttttctgtggaagctctgccttgcttttttttttttcccttttttctgctctgtaggtgcttgagggcggagttgcagatccagcagagactcgatggcactctctcactggatctgatgcgacttgagagcgatggggagacaggatgtgccgcagagtcctcggtgctgcagggtgcacagctgatcgccgtggcctcctcggaccccgcggcggcgggcgtggatgggtcgccactccagggcagcgacatccaggttcagtacgtgcagctggcgccagtgagtgaccacacggccggggcacagacggccgaagccctgcagcccacgctacagccggagatgcagctcgagcacggggccatccagattcagtgagcggtgcccatggcaccaggagcccctcgccggctccgcctacggcccggcccccacgcgccctgctctcacggcctcggcacaggcagcggctgcacgtgttctgctgaagtgcgtctgaaggccgctgcctccgcggggaacagcatcctatcaactgaaagagcagccgccgccgcccccagccggagacccctttcgtttgagtcctgctgttggtgtcggagcacgaggggaggcacggtgcggagagcgtcgcatatgcgcgggaaatcaagaactatgatatttttctgtttaaacagctttttttaatttgctatggtgtttataacaaaaaagaaaatttgaaaaaaaaaatcccaggggagtagcaggagccctttgctgtgtgctctgtccagtgtcatgagacgggagccctttgctgtgtgctctgtccagtgtcatgagacgggagccctttgctgtgtgctctgtccagtgtcatgagacgggagccctttgctgtgtgctctgtccagtgtcatgaggcaggtgtttgcaaagccagctctcggttccgatggggtattgctgacctacttttctaggggaaatgctcttaaacactgtaattatgcatttctaatgaaataaaatgtatttatgaccacagcagccttacgcttttcctcctgcgagacggttcgccagagagtgcctgtccctggggggttgggctcgctggccttcaggccacgctgctgccctct

SEQ ID NO: 579678 - DNA, 126 bp, Homo sapiens
acagggatagtcatttagttgtttgggctcttctggttttgttacagtgcatttacgtgaagatgcagtacgcgttttgttacaacaacaagtgttcgctctccctcattcgttcccagcagtcac

SEQ ID NO: 579679 - DNA, 539 bp, Homo sapiens
cccagagacatgagggtactagaggccacatttctgattctgcagatatcagatgacacaatgtcaccagcataatacatgctttcagtagcctatataataacaggttaactgcctaacagcagtcttaatatctggaccttatacatcaggatggtgctgtgagtatgggcaggaaatagtttagagcctgagagacacgacaactgaaataaaaatgtaggccaggtgcagtggctcatgcctgataatcaccagtacatataggaagagccaacgcaggaaaaattgctataagcccaggagagtcaagaccaacctgaacaacataacaaggaccctgtctctacaaaaaaaatagtttaataagtcaggcgtgatggcatgcaccctatagtcccagctacttggaaggctaaggtgagagaatagcttgaacccagaagatacaggctgaagtgagccataattgccccaatgcactccagactgtgtgacagagcaacaacctgtctcaaaaaaacaaacaacaaaaacac

SEQ ID NO: 579680 - DNA, 163 bp, Homo sapiens
cattccattttcaccaccaaacaccaagcattcaccatgtgcccaaaacaagcaaagcacccaacacagcaaacaaaggagcgaacaaccctcaatgctgcacactgcatggtcagtcaccctgcaacagtggcccaaaggccactgcatcaaacaataaaca

SEQ ID NO: 579681 - DNA, 1230 bp, Homo sapiens
  misc_feature (444)..(444): n is a, c, g, or t
  misc_feature (465)..(465): n is a, c, g, or t
  misc_feature (781)..(781): n is a, c, g, or t
  misc_feature (858)..(858): n is a, c, g, or t
  misc_feature (860)..(860): n is a, c, g, or t
  misc_feature (880)..(880): n is a, c, g, or t
  misc_feature (981)..(981): n is a, c, g, or t
  misc_feature (994)..(994): n is a, c, g, or t
  misc_feature (1225)..(1225): n is a, c, g, or t
  misc_feature (1227)..(1227): n is a, c, g, or t
ctcagggaaaaaggcaaagtacaaatctgtaaacataatagaagacttgcgaggagtcacacaaatacatgaaaaagaggctttgcagaagctttggccacagatgttcattgagcttgttagggatgcagccatggaaattgggaataaaaattcctatatgaagctctgcctacagcagataacagaccaaaaaccacaaatctgcgcccgctggcctcaggggcggagccctcgcgccgtttttctttagcgaggggcgcggccggacgcccgctccgcgcctccggccccccccggcccgtcgcgcacccgcgccctgccatagtactcaccctacgcccgcaatccacatcaaccctacacatatttgcgggccgttcgggcccactagtgactatcctatcattatagttccccgcgcggccgcgcgccggccggcgncgcgcacaccacccctacacnacccccaccgcacacgagccaccacagcggcgcgcgcctcgccgtcggggcccggcgcgccatgaacggcgcggaaccatcgaagcacagcccaccctaccatccgtactcccagatgcgtcacacccgaccaccctactcgcccccaccttcgcccgcccatctctgggctgtaacacaagataccccacatcccatcatcacccgatatgcgccgccgcacccggcaaggcatcgatatcgcgcgcggtgcctcgcccggccgcgccccgccgtgcgcgaccgcgcgaggcacgccgccccgccactcccatancgtccatgcgtcaccatccccgccgtactgatcctcccgtcgacgcgtggctcgatgccgcggagaccgatacaccnancgccatcgcgttacgttccnagcgcgcatcggcctcacaagacgacgcgctacagtgatacgacgccggagaaggcacgccgagttcgcccgttatcgccgcgcgtaccccccgattatantccgcgcgccccngatgtctacgcacacacctcaaacacgcgcgggcggggggcgggacccgaagccggacgcgcctcactccgccaccgaaccgtcgctctcacggtccgcgcgttgtaccgcatgagtccaagagacgttccgacccaccaccgcctcgctgatagcccgtcgctcctcacgcttcttatagccctatgacaccaccccgacgcagcacgctctccgtcgaccctccgcgtncntat

SEQ ID NO: 579682 - DNA, 351 bp, Homo sapiens
ctaaatgtgttctgaagataacatagatgaaacttccatcaaccctgccaatcgaaaaaaaaaaagcacatgccaacataatacaatttttcctcagaaggattttggtaatttgagaaacctgaattccaagttcctttctccttttcaagttacaaaatgcttcccaaccaacatgcacagcactgcaaacatatattaaagcttcacaaaacaaaaactgtaattaaaattgaaactctgtgactcatgttcattatgtcaaatatacagatggctggtgttgaacatagctcaaatcgttttctaaccataatcatgtataataaaagattaataaagagtgaaaaa

SEQ ID NO: 579683 - DNA, 910 bp, Homo sapiens
ggagagagagaactagtctcggtttatgtatgattttttccctattggatggtttaatgactttaaaaaagtgagcatgaaaataaatcttaatttcagttataacccaccaataagaaaaagttaggtcacagtttaagctctgtgacacaaagtgaactaggaggcaaattatatccatcagatacaattaatgccccaacttttacaagtacaggctatctggaaagctggcaacatacccagatatggctatgtggtctctcacgacagcaagggatgacatctgaaaagtggtcgttaggagtagcaggggtaactaaagtatgtggctcggaaatcaagaggttcataacacttgctacatgtgcggacactgagtacatactgcacacaagttgaaccccaacatgagactcaaccacaccgccgacacgacagcgcgtacccacgcacccccggccgtccacagcgccaaaatgagcataacgcaaacaagaccggggacgcccgctcccgagcgcaacacacaataaacccaatatacaccaaccatcaacccagcgccacaaccaaccacccccagcccaacacacccacaccacaccgacaccacgaccacacacgtccataacacgagacaaattccgcccgaagccataaacagggtacgaaaacaacgaggaaatcgcgagcacacacacgacgccgtacgccaacaagaggaccacagtaagcaccaccacaacggcccgccagacaagctatcgcgtgacaaccgagaggacaacagacaacgggtacagaaggacacagcccaaccgcgcagaccaccggcccatccacacaaaagaaaaaaccgacacagcgcacgacaacaccctcaccccacaaacccacgcgaacaaac

SEQ ID NO: 579684 - DNA, 588 bp, Homo sapiens
  misc_feature (18)..(18): n is a, c, g, or t
  misc_feature (25)..(25): n is a, c, g, or t
  misc_feature (28)..(28): n is a, c, g, or t
  misc_feature (31)..(31): n is a, c, g, or t
  misc_feature (34)..(34): n is a, c, g, or t
  misc_feature (36)..(36): n is a, c, g, or t
  misc_feature (38)..(38): n is a, c, g, or t
  misc_feature (41)..(41): n is a, c, g, or t
  misc_feature (46)..(46): n is a, c, g, or t
  misc_feature (61)..(61): n is a, c, g, or t
  misc_feature (63)..(63): n is a, c, g, or t
  misc_feature (66)..(66): n is a, c, g, or t
  misc_feature (69)..(69): n is a, c, g, or t
  misc_feature (84)..(84): n is a, c, g, or t
  misc_feature (87)..(87): n is a, c, g, or t
  misc_feature (92)..(92): n is a, c, g, or t
  misc_feature (545)..(545): n is a, c, g, or t
  misc_feature (554)..(554): n is a, c, g, or t
  misc_feature (580)..(581): n is a, c, g, or t
gaaccagttggtgaagtngagaagntcntgntcntngnggntgagngggtcgtaagagccntngtngangagtaggatgagacnggngagcnggcatggagttcaagtcgttggagtagttgggggagatggtgggcgacaggacgcctgcctggaaggcggcgctcaccgcgtcatgctcgtccagcagctgctgcagcgcgcggatgtactcgaccgccgagcgcagtgtctccaccttactcatcttcttgttggccgcgccgttggggacgtgctcccgaagggtggcaaagcccaggttgaccaacttgacgcggttgcgctcgcgctcgttgcggcgcgccacggcggccggctgctgctgcggcagctgtagccaaagccgctgaagttgagccggcgtttgcagcgcatcagttcgggcgaagacgaggtgtcgcttgacttgcttgggcgctgacttgtgaccgccccctgagggctgcgtcggccgccggtctcagctgcggcgcctgctgctgctgctgctgctgctgctgctnctgctgcgngccatctgcgctcgtctgcggcggcnncggccgc

SEQ ID NO: 579685 - DNA, 815 bp, Homo sapiens
tcagttttccccaccctttttcgtttccttttattatttgttcgtcaaactcacacacattcattacttacttttttattttctttttatttctatcttctttgtttatctcttattttatcttatctccattctttaatttcttttctattcactttatatttttcttttatctctacccttttctttttccttattctctttttctttttcctctctttttttttcttttatatcatttttcttactttttctttatctcttctccttattttttctctctttcttcttttttttctttatctattttctctctttcttcattcctccatttttttcttttctctttttattatttcttctttcctctccttttctctttctactctatttttattcttcttcttctcttattttttctacttttatatctctctcttccttctcttttttattctattattcttctacatttttctcttctctattcttctatatcttatttttcctctcttttatatcttctttttttctactttcttttctctttcttttatattacttactatctactccttctttatctcatgattctatcatatctcatcttactctcttacttctcttctcttttttctcctattctacctaatttcatctgtttcattttctctcttatattccctttatctctatcttcttatctccatctctctctcctctttcatttcattattattcttccttctatttcaatattactctctctctatcttatcacctcatctccatctaatctacttccttcatctccc

SEQ ID NO: 579686 - DNA, 446 bp, Homo sapiens
  misc_feature (403)..(403): n is a, c, g, or t
  misc_feature (412)..(412): n is a, c, g, or t
  misc_feature (438)..(439): n is a, c, g, or t
tgggaatgtggcacaggacctgctgaaggggctcacgctcatgtcgtccacagtgtcagcgcgcgatgtactcgaccccgagcgcagtgtctccaccttactcatcttcttgttggccgcgccgttggggacgtgctcccgaagggtggcaaagcccaggttgaccaacttgacgcggttgcgctcgcgctcgttgcggcgcgccacggcggccggctgctgctgcggcagctgtagccaaagccgctgaagttgagccggcgtttgcagcgcatcagttcgggcgaagacgaggtgtcgcttgacttgcttgggcgctgacttgtgaccgccccctgagggctgcgtcggccgccggtctcagctgcggcgcctgctgctgctgctgctgctgctgctgctnctgctgcgngccatctgcgctcgtctgcggcggcnncggccgc

SEQ ID NO: 579687 - DNA, 1171 bp, Homo sapiens
ggctcctaaaggcagctccaaacagcaagtcgtgaggatggacctggctcctggcaggattatcaggccgcaagtctctcggccaagatcctccgaggctcttcttcgagaaacagtcgttcatcgtgtctgccatccccatctggtttatactggacgaatataggcgatatggatacttgattcagtactggctgtcttgtatagtgtgatgaccctagtaagcacatattgtggtatgcgctttgaagtacaacgaatgtgaaattttgttctgcgaagcagcagagaggtatgcacagaaggaagggatggaatgcatgtgtcctaaaggaatgtgacatcgaatagaggtttcgatgaaggcctcgagtaatagtacacagagtgtgtctcggcgacaagggcaggagaaggatggaagagcagatcattggtgggacagcacagaaatggaagctggcggtgattaatggaagtcgtacaaagcatttggcccatcattgctaataacgaacaactcgtggttccgtagggtacagtggatcagttgtagcttcacttcttcatattgaagaactttcaaacccacaggtgaactacatactggtccataagatgccttcatcaggactcaatcgcccgtccaggtactactagctccatacatagaccgatgtcgagcttcaccccctggacttagtgtctatgggtggactgtggtatatggaaaagtagcagggtggtcagcgcgggagacacaagcaagttccgatagactagaggctgaaaaaagaccaggagaatgtattcagtaatggatatagggtggttttgacaggatgttgcacttaatgattgaagggaactcgcagtctaggaagttatacgggaaaaagtctgggaagtgctggattccagagggggaaataactgtgccctgagacgcaaaggagcgaggaacggggccagggggccagttactatataaagagcaaggacggaaaaagggtcttgtgtttcacacaagaataagcagttgtgcggcatattaaaagactccggggagaaacaagtacgcatagtagccggcaaccacggaaccctctgtgtgtaaaaaagggcgactgagaggcataagcgacataagcagggagagatgaggttacat

SEQ ID NO: 579688 - DNA, 708 bp, Homo sapiens
  misc_feature (31)..(31): n is a, c, g, or t
  misc_feature (417)..(417): n is a, c, g, or t
atctgacctctccagaaaggttgaaacagantgggaaatattttacacagaggaactggtcgcatctgacagaagccctgtcgctctatgagaacacctggggccgctgtattgtcctctggaattttccaaggagatcgctctgtgtcccctcaaacttggaattgtgggtattttaccccgtttggaagaaagcttaacccctgagatccgtagcccctatcaccactgtgctgccaatagccctcctgacctccaactatgctgtacactgacaactccaaatgagtcagggccattgattgtgaattccctaaagttttcccttttttaataattatttttaaatttataaaaagcccaatgggaaatgtatattttgatgagcttagggtgtttttttttgaaagtcaacgnctgaaggatggttagacacgcaccacgcgaagacctgctaaatgcacctgacccccccccttagaatgtgatttttgttcccttttatttctctgtgggcttttgtttttgtttttgttttggtagatcttccatttggatatttggaggagtgaacatcgcttgttttgctggagggaagatcttgatggtgtttctttcccccaaaattgacttagatattaaaatttggtgcttataagagagagttaaaaaaaaataggattgcttccattaaattaccaaagagta

SEQ ID NO: 579689 - DNA, 327 bp, Homo sapiens
cgagttatcaggcgaagccaccagacaatgatcggttttaatcacatcacgaacaatcaaattcgaatcttcattcggttcaaaattggttcgaatcgcaaggtcgatgtcatcatgcaagatatctactcgacggatcgttagctcaagagatatttcaactttagggtaggtttttaaaaactgatttaaaatttttctaatttgaaaatgcatcattaaaggtgggcagcttacttttaccaaaccttgtggctcacttttttgctttaataacacgttctctgcacattcaacttgagcaatgattttgcagcattcctcgtt

SEQ ID NO: 579690 - DNA, 600 bp, Homo sapiens
  misc_feature (18)..(18): n is a, c, g, or t
  misc_feature (25)..(25): n is a, c, g, or t
  misc_feature (28)..(28): n is a, c, g, or t
  misc_feature (31)..(31): n is a, c, g, or t
  misc_feature (34)..(34): n is a, c, g, or t
  misc_feature (36)..(36): n is a, c, g, or t
  misc_feature (38)..(38): n is a, c, g, or t
  misc_feature (41)..(41): n is a, c, g, or t
  misc_feature (46)..(46): n is a, c, g, or t
  misc_feature (61)..(61): n is a, c, g, or t
  misc_feature (63)..(63): n is a, c, g, or t
  misc_feature (66)..(66): n is a, c, g, or t
  misc_feature (69)..(69): n is a, c, g, or t
  misc_feature (84)..(84): n is a, c, g, or t
  misc_feature (87)..(87): n is a, c, g, or t
  misc_feature (92)..(92): n is a, c, g, or t
gaaccagttggtgaagtngagaagntcntgntcntngnggntgagngggtcgtaagagccntngtngangagtaggatgagacnggngagcnggcatggagttcaagtcgttggagtagttgggggagatggtgggcgacaggacgcctgcctggaaggcggcgctcaccgcgtcatgctcgtccagcagctgctgcagcgcgcggatgtactcgaccgccgagcgcagtgtctccaccttactcatcttcttgttggccgcgccgttggggacgtgctcccgaagggtggcaaagcccaggttgaccaacttgacgcggttgcgctcgcgctcgttgcggcgcgccacggcggccggctgctgctgcggcagctgtagccaaagccgctgaagttgagccggcgtttgcagcgcatcagttcgggcgaagacgagctgctgttcgctttgatctctgctatgtggctgctgtacattagtgccactgcctccactgatgggtctgagccagtctggcctgccggttctcatgctgcgagcgtcctgctgcctgcttgctggctgcttgcgtgctgcttgctaacaacatgcgtcgctgt

SEQ ID NO: 579691 - DNA, 560 bp, Homo sapiens
  misc_feature (18)..(18): n is a, c, g, or t
  misc_feature (25)..(25): n is a, c, g, or t
  misc_feature (28)..(28): n is a, c, g, or t
  misc_feature (31)..(31): n is a, c, g, or t
  misc_feature (34)..(34): n is a, c, g, or t
  misc_feature (36)..(36): n is a, c, g, or t
  misc_feature (38)..(38): n is a, c, g, or t
  misc_feature (41)..(41): n is a, c, g, or t
  misc_feature (46)..(46): n is a, c, g, or t
  misc_feature (61)..(61): n is a, c, g, or t
  misc_feature (63)..(63): n is a, c, g, or t
  misc_feature (66)..(66): n is a, c, g, or t
  misc_feature (69)..(69): n is a, c, g, or t
  misc_feature (84)..(84): n is a, c, g, or t
  misc_feature (87)..(87): n is a, c, g, or t
  misc_feature (92)..(92): n is a, c, g, or t
gaaccagttggtgaagtngagaagntcntgntcntngnggntgagngggtcgtaagagccntngtngangagtaggatgagacnggngagcnggcatggagttcaagtcgttggagtagttgggggagatggtgggcgacaggacgcctgcctggaaggcggcgctcaccgcgtcatgctcgtccagcagctgctgcagcgcgcggatgtactcgaccgccgagcgcagtgtctccaccttactcatcttcttgttggccgcgccgttggggacgtgctcccgaagggtggcaaagcccaggttgaccaacttgacgcggttgcgctcgcgctcgttgcggcgcgccacggcggccggctgctgctgcggcagctgtagccaaagccgctgaagttgagccggcgtttgcagcgcatcagttcgggcgaagacgagtgccatcgatagagcagtttgggctggtgaccttgtagagcgtccagtgaagattggccgtcgccctgcgttttcagctatggcgccttgtgatcgtgccgctgaataaagtggtgctgcgcac

SEQ ID NO: 579692 - DNA, 499 bp, Homo sapiens
  misc_feature (456)..(456): n is a, c, g, or t
  misc_feature (465)..(465): n is a, c, g, or t
  misc_feature (491)..(492): n is a, c, g, or t
tgggaatgtggcacaggacctgctgaaggggctcacgctcatgtcgtccacagtgtcagcgcgcgatgtactcgaccccgagcgcagtgtctccaccttactcatcttcttgttggccgcgccgttggggacgtgctcccgaagggtggcaaagcccaggttgaccaacttgacgcggttgcgctcgcgctcgttgcggcgcgccacggcggccggctgctgctgcggcagctgtagccaaagccgctgaagttgagccggcgtttgcagcgcatcagttcgggcgaagacgagcgctgaagttgagccggcgtttgcagcgcatcagttcgggcgaagacgagcgcgtgtcgcttgacttgcttgggcgctgacttgtgaccgccccctgagggctgcgtcggccgccggtctcagctgcggcgcctgctgctgctgctgctgctgctgctgctnctgctgcgngccatctgcgctcgtctgcggcggcnncggccgc

SEQ ID NO: 579693 - DNA, 501 bp, Homo sapiens
  misc_feature (5)..(5): n is a, c, g, or t
  misc_feature (61)..(61): n is a, c, g, or t
  misc_feature (101)..(101): n is a, c, g, or t
  misc_feature (104)..(104): n is a, c, g, or t
  misc_feature (107)..(107): n is a, c, g, or t
gccanggaaccgacaaaccgaaaggaagaatttttttaacaacaccccaaacgggcaacgngcaagcccttttaataaccaaaaaccgcccgaccccaccnggnggngcaaacactcctgaacaaatcaagaaaaattcaaaccagtctgaccaaacatgggagaatgaagaatgagtagccccattgaagatctggaaaaaaaaatcgcggacctcatgacacaagcttggctcgaagaaccgcaaaatgaaaacaaaataccccccacgcaaaagaagtgaaggttgctaaaaaataaaccggaaactcccaattttccaagccaaaaaaaaaaccaatgcgctttttcaacaaacaactatgtgaagacaggttctacaatataaaagaaagcatccttatcacccaacaaaaaagtaagcttgcaaaagcgaattccccccaatttctttaacaagtaatcctcaaaacttggcaccctggaaacgtggcccaactc

SEQ ID NO: 579694 - DNA, 941 bp, Homo sapiens
gttccgctgtagagctcagcttccgggctggcgctcttcgttgcccagtgtccgctctgtggtcgcgtctccgacccccagccaccagtacccgctgcattctcggacgggctctaggtcgccatgggctctcccgtcgagggatggcaacgccgtaagtgctgatcgcctggggatgtgtctgccgcttggccgaccaagcagtaacgagaccgctggcgtacatcgtgcttccgcggagggaagtggagtgagtgcaggcactcgtctccgttgtcagagcattgcatcgttagctgacgtcggtcgtatgggcgcaacgctcggcggatcctgagccaagagcgcgtgcgccatgtgaggctcgcctagcagtcttcgcacgttatgaggtgaaatcctgacgagagcccccaggaggaggggccaaggcattcagaagcgtgacagcatgctgccgcccggaatcggccacgcagtgcgggagtctctggactgggtaattaatgaaggggctccgcatcgccaaaactccacgatttccctgtagtcttcaaacgaagggtaggttggacatgaagttcgcaatgtaaaagtgaccattgcttcagtgaggggagaagatttcaggcggctaagtagagggcctcgtcaatggcttcggaagcgtgtcggtgttacccccttgcgattgaatcgttcgggccagcattgtacactgcattggacaccagttggtcgaagagcatttcgaggtcccaattgaatctcttgaaaggcccaatgcgtattacattaccccctagctcagaaaggttgcacctgcgttccacgtttatgtgatggcaaacacttcttagtaaagggcctttgtaaacacgtttacttgcaatttgagttaacactaacacacagacaacagaagacaaacataacaaatg

SEQ ID NO: 579695 - DNA, 194 bp, Homo sapiens
cagggcaaggagttgaagtaggagtccagaggcagaggcccgcagaaccagaccaaggtaacagagaatagatgagggaaggagccacatgagaagccgtacccatttgagtcaagcagcatatttgtgaatttgttgcaactgtagtctcatatagctacccacgtgtatttatgttatgtgcagacaagaag

SEQ ID NO: 579696 - DNA, 121 bp, Homo sapiens
ttctcgaaagagtacggggtcgaggacagagcgtgaatgttacagagtcgtgtgtggtcaacgcagaacttccaacgattcaatgggatcacgatcggctcacgagtgggagacaatgaga

SEQ ID NO: 579697 - DNA, 136 bp, Homo sapiens
cgctggagctactggaggccatgtcaggtcccgcttgggatggcttatcagcccttctgttacttcaaggggctttggagcacaccatattcaccatcaccatcaccatcatacacaccacacacccaccaccacc

SEQ ID NO: 579698 - DNA, 309 bp, Homo sapiens
  misc_feature (49)..(49): n is a, c, g, or t
  misc_feature (78)..(78): n is a, c, g, or t
  misc_feature (80)..(80): n is a, c, g, or t
  misc_feature (173)..(173): n is a, c, g, or t
  misc_feature (223)..(223): n is a, c, g, or t
  misc_feature (236)..(236): n is a, c, g, or t
  misc_feature (266)..(266): n is a, c, g, or t
  misc_feature (295)..(295): n is a, c, g, or t
ggtctcattcgggtgtttttggaagagagtcgtgtgggcccaggtatcntagcgacgacacgagagagacgggcggtntnacagccttccactacctgcacgagtgtattggtaacgttggggtctgtctgctatcagctatgccgctgcccattacgctgcagacccgcttngccaagagaggcatcctcaaacatctggagcctggaaccagaggaggagntcattgccgaggnctatgacgatgatcctgtagactacgaggncaccaggttgggagggcctaccaccaaanctggtacaaggtgt

SEQ ID NO: 579699 - DNA, 900 bp, Homo sapiens
  misc_feature (445)..(445): n is a, c, g, or t
  misc_feature (762)..(762): n is a, c, g, or t
tccggggggtggcttggaccttttttggaaaaaaaaaaaaaataattttttcaaaaaaccccccggggggggggggaggcccccccggggggggcccggggggggcctccccgggtcaagggtttaattggggggggaaggccctcaactcgaatatttggccagccttttcgcggcccccaaaagccgggcgcccggcgaacctcgaagagggtacacgggggaagtggtgtaaactcctcgttggagacggggcgtgtggcatacctgggggactgtgggggggcccctccaggcgtctcgaggtggtgcccctcgagcggggaacgagggagagcgcagcacaacactggcggtgtgggcgctcaccaaacgcgggggggggaaaggcggtgcttatttctcgcggggtgtgaaagagccccacgcgcggaagatagttgtnaacccgagtggtcacgcgttacgcgggcgagccatctcctgcgagtgtctgtgcccgcggagtgatattctccacacccaagcgcccacaatcctcgtggggtctctgatgaacaccgcggcgacgagacctcgtcacacgcgggcgaggcgcgaaagacgcgttggtctggcgcacaatcacgcggaggggagaacacagcgggcgccccacaagcgggtggtctcacggagagtggtgtggtgccgcggagatatttctcctcgggaaagacaaccccgcggtgtgggatgagagaaatgtgctggaccgcgcgnatgagaaagaccgcccgcgcgagtctgatgtatgagagcgcgaggagccggcgggacccaaccgtgggtgggggggccctacctcaaaaagggcacggcagagggggcacccagggggggccacagagttaagccggg

SEQ ID NO: 579700 - DNA, 681 bp, Homo sapiens
tagtaaagacagtggtttcaccggtgttagccatggatggtctcgtcctgacttgtgtgaccctgccctgcctcggcctcccaaagggctgggattactgtgcgtgagccaccacacctgggccccggcacgttatctttttaaggaagtgacaccagtctccgtggcttctgaccaaagaaaaaagtgtccacaggagacatttgaagaggcagacaggagggtgggtggcagcaacactgcagctgcttctggatgcagcgtggggtgcctcctccggagcggggtgtgaacagcgcacttcaacagtgagcaggcgccgtggcctccgggtggtgtccctcactctcaggtgggtgccccgtggatgggtggaagccagacctttgggggcaggaaaccagctcagaagaaggctacccagcctcagcttgctgggcaaggaggccaggttatttacatgccataatggtgtggtacaatgaaaacaacactgttctgcaagaaaactctcctacccgcatcgggagactgggggctccttgcttgggagatgagcttacactcaacgtgggagatggcggtggactaggtccctgaaaagctgggccttgcagggccaagtgaggtcctcaggtcctaacccagtggccctctgaaagggggtgtgacagcaaaggg

SEQ ID NO: 579701 - DNA, 198 bp, Homo sapiens
ccggtatgtgcctgacatggttaatttataacaccccgatttcctcttggggtcccctcaatgcagacggtggctcaaggtggtgttacattataataaaatggaagacaatggcagggcacatccctgtgaggcacctgccagactggacgctgtgcctcctccaagtccactcccaaagtctcctgggtaccgagc

SEQ ID NO: 579702 - DNA, 111 bp, Homo sapiens
gataccacttcgagctcggcaccccccatgatatatattgtctttagccctccagaggctggctaagttgataccacggcccaaaacccataccataaattatatagttag

SEQ ID NO: 579703 - DNA, 1271 bp, Homo sapiens
  misc_feature (323)..(323): n is a, c, g, or t
  misc_feature (440)..(440): n is a, c, g, or t
ggcatcttggtggataaggctcaggatgagaatcccatgcatatgtaccgtagtcccggaccccagacacggacctgtccttcctgggctcctggagtccatggatagcaccatgagaggcacctagttactatggtcgctatctacaagcaagctagctacgcgaagtagctaggagttacctgttaggttgcaaggagagacactacatcaacaagattgattccacatacattgaacctgcatgacaaggaattatcttgccatggccctaggaggtagcgtgactcggacctcaccacatgtcactcacccgtcctggnttccatgcggggagcgacagttgtacgtggcacggacctgttgggaatcgagaagataacaggacgcaatcgtctggtggactgctaatcccagcagtgtcgtgcgcaacgctattntgatgctgtcgtgcaattccctgagtcagccatgtcgtagttcgcgggagccgtggctgcaaagttgccccatacggcctcatggtcggccctgccatcagaaggcaatccaccgtcgagattgaccagcattgggtcgcgtaccagttgacttgcgcccgccgacatgactcggacctaaggctatggcaatcaattgactggctcagccatcagaacccaggaatggtcctagatgtgtatgtacaggcggggacattcgggggaggcgattgtggaccagtccaatgaaagccatgcgtaggttgctgcgagaaggcttgttgagaagcgtcccctgtttcactgcgatttttctgagagctctaaccaaaagccaaggatctgggcaatctggattgccgcccaccccctgaagggtccagattctcttcaaattgcttatattgcgcccgccaaccttggggacctagctggggggaagaggaacccattggtttcgggccccacaacaaggtggccgcgcttgtggaccaaaccaatttctaatcaaacgataaacaaggactttggctagtatccatccccgggggaatcggtgcgggacatcccagaaggtttctggtaaccacagaagagttaatgcgttggaggtaggaaagcggggccccccccggacaattggtgttccacgggggacatgggttggttcacccggccctggggcccaaaggggaggcacaatgggcaccctttgccaattcaattcgtttccagttaggaaccgaagggatttggattgcccgatctggccccacccaagggaagaat

SEQ ID NO: 579704 - DNA, 112 bp, Homo sapiens
cacattgtccgagagcaattagaaataactaaatttacttccctttttctgtcaccttatgtcctctaccattttctcctttctccacttcctaatttctctcggaccaatg

SEQ ID NO: 579705 - DNA, 187 bp, Homo sapiens
aattagtctttatgacagtactatattattctgattttaaagatagaaaaaacaaacacacacaagtaaactgtacagatgaactggtggcacaatcatgcggggcagcagccagagtcaaacgctcagcagctagtgttggaacacgtcagtgacgtgattaaaccttgggcaaggtaacattgac

SEQ ID NO: 579706 - DNA, 379 bp, Homo sapiens
cgaccgatctcagcgggtgtgactgggatgcactgagagtccctggggtggtcaggagatgacagaatcctggggagcagtggcatggaggggttgaagttgacacccaccacagactggctgagtaggaactgccagggtagtcagaggcaaaacccggaccaggcaggggaggcccagatgggacgagggtgggttaggagccatcgactcaaccctgaagagcgtctgagctcactggagactaagaggggccccagggtcagaagcaggattgggaggctaggaggtatagacaggaatgaggatctggctgagaaggggaagagggagagaggctgtgggggagaagtggggtcaggggagcccgtgtttcctt

SEQ ID NO: 579707 - DNA, 384 bp, Homo sapiens
aggacagcgccagagtgctacaagggtagaagaataacccagtgaaggccaggaatggtggctcacgcctgcaatcccagacacttggggaggccgaggcaggtagatcaccgtgaggtcaggagttcgagagcagccgaccaatatgatgaaaccctgtctctactaaaaatacaaaaattggccgggcgcagtggctcacacctgtaatctcagcactttgggaggccgaggtgggcggatcatgaggtcaagagatcaagaccatcctggccaacatgcgtgaaaccctgtctctacaaaaaaaatacaacaattagctgggcgtggcagcacgcgcctgtagtcccagctactccggaggctgaggcaggagaatcactt

SEQ ID NO: 579708 - DNA, 940 bp, Homo sapiens
cgcatccgacggctgggaggccctaaggcccgaatcctcccggagagtctcacctcagttttcgcggacgagacgggcccttgtggagttcgagtcgagcccggaagaaccgagggagcccgggtctcctctgaatgtgtgcatgcgtgcgtgcgcttggggtcccccgaaaaggccgccgaaggacaagcccaggatcaccccgtactgcagcagggtgcaggcttggagtcaccccaaggcagccagagccaggcgcagtcggtcccccccagggtcagcaagacctacacctggagtcgcgctcaaagagcagccaggagtacagtcctgaagtccccacgatgtcagccgaagccaaagtgaggaggcaccaaaggtgttctcaggaccagggagtacttgcctcggaagtttgggcccagatataagggaggagctgaaccccgggggcccccccagcgatcaaggtacctgccggtcgcaggatcaccaagagttctataccccggtcagccaagctcccgggtccgggacccctctcagcactaactggaaggctgacacccagggccagctgtgctcccccccggggctcagtattgggccgagttaagccacctccagcctggccgcagaactgtgaacaggcggcttcgggggccaaacgacagacgaaaaggttagaacagtccgaggccccaggctgtacaagaacgttgacttaagggagggaggctccctggtacatccccgagaggggaaatgccccaattcgggcgcctcgtggttgcaaggggccgccccaagaaaaaagatttctcgcggaatgctagaagggaaagcccctgtggcaaattgggggagcgtgaagatcaagagactcgtgagaggcactggacaaggattgccctcctgggcgggaacacacggcccgcga

SEQ ID NO: 579709 - DNA, 590 bp, Homo sapiens
ctgctgaaatgaattatgtatcttttctgtctttacttctattattttcaaagatctaaagctttcacttgaaaattagtcttttggaaaaaaagacattgaaactagtgttaaattatatttcattgaggtaatgaatatgaagattcatttgctgtaatctccttgggatcttctaaagtagtttcttgtgcttttaaaaataacactataatggtctatatgtgtatcagtttttacagtaatttgtttaaactttagcttataccagtgtgcatgaagaaccaagtgcagtctgaattagcccaatgcaaatagaaagccggccttttattttcctcccaaattaatattctaatataacccttatgtaaaataaagaatttttaagtgcttgtaaattaataacaaaatcatacataatgtcagtggaagagaaaagttaagggttttatatcgcagtaaaatgcatttttaaattgacgtagtattgttataaaacatattcttgaatatggtatcagagtttatcaaaactactgaagtcccactaaagatggatctataaaggtgttcattttataaaaaaa

SEQ ID NO: 579710 - DNA, 850 bp, Homo sapiens
  misc_feature (136)..(136): n is a, c, g, or t
  misc_feature (140)..(140): n is a, c, g, or t
  misc_feature (157)..(157): n is a, c, g, or t
  misc_feature (164)..(164): n is a, c, g, or t
  misc_feature (167)..(167): n is a, c, g, or t
  misc_feature (171)..(171): n is a, c, g, or t
aatgtaactgctgtgggaagagttgctatatgtgtgtttaggaaataacaagaaaaaaaaaaagcacaaccacccatgtttggttttttcaaatatttaacatccttgcttggttgaatccacggatgcggaaccnatanatcctgagggccgactntaccccnttntganaacatcccccacagatggctgccctgggtgccctctgttagctcagcccgactaccaggtggacctcaggttgagggctgggaccaggagacatgggcttctttcttgggaaggggcatgttgggcagtcctcgacgtggcccagacagggccctttcccagcggggtctcagccaggttcccctttcaccaaggctgggctgggtggagtctggatagttagaccccagcacctgtgagtcacgcagacccagaagcaggaagcagacagtaagtgacagccgctaagacgcagggaggctgggccagggctggggcacgagggtaccttcacctgggcgtcagaagcacttgagaggacaggggctgctggctctgatgtctgccccctaggctggcatgaactgccagagacgtcagacgtggtacatgccggcctctgtggcctggaggggcttgcaacaaggaggcagcgccctgtccccaagctggtctagcctattgtccaggactggcggaccggtgccgcacccccggggcaggggtggggcccgtccctccccagcacactttggagtcgtgcagcggggtgccctactccttgtgccttcttccatttgcgggcggtcccacccttttgctgccgaggtccccctggccctgtgtccccggccgttgc

SEQ ID NO: 579711 - DNA, 171 bp, Homo sapiens
  misc_feature (50)..(50): n is a, c, g, or t
ccgctaaaagtacacagcatcgtatggcttgcatgaaaagcctggccaanagcggcgaccaggagacgacttcaaggagtactcggtgttcctgaccatgctgtgcatggcctacaacgacttctttctagaggacaacaagtgaccagggctgccctccaccctcaccct

SEQ ID NO: 579712 - DNA, 673 bp, Homo sapiens
  misc_feature (136)..(136): n is a, c, g, or t
  misc_feature (140)..(140): n is a, c, g, or t
  misc_feature (157)..(157): n is a, c, g, or t
  misc_feature (164)..(164): n is a, c, g, or t
  misc_feature (167)..(167): n is a, c, g, or t
  misc_feature (171)..(171): n is a, c, g, or t
aatgtaactgctgtgggaagagttgctatatgtgtgtttaggaaataacaagaaaaaaaaaaagcacaaccacccatgtttggttttttcaaatatttaacatccttgcttggttgaatccacggatgcggaaccnatanatcctgagggccgactntaccccnttntganaacatcccccacagatggctgggctgggtggagtctggatagttagaccccagcacctgtgagtcacgcagacccagaagcaggaagcagacagtaagtgacagccgctaagacgcagggaggctgggccagggctggggcacgagggtaccttcacctgggcgtcagaagcacttgagaggacaggggctgctggctctgatgtctgccccctaggctggcatgaactgccagagacgtcagacgtggtacatgccggcctctgtggcctggaggggcttgcaacaaggaggcagcgccctgtccccaagctggtctagcctattgtccaggactggcggaccggtgccgcacccccggggcaggggtggggcccgtccctccccagcacactttggagtcgtgcagcggggtgccctactccttgtgccttcttccatttgcgggcggtcccacccttttgctgccgaggtccccctggccctgtgtccccggccgttgc

SEQ ID NO: 579713 - DNA, 284 bp, Homo sapiens
agaagaaggaaggcttcgaacgtttacatatgtcttccttggaattctaacaagggccacagaatctaaaggctctctcttcattccttccttccttcctttttttcttttttctttctttcttttctcatcccctctctccttccgtcccgttcttccgtcccgtccgttctgcctgtccgttccttgcctttctttcttgcgtctttctgttctgttctttttgcgttgtctttctcgtctctctccgtgctttccccgtcctacgcttccgttctttctcg

SEQ ID NO: 579714 - DNA, 337 bp, Homo sapiens
  misc_feature (20)..(20): n is a, c, g, or t
  misc_feature (49)..(49): n is a, c, g, or t
  misc_feature (78)..(78): n is a, c, g, or t
  misc_feature (303)..(303): n is a, c, g, or t
gctgctgctcaggaaaaaanattcctttcaaaatagttttgttctatgncaatgcacctggtcgtccaagggttctgntggagatgtacaaggagattaatgttttcatgcctgctaacataatatccatactgaaactctttattatttaaggaatacattttataaggctatagctgccatagatagtgattcttctgatgaaccggggacaagtaaattaaaaacctttagaaaaccttctccatcaggatttgttggcttttgaaatctgggtcaagtaaattaaaaaccttctagatngccattgggaacatttgtggtttcatgggaagag

SEQ ID NO: 579715 - DNA, 334 bp, Homo sapiens
ttagagatcccccaggagacaactttaatgcaccctctagctgggttttccttcagccctctgaacatactgaggatagccattttaaagctttttcctgtaaaccccaacatccggacctctccaggcaatttcggtggcctgctttcttcctgtgtatggcccagggttcctggcatgtctaatcatcttttgttaagaatcagacaccgcaggtgatacattgtagcaccaggggaaagcagttttcctttctctgggatccttgctgctgtcagctggttaataactcaggtacggagctggactatcttactgagcctgttctcctggg

SEQ ID NO: 579716 - DNA, 161 bp, Homo sapiens
tcatcgagctcggaccggccccgcggcatgggtaagcatgaatagtacatataaactgtattagaagattttgtcaaggtgtgtggcacatggtatgtgctcgggtcatagtagccttcgtgtcgtaggtaacggcctcgtggatagctaaattatctgct

SEQ ID NO: 579717 - DNA, 480 bp, Homo sapiens
actcgtcggacgtggtgatcacctggcgtataatttaattttacatagctggtaatatatactctcaagtaatgagaattctaattatagccatctgaaacataaagatattttaccgtcgtatctgcttcatatggtaaagatctttgtttcactgattgtgttcgtactatttatcaaggacatgtttcttttttttgtcagaaattttttaaaaattttattcgattttactttaagttctgggatacatgtgcggaatgtgcaggttggttacataggtatacatgtgccatagtgatttgctgcacctatcaacccgtcatctaggtttttcctgcttacttgcttttgagacagagtctcgcactgtcacccaggctggagtgcagtggcatgatctcggctcactgcaatctccacctcccgggttcaaacgattctcctgcctcagcctcctgattacgctgaatggaattg

SEQ ID NO: 579718 - DNA, 330 bp, Homo sapiens
  misc_feature (65)..(65): n is a, c, g, or t
tctgatggagaagatctttagaccatgttataaaaaactgctacagaaaatgaactctaggccanggcgtgtgacccacacctgtaatcccaacaccttgggaggctgaggagggaggatcgcttcagaccagcctgggcagcatagcaagaccccatctctacaaaaataaaaaatagttggatatgatagcaggctcctgtagtcccagatacttgggaggctgaggcagggtgattgcctgagtccaggagttggaggctgtggtgaactatgattagccattgccccccaacctgggtgacagtgagatcctgccgcacctctcaa

SEQ ID NO: 579719 - DNA, 631 bp, Homo sapiens
ctagcatcgagctatctataaacctagccaagtacatacagttaactgagctcgccaggcagataggccaaccctctacgagcagggaagacgtaatctagttgtactatgatgcgcagctacctatgccatgagaagactctgtatgatcgaggcagtcatgctactgataggaccaatacgcatgggcagacgcctaaacatttgcacaattgaccgccaccgacttatgcaccctaatagaagtgcccagctagcagtatgaatcatcagccgtccatgtacagttagcatttcacaaggctaaacctactgactattctagaaatatggtgtgccttaagacaagcctacactttaagacttctagtgatcgtgctacctgcgcgacgcgcataaagaaaaagaagagaaagtggagggggaccccggtacccaagcgacctatagtgagatgaataacaataaactgggcaggggttacgacgacgagactgagataaccgtggagttcctcacttaaacgagttgaaaaaaaacacctttgtgagctgagatacagcgaaaagtgccgtgcggacgcggttacatttgagcctgctgatggctggagggtcgtggcgttttttgt

SEQ ID NO: 579720 - DNA, 194 bp, Homo sapiens
tgagccggtccgttactgggcgtatgtaggagttgaagattagtccgcgcgtatcgtggtgtactcgtacgttccgtaccattggtggccattttgatttgatggtctgggagggatcgtttgacctcgtcctgttatcgtccggatgcgtagggattgcgcgggcgatgaaggactaggatgtatggcgggca

SEQ ID NO: 579721 - DNA, 385 bp, Homo sapiens
gcgatgctgatcatcgtcgagacgcttgtatatcgtctacgacaccagagatgaatcacgtaacgtctagctccgaaatgttctggatctctgtacactctctcttccggtgcaatcagaagaaacaaagaatttcctccctgccactttgggaattgtatagcgtctcatgtatattataggttcacagactgaaaagcaactcaagattgcctcagtcaggttcccttctatgttccacagagcaccaaggaaattctgggcacttgatagtgtccctgagagtaaaacatcagtattcaccaaattaccctctttgctgccaaagaacgatggggctttgataattttctccttttaaagccaaaaagataaggcatgactt

SEQ ID NO: 579722 - DNA, 131 bp, Homo sapiens
tgataggctgggggacagcacaggccaggcagaaacgaggacacagagaaatcaccgaggggtgagtacgctatgtcttccctagaatcaagttttgttctggactggctcgtgcctgagtggctagactg

SEQ ID NO: 579723 - DNA, 350 bp, Homo sapiens
cccgcagctaacaggcatgacatgaaggtaaagaagggagcagcatatgaagcaggcagataagctaggaagcttttctcagcaaatctagatatgaagtgcaggttgattgaatgaaccagtgggacatagtaagggcagcagcagcatggacgtatctcaggaaggacaaagacagagaggtggttacagagtctagggaaacacaccattcttcctggccttctctgatgctccccacgaggctcatttcagtaacaaagctcagagaaacaaccaacgaaagatctttgagacttccatgggcaaagatcaataaggtacaaatgcaaggcaatgttggcgtccat

SEQ ID NO: 579724 - DNA, 966 bp, Homo sapiens
cggaagacttggatcgggcctatgttcccatcgcacaatgtgaaagatgtgtacgtggttaaccagatcagattcgctgttgatttgtgactaatgttccatgaagaacgagtcgaaagtgcatctcgagcgaaaccgttactcaagagatctccacctattagagtctgatagtcactgattcatgagtcctagctcagttacctcagaattatatctaccatctacagctacatagtgggaggtcttcgggggcatacatactaggcctgttaggttgtccaccaatttcatgactgtgaagtcacacgatatgttgctcaagtgggacacctatacagtgcttgaagccatacactgttgaacagtctgtcaagacaccaggatcttttgtccagccatcactggtcacacatggcacccaggagcttcttaggagcgcgatcccggttctttgaagagtcctgctggatgacaaaccgcctggggctgttgtaggatacctgattgaagaactggtcagagttaacctattatggagcgactttcaagccaccatatacagtggtagtagggcactcgttacgcaggttaacatcatccagatgacagagtcctgatgccggtgccatggtctgaaaggctccctaaatagagtttgtcgtggaacctggccaaggggaagcatttcccaacgggaggggtcctgtaggcaatcgacttgcttgaaccccgaccttgcggagattgaccccagaacacgagtcttgcaggccctgtgtgatgttggctgagaaagtgtctgcgggactgcgagtactgaaaacttacatggggtctaggggccgtcttgtgtgaaacccccctggggaggaaaatacatcttggtatcacagaggacccaaattttgtcactaaaaaaccaaactacgcttaggtggcacaggccgcttccaagatgggcaa

SEQ ID NO: 579725 - DNA, 460 bp, Homo sapiens
  misc_feature (416)..(416): n is a, c, g, or t
gttcctgcccaacaagctctgccagaccatttaccctattaaaggatactcgatagtaaatgtaacctgtcgcactaacatttgctcctcttgggaacgatgtattatcatgaccatgcacaatctatgacgtactacatccctgtaccttatgcataaggactctactggtattaactcatcttggcaagtcaaagctaatacccccgaaaccagtctagctacctaagaacagcttatggagcacactgcgctatgtcacgaactcatgtgaagatttataggtagtggctacaaacctaccgtgcatggttatagcgtgatagacaagatagcatcttagctcaaactttgtgtgcacaattccctctatatcccctttgagatttaactggtaggccatagaggcacaggtntctagacactatgcatagaccttagtttgagagtaatacattcc

SEQ ID NO: 579726 - DNA, 1006 bp, Homo sapiens
ccatttaaatgagatgctgtatgtaagccagggtcagcaaagttcagcctgtgacctggtgtgtgtgtgtgtgtgtgtgtgtgtgtgtgtgtgtgtgtgtgtgtgtgtgtgcgtgtccctgagtaaagagtgcgttgggcatgtaggtaagccgataaaaaagaaaaaaaggatgccagatgaaaaagtgtgtcgcacggaccaggccaagaacgagtagcgcctggtacacgaagaagggggggcgtgccccgggagatcgtgtcgacgtcgtcggggtaacaagaaggtgggctttctcgaaaaaaggtgtggcgtctgacacccggggggggaggagcaggggaagtgaccctcagggtcgaggggaacgccctccaccgtccgggggaacagagacatagttgcgtgggctacaggcactcgctgaagattagcgcgtgggaaataagcggggtgtgcaccaaccagcagaacagcggtagtgggtacgggtgtaccccaccacacccaagaaactcgtgttgaaacccgggggagggggggcgtcgaaagaggagggcgggaatccatgggcgctgggtactacgcaagctgcggggtgaccaccgctgtgctgaaaaaataaaaaggttgacgctgtgagggcacaccaagtgggtggtctacccgagcagggagggtgtgaacatgcagcaagtcactttgagagcaagttctcggaaccgcttgtattataatcaaagcggccgggcgaagacaacgcgtgtgggcggcaacacggtgtggcatacgttcgcaaaagggggcgcccggcaccaagagaatattgcgggagagggaccaccgggggaaaccgtgtggacaacatccgggtgggggctacccaacttggggaacacaaacccgtggtggcaacccgttgggtgtgcacgagctgtcattaaggagagaagaagccccaatatgtaatcaaggcggcggggcaccaacggcgccgcgaaat

SEQ ID NO: 579727 - DNA, 436 bp, Homo sapiens
  misc_feature (97)..(97): n is a, c, g, or t
  misc_feature (198)..(198): n is a, c, g, or t
  misc_feature (328)..(328): n is a, c, g, or t
  misc_feature (353)..(353): n is a, c, g, or t
tgcaaagcttaatggctgcagaggataagtcctcgcagaaggaagacagatttgaggaagagatcaaggtcctttccgacaagctgaaggaggctgngactcgggctgagtttgcggagaggtcagtttctaaattggagaaaagcattgttgacttagaagagaaagtggctcttgccaaagaagaaaaccttagtntgcatcagatgctggatcagactttactggagttcaacaacatgtgaaaacctccttagctgcgaccacattctttcattttgttttgttttgttttgtttttaaccacctgcttgccccttaaatgcantttatttacttttgaccctgtctcngaaacatgcccaagatgcccgcttggtcagggggtggggtatacactttcctattggctagcccgtgtcagggcgatcctggt

SEQ ID NO: 579728 - DNA, 107 bp, Homo sapiens
tccggccacgttaggtgatctgtggggcattacgcccatgttcttttaagtaattccctgaggttggctcagggcaccacttctgattcgattccacagatcaccct

SEQ ID NO: 579729 - DNA, 463 bp, Homo sapiens
tctggcgaggcagtctcaaatgctggagatgcaagtggagctcttatgtatgaaagacagggcaacggaactgcgggggcagttgagttctgagaaaatggcccctgctgaactgaagagtgagcttgcacaaactaaattggaactagaaacaacactcaaggcacagcataaacacctaaaagaattggaggctttcaggttggaagttaaagataagacagatgaagtacatttgcttaatgacacattagcaagtgaacagaaaaaatcaagagagctccagtgggctttggagaaagagaaagccaagttgggacgcagtgaagaacgggataaagaagaacttgaggatctgaagttttcacttgagagtcagaaacaaaggaatcttcagctaaatctacttttggaacaacagaaacaactactgaacgaatcccagcaaaaaatagaatcacag

SEQ ID NO: 579730 - DNA, 112 bp, Homo sapiens
  misc_feature (11)..(11): n is a, c, g, or t
gctggtcctanagctcaggagtcgacactagctgggaacatggtgaaacctatatcattaaaatacgacaagttagacgggcgtagcggcagtgctgtagtcccagctactc

SEQ ID NO: 579731 - DNA, 241 bp, Homo sapiens
caggcacgcaccaccacacctggctaattaaaaacttttattatagagacagggtctcattctgtggcttaggctggaaatgcagtggtgcaatcatagctcactgtaacctcaaactcctgggctcaaaggatcctcccacttcaaccttccaagtagctgtgcaccacatccatctagttttgggttttttttgtagagatggggtcttgctatgctgcccaggctgatctggaatgcc

SEQ ID NO: 579732 - DNA, 188 bp, Homo sapiens
  misc_feature (27)..(27): n is a, c, g, or t
  misc_feature (188)..(188): n is a, c, g, or t
cccgctacacccaccaggcacacaganccaaccccgacacccatctccaccaccactacggtgaccccaaccccaacacccaccggcacacagaccccaaccatgacacccatcaccaccaccaccacggtgaccccaaccccaacacccactgcacacagctcccaaccccacaccattaccactan

SEQ ID NO: 579733 - DNA, 171 bp, Homo sapiens
  misc_feature (14)..(14): n is a, c, g, or t
gtgctgagacacgncacgagatggcactacttctgggcatgggcagtgctgtgtggcagcgcactggcgcctgaaaatcctcaaagagatgtcgcacctgagacggacggcgaggtggccgagccacgcgcgagggaaaatacgagcatgtggccctcgacctcttctccg

SEQ ID NO: 579734 - DNA, 118 bp, Homo sapiens
atgacctcacgtttccgattgccttctgcagaacctacaatgtacgagcatcagagtcggcccgagacagacagcatactgagtggttgcacatcctactctcgataagcactgtaca

SEQ ID NO: 579735 - DNA, 453 bp, Homo sapiens
actaatactgatttcagtttgctacagtttcccccacagtccagacatgcaatataggtaaattggataaataaaattggccatagtaaatgagtgtatgtgtgaatgatagagtgtgttcattctgctgtggtgatccctgttaaataagggactaaactgaagtaaaatgaatgatttcagggttttttttttgtaacttctaccagaactgttcccccatctaataacatttaaacgaaaattagtttccttcacttgtatagcaatctgaagtcagaatgcattgtgggtttgatgtgttgccaaatatttgcagttttttgcaaaacaaaacactgaaaaaaaacacaaatttgcttttacacacctacattatatccgcaacattgtactgtaagtgtcagtaacttttgtttaactatgtggaataaagctgtaattataatgata

SEQ ID NO: 579736 - DNA, 263 bp, Homo sapiens
acagatcgatggaacaaccaaatcttctggctccatcagctccccgtcgtctcttggcacctctcctgtacctcaccctggttatgtaagtcaacccaagcaatgtactatatctctagggatccactctgcccataaggatcctagtaatctatacacacataacaatatacagtcacacattctaacaaccagttactgaaaccatttactcagtggtactgcaatgattcgcacaacaatagaaaacagttcactttgac

SEQ ID NO: 579737 - DNA, 128 bp, Homo sapiens
atcccccacactactgcctgcttgataggtccgattgtgggatttcactgctgactgctggctgcctgttgaatgaaatacatatccccaggtcgctagcctggtgttgatggaactttccactttgt

SEQ ID NO: 579738 - DNA, 382 bp, Homo sapiens
tgcagcagacacagcatcataattcaggagctagttgaacgtatgcctcacttctctccactcgaggccgatatctagtgatgttgaccgggccacattcaatgtcagtagagcttcttcacagcctgtttgatctggtgcctgtaggatttaacatctactatgaacacaagtgtcttgtagtcctcgctcttcttcatggcacactctgtggtcggcggcaacttgatgataatatggtgttcaagcttgcttctcctgggggcgctcttctgaggatatttgggctgcccctggagtcgcagtgtattgggccgctggaaggtgggtgatgtgtggatcttttttcttcaccggctgtggacccctttcaacgctgtta

SEQ ID NO: 579739 - DNA, 1499 bp, Homo sapiens
  misc_feature (163)..(163): n is a, c, g, or t
  misc_feature (518)..(518): n is a, c, g, or t
  misc_feature (827)..(827): n is a, c, g, or t
tggccaaaaaaatccgatttttttttttaaaatagggggaaggaaaagggggaaaagggccccggtatgaagaaagggcctataagaagcaaagaagctaagaggtatcatcaggaaagaggcccgtccggggctatgggggaaagcgcgggaggcacggtcnactggggagtctcgccggacagcacgttagggtatattatcagaacgcggcaccggcagtgcctgaaagcgtctctcgggaaaactcttcgggtggcctcaccgaggtccccgcggtctccgaggtctctctcgcggagggtctccgacacgaggggcgccgaaagtctcacgcaggtgtggtccctataagagctgagaccgcgggtgctaccacgagactctcttggaagaaaaacacccagctgggagggccgccctgcaacctcggaacatacagtgtctgaggcgtccctatctgaggggaccgaggagcatatacaccccagagcgggagtgtgagagcgactatcacncactcccaaagagagaaggggagaccgaggccgagatattacaaccactactatcaccccaggtgaggagcctctcctacgagaacaggagtcacccgaggactgaggggagactataaaaagcgggggagaactccacttatatcctgggagggggggagacaactgagaaccagtctggtcccccacaagagggtgctaacaactgtctccactgacaagactgtagaaagaggacctccgcaacatacccggtggtgatacaccaacttccaccgcgaggagaagaagaaccccccctccctactnagaagaggaagcagaacgaacgagcagaggggtggtgggagccaccctctgcgcgagggacaagaacagttgggcgcccacctacacaaacacgaccgcacgtgaagagaggactaccacccccaggagcgtggaccgtggggggagaacaaaacggataattcatccttccccccagggagttagagagcagcaccaccaacgcgggaggaaacagcggccgactatgacacaagctagcaagccgccagatgagagaagcttttccacaacagttggtggggctcatccccctacgacggagaaagcaagggcgcgcgtcgatgggagcgggaggggaggaatacaccaccacaagacgcccctgcgatgatcaagaacacgacggatcatcacttgagaaacaagacgtgcggcccaacactcagggaggggtccacactaacgaggacggcaagtgctgtgtgcgcacccccaaaggaatagcacgcacgctacgacaaggcagcggcccctcacagcagacccctctacgagcacaaacctcggcggtacacaagcaccgaggactaccacccacaaggagagggggcggaactactacccccccacgcagaaagaagacatacaccagagcagaagagttgcgtgccgacacgaaactagacagcg

SEQ ID NO: 579740 - DNA, 846 bp, Homo sapiens
ttccgaggcctgtgcccaggcgcccctgacctcgtgggaggctctgcccttgtgcgcttggtaagggctcgtttcccgacccccgtggggaatctttggggggggccacgcggatctgtccattagggaagtccccgtgtccgtggaccttgtttaccccaatggtcatgttttgggtgttccacctccttggtttgtttgccccggggtcccccaagagtttgctcggggcccgccccccccagcactggtattgagtttctgtgtgccctcccgtgtgtctatccatgcagtgtaccccagtccgctgtatatggagtacccccgggatgtagctcttttccctctttggggcccccatttttaaagagggtgcctccgaagaggagattccacgactgtttccagatggtgatgcaattttgggcccaacgtttgctccgccatgggaacccccctggggaagggctgcccccctgtgcccagagtaccacccgaagagggagggtatctgccgattgggccccacaccccggcggctcccgtaatcggttaggaccaagaagtagctttttggacacacctctttgcccagaaggccgtggagaaccccccccgtccgtccacctagagcttgtggatgcagagtctccccggccccttgggagcctggaggaaccaaagaactggggttttttcgcaaaagggttcaggttcaaaaggccattttaccctggctggggaatttttttctggtgggggcccagggaccgaggccctgaaggacccaattttgtaattgtgacccccactttgggaattaaggattttttgcaggccccaata

SEQ ID NO: 579741 - DNA, 183 bp, Homo sapiens
ctctggttcactacgataccaccgctgatgagatctgcagcagtgtgatgggaagctggacatgctggtggcttcagtgggcacgggctggcaccatcacggtgcattgccaggaagctgaaggagaagtgtcctggatgcaggatcattggggtggatcccgaagggtccatcctcgcagag

SEQ ID NO: 579742 - DNA, 922 bp, Homo sapiens
  misc_feature (600)..(600): n is a, c, g, or t
  misc_feature (827)..(827): n is a, c, g, or t
acacgcgtgctgggcgcttacgcgtgctgggacagtgtgggctctgaacacgttgtattgcctggccgcgtctgttctttcctgtgcagggtagcgagacaggagtagggtgtggtcccgtgtagccgtgctcttttcaaggaaacgagtgctcctctccctgagaatggcatcacaagaagcatggtcaccaatacatctgtgcatgtataggtcattcgggatgtacatcccctgttagtcgtcgaggggcggtcattggcatccagcaatctacagaagaccttcatttacctcattaagataagcccgacatgcacttgaatgcacggagaagcaagtgtcctctgcttcgcacgtattgcgtctcttaatcatctacgtctcttcatagactctacctactatatgtctcttcgacctatgaaccgctataacttagctgagaatatctactaataggctatgtatatacatagaccctgtaaactctctctcattatacccgcatatctatctaacaccgctgttacgtagggagaagaagatgcacacttcatcgaagtgaccggaaacgactcgaaattcgtggagctaggntcgagtcccatacgcgatgaccagtatgactttgtatcatttaatctcttaaaaaagagctatagaagatataattgatccgcatggataagtacaccttagcatatgatcctggaagatatgagatcgatattccagtagagtagtgacagtaagagaagttgtgtcatagatcgacatacttgaggtagtcaaaatatcgaggcgttcctctatagattagatcncagctcagggtgatagatcacacttccaagtcattggttgtaacaacgttgcgggaagtggaaacgatgagatggcaccacgagtcattcaccgg

SEQ ID NO: 579743 - DNA, 357 bp, Homo sapiens
gcaggacggtgaaatatgctggccccaaaacctccaatggggcaatcttctacttaccctcaattcttcttgcaaaatgggagacgagtgaaatcataagagggagggagcctaggtacctaacagaccacataaagggatacacactagacgggagggctaacatgggtctttttctgagcaaaaaataaacttacaatcggtgtaaagccagtaatactcgggagttaatctgctacagtaagtatgggggtgtggactattacatacctgcacttgacactgaaccctttctccctatcaggactcccctccctgtggttagcctactcggtgcctgcttctgagacagcatac

SEQ ID NO: 579744 - DNA, 724 bp, Homo sapiens
agcgggaagagaacgagagggcgagcgagcgcggcgttcccgggccggcccggccccctcccttcaccatcgccggccctccggccgcttcctccgttccactcctctccccccccccaatgagcccctccggggcgggggaggcccgggaacgggacccgctacacgaattctacctaactcccatcgacctctcctctcgcccggccgagctgtgaggagaagggcccggcccggaactgcgctcgcagtgtgagcgaggaccaccgggcgggccccaccggggccgcagctgagggcctggctccgggcccgccggcgctgctgctgaccgacccgcgcgggcccacggctgcctggcccgggcccggcgacggcgccgacaccagacagcggggacggcggcccccgcgctcccgggcccccgcgcccgagtcggccgtagtacgcgaccctgcccgcgcccccgcggccccagggcccgacccagacccgagccccggccaagccacccgccccgaccaaacacacaactcggccccaagcccaccccacacaactgcaacccacccattcgcaacacagaccgcgcccttgactgcctcggcaggcctacaacaactccccttggtagcgacacgaaacccggctggcgaacgacttccgcggactccaccccttgctggaacgagccccagcccctctcaccccccgcgagcgtgca

SEQ ID NO: 579745 - DNA, 143 bp, Homo sapiens
gttatgaacagagcaagtatagagcccggtatgatttctagtaatgtgggggataaagagcttttgtgctgatagctgaaactgtcccagttaagttgtccacaaatactctgccggtgggttagattccgtgaagcaggacg

SEQ ID NO: 579746 - DNA, 391 bp, Homo sapiens
aatacacaggatcccacattctctactcagaggaaagctactcaaggaagccaaattatatataaatgtaagaaatttttcctaaaaattgtgatctcagggattaagttgtaataatgggtgttgtttacataacctgctggtatcgtcacactcctcacttaaaatgctaatgggtgaattctccccttcccattctgtgcctatgactccatcacacatttttagaaggtataagtcccttattctaatccattgagccattctcaattccctttcacaaacatgtggcatgacccatatcccatctcaccacagcctttccacactccacactgtgatataatatttataatgaaccctgttttcagtgctacagcctctcgtgccg

SEQ ID NO: 579747 - DNA, 132 bp, Homo sapiens
ttaaaagctaccgcaaaaaagcaacaacaaagtggtcccaaaacaccattctcctttcctatctgaaggtatcacgatgcattgtacatcataaaccagtcttttactcactaaactgggtcacggagctcg

SEQ ID NO: 579748 - DNA, 99 bp, Homo sapiens
atttttttttttggggggggaaaaaaagaaaggggacctttttttttggggccccgggttgggccgggggttcctttttccaagggatttttttgccca

SEQ ID NO: 579749 - DNA, 1471 bp, Homo sapiens
ggttcctcgttgccaacgctgtcttgtaaggtgcggctacgaagactggtggacatgggcagcgcctggcccagcgcatcatgcctcttcgacgttggatgggaccctcaccgccccgcggcagaaatattaccaaaggaaatgtgattgacgttcctagcaaaaattgagtgcagaagatcaaaagtcgtgagtggtcggcggatcggacgtttgagaaagatgcagtgagcaacctgggaaagtgactgtggtatgcataaagtacgaattactgtgatatccaggaaaaatggcgttgtgtacgcatacagaagatgggaaactcgttgtgtacgacagacatattcagaagtacatctggggtgaaggaccctcaatccaaagatattaatcgaaactacgtgtactgacgacttgcatttggccaaagattcaagagctcccgacaccaagaggggtaacgttcctagttgccaattcctgaacattgggcatggttcacgacggctgttccacacgtagattgcgaaaggtaaagcctgacaagaacccaggacagcaaacgcacattcggaggattcttacccgtagacatccgaactcaagtacaacggacacaaccgtcattgacggcaaccaaacaacacgctttctgctaaggcaacagaattcttcaccgcagaaaaaccgacgattgaagacatgaagcagcagacaggccccaccaaacgcttgaatgaccacgttaaggaacagcggccaaagacttccacaggacatatcgcaaatagatccactgtatccaatgcagtcggccattggagggaccaacagagcaggaataaccgtggcacactcggcagcacaccacctggcatggcaaacacaaactgcaaccgggacagaatcaaagggaacacgaacacatgcaagcagagccacctgacagaggcatgaacacgacaacacacgaaaacagacgcacagcaagcgacacaagtgacaccccatcgaagcacccactgacgacacaacacccgagaaaacacgcaagtgagacacgcaacacaacaggaggaaaaaaggccaccctaggacgggaaaccaacgcagcacaagacgaaccttgggagaacaagaggacagaccacaaaccataacaccgcgaggaccaccagagtcaagacggcccagggacacacacatcggcaagagaaagagcgcaagcgaaacagaggggaacgaacgcgacgcatgcgccaccacaaacaggataggaaaaacagagccgcaactggaggaggtacagacacacacaagacacaagacagtcattgacattgcgacctatgcaacgagatgagaagcgcaagggacgagagacaagactatggaaaggaaacaagacagacaagacgaccgacaaacaatacagataggatcagagaccactcaacctgaggcagca

SEQ ID NO: 579750 - DNA, 242 bp, Homo sapiens
tcagtaatatgccggaacggaaacagcccaaatgcatagtaacagaatgagtattaatacaattcaatactgtatacaacagatatgaatgaacgaactacaagcacgcaacaatacagatgagttgtatagacatactgttgagtcaaagaagccagacacaagagtgcatattatttcatttatttgaagttgaaaaacaggcaaaataaatctatgctattgaaacttctaaaactagg

SEQ ID NO: 579751 - DNA, 1189 bp, Homo sapiens
  misc_feature (523)..(523): n is a, c, g, or t
taaaacccacatcgggtcctttaatttcaagggaacttccccgtgtttagccccagggttgatatctaaccccgaaaaaagccccagaagaaaatttctcgtggcagaattaacccaggtaaaaaaaagcgcgccagttattcctttattgtgtgctcaacgagaaactcactctcagtggagaagggaaggcgggaaggaaaaagaggagaggagaatgtaaccagaggggctctcaacaccccttacaccacgtgcaaacacatttcagaacatttggggaatttaaacacaaacacttaaagaggaagccttctccgaggaagagggaggaggcaccaagtgtggaaactcgtggagagcagcctcgagggtgcactcagaggagacccacgaggaaaagaacacctccgagagcgtggcgagtgggaacccccgagagggagagcctcgagggcgtgcgccaccccagtgtggcgtgggaagagaactccgccaggagacgggatgtggagaatctccncagaaaatcctgtgggagagattagaacctatatcccttctgagacaaactctcttaccagagaaactctcccctgtgtgaccacagggggttgcgcaagaagatttaaaaaaaaccccaaggtctttaaaacaacactattattggggggggtggggcttatgggagactcttggagaaacacccaaaaaccagttttgggacttggatatgggccaaagcctttggcccaaaaaccactttggtgtcccctctctactctgggtaaagggaagaggaaaactcgtggacacacaaacggcgcaaggagaaatcctaaaatttggggcgcagaaaaaacgcggggaagagcgaatcctccttgggaagcggagttctgaaacaaacggtgcgacacgcgatattacacgacacgtttaccaggggggagacacaggtaaccaccatctcttattcaaaccatttttcgcgcactaatggtgcgcccagcgtgtgtccccaaatacccgatccacaaaaaaataaacctcagggacgggtgttatggcagaaaacccaatccgtgtttcccccgagagggctgtacatcaaaagtgttaatgcccttggagagagtgttcccccaggggtcggcgggaaaaatccccacactcaagagacacgaga

SEQ ID NO: 579752 - DNA, 232 bp, Homo sapiens
acacgaaacacatataacattagccccgtaacacaacagcgagccagttctttcaaggctatgcaagcctaggcattgactatctgccctccacgctatacacagttcctagatgcatcttcttctactagaaggctgttttacctacactgcaaatctgttgtttagtgtagccatcttcctcaatgatctttgctatgtctaatggatgtcttgctccagcctcttcatc

SEQ ID NO: 579753 - DNA, 643 bp, Homo sapiens
agacgacagtaatggtcacatcagaagtgacgcgactgttgggcgagctgcctgcctctgtgcgtgaccctcacaggcgtggccctgtctagagatacccctggtcaatgaaggccactggtgtgcagagccgtgtcgaggctcctacacgtgcccactctcttcagcgggccacccggtcctccctccacgtacccgttctagtcccacagagaggcacgggaatgttagctgactctggtgccttatctcgaagggaccagaagtgctgcagtgtcaaggccatgctctgtgctgtcttccggtgtctcttcgcgtgtctagtcctactcgtccgtcctcttcctctcctttaccccactttcagtgccactttcatcaggtttcgtgtctcatctccctgcgtgtcttcttcctttgtctgtctgtttctttccccgatgcagagtcatgtagattgccgctgacgagtgttcagttacagatcactctctgtgcggggagtggccctgcttgctcctcagactcctggtggccttgaagttctctgttgcatctagtccatcctgccctatggccctggtccgggctccagcttgtgcggggttctgggtacgagggtcactgtcctttggtcctggag

SEQ ID NO: 579754 - DNA, 745 bp, Homo sapiens
  misc_feature (262)..(262): n is a, c, g, or t
  misc_feature (680)..(680): n is a, c, g, or t
ccacttccacaggaggactacacgccgtcggttgtgctgcagccatgtctcgtatctgatccctgaaaagttccagtcatatttatggcagactactcacacacacaagaatcgactgggcggcgataaaatatggctatgccatgcactgccatgtataggggtgtcgggccagaatgatactgcgtcatggttggatgttgaaggcaaagcaatgagcattgcacctacacacagagcaggggcgaggatgcaacttcancgtgtaggaggagtggaggctgggtgatcggctgctggaattcaccactaatataatgccaagcaaggtcccacgtcccagatactcaccgatcacctaggatctgtgtgttccttggaaccaggacgaggataagtgatggtactaaggcgactgcgtacacagatacccaggcccccgtggtccctagtcgcatactgggtcctggaccaactaacgctcacgcaggaatgaccgtggacgtcggactgagagtaacgagttcgcgggcccaattacgatgcgcttagcgttcatcggttcgtggggggcctgttcctgttcccgaaggaccaggcaacaaacaaggatgcaactggggcgccgggggccgcaaccgttgggttgtgtccagacacctgaagataaggctctgctnaggccctggttcctgcttaataagcactaggttatatatacccaagaacacaacaacgcacaagg

SEQ ID NO: 579755 - DNA, 89 bp, Homo sapiens
  misc_feature (35)..(35): n is a, c, g, or t
gaaagccctgctggtggcgctcaaggagcggggcntgttccgcgccattgcgcacacccccatggtggtgccactctgcaaccggttca

SEQ ID NO: 579756 - DNA, 327 bp, Homo sapiens
  misc_feature (14)..(14): n is a, c, g, or t
  misc_feature (16)..(16): n is a, c, g, or t
  misc_feature (29)..(29): n is a, c, g, or t
  misc_feature (56)..(56): n is a, c, g, or t
  misc_feature (58)..(58): n is a, c, g, or t
  misc_feature (63)..(63): n is a, c, g, or t
  misc_feature (69)..(69): n is a, c, g, or t
  misc_feature (73)..(73): n is a, c, g, or t
  misc_feature (85)..(85): n is a, c, g, or t
  misc_feature (88)..(88): n is a, c, g, or t
  misc_feature (94)..(94): n is a, c, g, or t
  misc_feature (97)..(97): n is a, c, g, or t
  misc_feature (120)..(120): n is a, c, g, or t
  misc_feature (123)..(123): n is a, c, g, or t
  misc_feature (141)..(141): n is a, c, g, or t
  misc_feature (143)..(143): n is a, c, g, or t
  misc_feature (145)..(145): n is a, c, g, or t
  misc_feature (164)..(164): n is a, c, g, or t
  misc_feature (244)..(244): n is a, c, g, or t
  misc_feature (250)..(250): n is a, c, g, or t
aaggtctcactatncncccaggttgcccnccgaagtgttgggatacaagtgtgagncnccgtncctggncccntgtacttgaagncancactancgnaatgtatagatattgtataatgncancggttgttatactgtacntncnatttgtatttttatttttncttccgtcaaatattcagccgcatctagttgaatctgaagatgtggacctgctgatgaagagggctgattgtatctaacntagggncttgcatgcagctggcacttaatgcattttattgactgttttagctaacattcaatggacaattcctaataaaaact

SEQ ID NO: 579757 - DNA, 155 bp, Homo sapiens
tacgtcattctatgtgcggtgatcatctagagctcgagctgcggcagtcatgcttggaactggctatcgtcttacatctaacagttatgaccatgcactggcctatcgtcttacatctaacagctatgaccatgcactggccgtcgttttacact

SEQ ID NO: 579758 - DNA, 156 bp, Homo sapiens
atggggtctccctatgttgccctgggatgatcttgaacccctggccataagcaatcctcctgtaaacctcccaaagcactgaaattccaggtgtgaaccaccatgaaaaccaaaaaaacaaaaacacacaacacccaccacaaaaaaaaaaaacac

SEQ ID NO: 579759 - DNA, 475 bp, Homo sapiens
gcccgaggaaaaatccgaatcggaaggtgaggaaaattaaatggctcaacaagcccaatacttaggtttccccccccccctttttgattgggaatgttgaaccatttgaaaaaaaaaacttggtttttgtttttgcaaaggaaaaaaaaaataggataggcttcccttgtgcaaagggaaaaaaggttttgtttttgttttgtttttaaaaggagccctgaggcatcagctattatacttgggactttacctttcactccctatatggtaacttaaagccattcaacaaggagtcaagtagatttgaaattaaatactcaacagactcctccttttttagctgtatttttcaggtactgtgtggtgaccccccccctggtgtttattacaggcccctttggtagttgtgtatttgctcatgtatgtgatttgacaaaccagttttttaaaatacccccctttttaaaaatttgga

SEQ ID NO: 579760 - DNA, 353 bp, Homo sapiens
tctgcaggatcccccgttactggcatttagtgactagaaattctttatccttcagctgcatacacatttactacacacactgtgttatcaagtgcactgtgcttatagggttcaaggactcactataatcaagaatctttcttcagttgtctcattcagcaattttaaggcttctgtatcatattattttggatgcttagattcctgttgtctcatacatattaatgtattttctgatatacaagacactgtatcatcccatgtgagacaaccacctattattcaccactgtgaacgattatttttctgtctgcttcatcttttctcaaatgccaggcaatgccccgtgacgc

SEQ ID NO: 579761 - DNA, 199 bp, Homo sapiens
cgttgggctgagtctgtgggcctgacggccgcggttgattctgatgtacctagtactacaggcatgactgggattccgtgtaccagagtacatgacccatggtatgtacgcacgtaggcacccttggacgcacccactggggcctgggggtcggagggagtgttggtagcctcctccccacccgaagggctgaccggcg

SEQ ID NO: 579762 - DNA, 935 bp, Homo sapiens
aggtctacaagagcgctacttccccatatcatagaagagcttatcacctttcgtgatcacgccctcgataatcatgttaccttatcgtggctcccgtagtcctgatagtgcccttattcctaacagcttcacaagcaaagactaacctaagtactaacatctcagacgctcaaggacaatagaaaccggtcttgaactatcctggccacgccaatcatccctagtccctcaatcggccccttccccaatcccataacggccattcctattttaccacttaaccagaactgaaggatctacacacgcgaagtccccgttcccccgttgatcccatttcacaaactccacaatggggcccaacccaaaagtgggataacatggaagaccccgtaaacgaaaggttatcaacccgggaaacttataacgtgggccggtgactcattaacgttcttatccaagtcttacactttaccagtataccgtatacaccccccaaatacaaaatatacccatataggaaaacacccaaggggtgcgccagaaactccgtagtgggtaaacttttcaccaatttttgacaccgagctacgtgaacacacaaaaaatctcgtggaaggataacgtatacacatatcacccacgcaactttgcgacacgagactcccccacccgccaaaattgtacccgcgatacagctttaacttataaatctatatcacgacgcgtttttcacacataatatgaaaacggcagcttaaatatggggcccacagttatctctagtgtttagaacactgcccctcggagtgcctccccaccacccacaagacaaaagtttctatcaagggggcgcccgaattatataatccatcaactgtcatcaacagcggaaaagtgtgcacccgcaagctatattaacccccccctggcggagc

SEQ ID NO: 579763 - DNA, 556 bp, Homo sapiens
gtttcatgcgtctgtgcgatacctgtagcctgcagaagtgtaactactagcagtctgtctgcatgatagttcatttttattagtgtagaacattatcaaacccatagaaaaatcgagagtagagtgaatacccatatgcccctatccttggtgcaccagcgtattaacaccttgtcatttctcttctccctctttccctctcttactctttcctttctctctctctttcttctcctgtctctgctcttttgtcagaccatgtgacactgcaccaacatataacacttcactcctagacccttggggggatactagtgctccttacaaggaaggtgtacttcccacaggtagagtacccataccctttcataaaatgatcatgcattaatgccatgacatcccatcctcccagaaaagtctaggatactctgtcttccacacctgatttaattgtggcatgcattattcttagtctagaacagtcttgcccttcctctcttcttgaagacattcagtacttcgcgatgtacagatcagttgttcacagagtggtcac

SEQ ID NO: 579764 - DNA, 1096 bp, Homo sapiens
  misc_feature (705)..(705): n is a, c, g, or t
caaacggcttcagaactggacagaggagtgtgacaatctctggtggcgatgcattcactgactgagttctttgaggatgatgccatgttgaccattctactttctgcctgtgaggatggaccaaagagatataccattggtcgcggaccctgatcccacgctacttccgcagtcatctttgaggggggtgctacggaggctgtactatgttcttaagtcaccccaaggaggcattccacagcaatctttgtatccctcgactgtgaccagggcagtcatggtgacccagcgatggcaagcccatgttcacccaggtgtgtgtggacgggccggttgatacctggtagttcagtgttgtgacgacatgatgcggataaagacgtggcacttcagtcatccggcatcaccgagagctcttccctcgcgtagcatccttgccatgcgtgcccaagatccccagatgttggatcgagctctccagataaacatcgactcggatgtgggctgtccgaattccactctcaactacctccgactctgtgtgatactcgagcccatgcaagagctcatgtcacgccatcaagagcctacagcctcagcccccgcgactggctcgagacctggcttttcccgaagtggcagcgcatggtagcaccctgcggagccaacgtcagcagccagcaaaggcggaaacggacgattccnggggcagaccatgagctctggtggggcaactcaacaaaggaccagtcagaaaagagcccgtaaacatttggcccttcagcccgattttgatgtggggaaacccctgtatggcggggagaccgtgagcaacgacaaagggcgttcacccggtgggagaacacccaagttggttgacaacagcgctgtgaaagagaggagcattaaaaacccctcatgtggggcaaccctgagaagaaagcggctacgaatagaacagggcgacctaggtcccaagcgggggggaaagcgatagccaaacatcacgaggagaggaacatagatctcaccgcaggacgaacagatccgggacacctcgacgagagaacgcactgggtcacacggtaagatgagc

SEQ ID NO: 579765 - DNA, 149 bp, Homo sapiens
  misc_feature (58)..(58): n is a, c, g, or t
  misc_feature (68)..(68): n is a, c, g, or t
  misc_feature (85)..(85): n is a, c, g, or t
  misc_feature (118)..(118): n is a, c, g, or t
  misc_feature (136)..(136): n is a, c, g, or t
  misc_feature (139)..(139): n is a, c, g, or t
atttgtcgaggcagccactaactcgttgcaagtcgtggaggccgcctcaacaagttcntctcccaaanctgcttggcgaccagcntttgttaggccaccgacatgcctggttgacaantacagttggttcctgagngcnggggcgatct

SEQ ID NO: 579766 - DNA, 177 bp, Homo sapiens
  misc_feature (60)..(60): n is a, c, g, or t
  misc_feature (63)..(63): n is a, c, g, or t
  misc_feature (103)..(103): n is a, c, g, or t
  misc_feature (151)..(151): n is a, c, g, or t
tatgaattctgccggctctgaactacagggttctgtcgttcaatgccttgccccagggancanccgtgggtggggtcaggaatcatcccttgggcagccctcnacccaagggtctggctcactgcttgcacgatggggtctcttcacacanctcttgaatgtttcccgataggggct

SEQ ID NO: 579767 - DNA, 248 bp, Homo sapiens
atctgagtaacacatatacactacacatgatattcatataaaaagggtattcaatcatgtacagtaaagctaaaaaccttccgtctacgttcgaatgggaatgcaaccagagaacaaatggaaaagttttccaggtacagaagatgagcacgcagtaacgccctcttgtgggatctctacccaccctaggaacactgtggctcttcccctacacatggtgattgctaaccttgctacaagacgttgag

SEQ ID NO: 579768 - DNA, 185 bp, Homo sapiens
agtcgctgttcggtattagctaagtctcttgtagattttctggtaaaccattatgcaaaaggtagaaggggtaatctttgcttttttttgcttttattttattctttcatctttcccttacggtactatctctatagcgtcaggataaaaatttctatctcctatactttaatgttaggtgaatg

SEQ ID NO: 579769 - DNA, 169 bp, Homo sapiens
  misc_feature (2)..(2): n is a, c, g, or t
  misc_feature (72)..(72): n is a, c, g, or t
anttcggcacagcgagtttctgaacctcagctctagcccttccatggctgtccggatcgccgcactgcagtnatcgcatgctctcactcgcctgcccacccctgtgctgctgccgtacaaaccacaggtgattcgggccttagcaaacccctggatgacaagaagagac

SEQ ID NO: 579770 - DNA, 109 bp, Homo sapiens
tgttgcgctccgcccgtgtgttgcgctccgtgtgcttcctggcgcccccgcccaaccaggaggccaggaggccgtcaccaggctgaggcccagcaccagtgccctggtc

SEQ ID NO: 579771 - DNA, 663 bp, Homo sapiens
  misc_feature (19)..(19): n is a, c, g, or t
  misc_feature (31)..(31): n is a, c, g, or t
  misc_feature (41)..(41): n is a, c, g, or t
  misc_feature (223)..(223): n is a, c, g, or t
aagacttggtaaaagaacntccactaatagngggcgctagnctcggtaagtagcctgaaacgacgagaatcatacagacgcgtatcgtatacatatacagtatcatcgacgtacgacaattgccggatcgcatacgcgggagtgatgctccgagcgggggtgcagctgactcggcatgcggctttgggggcttcgtggggagagaccgttgacctgactcggncctgtgacgtcagacttctgaccccgtgccgatgattatgggaccccatctctggccgtgtctgtgggtcatgaaccgacatgctgagtctggacccgggtccccgggcacactgactgcggtgaccccagataccaggacccgggaggcctcagagaactctggaacccgttcgcgcgcgtggctggcggtggcgctgggcgctgggggggcagtgctgttgttgttgtggggcggggtcggggtcctccggccgtcctcgccgcgtccctagcccgcgccgcttctccccggagtcgtcaacttcatcgcgatgtggtggaaagacgcctgccgtggtctatatcgagatcctggaccggccctttcttgggccggaggtccctatctcgaacggctcggattcgtggtggtgcgatgggtcattgtcccacgccctg

SEQ ID NO: 579772 - DNA, 269 bp, Homo sapiens
ccctcttctcctacaggacttggacactgcaataaagaaattttattttaacaaaaaaaaaaaaaaaaaaaaaaaaaaaaaaaaaaaaaaaaaaaaaaaaaaaaaaaaaccccctttgggggggggtgtttgtggggccccaaaaaaaaaaggggccccttttgggggggccggaaaaagggggggcggaaaggccccctcttttaaggggggggtcccccccgccgtcggtgaaacacagtgagggggccccgggataacacccccaa

SEQ ID NO: 579773 - DNA, 1181 bp, Homo sapiens
gctgctgagaggcaagatggttcaccagtgaggtgtactggaggcacccgggaccaattcggccaggttctcaggttcttgttcgtgtctgttcaagaccggccacggtcgtgatccggcaaatatggcctctaatatgtgccgctcagtgtttccgtccagtacgcgaatggatagtctggtctgcaatgtaaagttggactaatatgctcaatccttcagaaggacttatccggggcactctactcagattgagaaagcactgataagtactccgtatatccaaataaacaaatttgcataaggaatagcaaaaggaatgaacttgcgggacggcaattcccaatgactcggggggcgcgggaacaaggagaggctacgatgcacaagtggcgccccagtggcgccagatcagcgcgtggttctccatgaacgccggaggttgttcctgtggtccgtagagtgggttgagaaaactccggagcacgggctcactcgatatattggggtccaggtcgtatgactcccaagtttcctgacgtacgcgccgatggagttatccgtccgcggctatataatacggaattttggggggaaaagcaaggtatcccgtaagggaggccatcggcttaacgtgaagggggcaacctccgtttgacgtttgtgccaagagaagtctccgacagagaaaatggcgaaaacatctggtgcgttaactctccgtggaaaaggaaagagcatttgcagcggggatgtacacgcgttagacccttgtccaattataagagtccactgccaggtggaccacgggcgtttgccctgtcagagcatcacttggggggtgccggcagtctgttgagggcccccttgattacacgtcgtgttgaagaagcccaactgggagtcggctctggagggtacacgaaatggggagtaaccacgcttcgaaggaagacacaaggtcggtttggaaagcccaaggtgggaaaaaaaaatattaaaacggcctttcggagttctattcccattcgattaccgtggaggccaagaccggcattcagaataatatggggaagcgtaaattcggaggtaaccgcaatccgctctaggaagtcattagagagatgacgataggtacagtttcccacagaaaagcaatggcaggaatcggaagttaaccc

SEQ ID NO: 579774 - DNA, 122 bp, Homo sapiens
ttcctaggttccgtttgaaatgccaatttcaaatccatggggttttttgtatccactaccactgattccaaaccaagattatttcccccagacctaggaaagagccttcctaccactccccc

SEQ ID NO: 579775 - DNA, 341 bp, Homo sapiens
  misc_feature (35)..(35): n is a, c, g, or t
  misc_feature (39)..(39): n is a, c, g, or t
  misc_feature (41)..(41): n is a, c, g, or t
  misc_feature (77)..(77): n is a, c, g, or t
acccaccaaggaggagctggacgccatcatcgagnaggngnatgaggacggcagcggcaccatcgacttcgaggagntcttggtcatgatggtgcgccagatgaaagaggacgcgaaaggtaagagcgagtaggagctggccgagtgcttccgcatcttcgacaggaatgcagacggctacatcgacccggaggagctggctgagattttcagggcctccggggagcacgtgacttacgaggagatcgaatctctgatgaaagacgcgacagaacacacgccgcttgacttcgacgagtctgagatgagaggcgtcagaaggagggacagcgctctaccaa

SEQ ID NO: 579776 - DNA, 979 bp, Homo sapiens
  misc_feature (250)..(250): n is a, c, g, or t
ggtcacagtctcgtactccgcttctcagacactggtctccctctcgcttctgtctgcgcgaatcgcatgagaagagagatcatcgcgccaaggtgaatcagtcttaccatagggtctgaccctgtcaagaccgtgtctatctctagaggattactgtcatcagaacggtggtatgattcatatcgtgcgcgcacctcaaaccaccgcggtatcactgatgtgcaatgagcaccagaggagagtgcgtgcntgaccgtgtggcccaatgagtgaccagaacaaccaagccgatggctagtcctgtagccctataagtgacgcctatttgggcatcgcgccatccggttacgaaccttacacgtgagcattcacaattactagacaatatccttgcaaccaaatccattctaacgaatgcaagacatgaggcgtgtcctcactgaaagaggtacgaccctaatgtctgcatgaacgcaaaaggctcttctcactgaaaatcaacctgaaagagcaaactgggagaaggatgatgattcgagataatgctattgtagacgcattcgaataccaccgagccaattgatacagatgtgcctgtccaaggtccaagttcgtgttcccttctcacgaccatcctggatgcaccatgtgttccatcggtcgatgggactcatgggacacggcgttggtactagcgacaactcccgaggtggtccacactgctacgacgcgtgttagcgccgactacaccctcagagctagtgtcctcgcggtaatagggactcttgaggctggcacggtgacccttgtagccgaccatagtcgtctatggaacgaattcctcagattgaatccgaaggctactcgctttcatgcaacccaggggccagaaggcttgcaaatcggttcgccgaaattcctaggaacaaccctgtagattaccgtccccccttggacttccagaaaggatagttgcagg

SEQ ID NO: 579777 - DNA, 162 bp, Homo sapiens
tacaatgttgttcttgtttttcaatgatggggtctcattctgtcacctgggttcagcctccagggttaagcaatcctcctacctccacctcctgagcagctgggactacagccatgcgccaccacacctggctaattttttttttttttttttttggaaatg

SEQ ID NO: 579778 - DNA, 335 bp, Homo sapiens
  misc_feature (44)..(44): n is a, c, g, or t
  misc_feature (48)..(48): n is a, c, g, or t
  misc_feature (64)..(64): n is a, c, g, or t
gggtcctccaatgctatattgaatttgtccattcttccaaacgnccanaattctatgatgtccngtgtctgctattaccaatctatcagtaacttggtctactgttactttgccaggaaatagcaatggtgaaggtggcaaagaatctttatagagttttattccaattttattatctctgatctgccccctgtctttgtaatactttaaagcaattgaagtatataaaaataatttatctttgtgtccctctccaatcaaagaaaacaacatgtttccacgaggtccaagtatgactagagttggccagcaggaaacttctagttcttgccaaa

SEQ ID NO: 579779 - DNA, 235 bp, Homo sapiens
agtaggcaggtatgaaagtggcttatttatgtaaataggttgctgttatattctgaagtttcagttgtcttgcttcagctcacagggctttatgaaggcacaacatagttttcagccactctaaataagacaaaaaaaatgagaaaaaagaaggaaaagatatttaaaacattatttttaaggcttgtagccaagaaaaattagagtcaggcgccacacagtagtacatattaaa

SEQ ID NO: 579780 - DNA, 138 bp, Homo sapiens
ctagagtttcctggtcggagtagcctgatcttttttggccctttcacagttggagcaacagtccctagccttgtgacactgggcccaatcagcatttagcccaccaggtccacccagcacccgcgctcccagctgtca

SEQ ID NO: 579781 - DNA, 639 bp, Homo sapiens
  misc_feature (146)..(146): n is a, c, g, or t
gcggaagcttccccaggattgtgaatttaaagtctccagcttatttggggttttcttctgggaaattagttcaccagaaaaggggccactaacattttgccgcaagagctttctagaaaaatccacgggcccacttgcgacggacntcggcatctggacccttggcggaccacacatagctctctctggccctgcggtaggcttctcacctttagagttatacccacccgttcacaggccgggggcccacatccctggagcttggaccagatggatcgaccaagttccacccagcccagcgtctcccaccacatctacggcctttctatcctggcccttgacacgacgctgtgcctcccacgtgtccgcccagtgccctccacggtcctcagccggtccctcccagccctgcctactctggagcacgcgtgtcccctctgggaggcacagattcacgcttcggcgctgcacattttctgcgcgggccgctgtgccgcccgggccgcagagacgtgtggtgcctcttgtcccgatgggagagaccgatcgaacgtggcccagatttttataaccagactccgtgactatcttttcacgctagcccagatatgccagccctgaaggaggggaatccagaga

SEQ ID NO: 579782 - DNA, 122 bp, Homo sapiens
  misc_feature (76)..(76): n is a, c, g, or t
ctctccatttagggttgccccattctgataaatgtccatcaaccaacactcaatgtttcctttctagctctcccanttcaataggctgatagtgttaaagaaatagcttcctatctactatt

SEQ ID NO: 579783 - DNA, 147 bp, Homo sapiens
ccttccgtctggccaatggagaagcactcatatgtggacacaaacacaatccctccgtctaccttggtgaccacactccctactccaaatgctcgttatgactacgtctgagaccacctactctaattctccgactggtcctgttac

SEQ ID NO: 579784 - DNA, 571 bp, Homo sapiens
  misc_feature (90)..(90): n is a, c, g, or t
  misc_feature (170)..(170): n is a, c, g, or t
  misc_feature (320)..(320): n is a, c, g, or t
ggtgttgtcttgggcacccggaccagccccgttttttgggccccccacttctgcccacagggccttttaagtgcccccttaagtgcccgngcccttccaggggggcccatccccccctgtgtatatacgttttccggtatatctctgccccccgaaccctttttactttngggggtgggtttttgtttgacactttcctgtccccttttcagggcgaacctcccatgtaggtggcgtgtataaatgaaaccggccctggttttttggaattgaagggcgggggtccttttccccctggggtcccagggtgtttttcttgntaaaccaggccttttttgggaacccctcccccaaaaattaagtttggccaccttggggggttgtgtccccccagcccgcccgtcctttggggtgcacaactcccctttttcccccctgccccggtttaaaaaccaagtttgtgggccctttttccctttaggcccctgtcctttttaacatgtccccttcaccggtaatcccccccccctgcccccgtctttttataaaaaaggaccccccgcccttttta

SEQ ID NO: 579785 - DNA, 877 bp, Homo sapiens
ccgcccttttttggtggttttcctttccaattttctgtttcaaaggcagcagcagttgagctgcaatggcgccagccttttccccagccccactcccttttatgaactcctagcttttttggcagacggcctagcattctggcttaaggggcacctttggttagcaaacacaattttctatgaacggatttacccatgtggacgtgaaccgtgttgttgccagcggcttggaaggacgggggacctccagacaatgagtgtcccagtgagttgatgcagattggtggagtggtggaggctcctcaggatgagggtcgctgcagacccccgtgggtaaccagaccgagtgtgacaacagtagggacataacctctatagcagactcttggcacacctttaactattagccccgaggttccgttgttgacaaggctccggttatgcacgtgcgggggaaaattgcctccccaggcagaagcgggccctctccaggcgtggcactccgtgggggcacctgccagggattgcctcacagcccctctcgtccacaaaaaccatgtgtctcccccctgggggcttccgtgaaagaagcgcctgagtgtagactcgcacggccacgtttggtcttcgcgagcgagagacacacggtgggaaaagcgctggcaacaggggtcccgcgaagtgggggctatctgcgtagagccgggtccttccaggcatcccagagaagggcgttgatgttgtacccccaaggggccggattgtgctacccagggactaagggttagccttgtccacacggcgccgagggggtctctccccggggcggggttgtccctttaccccgggtgctcgggcttcccggtcattttcccgc

SEQ ID NO: 579786 - DNA, 340 bp, Homo sapiens
acgtatatattgtaccggtcgctcgataaggcaacatgcgtgctcgtgcatgagtagtgaatctatccgttttaaagctaatctatgcaagcagtcccggtggtctccttagactgcgtacttgccacatctacatattgatcgttttaagactttccctgtttgaattcttatctccccaaatcataagcattgtaccgatttgcactcgtgccggccagcgcagctagtaaagagtatgcccgtttcccctgcatagtctcctggtcactgtaattgatcgtgtgtgtgcgtgcgtgtgtgtgtgtgtgtgtctgatactgtcttggcccttatcgag

SEQ ID NO: 579787 - DNA, 347 bp, Homo sapiens
cctcccatgttgacgactcgttgggacaattcattttattattacactagaatagctagcagttgcccattcggtccccagatacaacatgtgagcaaatggtgagaagttagtggtatctatgtttacatgtaggaggcagctgtgtctaagcggtaccgggagtttgctatcctacacctattaaccgttaagtatagaagtttgcctaactttacatttcctcgactcccaggtaagtggccattttcattatcagaacaacaattagattcccgacgtcgggaattggaagaatatctggcaacaagtgtgttcaatacgagtaatttgtgaggaggttacat

SEQ ID NO: 579788 - DNA, 738 bp, Homo sapiens
attactttactcaacctctttgatgacacagcaaacaacagacgtgactatgtctcttgtatatagcagacaatctagcctgttttccataccagacacgaggaagagccgtgtttataatgcatcatatagacattacactctacagtttctggtagtaacctacttgcagttcattcaaggagttctatggtaaaggacacacaaggaaagagagaaatatcatcacctagtaacggaatcatgatgtcaagcgcaacagtgaagaagaaggtttccaggcctcggaaggtcagcggagagaacggtgtaggagttcagattcagagttcatgagttcagaagtacgactagtaaattcagtgagtgaaatgtcttgccaggagaaattcagcctcctttaatgcgaatttgcaaatgtgctcccagggatattttattacttctgcatgcttcaagagacaaccatttgaaggaactgctttgtggcattgttcctggatagtaaaacttcagaagtactctccatctgaaatctgcaaaagtatatgataaagcgataaaccgaaaaacaggagttcattttccatccaaaacgaaacacgtggacttcctgcggagtgacatggctaattccaaaatcacagaagaggtgaaacaggagtatagtaaaacaggatctagatttcaagacttctcagtggaacatcctggaccctgatgaagaagaagaagaag

SEQ ID NO: 579789 - DNA, 485 bp, Homo sapiens
  misc_feature (105)..(105): n is a, c, g, or t
aggcgcttacagctcaatgcgaatcaggccttcttcctgtgggtgagcggacacagcatggtcggcgtctccgcgccaatggcagaggtgtgggagatgagaaanggggaagatggattcctgtacatggtctaggcctcccaggggacgttcgggatgaaattggcggtgtgaaagcggaaggaagtgcatctctgtgagaattgtttaaacgcgttaccaaggaaggaaaaggcgtgtggggaactgagatcgaggaggtgatccgatcagagagcaggaaacagtagtgttccgacctaggagtgtgaggaaggggtgttggggtttcaggcggaggggactggggtcggggtgagcacattcagctttggaaactatattatttaatgtggggtagcttgtgttcagattttaagagtttaacaataaaatactttgcgttctgagttgcgaataaaatagaccttcaagttaaaaaaaaa

SEQ ID NO: 579790 - DNA, 144 bp, Homo sapiens
aactgatgaagcacatatcattctctatgattaactgttgcagtaccgcttaatgtgagttcttttaattatgtggcacgtgatagaagttatgtactttcaggtgggagaaatggcctgcttagctagaatatcctaaaatat

SEQ ID NO: 579791 - DNA, 1167 bp, Homo sapiens
tggggggggtgcgccccccaaatttttttattatacaaataaaaaaaaaactccccgcggggggggggcgcccccgcgcgcgtgcggcggggggggggagcccccggggggggggggcgccccctctcacgcgcggggggggggaggcaaaacacagcgagagagagaggggggcgtcggcgcgcgccccccgacaaaaatcggagaggggagagcagcgcgcgggagagcgaggagagaaaaaaacacagcgcgggaggagggaggtcctcgcgggcgggacgggggggggcgccccgggtggcctcttgtgtgccacacaaggaggtgttatcttcctgttgggagcaaaacaaagagaaaagaggcgcgccgcgccataaataccacaaatatatttttcttccggcgcccggtgggggagggagtcattctacacccgcgaggggaaccgtgcggcccgacagagagagagcccgccgcaggggaagaaggagggagcgctgcgggagggagcacaaaatctctctcgcacggggggaccggggaaaaaaccccggaaagaagcgcggagtgaatctcgccggagggcacccagagaacacaaccgtgtgacagaatcagtgagacgggggacgggagggggggaccacacaggaggagagaaagtgggaccaagcaggagagtggcggggagaggagagcagccccccaacggagaggtacaggaaaaaggaaggcaagggaagggaaaacacataagagaggggagagagaagaggggataaaatatcgagcgccccccccggccgcctgcggacaaaaacaaagagggagacacaagagagataaacaaacaagagaggaggcaccacaaaagaggaaacacgaccccaccaggagggacagaaaagatgaggactccacagcaccaaaaacaatgagagcagcccacagagaagaagtgtaaacaacaagaggtagcaagcagcgagaaggggagataaattagggataaaccccccaaaacagcgtgggagacagaggaaaagagcgcaccgcagggtgaaacagccaccagagagcagagtataaaacgaccaccggagaagagatgcacacaaaaaaggggggtagggaggcgaacaatagataagagagaatacc

SEQ ID NO: 579792 - DNA, 719 bp, Homo sapiens
aggggatcttgctcctggaggctgagcggagcctgcggagagcgacggcacccgcttccaggtcctcggagccgcgcttgtgtggggctggtgggtcccctgctgcccattgatctatcctccaccccgagcgtccgtgcgttctggtggcagcgagacggctaggcgggtatccgcggtagcaggaaggcgacaggaacttcctatgtccttgcgtggggtcatgggtcggagtgcgtgtctgttcgtggacgtttcgttcgctccgttgttgtcctaacccaggacctggaatgccccgttctactgatcacgcagccgttcttaccagacttagtaatgcggcagggcccaggcggggcggggacgcctcatgcatcctcctgggacctaaatcacaggagtccttggccacgttcagccataagacattattcacttgggctgcgaaactcctggcaactattaggcgtgggtgaggtcccagcccctgtctgggacagagacgtagtaggtcatgtgtcacccgtaaggctttcacaacggtcggtgggttgcatgtccacggagagatcagggtggcgatatgtgcctaggtctatatctatgatatgatcgccatgagtgacaatagtccgcagtgacccttcctggacggctcatcgggtccctggcctccacgactcccgggggccggttcgccggaatgtcccgggttg

SEQ ID NO: 579793 - DNA, 672 bp, Homo sapiens
  misc_feature (156)..(156): n is a, c, g, or t
  misc_feature (212)..(212): n is a, c, g, or t
  misc_feature (254)..(254): n is a, c, g, or t
  misc_feature (330)..(330): n is a, c, g, or t
  misc_feature (610)..(610): n is a, c, g, or t
  misc_feature (648)..(648): n is a, c, g, or t
agcttatccaccatgatcaagtgggcttcatgcctgggatgcaaggctggttcaacatacgcaaatcaataaatgcaatccagcatataaacagaaccaaagacaaaaaccacatgattatctcaacagatgcagaaaatgcctttgacaaaattnaacaacacttcatgctaaaaactttcaataaattaggtattgatgggacatatctnaaaacaataagtgctatgtatgacaaacccacagccaatatnatgctgaatgggcaaaaactggaaacattccttttgaaaactggcagagggatgccctctctcaccactcctattnaacatagtgttggaagttctggccagggcaattaggcaggagaaggaaataaagggtattcaattaggaaaagaggaagtcaaattgccctgtttgcagatggcatgattgatatttagaaaaccccatcgtctcagcccaaaatcttcttaagctgataagcaacttcagcaaagtctcaggatacaaaatcaatgtcaaaaatcacaagcattttatacaccaataacagacaaacagagagccaaatcatgagtgaacttccattcacaattgcttnaaagagaattgctaggaatcaacttaccaagggatgtngactttttcaaggagactccccct

SEQ ID NO: 579794 - DNA, 525 bp, Homo sapiens
cttcagtgcttctgccaggtattctacagcggtgagtcctgtgttcctacggccaaattccaccacacacggggaggagtcttttaacaatttcaaatatatgagcttatcagtttctgtattcagtggtaaaaaggatgagggaaaatgttatagccaatgaatacctaaaatagacttaattggattatactgcatttcagaaatacttgattacacacacacacacacacacacacacacacacacacatacaatataaggggaaaagtcaggagttagattgggacgtggtggctactctgtatgtcaactgatatttatagggtgcctgccatttgcccactgcactaggtgctgggagacagctatgaacaagccagattatggctgcatgcaccaataagggtgaattctcaaaatataagtagtggagaaaaagcaattaatagggaatatacaaatagtgtatattcaaactaaataggttgtttcagatttatatatagtggtataaccctaaag

SEQ ID NO: 579795 - DNA, 1712 bp, Homo sapiens
tggttaatgtcattaaggaaaaaaggaagaaaagttatgccgagggcgttcttggactgggtgtagtagggggtggaagggtgatttatatcggaagtgggagggtgattccatagggggtgtgttgtgatcccgttttcggtgcaagaaattaggagggtggaggtgcgcgcatagggcgtgcaactacagtgaaagggacaagaagtgaaggtgaacagaggtaaagaaactcggtggtgaggggtgggcacgtgcgcctcacgtggagatagccttccctcaagaaatctcactgtgaacaccaaggggctcgtggtcccacaaagtgtctcagtgcgcgcacgtgggcgcgcgaatatagcacaaaacgctctgggacacaccatcaacagggggggcggcacacacacatcgagaacacagtggcacctacatcaggtgtcggcaccctcaaagcgggggaaaccccactcagatatctacgcggccacaacgggacccggactggatgacacaccgaccccaaagcgtgggaaaccacatgcggggaggcataaccactccgcggaaaacacaacagggggggggccaagcctacaaaatcccggggcacaaaaaaagacagggctcaccaaattcaggcccgatgccagagccaaatctacaagaggggcctacccaacacacgacaaaaccacaagcaacaagtgggggagaaaaccctatgtggaacacaaacaaacccaacactatgtggacgcccccaacaaacccaacccaagaacaaaggcccccaaaagagacagtgcaaccagaggcgaagcctatcaacccaggagcgaccactaccaagaaacactaaccggcgcaggaaagcaacttagggggagacgaaaccagtggcacaacaccaccacagggtgaagacatacacaaattgcccccaaggaacgtcagccaggcaaccgcaagggcaagtggaaacacatcccacccagcgcactctagtgaccccacgcgggggatggccactatagtgggagacaaaacaccagtggtgacacccgaagcgcacagacgcccgagaaacggctttgtagcagcaccaaacaacacaacaaaacccgcgggagcgcccagattagccgcacacaatcagaacagacgggcgtaacaccacgacaacgccacaacaaaaaccgcaataacgcacccacacgcgagatccatgatgccacccacgaggtagcatcaagcgcactcaagcccacaccagcacacccaacaacgaggtggacacacgcgatcacacaaccagggagacacacacccacatatccagcagaaacagcgtacccgacaacaccccctcgcgccaagcgtgccagccacatcaggcgcaagcgggccaaccagacagcccacccagacaagctcgtcacgcgccccatcagacacaactccaacaagccctcaccaagcttacaccacacagcacgcatcgtccctacaccgcaccaagaccaaccgccagacgcaatcagacaacacagcgacgccaccaacgacagagccccatacacacaaacagggcaaagtagaccaaagaccaccaagaacacggagaaacatccatacacgaccaaccacagcccacggagacaacaagcagcgcgaagcaacactaacgcgcaggccccccgccatgt

SEQ ID NO: 579796 - DNA, 440 bp, Homo sapiens
atgatggcgggcgcctgagcgtctgttccgtctgctccggaggccgtgacggtcagactcgttgctgtcctgtggttcgtctcacgcactacaggaccctggggggctcgagccacctccagacggcgcgaggagtcgcttaagtgcgaggacctcagagtgggacattatattcgtggagagccaactctacatgacgctacgccagagccagctaactgtacagactacacagctcatgttacctgcattccagcacgcgacatagcttgtcaggattccagtgtcaatgacacacattttactgggaacgaagttgcttttttcaagcccatatcttgccgtgtctatggatattcctacagagtggctcggattgcctctatatcttggcatggtgggagcagatcgattctaccttggatccctgctttgggttt

SEQ ID NO: 579797 - DNA, 378 bp, Homo sapiens
  misc_feature (101)..(101): n is a, c, g, or t
  misc_feature (132)..(132): n is a, c, g, or t
  misc_feature (182)..(182): n is a, c, g, or t
cccaggaacccccacggcacagaaaaaaggccaaaattgtacgaaaacaacaagtagaattcgaaggccccagggcccaaaatgaagctgctcacagctgnagtgaaagaaaggtgccgtccggggccaaanccagcagtgtctaaacccccggagccatctcgctgccgaaaccctgcttncccctcgccctagggctcccttgccgccctcctgcagtatttatggcctcatcctccccacctaggccacgtgtgagctgctcctgtctctgtcttattgcagccccaggcctgacgttttacggttttgttttttactggtttgtgtttatattttcggggatacttaataaatctattgctgtcagataccctt

SEQ ID NO: 579798 - DNA, 328 bp, Homo sapiens
tccagctggcccccaagtcagccacacacggcgtgtgactcccagaatggctccgcctggagattccccatcctctccaatattccccacggtccattcagtctgccccaccgcaccttcaacttcccatccttcagtttccctctagcacatcatcctcttcgcaacttcgtcctccacccggcccagaccccagggcccgtactttgccctctccggtcccagcacagccccaggtcctcatcacttccaccacacccttacgcccttgggggccacgcgggacggggtacccgagctcgacatgcgtaactcactggtcactacg

SEQ ID NO: 579799 - DNA, 1834 bp, Homo sapiens
caccgcctgccggcaccgacgcgccacgacctcaaagccagaagcgtgacgaacacgcgacaccacaacagccgcgcacaatgactgccacacatgccctccggcccgagccacagcagaacgcatggcgagccgaacacaggcaggacaacacacaccacgcgcccaccggcagcagccaccgaggccccccagcacgaacgcacaggcaccacacccaagagcacacccgtcaccccacgctcagccacccccgcgaagagaagcagacagcacgcgcgcaggcgcacccccgcgccaccagaacggagcgacgacgcacgcagagagcgagcgagacggcacgcgccacccagccacaagcccaccggccacgcgcgcagaaacgacacaacgcgcaaccgaacacccgggcgccgccggccgcccgccccgactccaccagaccaagcacacaggacaggcagccccgcgccaccgccaccccaggagagcgagcgacagacaagagcagccacagcagccgacgacacccagcccacggagcggccgaacgagtagcgctgtacagaacgaagagaaccgaggacacgagggacgacagcagcgccacgcgccaccaagccgacaaaggaacgcaaaaaagatggccaacgataaagaggacgagacggagtacgactaggacggcgagagcggagagaagcgggcacacagagcgcccacgcgcccaagcgcggggccgctgcgagccgccagggcggcactcgcgcccgcaccacgacgccagaccagcacccgacacgcgcgcgacccagccacgcgacgaggaacggacatcgcacgcgactcccggccgcacctcaccctaccagcacgccgcccctgacacgcgcagcgcccgcccacgaccccggcgcccgaacacagacgacacgacccagcgaacggccgacgagcaccgcgacagaaacgacagcacgggacagcacaccggagaacgaccaccgagcaacgcgcgcccgcgacccccgccgcaccccaacacagtccaacaccccgaaagcctgcgaacacacacacgctcacgacgcctacgaccaacgaccagcacacacgaccaccaaccgagcagctaccgagacgcagcagcccaaatcagcgagagcacaaccatcaagacgacaacccgcgttcccgctcccacagccgcgcacggcgcgcgacgacgcgccgccaccacgcacacaccaccgcgcgcccccagacacagcgtcaacgctgagagactcgccaccgcgcgacgacgcagtctgcacccgcagctcgaacgccgacgcgcacggacggcacgcgcagaagaccaggaccgaggagacgccggaaggcgcaaacgagagtgcgggaacgaggccgactgacacgacgcgcacggacgcagaccagaacgaggagacgcgagcacccaggagaaccacgcagcagcagcggagcggcacgcgcgggaacgcgcgccgaccgatacaaccacacgccagcacagagacgccgacgacagaggcgaggcacgcagagacgagcgccagacgcaacaggacccgaacacgacacacaagagcaggcgccgccagaggatcgagcgaacgaccaatcaggaccgacagcacgcacgctccgagccagggcgcgatgcagccgcgtcgtaaagccacgccagacagagtccagcacaagagatgccaggcgagcacgacaagaagaagcgagaagagacaggcgaggaagagacagtacaaagacagcagagcgagacacacacactccgtgaggcaca

SEQ ID NO: 579800 - DNA, 114 bp, Homo sapiens
cgcgttgggagctgaagctggccgactttggactggccagggccaatgtcagtgcccacaaagacttactccaatgaggtctgtgacctctgtagatacctgccccccgaagag

SEQ ID NO: 579801 - DNA, 281 bp, Homo sapiens
gtggatcatctgaggtcgcgacgtttgagaccatgcctgaccaagtcgggtgaaacctcactctctgcatataccatacataaattctcttggcgtgtgcctgtagtcccagcttttggggaggccgcgccaggcgcattgcctgaacccgggaggtggaggtagtagtgaactgagatcttgccagcgcactccagcctgggccccagcacgagactctgtctcttcacagaccacacaaaataagcaaatacagtaaaacataaaaaatttaaaatggg

SEQ ID NO: 579802 - DNA, 270 bp, Homo sapiens
ggtaatatgtaacacagactaacacgtgatatatgggattcccataaacaatagtaaaaacactttaacattatttactttcaatattatcttggaattattccaatgtattccaagtaatagttaactggtgtgttacaatggattccagacccaattggatagcgcttagatatattagaggtgtctgcttgttctttcacttgaatcccggatgaaactccctttatggaaagaaaatccagggccacctggttacctatttacggt

SEQ ID NO: 579803 - DNA, 398 bp, Homo sapiens
  misc_feature (24)..(24): n is a, c, g, or t
  misc_feature (69)..(69): n is a, c, g, or t
  misc_feature (75)..(75): n is a, c, g, or t
  misc_feature (232)..(232): n is a, c, g, or t
  misc_feature (236)..(236): n is a, c, g, or t
cctagaggatacgtccggcatttncgcccgtgtactaccagagcaatctttggtaaaactaagatccangattcntgggactgtacagacctgccaaaggatggcctattagaggttcaatacttcttcaagatcttggataattagtggtgtggaaagtaaagaagtcacaggttgggacatttagacaagagtgaatcacacacgaggaatgtgttcattctttttgtgntcgntgctttaacctgactgaatacaagatcaacaattttttttttctcctggcaatcattacatatgtcagaacatggattttgcactgcagacaacatttaacaccagcctatggggtactgcattgctttttataaagttcaaaatacagatttattttcaaa

SEQ ID NO: 579804 - DNA, 174 bp, Homo sapiens
ctaattggttcttcgatgacgaaaactagacatctaaaggtcaaagaatgaaattagaacactctctaacatcgcatgcaaaaatacactcaaatgcattaaatacctaaataaaagactgactactataaaactcttagaggaaaacataggcgtcatcgaagaaccaattag

SEQ ID NO: 579805 - DNA, 596 bp, Homo sapiens
  misc_feature (26)..(26): n is a, c, g, or t
  misc_feature (68)..(68): n is a, c, g, or t
  misc_feature (141)..(141): n is a, c, g, or t
  misc_feature (170)..(170): n is a, c, g, or t
  misc_feature (172)..(172): n is a, c, g, or t
  misc_feature (182)..(182): n is a, c, g, or t
  misc_feature (194)..(194): n is a, c, g, or t
  misc_feature (197)..(197): n is a, c, g, or t
  misc_feature (202)..(202): n is a, c, g, or t
  misc_feature (204)..(204): n is a, c, g, or t
  misc_feature (209)..(209): n is a, c, g, or t
  misc_feature (212)..(212): n is a, c, g, or t
  misc_feature (215)..(216): n is a, c, g, or t
  misc_feature (221)..(221): n is a, c, g, or t
  misc_feature (228)..(228): n is a, c, g, or t
  misc_feature (251)..(251): n is a, c, g, or t
  misc_feature (313)..(313): n is a, c, g, or t
  misc_feature (322)..(322): n is a, c, g, or t
  misc_feature (403)..(403): n is a, c, g, or t
  misc_feature (422)..(422): n is a, c, g, or t
  misc_feature (426)..(426): n is a, c, g, or t
  misc_feature (428)..(428): n is a, c, g, or t
  misc_feature (471)..(471): n is a, c, g, or t
  misc_feature (490)..(490): n is a, c, g, or t
  misc_feature (496)..(496): n is a, c, g, or t
  misc_feature (529)..(529): n is a, c, g, or t
  misc_feature (593)..(593): n is a, c, g, or t
attattgttttaggtttggttaattntgtttatttattatttatgtgtttggaattatatttagttgnggataatttgattttatatttaagtgatgttatatttgttagaatatttaggatttgggagtaggagtttatntttattttagggttttagttgtggtgttnangattttttgngttttgagtttnttnttttnanttttntgnttnntgttnttgatgntgttttgggttgtgttggagttnaattatagaagttggagagagttttttggatggagtaaaattgtttgatttttttgatttgntgatgggtntttgagattgtggtgaggttgattgtgtttgtttttatgaataatgagagattaatttattattttaatgttgattaatangagttgtggtgttgggatnattngnggatattgatttagtttaagagatattgttgattgtttgttgnggttggttttgtgggttgnattatntgtatttttatgtaatttatataattgggatgngttattatttatttgttatattttatgggagtgtgtgatagtgatgaatgttgatatttatganaga

SEQ ID NO: 579806 - DNA, 609 bp, Homo sapiens
gtgggctgagcctgcgccgaggattcagctgcctcccctcttgatgccccctcgtttcccgactgtccgttccccgcctgccctgctactgccgcggccacccggtctggcggactgcgcttccggtagtgccggtatatgccaccggaggtgcagagagggcatcggtagtcagtatggtccggttgatcccaagaacctcgcagttcgttttcggaccccttttttgcttgattgcaagggtaagacggcgtgaatgacccgttgcttttccgtgctgggcaaactgtgaccgcgatattatatatctcgcgatattacacggaaattttcagacctagaagaacacgcgggcaggggaaatgaccccctttttacctaactgtggttcccaaaacggcgaattccgggcttggagttgactttaacaggaagttacaaaaaaaggaaaaaaagttaagtgttggaaagcgggcaggtttaacacggaacaaaaacaggtttgtggcgcattggcaaaattggtgataaacgttggtaagattttagagggcaattccggagaaactaatgggaaggaagggtacatttcagagcaacaatggggta

SEQ ID NO: 579807 - DNA, 214 bp, Homo sapiens
  misc_feature (132)..(132): n is a, c, g, or t
  misc_feature (136)..(136): n is a, c, g, or t
  misc_feature (166)..(166): n is a, c, g, or t
  misc_feature (172)..(172): n is a, c, g, or t
gctgcatagttgcgacctctggttaaggaattgtcattgggcgctcgcctggcagatgtgtaggtcctgagtggcgactagatcgagcgtgtctcagtgaggaaactgctggcgtctcccaggaccaggatnagtnaactgattgtgtctcaacatagggaagtgngttctnttggcatattcacccccgaatattgctgtcgggctagtcggg

SEQ ID NO: 579808 - DNA, 149 bp, Homo sapiens
taatcgagctcggtccggcattatggctttaaagtttaataagtcctggcccaggtcagtggctcaagcctgtaatcccagcactttggaagggcaatgtgagcagatcacttgagctcaggtgtttgagcccagcctgggcaacatgg

SEQ ID NO: 579809 - DNA, 269 bp, Homo sapiens
  misc_feature (121)..(121): n is a, c, g, or t
  misc_feature (191)..(191): n is a, c, g, or t
  misc_feature (238)..(238): n is a, c, g, or t
  misc_feature (257)..(257): n is a, c, g, or t
gtccggggatcaccatccggagatgttttccaaggctaaattcaactagcccctgttttttcctccctgaactcttggggctgagctgcaaccacccaactttctttcccactcttctctngggacgttgtgggcctccacgggcttggggcacggcattgggacgtggcccacggcacacgaggtcccgngggcatcaggagacaaggctgggtctggggaccgttgtcctccccangttgatccccgtgacccgnggtaccggagct

SEQ ID NO: 579810 - DNA, 441 bp, Homo sapiens
  misc_feature (212)..(212): n is a, c, g, or t
cccccgcctgaagatgctgcccgagtcccgctccctacagcaggcgcttggtcaactggagttaagccattgactggtattgctgtcggacgcggtatgccccttgcaaccccagcagcagcaattgccccagctccacctgctggtttaggtggtccagtttggggagttggagcaccagcaccgggtctgatgcaaccacgagcacttcntggcatgccacctccacctcctcccccgacaggtgcaccaactgcggcgttcggtcgtgggatgccacctgttaccgctgtacgagggtatcctcctcctccacctccaccgcctcctggatatcgttgagatgcaatctgattcatggtatctatcctagataaccacttatcatctctgagaagttttgtaaaagcatttacttgtttcaatatactttcctaagca

SEQ ID NO: 579811 - DNA, 794 bp, Homo sapiens
  misc_feature (670)..(670): n is a, c, g, or t
cagtgtacctgggctggttacagcagctctacccctcactgactgcaaacatggcagcgcagaaggaccagcagaaagatgcctgagtgctgtgaagtgtgctgagctggcacgaccctgctgcctgaagctgattccctcctggtgcagtgcctggtgagtggctggagctggctgcctgcgcgaccatcctggccctggagcaccttctgtggaccagcatgctgcttctcactggccccgcaacctgggagagcattgtgccagcgcctcgtacgcaacgtggatgtactaccagagcaactatgtgtacgttgttcctgggcctcatcctgtactgtgtggtgacgtcccctatgttgctggtggctcctggctgtcttcttcggcgcctgttacattctctatctgcgcaccttggagtccacgcttgtgctctttggccgacaggtgagcccagcgcatcagtatgctctggctggaggcatctccttccccttcttctggctggctggtgcgggctcggccgttttttgggtgctgggaaccaccctggtggttattgggttccaaggttcctttcaccaaaattaaggttttgaacgggaagaagttcaaaatgaaaccggtttaaggttttttttggaacctgcggccctcccgggcaagntgccccacccctgcccatgcctgtcctgcacggctttgctgctcgggcccacagcgccgtcccatcacaagcccggggagggatcccgcctttgaaaataaagctgttatgggtgtcattcaaa

SEQ ID NO: 579812 - DNA, 129 bp, Homo sapiens
cgccgtggatgttttcagaagtggccatcgagaggtctggatggtatcatcgcaacgttgctctgataccgtttgtatctgtaaatatgtcttctgcaggtcagacacatataaattttatccacgtca

SEQ ID NO: 579813 - DNA, 113 bp, Homo sapiens
gctggagctgctcttctatctgctgctgttctgagcaagctacagtgtctgtgtgagtatgggtcttatctctggcactagagcagctcgcaaggtattctggccagccatgc

SEQ ID NO: 579814 - DNA, 277 bp, Homo sapiens
taaaattttggtagtgaaaattgtatcactatgtttaccaatattactagtatgaataatacacatagggtgtgacttggaggctgctcaatactttgttgctatacacaatgcattattttgttgtaagcatcttaactacacatataggtttgctgaccttgaatacatcccggtatggcaaacttcattttattctgggtgttcattttattctggtctcagggccatacatttattttagttaattacttattattttgacaccattacttgg

SEQ ID NO: 579815 - DNA, 380 bp, Homo sapiens
ttaatactcatcacgactattataacggatcttcacgtcaaaacaaaccaaaaatccacattacttcatatatcctctgttctcttatccggtctgcttaccattcaggataaaacgtctgactttaaaaggcggtgctaccctcctcgagctccttgatcttcttatctctattctcgtgtgtaaaaaccctggaagatatgctttaaaacattgagtccaaaattttaaattgctttccagcatagcaatatctctcgcccctctggattcagttttctgtgagatggaccgaacgtctcgcctaatggacttgtggtgactcttagcagtggttgtgttggaagttcctctattaataattacattaaaattgcttt

SEQ ID NO: 579816 - DNA, 873 bp, Homo sapiens
tgctcggaggggtcgctgcggcgcgtccacgtgttgtagggtggggagggcggtcagggggggagagaatgggggcggtagggcgagtcgatgcaagtggacgggataggcggcgcggtaggggcagccgcgcccgtgtgggcgagggccgcggcggaggtgagtgaaaggcgcgcgcgcggtgggttgtgtgtacgcagctgtgggtgtggagtggggggaggtgcttgcgggcagtgattgcctgccgtatccgcaggcgcttgggtcttctgttgatgttgtgcgggggcgagaggagcgcggtgttgatgtgagcgggaggcggcgcggggtggaggtgcaggactcggggcagaggagcgagcccgcgattgtgtggggacgaaaaaggcagcgaccgcgtagagagcggaagagagccgtgtatgaggggcaataggcgcgagccaaggagatccgccgtgggatggtacacaagacaatgttgtgagggctgacgattgaccgtagaagagtcaatccttctcccatatagaccacaggcgagaggagatagcacaaacgactgtaaggagacacatgttgggccgctactgcgtggtccatgttctgtgatgcggcgtctggggcgcggttgtgtagatgtgggccccgcgtcctcaccgatgagtgtgttcccccgcatgggggtgctattcttattacgcgtgggccccctcaggtttgtttgcccccagtggctgaagaccgtttgggggtctgtttcttgaggcgtgttctcgttgcccgcacacgccccacatcgctgttttcctcccaggcccctggccgaaaaagagtaaaaaatggccccccccccccccacgaaga

SEQ ID NO: 579817 - DNA, 2464 bp, Homo sapiens
gagcacagttgagtctccagccttgactcttctcaagagcctgtgactttcctccctggacaaaggcatcatgagttgtcagatctcttgcaaatctcgaggaagaggaggaggtggaggaggattccggggcttcagcagcggctcagctgtggtgtctggtggaagccggagatcaacttccagcttctcctgcttgagccgccatggtggtggtggcgggggcttcggtggaggcggctttggcagtcggagtcttgttggccttggagggaccaagagcatctccattagtgtggctggaggaggtggtggctttggcgccgctggtggatttggtggcagaggaggtggttttggaggcggcagcggctttggaggcggcagcggctttggaggtggcagcggcttcagtggtggtggtttcggtggaggcggctttggtggaggccgctttggaggttttgggggccctggtggtgttggaggtttagggggtcctggtggctttgggcctggaggataccctggtggcatccacgaagtctctgtcaaccagagcctcctgcagcctctcaacgtgaaagttgacccagagatccagaatgtgaaggcccaagagcgtgagcagatcaaaactctcaacaacaaatttgcctccttcattgacaaggtgcggttcttggagcagcagaaccaggtgttacagaccaaatgggagctgctacaacaaatgaatgttggcacccgccccatcaacctggagcccatcttccaggggtatatcgacagcctcaagagatatctggatgggctcactgcagaaagaacatcacagaattcagagctgaataacatgcaggatcttgtggaggattataagaagaagtatgaggatgaaatcaataagcgcacagctgctgagaatgattttgtgacgcttaaaaaggacgtggacaatgcctacatgataaaggtggagttgcagtccaaggtggacctgctgaaccaggaaattgagtttctgaaagttctctatgatgcggagatatcccagatacatcagagtgtcactgacaccaacgtcatcctctccatggacaacagccgcaacctggacttggatagcatcatcgccgaggtcaaggcccagtatgaggagatcgcccagaggagcaaggaagaagcggaggccctgtaccacagcaagtatgaggagctccaggtgactgtcgggagacatggagacagcctgaaagagatcaagatagagatcagcgagctgaaccgcgtgatccagaggctgcagggggagatcgcacatgtgaagaagcagtgtaagaatgtgcaagatgccatcgcagatgccgagcagcgtggggagcatgccctcaaggatgccaggaacaagttgaatgacctggaggaggccctgcagcaggccaaggaggacttggcgcggctgctgcgtgactaccaggagctgatgaacgtgaagctggccctagatgtggagatcgccacctaccgcaaactgctggagggcgaggagtgcaggatgtctggagacctcagcagcaatgtgactgtgtctgtgacaagcagcaccatttcatcaaatgtggcatccaaggctgcctttggaggttctggaggtagagggtccagttccggaggaggatacagctctggaagcagcagttatggctctggaggccgacagtctggctccagaggcggtagtggaggaggaggttctatctctggaggaggatatggctctggcggtggttctggaggaagatacggatctggtggtggctctaagggagggtccatctctggaggaggatatggctctggaggtggaaaacacagctctggaggtggctctagaggaggctccagctctggaggaggatatggctctggaggtgggggttctagctctgtaaagggtagctcaggtgaagcttttggttccagcgtgaccttctcttttagataaagatgagcccccaccaccaccgactctcccaacccagactctcccactccagaatgtagaagcctgtctctgtacctctaactggcagcaagttaaatttttgtcatttatctctgatggcactttgagggaaaagaatgtccacatacagtttttgaaagatcttctctccaaaccagttagttagagccagtgacgcctctgtgttctggggcggaatctgtgctgtctaggtttgtgcttctagccatgcccattcccgcccccaccatgcctctttgcattgcccattttccagatgtgtattctgttgaggacccaggcccatccagggatttcatctctaagcctggcagtgctggggggaaatgtgtttctgtgtatatagctcctcttgtccactctgctttcggaagtgctgtggtctgggggtcttcataataaacctcatttgca

SEQ ID NO: 579818 - DNA, 881 bp, Homo sapiens
  misc_feature (117)..(117): n is a, c, g, or t
  misc_feature (521)..(521): n is a, c, g, or t
tgtctctttctttattttgatgatagagtctgggctctgtctggccaggctggagtggcgtgtggcacatctcagtctcactgcaccctccgtccatctgtggtttcaagctattcntcctgtcctcttgcctccacaagtaagctgggaattacagtgtgcacaccactcatgccccagttaattttatgtattctttaggtagagacgaagttcgtcaccattgtgaggcaccaggctagctcgtcgataactcttgcaccatcgaagtgagtccactttgcgcgttggccgtcctcaagaatgcatggggattgacaggccatgagccaacctacagcctggctctcaatcacatgacatctgaacagcttttcacgtgtggtgcaactcgtcatgtgtcatgtcgacacacgtatcctccaaccaacagcctcattcttcaccacgatttcatgaagacgcaagtccaagaatgtaggcaagtgtgatcgcctacgtctcacataacgccgtcatcntcacatctttggtgggcccgtatcgcatcgtatctctagtcgtcacatatctacataactacacagcaacgcaaggcattagcaaggagcagcttataacttgctctgtagcatacgtctagttacactggcgttgtctggcctggactgcttgaacactttacatgttgccatgtcctctgcaggttgtgacgagtttctctgactctatcttgcttgctacctgtcttgtgataatcgtggctatgctcatggctagaactgttatctgcctatgcggtcccttctggcacttggcggcactcgcgtccgtgatcaaggtaacactggttcttgtttttcattcctcgtggccctccg

SEQ ID NO: 579819 - DNA, 321 bp, Homo sapiens
cagtttactgccgctctacacctcagtcttgttggagactcgacgcctcacccatcagttcaggccaatgtaaacacagcgttacccggcagtgcacaaaacaggcctcagtgagaaatctaccactttctacagtagccccagatcaccagacacaacacacttacctgcccgcatgacaaagctcaggcgtcagtgaagaatccaccacctcccacagccgaccaggctcaacacacacaacagcattccctggcagtaccaccatgccaggcctcagtcaggaatctacagcttcccacagcagccattgcactccgg

SEQ ID NO: 579820 - DNA, 223 bp, Homo sapiens
ctgatagagacgcaagagaaaaatccattgccttccaaagaagatgaacacggacgaacgcaagcacggcgacatcgtacatgacggcgtgcgccgccacatatgcactgatacattccacatagcattgccatcttattgtcacttcattttaggctgtactacactttgtacagatgcaacagagagtgggatcagagtttaaatagactgtgctgcccca

SEQ ID NO: 579821 - DNA, 212 bp, Homo sapiens
agatgttgcacagaacccagtatgtatgcagagtatgtacaaatacttgtgccacaatgactgcctcccctctagtctccacggcgatgatacatacaaccagatttgtatacacataggcctgctgtaggtcattttaaatctatgagggacttctagctttagtaagactaaatgctggcatgggtgcgcggggtgcacgtggggcatgc

SEQ ID NO: 579822 - DNA, 248 bp, Homo sapiens
gaaggcttccgaggattctggaaattccctaaggattttggcctgtcctctcaaactaaccaagggccctggctggtggccttttccaagagccggaaattggaaaaaagaggcattaaggcaggaattggaacccctttatggagacccccccccaccttaatcggacccccatttttaaactcttttcctcctcaaggccaaggaagtttgtatctgcctttagataagctcttattctttctaaa

SEQ ID NO: 579823 - DNA, 108 bp, Homo sapiens
ctgatctctgcactgatcatcccgttagcagggcgtctcttccattttctgcctcttccacaacttccttcttctcctttaagtcctggaggtgatcttctgcacgat

SEQ ID NO: 579824 - DNA, 404 bp, Homo sapiens
caggtggattacttgaggtcaggagttcgagaccagcctggccaacatggtgaaaccctgtctctactaaaatacaaaaattagctgggcatggtggtgtgcacctgtaatcccagctacttgggaggctgaggcaggagaatcgcttgaaccagggaagcggaggttgcactgagccgagttcgcgccactgcactccagcctgggcgacgagcaaaactccatctcaaaaaacaaaaaaacaaaacaaaacagatggcaaagtagatggtggatgagggatttgcagagacagtgcatgaagatgctgagaaaggagcagggggagaaaagcaactagagaaatttagagaaaaactgggtttctagagagataaagttcagcaagacaaggtagagccgag

SEQ ID NO: 579825 - DNA, 289 bp, Homo sapiens
tatacgcccgagatgttgctgggggggtgcgcacacctttaaacagccaggtctcgggggaactcgctgtcatgaggacagcaccgaggcgatagcagtaaacccttcctgagagtccaccccatgatccagtcaccattccgcgctggatgcatgcggtggggagcagggtgaggactgcaagtgtgttcagcttatttttcttttcttttctttttttttttttttttggaaaacagggtttctggctcggccgcccgggatggggggactcctcataaagtcaacc

SEQ ID NO: 579826 - DNA, 1538 bp, Homo sapiens
ggttagtattgcgggatactcatgctcgggcagatcccattctcccatgcatggtgccctaccattcatctccatggcactctctgggcacccattctgtacagggagtgaggaggcctggtctgcatcatcagtaatccaggatcctcccggtataccatcgcttgctatgtcggaggatcgtgacagaccacggcggatgagatgcgtggtggatgggtgagggatgcatcgaactgatggtgtgcggaggttctgtccctccctatgcctggcccttaatagtctcttgactacacctccacgtctctgctcaatcttggtcctttgcacactaatccccatgcgtacttgtcaccagtgcgtacttcgaccacaagtgcgcgaagcgtttaatctcgagtgtcccaaacatctcaaccactactatgagtgtgcaccttgtggctccttcggggagtaaaaagcccagatggtcctctgcaagcttagtagttttacaaagtcccgttgggactctttgcctctcgcactcgaggcgtgtatcgcttcaggcccccaatgggtgcgtgtcttagcatcctccaggaataggataagaccgcttatggtggaccaacgttgggtcgcgtgagggaagcttcgctgggctcacacaagttgtttcatagtgccctagtggatggcttcccacaatcgcctttgtcgcttcgcatgcattgcgtggcacgaagagacacgcggggcacaattccttgtcgccaacaaaccccataccaattgggcataggcccatggttgtccctcatccggtgcagttaagagggcgcactaagtcgcgcccgtggaagcgttaggctgttcttagacagtccctggtccgggggcttatagggttctctccacgagactttacgttgccacggcttcgagggtccttgtacttaccgaaccaccaaggaattggcctacagaccgtcttgtgggtggaaccctcttgggactcgtcgcggcgaggctcccttggctacatctagcgctggttcataggtgcccctgtgttgttgccatccccagatcgccctttttccccttcccttcgcttgacttcgcctgaaatatgcccctgggtctctagtcctttttactgagatgccaccagcatttcttctcttggtcgccgtggtgaccttctggcccgccacacaccttgtgggctgggccagttcaaggtaccccattccctggggaaagccaatcgttagtgcctctttgcgtgcaaactttaaacatctcagaaagcccattgtgcagtatgggcagcttttccacagaactgggtatatctggtgcaccacccgcaggtatcagaaatctctggcggctctattgagggttccccaacaggggccagttggcccacgggaataggcgctatggggcaagcgtctcaattatcgccaagcagtccattattacagagccgctccccacagcatggtttccacataacagtgttgtgtgagttattaacacca

SEQ ID NO: 579827 - DNA, 130 bp, Homo sapiens
gtggttgcggagacatgagggtacacatgagtagtactcctgtctgactgacggagacatgagggtgacacctgagccgggagcaggtcaacccaaggattgctgagggcaacagaggccacggccatgg

SEQ ID NO: 579828 - DNA, 1924 bp, Homo sapiens
  misc_feature (1922)..(1922): n is a, c, g, or t
  misc_feature (1924)..(1924): n is a, c, g, or t
gcgtgattcggtgctccggtcctttgatctctttggtcctgtcctacttggtgttggtgctagagtcatgtctagaagcttgatgtaccaatgcttgatcgtgacggctgactgcccatgtaggggcgcaggagatcgtagttgattccacatcaagatctagaacaacaatgccgagtcatgttgccctggtgtggcacgctggcacaggcgtaggagcagagtccgtcagcgaatccgtgtcgcaggtctacggaatgaagccgtcaggggtctctgagtccgggacaggctcatttgcgcgcaaggagtgtgtagtagcgcaaccacagttcctgcaatcgctacatgtgcacgtaatccattctcttgggaatagagtcgggtcgcccagttgagcaagcgtgaggggcgaaatgagtcgctggcctcccgctgggacacggacagggcatggtgtggaccgcctggcacggcactgacggagcaccgggggcttgcgtgggtgactgcgatgggaggcacttccataggtctgcccggggcccgcattttgccctgcctttggcaaggcacgctcccacaaattccttgggcccgtgcggcggggtgtcaccgtgccccgaggaggaggacagaagcacacggggcggttgagcggtcaccagcacagcaaagaggaccggttgcccctccgcgagccaccgtttcgtcacgttgaaccaaattaccgaagccctgcaaggatgttgtgaaccggagacgccgtttgtcgctgtctgttatgtgcgaaacgggaccttggacggagctctgtggagacgggctaaatgtccagcggagccattgaggatacagggacccagcccaagtgcgggagcaggttgggttcacagcaagagcatgtggtgtaccggggggtcgggcacccttcggtatcgcgtttggttccccatgggcttcagtttcattagagtccgttccacccgtttgacagaaaatggaccaggaaacctgcaggagaaaagttttcgccttcggggacaggtcaacgcggacgcataagtgtggtggctagtatatacgcaataggaaccctattggactgacccccaaatataaattgggcgcccaggtatggccaccatcacaaatattgtggcaactaaccacagtaatgtacggcggatagtacggcatgacggatacacattgggcgtaggtaatagccgggtgtcccatttgtgtggccctcagagtgcttggccctgtgtttgtgtacatggacagaacaaacgaccttgttatagcagtgggtgtcaacactctcaaaccaattgtgatgagagttaatgatcatcgttgtgcatatgaacacatgatctacagtggttatgaggtggtcaccacactagcgtgacaacaaactctcagaaagtgaccctggaccccacagcggtcgtctaccgtggcttatacccactggtagagaaaagaacctgcctttaaacaatgggggacagtcgcaatagaaacaaggcaatatctattatcagaaataaggcacaatagtcaccactgcccagcgtaacatacccctaagcgaaggcacacaagaactatttctattgctaacatccatactagaataacaaccacttatacgaggaagaagcacacaatcacgctatcaagcaaacactaacagtaacataattcccctaactaacataccgactcaaacttcctgcaacatacattaccaaatgccgacacaatgacccacacactaacgcaacaaccaaactgtatttgatagcaactcactctagaataacgatagatataactaactacgcagatgtaagaaccatcactgtgaataacactatttctactactgctgctttttactttccatngn

SEQ ID NO: 579829 - DNA, 100 bp, Homo sapiens
cgcgtccggcgggctgcggcggagcgagcggggcagcgctgcagaaggcggcggctggctctccgggacggtcacatgccgctgcagggtgcgggcggag

SEQ ID NO: 579830 - DNA, 1005 bp, Homo sapiens
  misc_feature (26)..(26): n is a, c, g, or t
  misc_feature (510)..(510): n is a, c, g, or t
  misc_feature (512)..(512): n is a, c, g, or t
  misc_feature (520)..(521): n is a, c, g, or t
  misc_feature (523)..(523): n is a, c, g, or t
  misc_feature (528)..(529): n is a, c, g, or t
  misc_feature (542)..(542): n is a, c, g, or t
  misc_feature (545)..(545): n is a, c, g, or t
  misc_feature (551)..(552): n is a, c, g, or t
  misc_feature (561)..(561): n is a, c, g, or t
  misc_feature (563)..(563): n is a, c, g, or t
  misc_feature (565)..(565): n is a, c, g, or t
  misc_feature (567)..(568): n is a, c, g, or t
  misc_feature (570)..(571): n is a, c, g, or t
  misc_feature (579)..(579): n is a, c, g, or t
  misc_feature (586)..(586): n is a, c, g, or t
  misc_feature (597)..(597): n is a, c, g, or t
  misc_feature (599)..(599): n is a, c, g, or t
  misc_feature (601)..(601): n is a, c, g, or t
  misc_feature (608)..(608): n is a, c, g, or t
  misc_feature (612)..(612): n is a, c, g, or t
  misc_feature (617)..(617): n is a, c, g, or t
  misc_feature (819)..(819): n is a, c, g, or t
  misc_feature (883)..(883): n is a, c, g, or t
  misc_feature (936)..(936): n is a, c, g, or t
  misc_feature (1003)..(1003): n is a, c, g, or t
tctggcgctgattatctgctgctgcngccaccgtgctgctgctctgcaaaattcagctgctgcctctgtcttgaggaccccagcgcctttcccccggggccatgctgcctgcagccacagcctccctcctggggcccctcctcactgcctgcgccctgctgccttttgcccagggccagacccccaactacaccagacccgtgttcctgtgcggaggggatgtgaagggggaatcaggttacgtggcaagtgaggggttccccaacctctacccccctaataaggagtgcatcttggaccataacggtccccgagggccagactgtgtccctctcattccgagtcttcgacctggagctgcaccccgcctgccgctacgatgctctggaggtcttcgctgggtctgggacttccggccagcggctcggacgcttttgtgggaccttccggcctgcgcccctagtcgcccccggcaaccaggtgaccctgaggatgacgacggatgagggnanaggaagannangcttnntgctctggtacancgngcgggnnacctcgggnantnannannaattttgnggggggnggctggagaangncnaggaaancctnaccangcccaactggcccgagtccgattaccccccgggcatcagctgttcctggcacatcatcgcgcccccggaccaggtcatcgcgctgaccttcgagaagtttgacctggagccggacacctactgccgctatgactcggtcagcgtgttcaacggagccgtgagcgacgactcccggaggctggggaagttctgcggcgacgantcccggggctccatctcctccgaaggaaatgaactcctcgtccagttcgtctcagatctcagtntcaccgctgatggtttctcagcctcctacaagaccctgccgcggggcactgcnaaagaagggcaaggggccggccccaaacggggaactgagcctaaagtcagctgcccccaagtcccanct

SEQ ID NO: 579831 - DNA, 717 bp, Homo sapiens
  misc_feature (26)..(26): n is a, c, g, or t
  misc_feature (573)..(574): n is a, c, g, or t
  misc_feature (580)..(580): n is a, c, g, or t
  misc_feature (585)..(585): n is a, c, g, or t
  misc_feature (592)..(592): n is a, c, g, or t
  misc_feature (594)..(594): n is a, c, g, or t
  misc_feature (598)..(598): n is a, c, g, or t
tctggcgctgattatctgctgctgcngccaccgtgctgctgctctgcaaaattcagctgctgcctctgtcttgaggaccccagcgcctttcccccggggccatgctgcctgcagccacagcctccctcctggggcccctcctcactgcctgcgccctgctgccttttgcccagggccagacccccaactacaccagacccgtgttcctgtgcggaggggatgtgaagggggaatcaggttacgtggcaagtgaggggttccccaacctctacccccctaataaggagtgcatcttggaccataacggtccccgagggccagactgtgtccctctcattccgagtcttcgacctggagctgcaccccgcctgccgctacgatgctctggaggtcttcgctgggtctgggacttccggccagcggctcggacgcttttgtgggaccttccggcctgcgcccctagtcgcccccggcaaccaggtgaccctgaggatgacgacggatgaggggcacaggaggaccgagggcttcctgctcttggtacagcgggcgggcccacctccgggcactganncaccanagtcnttgcggngnggcnggcttggatccaagtgccccattggtaactcctgatcactggccccatagctgacccgaggtccttattacccccccggcgcaatcagcctgttcctttgctaccatcatctgtcgccc

SEQ ID NO: 579832 - DNA, 154 bp, Homo sapiens
  misc_feature (132)..(132): n is a, c, g, or t
ccaccctgacctcccaaagtgctgggattacaggcgtgagccaccgcgcccggcaatatgtaaccctttcaaaatgaaaacaccagtcttagctcatgggctgtgaaaaatagcaacaaaacaggcgccggntcatacttggctggttccgctg

SEQ ID NO: 579833 - DNA, 132 bp, Homo sapiens
ctactgtaccattaattacagacacacacacacacacaatcacacacacaccccccgcacagagacacaccgttacatacacatgacatacacacattccactggctatacactgtttgtggaggtagcact

SEQ ID NO: 579834 - DNA, 228 bp, Homo sapiens
ggccggtaccaacatgcgaacggactgatccagtcccgggttggtgaactccttgcccgcgccgttcatgtagtcggtcagcggcaggatcttgccgtagcggtagtgcgtgccgatcaggtcggagtcgctgatccagccgtcgtagatggacttgcccgactgcatcgaggtctgcagcttctcgaccacgtcgccttcctggatcagtccgttcgccatttggtg

SEQ ID NO: 579835 - DNA, 1009 bp, Homo sapiens
ttgtctttttctttctgttttctctggctcgtttctgtggtctgtgtggctctctttttgttgatgtctccattttcgtgggttctttttgcctgtctctgtactatttcccttgctttctgcttttttctcgggaccgggcgttttggtgcgtctccctttttgtctctcctatctcggtgatgccttttgttggtgtgctttttcgagtttgtctgttttgttgcagccctatcctgtcctgtggtgtcttgctagttctcctctccgtctgtccctccagattagcgttggacttatatggcatagttgccaccacgctctgatcgtattttttatattttcttggtaggaggagtggggtctcgcattctttgccaagtcttgccttgaacttcttttgggcgtttttatcaatgctttctcacgttctgcctcaccatagtttcaaaggattatcatggtgtgagccattgcccccagtacaatgtataacagttttgtgtgttgtgtgttgtgtttttgtgttgtgttttgttgtctgacactgggtgtctcattctgtttgcccaggcagtattgtagtggtgcgaccatggctcatctgtagtcttgacttctcaggctcaagttgatcctctcacctcagcctcctgagtagcagcggttacaggcatgcatcaccacacctggcttattttttaaaactttgtttgtggagacagggtcttactatgttgccatggctggtctagaacttctgggctcgagtaatcctcctgccttggcctctcaaaatgttgggattacaggtgtgagccactgtgtcataacaattattctttaaaattctcttatttatttatttttaataattatacaagatggagtctcagtatgttgcccaggactggtcttgaatgcctgggctcaaatgatcttcatgccttgacccccctaagtgctgggattacaggcgtgagccaatgcgcctggcctataacaattc

SEQ ID NO: 579836 - DNA, 363 bp, Homo sapiens
gattgagagtgcacagactatggtcctgtatatcctaagaaatcaccccaagctattagaactaataaagcttagtaaggtggcaggatattagatgaatgtataaaaacaaattgtacgctgggcctggtggctcacacctgtaatcccagcactctgggaggccgaggtgggtgcatcacaaggtcaggagatcgaaagaccatcctggctaacacggtgaaaccctgtctctactagaaatagaacagaaaaattagccaggcttggtggcaggcatctgtagtcccagctactcgggaggctgaggcaggagaatcacttgaaccccgcaggcagagcttgcagtgagttgagattgcg

SEQ ID NO: 579837 - DNA, 1441 bp, Homo sapiens
tggggggggggaaaaaaagggggggagaggggagagagagagaggggagagagcggggattgttccaccaccccccgcgcgcggcggagccaccccgcgggggaggggaaaaaaccccgagggggggggagacggggggaaggggaactgtgggacactgggggggaagaggtgtgcagagtggtggggtgggagggggggagaaagagaggagagaggggtggggaggagacacgcgcagagtgggagggtggggtgggtggcagagcgagtggtggtggcctatatatattcttgtgtagaatgtgttatattagtttttcttaaaagaggaggggacctctccaaagagagggggagcaggaggggagagagggggtgcgcgcgggagggagaaaggtgggggtgtatatatactcccgcgcgcagaacacatagaagagggcccacagagcgggggacaacacgggggagaccgcggggaacacgcgcggtggttggtgcatgccgacccctctccacaaagatatatctcatcccgccgtggcgagagggaggagggtgtgtggagaaaaaaaaggtgggtggtgagacagagacacccaagagagggagagacgcacacagagagagatgaaaagaaagaggggggggggggaacacatgggcacaggagcgcgagaagagagagagacgcggaagcgaagggtgagggtacaacgagtgcagaccactaggggaggagagagacaatcacttgcagaaaacgccccgtagaaaagaagtgtgtcacccccaagatatgacgcaaaaatcaagttgtctggaacacaaaccgaggagggcggaggcaaaacgagcggtggtggtggaggaggccaccaccacagagaagacagagtcgtccagagagagccacagaacaaatgtgagttcccaacggcatcactgcggggaggaacacaacaccaacgggcgggcgatgagatgaagagttgggaacagagacgaagaagaagcatgggtaaaacacgaggggtgatcgccccgtcggcaccccaccgttgtcgagaaagagcaagagagacacacaccaccacagagaaatactcgaccagtcaaagaaggagggcggagcacaaaccgcgaggagacacaaatgtaaaagagagagcagtgtcctgggaaaacaaagcaacgcaagcggggggaaacacacggggacacagaagaacgagtctcacaagaaggagaacaagtgtgtgcgccacaacactgttgaggagaacagtactgcacccgcgagggagaacacacataaagtgcggcggagacaacccataccgtcgagcaacaagacgaggtcgcacacaacggcgcctgatgaggggaagaagcaacacaagagcaagtgaggcgaatcacaagagaaaacaagcac

SEQ ID NO: 579838 - DNA, 110 bp, Homo sapiens
tagctggccctcattgtgtgctgaggtgtggcctcgccgcagtgccgatacgggggcagagggtttggcacgcacagacagctcggtgcctgctccagacttaaactcca

SEQ ID NO: 579839 - DNA, 702 bp, Homo sapiens
aaaggggttagcgacgccattaccaaatcccggcaaaaaaaacccgccaattccaaatacgggattagggcatccactggccggcaatttgaatgttgaaaaattgggtcacatatttcccgggctgttccaaatcgggctcaaagaatccacccgctggcctccaaaaggctgggataccagcttaggccaacatgctggccttaagcacattattaattaattccttatttattaatttttttggagatgggttcaactcttggttcccaggctggagtgcatggttcaatctcggcttactgcaacctctgcttcctgggttcaagcgattctcctgcctcagcctcccaagtagctgggattataggcacctgctaccacacctggctaaattttttaatttttagtagagacgtgtttcaccatgttggccaggctggtctcgaacttctgacctcggtgattcaccctccttggcctcccaaagtgctgggattacaggtgtgagccaccacacccggccatgtatgcacattaatgtttgagaagcactattctagaaaacccagtctggctgggcgcggtgctcatgcctgtggtcccagcgctttgggaggccaaggtgggtggatcacttgagcccaggagttcaggatgagcctgggcagtatggcaaaaccccatatctatttaaaaaac

SEQ ID NO: 579840 - DNA, 390 bp, Homo sapiens
aggatccccccgctagaccttaacccttgtaaaagaattttaatttcttagatactacggaacactcaacgggagggagttgagggatctctggatggcagcctccagcttctaccccagcatccccacgcgcaggctcagcggctgcagcaggggctcctgggcccactcttccaggacacttacgagcagctgatacaacagattgactgccaaacatgccatccaggttgatttcaggcagcctctgttctaggaagacggtggctctctccagcgcagacaggatcaggtctgcaatggtggctttactttcagcagtgtccagcccaggcagtgaggaggaccacagcggtggcagtgctgtcagtagcggtaagggctcccggc

SEQ ID NO: 579841 - DNA, 374 bp, Homo sapiens
tcacgctccttgatctgccggctcaaggctgattgcgccacgaacgggcgctcggcggcagcactgaagctaccgctgtcggcgatttcgacgagataacgcagttgccgggtggagatcaagagtcatgcctttttgagatgagtagcgagcctggaagatattagtcgcaacccttgccgatggctaaagtgaacggcatctcaatagaaggaataagtcatgagcccggttgagctgatgagccagtggactttcggcggtattgattggctggtgatcggcctgggcgtgacggtggcttatatcgtgttcggcattgccgggttcggcacggcgctggaggcggggccgatcctgattttattcatgcc

SEQ ID NO: 579842 - DNA, 259 bp, Homo sapiens
ggacttgagctttgtctacgtggcgcccaccgccggagggcgccgtcatctctaggctgtgggtcctgctccctattgtggtaggagtggcgacgccagcacctgggtaattggacatcttgctcctgtgcttgcaacatcctgtggcttgaattggccatgaatgccatgcatgcccaatgaatgtggtgcctgttgtgcattttgcttgcattgtggactgattgattgatgcccattggtgtgccccattgtgacc

SEQ ID NO: 579843 - DNA, 184 bp, Homo sapiens
cactgcttcggatgctgggccttgtagatggcttctcaggcgtcacactcctgtatccaggaacgattggtagtgtgtgcactcaaagcagctgtcccgcgcacgtgtgctaggaagtctggcgcactggacagatcacgttgtcagccagttagcactgtccccaatccgaagcagtatgcgg

SEQ ID NO: 579844 - DNA, 688 bp, Homo sapiens
taacaatagacatttatttaaaggtaaaacatcttcagaccaaataattcttaaaatggttggtttcaaggtttaaccatcttcataacagcggcatccacagacttcaactacatgattacttcttggcccattcttctctttcttttctttcccgaataacctctttcagatacgggttcaagggtagaaattttcctcttcatattggggtccacgggtctttagagcaagatctggatgcttcaagtccaggtccagtgccctcttaaggcgaaacatccggtgcattataagggttctcaggaagtcttctttatgggctctctttatacatcttcatcccctcgatatatggtatcatctcgcatttaaccccagtttatggaactccgggagcatggtaatcaccatttcggaataccattccagccacttggcctgtgagtgctgaaacgggccgtgctttaccgagccctgtgtaccgagcaaccagtggcggggtgggcaaagaaccaagcggcctatacagaagggcgggcaaacaagggagccaagaaagaagggggtggactccattttctaagaaagcatgggcatgatgtgaaagcaccggctaggtccaatataagaacatatggaaagacgctcgtcaccaggacccagggaaccaaaatggcatctgagg

SEQ ID NO: 579845 - DNA, 317 bp, Homo sapiens
ggccttacctcggacttacctcggagcttacctcggagccttacctccggagccttaacctccggagccttacctccggagccttaccctccggagccttacctccggagccttacctccggagccttaccctccggagccttacccttgtgaggtagagaggaggctcctcgagggaatgatcacggcagcctgatgtgaagaaaagcaaagccctgagagaggttggggcccagatatgaaatgtgggggagatcaaaggctttgagtgggagtggccacatggattgggaacaccttgcaggccaggaaccagg

SEQ ID NO: 579846 - DNA, 256 bp, Homo sapiens
  misc_feature (166)..(166): n is a, c, g, or t
  misc_feature (182)..(182): n is a, c, g, or t
  misc_feature (242)..(242): n is a, c, g, or t
tacgttcataagcaccgctacagtggcaggacagctttgcaaatgagccgagatctttctattcagcttccccggcctgatcagaatgtgacaagaagtcgaagcaagacttaccctaagcgaatagcacaaacacagccagctgaatcaaacagcatcagtaggntaactgcaaacatggnaaatggagaaaatgatgggacaattaaaattattgcaccttcaccagtaaaaagcttttngaaagcaaagggat

SEQ ID NO: 579847 - DNA, 104 bp, Homo sapiens
  misc_feature (30)..(30): n is a, c, g, or t
  misc_feature (55)..(55): n is a, c, g, or t
aaaggggtctcagctgcccgaccggactgnacgtctccggggaaccaagcatgtncaggagaaagagaactagtgctgagggcctcaataaaggtgtttatgac

SEQ ID NO: 579848 - DNA, 862 bp, Homo sapiens
  misc_feature (550)..(550): n is a, c, g, or t
ggaccccgtgccaacaccagggggcacagacgcactttgtagccgagaatgtgggagaacttggggccccccccccaccagaaagtggacagacgtgttcccgggacgccgtggaccgcgtctgagacctcctccccagcccttccaaggaactgggatgataatggagactgtcaagaagggggcaaatacacacaagggcagagatagccctgtgagccagtctcagctcacagactgccgcccccatttcctgttgaacccctcctggcccccccttgattcccccttatagggtaccgacccgtaccctgcccccggagctgcgttgctaatgttcctaagcctgccacggcacgaagacctgtaaggggcactctttggctctcgcgggcactctctggatttatgaaccactgggctaccacccccactacccgctggtataaaccttttattctcacgtttgaaaatcacgctttgttgttccagcaagaaagatgtgcctataaaggtataaatgggagaatgtttgtgccactcgcttggnttgttgcacgcttcagcacacacatgtgacaccaccaccaccaccactacaccaccaccaccaccaccaccaccacgagacaccacttcttaaaggggaacccacaccaagtattgccccttaacccagacttccaagttttctgctgtataagaaagctgtaatatatagtaaaactaaatgttgcgtgggtggcctgagttgaagaaggccaaggcttgtaaatttaccccatgccgtttggctttttaaattattttgtgcctatttatggataaatattaccaattctaaaagataagtgtgtttcca

SEQ ID NO: 579849 - DNA, 334 bp, Homo sapiens
  misc_feature (54)..(54): n is a, c, g, or t
  misc_feature (62)..(62): n is a, c, g, or t
cccagatttggttaggaaagaccactaatggcctctttcttgctcattagcccntcattctncacatcagttgggatctcctcactttggggaagccagctggcatgttaaggagccctatggagaggcccacatggcaaggaactaaggcctcctgccaacagccacgtgagtgaatgtggaagtggatcctctgccccagtagggccttcggatgagatcacagcccagtagacatcttatgtgcagccccatgaaagtccctaagccagaaccaccagctaagtgactcctggattcctgacccccagaaactgtgtgagataataaatgt

SEQ ID NO: 579850 - DNA, 503 bp, Homo sapiens
tttttttaatttgagacagcattttgcttttgttgcccacgctggagtgcaatgggatgatctcgactcactgcaacctctgcctcccaggcccaagtgattctcccgcctcagcctcccgattagctggaaccacaggcgccaaccaccacacctggctaatttttgtatttctagaagagactaaaatataatctacaaaatcaatttctccaaaactaattagaagagacagggttttgccatgttggccaggctggtcctgaactcccgacctcaggtgactggcctgcctcggcctctcaaagtgctaggattacaggtgtgagccaccatgcccggccctaagtgagattttttttttttttttttggagacagcgtcctgcacgggttgcccaggctggagtggcatgggcacgatcttggctttactgcaaactctgtctcccaggagttcaagcatttctccctgcttcggactccccaattaggctaggatta

SEQ ID NO: 579851 - DNA, 622 bp, Homo sapiens
aaaacgaaaaattaaggctagtagaggccggtgttcatcggccgagatgtgcaagtctgtatggtgatcctcaggatctagaattagaaataccatctgaccgagaccatcccattactgggtatatacccaaaggattataaatcatgctgcgataaagacacaagcacacgtatgtttattgcagcgctatttacaatagcgaagacttggaaccaacccaaatatccaagaatgatagactggattaagaaaatgtggcacatatacatacgtggaatactatgcagccataaaaaatgaagagttcatagaccttatgtagggacatggatgaagctggaaaccatcattctcagcaaactatcacaaggataaaaaaccaaacaccgcatgttctccctcagaggtgggaattgaacaatgagaacacttggacacaggaaggggaacatacacacactggggactgttgtcgggtggggggacgtgagagggatagcataaggagatatacctaatgctaaatgacgagtataatgggtagcagcacaccaacattgcacatgtatacatgtgtaacaaacctgcacgttgtgcacatgtaccctcaaacttaaag

SEQ ID NO: 579852 - DNA, 803 bp, Homo sapiens
  misc_feature (671)..(671): n is a, c, g, or t
gaaaccttaggctgcggctgcatgtgtgcttggagagcccccttcttccgccggggcgggcaagcagtctgtaggactgtggcacaacgggctggtggcgcaaggagaggaactcgtagagcagcctccatggcgtcacacaggtagggctggtgcctgctgctctgcctggcgtctagtctggagtcagcagcaaaccaatgccctcaccgcagcagatggggcagtggcgggtcagtggacgtggtccctagactgcttcctgtgcgaacgacgtgtgcgcaccgtggatgctctcgccagcgtgtgtaggacaagggcacagggcctccctatgtgctgagagcaggtgccagtgctggacgatggctccctggtaggacattcagcgcgatttccaagggggcacagctggcccaatgatgacaccaactattatctcttgaggcctcagtggacctggtccagattccccagtgcgcgagggcttgctccatgctgactgcagtgggaaggaggtgaccttgtgagatctcccgctactttctccagatgactgagaccacgtgttcagacagcagcgttggttcactggccaacgtgcaggtctctggagggggacctagcttctccttgtgtgatgaacgactcccagggtctgccaacgagtngaggcgctctggccacccgaggctcgaaggttgccactgagcccccaggggactgtgcgaactgcagtggagtcccaggtgatgacgcagacccaatccctgagcttcctgctggggtcctctagctccttg

SEQ ID NO: 579853 - DNA, 91 bp, Homo sapiens
ggatttgctggtgcagtacaacaggcttaatagggacatgctcagagaacaaacttgacatccaggaaaagaagttgataaatcaaaaaaa

SEQ ID NO: 579854 - DNA, 905 bp, Homo sapiens
ggcataaggagaaggtcgaggttgtagaagctggggtggccggaagtgtacgcctcatcggtgtgtcgtgggctttgtgcggctcgcgatgtcctctgctcatctccactgcgtaaagggagggaggctgcgaccgtcgtaagcagggagcctcggcatgtccgctgttaggtgtccaggatgacttgcaaggccacattagagagcgttgcttcgtcaaaactatgctggatggctggagcgagcacatcaagtatgttagtgcctcgatgcttcctagagcttggcaacggctcgccagatctggtcactatgtatagcgttcttgctgttagtagacatgaggagggggatcatgttcgagaatagagcaaacagcgtgttgctttatcctttgaggactttgtgccaatgcctaaacggtacacgaaggagagcacgcgataggatgcggatggttccctggcaagggtactgaaagataaggcagggatcattgaaaggaggggtagtatcaaacaggaaacgcgtagatggagtgggggatgggctgtgacggacgagggttgagtacaacaatgtccccatcaccgcatcaaatatcttagaaaagatggtaatggtaatgaacacaataaccaagttttagcaatgaggaaggaagaaacctaaaggggaagcaacgaagtatcgctcaggaagtgaagggaattgttgggatgaaggaaaaaaagagaaatgtagggagcatggtttattaggctacatcatggaggctgagcctggctaggtcgcctgtgataaattggcgcagggcaaagtaaattaatggttttttcccaaaaattatattccaacaggttggggaacttttctaggtcgttaattcaggggttcccaaaggt

SEQ ID NO: 579855 - DNA, 1306 bp, Homo sapiens
  misc_feature (769)..(769): n is a, c, g, or t
taaaaaaacctcgggtcctaggggggggggggggtataatcctaagtggaaatgatttcatttacggggaaaggcccttggtgagaatgtaggccttaatttctcttggttcctttccgtgtacaggggaggagaatttggaatgtaagatagagaaccaccggaccttggagattacctcccgggtcttgagaactcaagatccacttgtagagcacttaaactctgttggacacaaacacgagacacctctatatatacgcggtgctgcgcacccatccggggaaatgtgtcctctgggtatccgaaactatccaggaggtccctgtaaaacacctctatatgtgtgtgtggtatatatgcggcatctccctaagaatataaggaatttggcgcgctgggttataccccctctagagggtgtacacacttgtgtcccccggttggggtcccaagatgttaaatgggcggatcccaaatgggggatgtatataagagacactgtacgccgcgccttataagagatcgtgggggagaagaaaaggtctcctaacaacggccgatgtgcaacccgtggggcctccgaggaccacagcgtatcggggtgtacaccccccggggagtggtgcgcccaagccaggcgggcaacacaaaccgggacgaacaacgggcgcgcctattaacaaccgcttgtgtagaaagaacgccccggcccactcaggagaggcggggggcccccaaaaaacgctcttatggggaagatcacccnccagaggtgtgagcacccccgggagccacacaaagacgccttgcagcaccagacaggagggcgccactcgggagaaccaccttgcggcatcgagggctccccccggaggaccaccgcgtcgggacagaacacagcacccggccgcccgagaggagttaagaggcgccacaaggacatgacgtctagcggccacacacaccaccaatgtctgttagggaaacacccccccacagaaaggagggtccaccaggacgaacacacacccaaaaaattgtaacagcagcgcaatagttggagcgccaatgaggcagcccgccacacaacgccgcctataaaagcaccaagatggggcggcctcccagcttgcgcccccacgaacaagaggcgctatagtctgacgctaggagcgcaccacagacgtggtgccccccccccatggtggaggtgtacacaaaagcgcgcgagagaactaccacatccccagcggagaccacagaaaccccccccaggggggggctcgcactctcaacactcgcc

SEQ ID NO: 579856 - DNA, 164 bp, Homo sapiens
gatgagctggtaccgcaaagtgggatttactggaggtggtagcaagggttccaagaaaaaagtaaaacttgctgctgatgaagatgatgacgatgatgatgaagaggatgatgatgaagatgatgatgatgatgattttgatgatgaggaagctgaagaaaaag

SEQ ID NO: 579857 - DNA, 301 bp, Homo sapiens
ggcagtcatcacacatctcatgttgatgaacagactcaggataccagtttaaaatagaatcttctctcttggcaaaatttggaaggtatttttcagttgcattttgttgggttttagtattttggtaatgactattagttatagtttccttacattctggcatccttctttgtagccagttgtcttttcagtttacctttatttttttttaagacctgatgatatatgttcattaacactgccatagctcctggagttggattttcagtgacttcattgaaaattaaaacgtttctatggc

SEQ ID NO: 579858 - DNA, 910 bp, Homo sapiens
gagagtataccgcagacatcatttctactacagtggcggagccgtacaggacctgtttccactgcaggggatccaaaacaagcccgtgaagcagaagccagagcaacagtagccgaagatattgttctctccctctggcgcccacttgcccacgcaagcccagagtcccatttacatctttacagagcatcgtgcatcaagtcaccagggtgtatccatatcaagctgaagattagtttgtacatccttgttacagggatctcctccttccagtgccactacagggaaagtgcatccactatgtcagggctcaccgagaacgagaaagtgctggtgggacaatctcttcttgcccctaagatctcacggatggaagtccccgtaaattgggtccttggccgttcaaaggtgtctaatgaacctcgccaaggaggcataatggtggtcaccaatagtaaattactgggccaccctaaaaggatgaatccacgttacaagagacctcctcttgaaacgacaatcccttgaaaactcaatgtttaaggctgtcccatagtctggggtctgtatccgacacgctttaggagctgccgcaggcttagtcataactggccaggaccgatgctcaatgtcctgcctgatgattggagataaacacttgtgcattggacgacgcagaactaccttattgagtctgagagtcttaacaattcactgaaaaggacacatcatgttccattgataatcaagatacccggatactgaaaaggggggtacccttgacaaatcgacgaataactgttccacaatagtaacaagaggcgaaaggaaggataatacgagatgaacgaacaatcgtaaagataaggctggacaagacttacacctttccactctacacattaattta

SEQ ID NO: 579859 - DNA, 531 bp, Homo sapiens
ggctgtgtgtgaaaaatcaaggtagagtctgtctttcactaggcccacaggtgacgtcagaatggcatggaggccagatacaatgccgcgtcactctacagtgcagtttggagaatacacatagacccggatttacgcatctctggtctgggaggccacaagctcagaacacaaatctgacaacaaggaagcatgtgttcccaaacctgtcatgaccatgggcgaaaatgaccagcatgcgacaaggcaagaatatgtatgtcggcatgggatcctcagaacttcgcgagagaatatgtatctgggatcctcagaacttagcgagacgaatatgtatatgggatcctcagaacttagcgagagaatatgtatatgggatcctcagaacttacagagagtatatgtatatgggatcctcagaacttacagagacccctgcacatcaatgggccaggcatgatgccggcactaggagaggagcgcgtgacgaccgttcctggcaaacgagccaaaaacggccagaacaggaac

SEQ ID NO: 579860 - DNA, 1285 bp, Homo sapiens
  misc_feature (258)..(258): n is a, c, g, or t
tttctaggaccatctcggtttggtcgcgcgggccctaggctaggtaaggtgaacagtgagtcagtagtctgttttcctatgcgcagatcgctgttctaatgactagctgacttggagtttgctcgaccaatagaatagaacgcaccgcggcagtggaacctagacgttcatgaacaaagtccgagcatggaagattcttgtcagtgttccagttactgtggcagtctaatcaagcccaggcagtccaatgtcgtagcntctgatgagtcgaaatttactgcactcgcgaacctttgaagacaccaaggttatccttttaaaggaaaacggctcaggttaccaggggggcctgagatgaccaaacaagtcgacgtgccacgtcttgccacccacttctgacttggcacaacgccaagcaaggcgccgacacttgcacacttttcacctgcactaccgtccaggcttccccacagcgtctcacacacgctcaagacaacgttggtgccacaagctgattgccaccacacacattggttcctagttaacgacgcgcccccaactccggggcattttctccaccccatattggacagtcgcagtccaatctctgcaaaccaacctcaccaagctagcgccgaattcccaacgtctgcagccatcccttccagacggggcctttgcaacaacggccctgggctgcggactgtccaagggggatccccaagggtagtggccccgtttagttataagcagttgggggaaccgaaggcccaaccttcctaagctcatataggtgccatgcgctggcgcaccgggggacagaccggccagttggcccgctcctcaaacgccttcccaacgcactcagtcaactttgaacccgcgtcaacaggcacacgagcaccgcgccacattggcttggaaccacaacaccttcccgttctgtacaccggctcactttacctttccattgtgagccacaacacggtcccgctgtcctccatatgggccgcccccccattgcgctcacgacgagctcgggcactgaacctaccacaagggggctatcttacccccagagcaacacggaagaaatgagaactcggttctcctaatcacagcctcaagtgggccgtctgtgcgcttatcgcgacgtcttcgccgactcatactctcgtgacacttggcgcaccgagatacagtcactcacgctgcgcacgcttggcaacaactcgacgtttcgcacactctggtcacacgctgacaatctgctcacatccagtaa

SEQ ID NO: 579861 - DNA, 270 bp, Homo sapiens
  misc_feature (225)..(225): n is a, c, g, or t
tagatgctgatggcaatgacacaattgacttccctgaattcctgacaatgatggtaagaaaaatgaaagacacagacaatgaagaagaaattagagaagcattccgtgcgttcgataaggatgacaatgactatattaacgctgcagaacttaaccatacaatgacaaaccccgaagagaagttaataaatgaagaagttgatgaaatgatcaaaaacgtagatnattgatgacgatggtaaggtaaactatccagcgttagcacaaatg

SEQ ID NO: 579862 - DNA, 115 bp, Homo sapiens
  misc_feature (57)..(57): n is a, c, g, or t
gctctctccaccacctggtgacgttcttgacacgccagacggtgttttcatctctgncttcctccacagaccagcagcaaagtagatggcacagagaggacactgcaaatagtct

SEQ ID NO: 579863 - DNA, 118 bp, Homo sapiens
tgatgaactggcacaccgccaatcttatctacttcatccagaaagacaattccttgttgtgctttttccacattataattggaatctgggaggcacgagaggtgtaccgagactcgaa

SEQ ID NO: 579864 - DNA, 894 bp, Homo sapiens
  misc_feature (48)..(50): n is a, c, g, or t
  misc_feature (55)..(55): n is a, c, g, or t
  misc_feature (57)..(57): n is a, c, g, or t
  misc_feature (60)..(60): n is a, c, g, or t
  misc_feature (62)..(63): n is a, c, g, or t
  misc_feature (66)..(66): n is a, c, g, or t
  misc_feature (70)..(70): n is a, c, g, or t
gtcatgacggagggtgtgaagacgctagtctggacgacgcagaaaggnnngtgtnantgngnnctnctgngggtgctggggagtcggaagagcaccatcgtcaagcagataagatcatccacgaggatgctactccgaggaggaatgccggcagtaccgggcggttgtctacagcaacaccatccagtccatcatggccattgtcaaagccatgggacaagcctgcagatcgactttgcgcgacccctcctagatgcggacagactgccagtgcagactatttgcactgtcctgcaccgccgacgtgagcaacggcgtgctccctgatgacctgtccggcgtcatccggaggctctgggctgaccatggtgtgcaggcctgcgtttggccgcgtcaacgggaagtaccagctctaacgagctcaggcttgcctactacctgaactgacctggtagcgtattgcatcagagtgactacatccccacgatcagcaagatgtgctacggacccgtcgtatgagaccacggggatctgtggagacacagcttcacccttcaaggacctacacttcaagatgttggatgtgggtggctcagcggtctgagcggaccgaagtggatccactgctttgacgggcgtcacaggcagtcatcttctgcgtagtccttgatgcgcctaatgacttggctgctagctgcaggacgaggacgatgaaccgtatgcgtgagagcgtgaagctattccgatagcattcttgtacagaacaaaggtggttcacaagacagcgtccatcatccttcgtcctcgacaagaaggacctgtttgaggagaagatcagacacagtcccttgaccatcttgttcctgagtacacagggggcaaaatttatgagga

SEQ ID NO: 579865 - DNA, 241 bp, Homo sapiens
gttaggacctgaccctgtagcttccactgtttgctagtggtatgtctatgtctgagtttgcaaactgcaagttcttgtccagttatctttttttaaaacttggatactttcccaatccaatcgctggtttggggagccactctcagtgcttgtgagtcctcctctgccccagggcaacttagggacctcggcaggcatcggtctaggcagagagagaggcagcttccgatgacctccactc

SEQ ID NO: 579866 - DNA, 199 bp, Homo sapiens
gttatgtgtggtgtatgccaaagctagaggtgcattacattgccttaagagtgctttggaaaggttcttcgttatggcaaaatcgtctcgcagtaccttcttgaatgagatggaatcatcgaagggtttaagccttaagatggaaggggacttgatcatcattatagcgcgaaagtcctcggcataacaccacacaatt

SEQ ID NO: 579867 - DNA, 301 bp, Homo sapiens
cagaggcacacgagcgaaactttactccaaaaacataaaaaagagaataggttaaaatgggaacccttgttaagagggagggtcgtgtgtgtggggaatgtcactttgcttccggagaggtactagggtgctcaagcagtctctgcaataggatggggtcccctgtctttcctatcccttgtctgatcagccctaaaatttactggtacagagacgggagaaaggaggggtgggtgcacaggacattgtcggagtggggaaaactccgtgcaattatgttggcctcgtgggggtaccccct

SEQ ID NO: 579868 - DNA, 851 bp, Homo sapiens
tggctgagagttggtaggctgggggttatcacaaggacacatgcaacatacaaatgcttaaaatacactgttgtacaccagatgctcacagtttacgtagatgatgatcctactttacatggcaatgacaaatagagatactttgactggtgtgcaaagatgtgtagtaacacagaatgaggaagctagcaagcctcccctagccctactaggactatagacaggcctttcaagggtgacgtgagagtctactagcgtagagaagaaagggaagaggcaacagtattcaggatagatgggggagcgcggaagacactgcaagatgaggaaaccagattagcaagcctatgaattctctgaactgacatgctgacactataagaatgtacaggtgatggactttccagcatagcgtctctagcacaagaacgttgcggcatgggttcggtggaggaaaagggacgtgcacatcgatagaaccacacttgcattggtattcctcatgcgtaaagggcccaattgctgatacctaatcgacggctgtgccgtaccctagtgtgcgcgtgaacggttgctacggacctcgaggggcttgagctgggaagccacattgaccaaatatgccaatccaacatggattcgaacggcggtcgccactttaacctttagtcccaagggaccaattctcacgagggttaagaacgagagacaaacctctctcaaagcccccttggtaaacgcctccaagcagggtaggatatggccacgggtgcaggaattatggcaagaatcatatacaccacttggcactacttccaagacttcaatagagaattgtaacaggtccacaa

SEQ ID NO: 579869 - DNA, 285 bp, Homo sapiens
tgtggtcaggtgatataatggatagaggcgtctaaagaactcaagagaatcactggattgcggaatcttagcattgtggagtaaggacatgctatactagcaggaagctgttggtctttcaacatcagttcctgatatagagcagtgaaaaagaccatcatctccactcctatcaacaaaaataggtcatataagctactataccgttctagtctctcagaaactcttcacagagctgacattgtacaggaatccaagctcgctaaattccaaaaaggaatcagc

SEQ ID NO: 579870 - DNA, 752 bp, Homo sapiens
aagcaccatcacaattcagatgatgtaaccacgttggtcgacagcgaagatgggcctaaaagtaccacacaatagcgttcttatcagcggtgaagctacagtctgctctgtgagtgccgtgaactactgtcttgtcgttgacgcggtgtgatgtgggtatcttggcccggaagctgaagttcgatctattactactcgggcgctgctgtctacacacgttcagatgtgtattagcgttacatgcctggtcaatctcagagagcgaaggggcttactatagttaaattgtgctaatatcagttaggaaaatgcttgtcatgttgtggtgaaatcttgagtttgtgtagcaatgcctgggacatgaacgggccatacaaacagaggaaagctctggggcttccaggcaatggccttgtgtcgagtcatcttacaagtgtccatcttgaacatcattaaagtggatttaaaaagaagtagcagtgccacagtttatcaccaagaacttattttaatgggacatgggtctaatgtcccttcatgcaacaagacagatgaacaaaaaacaatggtcctaaatagctatgagtgatcttgtatccagggtggaacacaacagggcatgtgtactgtcatatatctcttagatgaaatcacacatgttgtgaaggtagaacaccgaagcccaagcaggcttaggtctgccacggacgtttacgccttagcttgtgggctatccgtcccctgatgtgcag

SEQ ID NO: 579871 - DNA, 1119 bp, Homo sapiens
  misc_feature (343)..(343): n is a, c, g, or t
ggcagagggactctgcaagcgatgtctgcatcgtgcctgtgccagagcgtcacctgtctgactgacgtgtgagccgcgctacacgctgctggtggcactgccgtgctctctgccctgagcgtgagtgctggcgcctactctaccctgttctgtgtgcatcacgttcacagcggctggcactagcacatgagaattgcattggaacggcctaccatggctcgcacgtgtagtaaggacgtcagtcgacatgcgtaccctactgatcttaatacccagatcgtgcgaggtgctgatcgacgcggtaccagcttggtgtacccgagctggttatcggtgttatcantctttatataggcggcttgtctacctatgcctagcgcaagtccgaggcgtgcttgaggatccagtatgggccacaacagtctttgcatgtggcatctatcctaggactaactcttgccatgcgtttgatcctatcttgcagtctagtcagccaggaactgacaacgggtacctcttacccttgcgactgttttcacttcattgttgccttgtcggccgttctttagctcgtagtgcagctccgatgcttggctgctgcggctcttcaatgacccagtggtcatggtgctgctgcttcctcagtatcaatctcgctgctggcgccagtcgctggggctggggttgctgcttctcttccagccgtggcacgtcgtctgttgaagatgaatgtgctgctcttcggccctgggttacgtgatcttctcctcgacacgagttaggcttccggtggcggcccttcccaagctgcggaactctgtgctggccttcacgtgggtgcgtgggggtttccttctggtcgggaaaccctggggtactgtccgccctttgaccttgtgcgcgcattctgcccctgtggcgaacgtgggccttccaaggggctcgtgtcaacgttcccgggcgtctgtgggcccaaaccggccgcggttgcccctcaggtgcgtcacaggagcaatttccggggagccaccgagaggacgccctttccaaggtacctatcccaagtgtatcctccaactgttaaccctggatagacaactcgtgttgtatcaccatatg

SEQ ID NO: 579872 - DNA, 562 bp, Homo sapiens
ctggtctttttcagttggttcacgtgtgtccagctttcttcttcgggtttatttcggttcctcataagtatggccaattgtctaccctgttgcttcagcccgtttcatcgaattcccatctcatttccaggctcttcctatgacaatccgtgatccattcctcctgggacattcggggtgcccaaccaggactacgaattccaggccaagcaagcttgctcacactggacaccacctctatccccctgcgcctctgccctgtcgcctcctgcaccggaacgcccgcctgcgtggccggctgacgagggcgactgctgctgctggtacgctgcggctggaccagcctcataagaggatggtctgtgaagtcggaattcgtcttctctgagggctctgacggcatctcggacggagagctgcgatgggctggcatttgtgaactgaggacatcgtggcctccaaggggatccggccttgggcaccaatctgcctgtggagcttggaggcagacgtgagggggccggggcagcctagatccacggatggcagtggtggtcctggc

SEQ ID NO: 579873 - DNA, 894 bp, Homo sapiens
cacggtggctcacacctgtaatctcagcactttgggaagccaaggcaagaggatcctctgaacccaggagttcaaaaccagcctgaccaacatagtaaaaccccgtccctacaaaaatcaaaaaagtaacaaaaaataagccaggtgtggtggtgggcacctgtgatctcagctacgtgggaggctgaggcaggagaatctcttgaacctaggaggcagaggttgcatgtgagccaagattgtgccagcctgggcgacagggtgaggctcttgtctcaaaaaaaaaaagtccacatcttcatgaaccctcagactctggagtagggtgtcggcattgtttagccagctattgtgggaatggccttggacctattaaaggacggaaagtgggtaatggatgtcccaggcagtcaagagactgggatatcccccgagaatggcttgggttacccagctatggacccttggaagatgaatctaatccttctcactgggtggagtctgtgcaaagtcatttgcttacatttatgctaatagcagataaactctatattccatgtgctcacagggcccctgggtagacaggacccagtcttgatttccagagcagacaataggcgaccgaaacacagtgggcattgatctgtgcttgagtcccagacaaacgtgtccattacatttaccagcatttccaaaacttgtgaaggcaagaacaaacggtagttgccataaagaggtttaccaaaccaactgtggcagttcagactattaacaggcagaatcaagtgacacagagaaacaaacagcacaaagacatgctggacgcgagtcgcacgcccaccataaagccaacgtcacgaacaaccactgccagtagcgcgccggcgagcccca

SEQ ID NO: 579874 - DNA, 107 bp, Homo sapiens
tcaagctcgacgatcgccgctacgcctcgtctacgacgccgacttccaggtgctggccagcggcaatcccgacatgatctgaccgcgacctgtcgtcgctgtccgga

SEQ ID NO: 579875 - DNA, 678 bp, Homo sapiens
  misc_feature (188)..(188): n is a, c, g, or t
tcatctgtggccacgttatctcccgagatgcactccataagctcattaatgggaggaaaactgaagtgtccctactgtcccactggagcacgaactccggcagattgggacacgcactcatattctgattcctacctcggagaggaaatcttgttgaaaaggggttcttcacactgtgagcgcttggntctgtctccggtaagggtgtgtcaaacttccacgtggagctgtgtgttggtttccacgaacgcctcggctgtaggagcttccacctgaaggggagcacactggaggcagccctttggcacgaaggctgaggaagggagatggtacccagcccacgcctggcacctcggcatccactggcataaggaaagggagatgctggcctctgtgctcctgctgtcttttcctgtttctgtttgcgtttgacttagtagccaccgacagagctggcaagggagtttggtcttcagccgtagagcatccttccacccctgccctcagcccagtctcttgctgccatgcccatgctatgtccacccttgcccctcggcccacagagtgtccaacggtggcccacctcttcctcccactacagcctcacacagtatgtaccatctccccctgtaaatagtccccgttagaacggatgccgttgttttataacctttgaga

SEQ ID NO: 579876 - DNA, 233 bp, Homo sapiens
tccccgcgcgtttgcgtgtcacttagtgggcgtttgcgtgtcacttctaggggatttagcggggtgatgcctgttggagggccagtgccctcctaattgtgggggtaagggctacgctggagtgctaaaaggctcacaaaaatcctgcgaagaacaaaacttctgaagtaataaatatgattatcccgtatcgaacgcctttttggacaggtggtgtgtggtggcctcggtat

SEQ ID NO: 579877 - DNA, 438 bp, Homo sapiens
  misc_feature (310)..(311): n is a, c, g, or t
ggcacgagggggactaggttttgctatgttgcccaggctggccttaaactcctggcctcaaggtgatccttctgtcttggcctcccgagtagctgggaccagaggcgtgcaccgtcacacccagcttcaagtctcttattataaagttctggccacgcacagtggctcgcaactgtaatctcagcactttcggaggccaaggcggtcagatcacctgaggtcaggagttcgagaccagtctggccaacatggagaaactccgtctctactaaaaatacaagaattagctgggcatggtggcacacgcctnnagtcccagctactcgggaggctgaggcaagagaattgcttgaacctgggaggcagaggttgcagtgaaccaagatcaagccatttgcactccagcctgggcaacacagtgagactctgcctcaaaaa

SEQ ID NO: 579878 - DNA, 474 bp, Homo sapiens
gaggtgacttaatcagaaacacacaatttactggcacccccctttgtccccagtccctgctcctcgaacctgctcttcctctttccccctttccctccctttcactttcctcccctccacacaccctcctcccacctctgactcccaagagaagacccgggacaggccagaaactggagtgaggaagaaagaaccacagaatattaatgtaatgaataactttcaagtcctatctggtccgtgtcctggcaaagtcccttggggtctctcccctgctttccgttcatcaggatgactgagctcagtaattgtaacaaagggagtgtagtaggcaaggggacaaaacccatagtatcccacccctgattgacttattaactcaatgaacacttattgaatacctacgatatgccagaagcagttccgggtactggaaatacatcagtgaataaaacagccactcatcctagtaaa

SEQ ID NO: 579879 - DNA, 230 bp, Homo sapiens
cctctatacgggtgagtggtcacgctgtatcccaggcactttgtgatctgaggcaggtggagcacttgaggtcatggagttcgagaccagactggacaacgtggtgaaacccctatctctactaatagaatacaaaaattatgccggtgcaatgtggcacatgccctgtagtccccggctgatttgggaatgttgatggcaggtagaatcacattgaaccccatgtggct

SEQ ID NO: 579880 - DNA, 655 bp, Homo sapiens
tctcaaaaaaaaaaaaaaaaaaaagaggaaaaaagaaaccttaagtttccgccaggcttgtgaagtaagaactctgctaaagaggaaaggggggttcatcatcatcctcctcagctgggtgggggtcagtgggaagtgctggtcacggggatcgggtcccagtgtctcagacttggcccaccagggaaggccttttacacctacccaaaagggagcgggagatgatgtcagacggaggcgtctgaggagatcctcgtgcgatctggttttaagctatcaagttggattccacgcttaacaggtgaacaatgatcagcaagtggctcggttggaaacacctaggtgggttgggtaaaaaaagcgggaggctgacaaggtggggggtataaagacacagtcgaagccagctggcgggattccaacccccctctcacaggatggaaccgcgcgtggatgggctcaccctctggtgcgggcagcaatgtgcaacgccagggggggaacactatcctcacaggtttaaacttagcactccaaaaagatccagagtacacctcacttgagttgggtaaggaccatttcggacctggggatccccgtgatcactacccaggacagaaatactatcagtgtggaccccaccggcacggtgtgt

SEQ ID NO: 579881 - DNA, 190 bp, Homo sapiens
ttggggggtttgccccttttttttttatttcctttttggtaagagccctttataaaaaaaaaaagaaaaaaaagaggggggggggggccaaaagccacccctttttccccccccccaagggttttggggggttctccccccccggttggtgggttttttttcccccgtttataaagcctttgacccggta

SEQ ID NO: 579882 - DNA, 257 bp, Homo sapiens
gatctttctgtaccctgacggaaggatctgacatacacttgatttggcttacaatgtctgatcactgatcaataagatatctctagattgccccttgcgagcaggactgtatgaatccataacatctatgctcatgatcagtacatgcaaaatcagcaagacaatcatccagtggtgcataacctctcctgcctcatttagtgcagcccgggttccccacgcgggtgttaaacctctgtctctggtcctaccagcat

SEQ ID NO: 579883 - DNA, 795 bp, Homo sapiens
agtgagactctgtctcaaaaaaaaaaaaaaataaaaggaatcagttggggtctgtggcagaattcaacataaggaatatgacaagaccccagttaggtaaccctgatttgctcaggtccgagctgtggtctcttttacggcttcatgaaaggaccgtgccctcacggaggggaccacggtttggcctgggggggtctaaggtaatggcatgccattcctttcttcgatcaccaacaacccaagccttcttttgctgggacacttaggggaacgagagcagcaaatgagaaatttacctttttatcttcccaagcgagcgagaatgtttcccgtgttcagagaggaaagtaacattcacttattgcttgactgggggtgtccttagggaggggtggtacacggcttgttctcctcttcaattgggaacttctggtatttcaacaggactgtttatgtcaggcttgacacattgggacactcctgaagaggtgattggccccccacccttgttttggcggtgagttccggaccacgcggcgctcagaatgtgtcccatcttggcttcgatcctctggtacgctgtgcttggtaaatacttgggtcccaagctgagacaatggctgtgtaaacaccgtgaagagtcactcccaagggtgttattgggtccaaaagaacttgccgtgtgcttcacccgaaggcagcaagtctgcagtgggattttctcacgttggtgaatgacaagaaacagggataattttggcccttgcggaagaaattacgggagtgggctacaag

SEQ ID NO: 579884 - DNA, 240 bp, Homo sapiens
gtcgtctctagagctatccccctttgctgcctgggggttcttgatctcagtgctcattgaaacttctaatactaggggctgttattcgcccatcagttcgtcactcagtactgtctggtgttatcagattgttgcagtatcacagcctgcctgtgctgtacaaagggatgattcaagggtgagatagagtggatcgcacgattattacatcatgctgctattgaaacttctaaaactagg

SEQ ID NO: 579885 - DNA, 341 bp, Homo sapiens
tgtgcatctctaaggaacctctgttaaacaattgttgatttttttttttaaagactgagcttgggccaggtgagatggctcacgcctcccagcactttgggaggctgaggcaggcggatgacttgagatcaggagttccagaccagcctggccatcacggcgaaaccccgtctctactaaaaacacaaaaaaagttagccaggcatggtggcgtgtacctgtaatcctagctactcgggaggctgaggcaggagaatcgctttaacctgggaaggcggaggttgcagtgagccgaaatcgcgccactgcactccagccagggcgacagagtgagacctgtc

SEQ ID NO: 579886 - DNA, 325 bp, Homo sapiens
ggtacctgtgggtagcacaactagggtcagttttgcaggtggtaaagccatttaccaagatagttgtaggtaaagaagggcagatttattagagaaatgtgaaaatatgttgcagtgggcagctcagcagagaaggggctacctgcaaagaggcaagggctggaggaaagttttatagggtcctgctgaagggtgctacgtgtggaatgaggtcattgtgcccgcaggttgtttgtgattagctgtctctaacaattgttcatacaataattgttcattattgttctcaacttggggctctccccaacctggggacccttcctta

SEQ ID NO: 579887 - DNA, 374 bp, Homo sapiens
ttgttcctcgttggtttcaggctcgagttagaacttctcactggccgtccaccacgtgctgaagcgccgtcatcacagacccgctttccacccctctggatccagcagggtgtctgctgcgtttctgatccagtgaggcacccattgccactcccgtttgggttagatgctcaccattgttcctgcgtggctgagtgcctgggtttgtcctaattgagctgaacactagttgctgggttccaaggttctcttccttgacccacggcttctaatagagctataacactcaccgcatggcccaaggttccattccttggaatccgtgaggccaagaaccccaggtcagagaacaaaaagcttgctgccatcttggg

SEQ ID NO: 579888 - DNA, 146 bp, Homo sapiens
agcggaacagtccagttagtagtgtgctcatgttcatgtgtgaacacaattcaggccccatggaatgcatgctaagaaaaaggacatggaccgtatactaggttcagacacagtcacctgtgcggcgcggggatcccctctcctgt

SEQ ID NO: 579889 - DNA, 1281 bp, Homo sapiens
atgagaattcaggttctaaggactataggtctccttacaaatgaagacttatcagggccctagaaagtgctaggaggaagaggttaacaaataaaaatttgtccgcgtgcaaactattatagaaatgacttgccacattgcgaagctattatttgtctcccaccatattttttagttaaaaaaaagtctggggccgggttgcggtggctcacgcctgtgatcccatgactactttgtggcaggccgagggtaggcggatcacctgaggtcggaagttcgagaccagcctgagcaacgatggagaaaccgccatctctactaaaatatatcaaaattagctgggcatgggggcacatgcctgtaatctcagctagtcaggaggctgaggtagtagaattggcttgaaccagggaggcagaggttgtaggtgagccgagatcgtgccattgcactctaagtcctgggcagacaagacgtgaaagctccgtttcgagaagaagaacaagggctggttgtagagggctcatggccgtgtaattctccagatatttggggagcttgaggcaggccgattgcttgagcccaggagtgttcaatgaccacgtacctgtggggcaacaatgggcgaaaacccatctctaaagaatgatactctgaaaatttatcccaggctgtggtaacactatgccttgtggtgccttagttacttggggacggctgaaggtgtgaacgggcatcaatattacgggccgtggaaaggttagaacgggatggtaaattaacgctggtggatgtgttgccccattggcgtttccaagcctctgggcaaaatacacgtcaagaacccttattgtttcacgaaccatctgggtgtccctgggttttaacaacacacagggttataaagggacaacccttaaaatcaggcaaatagccggagcactgtatcacaggaatttgccccgcgtaaaaggcaaaggccactgattggcaaaatatgacgagggtaccccccggggaaatgggggcacaccgcgggacacggggattaacaacggagattgtccccccatttgaaaagaaagggtcgcaacaaccacacgcatcccgtctttgaaggacgggaggagccagaagatgagtgcacaacagcacaggcgcaagcagtacgctaagccaagcagcaacagtacaactagacggagacacaatgcaagagagaaagcacgacaacgaacaagcgacgagcaacgacggtaagccaagtacaaagcaaaagat

SEQ ID NO: 579890 - DNA, 466 bp, Homo sapiens
gtatggagccagcgcacgtgtcaggaccgtacggacctccaccacgagtttcctctggcttcgccctctgcaaggaacccacgcgcgtgggttccttgcacacttggggatgtatgggactccttcaggtttcactgttgactggccttgaagagctttgtggctgggcccccacttgctctcctctcgggcaaggggttgtggttcccttcccactcttgcgccttcatgtgggccccactctgccctggttgtgctgggaggtcatcttccctcccttcatgagccatttacagcctcattttgggggcatatcgtctcttcatttgcaagaaaaaatacaaagtagtctctgtgagtgtgatgatcctgagtcattgcatactgtcatcattctagaacaacaagatgtcaaaaggtgagtggattgatttcatctgcaaggaacccacgcgggtaccgagct

SEQ ID NO: 579891 - DNA, 129 bp, Homo sapiens
cccgactatcgacagctgggcgtgggccaggctcaggctccacaggcgcaggtaggaggcggtgttggagacagcagtcccaggcagtaactctgataggtgtgagatggtactgggtgctatgagcac

SEQ ID NO: 579892 - DNA, 375 bp, Homo sapiens
tcacatgtggtcccacgtttgtgtgggaggcccactagttcaacaaggactccacttgctctactgttggctaagaggcagtctgcttttcatccagggagaagcagaagtgcaaatggttatagactatgtacaggaccaagttacctcggcaattctaaacgactgcaactacctgatctttctacaagtagataaagggggtctggatacaccggaattgctatactttctctcggcctggggatccctcgtagtagaggggtgcaacctacagctgaaacagctccactgctcgctcgaaggagcccccgtatctggcgagtctggtggcgccctagatgacaccatgagcctagtcctcccaccacaaac

SEQ ID NO: 579893 - DNA, 477 bp, Homo sapiens
agcttttccttgagaaaaatatctaacaggtgacagcctaatgagtccagacatctgtcataccatagaacaggaatgactccacatcataatataatgtcttgtggtccagaaaaagttatgcgccaacaggcacaggtatgcagtaatctgtttcttgccatccactgaaacacagagatgaaccttgcaatatatctcatcaccaggtggtgtttccacacacatttggccatgtgccgagcggaaatatcgataggctcttcatatattttaaacagaatacacacatatagagacgtcccagccgtgcatattcttcaggatatggagaatgataccaggtatcaagctcatagcggccaaaagcaattgataaatcatgttgcttccctctgtgattggccttgcagccttaacttctccaaatcctctgaagcccgggcttgtgctcttcggaacagatccacgtcatac

SEQ ID NO: 579894 - DNA, 637 bp, Homo sapiens
agaggacttcacactaagtcaagatatattagaactaataaaagcacttgttgatagatctattggcctttctttattcatagagacacaaacagatcgcagatcagggttctcaactggagcatctgttaattttccccataaaaatcagtcttattctatattatttggagatgacgtctgccacccaggctggagttcaggtggcacaatcatgggttcactggaagcctggatctccccggactcagggtgatccatcccacctcaagcctcttgattagcggggaacacaggcgcacgccaccacgctggctgatttcttgcactgtaagtaggagatgagggttcaccatgttgtcccaaaactcctgggctcaagccatctgctcacctcggcctcccaaagttgctggggacccacaggctcccagccaccacaccaggccttcaagccttatatatccacttctgggagttttattccaaaaaataatcagggattgtgaaagaagatttaagatgcccagaaattcagcatcttaaaatcatcatttacgtccatgcaaaaataaactgcggttacagaccatgaattttatatcattataactaggctcaaacacatctttattaa

SEQ ID NO: 579895 - DNA, 206 bp, Homo sapiens
cacgagggcgatggaaattcggccgtctcggcgacgcgcgcgatctcgggcgctaacaattggtcacggcagacagtgaacaacccgccttttccttttatggaattattttcggattgaatctgccgacaggtgtgctggacgtgcataatgccgatgaagatcgggcggatcgcacgttccaaccgggaaccggtacaatcgac

SEQ ID NO: 579896 - DNA, 479 bp, Homo sapiens
agagctttccgctgcttctggtgaggtggcccactgctgcccaagtccttcgtctgtcgtcaagtgtctcagccggcccctgttttgagcgcctgttgcccggcgtgtcctgaacagagcgcaggacatcaccctgccccacctgtgcatgcgtacttctggcttttgcgcgtctgaacttccatccagatcaagaggatcagttcttcagcctggtacatgagaagctggggtcatagctgtcacgtctgtagacagccctgcaggtggacctggtgtgggccctgtgtgtgctgcagcaggcacgggaagcagagctgcaagccgtcctccaccctgaatttcacatccaatttctagggggcaagtctcagaaggatcagaacaccttccagaagctgctccacatcaacgccaatgccctgctggagtacccagagtactcgggtcccccttctggctgcctcggctggtggccc

SEQ ID NO: 579897 - DNA, 922 bp, Homo sapiens
gatgttgaagctctgtgctgcgtctgctgctgtcctggcacagctgccgaggttccaattcactcgaccgaacgaaagagactgagatgaccactgatccccaagtccagactgaacaagatctagcctcatcagagtggcgggaggctgagggccatttaagacccgctggtgtgttaccacaggtgcgaaggtgtccgcgcgtgctgcggctgcgcgaattatatactgcattgtaatgagaacaagactatgcttagtcatgtacataccctcttgcatgaggtgagatggcactggtataaataaagcttgggtagaaacgactgacgtggagtctcttcatgcagaagaaggtgagagattctgtatggctcactgggccagggccatgtacctattcatggaagctccttaaagtcatccgggctttaaatctcagatgctgtgtctatgtaccaaagcttcccgaactcgacagatcagatattatcaccgcgagaccatgtagctcaaggggtggtagtagtgcatccatccgtgcttggccgaagatctcgcaatgtgattatgggtcgcacacgcatgtcttgttacgatcatggagagaagagtaacaatgtcttatcatggtctaaaacatatgaacacctttgaactgagaaagtagtgcagagcacctatgtcttgggaacgttgttcgcgtccaacaacaagagggccgctcagagaccacgaggttgtacatagagctccctgacaactggataatcccctcccgaaggcccttccttgtgtaacgaatgggttaccttccaggctccgtccagggaaccttttccttaagaagacacccggcccttggggtgccagggcggggctttggcttgggggggaggaattgcctcgaaggcgcttccag

SEQ ID NO: 579898 - DNA, 1740 bp, Homo sapiens
ggggcacagcgacaagtctccaccagtccaggaaggtcctgcaacagtcaccatctcgtatctatacaagtgagtacaattcaataggtgggtcgtggtctcctcctcatgaacctgtcgtggttaggactctatgagagcgtgggcaggtgacatctgagagctcaagcatgactcctctgcgagtgcgcatcaggagaccattgtcacgctagcaaaccactccagggtcttccacacgggcgtggagcattcctatgcgcatacatcattggagacggtgtttagaattcgatggctctttcacctaggagtaatcaatctgcaatcatgcaaggccctaagagacactcgtagagaactcctgcacgcacttcaagacatcatctactaagcgtagccttgtactattgcccgtgggcgcaaggaaaggtgattaaggagtccattgcagctccttatcgccacatttaagtaacgtataagtacgtacgtatgtgcttcgcgacacgggagggctcccacaaatatatgtatagcgttcgcttaggacatattccggttgcgggtgctccataattcgaagaaggagggattgcgagcgcggaggatccaacataatcggcaccttaggtggacagcttttaatctacctcttgtgttctatctcaatctccttagtgggaaggagacatgaagaaggaatttcacactcgctgtggcgacgacatcgcgggtgagcctgtgagtatagtctgccaaccggaggcgggtttgggagaaccttccctcgagttgccggttaccgcctttggtggatttaggctctcttctaccatcttcgcttcccctgcggggcgcgtttgcctagagtcgcgggtaacatctactattggggcgcgtggggggtgtccccccctttttaattccgattaggcgattatttcgaccttcgtagacgcgggtcgtaacaccacaagggccacacagcgaagcgtccgcgcggcgactcatggtgtccctagtgggtgccccctacccaacctgtcgctcggggcaaccttctttgtgccaggcgcaatccattagagtgccgggcgcggtgtttctttcatccccacccgaggttgtgtttagtcgcgtcccgcagagaggggaagtgcggcactcgcgccggagcttttttgtgtgtgtcggtaccccgctcctggaggtggggagaactcgccctaccttccaggggggatattggggagctcttttcccccaccatgggagtcgcggcgcgtggggccggagcttgaccggaggtcgcgcggcgcaggtgcccccccttgtggtggtgccgcgcgagggccttgtatcccccggcgggcttttcttatagagggccccgggcgcagggcgttcgggtgtagtggtgcgcccaactgtgacgttctgggtgaacccccgtctcacaggggggcggatcaccctcgtagctcctctttggtcctctcctacggaaactgtgggggcttggtgccccacggtgttttcgctctgggaggggacgcctggttgctctgttgttacatgttcccacgcatcagaaagatcgtcaacagaccacgatctttatcgcttttgtggccgactgacgagcgggatgccgacacactatgcgtgtggtgtcctccacgacaatatgtagttgtgtcggccgtggtcgcatgacgtacgttcactgagcagccc

SEQ ID NO: 579899 - DNA, 942 bp, Homo sapiens
cacgcgtcggtagcctgtgtgtggccagtggctactgtatgagatagcacataatagaacattgccaacttcatagaaaatgctgggacagagctgaggaaaggttgtggtgccttccaaggagcatcatagcacacactcgaggcttcctgattcctccccatccactggtacctttgctgtagatgcactgaccccaggtagtgaattgtgagattttcagtggtcaagaataattactgagtaaagttgaaaggctgactcgttttgagatcctggcagtggaaaatagcattagaggatgatgagagcctgggcaggccgggaatctactgccctctagcttgacaccttttcccgagacttttccacacatcagtggatgctgagttgcatactcattgacagtcagtactgaaagtcaaggcatggcgtctcctggaggcctcttagatatttcgtggcaggagtaagcaaataataaaagttcttccctgctagaatttctttcctttaatgcagaatcaaggacaaaccaattacaaagataaaaatgaaatgtgtcagtacctggcacagaataataagtgttgctgaaacaaatgctatttgaaaaatacctgggttccatctatggaagtgatagaaaccatagcaacacttatatgtcttcaaagtgcaggcattagtctaaacctgtcagtatttcatcattctcacaaaacctatgtggattgcaggcagctcagggggacacgcaagcggcatgacacccgggtggaaggcccggccaaaaaccccgggcggaacaccacctcaaaggtaacaccacacaggagatcaacgcgcccaagcggggccaccacgcacccgcgcggagccacaacgaggggccacaggggccccccacagcagagcgcccggaagaacataaaaaaacaa

SEQ ID NO: 579900 - DNA, 1660 bp, Homo sapiens
  misc_feature (37)..(37): n is a, c, g, or t
  misc_feature (1219)..(1219): n is a, c, g, or t
  misc_feature (1256)..(1256): n is a, c, g, or t
  misc_feature (1258)..(1258): n is a, c, g, or t
catctatgtatagtatcaacagcatgtagatgccgcngatacatgcctggtagtataaagcacagtagctgtggtgggcgtcctatattagacgtttcagaggggtcacccagcagggttggcaccaagaacaccggtggttttttatctccgcgtggtcctttgttcttttctgccttttcttaaagtgtataccgctaggcccctttgcgtcgtccgaagtcttccggccccccaatgatataaatttccaccgaaagtgtgaataaattaatgccctctactaggggaaatatataaagggttgttgtcttcccgggtcagcccccgccgttgttcgtgtgaaatggatatctccacaggagtagtcctaataagaaaataatgttgggggatatcccaccccgtgttgtaaagagagtaaaaaggggccccctataaagagaaattttttttggcgcaacattgggacaacacaggaacacatagttcccacggctgcccccctataatgggaggtgtcccttcctcacccccccgcctgtgttgtgtggttgaaagaaatgtgggggcgccgcccccccgcgttaagatattatccaacggggtttgttcaaaagccgcgggcaacaaatggatgcccctacttctctcgttctttatttataatccccgggctctggtagaaagtggttgcgccccccctcgccggagtgtgtaaaccccagcgggtgtcaacacccgcacaggccctccttgggaaacacctcccacgaaatcaaagccgtatacttgcacgctgtgcgttttaataaacgtgtgggcgccacaccacaaaaggtgatcaacgagcccacggaggaccccaaggccacacagagagaaaggaaacctcacaggagagatctcgttttgggcccccgcgggcccgcagagagaagagaagggcttgcctcgtgccacaaaaggggggaaccgtgtccccacactcgagaagagagagtcgcacccctgcgggccttcttcgcagaccacagcggagagtgtaaacacaccgccgctggtcaacagcacacccctcttgggtttgcgagagaaacacacacagagatatagtctctcacagtctctggttgggtgtgatttcggcacacacacgagaccttgggggagattccccacttcagagagtctctggtgtgtgttctgtttctttggncgctcgcccctctgtgtgtgtctgtgataatatttgngngcggtgcccctctaactgccacttattcacacaagggataaaggcacaagaactgtggagacgcttctaagtccaccacggataagacctcgcacaccacctcgttcgcctcttcacacacacacaggtgaaactccggagaagacaccaaaggcgctctttggctaagactggtggaagactatccaggacccaattaccaatgaccagatacgatgagatccccccgtccactggggtgcgccaaagtcctgggtcctaaatctgtggctctgtatcccccagctctcgaaaaggccaagggctaaagaacttgcccctataactggcgttaaaagtaccctgttgagttttcctgtaccaataaaaataattgaaataataccaattttcccttccaca

SEQ ID NO: 579901 - DNA, 715 bp, Homo sapiens
gtctaagccggcgcttgaagcacttcccccggggcgcggccgtagctacgacctgtcgagacatcacccaggctgatcctgtcccggaaccggtttcccgaggtgcccgaggcggcgtgcgcagctggtgtccctggcagggccgtgagcctctaccacaattgcctgagatgcctgaacccagccttggggaatctcatcgaggcacctgcacctactctgccaagcctcagtccgaagaccaggctgtcagctgctgtccaccctacatcttgccagactgcccctgagggtcctcatcgtcagcaagcaaacaagctgggagccctgtcccctgacatcgggcaccctgggaagcctgcgacagcttgaggttgagcagcaacgagctccagtccctgccctcggagacgtgtgtggcctctcttccctgcgggagctcaaatgtccggaggaagccagtctcagtacgctgcccgaagagctgggggagctccctactgagtccggctggatttctccgttgtaacgcgcggtctcccgaagtcccaggtctccttctgacgcctgaggtcacctgcaggtcagttctgctggaggagacaaccctctgtcagagtccagcctgcccaggtctgcctgaaggggaaacttcatatcttcaagtatttgtccacagaggccgggcagcgtggggtcggaccctggggggact

SEQ ID NO: 579902 - DNA, 82 bp, Homo sapiens
gggggaaggggtttggggggccccccctttttcagttttttttttcaaattccaggggccttttcttggccccttttttgga

SEQ ID NO: 579903 - DNA, 293 bp, Homo sapiens
acagaatcagaagctaaatcccatttagtcggtgatatgcagactcctctgtcacttaactgtgtatcaaagagctactacacagcttaagagattcatcagacgtgttccttccatttacttaatagataggcactggtgtccaaccttggtatgtccaaaggccagtaggcaccacgaagcaggcaagaaggcacctgcagaaatctccccaaataacatagtgcatcacaccattcattcagctcagaccatctcccagcagtcatgtctgcacaagcacacacagcatg

SEQ ID NO: 579904 - DNA, 276 bp, Homo sapiens
  misc_feature (98)..(98): n is a, c, g, or t
  misc_feature (141)..(141): n is a, c, g, or t
  misc_feature (178)..(178): n is a, c, g, or t
  misc_feature (214)..(214): n is a, c, g, or t
ttgccccacactattggaggtcaagggggtcttctaaatagcacacatcttgtcatccaagttctgagtacattaaaaataagacaaaaacaaaagtntaaggcatatgggaacccaaatgtgatatttgttaccgacagngctgatacttgaaaaattgcctactggtggacaagtnggctttctaataccagtccccagatttagataactntacaaaccacatcacaggcagttctggatgatagcaaaagccccctggacagtgggtgggca

SEQ ID NO: 579905 - DNA, 290 bp, Homo sapiens
gtgatacagagatgaggcctcagtgagccgttgatacagccactgcactccatcccaggcaacagagtgagaccctgtctcaaaaaaaaaaaaaaaaaaaaattcccgaagacggggtctttttttttgccccaggtgggtttgaacccctggggctcaggtaatcgcccggtttgggccccccaaggggcgggatttcggggtttgcccaccaccctgtggcccagtgtgtgctccccttggctttgatttatttctcaggggatccctcaagagttcaccctgtgggt

SEQ ID NO: 579906 - DNA, 805 bp, Homo sapiens
ggccaggccaagcaccagccaagcagccatcattgccaaggaccttcaagggccgagggatcacggtgggtagaagataaggagatcttggctatgggaagcccctgccccagaaaacatggctgagcagatcatccaggagatcttgacagccaggatccaggagcaaaaagaagatcctggcaagccctccgacaggaggacgcaccctcagtggacgatgccaacattcgcgcattgcccaggcctgaccaggctgacaaagtaggggacaagatagccagccgcagaggcctacgggcaggcagctggccaagctgggccaatggccaggtgagccgcgagtcagtcgtccctggatggggacgaccaaagaaaattgccaccgtatctcggagatcttcaaagaaggagcacccggaccggttcagtcgagtgctacatggctgagcagaacatggtgagcatcgcggtgggctgtgccacccgcaagacaggacggtgtcccttctgccagccactttttgcaagccgtatctttcacgacgggcctaagagcagattcgacttgtgacgacactcttccgagagcaacatcagccctctgcggcatcccacgtgcggcgttatccgaatcggaggaatgacgggggcctcccaggaatggcgcctagaaaagatctggcatatgtgtacggtccggtccccacatcaaactgtctttgtacccaagtgataggcgttgctacagagaagtgcacgtggaaactatccgacaatacaaagggtatctgattcatcggaa

SEQ ID NO: 579907 - DNA, 135 bp, Homo sapiens
ttgatgtggtcctggatgggaagagggacatgagatggagtttaaggaacagcgagcgatggagtgagggaggtgctggcctctcccctctgaattaactcccccagtgagctcagctctgtgcctcatgtttgt

SEQ ID NO: 579908 - DNA, 213 bp, Homo sapiens
gttcgtctagctgttccagaggatccttgtagccacatatgtaagtgctaacatagcgtcagtggtggagtctggatttgaactcaggtgtgtctgacttgaaggctagggccccgaaccctgtcatccaccctacatgtgacctcaggcgtggaacgtagggtgcttgtcctgagagtgtctcctcccacattagagtggttacatggggta

SEQ ID NO: 579909 - DNA, 146 bp, Homo sapiens
tagcgttcagaggatcacccttcgagcggtgtactggagataaaaaaaatacgagtgatacgaagtagcaagacacaagcctctgtcaaaaaagaagagaaaagatcgtctgagaaatctgaaaaaaaagaaacgcaaggatacta

SEQ ID NO: 579910 - DNA, 524 bp, Homo sapiens
  misc_feature (444)..(444): n is a, c, g, or t
aaattaatgaaagtagctacactggtcaggcatggttgctcacgcctgtaagttcagcactttgggaggctgaggcgggtggatcacctgaggtcaggagttcgagaacagcctggctaacatggtgaaacccaatctctactaaaaatacaaaattagctgggtgtggtggcgcaggcctgtaatcccagctattcaggaggctgaggcaggagaatggcttaccaaggagacagaagttgcagtgaacggggattgtgccattgcactccagcctgtgcaacaagagtgaaactccatctcaaaaaaataaaaataagaaaaaagaaagcagccaaaccaaacaacagattttcaataaagacaacatagacttctattgtaagaagatataatctaggactttcatagctatagagaagtcagtcaatgcctggcttcaanagcttaaaggacaggctgattctcttggtagggactaatgcagacaatgattttaagagaaagcccaatgtctttacatt

SEQ ID NO: 579911 - DNA, 148 bp, Homo sapiens
ttgggaaaaaaactttcccctgagcttcccctgaggtcagactgcagtttcaaaaagggggaattttaaaaagtcattgtttatttcatggaaactgaagttttgttgaggggtgaccagccctggcattgaaaaatataataatcat

SEQ ID NO: 579912 - DNA, 269 bp, Homo sapiens
agtcagggcgattgctcccacctcccttcttccatcaacgcaaactatttggagagatgtttgaaagtgatgttgtggaactgtgatactgcgtacatggtcatgtaatggaccctcagatgggacacagtattggacaacttgcttggtgcatgacgtggactttcctttttgtgtggtgtcttgcctggcatacctcagtaggacaaacccagatgaactgtttgcacacagcccatctggagagagtacactgtgtggactcccta

SEQ ID NO: 579913 - DNA, 150 bp, Homo sapiens
gtaggcagccaccatatgctacaagaaccgcaaactgcccacagtttccctgaagtagacagtgaggataataacaaagtcgccaggcaggaaaaaaaatccaggaaaaaagcttgtccgctatttgagaatcccctatattccccaagg

SEQ ID NO: 579914 - DNA, 244 bp, Homo sapiens
tccaggatcctctaggcgctcacacaggagaagctgctagttcctttgctctcttgcctttgttatatctgccctgccgggtagggatgtggggcttggggcatctcctgtggtgtgctgggtgtgcagccctgattgtcgtgtggtgccatcagacctggacagagagggaggactcagtccaggcaatagggaggcccctaggacgctatctgtgacatttcagaaggccaatcagcagcac

SEQ ID NO: 579915 - DNA, 149 bp, Homo sapiens
  misc_feature (16)..(16): n is a, c, g, or t
ctgtactgctgcctangtctgaccctgctgggtgcccagcccacaggagaaggaggggatgtcgagcatgttcagcagcgtggcttcgctggctcccactttgtctccacgtcttgatccgctgtcatcactccggatttcactggtgc

SEQ ID NO: 579916 - DNA, 400 bp, Homo sapiens
tggaaggcgggcgggaagagggtggggcgagctaagaagctagaagcgttttgccgtgagccaaggaccaaggacgggaatgcacgatgtacgagcgaggagtcagggacggggactccgatggccgatgactcagacctgctttgcctggctgggggaactgggccatgggaagaacacaggactggccccggcccaggcccaacccccgcttggccacggcggagagcctgccccaggcccacctggccgaagcaccagcatcattccaggggcctcaccctgcctaactcccaagtccatgtccaacaccttttcctgtgtccacaattctcatgtggttcaaagacgtagatccattactgtttccagatgatcaaagcagctacaaaattaaaaa

SEQ ID NO: 579917 - DNA, 296 bp, Homo sapiens
ctgaggtatagacacagaattatagacaggatctttgaatcttaaattcagctgattaaaaaaaaaaacaatgaacaaataaaccatacaaaaaaaaaaagggatcttgaaatattggccccctctgttcctttgcagctttttccacaatacccaaaatttaaaaccaccctgattgcccttcaccagtttaaggggttaaacaaagtgtgggatatgcagacaatggagaatttatttcagcctaaaaaaggaatttctgtcatatgctacacttggtataacctcttgaggac

SEQ ID NO: 579918 - DNA, 355 bp, Homo sapiens
ctcgctgtgttggactgacctgcggtgttcctcggggctgtccgagccaggccacaggcggtcatgctgctggaggcctggggaggttccgagtgctctgcggactccaacacctgtggccatgaactgggaggttggacttccctgaaaaagaagctggcccaccaatgacccgggtcagccttggggagacctggggggtggggaatggcttccccgtgggcactcggtactgctgcagtgagctgttgctggaagtggaacccaggcggtgccggtagtagtcgtgggtggccacgagcgagccgctggagggggatggcctgcattgctttagcttgctggctggtgggat

SEQ ID NO: 579919 - DNA, 1251 bp, Homo sapiens
attgtgcagcaactgggcgggccgacggaagtgcgcgttgaggtcaacaagaagtttcgcctgtctgtctggcatgaaaacctggctgtcgtccaagtatctgggtactgctggtgccgcttgagcagaaattcagtcagtggctgactttctcatccgattgttcctgctagtacgctggcgagttatgctattggcggagtaggcgggtcgatggactgttgtattcgttatccatcaagcagaaccgttcgtgctcggatctcgaacactgcagccttgacacgtgtgttggtgaaagggacttattccgtccgacgactggggtgagatatggccgagcgttcggaaggttggcgtttcccgttcacaccgtgccgttataatacgataattgggccgggatggcgtggtccacatgcaaagcatagggcagggactgatcgcggacgacgactgactatgatgggctgggggcgttaaagtcgactgaacttctggccgcgagctgcacgtggtgagctgctgtattttcccgcccattggcggacctcgacgaatcgcctagacgctgaatgccagcggcacttgggcctactccattggggcacgaaaaatccgaagtcccactatagagagggaatcattccgaagacggaaggtcggaacgaggcgggccacaatggcatctgggaacgcgacggttgtcactccccggaactttatcccttgtcagggcatccgcggggggcaacgggaaggaattggtccctgaattgggggagagcctttgggggcgcggaatttccttctaaacacttgggcccaccgtcttagcgttccgaggatggccacggcggtggaaatttcggccgttgggcccaccgcacaccatagtgcattggcgcccgttaaattggtaaggccccgcgggcacaaaacacctttgggaacgcaaacaccaggtcgacgctattataaaaacccacccccgtgagaccaacccccaactatacgcaacacacagtcggaaaaccaacaacttcgggcccaagacaccaccaagggacaatcaggcgaccccggagagtacaaaaaccaacgaccggcgccaggccagggcgtagcccgcgcgaaacaacttagctacgggacatagagtccacaaccacggccacgtggcaccccagagagatcagaaaatcgcgcggcaccaaagaccgcaggcgacatggagcgaaaactcaccaa

SEQ ID NO: 579920 - DNA, 131 bp, Homo sapiens
tccttatccagggagcggcacttcttaatagtttgtggctttctatccagcctctcttaggaggggtaatggtgtagtttgcatcttgtaactctcctttctcctttcttcccctttctgaaccctgcact

SEQ ID NO: 579921 - DNA, 276 bp, Homo sapiens
tgctggtgcaatctatccagagcataaatctctctatatcagcataagtgaacttatgtctgttctatcttcaggtgtcactggagtagcactttgaatttccttcaagaactttccctatggattcacaacctggctatttggtgcaagaggccgagctttccgcctgcctccgcttttgacattccttcttcactaagcttaatcatttctaggtgtagatttaaagtgacagatgtgcggccgggcacggtagctcacgtctataatcccagc

SEQ ID NO: 579922 - DNA, 838 bp, Homo sapiens
gagggacccgaagctcagttacagtacagatcaggaccatgaagcttctcacggtgcctggtgttctgctccttggtcctggcgtgtcagcagccgaagcttgcttttcgttccttgtgctgaggcttcttgaatgggggccgcgggactatgtggatgagcctcacctcttgacatgagagagcgccacaattcacatctggcctcagacgagaaatacgttccaatgcctcggaggtggaacgtaatgatgctgccaaagaggggaccatgggggatgtcctggcgcgtgcaagaacgcggagtcacgccgagtgccggtagagaactatccagagaatatcttatggcctatgggatgcggaaggactcgactaggtttgcattccagggctggctcgaatgatatggggggccagtggacgtggtgccagagggacccccgatatcgagtttccgtagcctgttggtgcctggcctgaatggaagatcactgggagtcgttcctctttcagcttctgctcctcctggagattcgtgggctggtgacggccctccagggggcagtggattatcaacatgccgtgaggtagaagggtacacccatgtgagtatgctaaggtgaaaattacctataaaagagggtggaaagtttctgcaatgggaccacaaggcacttcggtgaaacacttaagacaactttgtgtagaggcccagcttagtggtccccggcaaaaagaactgtgtgcaagaccctttccggtctggggcactgagctgaccctatgcgtgaagacgtggctccagggccaaagcgggtccccaggggaaactcgcg

SEQ ID NO: 579923 - DNA, 621 bp, Homo sapiens
taaaaggatcaaagcggtgaatagttctaaaaaagggtttgtgctcttaagtttggactaattgtctttggcagcgagaaagggaacaatacttgacggaaaataaataaactacattccaattagaataaactaccggggttcttgaataatacttttttaaagaaaggccctttttaattatacacgggttcaagatttttttttaataggaacaaacacttatacaacactgctgggagaaagggacttggtctaggtaatttcaaaccatgaaatcaagcaatcctcaccaggatacttaggagggagagaatattttattcccattttaccaattaggataaatgaggcccagaggggttaaggtaacttgcttaaaattcacacaggtagaacaatgggggtgctgagaataaaaacccagtcaagtttgcttggaaggaggtattaattgtttgattttttcagaaggttaacaatgcgggtaatgaatatttgtttaacctaatgccggaattaaaagaagggaagggtgaataagagattgcaaccagtggcaattaaagcatttaataagaaagggatgacccccataatcctttggaatttcctaatatt

SEQ ID NO: 579924 - DNA, 1391 bp, Homo sapiens
gacatgctcagcccagagtgaatgtctgtgagcattccagtgtgcacatgtgctggttgcctgctcacagatcaggcttggcaggtggtggtaggtggttaaggttcccagtttcagccatcaagtgtgcagttcgttcactgctccagcagtctcagtttactctccatcatgtcacacacatggtgcacagcattcctcagctctcaacacatttcatcaaggcatcccactaggcctgtagtgttacaacatgtaggccataacagtgggcatcactgttgagctagattaaactcataataccgacacagagcaccagagactggatatactgacatctagggaatacaaaccattacaaccccaacacactcaacttgtcatgtcgaccaccacagaaacacactaagactactactatgatgacactgctacatatgagcacaaacatatgaaacgaacaaacgacaacgagagatatacctacatagacctacaagagtcacacccattaacagctatacagagcagcatggcagaggcgacaggagacaagaaaagtccccacacgacaaacacggtaacaaaggccaccaatacaaaataactgacatagattgacgacacagaggcagaacaacagagggagacacaaagtgggagcgataaaatcaccaggcaccatcctgagggacactctgaccaagtcgaaccgtgcagcacacccagcaaaacgacaaaacacagcataacaaaataaacaggccataaagtacgaacgggtacacacaataagaggggccacacacgccagcaaggatcagccacacagaacacacaaataaccacaacacgccaaaaagacagaaatatgacaaccacaacgcaacatcaggacaatcgctaaaaggggcaacacagaaagcagacaagagccactagaagacatccctgagaaacaacacaaaaggccacgaagaacaggggctgcaccacagactaacgcaccacagcacacagaagtagcgcacaaagagtcctatggagacccggcggaagcagcaaaaacaacacagggacacagggccaaccacacgaaaaccaaatgaccacccaagcacgccgagcagcaagcacagcagaaaacctagaagaaataaaacacgagggagaagcagcacgaacagaccagaggacaccgaacacgcacaacacaccaaaaaacagccataaaaaacacaacaaccaacaagaacacaaccaaacaacgcctagaggaaaagcgacaaaagcaaggacacaaacaacacccagaaacacatcacagaggggtaccaagaaggcccgcacaccaacggagaagacacacacagacacaagacgaacga

SEQ ID NO: 579925 - DNA, 1304 bp, Homo sapiens
  misc_feature (335)..(335): n is a, c, g, or t
tcaggctggtcctggtcctgggatttttgggcattgtgaccacccggctctgcggcgctgtagaggctgctcccaagccgcgctcgagtagactcgggtgggggtccctggcggtggtagcggtggcggtggtgcgagcatgtcgtggctcttcggcattaacaatgtgccccaagggtgaagacgctggggcctgtcgcctgcctttgcctgtcctgtgctagcccgtgtgccgagtggcggcggggacctgtggcttgggagacctggcctggcgccctaagtgacaaattggaggcaacttcgaacccacctggcctggtatgcgcgcctgnctaagggtcggccgcgcgaagccttggagcacttcgccgttatgcccaagggaacgccccttgaattcttgggcacaggattccagtgatgcaagaacgcttgcaaggtttgcgagtcaaacagttccaatgtctcacaaagaaggtagatgagggccggcccgttaggaaggccaggcgtttccaaaggaacgtcggaaggtcgtgtaattcgcagtgggccgccagtggccttagaggtgagtaagtggacgggaaggaacccctttgaagccgaagggtagaaccccccgggtctatggctattccaggggcacatggggccccccaagttcattcaactgaaccaaaggggcctttgtggccccctgggcctatgagcgccctttaacggaaactggcacctccaaatactttgaatagcccagtgatagtggcacaccctttccttcccacattggaacgggaagcgaaaattttttaaagcgggggacaaagcgcccaatgggaaaggggaaggcttcctggtgtgtccaatgaaaaagcgcagtgggaaaatgccccaattgcccagtgctggaatgtccccaaccccgggtttgccaacctcgggggcgtgagcaatcggcgaccgccttgctgtggttgctaccatggtcgaactcttgtagaacatttgccttggtccggcacaggtttggtgcacgggtgctcggaatgtgtccccgccgtgtgtctcgtacgtccatgccctcataaggtgtgccctgtatttccggggctgctactaacatctttgcggctgagcacttttcattttcccgggctgtacagggtcgtaaattttcgtcggcccctttgtaaataggggcggtggttcctgtagtcacaccggcttccaatgagactcgggtcatttgggcatcgctttccagattccgagggacctggggctttggcagaaccatt

SEQ ID NO: 579926 - DNA, 360 bp, Homo sapiens
ggacccctaaaccctgtgggtggagggcaggggtcgggggggtttacctttttgggttttcacatggcctaggccagtcctccggtcagactggtgtcaggcaccctggtgcaaaattccttttttggcccctccagtacccaaaaaaactgggtgggccctttacttctgcagcccccagggtggtagaaaaaactgttaaaagccccccaaccagtaccaggacccctgggttttcctgtgacctggggcccagtttttgccctttaggcctttatttccccccctgcaagtggggatgccagccctggctttgcctccttcattaggctttggaagactggcccaggttgtggagga

SEQ ID NO: 579927 - DNA, 266 bp, Homo sapiens
ttggtgagaccctgtgtttaccgaaatacgaaagattatgctgggcggttgtgactggtgcactgtcgtccggctactagggaggccgaggcaggagaatcgcttgaacccaggaggcggaggttgcggtgagccgagatggcaccactgcactccagcctgggtgacaagagcgaaactccatctcaaacaaacaaacaacaaactgtgtgaagaggctgggcacggtggctcacgcctgtaatgccagcacttcgggaggccca

SEQ ID NO: 579928 - DNA, 1333 bp, Homo sapiens
  misc_feature (250)..(250): n is a, c, g, or t
gggctctcgtgggtgtggctttcttggttctatccgcgtccgcgacttctttttgtgagggcccgctcgtcgcccgttcggtgtgggggcccctatctctgctcgtgctcgggggtttttttgtgtggggacacctactgggtggcatgttcagctccatggtgcccctgcggggcgtattttttttgttacccccgcgtttcgtgtgctgggttcggtggtcccagcacggccgactctacaatgctgngtgcccccctttccgtttgattcctgggggggcccgcactgtgttttctcgccgacgaggggcacaccccatttcgtgggctcttcccgcggtgttttcaaagaatactcatgcccccccctccgggggtgctctctctcccacaccgcgtgcccttgtggggggagactctcacaaggggcccttctagccccccaagagagcccctgtctttggggggcacaagaacaaccggggtggggccaaaacttgcccggcgcccctcttgggggaagctggggcccactatgttttctacaattgcccggcgcccgccgcatcttctcgcccccaacccttccacccgacctatgttaatttgaggcccccctgtttgtgggtgtccacggggcataataaagggccccctgggggtgtatttgggtgtggagattagatcccacacaccacgggttcccggggcgccctggcccccggggctggaaagttgccacacacagcctcgtggctccctgggtgcgctacaccactcggagaggggggccacagcacaggctgaccggtcgccaccacaacacacagtgggcctctctgccgcccacagcacccggtggctcccccgacacacagtgggttgttctgagaacccctctggggaacgaaggggccctcgggccccccggttgaaaggccacccacagagaggcacaggaagtgggcccctctggggggttcccggggcaactgtctgcgcgcgttgctgcacaggccggcccacaccccgtgtaatttaatttttcacaccctagttctcccttctcctgtcaaaggcacaggcccgggctccacagggcgtcccccttgcgtggggcaatgtaaggtgggggaaggcgtcttgcaaggtcaacctggggggcccacagccctttctccaagccttgcctggcgtgagagcatgtgttccacaggggaagccctggaagcaaagcccctcaataaggacagggagggggtttccgaggccaggcatccgccgccccgtgtcgcatcctggaataaaaagtggctctggcatggttccca

SEQ ID NO: 579929 - DNA, 195 bp, Homo sapiens
gatagctgactcttgagtatcaacagcgagcaggataccagcatgcagaaaccctctctctactaaaaagacaaaaaaattagctgggcatggtggcacatgcgctgtggagcccagctactggggaggctgaggtcggagaattgcttgtacccgggaggcgggggttgcagtgagccgagatcatgccattgc

SEQ ID NO: 579930 - DNA, 127 bp, Homo sapiens
  misc_feature (121)..(121): n is a, c, g, or t
ccactcctagcatcactccccgtcaaagcatcactccccgcttcaagcataactccccggaggcctgaaggcccagctggaagaggagaggaagcgggtagcccgggtgcatgcatgagcntgcagg

SEQ ID NO: 579931 - DNA, 219 bp, Homo sapiens
cctctttactggactccacttatgattccctaaaggccactgtcgaagcccccatcgcttgggtcacatagtcactatgccgtcatgtatctctatcacaactaaggcgggctatggtataatacgcctcacagtcattctcaaacccctgacaaaacacatagcctacccccttcctttgtactatccctaatgaggcataattataacaatgctcgt

SEQ ID NO: 579932 - DNA, 849 bp, Homo sapiens
agcggaggggctgctgggaagatggcggactcgtgtggctagccgatgaggaggccgcgtgtcggaacccgtgccccctgggcccctgacgaccgatctgaccggagcgacctgcgcagggcccggggagtcatgtaggggtggcgcctgcggggagggctgcgggagggcagtgggagctggtgttagcggctgcggcgctcggtctccgtggcgtccctgggtccggggtgggtgtcggggccctccgacattctgccgtactcctgcaagcctatcgacgagagagctggtgcgactcgtggtctccacagcgtcgtccgcatgcgtactgatggagcagctagtcggtttctcatattcagccgtggtgaaggagatcttagatgagactgaagaccaccttgtcctaaggtcactgccgcatgcgtggtgtgggatgcagccctggcactgtgagacccacgcacctgtccatctcgcggtgtgccctgctttccactcgctcttgtgcttgccggcgtcctcctgtgggagagggacggtggtcgcggaagtagtgcacggcctgtgttctcgactgggagctctagactgcggcagcgatcagtagcccggtgaatcgacctcagggcttaccttaagccccgttcgctagctctgggtcttgcgtttctccacctggttgcatgtgagaggtctccatcgatccaacttccatgcttcgagtccttggtctctgctctagacctcccctgtctctggctgtcttggcctgctgctgatcctccagtacagcacttgtggttggggcccagccctggcgggacggctgttggagggagccca

SEQ ID NO: 579933 - DNA, 435 bp, Homo sapiens
caaagtcaaacagtgcccgggcaacacgttatctcttatccctggcctgtcacataagatgagttgtgatgtgtttaattaaactgtttgatgtgaatgttgaaacaaaacgcagggccgggccccatcacttggtgcactgctgttgctttcactgaaatcgtcttcatcatcatcatcatcccataaatggcagttgtgtctaccaggccatagaactgtcctgtaccatgggctgttatccgagccctgagggagttccccgagtcccgagttctgtgtgtggttcacatttcaaatcggtctgctcaggacaacgacggactggtaaaatcagttgagtattggctgttggtcaatgaaactatgtttcactgtcagtttcacaactatctgtgagccaatcccagcaaaaactttccatgcactgtcact

SEQ ID NO: 579934 - DNA, 143 bp, Homo sapiens
ctagctacactacagacatgatggtacggtttattcaccgagtcagtgggtttcaaaaagcgggaaaggaattgaatcagaaaaataggaagacacatgtaatataacacaccagtccacatttcataccagagttgtcgtcc

SEQ ID NO: 579935 - DNA, 370 bp, Homo sapiens
tggtagagaggggggtctccatggttgcccagggtgccctggggtgaacgtgggtttacaggcatgctgaatcttgtaaagcctgcccacagttcaaaggggaaggaagcaatccaggggccactgattgggatctgccgagctgttgaagaactcgagcgttggacgccgcgcctaaaggtagcagccgcctagcaacacaacattccctacatgaacgtgaaaggacacaataacctcgtaacagaccccgccacagaacataaatgaacgtggcgacaagtcccgcaatataacgagcgctttccatcccccacgcctcgctgccagcggaaataatgaacggcgaaatagggagatataccaccaa

SEQ ID NO: 579936 - DNA, 561 bp, Homo sapiens
tcttcaataactccagctataccaagatatattggtatctcttcacaatacgtgggaatgtataccattgtctggagatattctgattcatatgtctatactagtattaggaagttggatcccgtaaaagtcatcgacgtctactccatcttaccaggctagtgctataaatactggatcttcagatgcttccgcctctgcatacagatgcaaaaccttattagaaaggtataatgcacgtgatccgtttctagtccaaatgaaatatcgtagtccaagattaacagaatggttctatattctctgtcattgtctgacattatgaccaagatgtacatcccctcatcctcatatctccatccaatgatgatgtaggcacaagaggacgatcagatatggtcctgagaactttgtttcttcatacccttagcagaattctacttttgagctttaatcctttactttatcaccacctagcacaatatagcatcctaaggctagttttgcatgctgtgggtctttggtttcttttgttactaaaacaaagcattttcctgttcc

SEQ ID NO: 579937 - DNA, 211 bp, Homo sapiens
ccaagctggaggatcggatccatactccagcagagcgatagaagatcggggagcaagaaggaagagggaagcagatcacgaaggaggatgtgagcaggttaagtggccaaggaaggggagcacattctggagaaggcctggtgctatggcacttagttttcagcggggactgggctcaggaacacataaggaggttagccctgagagctcc

SEQ ID NO: 579938 - DNA, 269 bp, Homo sapiens
  misc_feature (249)..(249): n is a, c, g, or t
aataagaattagaaatgagtacccatgtaggccaggctagagacaggttcttgaactcctgacctcaggtgatccgcccgcctcggcctcccaaagtgctgggatcacggcggatgagccatcgcacctggccaacgaggaagtatttttttttatctatcctgactctttcttgaaaagctatgaacttttttcttgtactttcctttttcttttttggagacagggtctatgctgctgtcagccacncaatgtacgcacatgcggtt

SEQ ID NO: 579939 - DNA, 281 bp, Homo sapiens
ccttcttcaggatcagaggtagggtgcagaagcatttagggcagcaaacaagtgacatgaagggagggtcctgtgtgtgtgtgtgctgatgtatcctgggtgcctggctccttgcagcagggctgggcctgcgagaaccaaggctcactgcagcgcgctcctgacccctccctgcaggggctacgttggcagcccagcacataggttgcctaatggctttcactttctcttttgttttaaatgactcataggtccctgacatttagttgattattttctgc

SEQ ID NO: 579940 - DNA, 1804 bp, Homo sapiens
ggaggccgaggaggcccccggggcccggccgcagctccaggacgcctggcgcggcccgcgggagccagggccagccgggcgaggggacggcgactcggggcgctcccagcgagagggccagggggagggcgagacccaggaggccgccgccgccgcccgccgccaggagcagaccctgcgtgatgccaccatggaggtgcagcgcgggcagttccaggggcggccggtctccgtgtgggacgtcctcttctcctcgtacctgagcgaggcccaccgagacgagctcctggcccagcacgcggccggcgccctgggcctgcccgacctcgtcgccgtcctcacccgggtcatcgaggagacggaggagcggctcagcaaggtgtccttccgcggcctgaggcgccaggtgtccgcctccgagctgcacacgtccgggatcctgggccccgagaccctgcgggacctggcccagggcactaagacgctgcaggaggtgacggagatggactcggtcaagcgctacctggagggcaccagctgcatcgcgggcgtcctggtgcccgccaaggaccagcccggccgccaggagaagatgagcatctaccaggccatgtggaagggcgtgctgcggcccggcacggccctggtgctgctggaggcgcaggcggccaccggcttcgtcatcgaccccgtgcgcaacctgaggctgtcggtggaggaggccgtggccgcgggcgtggtgggcggcgagatccaggagaagctgctgtcggccgagcgcgccgtcaccggctacaccgacccctacaccgggcagcagatctccctcttccaggccatgcagaaggacctcatcgtccgggagcacggcatccgcctgctggaggcccagatcgccacgggcggcgtcatcgaccccgtgcacagccaccgcgtgcccgtggacgtggcctaccggcgcggctacttcgacgaggagatgaaccgcgtcctggccgaccccagcgacgacaccaagggcttcttcgaccccaacacgcacgagaacctcacgtacctgcagcttctgcagagggccaccctggaccctgagacggggctcctatttctttctctctctctacagtgactgggcttcctccgtgcagttttctgcaactctggagaagtggaggcatacttgtgtgtctgggttgtttttttttttgtttttttttttttttgttttgtcattctttaattttgttgttttacccattcgttatctgtggaaaacgttttaagttgtcatgtgacagaaacttttcctttgtccatcgaggtgtttcataagttttttggtgtgttttctgggtcgtctatgtgtcatatggttttacttttctctcctttttcgttttcagaacatttttctgtctgttttggattcactgcttccattttacagaatgtcactctttagactctcagtccatcatgccatcgggtactcttgttgcagtgtaatttttattacatgcggttatttccctaacgatgtgctattcacgttcatcttcaaactcattttccatcagccagtgtctactatttagtgccctggctctatttcggtcctcctccccgggctttccctggctgctgtgctggccaaaagcatgggctttattctctccattggctgctgctccaccttagaggtgtgacctcactagcgttgactgagcgagtctgttgtggagaagaactttttgtagtaatttactaggaaaaattctgaacaagtaaaatatgaaggaaaaaa

SEQ ID NO: 579941 - DNA, 252 bp, Homo sapiens
ttccctctctcacgatccttcccatccttcccatctctgtacgtgatcttcaacttcattttctccaagagcttctacctcagctaataaatcagcttcattagctgctgtgatgttaatgcctgtatagcagccatcgaagagttctgcgcttcactaagggcttccttaagtcctcctttctggaagaatctgcgagatagttcctgcagtcccggaacaagaattcccggccgtgctctagggcagggt

SEQ ID NO: 579942 - DNA, 385 bp, Homo sapiens
ggcacgaggtgtattagatgtgatgcagacaatccaaacggcagatactactgtggtggacagtgcacctgtgacatgtcaaagcatggcacagatgatggtgtagtatggatgaattggaaggggtcatgtgactcaatggagaagatgagtatgaagatcaaggccttctttccacagaaatagtgcccaatacgtagaattttgcgtcttctgtgtgtgacaacatttttgtacattatggtattggaattttctttcatacattatattcctctaaaactcttaagcagacatgagtgtgactttttgaaaaaagtgttggatttacatttagcacatgaatttcttttggtttcttcatatttcttgcttaccaaggttc

SEQ ID NO: 579943 - DNA, 139 bp, Homo sapiens
ggcctattgaagtcagtagcacatgctgcctggggtgatgatagtgttctatctggcagggttgagtcgcacaaatgtatgcattgtgaaaactcagcaaatatcacgcgatttctgctatgaaacttctaaaactagg

SEQ ID NO: 579944 - DNA, 759 bp, Homo sapiens
tccgtgttcttttctgcttcttttgtcttttgtatttcgttttttttttctgtttttcttgtttattttgtgcccttttcacttttttttcttctcttcttagtttcttctgttttgtttgtttagttctatttcggtattctgttctctttcatatgtcttgtatcgcgattctgtgattagtcctagtttttgttggtttctcgtttgtgttgtatctgtcaagctatgtatttctacatgatatgttgtttgtcatgttgtgattggtatctagaaggctatttgtctctctgtgcttgctatatcttttttttgtctttgtttatatacggatcttactgtgtatatgttattatcttgtattctatctctgcttttatcctttggagtcctgggagatctcctccatattaatggtataatgctatcaagagtagaattttgtagctgtagattagttatgtttttaacgcctacttgcaagtcttgcttctttgggatatcataaatgtattttgtgatgtactaaggatactggtcgtgaagtcgtactcaaatattatagtgcattttagcctaattcattatctgtatgaagttataaaagtagctgtagatggctaggaattatgtcatttgtattatacccagatctatcttctgagtagtgtggctgtcatgctgtcctgcgaaactgttagacctgttatctttgtcagtttgtgatgagaggatcttccttttacccacaaagta

SEQ ID NO: 579945 - DNA, 345 bp, Homo sapiens
ctgatcctgccgtttcctcagagcactgcaggaaagaatgtcactgaggtctaacttcccacacttttagcagagcctctctgtctacttttcttcatcttccatcacccaacaccggcctcccgttctccatggagacatggcgggagcttgagcttcacccacccctttcccgtccgcagtcagaacagcagagttctgtcacgtggttttgctagttggaggcagcagacaaaattctgaccagggatattttttgtttgccctgtatagtgttgtaaaaattagaatgtttcacccaaaccatctggattttcatcttctcctttttaccaaggagctgaa

SEQ ID NO: 579946 - DNA, 493 bp, Homo sapiens
tccggaagcaactgcacacctattaagcgcttcctggcataatcatctcggtgattggctttctctgtggcaaccagcaggaatcccagatctctgaattgtggcaaaggagtctcctgataaaggtgggatggattctactgaccaacatcaaaacgatcagacatttgaaagccttaatctcagggtcggggtttgggccgcccttgggccttttccttgggcctaaccattaaaatcagcctagccaggtctgtcttccaggcacaggggtagggccagatactcctgatgctttttgacgcttctcccactgggtgggcaacaaccctccccttccctgtgacctgcagagaagcttcagggggcgtttattcaatttgctaggagcctacaaagcacaggtacacggtgactctgtggttcccactgctcctgccactctccttggtcccctcactgtctctggcaggcagtaatgttctgggtgagc

SEQ ID NO: 579947 - DNA, 163 bp, Homo sapiens
tataatgctccctccatgtgctcctgggtgaagatggttccctaaaggaggtttattggttcatccctgatagaactcagggggattcttttccctcccaccagctcttgtaaatgatggcctttcaatatataccaactcctgccagggacacgaatgttca

SEQ ID NO: 579948 - DNA, 457 bp, Homo sapiens
  misc_feature (173)..(173): n is a, c, g, or t
  misc_feature (299)..(299): n is a, c, g, or t
cacagtgagtaggcaaaagcactcatgtgagctggtcctgtcacccctgctgaagagcaataagccagcgttgtggcttgagagaaaaccagagcttgtgtacctgcaagtgacactgagcggcctctcctgggacatggttgagtctggggacatggaatatcttattgtgnagcgacttcctctgccaggcctgaagggcaagctcatggaccactcccctttgctcagcctcctggcatcttggcctttggggccagcagagcaggaagctcagctttctttttctctttctttcnttctttttttttttttgagatggagtctctcactctgtcacccagactggagtgtagtggcacaatcttggctcactgcaacctccatctcccgggttcaggtgattctcctgtctcagcctcccgcgtagctgggactacaagcgcctgccagtacg

SEQ ID NO: 579949 - DNA, 385 bp, Homo sapiens
atgttgctgaggctggtcttgaactagcctcaaataatcctcctgcctcagtctcccaagtacctggggttacagacacaaaccatttgtatttggtgtttatttttaagtttttgaggaactgccgaactgttttctgtggtggctgcatcatttttcttgcctaccagcaatgtattagggttccaatatctcagcattcacacgaacacctttatttttcctttaaacaatttacgtaggtgtgagtggcatctccctgtggttcggatttgcattccactaatcacttatcatgttgaacatgttttcatgtgatttggggccatttggcccattcgataccttctttggagaaatgcctactcaagtccttcgtcgacgc

SEQ ID NO: 579950 - DNA, 878 bp, Homo sapiens
cgacaccgcggtcatgtgcggggcaagccccagacccgtgccggccaggctgcagtgcagggagtaaggctcgtgttgcgatgtgctgcgcctggccctcccccttgagccgtctccgcagcggcgcggggagtgcgggagctgcgggtgcctggacgggctgtgggtgctaacaaataccctggcatgcgtgctgtgctgtgcgtgcgctggctactgctgtggtgctgcatggcgcttgctgtgtggcctgcgtggtgctgctggtgtcgcggggaggcctggtgcctgggcccgggcctgggcccccggttgacctgccaatgcttgacacttcttccctccgtgctccaggcgggcatcccatcatggcctattctcggctacgacgtttgtcctactcactatctgggagaaagcatgcaggaacacagcgaggatccctgcagggactacttgcggacattgcccttgaagcctacggttgactatggcggcaccacgtttcatcccgagccaaggcccttcatcaggccaaccaacacacttcggaaacacgctgggcagagcggcaacgcgggcgcaatcctggtcgatatcggggcgtcctgggcccctcaagctatacattaccccaactaacctaatgatcgatgccccggggaccaattgttacacaggggtggatccagcgcgttgggctcttagcaattctcaaggggcaatagggcgcccgtgactctatgggcctaccaagtggagagcccttaaaggccaaggcctttaaccaaggttggcattgttccgtacacaagggaagggttggcccgacaagggggcttgaaattctccttggggcgatccgggaactttgtccg

SEQ ID NO: 579951 - DNA, 148 bp, Homo sapiens
tttgccatggctctctaccttactcgaagggacatgcatctgacaaccacaggcactgtcctcacgagagcccaccaggcctggcctgtcagccatggctctggagggagggaaatgtgtgccttgccttctagagcccagttgttgc

SEQ ID NO: 579952 - DNA, 1197 bp, Homo sapiens
tgggcaagggtttttttcccataaatattaaagttttccgaggttaaaatatttttcttcggggaagcaacaagtttcttttcagtgggtcccggatcaatttaaaacaggtgggagaacaccggggggcactggtgaaacgtggcgtttcgtggggcagcctcttaagctgggggggctggtagtacagctacaggcttcatcaaccttaaaagggaggtggacttcgggaaatctcgagcattatgagaaaaatgtcctggaattatacaatctctcccaacaaacttggccaggtggattttacccacgcaaaaatgtggggtggctatgggcttgagacataagagaggagaaaccaggccggtaacaccacaaacatgtgggctttgggctctctgaggagagagagggggcgcaagatgcgccaactagggagaagcgcacgtccaaaagggttcccagagacctcttggttgcccatgagaacccaggcagggctggtggcgctatgtggctaccctgggcggcgctcgggcgctactaaacagagatggtgcgcgcctgagagcgagattcgggcgaaacacttcccctggacaagctatatatttcatattcctcgtgtgtggagaaccggggtgcgcggcagaaccacgccacgagatagtaaacgctgcgcacagcgggcattgaggcaaagctgagacaagcgcacccgggggagcaccccctactgtggtctctcgtgtctgtccgcagaatgtgcgtggttacaacccacacaacgccgggtgggttcgcgacctatagggaccctcctggtggggaacccccctcggggcggaacaacaaaggcggggggtctcccaaaagaagcaccaacacggggggggcggctcccatacgaagacgaccaagctgtgtggggccgagaaaatacgaccaacgcgggggcggcacaaacacctgcgggcggacacggggtcttacaagcgctctgagtagccccccccagtgataagcaaggcccccaacgcaggacgaggcaccctcggggcctcctcacaatcaactggacgacacaacactgatgcggcagcacagcgaagagaataataacattatcgccacgaccggcgggcttcccagagaaactcaccggagggggcagcaacaaacacagcgcgccccgaa

SEQ ID NO: 579953 - DNA, 179 bp, Homo sapiens
tagactggtacttatcttaaaagcgttatggcagtgagacagtgtaagtaaatataaaccaacttaattaaactagctatcactaaaaagcttttaaaatcaaagacaagggagttcccgtcgtggcgcagtggttaacgaatctctgactaggaaccatgaggttgcgggtttggtcc

SEQ ID NO: 579954 - DNA, 601 bp, Homo sapiens
aggtgtgaggaggcggacaagcaggggtgctggaggctctgcaggatgccaagctcatgggtgacctggtcgcgcttcatcaagcttcttattcacaaacgttatgtggccacatgctcgcttggttcctgttctgatcacatttcttaacgacagaaaatctgctcctgccatgctcagccacttcactgtataatgagtcatagttgtctctcgaggtcaccatgatcccatccatccctggacctaggaccctcaggctggccgacgatgaggctgaacccatgtcattgacagcgatgcacgtgtagatgccgtcatcttccgtggtcacgcccacaatcttcagcgtggcctctcccaggtcactgtaggagatgctgtagtgaccatcgttgttcaaggtgttgtgttcagggcccttccaggtaattgaggctttggggcggccacagactcgacatctaggaacaacggtctcccctgtctcacacgtgacctcactcaatggaatgacgaattctgggggaacgtcataaatgtagttgggattgagaagcttgttgctgagtccttcccgtgacttccgataaccgttctc

SEQ ID NO: 579955 - DNA, 865 bp, Homo sapiens
tggtcaagatggggctttgtcatgtgacccagccgttggtctgaaactccgttgggctcccgcaatttctcccaccttgtgcctcccaaatggctgggggattacagggctgtgaggtcacccatgcccagctctaggatgactgtttatgtaaagattgggtatatgtcttgggagaagatggagaaaaccccaggtataaggggacacgacagtgtatgagacgtgaaccggggtctagtgagggtgtagagatggattacgccatgggaggagaccaagatacacgagacgcacatcctgacagagaacaagaggctctggggcaacccacccagagggacgagaacacacgagacgacgcgcaaagggagaaactcaactgcgttggaaacatgggccccatgcaagcgccaacgggacaggtgcgacctccaagaaactcgaccccacagggaacagacaaaccaagaagggcgagctcacaccaaggagaatagcgaagagagagcaagcgcacgccaggcgcaaagaaaatacagcccaaagagaagcgccatcaagaagcgccaaaccaacagaacacagtgcacgcgcgccccagggaaaagcacccccggcaacaaacggagagagacgcaaccaagctccccgcggaatgagccgccaaacgaaatacaaccacaaaaagcctggagagaaagactaggagacagagtaacacagcacccccggtcaagccaaaaggggcagtacgaaaagtagagccatacaataaaatacaaagagacacacagcaacgagagaaatacgcccaaaaacacaaacagtggaaaaaaaggacatgacaaataggcgacccaca

SEQ ID NO: 579956 - DNA, 1061 bp, Homo sapiens
ggttggacggggcactctcagaggaaccgcggggccccgagttgggctctctggaacttgtggaggacgacacagtggattcagatgccacaaatggccttatacgattatgcttgaaccagcgaggaactggtcagaccgtcagaagagaagctgccaggtattctaacgagcgcacgatgacgcgacaggctgccgggccggactcagagaactgaacgtgtctcttgctttcacggccatcaccaggtgggcaagctccgaatcaccacattcccccaccgatgagtcaggctgacgcgacgagcgagctcacggacacgactgcacggactgggaatgcagacggcctcgatctgctctcaataccgtgcacagcagagactgcacaacgggttcctggccaacagcgaggatcacgcaacggtccacgactcattccagtgcaacaagtaccatgacctgaacggctagcaccccgcgctggaatctcagcgagcctaccgacgacaggtcctgtgtgctctgctacgcgctgaccaccacgctgcgacagaaacagccccgaggcctgaagaagctcctcaggcccgcacaagggcgacccgagaggccagacaacgggtcccagacacaacgcacggctgccagcggacggcccaacgtaacaaccctccaccccacacgctgagctgccacccggcgacactgacgctcttcacgcaaactactccccaccctgccacccaccgctcgaccccgcacccgccccccgcaccccacccgggactcacaccacgcggcccacacactccgccccccacccaaccgcacccgaccccgccacgagccggcccacgcccccactctgacactcggcattcacgtctcctcactttacccgtatctccatgtcactcccccaatcacgcttgccacctcattccctacgcgcaccccctgcccggcatccccaatgtacacctggcaagctctcacccttgcacttccctccttcacaccctccctcacgcgattactatgccttcaccacccaaacc

SEQ ID NO: 579957 - DNA, 1013 bp, Homo sapiens
  misc_feature (358)..(358): n is a, c, g, or t
  misc_feature (476)..(476): n is a, c, g, or t
agcggaatcgtggcgacggcggtggcagggacagcaggagcagcggtgcggtgtcagcgcggcgcgtcggagtacactgggagcacccgtggggtcgagagtataattatgcaagtctgtccctcctaagcgtggcccatgaggcagtctgagtcaacaagcggagtgaaaatgaatcgacgacaattcagattatgtcgggtgaaggaccattacgactctgttgtctctggaaatactattgtagtctggtcaagtagttagatgattgaagagcctagtgcacctccttactactgtgatgagaatatgtcaatacgtacaagaccaactattgtgcattcatcagaagggatcntcacagcttgcttctatacctcgtggacctcgagtcatacgccccggccaatgcttggatggtggcagaagaccaggccagccatagaagatgcagacagagagtagagccaattcangagtaaacaacacttgcgttgtgcaagacaatgcttcagtggtcttactagacgaaggtgggaagtcctattcggaggtgactcttctgattacagaatgctaggctagagtacctgctgtgttggacctagtggcgtagatagaactgcctaggggactctaatagacaaggcaccacatctaagtatgttgtgaagcaaaaaaagcagttccaattcccgacagaagggaatggcccaacacagctgcgcgttgtcctgagggatacaccccaatgtataatggtccttgagttaatgcatgcgtgtaaaacatacgaggaggatctctggacagacaatcgggggcaccctttacttcgtttagggaacagtttttgaacacaggggttcggaatcccactcctgcgcatgttggaattcgcaacactaagatttacgacttaacaattggggaaccttttcctatcaggctcccctctggccttgttgtaggaagggttgctcaacggaaagtttgggttacctggaaaacca

SEQ ID NO: 579958 - DNA, 946 bp, Homo sapiens
gcagtccgtggagctgccaaagggagacctgggcccggcctccccgagccaggagctctggagtcccatgcctggtgcctgcgatggggattgtgtgctgcctgcacctcgcgtgaatgatcccccgtgcgagtgtctgacgtgtcgtcatgtggggcatgtcggaggcaggggggtggcctggttcccagtggactatggctaccgggccttctggcgtggaccggggggcgtactttcggggtgggccaggcagtgcccgggtctcgtcaagccggggccacccccgttttccgtgtgtcatgtggtcgtgtgccgtttccgggacgacggacacgtgcctggtagggcgccattgtgcctggtacggtggtcgccctcctaggtgtggcgcattcaccctgtgggggactactagtgaggcgccacaaagtcaaaagattgtacagagcccacggggagggaacaactcacaattggtatggcaatgctggcccctcgggatgggggccgcagtcgggcagcttatggagttacaaagacgcagtatttccacacttctccggcaacttatgggaacacaggagttcaaaagagaacaccctttcacacagcgagaaaagcaggttggaaactgttggggcaccaacccaccacagtccgaataaataggagccgaagcatagacgccccactgaacgagcatagtcgaattttagtcgagacaccccggtttaataaaactgcaagttttttactacccacgtgacctgataacaaccctagccccgattttagtggtcaccccacacagtaagtgggtgtaccccgatttctccgtttgtggtcgtaatcaacacacggtcacgccatttgtgttgctccaccccacacatgtaggtggagtcgccacccacttcgtagtgcagttagcctcattgttgca

SEQ ID NO: 579959 - DNA, 358 bp, Homo sapiens
attccaaccattgtcaaaatacaagactatacaatatagcacctatccatggtcatgataattaaaggctttcaggtcacctatcttagtgactattgctctcttctgaccctaaactcttgacatcctagtttatgaactgtgccgcctccttacacaccaaagactgataaaaaggagactgacttatgagccacggagtttacacagagattctctatataacggcataaaggtgagggtgagacgacagagagagagagagaaagagagcagaagaagacgtgaaggagaggagagaaaagaaaacagacaaaatataaaaaaagacagaagggtatacagtctggtgctcaat

SEQ ID NO: 579960 - DNA, 250 bp, Homo sapiens
cctgggccaagcacaatgaagatcatgatcattgctccatcctgagcgcaagtactcctgtgtggatctggctggctccatacctgggctcgcatgtccagattccagcagatgtggatcagcaagcaggagtatgacgagtccggaccctccatcgtccaccgcatatgcttctaggcggactatgacttagttgcgtacaccctttcttgacaaaacctaacttgcgcagaaaacaagatgagattgg

SEQ ID NO: 579961 - DNA, 200 bp, Homo sapiens
gacggcattgcatccagtcgaacagttggtcatggtctatacgatgcggtggaaattgcatcgtgtttgtaagcctaatgtggggacagctcatgagtgcaagacgtctttgtgatgtaattattatacaaatgggggcttcaatcaggtgagtactactcgagttgtcaaacgtcaaggtagtcgcatggtcggcctgg

SEQ ID NO: 579962 - DNA, 875 bp, Homo sapiens
acatatgatgataacctgctattattaaactttttctaaaaagtgaaaaaaaaaaaaaaagatttaaaaactcagggctcccatactctgtttcgggacccattctgagaatgcattgctaggcctattgtgttatgttttaaattttggcactgctcttcccgtggcaatttggtttacaagtggtttattgcagcaattattaagggtacattgtctctctgtttaagttaattatttgccctttattaaaaaaagttttgattaaggcaaactatttttataaagtgccctgtttaaagcatttggcactgttatttttgtgccatttttattttccattttcctactttcaaatttgtgtcctctcgacaattttccttctttccttactttttgtttttgcaccacgtgttagaaattgggggcatttgttgtgttgttcatgtgttagctcggccactttattgcccccatttgttgaggaaacccttaaaggggcaatttaaccttagaccccttgtgctccactattttgttaccccgtgtgttggtccttacagctggaggaaatttccctcccctgtagtccaatatttttttgtgccttacatatttcagaaatccataccctaataacttgtttgggaacatattctcctgttcaactttttaaattcccaggaaggctatttttattaactttttgcagaagcctttttattgctcccaaaggtcctgattcctcacagaaaacagtctctgtgtgttcaaccctttcctctaaagattcgttgctctcatatacattagtggtcccttcgacaaaaaaaaaaaagcgtgttcggctgggttattcttaacccactggatgg

SEQ ID NO: 579963 - DNA, 452 bp, Homo sapiens
gaatgctgtagaacatgaaacgacaagctctcatacagaaattatgacgaactacacagaaactctcgggataaaaatacagtaactcaaagtggaagaaactcaagtagatggcgttcataatcagaattcattatgtaaattaaaaactagtgaagaggggtcgagcaaagtggctcacacctgttatcccaggactctgggaggccggggtgggtggatcacttgaagtcgagttcagagaacagtctggcccatatggtgaaaccttgtctctactaaaaatacaatgattagctgggtgtggtggctggctcctgtagtcccaggttctctggaggctgagtcaagataatcacttgaacatggaaggcagatgttgcagtgagccggattggcccagtgtactccagcctgggtgacagagcaagactgtctcctctaaccatgag

SEQ ID NO: 579964 - DNA, 212 bp, Homo sapiens
  misc_feature (177)..(177): n is a, c, g, or t
  misc_feature (186)..(187): n is a, c, g, or t
atggccggcggatctccctttatatttttattgtgtctgtttgatccttctctcttttcttctttattagtctggctagcggtctatctactttgttaatcttttcaaaaaaacagctcctgaattcactgattttttttttgaagagtttttcatgtcctctaaatctccttcagnttcgtgctnnctgaacttagttattctcttatctg

SEQ ID NO: 579965 - DNA, 1206 bp, Homo sapiens
ggctttatcccgcgcgttgcggtcaagatggcgctggtggcttctgtgcgagtcccgtgctgcgcgttctgctccgctgcgggggccctggctcccgtgtgcgcggccctcgggcggacgtgagctgtggctggcctggcggctggagacggtgctgcgctggctgcttcagggagccagctgggtgctggtgggagccggactgctgtgtgccgcacgggtgtcgctgtgatgaacattcaagaaccccccagtgaaccagcctgagcctggcaggctctctgaacggagctggtcatcagcctggagaaggctggcacgaatgacaagagctttccgggggtgtccatttcctgaccctcggaaccggacccggcgatggttctatcctcggaccgggccttggaccctgactcggaagaattgtcgtcgcgcacggcagcgccactgcaccatcttacagactcgcgcggtaagctcgggaacacggccccgctaacacagggcacgctatagtgcaccttcgcaatggtatggtacccaatgacacagcaaaacacctgagctagcctagagaccttcccgggcatcaaattcaaaacccggcggaaagggcacattaggcaccagcacctgagtctatcgtaactgagggctttgggcccattgtagttgggagcccctagaaacccccattggttagaagcgtaaaccacgggaaatatcccttatgggcctacggtagaccaaaaccccgccaaagtggttaccgctttggaccatttacaggacctttcacaaaaattggagaagtaaacctgcgataatgactagtggtgggcaaactcttcatattacggagcacacccatattagcaaccagtgggatcttgagaaaacacgtaaacaaacgccacctttgctgtatattaaaaacacaaagcggccaaaactctcaggggcgggacaaaacacaacgagcagacaaaggaggccgcagcgacacaacaccagagcagagaaaccccaccatgatgacacagccgcctggaggggcgagccagtgcgaacacccgctaacaaccaccagtaggactcagtagtgcagcgagcaaggaggggaccctcctgtcggaacagaggtaatgcgcgagacaacaaatatacgactgggagcaacccccaacgagatcgagaatacccagg

SEQ ID NO: 579966 - DNA, 534 bp, Homo sapiens
aactacccaaatctcacttgactgtaatccccacatgccagggcgggatgtggtgtgaggtgactgggtcatgcaggcggttttccccatgccgttctcgtgatggtgagggagttcttaggagatctgatagtttaaaagtggcagtttcccctgagctctctctctcctaccacctttgtgaggaagatgcctgcttccccttctgccataattctaagtttcctgaggcttccccagccatgtagaactgtgagtcaactaaaactcctttctttataaattacccagtctcaggtagtatctttatagcagtgtgaacatggactaatacagagaactggtaccagcagagtggggtactgctgcaaagataatctgaaaatgtggaagccactttggaaatgagtaacaggcagaggttggaacagtttggagggctcagaaggcaggaagatgaggaaaagtttggaacttccaagagactagttgaatgcttttgaccaaaatgctgatacggatatggacaatgta

SEQ ID NO: 579967 - DNA, 667 bp, Homo sapiens
  misc_feature (348)..(348): n is a, c, g, or t
agcagtgtctcacacctctaatcccagcactttgggaggccgaggtggacagataacctgaggtcaggagttcaagaccagcatggccaacatggtgaaaccccgtctctactaaaaatataaaaattagctacgcatgggccgggtgcggtggctcatgcctgtaatcccagcactttgggaggctgaggcgggcagatcatgaggtcaggagatcgagaccatcctggttaacatggtgaaaccccatctctactaaaaatataaaaaattagccaggcatggtggtgggcgcctgtagtcccagctactcgggaggctgaggtaggagaatggcatgaacccggnaggtagagcttgcagtgagctgagatagcaccactgcactccagcctgggtgacagagcgaaactccgtctcaaaaaaaaaaaaattaacttggcgtggtggtggccgcctgtaatcccagctactcaggaggctgaggcaggagaatcactagaagctgcgaggcagaggttgcagtgagctgagattgtgccagtgccctcctgggcaacaagagtgaaactctgtctccaacaacataatataaattacgggttcctttgttcgctgatggaattttgttcagtcccccaatatatttactgattaacgtgggttt

SEQ ID NO: 579968 - DNA, 833 bp, Homo sapiens
  misc_feature (743)..(743): n is a, c, g, or t
gggggcaccgcgagtgccgaaccttcggctggacaccaagatgcctggcgaacagcaggcagaggaagaggaggaggaagagatgcaggaggagatggtgctgctggtgaagggtgaggaggatgagggtgaggagaagtatgaggtggtgaaactcaagatccccatggacaacaaggagagacacgatctcgctttgtcacccaggctggagtgcagtggcacgtgattgtagctcactgcagccttgaactcttgggctcaagtgatcctccttcctcggcctaccaagttgttgggactacaagtgcaccccacacacctggctaatttttcactttttgtagagacgaggtctaactgtgttgcccaggctggtgtccaactcctggcctcaagtaatcctccttccttggcctcccgaagtgctaagattacaggtgtgagtcactgcacctggcctcatactgggaatttgatctcacttagcctacctggcctttctcgggacactggggcagaggaggatcttaatgagctggattcagctcctcttaccaagatttttcctcgggcatccaaggccccttctcctgggcttggagacatcaacagtgcttgtatggagaatttctttttcagaagtcagtgaactcagcatgaggaaagcctcaggctgtccaaagtcactgaaagagggtggcaggaaaaacgggccagaaaaatgtagatcttgatgagancagtctctccaagtggtgatgtttgaattaacaatgattcaaaatcaaaaaaaaataacaaaacataaataattataaaaaaaaagaata

SEQ ID NO: 579969 - DNA, 196 bp, Homo sapiens
tcagtgatggacaggaagcactggggaaatcaccctctttgagacctcacttttagtcttcctaaatgggaattaataatatctgcatctgtgtgatgccttcagcattaataggaggcactgttgtgtgttacacagtcctcactagggtgcggagcagtggcaaagtgttgcgcttgcctatgggcgtgcactg

SEQ ID NO: 579970 - DNA, 413 bp, Homo sapiens
agagcctgctctagtaattagggtcggatccagaaagctttacggcccattttctgaaagtgtgcttcctgcataaagcatttaatattgatttgtgttgcggtaaatgacattctcaaaacattttgctaattctacaattaaatctgaaatcctattattcggaattcctttgtttctggagaaaggtatacatactcacttgacctatataacatggtattaaagtttggtaattaagtctaaattccctgttgtacaagtatcttgattatctcagaaggggacatcttctaaaaatggcacgtgactagatgcaaattttaggtaagcagagttcggaacaggcagccctttttttttctctcccttatgtatctgttggtagcatggtagtaatgttgaatcattta

SEQ ID NO: 579971 - DNA, 1519 bp, Homo sapiens
  misc_feature (1519)..(1519): n is a, c, g, or t
ggatgacgatgacggagaacgctaggtgggcctggtggtggagtacgcgttgggtacgtgagaagcgtcgaggactattagggatgcaggatgatggtgatggtgtactgtgccagggggcgtaccctggtatgtgttaatgccgatggtccggagacttcaaggttgggcctattatgaagcataacagctgggcccatgaggaggtaggtagcacaggtagtggcaatggttgacccgggagacatcgtggtcgaggtgagaacttcgacgtctttaaacccagctaacaggataatcccatttcgtgaacagacgtcgtagttgctcttggtatcaccctatgcagttgggcaacgaagtacaagactcgtggagtgcactgagtggagataggcgctcgcttggtgacatcagtcctcgtgaggttcccgcgttgtacagcattactcgcactgcatactctacttcattgcactgctaacgactggagaggagtctacatgatcttattgttccaatacgttgcacccttaacttaatagaaatagcggtagctagttaattatgtattgcaggccttggggtgtatccacgattgtacaaaggttcgacctttaaaatagtgccctactatagccaccgaagcgaacatgtttaccaaaagggaattcggtttggaggaagaccaggttttcccatattggggcaaggaaaagggtaatttcatctacttaagagggtccatgggtgctacttcacttacattgctagttatgtggggacacctccttgggaatagacgagcgtgtaaggggtcaattacctgcggctatggcctattacccttcacggttggcacaaggttaaaccaaaataggggaaaagcttgataataacacccttcaaaaatataattagccagattgccgggaaatttgggagttgtacagctcttcatacattgtggaaaggcacctcgcctggtacggaagatactgtggggagcgatacccattgcgtggacttgtggggcaagagagacttggcggttcttttggtggaaagccgaagttgcatcgaaaaaatggcactcgagtccattggagaggacccaccttaacacggttaaactacagggggggtgtcccaacaaattttttggggccagttccccattgtgcatttataggaggggtccccaaggatggtgttggcgcttcaagggagacataagcttgcagtctaagaggcctcaaaatccacccgggcatggggtttaggggacagggacacgctcacaaatcggaggttacctttgcgactacccactagagttgggggaggttggacacacagggtgccgccacagacattagcgaggcgacatgtgtgttgcccacactttgtaacgggagagagaagagggctaatcagatatgaggacacttttcacaattaaaaggcacaatgggggcttgggcagagtagactgtctgagacacgggcggtcatatgn

SEQ ID NO: 579972 - DNA, 727 bp, Homo sapiens
  misc_feature (108)..(108): n is a, c, g, or t
  misc_feature (113)..(113): n is a, c, g, or t
  misc_feature (115)..(116): n is a, c, g, or t
  misc_feature (118)..(118): n is a, c, g, or t
  misc_feature (124)..(124): n is a, c, g, or t
  misc_feature (128)..(128): n is a, c, g, or t
  misc_feature (132)..(133): n is a, c, g, or t
  misc_feature (147)..(147): n is a, c, g, or t
gaaaacctcttccttctttcccactgtgtgctttacgaagtgaaagtgaagattcgcagagacacggtctgatacacctctatagtatgactatcatcatttaaattnttttntnntntaaggngagnagannacagaaatgtgtgnctattccagatgattaaatttcttgggtctagacatgttctgagctcatagttaactcaggtggccagccctttgcactgacacagacctgcagtttaattccccataaaatatggattcgattgcagcagtgacacttcgttagcacctacgctgacgctctccagctatctcccatcgtcgagatctacggtacctcatgacagagatatctagcttacggaagaagtaatctcagttcttgcaactgtcttgctgtccatcgaactattgcagcgtcccttttaattacaattctgggattaacgcattgggggctccaattttccagcatctggtaaccgaaatccatgctgcactcctaaccattctccgaatcagtccggggaaggctttatcccccagatttgagcctgtgccagtccgtggaggagcacgagctgaactgggccttccatatgcacttttccctgtgacagtgtgctccatttacggagtccaatgttggactttccttgcaccctaagcattgctgtcctagatgagccggcaggcgttgcccgtgaagtgcaagctaaaa

SEQ ID NO: 579973 - DNA, 119 bp, Homo sapiens
ccccgtgtcttatgttggtttgtccaacattggcttcaccatcagaaagtaatagcactcggctaactccataactgctcacaatatgggagcaatttgctgagcacccgactaaccag

SEQ ID NO: 579974 - DNA, 395 bp, Homo sapiens
tgaggacccttctctatgctcactggaagcgcattgtttaggggcgatctgctgcctcaaagctgtggatgaccaggctgtatgaatgtggattactgcagatctgaaagacatcacgggtggaggacataacgagctaagcgacagtttctttgaatttgctgcagttcaacatcaatgttccttccagtgtctatgccaagtattacttttggatctttcggttctctgggcagaacgccgaaaaaacctgaagcttttcgctatggtagcccccgtgaagcaggggaggagggcctcaccaatgctatgagtgactatcctcgaagggcaagatagttgttgaaacccttacgcaacggcacagcatagtgagggtacgaatcattgggttt

SEQ ID NO: 579975 - DNA, 690 bp, Homo sapiens
gataattagcatattcataatctcaaacatttatcatttccttgtgttgggggcattccatatcctctcttctagctatttgaaactatatatatgcatacatatatatatatttttttcttttctctgaaatagcctgggcaacaagagtaaatctccgtctcaccaaaaaaaacaaaaaataaataaataaaataaaataaaataaaatggctattatcaaaaagacagaaaataacagatggtgatgagaatgtaaattagtacagccactatggataacagtttggaggttcctcaaaaaactacaaatagaactaccatatgatccagcaatcccattgctaggtacatattcaaaagacaggaaatcagtgtatcaaaaagatctctgcacttccatgtttattgcagcactattcacaatagccaagatacagatcaacctacatgttcatgaatggatgaatgaataaggaaaatgtagtgtatatacattagtgtacataatgggatattattcagccatagaaaaggaactaaatcctatgatttgcaacaatatagatggaactggaagatattatattaagtgaaataagcctagtacagaaatacaaatatcacatattctcactcatatatgggagctaaaagagttagtcatatggaggtattgaatagaaggag

SEQ ID NO: 579976 - DNA, 1453 bp, Homo sapiens
ggggaattatttttacagctgacacattgttaccccgtggctcttttgggggaaacctataaaacacggtttgtaaacaaagacgcggtgggtgtaccccctgcgtgattttccccgggatttttgtggcaccacccggcttgttcgggccacgcaccagacctcttggggggactcccacgtgccccccgctcactatcctttgtcctgttggaagaaggaggtgaatttaataatattcggttgaaaaatgcttctttgtgttgtgataatagtcatgctcctcactgatgggccagacttttgttggccgaccctcgtgtaccatcagtgggggcaccttgatatttacccccctgtgggggtgttttcgggggagcaaccaaacgccttttgtctctttggagtggtccaaagcccacaatcataaataccccacggggggggattatacaaccaccaggaggttatttctatgggtgtgcacacacagctgcgggtgccatgtacaaattcacgccacaacatgtggggtattatctttcccactcatccatccactctgcggggggcactctatttttttgggtgcttcttttccagggggggcccctcccaacaagggggggagagactcacttgttgctctttatagagaatcacaccctgtttggcacactactttctgtctcgcgtgcgttcttgagaacacacattttgtgtgtgagagagagtgtgcgcccaccacagccccacactttctcgggactatatatgtgttttaagagagaaaaaaggtgggaatctcccacagagagtgttataaacaccacacatttttccgcgccacaccaagagtgggagagaactttatccccccctggataactccaccccacacaccgggggttctcggagtctctctcgggcacacgggagtttctcacggccacaagatgtttataggtggctcttgtgtggggtgcgcaaaaaacacacacagagatgttggagagagaaaatctcccttccacattgttgagaagaaacccgaggtctccccgagacactctcttgttgcgcacacaaaagtgttatctctctgtggggggcgcttgtgggagataaattttctacccagagaaaggccgagaccacataaaggagagggcctgttgttggagagaaaaattgggggcgcgtgccgaggggagaaaataggtgcctggtgtgtaagctccacagcacgcccttggaaattgcttttgttcgaaggttttgggaaattgtttttgcctgctgccttctgaaagagataatcacagaaaggggctatagagaggggagatgatataggggttgttggtttcctcacaccccctcactttgggggggggggaaaggatccccccgggttttctcaattaaacgggtttttttttccagacccgga

SEQ ID NO: 579977 - DNA, 1581 bp, Homo sapiens
  misc_feature (105)..(105): n is a, c, g, or t
  misc_feature (115)..(115): n is a, c, g, or t
  misc_feature (289)..(289): n is a, c, g, or t
  misc_feature (304)..(304): n is a, c, g, or t
  misc_feature (347)..(347): n is a, c, g, or t
  misc_feature (446)..(446): n is a, c, g, or t
  misc_feature (701)..(701): n is a, c, g, or t
gatcaccggcgtaatcaaatccttcacgcgattggacgaaagtagctttccgtcagactctggagtgagaatcatagcgtggagcccaggctcagatacttgatngtcgcgatcnagactttcaactgcttagcagggtgcactaatccattagccgaagcacacatattagtcatttacacagcgaacaagtaccgtggctcgtggatggaccgcacaagatgtagtcggagttgaagcagtacgcgcctttcatggtgatgtattggtgaaatgcaatgcggcgttnctgatgcgtactcantgtctaaagtccggacatgtagcgtcgtactgagcgcagcganacacaatgtctaagaggcgcccgttaccgtgccagagagtgagaatgcctaagagcgcatggagtgcagtagagctgaattatcgcactcctaagctgntcatgcggagacccaatcaactgtgtgatggtccctcgcaatcggggagttgcttgagtcgactgaatgaaccatgacccatggacacatgcgaatgtatgcggcctgaattgtgggagctagacgtcgtatgtgcagaaatcacttggggcggctgttatcgacatggtctgctgcttggcacgatctacggattctaatggtgcgttcgcaggaggagccgagagtggatcataccgtaatgttgaatcgtcnagggcgcttgcggtgggcatagctcgattggcattcggcaattttcgcagagatccccagaacgttctccatccccgagaagtagaagggaaacacgagattgccatgcacgccttggcctgatgttccttggtagctcttgggaagacgtgggggatcgaaagagggccgacatgaggccagggcctggttgcctttcctggcgttagatatttcaatgggtcgtagattagcacgtcctggttaagcttgtggtaaagctggacaaggtttctagccttggagcagtttccacaggggactttcgcggggggaacccgtggtttaccgttgcacattacctgccttagtgactcgcaaagtggctcgcaacgggaaagaaagtagggggtcgccccataggagttgccagccctgttttggtgaggacctcagggactatgggcgtcccacgcacatctcgggagtccctcgttgggacacccacgtgtgcaagtatcgggatcaaacatggagcttcgtcagatacacagcatgagaaagggtaaaacaaagagtgggcaccattgcggtttggaacagcccttgtgtgggcggtgcaaagggttgactgtggggcacaagcagtcgtggtgggacagccttgtgctaaactaaagcgttgtgtgcccaaaaagacaacaaccagcagcggtactgttaggtgggtagacaaagacaaaatcgagacgtgtagaaggtccagcagttaacaggatgaggaccataggtgctaatgccgcacgcagcatacaggtgagaacgaaccagtgacaaccatgagacgagagacagctaagcacactcctttgtctcaagttcgtcttacgcagctgagcgg

SEQ ID NO: 579978 - DNA, 135 bp, Homo sapiens
cccccccctttggggggggggggggggggcccccccccctcctccccctttttggggggggggggggggggctccccccggggggggggttttttccccccccggccccccggggggccctttttttttttttta

SEQ ID NO: 579979 - DNA, 455 bp, Homo sapiens
  misc_feature (185)..(185): n is a, c, g, or t
  misc_feature (187)..(187): n is a, c, g, or t
  misc_feature (189)..(189): n is a, c, g, or t
  misc_feature (202)..(202): n is a, c, g, or t
  misc_feature (207)..(207): n is a, c, g, or t
  misc_feature (248)..(248): n is a, c, g, or t
  misc_feature (376)..(376): n is a, c, g, or t
  misc_feature (429)..(429): n is a, c, g, or t
taatattaaaaattggtatctctcttccgctcacgaagccatcaagtgccatccatacataaacctacatctttttcctccatctccaattatttttatattttcccatactatcttctttgaactcttatggtggatgtattaatacaacagtatagtgaataaaaataacattgagagcaagnanancccctaaggtccntccanggtgtggttgagccgcatttaagaatggggtgggctttaangacattacaggggtataagaaaatgttattaaaaaggtttaagtgaagggtggctgtgagaatggagggtagacctgatttaagttaaataatattttcctaggttgcgattgtaaatacctggcacnttggaaatacttaaaacaacaccagagatgtcagattatacatgcccctatanctggggaaagtattttattaaatagg

SEQ ID NO: 579980 - DNA, 4663 bp, Homo sapiens
cgggacgctcctcacttcctagatgggatggcggccgggaagaggcgctcctcatttcctagatgggatggcggccgggcagagatgctcctcactttcctccagccgcgagaccccctccccttccgcctcgcggcgcttcctcgctccgcggtcttctctctccacccccgacaccgcggggctccccccgcccgcccacggcgggccccggctgcccgatccccctcgcttcccgcgctctccagcggggccccagccccggccccctctctccctcccttctctctaattccccttccggacgctgccatcatgttgaagcctcagccgctacaacagccctcccagccccagcagccgccccccacgcaacaggccgtggcccgtcggccccccgggggcaccagccctcccaacggcggcctcccggggccgctggccacctctgcggctcctcccgggcctccagcggccgcctccccctgcctggggcctgtggccgctgccgggagcgggctccgccggggagccgaaggcatcttggcgccgcagccgccgccgccgcagcaacaccaggagaggccgggggcagccgccatcggcagcgccaggggacagagcacaggaaagggacccccacagtcacctgtgtttgaaggcgtctacaacaattccagaatgctgcatttccttacagctgttgtgggctccacttgtgatgtaaaggtgaaaaatggtaccacttatgagggtatcttcaagacgctaagctcaaagtttgaactagccgtggatgctgtgcaccggaaagcatctgagccagcaggtggccctcgtcgggaggacattgtggacaccatggtgtttaagccaagtgatgtcatgcttgttcacttccgaaatgttgacttcaactatgctactaaagacaagttcaccgattcagccattgccatgaactcgaaagtgaatggggaacacaaagagaaggtgcttcagcgctgggaggggggtgacagcaacagcgacgactatgacctcgagtctgacatgtccaatggatgggaccccaatgaaatgttcaagttcaatgaggagaactacggtgtgaagactacctatgatagcagtctttcttcttatacggtgcccttagaaaaggacaactcagaagagtttcgtcagcgagagctgcgtgcggcccagttggctcgagagattgaatcaagcccccagtaccgcctacggatcgccatggagaacgacgatgggcgcactgaagaggagaagcacagtgcagtccagcggcagggctcagggcgggagagccccagcttggcatccagggaggggaagtatatccctctgcctcaacgagtccgggaaggtccccggggaggagttcgatgcagcagctctcggggcggtcggcctggccttagctctttgccacctcgtggccctcaccatctggacaacagcagccctggcccaggttctgaggcccgtggtatcaatggaggcccttcccgcatgtccccaaaggcacagcggcctctgagaggtgccaagactctgtcttcgcccagtaataggccttctggagaaacttctgttccacctcctcctgcagtgggccggatgtatcccccgcgttctcccaagtctgctgcccctgccccaatctcagcttcctgtccagagcctcccatcggctcggcagtgccaacctcttcagcctccatccctgtgacctcatcagtctcagatcctggagtgggctccatttctccagcttctccaaagatctccctggcccccacagatgtaaaagaactctctaccaaggaacctgggagaactctggagccccaggagctggctcggatagctgggaaagtccctggtcttcagaatgaacagaaacgattccaactggaagaactgagaaagtttggggcccagtttaagcttcagcccagtagctcccctgagaacagcctggatccttttcctccccggatcttaaaggaggagcccaaaggaaaggagaaagaggttgatggtctgttgacttcagagcccatggggtctcccgtctcctccaagacagagtccgtatcggataaggaggacaaaccacccctggcaccatcaggaggcactgaggggccagagcagcccccaccaccttgtccaagccaaactggcagccccccggtgggcctcatcaagggagaagacaaagatgagggccctgttgctgaacaagtaaagaaatcaacgttgaaccctaatgctaaggagttcaatcctacaaagcctctgctgtctgtgaataaatccaccagtaccccaacttctccggggccccggactcattcaactccctccatcccggtgctgacagcaggccagagtgggctatacagcccccagtacatctcctacatacctcagatccacatgggaccagctgtgcaggcacctcagatgtatccatatcctgtatccaattcagtgcctgggcagcagggcaagtaccggggagcaaaaggctcccttcctccgcagcgctcggaccaacaccagccagcctcagccccgccgatgatgcaggccgccgcggctgctggcccgcctctggtggctgccacgccctattcttcctacatcccctacaaccctcagcagttcccaggccagccagccatgatgcagcccatggcccactacccctcacagccggtgtttgcccccatgcttcagagcaacccacgcatgctgacgtcgggcagccatccccaggccatcgtgtcatcctctacccctcagtacccttctgcagagcagcctaccccccaagccctttatgccactgttcaccagtcctacccacaccatgccacacagctccatgcccaccagccgcagccggctaccacgcctactggaagccagccgcagtcccagcatgcggcccccagtcctgtccaggtgcctgccatggggggtgctgagtggtcctggtgcaggaatgggtggccagaagaagggatagagctaggggtcatttctgagtggcgaggactgggggccagcgagttgctggcctgtgtggcactcaaccttcccctccccagcagcatcaggcggggcaggccccacacttgggcagtggacagccacagcagaatctgtaccacccaggggccctgacaggcacgccgccctctctgccaccgggaccttctgcccagtcccctcagagcagcttcccccagccagccgctgtgtatgccatccaccaccagcagctgccccacggcttcaccaacatggcccatgttacccaggcccatgtccaaactggaatcacagcagccccgccccctcaccctggggctccccacccgccccaggtgatgctgctgcacccaccccagagtcatggggggcccccccaaggcgcggtgccccagagtggggtgcctgcactctcagcttccacaccctcaccctacccctacatcggacacccccaaggtgagcagcctggccaggcgcctggatttccaggaggagccgatgacaggattcgtgagttctcattagctgggggaatttggcatggaagagctgaggggctgcaggtggggcaggatgcacgggttctgggtggggagtgaggggtcttggaggcagggctgtcccacagggcgcccgccgacctgcacctgtctgtgaagtatgtagggtgggcagaagccacagtcgccgccgccaggggcttgctcctggctctgtcctttgcttccctccgtcctcgctcagttgtgatccagcagcccccctccccactgcctccccagctctcagtgaccccgactgtctcctgacttagccgaggtaaggtcagtgcagcagacagggccagactggggtgtggggggctgagctgggcacatgagtgagggctctggcttactgggaaacagcgattgacctgtgcttctgacagcccccgagacaccttgaggaggccgctccttcccagacacacccccacgcccccactggacggcattggaggaagggacagctgcttgggttctaatgctcctgctctcttctctttcccctccaaccagttcaatctcatccctcccagcagctccccttccaccccccggggaactgaagattgtcctggccgcgacctgagacctccatgagtggagggaagagtgatctatgtctcttcccccagcagctcggaccactcccagccccccatccccccgttccccaggggagctggggaattcctgccaagcaccttgaatgggaggggcctcacagagggcagggccagggtccagcaggggtggggggttcctgctctgcccctgcccgtccccacccagtcttgccctcccatcctctcatctattcccccgctggagacggaagatcttttattttctattatttataacttcagacttgggccccctgttctttctttcccattaacttgagtgacctgtgtgagagacagacagatgccccacgaggatggctggacaaggacttttactttttattacataaaaatattaaaaaataaataaaaaaaataaaattttaaactaactta

SEQ ID NO: 579981 - DNA, 4514 bp, Homo sapiens
cgggacgctcctcacttcctagatgggatggcggccgggaagaggcgctcctcatttcctagatgggatggcggccgggcagagatgctcctcactttcctccagccgcgagaccccctccccttccgcctcgcggcgcttcctcgctccgcggtcttctctctccacccccgacaccgcggggctccccccgcccgcccacggcgggccccggctgcccgatccccctcgcttcccgcgctctccagcggggccccagccccggccccctctctccctcccttctctctaattccccttccggacgctgccatcatgttgaagcctcagccgctacaacagccctcccagccccagcagccgccccccacgcaacaggccgtggcccgtcggccccccgggggcaccagccctcccaacggcggcctcccggggccgctggccacctctgcggctcctcccgggcctccagcggccgcctccccctgcctggggcctgtggccgctgccgggagcgggctccgccggggagccgaaggcatcttggcgccgcagccgccgccgccgcagcaacaccaggagaggccgggggcagccgccatcggcagcgccaggggacagagcacaggaaagggacccccacagtcacctgtgtttgaaggcgtctacaacaattccagaatgctgcatttccttacagctgttgtgggctccacttgtgatgtaaaggtgaaaaatggtaccacttatgagggtatcttcaagacgctaagctcaaagtttgaactagccgtggatgctgtgcaccggaaagcatctgagccagcaggtggccctcgtcgggaggacattgtggacaccatggtgtttaagccaagtgatgtcatgcttgttcacttccgaaatgttgacttcaactatgctactaaagacaagttcaccgattcagccattgccatgaactcgaaagtgaatggggaacacaaagagaaggtgcttcagcgctgggaggggggtgacagcaacagcgacgactatgacctcgagtctgacatgtccaatggatgggaccccaatgaaatgttcaagttcaatgaggagaactacggtgtgaagactacctatgatagcagtctttcttcttatacggtgcccttagaaaaggacaactcagaagagtttcgtcagcgagagctgcgtgcggcccagttggctcgagagattgaatcaagcccccagtaccgcctacggatcgccatggagaacgacgatgggcgcactgaagaggagaagcacagtgcagtccagcggcagggctcagggcgggagagccccagcttggcatccagggaggggaagtatatccctctgcctcaacgagtccgggaaggtccccggggaggagttcgatgcagcagctctcggggcggtcggcctggccttagctctttgccacctcgtggccctcaccatctggacaacagcagccctggcccaggttctgaggcccgtggtatcaatggaggcccttcccgcatgtccccaaaggcacagcggcctctgagaggtgccaagactctgtcttcgcccagtaataggccttctggagaaacttctgttccacctcctcctgcagtgggccggatgtatcccccgcgttctcccaagtctgctgcccctgccccaatctcagcttcctgtccagagcctcccatcggctcggcagtgccaacctcttcagcctccatccctgtgacctcatcagtctcagatcctggagtgggctccatttctccagcttctccaaagatctccctggcccccacagatgtaaaagaactctctaccaaggaacctgggagaactctggagccccaggagctggctcggatagctgggaaagtccctggtcttcagaatgaacagaaacgattccaactggaagaactgagaaagtttggggcccagtttaagcttcagcccagtagctcccctgagaacagcctggatccttttcctccccggatcttaaaggaggagcccaaaggaaaggagaaagaggttgatggtctgttgacttcagagcccatggggtctcccgtctcctccaagacagagtccgtatcggataaggaggacaaaccacccctggcaccatcaggaggcactgaggggccagagcagcccccaccaccttgtccaagccaaactggcagccccccggtgggcctcatcaagggagaagacaaagatgagggccctgttgctgaacaagtaaagaaatcaacgttgaaccctaatgctaaggagttcaatcctacaaagcctctgctgtctgtgaataaatccaccagtaccccaacttctccggggccccggactcattcaactccctccatcccggtgctgacagcaggccagagtgggctatacagcccccagtacatctcctacatacctcagatccacatgggaccagctgtgcaggcacctcagatgtatccatatcctgtatccaattcagtgcctgggcagcagggcaagtaccggggagcaaaaggctcccttcctccgcagcgctcggaccaacaccagccagcctcagccccgccgatgatgcaggccgccgcggctgctggcccgcctctggtggctgccacgccctattcttcctacatcccctacaaccctcagcagttcccaggccagccagccatgatgcagcccatggcccactacccctcacagccggtgtttgcccccatgcttcagagcaacccacgcatgctgacgtcgggcagccatccccaggccatcgtgtcatcctctacccctcagtacccttctgcagagcagcctaccccccaagccctttatgccactgttcaccagtcctacccacaccatgccacacagctccatgcccaccagccgcagccggctaccacgcctactggaagccagccgcagtcccagcatgcggcccccagtcctgtccagcatcaggcggggcaggccccacacttgggcagtggacagccacagcagaatctgtaccacccaggggccctgacaggcacgccgccctctctgccaccgggaccttctgcccagtcccctcagagcagcttcccccagccagccgctgtgtatgccatccaccaccagcagctgccccacggcttcaccaacatggcccatgttacccaggcccatgtccaaactggaatcacagcagccccgccccctcaccctggggctccccacccgccccaggtgatgctgctgcacccaccccagagtcatggggggcccccccaaggcgcggtgccccagagtggggtgcctgcactctcagcttccacaccctcaccctacccctacatcggacacccccaaggtgagcagcctggccaggcgcctggatttccaggaggagccgatgacaggattcgtgagttctcattagctgggggaatttggcatggaagagctgaggggctgcaggtggggcaggatgcacgggttctgggtggggagtgaggggtcttggaggcagggctgtcccacagggcgcccgccgacctgcacctgtctgtgaagtatgtagggtgggcagaagccacagtcgccgccgccaggggcttgctcctggctctgtcctttgcttccctccgtcctcgctcagttgtgatccagcagcccccctccccactgcctccccagctctcagtgaccccgactgtctcctgacttagccgaggtaaggtcagtgcagcagacagggccagactggggtgtggggggctgagctgggcacatgagtgagggctctggcttactgggaaacagcgattgacctgtgcttctgacagcccccgagacaccttgaggaggccgctccttcccagacacacccccacgcccccactggacggcattggaggaagggacagctgcttgggttctaatgctcctgctctcttctctttcccctccaaccagttcaatctcatccctcccagcagctccccttccaccccccggggaactgaagattgtcctggccgcgacctgagacctccatgagtggagggaagagtgatctatgtctcttcccccagcagctcggaccactcccagccccccatccccccgttccccaggggagctggggaattcctgccaagcaccttgaatgggaggggcctcacagagggcagggccagggtccagcaggggtggggggttcctgctctgcccctgcccgtccccacccagtcttgccctcccatcctctcatctattcccccgctggagacggaagatcttttattttctattatttataacttcagacttgggccccctgttctttctttcccattaacttgagtgacctgtgtgagagacagacagatgccccacgaggatggctggacaaggacttttactttttattacataaaaatattaaaaaataaataaaaaaaataaaattttaaactaactta

SEQ ID NO: 579982 - DNA, 3909 bp, Homo sapiens
cgggacgctcctcacttcctagatgggatggcggccgggaagaggcgctcctcatttcctagatgggatggcggccgggcagagatgctcctcactttcctccagccgcgagaccccctccccttccgcctcgcggcgcttcctcgctccgcggtcttctctctccacccccgacaccgcggggctccccccgcccgcccacggcgggccccggctgcccgatccccctcgcttcccgcgctctccagcggggccccagccccggccccctctctccctcccttctctctaattccccttccggacgctgccatcatgttgaagcctcagccgctacaacagccctcccagccccagcagccgccccccacgcaacaggccgtggcccgtcggccccccgggggcaccagccctcccaacggcggcctcccggggccgctggccacctctgcggctcctcccgggcctccagcggccgcctccccctgcctggggcctgtggccgctgccgggagcgggctccgccggggagccgaaggcatcttggcgccgcagccgccgccgccgcagcaacaccaggagaggccgggggcagccgccatcggcagcgccaggggacagagcacaggaaagggacccccacagtcacctgtgtttgaaggcgtctacaacaattccagaatgctgcatttccttacagctgttgtgggctccacttgtgatgtaaaggtgaaaaatggtaccacttatgagggtatcttcaagacgctaagctcaaagtttgaactagccgtggatgctgtgcaccggaaagcatctgagccagcaggtggccctcgtcgggaggacattgtggacaccatggtgtttaagccaagtgatgtcatgcttgttcacttccgaaatgttgacttcaactatgctactaaagacaagttcaccgattcagccattgccatgaactcgaaagtgaatggggaacacaaagagaaggtgcttcagcgctgggaggggggtgacagcaacagcgacgactatgacctcgagtctgacatgtccaatggatgggaccccaatgaaatgttcaagttcaatgaggagaactacggtgtgaagactacctatgatagcagtctttcttcttatacggtgcccttagaaaaggacaactcagaagagtttcgtcagcgagagctgcgtgcggcccagttggctcgagagattgaatcaagcccccagtaccgcctacggatcgccatggagaacgacgatgggcgcactgaagaggagaagcacagtgcagtccagcggcagggctcagggcgggagagccccagcttggcatccagggaggggaagtatatccctctgcctcaacgagtccgggaaggtccccggggaggagttcgatgcagcagctctcggggcggtcggcctggccttagctctttgccacctcgtggccctcaccatctggacaacagcagccctggcccaggttctgaggcccgtggtatcaatggaggcccttcccgcatgtccccaaaggcacagcggcctctgagaggtgccaagactctgtcttcgcccagtaataggccttctggagaaacttctgttccacctcctcctgcagtgggccggatgtatcccccgcgttctcccaagtctgctgcccctgccccaatctcagcttcctgtccagagcctcccatcggctcggcagtgccaacctcttcagcctccatccctgtgacctcatcagtctcagatcctggagtgggctccatttctccagcttctccaaagatctccctggcccccacagatgtaaaagaactctctaccaaggaacctgggagaactctggagccccaggagctggctcggatagctgggaaagtccctggtcttcagaatgaacagaaacgattccaactggaagaactgagaaagtttggggcccagtttaagcttcagcccagtagctcccctgagaacagcctggatccttttcctccccggatcttaaaggaggagcccaaaggaaaggagaaagaggttgatggtctgttgacttcagagcccatggggtctcccgtctcctccaagacagagtccgtatcggataaggaggacaaaccacccctggcaccatcaggaggcactgaggggccagagcagcccccaccaccttgtccaagccaaactggcagccccccggtgggcctcatcaagggagaagacaaagatgagggccctgttgctgaacaagtaaagaaatcaacgttgaaccctaatgctaaggagttcaatcctacaaagcctctgctgtctgtgaataaatccaccagtaccccaacttctccggggccccggactcattcaactccctccatcccggtgctgacagcaggccagagtgggctatacagcccccagtacatctcctacatacctcagatccacatgggaccagctgtgcaggcacctcagatgtatccatatcctgtatccaattcagtgcctgggcagcagggcaagtaccggggagcaaaaggctcccttcctccgcagcgctcggaccaacaccagccagcctcagccccgccgatgatgcaggccgccgcggctgctggcccgcctctggtggctgccacgccctattcttcctacatcccctacaaccctcagcagttcccaggccagccagccatgatgcagcccatggcccactacccctcacagccggtgtttgcccccatgcttcagagcaacccacgcatgctgacgtcgggcagccatccccaggccatcgtgtcatcctctacccctcagtacccttctgcagagcagcctaccccccaagccctttatgccactgttcaccagtcctacccacaccatgccacacagctccatgcccaccagccgcagccggctaccacgcctactggaagccagccgcagtcccagcatgcggcccccagtcctgtccagcatcaggcggggcaggccccacacttgggcagtggacagccacagcagaatctgtaccacccaggggccctgacaggcacgccgccctctctgccaccgggaccttctgcccagtcccctcagagcagcttcccccagccagccgctgtgtatgccatccaccaccagcagctgccccacggcttcaccaacatggcccatgttacccaggcccatgtccaaactggaatcacagcagccccgccccctcaccctggggctccccacccgccccaggtgatgctgctgcacccaccccagagtcatggggggcccccccaaggcgcggtgccccagagtggggtgcctgcactctcagcttccacaccctcaccctacccctacatcggacacccccaagttcaatctcatccctcccagcagctccccttccaccccccggggaactgaagattgtcctggccgcgacctgagacctccatgagtggagggaagagtgatctatgtctcttcccccagcagctcggaccactcccagccccccatccccccgttccccaggggagctggggaattcctgccaagcaccttgaatgggaggggcctcacagagggcagggccagggtccagcaggggtggggggttcctgctctgcccctgcccgtccccacccagtcttgccctcccatcctctcatctattcccccgctggagacggaagatcttttattttctattatttataacttcagacttgggccccctgttctttctttcccattaacttgagtgacctgtgtgagagacagacagatgccccacgaggatggctggacaaggacttttactttttattacataaaaatattaaaaaataaataaaaaaaataaaattttaaactaactta

SEQ ID NO: 579983 - DNA, 3941 bp, Homo sapiens
cgggacgctcctcacttcctagatgggatggcggccgggaagaggcgctcctcatttcctagatgggatggcggccgggcagagatgctcctcactttcctccagccgcgagaccccctccccttccgcctcgcggcgcttcctcgctccgcggtcttctctctccacccccgacaccgcggggctccccccgcccgcccacggcgggccccggctgcccgatccccctcgcttcccgcgctctccagcggggccccagccccggccccctctctccctcccttctctctaattccccttccggacgctgccatcatgttgaagcctcagccgctacaacagccctcccagccccagcagccgccccccacgcaacaggccgtggcccgtcggccccccgggggcaccagccctcccaacggcggcctcccggggccgctggccacctctgcggctcctcccgggcctccagcggccgcctccccctgcctggggcctgtggccgctgccgggagcgggctccgccggggagccgaaggcatcttggcgccgcagccgccgccgccgcagcaacaccaggagaggccgggggcagccgccatcggcagcgccaggggacagagcacaggaaagggacccccacagtcacctgtgtttgaaggcgtctacaacaattccagaatgctgcatttccttacagctgttgtgggctccacttgtgatgtaaaggtgaaaaatggtaccacttatgagggtatcttcaagacgctaagctcaaagtttgaactagccgtggatgctgtgcaccggaaagcatctgagccagcaggtggccctcgtcgggaggacattgtggacaccatggtgtttaagccaagtgatgtcatgcttgttcacttccgaaatgttgacttcaactatgctactaaagacaagttcaccgattcagccattgccatgaactcgaaagtgaatggggaacacaaagagaaggtgcttcagcgctgggaggggggtgacagcaacagcgacgactatgacctcgagtctgacatgtccaatggatgggaccccaatgaaatgttcaagttcaatgaggagaactacggtgtgaagactacctatgatagcagtctttcttcttatacggtgcccttagaaaaggacaactcagaagagtttcgtcagcgagagctgcgtgcggcccagttggctcgagagattgaatcaagcccccagtaccgcctacggatcgccatggagaacgacgatgggcgcactgaagaggagaagcacagtgcagtccagcggcagggctcagggcgggagagccccagcttggcatccagggaggggaagtatatccctctgcctcaacgagtccgggaaggtccccggggaggagttcgatgcagcagctctcggggcggtcggcctggccttagctctttgccacctcgtggccctcaccatctggacaacagcagccctggcccaggttctgaggcccgtggtatcaatggaggcccttcccgcatgtccccaaaggcacagcggcctctgagaggtgccaagactctgtcttcgcccagtaataggccttctggagaaacttctgttccacctcctcctgcagtgggccggatgtatcccccgcgttctcccaagtctgctgcccctgccccaatctcagcttcctgtccagagcctcccatcggctcggcagtgccaacctcttcagcctccatccctgtgacctcatcagtctcagatcctggagtgggctccatttctccagcttctccaaagatctccctggcccccacagatgtaaaagaactctctaccaaggaacctgggagaactctggagccccaggagctggctcggatagctgggaaagtccctggtcttcagaatgaacagaaacgattccaactggaagaactgagaaagtttggggcccagtttaagcttcagcccagtagctcccctgagaacagcctggatccttttcctccccggatcttaaaggaggagcccaaaggaaaggagaaagaggttgatggtctgttgacttcagagcccatggggtctcccgtctcctccaagacagagtccgtatcggataaggaggacaaaccacccctggcaccatcaggaggcactgaggggccagagcagcccccaccaccttgtccaagccaaactggcagccccccggtgggcctcatcaagggagaagacaaagatgagggccctgttgctgaacaagtaaagaaatcaacgttgaaccctaatgctaaggagttcaatcctacaaagcctctgctgtctgtgaataaatccaccagtaccccaacttctccggggccccggactcattcaactccctccatcccggtgctgacagcaggccagagtgggctatacagcccccagtacatctcctacatacctcagatccacatgggaccagctgtgcaggcacctcagatgtatccatatcctgtatccaattcagtgcctgggcagcagggcaagtaccggggagcaaaaggctcccttcctccgcagcgctcggaccaacaccagccagcctcagccccgccgatgatgcaggccgccgcggctgctggcccgcctctggtggctgccacgccctattcttcctacatcccctacaaccctcagcagttcccaggccagccagccatgatgcagcccatggcccactacccctcacagccggtgtttgcccccatgcttcagagcaacccacgcatgctgacgtcgggcagccatccccaggccatcgtgtcatcctctacccctcagtacccttctgcagagcagcctaccccccaagccctttatgccactgttcaccagtcctacccacaccatgccacacagctccatgcccaccagccgcagccggctaccacgcctactggaagccagccgcagtcccagcatgcggcccccagtcctgtccagcatcaggcggggcaggccccacacttgggcagtggacagccacagcagaatctgtaccacccaggggccctgacaggcacgccgccctctctgccaccgggaccttctgcccagtcccctcagagcagcttcccccagccagccgctgtgtatgccatccaccaccagcagctgccccacggcttcaccaacatggcccatgttacccaggcccatgtccaaactggaatcacagcagccccgccccctcaccctggggctccccacccgccccaggtgatgctgctgcacccaccccagagtcatggggggcccccccaaggcgcggtgccccagagtggggtgcctgcactctcagcttccacaccctcaccctacccctacatcggacacccccaaggtgagcagcctggccaggcgcctggatttccaggaggagccgatgacaggattcgctccccttccaccccccggggaactgaagattgtcctggccgcgacctgagacctccatgagtggagggaagagtgatctatgtctcttcccccagcagctcggaccactcccagccccccatccccccgttccccaggggagctggggaattcctgccaagcaccttgaatgggaggggcctcacagagggcagggccagggtccagcaggggtggggggttcctgctctgcccctgcccgtccccacccagtcttgccctcccatcctctcatctattcccccgctggagacggaagatcttttattttctattatttataacttcagacttgggccccctgttctttctttcccattaacttgagtgacctgtgtgagagacagacagatgccccacgaggatggctggacaaggacttttactttttattacataaaaatattaaaaaataaataaaaaaaataaaattttaaactaactta

SEQ ID NO: 579984 - DNA, 1042 bp, Homo sapiens
gcttgggccgagctggaaaggcgggccacctcggtcttcgctcctttgtggagctctggcagtaactcccctccctctctgtttctctgcaggcagcgcaccgagttcccgcgaggatccatgacctgactgtgggcccctgtgagcctgcgctgcctctcgtgtgtgtcctgggtctggtgtggtgagcccagtgctcgcagtgcctggctgggctgggcctggagggctgcagtctccctcgcggtgagaggaaggcggaggagcgggaaccgcggcgtgcgctcgcgcggacgcctgcggtgggcgaagggcagttcctgggcctgggccgcgcctcacgcagggcggcggctacccagcgcagtactcagggcccaggggtggccggcggctgacctgggagaaatacaaagttagtgcggtcaggtggatgcccgaagtgagcgaggtgtgtgcctgggcctcctgacccttaagaaggcaactcccactgcaggcctgagaaaggtgcgcatcatcgacaggaccgagaggctttcaggtagacgggatttactgcgggactggatgtactgtgcggtttgcactgggcctgcacgggggcgacccctgtgagaacacgcctggaaattggcccccggggacccgcgggaagatccgctccacgaagggcgaatgcgggaaacgggtgcctagaacaagaaaatgcatatcgagggagacacaagggacaaagtgccgagaagtcgcctcaaatgatctggcggccacgtgggaaccggcaggggacctgggcaaacgaggagccaagccaaagtccccttgggagcgagcgaggatttgggaaacggacgtggggggcccaaggaccgaagttggcaacccgacccgattggcacccgaccctcgctcgaggagctcgcagaacgcgctggagaggaaccgggctgagcttaacgcaaacgagacagtcggtcacaggcacgcagcaggggcacgatcgcgcaagggtggggacagaggccgcaggagcgacacg

SEQ ID NO: 579985 - DNA, 3885 bp, Homo sapiens
cgggacgctcctcacttcctagatgggatggcggccgggaagaggcgctcctcatttcctagatgggatggcggccgggcagagatgctcctcactttcctccagccgcgagaccccctccccttccgcctcgcggcgcttcctcgctccgcggtcttctctctccacccccgacaccgcggggctccccccgcccgcccacggcgggccccggctgcccgatccccctcgcttcccgcgctctccagcggggccccagccccggccccctctctccctcccttctctctaattccccttccggacgctgccatcatgttgaagcctcagccgctacaacagccctcccagccccagcagccgccccccacgcaacaggccgtggcccgtcggccccccgggggcaccagccctcccaacggcggcctcccggggccgctggccacctctgcggctcctcccgggcctccagcggccgcctccccctgcctggggcctgtggccgctgccgggagcgggctccgccggggagccgaaggcatcttggcgccgcagccgccgccgccgcagcaacaccaggagaggccgggggcagccgccatcggcagcgccaggggacagagcacaggaaagggacccccacagtcacctgtgtttgaaggcgtctacaacaattccagaatgctgcatttccttacagctgttgtgggctccacttgtgatgtaaaggtgaaaaatggtaccacttatgagggtatcttcaagacgctaagctcaaagtttgaactagccgtggatgctgtgcaccggaaagcatctgagccagcaggtggccctcgtcgggaggacattgtggacaccatggtgtttaagccaagtgatgtcatgcttgttcacttccgaaatgttgacttcaactatgctactaaagacaagttcaccgattcagccattgccatgaactcgaaagtgaatggggaacacaaagagaaggtgcttcagcgctgggaggggggtgacagcaacagcgacgactatgacctcgagtctgacatgtccaatggatgggaccccaatgaaatgttcaagttcaatgaggagaactacggtgtgaagactacctatgatagcagtctttcttcttatacggtgcccttagaaaaggacaactcagaagagtttcgtcagcgagagctgcgtgcggcccagttggctcgagagattgaatcaagcccccagtaccgcctacggatcgccatggagaacgacgatgggcgcactgaagaggagaagcacagtgcagtccagcggcagggctcagggcgggagagccccagcttggcatccagggaggggaagtatatccctctgcctcaacgagtccgggaaggtccccggggaggagttcgatgcagcagctctcggggcggtcggcctggccttagctctttgccacctcgtggccctcaccatctggacaacagcagccctggcccaggttctgaggcccgtggtatcaatggaggcccttcccgcatgtccccaaaggcacagcggcctctgagaggtgccaagactctgtcttcgcccagtaataggccttctggagaaacttctgttccacctcctcctgcagtgggccggatgtatcccccgcgttctcccaagtctgctgcccctgccccaatctcagcttcctgtccagagcctcccatcggctcggcagtgccaacctcttcagcctccatccctgtgacctcatcagtctcagatcctggagtgggctccatttctccagcttctccaaagatctccctggcccccacagatgtaaaagaactctctaccaaggaacctgggagaactctggagccccaggagctggctcggatagctgggaaagtccctggtcttcagaatgaacagaaacgattccaactggaagaactgagaaagtttggggcccagtttaagcttcagcccagtagctcccctgagaacagcctggatccttttcctccccggatcttaaaggaggagcccaaaggaaaggagaaagaggttgatggtctgttgacttcagagcccatggggtctcccgtctcctccaagacagagtccgtatcggataaggaggacaaaccacccctggcaccatcaggaggcactgaggggccagagcagcccccaccaccttgtccaagccaaactggcagccccccggtgggcctcatcaagggagaagacaaagatgagggccctgttgctgaacaagtaaagaaatcaacgttgaaccctaatgctaaggagttcaatcctacaaagcctctgctgtctgtgaataaatccaccagtaccccaacttctccggggccccggactcattcaactccctccatcccggtgctgacagcaggccagagtgggctatacagcccccagtacatctcctacatacctcagatccacatgggaccagctgtgcaggcacctcagatgtatccatatcctgtatccaattcagtgcctgggcagcagggcaagtaccggggagcaaaaggctcccttcctccgcagcgctcggaccaacaccagccagcctcagccccgccgatgatgcaggccgccgcggctgctggcccgcctctggtggctgccacgccctattcttcctacatcccctacaaccctcagcagttcccaggccagccagccatgatgcagcccatggcccactacccctcacagccggtgtttgcccccatgcttcagagcaacccacgcatgctgacgtcgggcagccatccccaggccatcgtgtcatcctctacccctcagtacccttctgcagagcagcctaccccccaagccctttatgccactgttcaccagtcctacccacaccatgccacacagctccatgcccaccagccgcagccggctaccacgcctactggaagccagccgcagtcccagcatgcggcccccagtcctgtccagcatcaggcggggcaggccccacacttgggcagtggacagccacagcagaatctgtaccacccaggggccctgacaggcacgccgccctctctgccaccgggaccttctgcccagtcccctcagagcagcttcccccagccagccgctgtgtatgccatccaccaccagcagctgccccacggcttcaccaacatggcccatgttacccaggcccatgtccaaactggaatcacagcagccccgccccctcaccctggggctccccacccgccccaggtgatgctgctgcacccaccccagagtcatggggggcccccccaaggcgcggtgccccagagtggggtgcctgcactctcagcttccacaccctcaccctacccctacatcggacacccccagctccccttccaccccccggggaactgaagattgtcctggccgcgacctgagacctccatgagtggagggaagagtgatctatgtctcttcccccagcagctcggaccactcccagccccccatccccccgttccccaggggagctggggaattcctgccaagcaccttgaatgggaggggcctcacagagggcagggccagggtccagcaggggtggggggttcctgctctgcccctgcccgtccccacccagtcttgccctcccatcctctcatctattcccccgctggagacggaagatcttttattttctattatttataacttcagacttgggccccctgttctttctttcccattaacttgagtgacctgtgtgagagacagacagatgccccacgaggatggctggacaaggacttttactttttattacataaaaatattaaaaaataaataaaaaaaataaaattttaaactaactta

SEQ ID NO: 579986 - DNA, 249 bp, Homo sapiens
  misc_feature (53)..(53): n is a, c, g, or t
  misc_feature (70)..(70): n is a, c, g, or t
  misc_feature (77)..(77): n is a, c, g, or t
  misc_feature (80)..(81): n is a, c, g, or t
  misc_feature (84)..(84): n is a, c, g, or t
  misc_feature (109)..(109): n is a, c, g, or t
agaggacccggaatgtgtggtgttatggaggagcactttctcataaatttagntctgatatctgaaactnttttaantanntanttgaaaatgaagttaggaaggctanatataattatgtccagtagaatattcttttcctaaaattagtggaaccggccatctgaaagcatgttgagaagaaacaccctcgtgatcaaccacaacaaaacaaaataaccacttacggtggcataacaccacacaatt

SEQ ID NO: 579987 - DNA, 800 bp, Homo sapiens
gtatatcgctcacacctcatatcctccctactatgcctagaaagggataatactatcgcctgtgcattatagctactctcataaccctcaagacccacgccctcttagccaatattgtgccgatggccagactagtcttggcgcctgcgaagagagcggtgggccgtagcccgtatatagtctcaatctccaacacgtatggcctagactacgtacataacctaaactactccaatgctaaaactaatcgtcccaacaattatattactaccactgaatgactttccaaaaaacacataattgtgaatcaacacaacacccacagcctaattattagcatcatccctctgctatgtttataaacaaatcaacgaacaacctatttagctgttccccaactttttcctccgacccctaaaaacaccccttctaatactaactactgatcctaaccctcacaatcaatggcaagccacgcaattatccagtgaaccacttattcacgaaaaaactctaactctctatataatctcccctacgattctcctttaattatacattcacagcaacagacagtaatcatatgaatatctcttcgaaaaccaacattttcccacacgtggtatacatcaaccggggagggaaccagccagaagctggagaaggcccatattctattacacctagaagggccttccctaatcattgagaattaattcaaaacctggccataaattaaatcacacggccagaataaagcgggcaaataatagacgcacaggttaggaaacataggactg

SEQ ID NO: 579988 - DNA, 1677 bp, Homo sapiens
cgggacgctcctcacttcctagatgggatggcggccgggaagaggcgctcctcatttcctagatgggatggcggccgggcagagatgctcctcactttcctccagccgcgagaccccctccccttccgcctcgcggcgcttcctcgctccgcggtcttctctctccacccccgacaccgcggggctccccccgcccgcccacggcgggccccggctgcccgatccccctcgcttcccgcgctctccagcggggccccagccccggccccctctctccctcccttctctctaattccccttccggacgctgccatcatgttgaagcctcagccgctacaacagccctcccagccccagcagccgccccccacgcaacaggccgtggcccgtcggccccccgggggcaccagccctcccaacggcggcctcccggggccgctggccacctctgcggctcctcccgggcctccagcggccgcctccccctgcctggggcctgtggccgctgccgggagcgggctccgccggggagccgaaggcatcttggcgccgcagccgccgccgccgcagcaacaccaggagaggccgggggcagccgccatcggcagcgccaggggacagagcacaggaaagggacccccacagtcacctgtgtttgaaggcgtctacaacaattccagaatgctgcatttccttacagctgttgtgggctccacttgtgatgtaaaggtgaaaaatggtaccacttatgagggtatcttcaagacgctaagctcaaagtttgaactagccgtggatgctgtgcaccggaaagcatctgagccagcaggtggccctcgtcgggaggacattgtggacaccatggtgtttaagccaagtgatgtcatgcttgttcacttccgaaatgttgacttcaactatgctactaaagacaagttcaccgattcagccattgccatgaactcgaaagtgaatggggaacacaaagagaaggtgcttcagcgctgggaggggggtgacagcaacagcgacgactatgacctcgagtctgacatgtccaatggatgggaccccaatgaaatgttcaagttcaatgaggagaactacggtgtgaagactacctatgatagcagtctttcttcttatacggtgcccttagaaaaggacaactcagaagagtttcgtcagcgagagctgcgtgcggcccagttggctcgagagattgaatcaagcccccagtaccgcctacggatcgccatggagaacgacgatgggcgcactgaagaggagaagcacagtgcagtccagcggcagggctcagggcgggagagccccagcttggcatccagggaggggaagtatatccctctgcctcacagagggcagggccagggtccagcaggggtggggggttcctgctctgcccctgcccgtccccacccagtcttgccctcccatcctctcatctattcccccgctggagacggaagatcttttattttctattatttataacttcagacttgggccccctgttctttctttcccattaacttgagtgacctgtgtgagagacagacagatgccccacgaggatggctggacaaggacttttactttttattacataaaaatattaaaaaataaataaaaaaaataaaattttaaactaactta

SEQ ID NO: 579989 - DNA, 713 bp, Homo sapiens
gactgtactgcttgcggtgtttgcgtgtggcaggagccagtgactggcgagcggggtgtgtcgcgactgcggagctggcagtgcagaaggtggtggtccaccccctggtgctgctcagtgtggtggatcatttcacccgaatcggcaaggttggaaaccagaagcgtgtagtaggtgtgctatatggggtcatgggaaaagaaagtacttgatgtatcgaacagatttatgcagtaccttttgatgacgcatgaaaagcacgattctgtatggttaatagaccatgatatattgtggaaaacatgtatggaatgtttaccgaaagtcaatgccagggaaagaatagttggctggtaccacacaggccctaaactacaccaagaatgacattgccatcaacgcacctcatgaaaagatactgtacctaattccgtcttggtcatcattgatgtgacagccgaacgtgcctagggcttgcctacagaagcgtacatttccagatggaagacagtccatgtgatgatgagaaatccaagccatccgaaaaccattatggaaccacggtgacacaggtgcaacttgggagccagcggaagctgcacagcaagattggacgaaagacacacgttgtatacggacgaatatcaaacgcaaagacaggtgaggcactctgctctagcgtgctaagaaacaggtacatgttagcagggctg

SEQ ID NO: 579990 - DNA, 489 bp, Homo sapiens
gcctgaactggtgattggacttgttgaaatgtttttccttttttcctcttttgtcccctggcactgggatggtggtggtctgtgggtgctgtctcagggtgcccttagaaaaggacaactcagaagagtttcgtcagcgagagctgcgtgcggcccagttggctcgagagattgaatcaagcccccagtaccgcctacggatcgccatggagaacgacgatgggcgcactgaagaggagaagcacagtgcagtccagcggcagggctcagggcgggagagccccagcttggcatccaggtgactgttgcaaacagccaggactacttggggcttctgggaatatcctggggcctgggcccagagttgatgagtgctgtggtttaagccttgtgaccatgtaaaatgtcatacacaggtttaggaggttgaggtaaagcgagattatgtaatttgcctaaagtaacaaagctggagcttgtagatctaaa

SEQ ID NO: 579991 - DNA, 4126 bp, Homo sapiens
cgggacgctcctcacttcctagatgggatggcggccgggaagaggcgctcctcatttcctagatgggatggcggccgggcagagatgctcctcactttcctccagccgcgagaccccctccccttccgcctcgcggcgcttcctcgctccgcggtcttctctctccacccccgacaccgcggggctccccccgcccgcccacggcgggccccggctgcccgatccccctcgcttcccgcgctctccagcggggccccagccccggccccctctctccctcccttctctctaattccccttccggacgctgccatcatgttgaagcctcagccgctacaacagccctcccagccccagcagccgccccccacgcaacaggccgtggcccgtcggccccccgggggcaccagccctcccaacggcggcctcccggggccgctggccacctctgcggctcctcccgggcctccagcggccgcctccccctgcctggggcctgtggccgctgccgggagcgggctccgccggggagccgaaggcatcttggcgccgcagccgccgccgccgcagcaacaccaggagaggccgggggcagccgccatcggcagcgccaggggacagagcacaggaaagggacccccacagtcacctgtgtttgaaggcgtctacaacaattccagaatgctgcatttccttacagctgttgtgggctccacttgtgatgtaaaggtgaaaaatggtaccacttatgagggtatcttcaagacgctaagctcaaagtttgaactagccgtggatgctgtgcaccggaaagcatctgagccagcaggtggccctcgtcgggaggacattgtggacaccatggtgtttaagccaagtgatgtcatgcttgttcacttccgaaatgttgacttcaactatgctactaaagacaagttcaccgattcagccattgccatgaactcgaaagtgaatggggaacacaaagagaaggtgcttcagcgctgggaggggggtgacagcaacagcgacgactatgacctcgagtctgacatgtccaatggatgggaccccaatgaaatgttcaagttcaatgaggagaactacggtgtgaagactacctatgatagcagtctttcttcttatacggtgcccttagaaaaggacaactcagaagagtttcgtcagcgagagctgcgtgcggcccagttggctcgagagattgaatcaagcccccagtaccgcctacggatcgccatggagaacgacgatgggcgcactgaagaggagaagcacagtgcagtccagcggcagggctcagggcgggagagccccagcttggcatccagggaggggaagtatatccctctgcctcaacgagtccgggaaggtccccggggaggagttcgatgcagcagctctcggggcggtcggcctggccttagctctttgccacctcgtggccctcaccatctggacaacagcagccctggcccaggttctgaggcccgtggtatcaatggaggcccttcccgcatgtccccaaaggcacagcggcctctgagaggtgccaagactctgtcttcgcccagtaataggccttctggagaaacttctgttccacctcctcctgcagtgggccggatgtatcccccgcgttctcccaagtctgctgcccctgccccaatctcagcttcctgtccagagcctcccatcggctcggcagtgccaacctcttcagcctccatccctgtgacctcatcagtctcagatcctggagtgggctccatttctccagcttctccaaagatctccctggcccccacagatgtaaaagaactctctaccaaggaacctgggagaactctggagccccaggagctggctcggatagctgggaaagtccctggtcttcagaatgaacagaaacgattccaactggaagaactgagaaagtttggggcccagtttaagcttcagcccagtagctcccctgagaacagcctggatccttttcctccccggatcttaaaggaggagcccaaaggaaaggagaaagaggttgatggtctgttgacttcagagcccatggggtctcccgtctcctccaagacagagtccgtatcggataaggaggacaaaccacccctggcaccatcaggaggcactgaggggccagagcagcccccaccaccttgtccaagccaaactggcagccccccggtgggcctcatcaagggagaagacaaagatgagggccctgttgctgaacaagtaaagaaatcaacgttgaaccctaatgctaaggagttcaatcctacaaagcctctgctgtctgtgaataaatccaccagtaccccaacttctccggggccccggactcattcaactccctccatcccggtgctgacagcaggccagagtgggctatacagcccccagtacatctcctacatacctcagatccacatgggaccagctgtgcaggcacctcagatgtatccatatcctgtatccaattcagtgcctgggcagcagggcaagtaccggggagcaaaaggctcccttcctccgcagcgctcggaccaacaccagccagcctcagccccgccgatgatgcaggccgccgcggctgctggcccgcctctggtggctgccacgccctattcttcctacatcccctacaaccctcagcagttcccaggccagccagccatgatgcagcccatggcccactacccctcacagccggtgtttgcccccatgcttcagagcaacccacgcatgctgacgtcgggcagccatccccaggccatcgtgtcatcctctacccctcagtacccttctgcagagcagcctaccccccaagccctttatgccactgttcaccagtcctacccacaccatgccacacagctccatgcccaccagccgcagccggctaccacgcctactggaagccagccgcagtcccagcatgcggcccccagtcctgtccagcatcaggcggggcaggccccacacttgggcagtggacagccacagcagaatctgtaccacccaggggccctgacaggcacgccgccctctctgccaccgggaccttctgcccagtcccctcagagcagcttcccccagccagccgctgtgtatgccatccaccaccagcagctgccccacggcttcaccaacatggcccatgttacccaggcccatgtccaaactggaatcacagcagccccgccccctcaccctggggctccccacccgccccaggtgatgctgctgcacccaccccagagtcatggggggcccccccaaggcgcggtgccccagagtggggtgcctgcactctcagcttccacaccctcaccctacccctacatcggacacccccaaggtgagcagcctggccaggcgcctggatttccaggaggagccgatgacaggattcaagtatgtagggtgggcagaagccacagtcgccgccgccaggggcttgctcctggctctgtcctttgcttccctccgtcctcgctcagttgtgatccagcagcccccctccccactgcctccccagctctcagtgaccccgactgtctcctgacttagccgagttcaatctcatccctcccagcagctccccttccaccccccggggaactgaagattgtcctggccgcgacctgagacctccatgagtggagggaagagtgatctatgtctcttcccccagcagctcggaccactcccagccccccatccccccgttccccaggggagctggggaattcctgccaagcaccttgaatgggaggggcctcacagagggcagggccagggtccagcaggggtggggggttcctgctctgcccctgcccgtccccacccagtcttgccctcccatcctctcatctattcccccgctggagacggaagatcttttattttctattatttataacttcagacttgggccccctgttctttctttcccattaacttgagtgacctgtgtgagagacagacagatgccccacgaggatggctggacaaggacttttactttttattacataaaaatattaaaaaataaataaaaaaaataaaattttaaactaactta

SEQ ID NO: 579992 - DNA, 4272 bp, Homo sapiens
cgggacgctcctcacttcctagatgggatggcggccgggaagaggcgctcctcatttcctagatgggatggcggccgggcagagatgctcctcactttcctccagccgcgagaccccctccccttccgcctcgcggcgcttcctcgctccgcggtcttctctctccacccccgacaccgcggggctccccccgcccgcccacggcgggccccggctgcccgatccccctcgcttcccgcgctctccagcggggccccagccccggccccctctctccctcccttctctctaattccccttccggacgctgccatcatgttgaagcctcagccgctacaacagccctcccagccccagcagccgccccccacgcaacaggccgtggcccgtcggccccccgggggcaccagccctcccaacggcggcctcccggggccgctggccacctctgcggctcctcccgggcctccagcggccgcctccccctgcctggggcctgtggccgctgccgggagcgggctccgccggggagccgaaggcatcttggcgccgcagccgccgccgccgcagcaacaccaggagaggccgggggcagccgccatcggcagcgccaggggacagagcacaggaaagggacccccacagtcacctgtgtttgaaggcgtctacaacaattccagaatgctgcatttccttacagctgttgtgggctccacttgtgatgtaaaggtgaaaaatggtaccacttatgagggtatcttcaagacgctaagctcaaagtttgaactagccgtggatgctgtgcaccggaaagcatctgagccagcaggtggccctcgtcgggaggacattgtggacaccatggtgtttaagccaagtgatgtcatgcttgttcacttccgaaatgttgacttcaactatgctactaaagacaagttcaccgattcagccattgccatgaactcgaaagtgaatggggaacacaaagagaaggtgcttcagcgctgggaggggggtgacagcaacagcgacgactatgacctcgagtctgacatgtccaatggatgggaccccaatgaaatgttcaagttcaatgaggagaactacggtgtgaagactacctatgatagcagtctttcttcttatacggtgcccttagaaaaggacaactcagaagagtttcgtcagcgagagctgcgtgcggcccagttggctcgagagattgaatcaagcccccagtaccgcctacggatcgccatggagaacgacgatgggcgcactgaagaggagaagcacagtgcagtccagcggcagggctcagggcgggagagccccagcttggcatccagggaggggaagtatatccctctgcctcaacgagtccgggaaggtccccggggaggagttcgatgcagcagctctcggggcggtcggcctggccttagctctttgccacctcgtggccctcaccatctggacaacagcagccctggcccaggttctgaggcccgtggtatcaatggaggcccttcccgcatgtccccaaaggcacagcggcctctgagaggtgccaagactctgtcttcgcccagtaataggccttctggagaaacttctgttccacctcctcctgcagtgggccggatgtatcccccgcgttctcccaagtctgctgcccctgccccaatctcagcttcctgtccagagcctcccatcggctcggcagtgccaacctcttcagcctccatccctgtgacctcatcagtctcagatcctggagtgggctccatttctccagcttctccaaagatctccctggcccccacagatgtaaaagaactctctaccaaggaacctgggagaactctggagccccaggagctggctcggatagctgggaaagtccctggtcttcagaatgaacagaaacgattccaactggaagaactgagaaagtttggggcccagtttaagcttcagcccagtagctcccctgagaacagcctggatccttttcctccccggatcttaaaggaggagcccaaaggaaaggagaaagaggttgatggtctgttgacttcagagcccatggggtctcccgtctcctccaagacagagtccgtatcggataaggaggacaaaccacccctggcaccatcaggaggcactgaggggccagagcagcccccaccaccttgtccaagccaaactggcagccccccggtgggcctcatcaagggagaagacaaagatgagggccctgttgctgaacaagtaaagaaatcaacgttgaaccctaatgctaaggagttcaatcctacaaagcctctgctgtctgtgaataaatccaccagtaccccaacttctccggggccccggactcattcaactccctccatcccggtgctgacagcaggccagagtgggctatacagcccccagtacatctcctacatacctcagatccacatgggaccagctgtgcaggcacctcagatgtatccatatcctgtatccaattcagtgcctgggcagcagggcaagtaccggggagcaaaaggctcccttcctccgcagcgctcggaccaacaccagccagcctcagccccgccgatgatgcaggccgccgcggctgctggcccgcctctggtggctgccacgccctattcttcctacatcccctacaaccctcagcagttcccaggccagccagccatgatgcagcccatggcccactacccctcacagccggtgtttgcccccatgcttcagagcaacccacgcatgctgacgtcgggcagccatccccaggccatcgtgtcatcctctacccctcagtacccttctgcagagcagcctaccccccaagccctttatgccactgttcaccagtcctacccacaccatgccacacagctccatgcccaccagccgcagccggctaccacgcctactggaagccagccgcagtcccagcatgcggcccccagtcctgtccagcatcaggcggggcaggccccacacttgggcagtggacagccacagcagaatctgtaccacccaggggccctgacaggcacgccgccctctctgccaccgggaccttctgcccagtcccctcagagcagcttcccccagccagccgctgtgtatgccatccaccaccagcagctgccccacggcttcaccaacatggcccatgttacccaggcccatgtccaaactggaatcacagcagccccgccccctcaccctggggctccccacccgccccaggtgatgctgctgcacccaccccagagtcatggggggcccccccaaggcgcggtgccccagagtggggtgcctgcactctcagcttccacaccctcaccctacccctacatcggacacccccaaggtgagcagcctggccaggcgcctggatttccaggaggagccgatgacaggattcgtgagttctcattagctgggggaatttggcatggaagagctgaggggctgcaggtggggcaggatgcacgggttctgggtggggagtgaggggtcttggaggcagggctgtcccacagggcgcccgccgacctgcacctgtctgtgaagtatgtagggtgggcagaagccacagtcgccgccgccaggggcttgctcctggctctgtcctttgcttccctccgtcctcgctcagttgtgatccagcagcccccctccccactgcctccccagctctcagtgaccccgactgtctcctgacttagccgagttcaatctcatccctcccagcagctccccttccaccccccggggaactgaagattgtcctggccgcgacctgagacctccatgagtggagggaagagtgatctatgtctcttcccccagcagctcggaccactcccagccccccatccccccgttccccaggggagctggggaattcctgccaagcaccttgaatgggaggggcctcacagagggcagggccagggtccagcaggggtggggggttcctgctctgcccctgcccgtccccacccagtcttgccctcccatcctctcatctattcccccgctggagacggaagatcttttattttctattatttataacttcagacttgggccccctgttctttctttcccattaacttgagtgacctgtgtgagagacagacagatgccccacgaggatggctggacaaggacttttactttttattacataaaaatattaaaaaataaataaaaaaaataaaattttaaactaactta

SEQ ID NO: 579993 - DNA, 145 bp, Homo sapiens
agctaatatgtggtgttacgttatcgtggtgtacgtccttcaaggcactgacacggctccttcctcctttgtagtcctgcccccacccccacagacctcaagatggttctccttcacctcttttcccctctcacggtaacaccaa

SEQ ID NO: 579994 - DNA, 413 bp, Homo sapiens
ccgacgtggtcagtgtcttcactggggtgtgacgggtagttacaacgggcaagtttggtgatacccatcagactgcacacatacattttattgtatgtaaatcctgcctaaaatgtgattgtgtatacaatttcattctaaataaaataaaccaacatgggcaaaagaactttacaaattttaaagtactgtggaaagacaaggccactgtcattagtccagccacacagtgtgagtgtagaattctgtggagtttctcagatatgggggcttatcctagaccccaggatgagtctaatgaagacttgccagtacggggcttaaccttaaggtgcaacgtatgagaaccggactcaggagccagaggacaagagtctagagataacgcatgaagagaccggaggacaaaaagg

SEQ ID NO: 579995 - DNA, 4472 bp, Homo sapiens
cgggacgctcctcacttcctagatgggatggcggccgggaagaggcgctcctcatttcctagatgggatggcggccgggcagagatgctcctcactttcctccagccgcgagaccccctccccttccgcctcgcggcgcttcctcgctccgcggtcttctctctccacccccgacaccgcggggctccccccgcccgcccacggcgggccccggctgcccgatccccctcgcttcccgcgctctccagcggggccccagccccggccccctctctccctcccttctctctaattccccttccggacgctgccatcatgttgaagcctcagccgctacaacagccctcccagccccagcagccgccccccacgcaacaggccgtggcccgtcggccccccgggggcaccagccctcccaacggcggcctcccggggccgctggccacctctgcggctcctcccgggcctccagcggccgcctccccctgcctggggcctgtggccgctgccgggagcgggctccgccggggagccgaaggcatcttggcgccgcagccgccgccgccgcagcaacaccaggagaggccgggggcagccgccatcggcagcgccaggggacagagcacaggaaagggacccccacagtcacctgtgtttgaaggcgtctacaacaattccagaatgctgcatttccttacagctgttgtgggctccacttgtgatgtaaaggtgaaaaatggtaccacttatgagggtatcttcaagacgctaagctcaaagtttgaactagccgtggatgctgtgcaccggaaagcatctgagccagcaggtggccctcgtcgggaggacattgtggacaccatggtgtttaagccaagtgatgtcatgcttgttcacttccgaaatgttgacttcaactatgctactaaagacaagttcaccgattcagccattgccatgaactcgaaagtgaatggggaacacaaagagaaggtgcttcagcgctgggaggggggtgacagcaacagcgacgactatgacctcgagtctgacatgtccaatggatgggaccccaatgaaatgttcaagttcaatgaggagaactacggtgtgaagactacctatgatagcagtctttcttcttatacggtgcccttagaaaaggacaactcagaagagtttcgtcagcgagagctgcgtgcggcccagttggctcgagagattgaatcaagcccccagtaccgcctacggatcgccatggagaacgacgatgggcgcactgaagaggagaagcacagtgcagtccagcggcagggctcagggcgggagagccccagcttggcatccagggaggggaagtatatccctctgcctcaacgagtccgggaaggtccccggggaggagttcgatgcagcagctctcggggcggtcggcctggccttagctctttgccacctcgtggccctcaccatctggacaacagcagccctggcccaggttctgaggcccgtggtatcaatggaggcccttcccgcatgtccccaaaggcacagcggcctctgagaggtgccaagactctgtcttcgcccagtaataggccttctggagaaacttctgttccacctcctcctgcagtgggccggatgtatcccccgcgttctcccaagtctgctgcccctgccccaatctcagcttcctgtccagagcctcccatcggctcggcagtgccaacctcttcagcctccatccctgtgacctcatcagtctcagatcctggagtgggctccatttctccagcttctccaaagatctccctggcccccacagatgtaaaagaactctctaccaaggaacctgggagaactctggagccccaggagctggctcggatagctgggaaagtccctggtcttcagaatgaacagaaacgattccaactggaagaactgagaaagtttggggcccagtttaagcttcagcccagtagctcccctgagaacagcctggatccttttcctccccggatcttaaaggaggagcccaaaggaaaggagaaagaggttgatggtctgttgacttcagagcccatggggtctcccgtctcctccaagacagagtccgtatcggataaggaggacaaaccacccctggcaccatcaggaggcactgaggggccagagcagcccccaccaccttgtccaagccaaactggcagccccccggtgggcctcatcaagggagaagacaaagatgagggccctgttgctgaacaagtaaagaaatcaacgttgaaccctaatgctaaggagttcaatcctacaaagcctctgctgtctgtgaataaatccaccagtaccccaacttctccggggccccggactcattcaactccctccatcccggtgctgacagcaggccagagtgggctatacagcccccagtacatctcctacatacctcagatccacatgggaccagctgtgcaggcacctcagatgtatccatatcctgtatccaattcagtgcctgggcagcagggcaagtaccggggagcaaaaggctcccttcctccgcagcgctcggaccaacaccagccagcctcagccccgccgatgatgcaggccgccgcggctgctggcccgcctctggtggctgccacgccctattcttcctacatcccctacaaccctcagcagttcccaggccagccagccatgatgcagcccatggcccactacccctcacagccggtgtttgcccccatgcttcagagcaacccacgcatgctgacgtcgggcagccatccccaggccatcgtgtcatcctctacccctcagtacccttctgcagagcagcctaccccccaagccctttatgccactgttcaccagtcctacccacaccatgccacacagctccatgcccaccagccgcagccggctaccacgcctactggaagccagccgcagtcccagcatgcggcccccagtcctgtccagcatcaggcggggcaggccccacacttgggcagtggacagccacagcagaatctgtaccacccaggggccctgacaggcacgccgccctctctgccaccgggaccttctgcccagtcccctcagagcagcttcccccagccagccgctgtgtatgccatccaccaccagcagctgccccacggcttcaccaacatggcccatgttacccaggcccatgtccaaactggaatcacagcagccccgccccctcaccctggggctccccacccgccccaggtgatgctgctgcacccaccccagagtcatggggggcccccccaaggcgcggtgccccagagtggggtgcctgcactctcagcttccacaccctcaccctacccctacatcggacacccccaaggtgagcagcctggccaggcgcctggatttccaggaggagccgatgacaggattcaagtatgtagggtgggcagaagccacagtcgccgccgccaggggcttgctcctggctctgtcctttgcttccctccgtcctcgctcagttgtgatccagcagcccccctccccactgcctccccagctctcagtgaccccgactgtctcctgacttagccgagttcaatctcatccctcccagcagctccccttccaccccccggggaactgaagattgtcctggccgcgacctgagacctccatgagtggagggaagagtgatctatgtctcttcccccagcagctcggaccactcccagccccccatccccccgttccccaggggagctggggaattcctgccaagcaccttgaatgggaggggcctcacagagggcagggccagggtccagcaggggtggggggttcctgctctgcccctgcccgtccccacccagtcttgccctcccatcctctcatctattcccccgctggagacggaagatcttttattttctattatttataacttcagacttgggccccctgttctttctttcccattaacttgagtgacctgtgtgagagacagacagatgccccacgaggatggctggacaaggacttttactttttattacataaaaatattaaaaaataaataaaaaaaataaaattttaaactaacttaaaaaaaaacaaaaacaaaaacaaaaaaaacaaaaaagaaaaaaaaagaagaagaaaaaaaaacaaagaaagaaagaagaggaggggcgcggcgcccgaccaaaaagacctccccaccggggcggcccaccactatcagcggccgcccccgcgtttttatcaaacaagggggccccccaaatagggggcggccgttattaaacaaaccacagcgcgggcgcgcggcggtataaaaacaaccgtgcctggggagcggacaacagcgcagtccgcggggcccactgctggaagaggacacaccacacacgcggggagggcacacatcggggcaaaacacccaccagagt

SEQ ID NO: 579996 - DNA, 407 bp, Homo sapiens
  misc_feature (12)..(12): n is a, c, g, or t
  misc_feature (26)..(26): n is a, c, g, or t
  misc_feature (65)..(65): n is a, c, g, or t
  misc_feature (302)..(302): n is a, c, g, or t
  misc_feature (344)..(344): n is a, c, g, or t
aatttgggtccncattcaccaaatgnccatgaagcccatcctacaaatcctgggctgcttacacnaccaattaatatggtttccaatttgtgccctgaccaaatctcatgttgaactgtaatccccaatgttggggtaggggtctggtggaaggttattggatcatgggggcagacattccccttgctgttctcatgatggtgaatgagttctcatgagatgtggttgtttaaaagtatgtaacacctctcctcctctctctgtttctcctgctctagccatgtaaaacgtgcctcctcccnctttgccttctgccatgattgtaagtttcctgaggcctcccnaccatgcttcctgtacagcctgtggaactgtaagctgattaaacctcttttctttataaatta

SEQ ID NO: 579997 - DNA, 197 bp, Homo sapiens
acctagacgtaacacaggttcggtgacttaaacaatagaaagttattttctcacagtcctggaggctagaagtccaagatcgaggttccagcaggatggattggtttattctaagacttctctccttggcctgtagatgaccatcttcttccggtttcttcacatgatcgttcttctgtgctgtgttacgtctaggt

SEQ ID NO: 579998 - DNA, 427 bp, Homo sapiens
ctgtaaaggagtccaggctagagccacagagactgttgtggaggtgagttcggctgtagttagagtgattggacccttcctattggtctgtcttgggccaactggtgggtgatctctgctgcatccaacatgggagcagagactggcagcaggaggggggaacatggtgacaagtggtgctcacttttcccattcctcatagcatagtttgcaaaagctagagagtggcatccagcgggcctcacgctagagcccagtcaagcagtgcagtttaagccgcgtaccgcactccagcaggcccttgaaccaggcagcgaagccgcgatcacatgttaaacttggcatttaagactgtgccaatcggccgattagcctacaggtcctagcttaaattcctgtcaataaatggaaatgggtttggttttaa

SEQ ID NO: 579999 - DNA, 234 bp, Homo sapiens
aaagtgtctcatcacacagatgccatgacgtcgccttgcgtaggtaatccttcttgggcagctgagccacttgtctctcatttggtcgaaacagcctgccacaggtatcaccactggctcatatagcttctgcttccagagacactccatcgccttgtcgatttatggaatgtctgggctcagacttcatgctcgtggcccagtgctaactgtatcttcagcttttttcaattc

SEQ ID NO: 580000 - DNA, 127 bp, Homo sapiens
atccccttctgttaccttgtcatttgccattcctctcacagctatatcaggttctccttggcagctgtatactggagtctggatatatgctctctaaagaccttaaataaaattttgtacaaagacg

SEQ ID NO: 580001 - DNA, 304 bp, Homo sapiens
tgactctcgaggatacacaacccgcaaccccctttggaatgggggttttaggatctacagtcaaacaaggtaggtcagggaatttctttatggctagtttttacacagaaaggcagagggaaagttaaagtcctatttttaggttttatggctggctttggagagaagggttctggtttctaggaccagccaagggaaggagggcttctagtttctctgaggcctctgggaaggatgggactgagagacaggagggcaggagaaggtcacagagagaagttcgcttccaaggccactgctgaga

SEQ ID NO: 580002 - DNA, 344 bp, Homo sapiens
  misc_feature (51)..(51): n is a, c, g, or t
  misc_feature (58)..(58): n is a, c, g, or t
  misc_feature (279)..(279): n is a, c, g, or t
  misc_feature (284)..(284): n is a, c, g, or t
agctgggattacaggcacatgccagcacaccaggctaatttttgtattttnagtaganacagggttttcccatgttgcccaggctggtgtgaactcctgagctcaagtgatctgcctgccttggctcccaaagtgctgggattacaggtgtaagcgtccacgccttgcctacatttttttaacaactaaaaataattcacaatatgcccagtgtttttgtttctcctaaaagttttactgtggttttctgttacaaattcatggctaaaatcatgttgntcttnagaactggaaagaagttactgactttaaaccattaaatgtatctacttcgtgtaatacag

SEQ ID NO: 580003 - DNA, 535 bp, Homo sapiens
  misc_feature (112)..(112): n is a, c, g, or t
  misc_feature (121)..(121): n is a, c, g, or t
  misc_feature (178)..(178): n is a, c, g, or t
agctctacacaggcagctggtgctgttctgccacacgtcacattttaaaagtcactgtattcacaggtaaaaatagaagttgctctgagaaattcttcctccattacaaatnaagtcacangtcttccgtatgtccactctagagtgctatcttccaatctaaaacagaggaactgtnttcaaacatcattagtttagcggtctccactaacaaagacatacggataaagtaacatgtaagtcagattaagaatctcaactttttaagaaaaaccaaatgactaaaggcatatttttattctatactttttgtcctataggtactctaggtccttgtgtaattattgaggacaaaacgtcagttaaaggtgagagggaaaactaggttgcagactagcagctgttttgcatctcacaagaacaaaggccttaacaaaccgtatactttatgcaaacaaagtgatgcctcactgacttaggagacaagtcacatgccatcagtgtgtcagaaaatttctttcttcactgatagtta

SEQ ID NO: 580004 - DNA, 169 bp, Homo sapiens
  misc_feature (2)..(2): n is a, c, g, or t
  misc_feature (16)..(16): n is a, c, g, or t
  misc_feature (27)..(27): n is a, c, g, or t
  misc_feature (44)..(44): n is a, c, g, or t
  misc_feature (97)..(97): n is a, c, g, or t
  misc_feature (99)..(99): n is a, c, g, or t
  misc_feature (111)..(111): n is a, c, g, or t
  misc_feature (117)..(117): n is a, c, g, or t
  misc_feature (134)..(134): n is a, c, g, or t
  misc_feature (141)..(141): n is a, c, g, or t
  misc_feature (143)..(143): n is a, c, g, or t
  misc_feature (167)..(167): n is a, c, g, or t
  misc_feature (169)..(169): n is a, c, g, or t
anccctggtgttgagngaacgtccttntgtccatcgtgggtaanagccttggggagggtgcagagctctgcagagccatgggccaggtggggctgcntnagtcctgtcccnttgggnactgaggagaggggccnattcacntntctcctagaatgctgtgtaaatanan

SEQ ID NO: 580005 - DNA, 400 bp, Homo sapiens
tctgtctgtgtagaacctcctactgtctgcgacggtctgctgtctctactgctacatggtcacctgcatctaggtcttctttatgccattgttgggcattggcctccgatggcatgcgattcgatggcatcatggtcagagtgacccatttcctaatggttcctactacctgataagtagctggagtgggcgacagagacaagtcatctatcaatagggtcattgccaaggagggaaagactgggcttggagagctgtgtgctggttcctgggaacaggcatccttggcttgagatcacaaatgggacagccccatcatgacgatacacgatcacattaacataactcagtgctctgggaagtcctgccattaagaaccccagttaacccaaaatatctt

SEQ ID NO: 580006 - DNA, 883 bp, Homo sapiens
gctggacctcttaatgatattgtgatagggaaatacaaatcgttgaggtcatagaatattcttcttcctctcaggagaagacggaagctggagtggacatggttcataaaagccagaagacgcaagatcccgtgttggactccggggagggtgactcatggtcctcctgtccatgtcttgtagtcactggagtctcactcccagagggtgtgaacaaatagcccgaaccctgatttctgcacgctctatctatggcactgcacggttgtagtaacgcttccttgttacaatgccagcagccatctatgatatttatgtggacccagaataactgagaaagagttgattttgtatcctcgcgattagatcccgagaagggtcaagagatatgcggcgaacgggccaatcggtgggccttaggtggagcaagggtgcatgtaaataccagattctcgctaggggcgtccatatcacccacgtgacaggacgtggcgtggtatgtcacgacttcaaccaacaagaaagtcaatcgcaacatcgagattaccctcatcaggacttcctcatgcttggactacgatcaagtggtaatgctacggtctcctttagcgattcatgtggctggggcgtagtccatgactgggaaataatatgaaggctttgcactcaagtttgaatcttcactgcgtaaatagttgatccccaaacgcatgggattcttgatgggggacccctttcagaaaatggggtgcaacggagggcgcccgggactctgggagcgagggaatgcatggtcttataacaatgacccgtgattaccccctggttggcttcacaagggtccaaataaacgcggatttaatctataagtggtctcgttaag

SEQ ID NO: 580007 - DNA, 574 bp, Homo sapiens
gctgcgcgcacgcggtcccggtgtgcagctggagagcgatgcggcaccgggagcccccggggggagtcctgcgcccgccccccaggagcccgcgaagatgccccggcgcagcctgcacgcggcggcgtgctcctgctggtgatcttaaatggaacaggccttccagcccgtgccccaggtgaacgggttccaagtggaacttattttggtctgggtggggggagaatagcgtccagaagtaccgtcgtgtgggggctgctgcagtccccatagactgcacaggacatctcagtatgagcgctcagcctcgagtcagctacatcgtctgcaacaagcagtttctcctgaccaacaaggccattcagtgaagctgaacctgcctcggacatgcacatccagggcctccagtctcgctacagtgccagcagtgactgatggggaacgaatgaccgagtctacaacgtcgggacgattgcgcggctgcctgtcctatctcaacttatcgagcagatgagaatcgagctcgtgcgtgttctggatgtctaacggcagagttcgccctattagtcagcga

SEQ ID NO: 580008 - DNA, 929 bp, Homo sapiens
gctcgcacgtctgttgttccgccgcgttccgccggtcgcgttctctgccggtcgcaattggaagaagagatcgccgcgctggtcatgacaatgggtccggcatgtgcaaggctggtgtgctggggacgacgctccccgagccggttccttccatcgtcgggcgccccagacaccaggcgtcttggtgggcatgggccagaaggacctcctacgtggtggacgaggaccagagcaagctgtggcattctgaccctgaagtaccccattgagcatggcatcgtcaacatgtgggacgacatggatgaagatctggcaccatagcttctacaacgagctgcgcgtggcccggaggagcaccagtgctgctagacgaggccccctgaaccccaatggcaaccagagagaagatgactcagattatcgtttgagaccttcaagaccgccggtcatgtacgtggcatccaggctcgttgctgtccctctacgcctctgggcgcagcagggcattgtcatggactctggagacggggtcacccacgacggtgcccatctacgagggtacgctctcccccacgccatctgcgtctggacctggtgggcgggactgaacgatagctcatgaaagatcctcactgagcgatgcttacatgctttcaccaccaaggccgagcgggaaatcgtgcgcgacatccacggagaagctgtggctacgtcgcccgggacttccgagcaggagatggcaaccgcgatctccttttctctggagaaggagcttagaggttggccgatggccacgtctcaccatggccacgcaccgcccgggtcaagggcgccagcctcctcctggatgacttccggtcccgaacaccttactccctcaagtggcggggtccacaccttccaatggttgtggccaccccgctttcgca

SEQ ID NO: 580009 - DNA, 548 bp, Homo sapiens
  misc_feature (140)..(140): n is a, c, g, or t
ggctctcctgtgctcgccatggtccagagtatatcttatgagaagctgaaccttccagtgccaaggccttcgtgtgtgcggagcgagtacagccccctgagtgtgttgaccattgaacccgtcggctccatcgcttacanagagtacgaagacatgatagctacgaggtgcacctgtcgttagcatgggggccacttcaacaagcctgcctggcagagcaatgctgtgggccttagagtgcctgggcagagagcttcctgtgaccagtctctccgtgctgctcagtgcacactgtgtgagcgggggaagtgtgtgtgtggatgagcacatcgagtgcagtgtccgtaggtgtaaagggcacactctctggtcgttgccataaaccaagtgaaatgtaactcatttggagagctctttctccccacgagtgtagttttcagtggacagatttgttagcataagtctcgagtagaatgtagctgtgaacatgtcagagtgctgtggttttatgtgtcggaagaataaactgttgatggcataaaaaaaaa

SEQ ID NO: 580010 - DNA, 1581 bp, Homo sapiens
  misc_feature (354)..(354): n is a, c, g, or t
  misc_feature (1093)..(1093): n is a, c, g, or t
  misc_feature (1298)..(1298): n is a, c, g, or t
gatttgattggcgtgatgtctcactagaaagttctccggcgtccctagtacatgggtccctcgagcttcctgatctcggtaagcgcaacagcaaggcagtctgtgggaaggtgactagcttcccctaaggactgatccacagtcgcgaagccggttcttagcactctaccaggcactttgccatgagggaatactcctggtctggacgagtgaacttctagcattgcgtgtcgtgagtaatgtctgaaaccatggtccagggaatgcacacatggctgagaacaaacgtatacgtgacgtgtgcgtgcgacggcgtgatgaccaatgtgctatgagaacaaccaccgcatgagntgcgtcttgtgggtgacaattgctgcgcgacgtgaacggttgcgtgaccaccatcgaggtgctgtcttggaagcctttgccatgacctgtgctccttgtgacgtgacagcatccatcatgtgtgatgtgacacgtgcttcagatcgcgtgtgtatctcctttcgaaatattgcccagatatccatcgtcagaccgtatccggcctatgtcacaccaagggttatcttgtgatagcgatactatgggggaacgcgccctaggggggcattgggcccaaccaaaggcccatgcttcggcagggaaagggcactcttttattgattcaatcgcataacaaatttcactagttcgacgctcgatgctcagacgattcaagtatgtcctccactcttgccagcattagtcggtcgcgtagccattttggctccatgccgcccactagcaaagcaaaggaccgcgagccgtgctactgcgtacgagttcgcgagggttggaactcgcttgaggtggcgacttgtcgtgggcccttcagcgaagaacttgtgtcctctggggggccctgcggccggaggaagaggcctattgttatggccgcacggtagaggattcacccctcggattgggagacccgaatgctgagtttcccgtggggactcggggattggcatttacttggacctccgggaagcggtttcccttgccgaggggggaggtagtatcgccaaaagggcgcacaagnagggcagtagctcttgaggtggggttcaagccaaaggcgatttggagccacaacgccaaggaaattcttgacgcgcggtgaaagtgagccccatgccgaagcgcggccttgccgtccaagtgtttgagggccgggttaacttgagggggcaattggggtatttcccttgaccttcggctgtttagaccctggctgtctctgagtnggtcagccggcgccttggggggcattgaaaaagggttaaagccaatcccctcccggcagcttgagtaattgtcaagcgcgcacaggatccttggctcacaggattagggacctcaggggtctgaccgttttatcccactgtggcctcgcggagcggctgagttcaatggagagtcagtggcggctcccacttggattattggacctcttaattttggggaaagaaggcattaaagccctttaggggtgggttttgggcccctcgtttggtggaggtcgaacca

SEQ ID NO: 580011 - DNA, 97 bp, Homo sapiens
gccagcaccaaccagacatctatgtacctctgtgccagcaccgacagggggaacattcagccccagcattttggtgatgggactcgactctccatcc

SEQ ID NO: 580012 - DNA, 960 bp, Homo sapiens
agcggaggttcgcgccggcggtagactgaggactgccaacagcagcggagaaacgtttctctttcctctcagtttgcgcacaccatggcggcccctgcccatgcagactactcatgcctgtgctgtgcgtgtgaagcgcaaatgtgcaaggctcatgtattgttgcctaggccaagctgctgctcgtgctgcattgctgaactgcattggctgtgtgcccctgtcatgctatgacgccctggtgctatcagtggtcactccttcatcacctggcacatatgacacgagcgcaaggtgcgatggcaggacggccatacagacctacctcaagcgaatacgggcgaacgtacgatgctatgcggcccacgcaaacaagctttaccaggaacagagtgccatccaccgacaacggccccacatcctgcgcacacgctgcaccgcgcgaccgaccgcgacctagcacttgaaactggcacggcaccgcgccattgcgcccattggagaagagcacgacgacaccgttcagggctccgcacccacttctaacatgtgggcgaattcattacaaggcacggaccgtccggaatgatgctctgcaccagcaacacccgaaagttttccacccacaggattaccgcacttgctttcggcggacacaacacacggatagggaagcaaaggcctagacaaaaatgttcgcaaccagtgtttccgcggccttcaccatagtcccgaaacttctaacgcgcggaaagccaaaatcaagtatcagacctcctgaatcaactatactcggaaccgacgctccgcttgcgcaccgcaacaacactactgtaggtgcattgcagcagcacttcctagctcaagtttctactctctccacaaaaacgcgggacatacttacactcttcgtgttcaaccgaacatacaagacggcgcgcaatcagctggccaactaca

SEQ ID NO: 580013 - DNA, 685 bp, Homo sapiens
  misc_feature (282)..(282): n is a, c, g, or t
ttttttttttcacaggtggaaggtttaattttataaatttaccataaagatggtttaaattcggcggtaatttacccagtattgccaagttaagtgccaattcccgtgtaaaattcatcggttcaaaccccaagtaacccaggaaacttccaatcaatatgtaacatccgttgggtctaagaaaccgggttaagtgagggatcggtttccagccagatcagtgtaattaataggtgggacttgatgagttttgatcaagtaattagtggtcacagaatctgnacataaaacataagagagcttctatagtctgaaattcccaaataaagttagtcaagttacttaactgggagcttgaggatgctttcttacacacaatgctgtttagagtagaccccaactgatttagcgtcatctgtagacacgtttcccccaccccacgtgtacgtgagtggacacacacaggcaccaggctaaatcagcagggatggcagaaccacctgcatggaaccaccatgaagtctccttaaagctcccataagctttcacatcttgacacccagtccagtggggccccaacctcccctgaaggagatggagtatcagaaggagggcatcgacctgaagaagcaggctgaccaaatgcagtgaccgtatgggtggggcgtggggagctcgtgccgaa

SEQ ID NO: 580014 - DNA, 315 bp, Homo sapiens
atatttagagcttcaagttaccacatttaaaagtaaagacttggcacggtggcacacacctataatcttagcactttgggaggccgaagtggatggatcatatgcagtcaggaatttgagaccagcctggccaacatggtgaaacctcatctttactaggaatacgaagattagccgggcgttgtgacgcacacccatagtcccagctaactccggaggctaggacaagagaatcacttgaacttgggagacagaggttgcagtaatctgagatcactccgctgcactccagcctgagtgagagtgagactgtgt

SEQ ID NO: 580015 - DNA, 180 bp, Homo sapiens
  misc_feature (176)..(176): n is a, c, g, or t
gcctatctctattagcgtatgtagtattgtaaaccatctgatttgcttgtttgtgtacctgcagtagtttggttttgtatgtgtgtggaaggattgaatgtgggaaattcaaggatcaatctccagagtgcaaccttctttggctgttttttccaaaattggcccatttacaactnaaga

SEQ ID NO: 580016 - DNA, 128 bp, Homo sapiens
ttatgagactcagtgtcactatgccatgcttctattatggttacatgtcttttttctttctttctttctttttaagaaagatttttttgcactttgcctgggtgtttttttttggttggagacagggt

SEQ ID NO: 580017 - DNA, 107 bp, Homo sapiens
tgagagcaatgaggaacctgaagtgagggctgaatggagaaatgatgatggggaagcaaggaccagtgacaagggttgggtgctgggtggaggctgctggcaggagc

SEQ ID NO: 580018 - DNA, 353 bp, Homo sapiens
  misc_feature (124)..(124): n is a, c, g, or t
aattacttcagaaatgttttttaatagtaaccatttaaggataaggaattccttctgaaagtagagacaaatgtttggttcacagtggcattttgcagccttcccatagattggattaatgttntcatgtgttcatgttgttaaatgtactaaatggaggaagactgctgagaatccttgtcatgattttaaacttgtagccataaaatatttactgaaatgaaatcttaattcttgttcattcctcctaagattagagggcagtttgtaaaaccattgtgccagtatatgtgtaactaagtcattgttggatttttgcctgagtcaaatgtcaccagctttccctcttcaaa

SEQ ID NO: 580019 - DNA, 391 bp, Homo sapiens
ggaataggtctactcctagtgcaggctgttttaccggtgatgttgttgtcgctcagctcttcagactcattcactgtcctgatctatatatataaagaaaaaacaggcagtattcccttttaaaatgagctatcaggaagttgctgagaaatggggtggaatacggccctgtaatggccactgaagcacgtgagagaccctctcaaaatgatgtgaaaggaccagtttcttgaagtccagtgtttccacagatggatacctgtgtgtctccataaaagtcctgtcaccaaggacgttaaaggcattttattccagcgtcttctaaagagcttagtgtatacagatcagggatccgctgctgctttccttcggaatccaatgcttccacaaa

SEQ ID NO: 580020 - DNA, 104 bp, Homo sapiens
cactacctggcttgtgacatttaaaaactaaagccagacgcatggctaactcaagcagcggcaagaccctagtcgaggagtctcatactgctgtccaacggggg

SEQ ID NO: 580021 - DNA, 253 bp, Homo sapiens
cttaaagcctgcccatcgtactcttcaccagcagccagcgatgatgtggagctttgggattgtgatgtgtcgaggtgctgagctttgtggagacaagccttatagggagagaatgagcaatcagcgaggttatgaacgagcattgaggtatgggtacctggttgcccacctcctgatgtgactgcccttgccccttcttgtttgagcctcatgcaagaactgctgggctctctcaccggtgcccgccgggcca

SEQ ID NO: 580022 - DNA, 1039 bp, Homo sapiens
gccgccatcttccagtgattcgccaaaatgactatccctgagggaaacgaggagtaaagcacccgatatatagttctctaggcctttcacataacatgtaattggttcctattgtgccacatatggtagcggaggtctatgacgtaacggtgatatctcgtacgaacgatcaacggcgaataggcgctactaagttacaacaagagagaatgcgcccactacagatgtgtgatccatgagacagataactgtgatagtagctctaacgagtagtctaagcccatgcatgtctggttgtgcattcgtatggtccacacatagcaaagtttaggtggctcaagattctttgaccgtcgatgagattatttgttgctgtatgggattgcacacttaaagcatcttcctatagacgctctacgaatagcgttcccgtgataacggtagtagagatgggatagatcgatcatgagatcgaaggataacgaacgcctaagtgacgaagatggttaacctgtggtgtcatatctgtaatatgtcggcctagtcctagacttcccactcccaggaggaatgcacaccttttcgtggaggaaacccaatggggaaaagataagtccctggaggctgcttgggaacccttaatttcccctggattggaaatttccattggggcaataaattaaggggttggttttcaacacaacacacgaaggaggactttacacacacactctctacaacggggacccccttcgttggggggccttaacgcgaaaagccatgaaccccctcgggccacacaacaatggcgtctccgaaaggggggcgatttccttcaaaattgtacgaaacgagttcgcgggggtatcaacaaacacgacagcgttaaaccttgaagaccttgttgggcacgcccgttgcggggtgctcttaacccccttggattcccgcctgttgaccccccagaagtgattaattgtggcggcgacacaacaaggagtgagggacaaactccactgcgcgggtatcaccccccatg

SEQ ID NO: 580023 - DNA, 115 bp, Homo sapiens
gctgtgtctagtggctgcctccatatgcccccacttagatcgatgcttgtccagacgtttccaaggtatatcatctgctggctcttttatattatttcaaacacacagtagcgaa

SEQ ID NO: 580024 - DNA, 223 bp, Homo sapiens
atcactgcatgtgggagtttgagaccatgcctgggcacagtggaagaaccccatccgtactaaaaatacaaaaaaagtatagccaggcatggtgacgggcacctgtagtcccagctattcaggagactgaggcaggagaatggcgtgaaaccgggaggcggagcttacagtgaaccaagatcgtgccactgcactccagcctggggacagagcaagaccccat

SEQ ID NO: 580025 - DNA, 194 bp, Homo sapiens
  misc_feature (73)..(73): n is a, c, g, or t
  misc_feature (94)..(94): n is a, c, g, or t
  misc_feature (130)..(130): n is a, c, g, or t
  misc_feature (157)..(157): n is a, c, g, or t
  misc_feature (167)..(167): n is a, c, g, or t
agctgctgcgacgagtccactacctttttcgagagtaactcccgttgtcccaaggcttcccagagcgaacctntgcggctgcaggcaccggcgngtcgagtttccggcgtccggaaggcccgagctcttntcgcggatccagtgttccgtttccagnccccaatctnagagccgagccgacagagagcagggaa

SEQ ID NO: 580026 - DNA, 625 bp, Homo sapiens
  misc_feature (7)..(7): n is a, c, g, or t
  misc_feature (33)..(33): n is a, c, g, or t
  misc_feature (71)..(71): n is a, c, g, or t
cctcaanttggtcccaccctgagtaccagtaanactatatcctattgtttgcgccccaagacttcggtatntcgccttttggtcaccaagtcttaagggcttcactttggaacccttttgggcttcacatggctcaaggcgaattcttcctgccttaataccttccgagtagctgggattacagggcaccccgaaccgcacccgggtaatttttggatttttaattagagacaggggttcacccatgttggccaggttggactcgaactcctgacctcaggggatctgcccgccttagccttccaaagtgctgggaatacagggagtgagccactgcgcctgggctaaagcccgttctttctttagaaagccttctataggaaccacggacccagtggtcttccttacctcaaaaattagagccgatgggccattctagggtgtccagccctttcagcaacaaaaattccctcatagttaattcttgcccctctattgccccatctgaaaacatctgtccttaccaaggaaactatttttcacattcgttaatttttggtatatccagccccaaaagggggcttatcttattcattgcccggaatataccacgcccggggtgaac

SEQ ID NO: 580027 - DNA, 203 bp, Homo sapiens
agatggccagcttttccccgaggtcaacgagaaagagatcgtgagatcacgtactataggtgaactttagctcctgcagctcctttgacagaaatgtggtcgtgaaaattggacttttgcttttgctccagatgggtcatactttgcttggtcacaggacatcgcacagtaaagctgttccgtggtccagtgcctcagacttc

SEQ ID NO: 580028 - DNA, 303 bp, Homo sapiens
aaacggggggaatgggagtggcggggatggaacgaagagacagccctgagagagagctggttagagcagactgaagtgatccattatcaaatcagatgctttgacttgtcttgctgcttacttggacagtggtcaatgaaagaaactattatctgacatttttggtagcagttcttaaattaattcacctttcttttgataatcttgtatgttagtctagcttaggctaatgaaagcagtgaaatgtctgctgctttaagtgccctggacaaaccttaggaagagtctgtctgatagaacttc

SEQ ID NO: 580029 - DNA, 163 bp, Homo sapiens
tgactgcagcttgctctgtggcagatcacactaagatcgatgggtgagaaggctaggatgctatgttagtgttcttagctagtcacgttggctccttccagtgatggacagaaggtgttggccactcccttctaaaacacaggcgccctcctggtgacagtga

SEQ ID NO: 580030 - DNA, 772 bp, Homo sapiens
  misc_feature (416)..(416): n is a, c, g, or t
ttaagaggcgccatttccccgggttcaccaggaccccccaggggagagaactgggggggagaaaggaaaaggaggagaaaaatcccccgtttttccgtggggtgtgcgcccatatagtggggggatagccccaaatatctcggagcgcgtgtttttcccaaacatcttgggtggtatatatgggtggacagagaaaaggaggagaggagagaaagaggatatattttccctcggggactcggacctcggatatactctcacccagtggcctcggccgcctcgggcgccccccaataggagagctttagaccaagagtataccgccgaaacatttgtgtccaaattctctctctctaaaagagaaagatgtatagtccccgcccccagatttatagttgttaaagagaaagaccccncttataattaaagagaagagttatagagaaaccttagggacccaaaagcgcaccccagattcagcggtcttgtgtacatcccacagtgtcctgccagcgcaccaaacggcggcggttattgctctgaagaagccagcgttacccagaaaaaatataaagaaagaggctgccagaattaatagcttaaacattttggcccagagaatgaaggaggcttaaggagaagccgcccaggggcaccaattgcgaagagacgccagactttcctctttgcgaggttttacttttaagtttggatcccgtccaggaataagaattttttggggtaaccaattaataagatccagactttgtga

SEQ ID NO: 580031 - DNA, 319 bp, Homo sapiens
gcccccccggggccccccccttccggggccccccgggggtggggaaatccccttctgggttttttttttgggggggggggggttaaagcccccgggccccttccccccccttttttttttaggggaaggggtttgggtttttaaaggggggtttttttcccccagcgcgcttttttttttttggtttttaaggggggggggcccgcgcgccccgtttttcccaaaggggggggcggtttttttttgggggggggggcccgtttttttaccccccccccgcccccttttttgggccctttaaccttttttttccccccca

SEQ ID NO: 580032 - DNA, 259 bp, Homo sapiens
catttattttacaagatactttatcagtgtggctcttctcttaaacatgacaaaaggaagaaaataattgtggagatggtgaagtacataaacctcaagttctgaatttcattctaaaagtctgagacttcggttctcagttgtttttcctaattaataacgaagtgaatggccactttaaaagttttctggcaattatttctctcaaaatttatgtgtgtgtgtgtttctgtgtgtgtgtgtatgtgaagggaagaga

SEQ ID NO: 580033 - DNA, 149 bp, Homo sapiens
taatgatctaacagaagtagcaggattatctggggcaatggtggacaagtagaagaacatccttcccctcagaaacttggggtgggctgggcttcaatcgtgacttcggcagtgggtgggcgggtccagaagtttaaacagtgcatgct

SEQ ID NO: 580034 - DNA, 921 bp, Homo sapiens
gcccgtaagatggcgatggctgcggtagcagcggggggtgttgcctggcccggtaccctgtggacgggggccgatagcgccttccccgggccgtgaaccggctgcgggtcgctcttggggggcagcggcgaagtcccaccacctggccctcggtcccgccctccggggcggtccatgaactcaggtgtcgcgggcgccgagacatgaaccggagcagcaggcccgggagaacgccgcgccggacggacccagaggccggaagtcccgggggtccccaaagggcacaaggacccccaaggggcctgggggccttcccggggagcccatgttggccccccggtttttggcatcctccccggggtgcttggcccctgatgtgacgtccggactcgaatgctggcacacaattttcacagtgcgacaaattttccctgttcggaatccaaggcctggtaaaccaacccgttcccaaaacttataccccgggggagagacaaaatgagtgaaggagagagactaaatatgagaggacggggggagagagagaaactacatataccaagaaagcaacacgagacaagcgcaagcagaagaagaagagggcgcgggtccccccaccaccggtaggtgtgcgggggggggtaacgaagaagaaacacaaaagccgcgacccccaagcagagaagaaggagagggcgggggggggcggggcgccgcgcaatctgatgtgttacttcagtatgaagagaagacagcaaaaagacagcaaggacgacgagaccgctcagggcggcccagcgacaagacaacgagacgagaaacagagacgccagggagggaggagagagagtgaagaaacaaccaaaccctcaacttatattaactccaatagcctagaacacgacatcagagccacgcagg

SEQ ID NO: 580035 - DNA, 1198 bp, Homo sapiens
gtggggccaatcctggcctcagggacgcaccgtgagccgcctttccgggcctcagtgcggattctcctggcgctggccctggaagcggtcggctctggagctcccgtgtgtgtgcggccctcgggtccgccaatgcgtgggctcgggggactcgcgtgagcggtgagtagagatgcggcacgtgctggtgccagagtgccttgacgtcccatgaggtcagaggagacaggggggcggagacgaggagggacgaaacaccgtattcacagcacaagcgagtgaggaagccacaacgacagtgatacgaggcacagacagctcagcacgcgacacggagatgcgtggcagataccgagacagaggagacaggcgcccaagggccactaggagatagttgccacctagctgtggtggtagcgagtgacacgcgattgggtgaaggcaacaatacgcaaggataagcattgcgcagtcagacgagagaggaagggcacctttgtggaatggggctacccagagagggtccaccatgaagagggaacaccaagggtgggattgagcagaccgtgggattgtgggcaacgcgggaacttggcagcgaaggcaccgttggttgggacgttggggccatccagcagatggacgagatacgacgagacgttggaaagagtcgcattggaggaggatagtacgagagagagccattagaggaagaagagagagggagagttcgagaaagagcggttcgaaagtttcgcatagggaactaaaggacggtagggagcgatagaaggataagcgcggaggagcagcaagaatgagatttatagtgtgtagggacataagaaagggagcaatgaattagacatattggaagggaggatgaacacaaaaggagagaagacacagaaacggcgaggacacagtagaccaggcgaccaatacagatagggcacccaacacggaccgaggcagacgcgtggtagcagacgccagtacaagtatgatcacgcgctaggagggaaacaaccatatgagggataggagagcagacagccagacgggggaggagacgacgacgagggcaaagatacacagcattaggaacagaggacgtagggctgataccataggagtgagttagacagggattaagtcgagagagaaggggcggaacagtgactgcagagacggcacg

SEQ ID NO: 580036 - DNA, 511 bp, Homo sapiens
catgcaccagggcatctcgaggcacccgggctggctgctttcagcccggagaaggtctagcgagaatggagtgtatgtagtgtgagtgtgtcttgcatggcaagtttggggcactgggcctctgactccctcccccccccagagcagggaggacccctcccccccccccctggcgagaccgtttactgttgccgacttgccctagtttttgcccccagccaagattttgaaggaatgagtggccagcgccacgggcccaggccatgtggcctgccccgcctcgatgtcacttggcgcgcggggttgggtgggggtggcccgccgcatccccgccctgagatgcttcactttccttctcgtaacccgactttggaaaattgttcgtttcatcaggctctgttcctcaatggccttttgctacgtgcctcccgagaaatttgtctttttgtataaatgaccaagtgttgaaaatgtatttcctgaaataaatgtttcccatgcaggaacccca

SEQ ID NO: 580037 - DNA, 558 bp, Homo sapiens
gcctgcattgtgaataggtaggtgatggtatatagaatgataggtttgtaggattatgatacgcatcagtttggcaggttacattcaggtatccaaggaacattcatatggttaaccacccaagtcacagcctttggagtttttctctcgtgtctcctattgctcctgattgataaccattccctggtatcattctgtcactcatatttacataacttactctcgattgccatatggtcaccttttaaaacatggtttctctttcaacgtgcgtctgcatagcatctccgttttctacaacctcttgcgttccctttctccactcttctacataggctatcacggtagctttataaagtgcaaatcttacttcactaaccaaaacttgttcgtagctctactgtcatctacttgagtccagattctttagtttgcagagttattccatgatctgaactctgctttatttcctaaattcttgttttcttcaaactcatgctttttcaagcatagcattcattattacatatggtatccaacctacctatttcacaatcg

SEQ ID NO: 580038 - DNA, 686 bp, Homo sapiens
gaataaaaggaagagctctgggtttgcttttgatccaagtgtaaattattcaaaagtttactccagatatagacctcaatatggctactgggttataggattacagaatacatgtgaatataatgcttttgaggactcctcctcttctgatcccaaggttttgactctctttatggctgtgcctccctgtcgtattggggttttcctagactatgaggcaggcattgtctcatttttcaatgtcacaaaccacggagcactcatctacaagttctctggatgtcgcttttctcgacctgcttatccgtatttcaatccttggaactggctagtccccattgaattggttttgccaacgaacttcttaattttctctatttctttacaccacatctctctgctatatatagccctttgtcgctagagactcagattctgcaactgagttcatctctactgagaccatctcttcctatctttcaccttcttttacttacgaatgtctttgtattcatttgctagggcttccactagcacagcatcatacgattgctgactttaaactagtaattgtcatggccgtactgttgggctggcaaatcccaaatctacgaattccagacagagacggaccatccactgaagtctgaaaggcaagggtctctgtaacatagactcttcatacc

SEQ ID NO: 580039 - DNA, 915 bp, Homo sapiens
gcccctttctttgcggaatcaccatggcggctgggaccctgtacacgtatcctgaaaaactgagggcctttcaaggctctcatcgctgctcagatacagcggggctcaggtccgcgtgctctccggacacactcacttccattttgggcctaaacacaagcacgcagcccacgtgaattgtctccgcaaaattttcacctgactcgtgcacaggtcccagccatgttgaggcgtgactgactggatccctgtgtggtctgagagccaacgcgcattgcctagctctgtgagcagatgaggagcttgcggggaagtacctcccagaggcagctagccccaggtggttgccaggggggtgagctgagctgattccgatatgagtgccccagtcagtgccctgggtgttgcccccataccttgggcattcaagtgtcacccacaacaaacaagccacttgtagacatggcaagaggaggaaggtgaggcgaattcttgggggcctggttgggattcttaccttgaaggacgaggacttgactggtgggcgaaccgaagtgacatggttggaccatcacagttgtgctgcccctgttgtggctctataagcaggtctagagcctcctttccggcggcatgcccaaataccaaccgctgttccgtcacctgagttagcaggccagtgcggggcggtctgggcgacggaaccggggtgaaaggatgcccggttgtccaaagtctgagagcccaccttaagggcgccagggaagagaggcacggaagaacgagacccggcggcccagggaaaagtcacgccgccgcggaaggtacgtgacacggctgcaccggcgacctcacccaacctgggggaaccacccgagcccggcgctagcagcagggcggacgcaacaagtagca

SEQ ID NO: 580040 - DNA, 248 bp, Homo sapiens
ccccgggcccccccgcccttttgtgttttccccaaaaaggggaaggcccccccccccccggggcccttttttgttttttccccccttccccccccccccgggggggggggggggggggggcccccccgggggggtttttccccccaattttttctttgggggggggggcccctttccccctttttttttccccgggttggggggggggggggggggttttttttttttttttttgttgggggggggga

SEQ ID NO: 580041 - DNA, 131 bp, Homo sapiens
tcggacatacttctggtggcacgtgcggaacttgaggatagatcagtgagctgcatgcacttacaggcatgtctgtctcctcacttagtgcatgtccactcgaccaaagccctattctgatcattactcat

SEQ ID NO: 580042 - DNA, 296 bp, Homo sapiens
  misc_feature (71)..(71): n is a, c, g, or t
gggggggggcccggggggttgggaatattccgccttttaagggggttaagggggccccccttttttggaantttggggggggggggggggcaagggggggttttttttttttttttttctttttcggcccggggggggtgttttttgggggttttggttttttccccccccccccccgggggtttttttttttttttccccccccccccccccccccccggccccccccccggggttttttttttttttttttcccccccgggggggggggggggggggggttgtaaaagggggga

SEQ ID NO: 580043 - DNA, 103 bp, Homo sapiens
  misc_feature (103)..(103): n is a, c, g, or t
agggctacccaagccgatgccagcatcaagctttcccttaattggagagctggctaaaaaagctgggaccttggctcccatattctgggcccttcaacctggn

SEQ ID NO: 580044 - DNA, 500 bp, Homo sapiens
tctagcaggatctccaaagatctttgagcatcacctgccatttcctcctcctctagcccgctggaagtcatcactgtattctatgtttctataagtatgactattttagatttcacatataagtgaggtcatgtagtacttgtcctttctttatgtggcttatttcagttagcatagtgttgtccaggtccattcataatgtcataaaaggtagaaaatctcagtcttacttggtatacttagaccacttacagttaatataatcacttatgtgttagggcatatgtctgtcattttacttttggttggtctctctgggtttggtttctctgtggtcttctctctacttttccatgggtaacttgaaaactctttagaattccatttctatttatttatagttttttagtgatttctttgcatgccttctttagtggttcctctaggcattacattatatacttaacttaaagtctacgggtgatgctcaaagatcttgg

SEQ ID NO: 580045 - DNA, 316 bp, Homo sapiens
  misc_feature (3)..(3): n is a, c, g, or t
  misc_feature (148)..(148): n is a, c, g, or t
  misc_feature (184)..(184): n is a, c, g, or t
  misc_feature (219)..(219): n is a, c, g, or t
  misc_feature (260)..(260): n is a, c, g, or t
  misc_feature (270)..(270): n is a, c, g, or t
  misc_feature (297)..(297): n is a, c, g, or t
ttnccctcacagagttttagttagaatcactttctctatttccacaaatccttcttttctttccttttattttctaaagtgaatgtccaagcaaaaaggaagcaaaaatggtcaaagatctctcttacaatatagtaataaatttatncaaacaacttggaattcaccctgtgcattgaaaatncaactccacactgcaaattatggcattttttcccnctcaaaggaattagtgaactccattggatgcattcatactnctgtttaggnaataagggaaaccgctttgtaaaagtncaacatggcctaggagtta

SEQ ID NO: 580046 - DNA, 308 bp, Homo sapiens
gactcctgcgccatcttttctgtccctggcttacctcaggctcgggcattgaactaagtacaagcagccaaggcgtcagatctagatagcagagacgtacgtctcattctacaacattgcaactactgttagagtccaccccatgaagctgtttcagatagagtatctatgactgaattctataagtatatattgtacagactaaaacaaatgtagctagctaggtaggcatgtgctgtctcagtaggacattgacagactccagcttacaccctctggcgaccttggaacctgagtgccacatgcat

SEQ ID NO: 580047 - DNA, 1013 bp, Homo sapiens
ctttttttattagggggcaggaggtgtgtttactgtgtacattcaaaccaagcagcagttccaacagattgaggcaggctttgtgcttgtacatggcggaaggccaggaagagcattcttaaaacgactaaatgagctcctgtgactggcaaatcaacaactgaagtttaatggtcaacatgtgcttccagtgtgctatggaatcttcatgcagcttagtcttcttataggcttcattttcccctatcatcaaatcaggggaacggccaggcacagtggctcatgcctgtaatcccagcactttgggagcgccagggccacgcagactgcttgagcgccagcgagttcgagcaccagctctgggcaaccatggctgcaaaccccatctccactaacaaataacacaaattagctgagcgtggtggctgggcacctgtaatcccagctactcgcggaggctgaggcaggaggattccttgaacctgggagcgccagaggttacagctcagccaagatagcaccactgcactgcagccctgggcaacagagcaagacttcatctcacaaatacctacctccatacaaatcgccaagagttccctcttcaaggcatgcgcaaggaacgtcagatattcttgtcactgaacagggtgccgggcccccgacgtgctctccaccattccctgcaccctgctccccaatcctcttaccccattcttgccgcgacaactacatccactctgcaatgctccctgggcattggccaacaggcgtacccaagctgactactacttacccaacctcgcaacttcgccacattcattaacaactagttgcatgttactccatctagccccccttacatctccacatctggcaccactcctactctcctaacatcataacaaatcttatgtcaacaccatcacttggaaacacctctacttttgccccacaaccacatccaaatccgcttataaacacgagctcaacaacatgcaccactatcgcaa

SEQ ID NO: 580048 - DNA, 878 bp, Homo sapiens
tatatactgccaacaaatatgcctgttgatagttaggcctcaccccataggtgtcctctgtctcgtaaacagacattatatatgtctgggggctgaagaaaaaaccttgcattccaaaggtccatactggttacttggtttcattgcccatcacttattggcaagtgtctcagattatagaaccatttgagtcatgcgtccctctggacggccttgcgacaggagcttgacttggtaagttgtggagaataactgctgaattctgcacgctgtttgtgagattgattctgtaagccactgcaaccactaagctcaatatgaaaactattcaaacttatttattcatcttgtgaaaagtatacaatgagaaattttgttcatactgtatttatcaagtatgactgaaaagcaatagaagtatatattcttattattatgttaaattatgattgccattattactcggcaagacatgtggagtgtatgttcttttcacagtaatatatgcctgttgtaacttcacttggttattttattgtaaatgagtacgaaattcttaatttacagagattgtatgtcactatttatttcattcaatttctttccttgtttacgtaaacattttcgaaacgattgcatgatttcttgaccagaaatcgatcttgatgctgtggaagtagtttgaggaaccatcctatgagtttcttagaatgtctaaccggttgaagcccatccaacttcaaagaaaaaaaattgaacacataactttgcaaccaggggtgacattgtgggctgctttcttattccaattttataaagtagcaaaaaggggttgcttaatgccaccgttctactgtgaaatactcgaagttacacgc

SEQ ID NO: 580049 - DNA, 209 bp, Homo sapiens
acttattaatacaatgtttaaaaaagaaatgtatgaccctgtcttaaaaaaatactaaacaaaaaaggaagaaatgtcagtattaaatcctacttgtatacgccaatatttgagtttgagtatcttcttaacaaattaaatgaagaggaaaatccttcttagttatctgcagttgcacatgatcttctgtggctgatgagaaaccgcca

SEQ ID NO: 580050 - DNA, 118 bp, Homo sapiens
ctgagccggtccgacatttttgggatatagggcataaatacatcatcatctagttcttctcattctcaataaaagtgcctttagtatacctgtgtatttttattttctgcattcacta

SEQ ID NO: 580051 - DNA, 946 bp, Homo sapiens
tctcgcatgtatcaatgatgagtactatgtatgtcctatatggtggatccgggggcagctggaaggagcatcactgacggctgtctgccaaatcaaagtgtttatgatgcctatcggaaggtactagtgagtagtcttgaccgtgtgggctgtccactccaggcacagggcaaatttggggaagatcatcagagagatcttaccctgacgatcaaagctacgaagggcttggtgggccggggaccagtccaagagtatttgctacaggtgggcagtagatggagtgaatgatctcttgtgtgctctatgaccagtccctgggcgcttgggagctgtgatcctaaagggttctgaggaggtccagaacgtgggcccagaagataaccccaggagctcgagatgaactggtggaggcagcgtgtgccctgacctgtgactggcgcagagcggatcctgaaagcggtccttcaggtttccatcgtatagagagtcagcccgcttccctgctacagcagcatctcatctctgcccgatctgcaacatgcccatgtgcttaaggccatggggctttgctgcatgaggacgaacatgcacctcgggaacggtcatctaaaccaaagaatggtaagagaagccagagggtggcagcccacaagaagccagagagactggccagtcctcctaggtgatctggaagcccggaactgtgggccgtgtcctctcgccactgtggacgagcgggaagcaagcagtgtaagtggagagctccggcccccattgttgccaataagctcgcgggtttacttgccctagttggctcgggttggcactctggctcccttaccacgggggcccgttggtcgattagttccgccaattcccagtctatcaagagaatacggggccccaaggattcctccagagtggcctgagaaagtggcacacg

SEQ ID NO: 580052 - DNA, 256 bp, Homo sapiens
tagctgtacttgcgtgtctatgaattacagtactctaggtacttcatataagtggaatcgatatagtatgggtcattttctgccggatagatttctgacatgtaagtgtttctttcgcggtgccgaggctctgttcctctcccggcatttcctccctggaagcctccaggtttctcatttggtttctgcctgcggttcttttcttttctccacacatcacactggcatgcagcatgtagtggcgtgtgggcatggg

SEQ ID NO: 580053 - DNA, 328 bp, Homo sapiens
ctgccgcttgtccttgtgtctgggctgctccaagtccttgtgctgggcaccctggacacgttctgctggtgagggacctcgggaaggtgacagtctgtgtgccttggtgtggagaccaacctgaggatgtcctgggaaatgtttccctgatgaattactacttgactggcctttaaagaacataagaattccctatgcccatccttagagcatttgtcaaatgctttctttagttcccagagtcagagaattggcaaaggttctctaattggttatattggccttgcctgtgagaaagactcacgataaaagccatgtgtgagaaagc

SEQ ID NO: 580054 - DNA, 303 bp, Homo sapiens
  misc_feature (30)..(30): n is a, c, g, or t
aggccagcccatgccagccggcttggcccnctgcaggcctcaggcaggcggggcccatggttggtcccttcggtgggaccggatttgggcctgccttttaaaaacccttagctaccttggggtttggggtgggtttttgggaaagtgcttccccaaaacttccctggctcctggcctgtgagtggtgccacaggggcaccccaatttagcccctccccgggaaggaggaaacccccgtgggcacgtgtccccttttaatcaggggacagggctctttaataaaactgctggcagggccccgga

SEQ ID NO: 580055 - DNA, 207 bp, Homo sapiens
cccgggatgtattggcttatgattgggttgattctcataataaagagagtgtatactgacatgggcaggatgataaaaagtcgagggtttgaagtattgtctttgggaaagctgtagtgccaacaaggtctaagttatgttgtacaacatgaagaaaacctcaaagttcttaatgtttaaaatgcctagaagacaatatttagtctg

SEQ ID NO: 580056 - DNA, 781 bp, Homo sapiens
ctgctggttgggtgtaagagcggcgcagtgccgggggagccaaaagtgcgttggcgccataaaaatgttagaggggaattggcgccctgcggccggcccgcgttggtgcagacctgtcttgcggagctctccacggtgccgcgtgggaaaatttgcctgtactagtgcttggaagtgcgatcctgtggagagggcgaagcaaagcgagaaatgttttctgctatctagagagcgtgtaccgccagagagactcccaaagatgtgtctcacgaggaggtttatatgaccgcgcgccgtaaaatacgcctcccccccggtgagaaaggtcatattcaatgggctggtaaaagcgtccaattggagctgtcgtcgccaaatttatgttcgttacagaacaaggttgagcccgcgagggtgaactcacttggcgctggcagttcaccatgcggggatgagatccccccacgcgcccgccccctgggacaaatttgagaggctatatatgtgatacgctgccacttgtatacttaggctttgaatcttgcgcaacgcggggaacctctggtgtaaggaggacaatttctacgaagaattggcagtcagggcaaacaggggcgctagatgagagcgagaaagttgtgcagaaatcccgcggcgaggcactggcaggagcaacaataaacgaatgcttctcgacgctacaggaagcatacccgtgcgggaacacagcacgcccgacaataaacaccagttgttcaaacgccccaacaatgaacagaaa

SEQ ID NO: 580057 - DNA, 384 bp, Homo sapiens
acttgtatggcgggacttaggtcaggagtcgagaccagcctggcaacatggtgaaaccccatctctactaaaaacacaaaaattatctggtcatggtggcgtgtgcctgtaatcccagctactctggaggctgagtcaggataatcacttgagccccggaggcagaggttgcagtgagccaagatcgtgccattacactccagtctgggtaacaagagcgagactccgttgaaaaaaaaaaggaaaaaaaattcctgcctgtaatccaggttacatgtcaggctgacacaggaggatcacttgagcctgggaggttgaggctgcagtgagccatgatggctccattgcactccaggctgtgacaaggcgagaccttgactccag

SEQ ID NO: 580058 - DNA, 558 bp, Homo sapiens
ggcgtgggccaataatctaccatttggaatggctgtatttacccaatgcctgtacccctatggtatctaaggaagtaactaacttgcttttcattttacaggctcataggcagaagggactagccttgtctaggatgagactttgaactgtggacttttgagttaacgctgaaatgagttgagactttcaggaactgtggggaaggcatgattgattttgaaatgtgaagatatgagatttcggaggggctaggggtggaatgatatggtttggctgtgtccccacccaaatctcattctgaattcccacatgttgtgggagggacccagcaggaagtaattgaatcatgggggcagatctttcccatgctgttctcatgaataagtctcacatgacctgatggttcaacaaatgggagtctccctgcacaagctgtcttctcttgtctgctcctatgcaagatgcgcctttcaccttccaccacaatcgtgacgcctccccagccatgtggaattgggagtccacataaatctctttctcttcgcagtctccagcgt

SEQ ID NO: 580059 - DNA, 132 bp, Homo sapiens
atgttcctgatgctgattgtcccttcactttaacaaagcacagaatcccaggcccactctctatttcgtgtgcctccgggctacgggagcataataaggaaatgcactctttctgcctaagttaagaacact

SEQ ID NO: 580060 - DNA, 229 bp, Homo sapiens
ctagtgacgcagctcttcccctgggactctagacaacatattgggtcacaatgaccctagttctaacctccctgtgcttatgaattcgaacagcatacccccgattccgctacgaccaactcatacacctcctatgaaaaaacttcctaccactcaccctagcattacttatatactctctctccttacccacttacactctccagcatttcccccgtcaaacccaaac

SEQ ID NO: 580061 - DNA, 105 bp, Homo sapiens
cattactcagagaaccttctactttgatacgtgttgtaattcttgagctaatacatcctgacgggcgctgacccccttctgctggtgggatgcgtcatttatcag

SEQ ID NO: 580062 - DNA, 216 bp, Homo sapiens
ctcctcctaggtccacctatgagaaggcttaggtactttcacagtggacacgtggatccaactctacagcaaactactctttaggaagagtacttgaactacacacaaaagctgctgctttctggctaatgaaagcaaggactattcagccacacagaggagggtaacagtacagcagaggctcctagttgcttacaagcttcagttagaggagtt

SEQ ID NO: 580063 - DNA, 158 bp, Homo sapiens
agcttctgagatacagacaatatgctctagattatacaaaagtcagaatactactaagatagacttgaataccaattcaactttggttttaacaatctgagtggaaaaaggccaaggatttcagtacaaatcttttgccagtttatgcaatagatgta

SEQ ID NO: 580064 - DNA, 787 bp, Homo sapiens
tctgagaagccggactacgcggcagggctcttcaaagcggacgccgggagttttgctacagttttcgccaccatgagtcgcagctataatgatgagctgcaggttctgtggagaagatcaataaaaactgttggaggatcaagagagggtttcgtgcccaaaataatgcaggttgacgggtgttttctatgtgaatgatgctctggagaaatggatgtgggaggaattagggaatgccttgtcgaggtggtggtgtggggggttcctgccaagcctatggaaaccagtttgtggcaatgtggcaagccctgctggattgtgtcatcgatctatgggggcttccttgatggtccatttcagggatatgggttgggctatgggggaacatggcagcttggggatatgaatgacccttgaaggcagtagtatccccaggttggttgtcgggttttgacactcaactgtggtgtccggtggcttaagaacccaatttagatgaacggggatgtccagcctgtgaaggagcacttgcccaaggctatgtgtgaccacatcctggtggggcggggggtcaaggggtgtcctcccactgaagtgcaaagatctggagggagcctggagatgggggggactggtcttaagagaagggtaggcctggggtgaacaaaggcgcccgggagggagcccggaggcgtgcggttgcccaataagttcggaggggaaaagagccccccgtgggcccggggcggaccttgcgacccgggggggaccccggtcgcaaagggcc

SEQ ID NO: 580065 - DNA, 164 bp, Homo sapiens
tcgctattcatcggcaccagggaccagttttgtggaagacaatttttccacagataggggatgcgggttggggggtgccgatgaatagcgaggtgccgatgaatagcgaagtgccgatgaatagcgaggtgccgatgaatagcgaccctggtgccgatgaatag

SEQ ID NO: 580066 - DNA, 469 bp, Homo sapiens
  misc_feature (65)..(65): n is a, c, g, or t
cacgaggccgggacacccccagcgccgcccaatgtgcttgcagcgcggccggcggcgcgccgtanaacgtgacgttgtgcacggacagccgtttgtgtgcgcccgtcatctcagccccggttttcgatcgggacgccgaaccgttcccggaacggccggaattcggcgtgcagcgcgtcgaggttctcgccgatatcggtcagcaattgcgtggaatagcggaattttccgtaccggtcgccggggttgtcggccaggtaggcccgcatcgccgactcggcctcggccgtgagctcgcgcccgcagaaagcgtaataacgccgcacggccccaacatgatcggcgatgaagtcggtgtagcgcaggtgcaggatgcgcggatcgtcgaccaggggattggtcatcgtgttggcgatgctggcccgggtcatctcgaggtgcttcttcgcctctgcgtgcaggtcgaccg

SEQ ID NO: 580067 - DNA, 97 bp, Homo sapiens
  misc_feature (39)..(39): n is a, c, g, or t
aaatgcaaaatgagttttatttgctagtcctttttattnttaaatatattaaaagcacatgaattatattgtcttaatgttgtttcagttaatgatc

SEQ ID NO: 580068 - DNA, 346 bp, Homo sapiens
tgaaaaagaatgacaagacgattcccatcagaccaaactggagggcccactggtggaaaaagagggagcatttcagccggctccgcatgatccatcctgtcttcagtcagtgccttcaggaagggagggaaagacttggatgcacctggcactcaatccactcggcccctcgctgctgctgcggtcctggggctggaaggaactcccactgggcacacatctacagaggagggcgcggcgcagtgaggacggttactgctggagccgacacacagcgaactacatacttttagaaagagcctctgtcacatggctagaacaacaacgacaacaaagaaaacccaca

SEQ ID NO: 580069 - DNA, 464 bp, Homo sapiens
  misc_feature (87)..(87): n is a, c, g, or t
ggtatatcccaacacccacatctctctttcatacaggattgctgcaatactatattcttccaaccagtgagtagtctcaaagtgtgntgggcgataacatcagtatgttatcgcccaacacgccttctaattttggtatttttttggtagagacagagtttcaccatgttggcccagctggtctcgaactcatgaccttgtgatccggctgcctcggcctcccaaaatgctgggactacagacatacccactacaacaaaaaaaaaggaaagaatgaaatcctgtcattggcagcaacatggatggaacgggaagtcattatgttaaatgaaataagccaagcactgaaagacaagtatcacatggtctcactggtggaggctaaaaaagtggatctcatgagaagatagactagatgggtggtacgaaggtcagggaaagcgggggtgtgggggataacatca

SEQ ID NO: 580070 - DNA, 236 bp, Homo sapiens
gcgcatctagggtacagaaataggaagtgagtaattcattagccatctggggtggatatctcaccgtactggtggaacacatagcagaacatcacagatattaagatgtctaaggtctctatttacctttaatatactaatatcgaaggaagcaaattcaaggagatcttcaggattatgaaaactttagattagtggaacagaatgattcataaagactttcaaggcctcaacac

SEQ ID NO: 580071 - DNA, 376 bp, Homo sapiens
cttagcagtatgataagataacattaatatcatgcagagaggctccagttattagaacaccacgataccgtcaagagccagaaaaagtgtccatgtaaataaaaagtcagctgagtatcttaagatgttttttctttaataaaaagttaagaggtagagttaaactaccagatatacgttagttcactcagcaaacatgtatttatcttctgacattagccagggatagaactaggcattggagatagaaagctgaataagtcatgaatggtccctgccaagaaagtgcttgtcattttagtagaagcaggcaaatgtgaaaaaaaatgaacactataaagtctgtgttcaaagagatgtcttctttacctgccat

SEQ ID NO: 580072 - DNA, 145 bp, Homo sapiens
tcgcgctggtcactctccggacagtgtgttgattgccatgctgacccggctgctgtcgtcgactggtcgagttcttccaccacagggcgcatgtgctgctggggggtggttggtctaggtgctattgacaccttctcaaactcgg

SEQ ID NO: 580073 - DNA, 329 bp, Homo sapiens
acccatacccgtaacacccactccctcttagccaatattgtagcctatgacatactagtctttgccgcctgcgaagaagcggtgggcctagccctactcagactcacactccgaaaacatgataggccaagactacgtacataacctaaaacctactccaaagctaaaactaatcgtcccaacaattatatgactaccactgtacatgactttccaaaaaacacatcattggaatcaacacatacacccacagcctaattatcagaatcatccctctactatattgcaaaccaaatcaacaacaacctaataaaagctgtagtaacagg

SEQ ID NO: 580074 - DNA, 140 bp, Homo sapiens
caggagagcatatcactgcatggagacacaggtcctgtcaaatcacagtgtggatctgcaggctgtgggacttgaagactatgggaagcaaggggactatattccacgccaggtacgaacctgggttaagcagtatcgag

SEQ ID NO: 580075 - DNA, 255 bp, Homo sapiens
acaaagaacacaaaaacaaaaccaaaaccaaaaaaactatacaaccacagactaatgtaataataccatgagtccccagtcagctccaaccccatggtgtgccaaccccattttttcccatgcatctaaatgatcaatccaggctatgaaattctttatcctatttgtagcagcttatgcaggtgcagccaaacaccaaagcttcaggaccaaattggtccaaccctttacaattgtggggatttaaattttaaa

SEQ ID NO: 580076 - DNA, 264 bp, Homo sapiens
gggactgtgactattcagagataccggataatcaggcgctccttctgttggcactggacagggccattacgccgagattgatcaatgacgacttcaccgtagctgactgccgaggacttgcgcctcggtacgtcggtgattttgtgcagcaattgcgtgaggcggggctgatccttgaagaccccgccaaggccaggccgggtacctattattgggagggcgatgagatttggatgttgagggagcaagtagcctatcgtttgg

SEQ ID NO: 580077 - DNA, 120 bp, Homo sapiens
ctaatcactgggtaaaatctgtgcctgccctttgaactattcacagagtaggttgaaagatagaaacaatgcatagaggtctaagtgtcacctcttacattatggaaagattttttcccc

SEQ ID NO: 580078 - DNA, 338 bp, Homo sapiens
cggtagtgtcagtacatgcttttgaacgtatgtaggtttgtcagaccatgctcccattttgttgactactagattaccaagaccgccgaccagccagaggttcaaattcgaacttggctggctacaacgggaaggattttaggttatggtcaaaagaatattggaaagaccagttgttggtgagtctccaatacagagatggaataataaaatatgttccttacgcaaacacttgcctagatgggctcgtcacacaacaggtttacttaaaaaagagaaacaccatctttcatctattatagatgacctcgaggctctagggggtctaaatgcaatca

SEQ ID NO: 580079 - DNA, 329 bp, Homo sapiens
catgtcactctctgtagggcaataagcgttctcactgtccagccccttcctaaaacaattttcaactacaacatggtgtatttaagcttccattgcatgtccctttagatttgagcagattacgtgtggtctttattccggtatcatattattaactgattttattttatttattcttatcttttgagacagagtttcactctgtcacccaggctggagtgcagtggcacgatcttgccttattgcaacctctgcctcccaggttcaagtgattcttgtgcctcagcatcccaagtagctgggattacaggcacccaccaccatgcctg

SEQ ID NO: 580080 - DNA, 377 bp, Homo sapiens
tccctcagtgcaatgcacatgtagcccaagagaatgaagcctggggagagcttctcaacaggacattcagcctcaggcacattctgtgaagtgccagaaagagctttatcaagagtttgggcacggtggctcatgcctgtaatcccagcactttgggaggctgagacgggtggatcacctgaggtcgggagttcgagaccaacctgaccaatatggagaaaccctgtctctactaaaaatacaaaattagccgggcatggtggcgcatgcctgtaatcccacctactcgggaggctgaggcgggagaattgcttggacccgggaggtagaggctgcagtgagccaagactgggcaaaaaagcgagactttgtttcac

SEQ ID NO: 580081 - DNA, 212 bp, Homo sapiens
tgttgacggaagcagcttgagggcaggcatgctggcaagaaaagggcgtcttaagatcttgtccgtatttggcccaggaccaagcctccgccctcagaatgttacagctggagggagggcggtggcgacacataatttctgccacgttctgagcacctccccaactgagctgggcagcaggaactctgagtacggggaggattggaaggccc

SEQ ID NO: 580082 - DNA, 137 bp, Homo sapiens
cggtaactagaatagatttacaaggagatcccgctgaatagcattgagaactcaagaaactatgttttcattagatgccttctaatatctgtaattcaaaagtaattatcttttgtcccttggctgagtattgcggt

SEQ ID NO: 580083 - DNA, 795 bp, Homo sapiens
ttttaggcattatttaaatttggaaagaaattgagcccttggggagttccttgaatcccgccgaaaactaaataattcaaccctttaaagtcgattcttctcagaattgaaaaccgagtcttttaaccataattacaggattctgcttaccctctaatggaaaaagttgtggtcattcctcggaaataacgaattccaatcccatccaattgaggaaacagcgttaacgcaaacattatcccctgggctcgaactcttaagcaactcataaacggagcgctctgggtaagggtgaaatgttttgtccaaggctcggaatcttcccttgcgcaagcgccccacagccaagagatctcaggggaccagaattcgcgcagaaatcagcaattgtgcctctcgcgcagcagaaaaggggaatccacatgtgtgcacactttgtatcagagcagacaccaagtctttggccataatctcgccgcgagtcgtgccacaccgacagtgtgcagcatgcgcccgcttgtgtgtcatagtcccgtcccgccagatacttgagcggtggctcagcacaggtcgccgttcttgtcgatgatcatgttcttcggcacagcgacgatgcagtatagcggcccaaccatgacagcagcggggggacctccgagcacgctcgttacagcagaacgcgcggtcaagtatggcgcgaaattgtggccgccccgcccccctcgtccccatttgtgcacgcgcagccccgccccccgcccctggcgcacgcaagggatcgttcgtgtcgcgccc

SEQ ID NO: 580084 - DNA, 180 bp, Homo sapiens
gtcgggtactgtacatacactgtaagcagctcaaggggctacagccctgacactagacgccacactgagcaggatgcacggcccggggtcacactgtccatggaggaggtggggtcagcctgaggtgagcggatggtggcccgagacaccgagagcttggtactagggacagaggcatac

SEQ ID NO: 580085 - DNA, 739 bp, Homo sapiens
cttcaaggcctttgggaaatttgagacggggtgcgcccaacttttttgtctcctgggggcgccacagtggtggtccggttgcgctcggcaggcgtttgtgtccaactggcaacacactccgcgcaaacaacatggcgttctggttaaaatgttgaaccacagttggtgtaaaccccctttctccctgtgagccgtcaccactgtgtcccttcgtttgcggtgccaacacacttctgggtgtgttgctgggggtgcctggtgttcaccacggcacaaaaactgggtggtgcaaaggaggttgtttggagttaaactgtggtcaagtttgccaacgtgttgtgtacccccccactgtgttgcgccccctctcatttaaaactgctgccctcttcatggccccctgagagcccattatagtggcgttttaatagagtctacccaccgtattgtcccaaaaccaaagcgcaacaagggctttgacattggtcagcgagcactcagctctgggttttgagaaccacacccccggtacttgctattctctcctacctctatgaccaatcgtccttccccgcctttactgcctgcctttttctgaggttttcccacgggtcctaggctcagaagtagggtagctcaaccctggtacaccaaggatttcctgagaagcctgtgaaaaagtccacagcatgtttctgggagtgattctaccaaggaaattaaaaattgtttaaaatcc

SEQ ID NO: 580086 - DNA, 498 bp, Homo sapiens
tgcctctcctcccacctcaaagtaccaggaatcccacactggtaaaattcctgagaatactgcatattgttagatatgcaggctcctagagtagaccagagttgcctaaatgaatcatcctcaatcttgttgcatactaaaaaaagagataccaggagaaagattttctcttcaatgcttgtaacataaaacctgtcttcctcctgagaagtccgcaagaatgaaaacgggtataaggcaatttacatttcaatgaaaagcactgcttagagtgaattgttatttccaaccggcactctcaatttgaggcacacatttgaaataccatggtgagctgccaacagaactctcttcacatactgtgtcgagggctaagaaatttccttgcagccagattaacaaagtaaagtgaatgtgagtggtgaagtccgcagtgtgcatatgtgtggtgtggacgtggagtgtatgtgtctgacaggggaggtgggaggagaggaa

SEQ ID NO: 580087 - DNA, 333 bp, Homo sapiens
  misc_feature (93)..(93): n is a, c, g, or t
  misc_feature (99)..(99): n is a, c, g, or t
  misc_feature (101)..(101): n is a, c, g, or t
  misc_feature (160)..(160): n is a, c, g, or t
  misc_feature (203)..(203): n is a, c, g, or t
cctctgtgctttgggacggcgatcacgagaacctctggagtgggagaaggccgtcaggcctggcagcatcagcaagtcaggagctgcggcggntctgcnangtccagcagcaatgggcctgtgccagtgcacagtacgtgtcccaggcagaagcctcagntttgcagcagcagcagtactaccagtggtaccagcagtacaantatgcctacccctacagctactactatcccatgagcatgtaccagagttatggctccccttcccagtatgggatgccggctcctatggctcagccacaccccagaagccatccgccgtcccaaggcacag

SEQ ID NO: 580088 - DNA, 695 bp, Homo sapiens
  misc_feature (597)..(597): n is a, c, g, or t
ctggactgcaaactcagcttgtgcctctctccagccctgtggcctcgctggacaatttttctaatctctttggagctgatcttcatgttgaaaaaggacaagtcccatcttcagatcaacacctgtcccagcgctgccattttcccaaggctcctccttggagtgtttgtaaggcacttttgccacgaagtaacccagccaccagcctcagtggaacctccaagcctaattctggaggagactttaactcggtgaccaaaagccagccccactgtgagttgaactctttcgtgttgaccggccactctcctgtgctctggatgatgtcggaacacgacctggccgatgtggttcagattgcagtggaagacctgagccctgaccacccaggtacagagctgtgggacagtaggtgaaatattattctctttattcttcaaaaaccaaaagctgctccagttattttctttcctttaagcagaagaaaaagtaatgcatgctgcgtatgaaaagtttgaatcctagagatgtgacactgtcggcccctcccttccctcgccccgcagcctcagccccacgtcccttctggaggggccnctgtgacactttgtactcgagggccatacctgctcccactccttgggggatagcgtgtgttctacactaactcccctgccgcgtctcagtgtcgcata

SEQ ID NO: 580089 - DNA, 519 bp, Homo sapiens
  misc_feature (411)..(411): n is a, c, g, or t
  misc_feature (421)..(421): n is a, c, g, or t
  misc_feature (487)..(487): n is a, c, g, or t
ctggactgcaaactcagcttgtgcctctctccagccctgtggcctcgctggacaatttttctaatctctttggagctgatcttcatgttgaaaaaggacaagtcccatcttcagatcaacacctgtcccagcgctgccattttcccaaggctcctccttggagtgtttgtaaggcacttttgccacgaagtaacccagccaccagcctcagtggaacctccaagcctaattctggaggagactttaactcggtgaccaaaagccagccccactgtgagttgaactctttcgtgttgaccggccactctcctgtgctctggatgatgtcggaacacgacctggccgatgtggttcagattgcagtggaagacctgagccctgaccacccaggtacagagctgtgggacattnttttggagantcatgtagtgacagatgaagacgaacctgctttgaaacgccagcgactagaaatcaattgccaggntccatctataaagtcattcctgtattccatca

SEQ ID NO: 580090 - DNA, 318 bp, Homo sapiens
tcgacgctgacacgtagactatatgacctttatgatctaacctgcctgactttcctatttactagagtactaagttacagtgatcactagtctccttggaatttccttgcaaggtcccccagcagttttcccagccctgggcttttgaacattctgggaaccgtctcttgtagagagtgttttgtctgtaatctttacgatcgtatatttcgaagtatttaaacgatctagtcttacagcacatcttcggcattctcaagattttttttttggagatggagtctcgctccttgggacccaagtgctggagttgcatgt

SEQ ID NO: 580091 - DNA, 128 bp, Homo sapiens
ccttattaagtgcggcatggtagctccattcctgaaacatttagacaatcagcacatatctgctgggggtgactcaacaatccagacagtgactgtatgagactgctactactgccccaatgacagag

SEQ ID NO: 580092 - DNA, 351 bp, Homo sapiens
agttcctgccttaactgatgacattccaccattgtgatttgtcctgccccaccctaactgatcaattgaccttgtgacaatacaccttccccacccttgagaaggtgctttgtaatattctccccacccaccccacgcccgcacccccgcacccttaagaaggtattttgtaatattctctccgccattgagaatgtgctttgtaagatccaccccctgcccacaaaaaattgctcctaactccaccgcctatcccaaacctacaagaactaatgataatcccaccaccctttgctgactctttttggactcagcccacctgcacccaggtgattaaaaagctttattgtt

SEQ ID NO: 580093 - DNA, 114 bp, Homo sapiens
ggtcctcttgctcccatcagcggatttctatacattgacctttgttggttataaacagcagtaacgagtgtcacaaatgacgctggttgatgggactgatgggacgaagatgcg

SEQ ID NO: 580094 - DNA, 175 bp, Homo sapiens
cgcacactttgcagctgatctcggacgaaggttgcgaagtgattgccaagagcgacactggtgggcatggcagctttcctaactattaataatatttattatccgccgtgcccgccaagtcgtcaatgtgcggcatcgttgagctgcgtctgctgaggaggggtaccgcgctcga

SEQ ID NO: 580095 - DNA, 119 bp, Homo sapiens
ccgtactgagatgtagcagaaattcaggcttcacgtgggtctattacgtgtctgtacgtgtccggccaccggacacgtagtggccggatatatgtgttacctaccctacggtccggcca

SEQ ID NO: 580096 - DNA, 118 bp, Homo sapiens
atcacattatcagtagggtaaaattaacctggtctcactgacgtgtctttagtcccaggcttcacggttcctctattatgtgggctgaacaatccacacgtcttgcgtgaatttctgc

SEQ ID NO: 580097 - DNA, 759 bp, Homo sapiens
  misc_feature (103)..(103): n is a, c, g, or t
  misc_feature (289)..(289): n is a, c, g, or t
  misc_feature (679)..(679): n is a, c, g, or t
aagcacttctgtttccagtaacagcgattgaggtttgacctggtcatcggggcgaagttccaaggtgtagagcccagctggaccaaggcttgggctatctgcncatgctcgagcgggttgcaaaccagggtggccttcataggtggaatttgcgtcgttaccaactgtttggccaatgccgaaaggcgctttgggggaggcacttcctccaacaggcagtggaaggctcggttggcgatggatgttgcgtagtgttcgaggttgtcacacatcgccttgcgttggcgcncccacgcactgagttgcgcgtgggcgcgtgaccagaagtcgaggcgggcctgctcaagcatttcttcacgatgctcaaccgcctggcgcagcagctcttcagcttgggcccgtgcgctatctagcaactgcgcggactgaaagcaatcggcgagcatctcccgggtaatcagtacttttggctgcccggaagcgccgtcgtgcaattcgattttgcgttgggtcaacatagacaatgctctggtgtgttgccgttaacgacgagttgtttcactacccgttgcgtcgatacgccagacaatcgcctgccacagcgtattgagccggccatgcgcatcgtcaaatggcaggtgtgtggtttcaagtgcctgcacccggtcaggcggcaagngcagacgaaggcgttgccagacagcaggctcgacccaggccctcagcaattgcattggatcatcctccggcccctgaatg

SEQ ID NO: 580098 - DNA, 242 bp, Homo sapiens
  misc_feature (138)..(138): n is a, c, g, or t
  misc_feature (169)..(169): n is a, c, g, or t
  misc_feature (195)..(195): n is a, c, g, or t
  misc_feature (233)..(233): n is a, c, g, or t
cacacagcccagctgggtcttggccggcctttgttgttggggtagagctgcaggaccttctggaaatcagcccgtgcccagttcaaagtcattccacggcccaggtgggccctctcccccggcggaagaggccccttnctccgttgttgcctgtaccagttcctagggnccttgttaacagctttcaatggcagncagagcaaggtcctgtagtttacagatgaccacatggnccaggttga

SEQ ID NO: 580099 - DNA, 678 bp, Homo sapiens
attttaagccactgagtctgctaaaacatttaagaaataaacactcttaggctcacattagtttagtggatatttttttccccaactacataggtgacagtagcttattttttgagttttaacacaggttcttcatagtgggccttgaaactttttacttgatattcaatcttgcatggctcagaaatgtgttattttatatcactgtgtctaaaatttcaggaaataaagacacctgcttctcaatgtcttcataccaagaaaaagttgatatttgcccctttcctctccatctcatactcaaaatttagatgactataagtcaaatggggaagaaatggttggatataagtgaagaaggaggagttctcatccaaatgtcataaaaattcatcttttcagtagttggatatgtataaaagcatcattccaaaaattttgattttctgtactggaatagataattttgaaatatctcaataaattctccaaacttaagctaataacccacccagaaagatctgtgaacaatctctcttaaacaatcacaaacataataacattttacaatgttacatagtttgaagtctttgatgtatctataagaatattaaaaaatcaccagtgtgcaggaaataataaaggtatacttgaagattaaaaaaaaaaagggggggg

SEQ ID NO: 580100 - DNA, 463 bp, Homo sapiens
aagcctagggtaaaacttaggtttgggacatgcttgatgaaagcaagagttgagcaggttgttgtgtgtatgtaggtcaggtgctcagcggaaaagtctgagctgtgtagtacgtcaggcagatgtcagtttagatgcgatagtttaagccacaagagtaggagaggtcatctaaagagtacagcaggcctaagggcatctatatttaaggagaaatacagaagaagtctcctgagaaggaataatggggcgggtggggagggagaaggcagtgtcccaaaaaccaacaaaggttttaccaaaggtaataccatcatttctgagcagcagttccttaacttgtgaatgtggcaaatgttctcctttacaaattgttctgaaggtaaaatgagatcatgtaaacgaaaatcctttgtaaattacagatgtgtgttataaatgaagtatctctcgagtcactcca

SEQ ID NO: 580101 - DNA, 496 bp, Homo sapiens
  misc_feature (183)..(183): n is a, c, g, or t
caagattcctgtatcgtttgaatattgcttttaaagaaatatttgaagcgacttcaaattcagactgtgtttaaaaagatttaaaatcggaatccaaaatcaaagtattaaaaaataatgctgagtgtttaggattcacatacctctgagctctggtggcttttgccagtcctgtccctctgntgagcaccagcccttcctgcagcagtcctgccggtgtgtttctgtgcacctggggatgaagtgtgctcctcccccagcggttagcctcaatgcttttcctccctctgttttattatttgaaattagccaaaaaccaacaaaggttttaccaaaggtaataccatcatttctgagcagcagttccttaacttgtgaatgtggcaaatgttctcctttacaaattgttctgaaggtaaaatgagatcatgtaaacgaaaatcctttgtaaattacagatgtgtgttataaatgaagtatctctcgagtcactcca

SEQ ID NO: 580102 - DNA, 1090 bp, Homo sapiens
gtgtgccatgtgacctgcatgtactcctgggtgaatgcggaagcgcagtgctggagcctggtggaggctcttgtgctcgcttgtaaactgcctccggagctgactgcggtcgagtcagcggcacagaacgacgtcgtgagtggtttggagatgagctggctggagaataattgtcttccacattgtgtggccactgtgtgctcccagtgatggaaccagtccagacctctcctgcgggaagttctgcgccctgtcaccggggacagccacgcagcgtgtccgccgtaatctccgcagcctcggttcagggaggtccaggcaggaggggccgctaccgggttgctttcccagactgccgatcctatgggtgaccacctgagagcggggcagtgagtccggaggtacactgccaggggaaacccaggaagcccgccgaggaacttcgagtgctttcagatttgctgagcaccgttgtcccgacgaggacgggagcaacctgaagcctgcctcttgacatggctccttgcagaagagcatcttgacccacgatgtgatccctcttgcaaattctgtaagaagttgatccggtgaggcgattgacttgtgtctgaaggattggaccaggagctcagtgcgcccaggaaggacaccaaaaaacacggagtgaacatatgtagctattgacatttacgtactttggagaacggccactccaggcttggattgaggaacattctcttccgtgcagcccttactagggcaggaatgggcagcttggtaaacactgatcaaagaaagccagagggaacatttttacggacggattgaaaggattgacggaggacacagtgacgaccattaccctttggcggcaaaattatgttacccccaggaaggacggagcaagcaggtgactgggacacagagggaattccccagtaggggcttcttggaagaacttacaagacgacgcaggaatatgaagagaggcacgagaaaggcagacacacgaacagagcggagagtgtgcagacaagaacactccttggattgttgcggaaagggagattgcggatatgaccacgcgcca

SEQ ID NO: 580103 - DNA, 656 bp, Homo sapiens
gggatggaaatgtcacccgtaagtatggcaatgccagtggaaccacgctgcttgaggctctggatgcatcctacacaatcgtcccaatgaaagccttggctgcctctccaggatgtctacaaaatggggggctatgggtacgtgtaccttgtgtgccgagtggagactgggtgtctcaaacccgggtatggttggtcaccctttgtgctccagtcaaccgttacaccggaagtaaaaatctggtccgaaatgccaccatgaaggctttgagtgaagctcttcctggggacaattgtggggcttccacatgtgtcaccgaatggtgtctggtcaaggcgatgtaccgtccgggtgcaacggtatggcctggtgaaccaggcaaaaaaatgaccccagccaattggacagccagcttgggttccactgggctccagggtgattaatcctggaaccatcccagggccaaaaataacggcgccggggattaattccccccttgtaattgggtaattggccacaagtgtgcttcaacattttgacatttgcaaagtttgtgcctagaacctgcaaacggacaaacaattgggatccgccggtcctggcttaaaaaaaggctggaaagattggccctaaaaatctctggcaagtctgttaac

SEQ ID NO: 580104 - DNA, 398 bp, Homo sapiens
  misc_feature (120)..(121): n is a, c, g, or t
cgtgcgaaggatagggtatcccggcctgcgacaccttgagcgtgtagtctctggggacagcttgtagccgtgcctcccagcttcagtgtgatcgcgggcagggtggaccctttgcctgannccgcttcatgggcatggacatcccgccacccagcgggccactctggatcctgggcgacgtcttatcggccgctactacactgtgttgaccgtgacaacaacagggtgggctttgccgaggctgcccgcctctatttcccaaggcgttcgcgcgctcagcacagaaacataggagagttccatagcaggaggcccctggcccggcggtcccttccgcacacacccacacacttgcccgcccactgttctgggcgccctggaagccggcggcccaagcc

SEQ ID NO: 580105 - DNA, 1289 bp, Homo sapiens
tggtgacccgcgatggatgtctgctgcctgatgtgactgtgagatgccactgataccttgcagtggcttggtggcttgctgtggctccgtgtgtgtcaccacccatgtggcagacccggagggtggctgcctccgccgggcctgcaagctggagagggagcagtgtcccccaagcctggtgggagccaggtgacttgatgcacggcaactgctggggtcacctgccgggcatgtctgtgggagtgatgccatcttccttggaggcagcaaaactcaccttgggtgtgcggaagtgctccccctttgttttgtccatcccgggaagaccttggcagtgaggttctttcttgccttgccacgcatgatgatgttgcgcggcgggacgcaatacgccaggttgttggcaacaccgactgcgaagcgcaaggtcatgggaatgggcgcactgtgtgcctgtgcaccacgtcggctctcacgcccttggcagcccacttggcgttgcgatccccagggagacccgacaagaatgacggagagaaaccccctcttgggtagtactctccgcgcccgaccctgggtgtataaactccagtcggcaccaaagaatgacaacccccttttgtgactacatggaacttccaatttccccagagcgatgcccttacagcgaacatacccatcagcaccggccgagaaaatggcacctaacaacagaggacacgactttccggaaacttcccccagctacatgggcatacaccacagagttttaccggcatttctatcctgcaacagcaaagcgaccctttcacactactaattcacccattaccttctactattgcaccctttagccctccccacgcacgacacttccaaccctctcgaagttaccccaccaataacaccccttggcttgacataactcccactttattccatttccagacaaccacatttggcacagctggacttaccacaccttgtcacacacccacttctctcccctctacatcaacctcccaacttgcaacccacacttctgccacaaacacaaactagcacacaataacctccgctgctaacacaccactctctaattcccttcctgaacaacactaacaccccgtacccttaccgctcacagctctaccacaacacacacctccctacactacacacatcttacctcttacacaccacggcttactctattaacacctatcttcgcactatcacaaaaacaatactacaacctgataccattctgcaccccaccacaccatata

SEQ ID NO: 580106 - DNA, 714 bp, Homo sapiens
tttgtttgtttttaataaaattccaaaaaaaaatttaaagatgggaggatttgtttttgtacaaacaccggccaaagttttggtattttggcttccttctcgaaggggccggcattgtcaccgaggtttggcctattggaagcgtgtaaaatctgcagaagtggtcatattttcacaacgcgtacagtggttccccaaaccccaaaatcctcgtcgtggccacactggaaaccgacacctttcgcggttctctgtgcaattcttagcggtatctgttgattatccagattttgtactaatccacagtccttggaacatgtggacctaggtgtcccacataataggggtcacgaacccgttaagaaaaggcacttaatgtacattattactttgtttgaaccggaaatgttcagggaacaatggctcttagggatccgtgagtgtgatcctgccccatgaaggtgagcctttcaaggaggatttacattggtcttcctgtgcaggtggagtgcgagctagagaaacagttttttaaatgctgaagtctctacagatactgttaacgggggccatttaggggagcatgactgactcgttgtctggaaacagtacaaattagcctttataaattttaaatacaccccccgcccctcaatgatattgctttgtccaatggtttggaccagtttcctgttctataaagttgcgtcctct

SEQ ID NO: 580107 - DNA, 387 bp, Homo sapiens
  misc_feature (24)..(25): n is a, c, g, or t
  misc_feature (74)..(74): n is a, c, g, or t
acaatggtgggtcagtgtgctcannctgatgcgtcatgtatagctgatgatgttaacggtgtgactgatcgagngcggacgatcctggaacgcgtcaaggccgcgatgaagacgccgagagcgactgttgtcgtcaccgggtattgggacgtggggctggacggcaaggcgggccgcgagaacgggcccgactacgtcaaggtgaccgatatgatcaccgaggccttcaacgccaacgtcaagaagatcgcccacgaggtcggagcggtctacgtcgacttccgtaccccgttaaggggagcagatggcacgcgtgatgacacagcactgctcactgacgacggggatcatccatccgagcaagggcacaaggtgctagcggaggct

SEQ ID NO: 580108 - DNA, 146 bp, Homo sapiens
actctagtggatcccctgtggttcttgtgctggcgtgtggctcttgtcattggcacacttagatttgtcttcacccaccagcttcgttccagcacccagcacaagaccaccagcacaagatgacacgcgccagcacaagaaccaca

SEQ ID NO: 580109 - DNA, 505 bp, Homo sapiens
ccacctgctgatctgacaggaggcagagctcaggtggtaatcctcactcacctcctgctgtgtggcctagttcctaacaggccacagaccagtaccagtctgcggcctgggggttggggacccctgatctaggggctcaactggggctggaagggtttaattccatgatggctcactagtttagctgctggatggagaccaacagctttttttgtcatagtcacgtaaaaattcaatttcagttatagtaatattcttggttcacaggaattggctattatgtggatccatttggctctctgcctagcaacactccaattaaaaaaatattttctttgaacttgatatgatgagagtgttggtaaacacatgtgaccattttcccctccctgtctcccaagtccctgtttttttgggtgggtagtttgctgtgtatcaggtgagggttcctgatccaagtggcttaagactggaagatatgagaaaagcctaaatgctacatagg

SEQ ID NO: 580110 - DNA, 285 bp, Homo sapiens
ctttccgaccagtaacgagacgccggtccattaatttaaagcgtcatcttttcgtcatctaaacaagccagtctgtcgcccctcgaaacccacggagcttgtcatgctgcacgccgaaaaccaggaccgcctttacctgatcgcccccagtgaagaacagcaggcgctggtgggcgccctggccttcaacgtgcaggaccggcactggctggtgtattgcgccctgggcgggcaccagcacgcggacctgccggaaacagacctgctgacgggcgtcagcatgct

SEQ ID NO: 580111 - DNA, 655 bp, Homo sapiens
aggacaccccacaaacaagtaggccagcgtcatgcacaggttcatcctgaaggcacggagcccgggcgtgacatcgacccccagaaagatcccaccttcctaagaattcgctcaaagaagaatgaattgtggttgcccagataagaatattcctgattgtgaatcagaatccaaccgaataagccactctcgtggctcgcggtgttcctccttattttgttgccccccaatattgttgttgtccatcatgtcggaggactagccggtggccgtcgctaggcacccaatcacactactccggtgggcttgtgtctgctggcggctcttctcccccaccggcggccctccggtggtgcccattcttcccaagagctgaggggcgccttctcattactgcgaggtgttggagcagcatgctgcaggaaggccggcaccttcttcctactcaccttcagctagtttgcccgcggtggggctggtgggtcgtcctctaacgtcggctggttgcttcctgttgggccggcctctaaactctaaacgcccccccgccgcggacacaaaacaccacaaaaaacacacaacacacccaccacacaacccccaaaaacaaacgacacaaaaaaaaaccacccccaccacaaaaccacccaaacgc

SEQ ID NO: 580112 - DNA, 536 bp, Homo sapiens
  misc_feature (265)..(265): n is a, c, g, or t
ggcctccccccgtagcgccgctccggctgcaccgtgctcgctccgagtttcgaggctcgtgctagagctagacgccgtctgtcgtctcccttcagtcgccatcatgattatctaccgggacctcatcagccacgagtgagatgttctccgagcagtctacaagagtccgggagatcgcggacgggttgtgcctggaggtggaggggaagatggtcacgtagcgacagaaggtatacattgtatgactcgctcattgggtggacantgccgtccgctgagaggccccgagggcgacaggtactcgaaaggcgacagttaatcactggtgtcgagtattgtcatgaatgcattcaccatgctgggagaacaaggtttctccaagacaggaagcgctacagagacagtgacgactcaagaggattgagctatgtagaatcgaagtcacactgggacaacttggaggatacagagaccagaaggagtaaaagcttttatgacaggggctgcagaacaaatcgagcacatccttgctaatt

SEQ ID NO: 580113 - DNA, 195 bp, Homo sapiens
tatcagccggacctaattctatacttctgcatatgaacttactagtaatactttgcaggagagccatagctaagacccccgaaaccagacgagctacctaagaacagctaatagagcacacccgtctatgtatgcaaaatagtgggaagatttatagagtagaggcgacaaacctaccgagcgaggctatagttg

SEQ ID NO: 580114 - DNA, 383 bp, Homo sapiens
cgtgttagcagtgtatgcaggtctccatatctactagaaaatcatggctggtattcaccatgtagtcctagtctacatggggaggcagaggcatggagattctctggggcccaggagctcaagaccagcctgggcaacatggtgagactgtctaccaaaaaaaaacgaagaagaaaagaaaataagcccaatgtggtggtaggcgcctgtaatcccagctacgggagaggctgaggcaggaaaatcgcttgagcctgggagacagagattgcagtgagccgagattgccccattgcattccagcctaggtaacagagtgagactctctcaaaacacacacacacacagacagacacacacacccttagaaaacgggtctctca

SEQ ID NO: 580115 - DNA, 1409 bp, Homo sapiens
  misc_feature (278)..(278): n is a, c, g, or t
  misc_feature (483)..(483): n is a, c, g, or t
  misc_feature (1207)..(1207): n is a, c, g, or t
tggtcttggtccaaaattttataaagggtctttagaaaagcaacttccagactctccagaattacagctgtgccagggagaccctggtttagtgcgtggtggggacgtggctgtggggcatgtggcagggggctctcgtggctttcccaccctttcgtgtccgtgagaagtggggggtgggtgggcagtattctcactctttggggttcccacaagtgctctcacgggtggtctcgaggcagagggggctttcttaaaggggcccaaactcctttccncaagtgtggggctccccagggccagagcaagtgaaatcttttcaacctgttgatagtgcccgaggaacacacctcgtgtctctgtgaaacgcaaaccacggtgggcggccacgagcagaggtggctccacagtgtgataagtgatgagtttatacagcgaggggcctccctcccgggtgtggtgtgggcactacactacgagggngcccaactacccaacaaaaaaactttttcgatgtgggcatatttataagcgcccctctcgagttctccccgctgcgagagagtaatatcctcccccgaagaaaacacacccaaaaaaaccctctcgcgagagcccctttgttgtgtcgcccccccaacaactcttctctccagaggtgatgaagtggaaccaccccggcaagagacaaacacacaccagataatgaagaagaggaggcggcgcctctcgcggcgacaacagagaaaagaagccccctcatccctatagaggagaagagtcctgtttgggctaacactgtcagaagaagaagacaatcgtcttgtggccccttgtggggcggcaatagatgggggggcacaacacaaacaagagggaccctctccttattattgtgttgtcgccaccccaccccttatattttctcacaggcgacagaatataaaaagaggctttctaataaccaacgttgtggcgccctcttctgtgggggaagaaaacggccccaaaaaaactctcttctgtctcctttagaacaactatacccaggaggacaagactccaaaggttctccccaccgaggaaaatattcacggggcccgaggggccccctttttttattaccaccccgagaggaaaaccactctcgggggggggactcaccaggggggagtggcataaaagaaatacaagtggtagtattgcngggagccccgagaggatgggggggtggaaaaacattgtcggaaaaccgctctctaaaaattcttcccggagaaagtttaagcgcccaattttctttttacaaggccccaaaggtactccccgccagaagtataagagaaaaaactctccaaacttatcaagagcttatacaacggctatttgagtaagaggagatattgcgc

SEQ ID NO: 580116 - DNA, 3181 bp, Homo sapiens
  misc_feature (38)..(38): n is a, c, g, or t
  misc_feature (92)..(92): n is a, c, g, or t
agcgggtgtccggccaagcggcgccctgaaggcgtgtncggccgcagcttaggctctccgggagtccccggagagtaggggcggccggcggngctagtcttctggggagcgccgggtgcacaccggaccactgcgggaggcctagggccgagggccgaggagctggcctgcgcccggcgaccccggcttccctccgcagtcgcccaggcgtcccttcccccctacagccgagcggcgccgggcgcaggcgcattgggcgcccccggcagcccccgcggcgcgcccgtccgctgcccgtccgaggaggcggagggcgatgacgtcatcgagcggggcgacgggcattgggcgccattttgaacaaggggaaaaaagatccctccccggcggcggcggcggcggcggcggcgccggcggtggtggcggccccggggctgagcgctcggctgcagcggcgcggaggccgtctccctggtctgccgcggtccccgcccgtcccgccgccggctgccatggcaggagccggaggcggcggctgccccgcgggcggcaacgacttccagtggtgcttctcgcaggtcaagggggccatcgacgaggacgtggccgaagggcgtggagaggagagctcggggctgctgccacagatcatgctgagccgccagcagctccacctgcccttggctttgctcatccgtggaaatgacaacagcgtgaaaacggcagatgatgtacaaggattatgatgaaaatagtcttgacctcacggaccctctgagaggttcttgaccgttgcaccctcaagggcccacagaccgcactttgagaactgctgcttgaatgcaagctattagcagtaggagtgtcaaggacagggcagacttcaggattaactgttccttctcatctttaccagattgtactggttttgtctcaaaatacaaaaatagagtgtttattatgtaaagaaaatcaaatgatagaacagctgagaacagctggatcaagagcacagagcggaagttcctcttcatcccactgctgtcctggagtcttcctcaggacccactgctcctaactgtatctttgtagatcattttctatgtgtttatttatttatattttaaaacctagtttgtgtataagcaatcttttttaatccacaaatgtggaatcttattctagactttgaataagattttctgtattagtcagtattgttttttgctacttcttttcctttcctttccttttttggaaatagggtcttactcctctgtcacccaggctggagtgcagtggtgcgatcagagctcactgcagcctgatcaggctcaagcaatcctctccctgctcagcctcctgagtagctggaactataggcttgcactgccatgcccagcttttttctattttttgtagagacagggttttgctgtgttgcccaggatggtcttgaactcctggactcaagtgatcctcccacctcggcctcccaaaatgctgggaatacaagcatgagccatggcatgtggccgccacttgccttttttcattaagagtctataattggagatcttacagggaactgggctttctgctcagccatactcgagctcatttgacccccggccactgccccttgaaatcggacatcatttccaccgttgagtttaattactctggagatcttcttgcaacaggagacaagggcggcagagttgttatttttcagcgtgaacaagaggtactggcccagccccgccgtcctgccctgccatgaagtgtgagcagctttctcagcacttcctgcagagaagtctggcaggggtgtgaattctctcttcccttcagggagagaataaaagccgccctcattctaggggagaatataatgtttacagcacctttcaaagtcatgaaccggagtttgactatttgaaaagtctagaaattgaggaaaaaattaataaaattaggtggttaccacaacagaatgctgctcattttctactgtctacaaatgataaaactataaaattatggaaaataagtgaacgggataaaagagcagaaggttataacctgaaagacgaagatggaagacttcgagacccatttaggatcacggcgctacggatgacctgagaattaatttatggcacttagaaatcacagatagaagctttaacatcgtggacatcaagcctgctaacatggaggagctgaccgaagtcatcactgcagccgagttccacccgcaccagtgcaacgtgttcgtctacagcagtagcaaagggaccatccgcctgtgtgacatgcgctcctcggccctgtgcgacagacactccaagttttttgaagagcctgaagatcccagcagtaggtccttcttctcagaaataatttcatccatatccgatgtaaaattcagtcatagtgggcggtacatgatgaccagagactacctgtcggtgaaggtgtgggacctcaacatggagagcaggccggtggagacccaccaggtccacgagtacctgcgcagcaagctctgctctctctatgagaacgactgcatctttgacaagtttgagtgttgctggaacggttcggatagcgccatcatgaccgggtcctataacaacttcttcaggatgtttgatagagacacgcggagggatgtgaccctggaggcctcgagagagagcagcaaaccgcgcgccagcctcaaaccccggaaggtgtgtacggggggtaagcggaggaaagacgagatcagtgtggacagtctggacttcaacaagaagatcctgcacacagcctggcaccccgtggacaatgtcattgccgtggctgccaccaataacttgtacatattccaggacaaaatcaactagagacgcgaacgtgaggaccaagtcttgtcttgcatagttaagccggacatttttctgtcagagaaaaggcatcattgtccgctccattaagaacagtgacgcacctgctacttcccttcacagacacaggagaaagccgcctccgctggaggcccggtgtggttccgcctcggcgaggcgcgagacaggcgctgctgctcacgtggagacgctctcgaagcagagttgacggacactgctcccaaaaggtcattactcagaataaatgtatttatttcagtccg

SEQ ID NO: 580117 - DNA, 2405 bp, Homo sapiens
  misc_feature (38)..(38): n is a, c, g, or t
  misc_feature (92)..(92): n is a, c, g, or t
agcgggtgtccggccaagcggcgccctgaaggcgtgtncggccgcagcttaggctctccgggagtccccggagagtaggggcggccggcggngctagtcttctggggagcgccgggtgcacaccggaccactgcgggaggcctagggccgagggccgaggagctggcctgcgcccggcgaccccggcttccctccgcagtcgcccaggcgtcccttcccccctacagccgagcggcgccgggcgcaggcgcattgggcgcccccggcagcccccgcggcgcgcccgtccgctgcccgtccgaggaggcggagggcgatgacgtcatcgagcggggcgacgggcattgggcgccattttgaacaaggggaaaaaagatccctccccggcggcggcggcggcggcggcggcgccggcggtggtggcggccccggggctgagcgctcggctgcagcggcgcggaggccgtctccctggtctgccgcggtccccgcccgtcccgccgccggctgccatggcaggagccggaggcggcggctgccccgcgggcggcaacgacttccagtggtgcttctcgcaggtcaagggggccatcgacgaggacgtggccgaagcggacatcatttccaccgttgagtttaattactctggagatcttcttgcaacaggagacaagggcggcagagttgttatttttcagcgtgaacaagagaataaaagccgccctcattctaggggagaatataatgtttacagcacctttcaaagtcatgaaccggagtttgactatttgaaaagtctagaaattgaggaaaaaattaataaaattaggtggttaccacaacagaatgctgctcattttctactgtctacaaatgataaaactataaaattatggaaaataagtgaacgggataaaagagcagaaggttataacctgaaagacgaagatggaagacttcgagacccatttaggatcacggcgctacgggtcccaatattgaagcccatggatcttatggtagaagcgagtccacggcgaatttttgcaaatgctcacacatatcatataaattccatttcagtaaatagtgatcatgaaacatatctttctgcagatgacctgagaattaatttatggcacttagaaatcacagatagaagctttaacatcgtggacatcaagcctgctaacatggaggagctgaccgaagtcatcactgcagccgagttccacccgcaccagtgcaacgtgttcgtctacagcagtagcaaagggaccatccgcctgtgtgacatgcgctcctcggccctgtgcgacagacactccaagttttttgaagagcctgaagatcccagcagtaggtccttcttctcagaaataatttcatccatatccgatgtggtgtgggacctcaacatggagagcaggccggtggagacccaccaggtccacgagtacctgcgcagcaagctctgctctctctatgagaacgactgcatctttgacaagtttgagtgttgctggaacggttcggatagcgccatcatgaccgggtcctataacaacttcttcaggatgtttgatagagacacgcggagggatgtgaccctggaggcctcgagagagagcagcaaaccgcgcgccagcctcaaaccccggaaggtgtgtacggggggtaagcggaggaaagacgagatcagtgtggacagtctggacttcaacaagaagatcctgcacacagcctggcaccccgtggacaatgtcattgccgtggctgccaccaataacttgtacatattccaggacaaaatcaactagagacgcgaacgtgaggaccaagtcttgtcttgcatagttaagccggacatttttctgtcagagaaaaggcatcattgtccgctccattaagaacagtgacgcacctgctacttcccttcacagacacaggagaaagccgcctccgctggaggcccggtgtggttccgcctcggcgaggcgcgagacaggcgctgctgctcacgtggagacgctctcgaagcagagttgacggacactgctcccaaaaggtcattactcagaataaatgtatttatttcagtccgagccttcctttccaatttatagaccaaaaaattaacatccaagagaaaagttattgtcagataccgctctttctccaactttccctctttctctgccatcacacttgggccttcactgcagcgtggtgtggccaccgtccgtgtcctctcggccttcctccgagtccaggtggactctgtggatgtgtggatgtggcccgagcaggctcaggcggccccactcacccacagcatccgccgccaccccttcgggtgtgagcgctcaataaaaacaacacactataaagtgtttttaaatcca

SEQ ID NO: 580118 - DNA, 2787 bp, Homo sapiens
  misc_feature (38)..(38): n is a, c, g, or t
  misc_feature (92)..(92): n is a, c, g, or t
  misc_feature (2340)..(2340): n is a, c, g, or t
agcgggtgtccggccaagcggcgccctgaaggcgtgtncggccgcagcttaggctctccgggagtccccggagagtaggggcggccggcggngctagtcttctggggagcgccgggtgcacaccggaccactgcgggaggcctagggccgagggccgaggagctggcctgcgcccggcgaccccggcttccctccgcagtcgcccaggcgtcccttcccccctacagccgagcggcgccgggcgcaggcgcattgggcgcccccggcagcccccgcggcgcgcccgtccgctgcccgtccgaggaggcggagggcgatgacgtcatcgagcggggcgacgggcattgggcgccattttgaacaaggggaaaaaagatccctccccggcggcggcggcggcggcggcggcgccggcggtggtggcggccccggggctgagcgctcggctgcagcggcgcggaggccgtctccctggtctgccgcggtccccgcccgtcccgccgccggctgccatggcaggagccggaggcggcggctgccccgcgggcggcaacgacttccagtggtgcttctcgcaggtcaagggggccatcgacgaggacgtggccgaagcggacatcatttccaccgttgagtttaattactctggagatcttcttgcaacaggagacaagggcggcagagttgttatttttcagcgtgaacaagagaataaaagccgccctcattctaggggagaatataatgtttacagcacctttcaaagtcatgaaccggagtttgactatttgaaaagtctagaaattgaggaaaaaattaataaaattaggtggttaccacaacagaatgctgctcattttctactgtctacaaatgataaaactataaaattatggaaaataagtgaacgggataaaagagcagaaggttataacctgaaagacgaagatggaagacttcgagacccatttaggatcacggcgctacgggtcccaatattgaagcccatggatcttatggtagaagcgagtccacggcgaatttttgcaaatgctcacacatatcatataaattccatttcagtaaatagtgatcatgaaacatatctttctgcagatgacctgagaattaatttatggcacttagaaatcacagatagaagctttaacatcgtggacatcaagcctgctaacatggaggagctgaccgaagtcatcactgcagccgagttccacccgcaccagtgcaacgtgttcgtctacagcagtagcaaagggaccatccgcctgtgtgacatgcgctcctcggccctgtgcgacagacactccaagttttttgaagagcctgaagatcccagcagtaggtccttcttctcagaaataatttcatccatatccgatgtaaaattcagtcatagtgggcggtacatgatgaccagagactacctgtcggtgaaggtgtgggacctcaacatggagagcaggccggtggagacccaccaggtccacgagtacctgcgcagcaagctctgctctctctatgagaacgactgcatctttgacaagtttgagtgttgctggaacggttcggatagcgccatcatgaccgggtcctataacaacttcttcaggatgtttgatagagacacgcggagggatgtgaccctggaggcctcgagagagagcagcaaaccgcgcgccagcctcaaaccccggaaggtgtgtacggggggtaagcggaggaaagacgagatcagtgtggacagtctggacttcaacaagaagatcctgcacacagcctggcaccccgtggacaatgtcattgccgtggctgccaccaataacttgtacatattccaggacaaaatcaactagagacgcgaacgtgaggaccaagtcttgtcttgcatagttaagccggacatttttctgtcagagaaaaggcatcattgtccgctccattaagaacagtgacgcacctgctacttcccttcacagacacaggagaaagccgcctccgctggaggcccggtgtggttccgcctcggcgaggcgcgagacaggcgctgctgctcacgtggagacgctctcgaagcagagttgacggacactgctcccaaaaggtcattactcagaataaatgtatttatttcagtccgagccttcctttccaatttatagaccaaaaaattaacatccaagagaaaagttattgtcagataccgctctttctccaactttccctctttctctgccatcacacttgggccttcactgcagcgtggtgtggccaccggcgggtcttttggctttcttcgatccaggggaccctttggaatancgaagtgggccagcaggttaagggggccctttatccacagaatcgccggcacccctttgggtgagggtctttaaaccaaaccatttaagggtttttaatcccccacaaaaaataatcaattatattcgggcctttggccaatcccctatagggggggttaaaaatagtgcgcggtttatacaagcgccttggaaacccgtggtccacctaaaactttggtgaaaacctctttcgcgggggaaaataaagaacccaccgaggctttccaaatggccccttgggccggaatataggttatttttaaaatcggaatttttgtaaagttattttcacctcgcggtgggaaatcttatcacccccccttagggtcctctctctcataggctttataggtctctctacatgcttctttccggcgtccaggcctctctacattttgtggggggt

SEQ ID NO: 580119 - DNA, 2824 bp, Homo sapiens
  misc_feature (38)..(38): n is a, c, g, or t
  misc_feature (92)..(92): n is a, c, g, or t
  misc_feature (2689)..(2689): n is a, c, g, or t
agcgggtgtccggccaagcggcgccctgaaggcgtgtncggccgcagcttaggctctccgggagtccccggagagtaggggcggccggcggngctagtcttctggggagcgccgggtgcacaccggaccactgcgggaggcctagggccgagggccgaggagctggcctgcgcccggcgaccccggcttccctccgcagtcgcccaggcgtcccttcccccctacagccgagcggcgccgggcgcaggcgcattgggcgcccccggcagcccccgcggcgcgcccgtccgctgcccgtccgaggaggcggagggcgatgacgtcatcgagcggggcgacgggcattgggcgccattttgaacaaggggaaaaaagatccctccccggcggcggcggcggcggcggcggcgccggcggtggtggcggccccggggctgagcgctcggctgcagcggcgcggaggccgtctccctggtctgccgcggtccccgcccgtcccgccgccggctgccatggcaggagccggaggcggcggctgccccgcgggcggcaacgacttccagtggtgcttctcgcaggtcaagggggccatcgacgaggacgtggccgaagggcgtggagaggagagctcggggctgctgccacagatcatgctgagccgccagcagctccacctgcccttggctttgctcatccgtggaaatgacaacagcgtgaaaacggcagatgatgtacaaggattatgatgaaaatagtcttgacctcacggaccctctgagaggttcttgaccgttgcaccctcaagggcccacagaccgcactttgagaactgctgcttgaatgcaagctattagcagtaggagtgtcaaggacagggcagacttcaggattaactgttccttctcatctttaccagattgtactggttttgtctcaaaatacaaaaatagagtgtttattatgtaaagaaaatcaaatgatagaacagctgagaacagctggatcaagagcacagagcggaagttcctcttcatcccactgctgtcctggagtcttcctcaggacccactgctcctaactgtatctttgtagatcattttctatgtgtttatttatttatattttaaaacctagtttgtgtataagcaatcttttttaatccacaaatgtggaatcttattctagactttgaataagattttctgtattagtcagtattgttttttgctacttcttttcctttcctttccttttttggaaatagggtcttactcctctgtcacccaggctggagtgcagtggtgcgatcagagctcactgcagcctgatcaggctcaagcaatcctctccctgctcagcctcctgagtagctggaactataggcttgcactgccatgcccagcttttttctattttttgtagagacagggttttgctgtgttgcccaggatggtcttgaactcctggactcaagtgatcctcccacctcggcctcccaaaatgctgggaatacaagcatgagccatggcatgtggccgccacttgccttttttcattaagagtctataattggagatcttacagggaactgggctttctgctcagccatactcgagctcatttgacccccggccactgccccttgaaatcggacatcatttccaccgttgagtttaattactctggagatcttcttgcaacaggagacaagggcggcagagttgttatttttcagcgtgaacaagaggtactggcccagccccgccgtcctgccctgccatgaagtgtgagcagctttctcagcacttcctgcagagaagtctggcaggggtgtgaattctctcttcccttcagggagagaataaaagccgccctcattctaggggagaatataatgtttacagcacctttcaaagtcatgaaccggagtttgactatttgaaaagtctagaaattgaggaaaaaattaataaaattaggtggttaccacaacagaatgctgctcattttctactgtctacaaatgataaaactataaaattatggaaaataagtgaacgggataaaagagcagaaggttataacctgaaagacgaagatggaagacttcgagacccatttaggatcacggcgctacggatgacctgagaattaatttatggcacttagaaatcacagatagaagctttaacatcgtggacatcaagcctgctaacatggaggagctgaccgaagtcatcactgcagccgagttccacccgcaccagtgcaacgtgttcgtctacagcagtagcaaagggaccatccgcctgtgtgacatgcgctcctcggccctgtgcgacagacactccaagtgtaagtgcgtctgttgttgagatggagtctggctctgtcacccaggctgcggtgcagtgacacagtctcggctcacggcaagctccgcctcccgggttccagcgagtcttctgcctcggcctcccgagtagctgggaccacaggcaggtgccaccatgcccagctggtttttgtatttttggtacagacggggtttcaccatgttgaccagactggtctgacctcaggtgatccccctacctcggcctcccaaagtgctgggattacaggtgtgagtcaccgcacctggtcacgcctggcgtcttttaaagcatctcatttagagccacttgtncttcagacactccaaagacttagagagttcttcctgttccccaagtgcctttgcacaactggggagccctcctttgctggggccgtccgagtgtggctgtgtcagaggctgctgctaaataagtggaactcgaag

SEQ ID NO: 580120 - DNA, 164 bp, Homo sapiens
cttaatcaaacacgtgggccagtgggaggagagagaatcgtagtgatatgagcaaggaagggaaagtgaggaatgactgggcctcctaaataaggccggcttggacctgagagtgaagaaacaaatctgggacacaaaccttaaaactccccaaactcctattc

SEQ ID NO: 580121 - DNA, 524 bp, Homo sapiens
cgagtcggtaccatacatgtcgtgatgacatgaacttatatacagaaaatcctaaggtatccactaaaaactactaaaggtaataaatatgttcagatggttacaggatacaagatcagtataaaaaaatttttgtttttatacacttccaacgaagaatctgtaaatgaaattaagaaatcaattccaggctgggcacggtggctcacgcctgtaatcacagcacttggggaggctaagttgggtggatcacctgaggtcaggagtccgaaagcaacctggccaacatggtgaaaccccatctctactaaaaatacaaaaattagctggcatggtggtgggcacctgtaatcttagctacttaggaggcagaggcaggagaatcacttgaaccgaggaggcggaggttgcagtgagccgagatggtgccattgtactccagcctaggggactacactaaaactccatctcaaaaagaaaaaataaacaaaattctgtaggctttgaccttactatcttctgct

SEQ ID NO: 580122 - DNA, 225 bp, Homo sapiens
tcactttctacacagtagtttttttttggtttggtttggtttggttttgagacagagggagtttggctgtgtcgcccaggctggagtggagtggagtgcagtggcgcgatctcagctcactgcaacctccgcctcccaggttcaagctattctcctgcctcagcctcccaagtagctggggctacaggaatgtgccaccatatctggctaattttggtattgtta

SEQ ID NO: 580123 - DNA, 636 bp, Homo sapiens
caggccggggcgaggccgcgctggccctcccttggcggcgggcggcgcgtcgcgggagacggctgcacgtgggacggctggtggatgaccgctgtgtggtggatgccctgtcggccccggtgggacctgtgaccagagcaccccactaatgaatgttcctggtgtatcttgccttcgttcaatggatgttgctccactattgtaacctggcgtagcgttcgtgcctcgaggtaaaagctatgctcacatgtggaaatgggacccatagggccgagggatcctaaagaggtcaggagggaccataagggggcaaggcaaaggaaataccgagtctgggaaatgtgcttgagcattgtgtttaggctatggcaaggtaactacgcccgttggcaagaacaatgtgatcccgcggatccgtggccaaggtaacttgaggcacgccccaagaatataacgacccaaccataccacttggaaaacaaaactgggcacacggaaaaaatcacaacaatgggaacacgctgttctgtcccacttaggagcgggggcatttggatttccaggattgggcaaacagggttcaactttgggggccaaaggtttgagattggaaatttcccccaagtaccttcctcc

SEQ ID NO: 580124 - DNA, 348 bp, Homo sapiens
catctactccaatgtggccaggaagcagaagataggacacccctgttctagaggttgcacttaaatatcataaataagtgacaggtgcactgtctttcaggctgaaggaagagggtatgaggtcaatacattctccaaaggtataataaaatgaggagttctgcaaattagaagaacagcgaagatcagaatattggaaaagaaatagtggcctatgtgacaggtagctttggattatattctctgggtctaggtttccccatctattaaaaacaggggatacaactagatgtattctaattaactttctgatctcattggtactttacaaaaacactgaatagagat

SEQ ID NO: 580125 - DNA, 912 bp, Homo sapiens
  misc_feature (15)..(15): n is a, c, g, or t
  misc_feature (114)..(114): n is a, c, g, or t
  misc_feature (148)..(148): n is a, c, g, or t
  misc_feature (317)..(317): n is a, c, g, or t
  misc_feature (319)..(319): n is a, c, g, or t
  misc_feature (459)..(459): n is a, c, g, or t
atacatacactacangataggaacagcagcaaaaagtagaacctctactactaatgtacccttcgttgttttccacctaaaattttagccgcttccctataaatgttcctgttngattactgctgccttgtcactgtttaatacgagngcaaccttccatagatgggccagcggtctcctacacccaaatctttgttcgcaagtctaacacccggtctggtcaaacgcactccctttggtgcgccaaggctaacccgttttggtctttgaatatcttatccggacgcctttctttatcatatacaggtttacatgtntncctgtgcctttacattattttcgcccgaacccctaagccttgcttagcgttacacacaaaacccgcgcaaaataattggggctgcagaaaaccaccaattcgggcaaagtcccttttccccccccccccgcggtattggnaacactttcgttccaaccactttctgcgtacctactactcgtcgccctaaaaagtgctcctcccccccacccccactatagttaaagtggtactctttcccccatcttaaatcaacgtctcatatcccgtgtacatacgtatcgtggaaatcagcttttttagcacaaacttttctggagtgggtcctcacggaacaagtacatttcccctctcctcaacagtaacatgtgttttcactaaatatcagggacacgattttctttcccgccactccaagatcttttttaccctctatacctcgtcatcgatagttttcccgcagttcattcttagataaagcccgctgcccctatatacaaacatgtaccccccgttacaagcatcctcggctattagttcaaatagcaataaatttccccctgccaaaaaaggaccaccagacaacaataaca

SEQ ID NO: 580126 - DNA, 319 bp, Homo sapiens
cgcctctggggttcaagcagttcttctgcctcagcctccagagtagctaagatgacaggcatgtgccacgacactcagctaattttctatttttgtagagaggtctcactatgttgcccacgctggtctcaaactcctgggctcaaacaatccttccaactcagccacactgggattacagctgcgagccactacacctgggtcaatcaactacttcctatgaatgtttcacttctgaacttttatgaataccctcaacttaaaatccaaaggagtcacatattatgtaattccattcattatccatttagggttgatg

SEQ ID NO: 580127 - DNA, 179 bp, Homo sapiens
gatccgcacagaatagcctttccaagacagtagatccaaaaagcctgctaaatagcataagacaggacgaagatcaggaagcaaagggtgcctgggaagctttaatccagagctcccgatctactacagaggcatcaactttctttttaagactgtttgcatttcctatcagctttctg

SEQ ID NO: 580128 - DNA, 152 bp, Homo sapiens
ctggtgacgtccgggacacccccccgcactcgcatgtcgcctgctcttccatgtgaaatagtggcgtccggggtacctctgcagcagtcgcatgtcgcctgcctcttccatgtgaaaaggtgacatccagggtacctcctccacactcgcat

SEQ ID NO: 580129 - DNA, 731 bp, Homo sapiens
gcgtcgcttgacgaatagttctacaatgggctgtgatgttccatttactgatgtctccagatgggaccccttactagtcaatgcctcacgagtattggccaggcatccaaggtaagactcccaatcgttgctatatagatgtatacaggcgaagatatcagaataaaatggcggggatattgaactataggactatctgcctgtctgtcaccagtttaaaagcattttaatactaagaccgctaattcgtttaatcttatattttagtcattgagtgtggaacttgtaggagcaggttgaataagaggatctctataacagatcctttcaaaagaagagttttagagaaaatagatttaactttaaccacgagtggaaagtggaccctatagggggacaaagccttaaaatgcattgaaagaattagatcggttcgtgtgccttgttatctatgggagatggagtgacaacctgtgtgagagaatttatcacaccaggtccttatggaataataagctagtgtgcctatgagttatattaatgtcagggtgggtaacacgtagtgttttcaaaaattgttaaaaaagcagttgcattgttatagaagttgggaatatacaaccaattttttgtagtaaatggtagttaagaatatcacattataatgccaactagagctccagtttcttttttaacaaaagcaggggatctggtatgaaattacatggtgt

SEQ ID NO: 580130 - DNA, 1679 bp, Homo sapiens
  misc_feature (66)..(66): n is a, c, g, or t
  misc_feature (359)..(359): n is a, c, g, or t
  misc_feature (921)..(921): n is a, c, g, or t
tccactgtgtagtacgctcgtccgatgcgtggctcgcttggagtcgctggtctgcactcttgtttntgttctattagcacagcgcgcgcgtgcctgtttctctctgcgtgatgttgggctcgaccacatctcttcttcagctgggggcgctgctccgttgatctgtcgtcgacataagcttcttcgcgggggtgcgctgttagtttgtcccccccttcgtgtctcacagtgtttttagtatggcggcgctccgggtgtgttggtgagagcccccccctttgttgcttagcacgcggtgcttcttcgctccccggtgatatccacccacgggggtgtttcgggggaacttccatccaggntcccccacagccttttgtttagatagggtgattattcctggtgtctcgctctgcgcgccctctttgggtgattgattctcgagagacacaccccgtggggggattctcctcttctctcccccccaagttgttgtgaaaacacaggcggatttattcctcctggtggttccacgcacgggggggagggatgtcgtccccccccacaatttgtgtagtgccgctcccgcctctgtggtgtccccccccccctcagagtcgcgcgccccacttgtgtggtcttctgggaggcgccctctcctttaggccgcccctattttctgtggtgggaacatccggggccgacaaaatatgggcccccccagaggacaccccttttaggcccccacccgggggggacaacggcttttttgggaagcagtacacacaaatacgcggggtgccccacaacaggatgccgcaccaccaacgacgtgggtgttgtcgcacacgacgacgggtgcggtggtggagtagtacacacccgcgcccaccacacgcgaaacacattacgcccagaaattgngtagagcccccatataaatctttctggggaacacaagagatctctctcggagagtaaagagcaaatagggagctctcttctcggggcaccaccccgtctccaaagagcacactctgtctctctgttttctctctctcagagataaagagctcggggagccccacaaaaactctttctcggtgcgcacatccacattttttcacgcgcccctcacgcgcacacacacataataattgtatatgttgtccacacgggctcgggctctctgttatattcgcgagagtgtctccacacgcgccacgagaatatacacacatataaacaaagagaacacactgagtctccgcgagaccacataaagagactctgttacacaggccacagagtgtcacacacactctatagaggctgcacacacacttctctctacacccccacatataggcccgcgagagggggtgtacaccagccttatttcccgcgcctctaaaaatattatcacataaatgtgttggtggttctctttgagaagaatttcatagtgccacaaatagtgtatttacgcctcgggggaatatttcttctaaaaggacgccctcgagtttctgtggtgtggtggagttttaaaaaggagagaacacactgggtcacagcacaagtccctcttgttaaaggccacaactcattgatatttccttaatttttaatttactttaaaaggggttttaaattttatttaaacctttgggttaagcata

SEQ ID NO: 580131 - DNA, 218 bp, Homo sapiens
tccgggttgaaagttggggggaaatgtgaggggaaaaaaattttccccaggaaaaaattatgcccaagaaaaccccaagcttgaaattaacccccccaaaagggaaaaaaaagggggggcccccccgggggggggccgctttaaaaaaaagggaacccccggggggaagaaattgggcccgaggaaaaatccccccaaaaaaaacccggcgaagggga

SEQ ID NO: 580132 - DNA, 1592 bp, Homo sapiens
aacaatagagcaggtagaggccccgggttaatcgcgacgaggcaagacggcggattaagccacgcgacgctgctgcgtctgagatcccggggctgaagactaacgccggaccccgagcatcgggacgtcgtagggtgcagcgactgaaggaggaactatcagctcccttatccggctatgtggacgaacaacaagaatgctgacaacgactcggcttccgactggagtccaacaaggcaaggacctcggctggttcggcacaaactgctggtatactccactgaccgtcctgcaacactactgcagcttctcgacatcgcacgtttgacacttcctaatcacatatccatacgtactgccccagcaacactctgcagcttccctgcagcctggaatggcaaacgaccagccaaacgcatgtaccacggggctggccaacacactactgccctgcacggcactcatctctcaacaccctcttgctgcgccccacggacactgtgcccaacacgctctctggcaccctagcctcactcctcactgggcccatcctgggcgcccatggggactccactgggcctgcgccagccgggcacaactccccccttcacctcctgcactaccaggacaggggccgcctcactcccaaaccaaccacacacgagcacaactgcaccacccacaacccgcacacagcaaactcaaaaccgcacacccatgcaagcggccaacgggagcccaaggaaaggagcaacccgtgtgcggcactcacagcggcctaaccgcacgcaaccgctaagtacgccaccccatggcaggccacttgcaacgagcctaccaaagcccgtcccacatcctacgaccctgagacatgtaagcgcgaccggcgggtaccccaccgacccccatatccacccaaacgacccggtacccatcaacgcgctcgggcccgagacgcccataaaacgaccctcaagcgcccttgcccacagggaccttagccggccgccacacttcggccctagcgccgccagaaccgacggacaagcatcgaaagcaacgcatccgactcagaatcccacaacaagcacaacgaccaatccctgggcgatagccccataatacagcactacgcaccgcgtatacagaccacgggcacgacatgggcccagcccacagagcggagagaccacccggggcgcacagacacacagccaaaccattgaggccgccccgatccaacgggcgcaaccgacactcctcctacacagcaacggcgcttcaaccacacaccaacatacatttccccgggccacactcccctcaagcagggctgtgcgcacgccaagaccacatagcgccgacaatctcaactatgggcgcagccgcccacccgcggcgcccgggcataacgagcccgtccacacacacgcgatgcaaccacaagccagcagaaagactgacgccaccccacacacgacacggcgcgacccaccttcgggcgaagcacagtacacacccacagcaagctacacacaccaacaacgacacgccgcgacaacaccagcaccggacgacacaaacacacgagc

SEQ ID NO: 580133 - DNA, 110 bp, Homo sapiens
agaatcgagctcggtaccattcacgaggggttggcatgttcttctcccatggctgatgaggatattccgggccatctccgcggacacaggctctcaccaagcggagacgg

SEQ ID NO: 580134 - DNA, 236 bp, Homo sapiens
aatgtcgttaactgataaatgaataaaagtggtatatcatacaatggaatattacttggcagtaaaaagcagtgatgatgatgatacatgctatgacatggatggacctagaaaacattatgctaaatgatagaagccagacacaaaaagctacatagtctaggattctctttgtatgagatccctagaacaggcaaatctatggagataggaaataaatcagagtgggttagtgt

SEQ ID NO: 580135 - DNA, 214 bp, Homo sapiens
ttccccgggggtccccaaaacccggtgggcaaatccataaaaattgagcgctatgggtgttaacgggcatgaggatcagtttgcacccgcaaggccaaaaggagaaaaggaacatccgttgaatgagggtgttttgtacataacttcaaaaacttgtgaacatcccttatatttgtcccccaactgtcagaataaagaacattttaaaatgaga

SEQ ID NO: 580136 - DNA, 109 bp, Homo sapiens
caaacctgtaggtgctgatcaaaaaataagtaaaaggtgcagatcccaagtcttgtagtatgtgcattcttcaagcaaggacagttactaaaggagataagtgtaaggt

SEQ ID NO: 580137 - DNA, 360 bp, Homo sapiens
cagcatcaaggtctataagagacgtggctgtcctggttctttcttctttgcactgagagacattgattaccaactatgtagattatttcctgacatgactctttctgggtttgtccttgacaaaaacatccaggaaacctgcagcaacatgactaattcaagcatgtacccactaagatctttgaagacatgcattatacacatacagagtctttagaacagactcataaattcagacagacacataattatgaaagcatatttaagtttaaattaactttcagcactaactagctatggcctatattactatttaaactttcctactccccagattgtggtatttaacttcagtttagt

SEQ ID NO: 580138 - DNA, 1109 bp, Homo sapiens
ccaggaggcggagcttgcagtgatgccgagatcgtgccactgcactccagcccgggtgacagagcaagactctgcctcaaaagaaaaataaaaaaaaaaaaaaaaaaggggtgtaaaaattttaaatcacttttggccccggaagggttttcccaccctctgtgtttacggtaactctcgaagttcctccaccacttagaagcaaaaactaggctggcacaaatactccctctctcgaagcgggcactcaacattgtgcttttcgtgtcatcctttcggagcaaaaacaacccaccaggactaattcccacaagcccgtgacccagtatgaagcgcggtcctattggtcccacaagcaccggagcactcgcctgcgtcggtggcgccatcttgggagcactgcttgcgatcgtctctataaaatctccatatcttggggctactccactcttttgtgaaaaacgcgcgcccaaaaaacccgagtggacacttctcttggacccgagaccaagacaacgcccccatgcatgagcaaataaaatagcgcgcactttaggaaccgcaacgccacgcaaatgggggggagtctcccccaatacaaacgaccaccacttgaggcgtcagtatgaccacacaccctctgtgtttggacacccctccttctaatgagagagacacatcgctcgtttggctcactattcacccccatatggcacgatttccccctacacgcgcgacatcgtaatcatcaacgaaagccaaagcgcagcgcgaaccatatattcaatcttcccccacacaattgcatatgaggcggcgccgccccaaagagcagacgtttcctttgtaggaccccatgcggtcgcttccactcggacacccttcgcccccaccttttcatacgcgggaggccccaggcctttaatgatgcaatgcggccatggtccctctagcgattacttccctctgatgtgagcgagtggcagctcatatgcgaccctgtggagccgatgacactgtgtggcccctccatgccgccctctctatttccgcgcgcctccgtgcttgttggacttcctgcctcgtgcgtcactaggccctactcctcc

SEQ ID NO: 580139 - DNA, 230 bp, Homo sapiens
acaggcgacggtggccctggcaagggcccgagatgccagctcaacgtctcttatctccatagctcgtcgggctacctcgaccccgatgtcgcgaaccatctggatcatgtcgatccgccattcctcggcccagtgccattggccgggtgcggcatcggccaaaggagccccacgaacgaggtcaagggcgctcacaagattggctagcggagccgtagatactcccccag

SEQ ID NO: 580140 - DNA, 121 bp, Homo sapiens
gcaagttcagcagtcgggatgatgaaggaccggatatgggaagttcaaagcgttcgaatgaggagactgatgactatgggaagaacagcaagtggccattgtgcctgcagtctgtgctcaa

SEQ ID NO: 580141 - DNA, 353 bp, Homo sapiens
ctcacagagatattcgtggagcttggtctgtaacacagaagcagtgatgagcaaggtctcttgtgccctgaagcccagcgaggtgtccacacttcacccttggctgggctgtgtgccaggaaaccctcccggtccaaggtcttcacaaccacgccagtcttggtagggaggcagactccacatcatccgcctttggggcgagcaggctcactttgtggaatcaccatcaggaaaactatcttaacctatcaatcagcagactttcttccttctctaattctgacataatatttgagatttcaaagaacccatcttgaactaaaatgtaaataaaggctgagctttaagttgta

SEQ ID NO: 580142 - DNA, 247 bp, Homo sapiens
tgtctctgggatcgacacttaaccaacctggaagtttgtatacggggaaaaaccaaattactagacttcagaagctggatgcgctcaccaactgacagtcctcagttatgccgagcaaccggctgaccaagatcgacgggtctgcagaacctgcgtgaaacctgcggtgagcctgtacctatagcttacaactggcattcgaggttcatccgaggagcctcggagacccaattaacaatactccacg

SEQ ID NO: 580143 - DNA, 618 bp, Homo sapiens
  misc_feature (34)..(34): n is a, c, g, or t
  misc_feature (78)..(78): n is a, c, g, or t
  misc_feature (114)..(114): n is a, c, g, or t
  misc_feature (132)..(132): n is a, c, g, or t
  misc_feature (183)..(183): n is a, c, g, or t
  misc_feature (185)..(185): n is a, c, g, or t
  misc_feature (220)..(220): n is a, c, g, or t
  misc_feature (288)..(288): n is a, c, g, or t
  misc_feature (291)..(291): n is a, c, g, or t
  misc_feature (293)..(293): n is a, c, g, or t
  misc_feature (296)..(296): n is a, c, g, or t
  misc_feature (318)..(318): n is a, c, g, or t
  misc_feature (326)..(326): n is a, c, g, or t
  misc_feature (328)..(329): n is a, c, g, or t
  misc_feature (337)..(338): n is a, c, g, or t
  misc_feature (345)..(346): n is a, c, g, or t
  misc_feature (349)..(349): n is a, c, g, or t
  misc_feature (369)..(369): n is a, c, g, or t
  misc_feature (373)..(373): n is a, c, g, or t
  misc_feature (382)..(382): n is a, c, g, or t
  misc_feature (413)..(413): n is a, c, g, or t
  misc_feature (416)..(416): n is a, c, g, or t
  misc_feature (450)..(450): n is a, c, g, or t
  misc_feature (454)..(454): n is a, c, g, or t
  misc_feature (466)..(466): n is a, c, g, or t
  misc_feature (474)..(474): n is a, c, g, or t
  misc_feature (483)..(483): n is a, c, g, or t
  misc_feature (504)..(505): n is a, c, g, or t
  misc_feature (541)..(541): n is a, c, g, or t
  misc_feature (550)..(550): n is a, c, g, or t
  misc_feature (554)..(554): n is a, c, g, or t
  misc_feature (588)..(588): n is a, c, g, or t
ctgagactgtgattgacagccaaagggattaacnaacgttttattctctgccccccaaaatatcctgtgtatccctangctcccataacgcttcccttcctgcctttcaagganatcgtcaagcgccatgcntttgcaaaaattgtggttataatgctctaaagaattttttgcatagcattnangccaaaggagtctatgagcaagtactttgccaccnggtagttcgtgcgtatcctacgccccccggggggtcactgtcatcctcaccggctgggacacggttcngananccntcgccccagccgtggccaagcnggccccgncnnggccaggnngaatganncanttacctcctggatcaatgcngcanggagcagtnaacacttgcttctgcttccgctgcagtgggngcnggccagcccccgcgcctgcagtggtggccgcggnggcngcggggtggggngggggganctcgaggcnaggctatgaacagtgagagannaagagaattgctggtgcttctccagggagatacggnacctacacnccangcaggtttttactttcaaacaggccaccaccagnaagcaaagagacctatgccttttttttttt

SEQ ID NO: 580144 - DNA, 454 bp, Homo sapiens
ggtcgacctcatcacggtcagtgggacagaggtggtccctgactttggggagatggtatcccagtggcccttccattccatccaagccctttctttccacggaagcacagacacccctctcttacctgcactcttttctttaggcaactaagcctcaacatttgaatctatctaaaaataaagaagaagaaatggcattttattagagattttttaaagataaaaagtaatcaagcctctggagaaaagaccatccatctccctgtggcctcgcagccatcacgaaatgctgtaatttggggagagaagatgcattatactgcatcttaatattagagaaacgcgcagtctgtgactcagcagtcccacttttaggtttctatactgcagaataaaagcgtgagtacatagacactagaatacgaaggcgttcattttcagaattataacgcaa

SEQ ID NO: 580145 - DNA, 335 bp, Homo sapiens
tcatcattcaaagctcttcttgtattcctccgaggctaggtagagtagaactcgtatgaagaacttggtgctggatggctgtcttcacaatggcctcgatgctctcaaactcaatgtaggcctggtctgaagtcttagagagccctttcttggagatgaactgggaggtaactccaacctcaaatgtcccaaacacgggggaatggtcgctggtgacgatgtcttcagtgcaatcataagaattgcagatgatgtgagtttcagggtaggattccacagaatccggtcacaccatgagggcacgttggtccggaccccatgagtgtctgtcattg

SEQ ID NO: 580146 - DNA, 113 bp, Homo sapiens
gggcccacatgaggaagagagagaccctcactgctggggagtctgccacactcagtcccccaccacactgaatctcccatcctccatggtgctgacatcctccatggtgctga

SEQ ID NO: 580147 - DNA, 388 bp, Homo sapiens
gtcccaaatattcacatgtgcctttctttggtgccggaaacgaacagctgtgcttgcagcatttgaaatctgattgtatctacactgacatcatgttccagctcggccagtatgtcaaagtgttgtctttgggtgcctggaatctacttgtaggaacatcagaccacaccttcactgtaaacgtcccaccgaatgacaataatatatgcccgttgtcatgccatagcagatcttactatcagtcatcattcatgtcccattaacgtgtcctggcgtcttcctaattctatggtataaatatagacattattatcccatgaagaaattatgacggtggcttctcctggttgaaattcaccagacgatgtatccatatttgtacctgata

SEQ ID NO: 580148 - DNA, 179 bp, Homo sapiens
  misc_feature (99)..(99): n is a, c, g, or t
  misc_feature (105)..(105): n is a, c, g, or t
gccactacacatcctctagaatgaccaaaaataaaaatacagcatcaaatgggacgacatggtgccaactggaattccttataccctgctgatgggagntataantgtggtacaggtcactttggaaaaaagtttgacaatttcttatccaattatacataaacctgtcctacgaccta

SEQ ID NO: 580149 - DNA, 557 bp, Homo sapiens
gatagcagctcaaaaacttactgggtatgtattccttttcttctttaaatattgcacattctgtgaattggtgtatcccggtagaatttttccctgaaatatattcatttggtactttctttctattcccattcccattggcatggtcttggatcgggctcacattaactcctaactggacttttgaaataacttcctcactgtactttcggtcttttcttttcctatgcaccttttactctgccacagatttgagaagtccaatcacagatctgaccgtgtcttgctgactggcttcctcaatcatgtacaacgtaaagcctaagatgtctgctttgcttctgactccctcgggatactgaaataccccagcacaacacctgccaatagagtcaggctacacacaactcagggatgttcccggcagttacctaggaagctcctcacttgttcccccgcgattcataattcatacttcatcttctgccaactccagcataccagtcctggcatgccactttgggatttatctctgccactgtggcgctgatctaccc

SEQ ID NO: 580150 - DNA, 937 bp, Homo sapiens
  misc_feature (9)..(9): n is a, c, g, or t
  misc_feature (75)..(75): n is a, c, g, or t
  misc_feature (85)..(86): n is a, c, g, or t
  misc_feature (89)..(89): n is a, c, g, or t
  misc_feature (92)..(92): n is a, c, g, or t
  misc_feature (105)..(105): n is a, c, g, or t
  misc_feature (109)..(109): n is a, c, g, or t
  misc_feature (119)..(119): n is a, c, g, or t
  misc_feature (129)..(129): n is a, c, g, or t
  misc_feature (148)..(148): n is a, c, g, or t
  misc_feature (152)..(152): n is a, c, g, or t
  misc_feature (177)..(177): n is a, c, g, or t
  misc_feature (181)..(181): n is a, c, g, or t
  misc_feature (184)..(184): n is a, c, g, or t
  misc_feature (189)..(189): n is a, c, g, or t
  misc_feature (195)..(197): n is a, c, g, or t
  misc_feature (204)..(204): n is a, c, g, or t
  misc_feature (207)..(213): n is a, c, g, or t
  misc_feature (223)..(225): n is a, c, g, or t
  misc_feature (240)..(240): n is a, c, g, or t
  misc_feature (254)..(254): n is a, c, g, or t
  misc_feature (273)..(273): n is a, c, g, or t
  misc_feature (307)..(307): n is a, c, g, or t
  misc_feature (350)..(350): n is a, c, g, or t
  misc_feature (382)..(382): n is a, c, g, or t
  misc_feature (384)..(384): n is a, c, g, or t
  misc_feature (386)..(386): n is a, c, g, or t
  misc_feature (405)..(405): n is a, c, g, or t
  misc_feature (420)..(420): n is a, c, g, or t
  misc_feature (422)..(422): n is a, c, g, or t
  misc_feature (438)..(438): n is a, c, g, or t
  misc_feature (476)..(476): n is a, c, g, or t
  misc_feature (479)..(479): n is a, c, g, or t
  misc_feature (482)..(482): n is a, c, g, or t
  misc_feature (508)..(508): n is a, c, g, or t
  misc_feature (559)..(559): n is a, c, g, or t
  misc_feature (563)..(563): n is a, c, g, or t
  misc_feature (574)..(574): n is a, c, g, or t
  misc_feature (582)..(582): n is a, c, g, or t
  misc_feature (584)..(584): n is a, c, g, or t
  misc_feature (594)..(594): n is a, c, g, or t
  misc_feature (605)..(605): n is a, c, g, or t
  misc_feature (652)..(652): n is a, c, g, or t
  misc_feature (656)..(656): n is a, c, g, or t
  misc_feature (662)..(662): n is a, c, g, or t
  misc_feature (680)..(680): n is a, c, g, or t
  misc_feature (691)..(691): n is a, c, g, or t
  misc_feature (700)..(700): n is a, c, g, or t
  misc_feature (792)..(792): n is a, c, g, or t
  misc_feature (829)..(829): n is a, c, g, or t
  misc_feature (844)..(844): n is a, c, g, or t
  misc_feature (846)..(846): n is a, c, g, or t
  misc_feature (856)..(856): n is a, c, g, or t
  misc_feature (876)..(876): n is a, c, g, or t
acccaggcngagggcttcttggttcctggagacatgcccagccacagcaaacacagggaaacgcgaagggggcanccggaaaaannggnccngaacggggggggngggnaagggagganccccacgacnggagcagcaggaagaaggngggncgggggaagggccgggccgcccagngggnccnccccnccccgnnncctgccnccnnnnnnnaagggaaacnnncccccccccccagcnctgaggaaaaggcncctggccggggcccccccngccccccccccacccgggggagaaacggggcccntgccccccggccccccccagccgcccagaagccgggcccgggncagccgcgggaagaagcctttgccgaacccanangngccgaacaagaaggcacangagggggcagccttnangacccgaggaaggaancccgcaaaaagtcccttggtgcccgactcggcccgganccnccncagcagcagccaggcggagtccacangcagggggttcactctcacagccgccagcgcgcccagagcgaccgggcggngggnctttaccacgncaaagggnanagtcagcacngcagccaccgnccccgagaagccaccagccacaaagctcatgcccacagaagtttggncctncggccngagcccattgagccagcncttcaccagcncatagttgnaccagtacagggctgagaagggcacatctcgaagggcagtggggccccagcccagccacagtgagcgccaccaccctggagccactgcagtncgaacacaggcacccagctcccggtacgacacaagcngagcctgcagctttntncgcataagcnccagggggctgatcacagtnacggtgcccaggcggccagcgcgccaccaaccatgggtgcgtagaggtcagagggcagggc

SEQ ID NO: 580151 - DNA, 508 bp, Homo sapiens
cagtataggagagcaaaagtgaggtgcacacccaaaattagaaattagaaaaataaaatcagaagataaagctgtgaaatcaacatataaacttatattgtcagaatggctcccagaatagcaaaatttgccaataatcatgtttttaaagcatgcacacacacacacacacaccacacaccacaaaatatgaggaacgatgtatgaaatattaaaacaaaaccaatgcaatttcttttctatgttggacactatcaaaattagaattagaaaaaaaagataaaatcgtagctattttctgtaagttttaattaaattaaaaataagcattttcgtaattgtctcgaatgaatttttaaatgctcatttgttactttctgttagattcaaagtaactagtttattcacaatcctaaaaatacctcaaactactttttcaaggctctgacttttttgctaacgtttatttattaaagacacattatcatgggatgtattttatttaaaa

SEQ ID NO: 580152 - DNA, 253 bp, Homo sapiens
tgggggaaatttaaaaatttttttggaccggccgaggggggtttgttttgaacccaattgggggggggggggtttttgaaagggggaaccgggcccttgggacccaaaagtttttggttttttgggggaatttcaaccccaataacgttttgggaacaccccccccgggtttgggttggcaaaattttttttttttttgcccaaaaaatttttgggggcccgggggaaaagccccccatggggggtccccttt

SEQ ID NO: 580153 - DNA, 828 bp, Homo sapiens
gatactgtgccctccatgaaatggaggagccctctcctaaaccgtggcctgcacatagtaacttccttccaaagaatacaaaatggaaaggaggggcaaaagagtaagtttacagtggagaaatgtgacaaatactacctcagccaggtgatcaaggtgaacagcagaagcaagaaggtgtgttgatactatgtacccttgatatgatgtgatgagaccagcattttacctttgtggtcttcctctcgaaaacccataactccgatccaatcatgtgaacaacagtagatgaatcccagctgagggacattctagaaacaaaccaggccagtactcccccaaactgcccaggtcatccaaaagaaggaaagtctgtataattgtcacagccaagaggagcctgaggagacaggatgactaaatggaatatagtgttcttgatgggatcctggaaccacaaaagaacattaggtaaaaactaagaaaatctgaaaaacatatggactttaatcaatagtgataaacaacatcgttctttaattatgagaaatgtaccatatgagtaaaagatgctaataataaaagaaacttggtgtggggtatatgagaactctgtactgtcttcacaaaattctgtagatgtcatctatctaaaataaagttatttaaaacgttaaaacacaagggggcgcctaagttctgagggcaagtaggtacagtctgtcaaggccaagggggataaaagagagggggttaaaggggggaagttggctggagacctccggggaatggaccggtagcagaaaataggaggattggggagtgtag

SEQ ID NO: 580154 - DNA, 245 bp, Homo sapiens
  misc_feature (95)..(95): n is a, c, g, or t
aatttaaacagtctcactgtgttgcccaggatggagtgcaatggcacagtcttggctcatggcaaactctgcctcgcaagcagctgggacttatnctccttttgtaaaagaaaaaatatttatttatcatacaaattgtacatacattctagtgtaagatttcaattaaatactaaccgcgctacctctgcagattggtttgttataacttggtgccagaataaaactcctttttttttcctcaa

SEQ ID NO: 580155 - DNA, 947 bp, Homo sapiens
actccccccacccgcgcgagtgtcgcgcatgaggcttcttgggggggcgcgcacacatactcccccccacaggagagcgtgggagagtaaatatcactctactctctctccaccagcttcgctcttcttcccgccctgtttcttcccccgggcctctgctgctcttcttttgtcttgtctctcgtcgcgtctcttccactcttcttgtcgtgcctctctcgcgtcgcgtggggatgtctgtcctcctctcttctgtgtgtacgcgtcggtgtgttcctcatctcctgttagcacagatatgattctttttcgtcgtgcgctcccgcgcgcgcactcgcgcgttgtagagagagcgcggcagctctctcggtgagagaggagagacagctctactccctctctcgacgcgcgcgcgtatgtgtttttctctccacgctgatttgcttggggggtggccgggtgtgttgcctctgtgctctgggacgccccactctggcgcgctctctccacatcacagaagcagagcgctctctctctctccccccgcaccactcgcggctgtgtctgtgctgtgcgctgggcgcccaccacgcaccacacgctctctctgctctgtgtgagtagtaggcacagagccggcggtcgttgcacaagtgactgtggataatattcttgtaatatatgtcttctctcacacccctcccagagagagagtagagaaaaagccgcctagaggaacgagcactcaatatttgtttgttgtggtgcttctttgttttgttctacgctccagagagatgagaacgagaccctcctgttgtctccgcgcggaaattggtgtcatgtgggttttatatatgaattgttctgttcatgttgtattaaataatatataatcataataatgaaaataaataataataataacaataagaataataaaataa

SEQ ID NO: 580156 - DNA, 157 bp, Homo sapiens
gcgagatcgtaagtccgtcatcacggtcaggactgagccagagcagacagaaaatcgtcatatgctcgctgggagactagtaaaggttacagcgtccggcattcgtatctgctggtctggcgcattttacttcctagtacgaagtgacgccggctgc

SEQ ID NO: 580157 - DNA, 701 bp, Homo sapiens
tagagggcggctaacacatacaggatgaacatcgaaatacagccacgagaagcagaggacaagagacgacatgctgacaccacacaacacgcaaccaagacggcaagcacagagccagaaaaggaccggaacaagcaccacaactaagaagacacaacaaagcacaagaaaacacaaaacaacacacacaaaaacaacaaaaacaaccaacaagaacaaaaaacaaaaaaaaacacataaaccacatatataaactaaataacataacaaaaaaaaaggagcaaaacatacaaacaaaacaaaacaaacaaaaagaaaaaaacaaaaaaaaaatacaacaaataaaaataaaacaaaaaatatccaaaaatacataacaaatataaagaaactaacacaaaacaataacagaaaaaaaacaaaagaaaaagacatacaaataaaacaaaaaacacaaaaagacaaaaaacaaagaagaaaaaaaacaaaagaagaaacaaaaaacgaccaaaaaagaacaacgaaaaaaaagacgaaaagaaacacaaacaagaacagaaaaaagaaaaacacaaaaaagaaaaaagcagatagaaagaagaaagagagaaatatcacaagaagacgcaaagagagaacgactagaagaggagagaagagagagaaaagtaacaacgtccaaagagacaataacgaacaac

SEQ ID NO: 580158 - DNA, 526 bp, Homo sapiens
  misc_feature (526)..(526): n is a, c, g, or t
gcctgtaatcccagctctttgggaggccaaggcaggcagatcacctgaggtcaggagttcgagaccagcctggccaacatggtgaaacccagtctctactgaaaaaaaaaaatacaaaaaattagctgagctgggtggttcgtgtctgtagtcccagctactcaggaggctgaggcagggagaatcgcttgaacccaggaggcggaggttgcagtgagccaagatcaatgccattggcacttccagctgtggggtgacagagcaagacttccgggtctcaaaaaaaaagaaaatctcttactttcggcagttttctcaaatggtgtgcactctcttattgggttatttaacctttaagtccggccttgggatcccggcagtagaggcctcctgggaaacttaacccctccctggcgcttaacgtgggaatttggtggtggtccttttggacccggaattcttcggcccagggtcccccttccccccaaggccatccaggtaaccaccaatttaaggtcctctgggn

SEQ ID NO: 580159 - DNA, 955 bp, Homo sapiens
gggctgacgcctcgttcaatttctcatagggttgcgcttgttaccgccgtgtgctaatggagcactgtaatggtttcaataggtgcgcgttccagatacggtgaatgagcctctttgatctcttccggtgctttgtcggctttcattggcatgtcgcgtagtgacagtagtattcctttttgggtagggtatgattcgtagattgataggagttgatgatgagcgaagaagaatgaggaagggggttcatggtggctcgtagggcatggcaaatggttcaatcagtggtcatctacaccacatggagggatatggagttcggggttcaagatgtcgaagcgccgaggacgggagggatgcagtctcgcacgtattaatttacgcgctttgaatgatccttagatagctgagatttacaattatgttagtcttcatgctgattatggggtgagcctggtcacgttgccgttttctcattacttctgaagcttctctaggctcctgagttctgagaccgctcgtggtgagagactacggtccagggacagaccactttcgggactcaatgcttaagtatccagatagtcaaccagcccaggatctcgggggggtctaggagagatgatgctcgaagtgaattcacccgatctagtctgccagtactgtgggtttccagaggccattttaatagggccgaatgatgatattgctaatggaccccagttcagaaaccagagaggcatatgacgggattccgaggtttcccaggtaggctggccgcttctggggcgagcaagtctttcaagaggtccggtactaaccctaaccatgggtatggagcgccgccgggtgcgtgtgggcaaacatatgtaccactatgagatggggggtgcgaaaaaaaccacgggtgtccgggttgggagggcaaccagcaggcgttttcccgaatttcagg

SEQ ID NO: 580160 - DNA, 279 bp, Homo sapiens
tatgtcgctggtacaaaactcacaggacatgatttggtctaagggaattttcatagttttggcaagggtgcagcaactcttctttttttccttctctgtgcccaggctggagtgcagtggcacaatcaccacttactgcagccttgacttcccaggctcaagcaattctcccacctcagcctcccaagtaactgggaccatagatgtgcaccaccatgcccaactaatttttttttttttttttttttttttttttttttttttttttttttatttttt

SEQ ID NO: 580161 - DNA, 213 bp, Homo sapiens
tgaggatgcaagtgtcaagaagggaacattgtataccagtataaactctctatagtgggtctgcaagtatgcttaacctctcggggcctcagttttctcatctgcaatatgaaggagttggactcgataatctttaaagtccattcctgctctaaaatcctatgcttttctgaagtactctatttaacagaatgcgttgctttctcactttga

SEQ ID NO: 580162 - DNA, 226 bp, Homo sapiens
ccgcgcagctgtactccaccggcaggttgtactgtctttgtctggttttggtatcagcgctaatacctacgacaccatgaaaatttgccttttcttttttctaaagggagattgtacagaattttgacgttcactctattttatttttttgataacggggtcttgctgtgtcacccaggttacagtgcagtgatgcagttgtggctcactgtaacctttacctcca

SEQ ID NO: 580163 - DNA, 324 bp, Homo sapiens
tacttaagcagtactccatgaaataatagataaaaggcattactgccaaagaaatctccagaggggcataaaaagtacagttcttacaaactatcttaaatataaaaacatgtcaaggtacagaacacatagtacgtacgattaacaggttataacagctttgcattatcacatgttgctaagccaagggtgttcctcaaacttctcttggctgcacttcaggtaatcttcttcccctcatccccccaggcctgaggtttgatattctccaataatgtggtaggctcattcctggctagctttttgctagctgaataatctcaa

SEQ ID NO: 580164 - DNA, 287 bp, Homo sapiens
  misc_feature (281)..(281): n is a, c, g, or t
  misc_feature (286)..(286): n is a, c, g, or t
gggggattaaaaactgaaagagctcattatcattgacttaaaataccgtaagtgtcacttgaggtcaggagttcgagaccagcctgatcaacatggcgaaaccttgtttctactaaggatacaaaaattagccaggcgtggtggcaggtgcatgcaatcccagctactcgggaggctgaggcaggagaattgcttgaacccgggagacagaggttgcagtgagccaagatcgcaccactgcactccaacctgcgtgactaagtgagaccccgtctcaacancatang

SEQ ID NO: 580165 - DNA, 253 bp, Homo sapiens
  misc_feature (55)..(55): n is a, c, g, or t
gactgaagtggagtatgggcgtgtggacggcggacttcagagtcactggtcccanagtagaggtagcacacgaaaaggaaacccaagaagcaccagtagagaaagcaaacaaccaaggaggggcgggaacacctcacattgggaaaaagaaagtcaggcaggaaattatatttttaagttatttgacctgatatttgccaaatgtgaacttttgctggcctttacttttccaataaaatcaactatgatcatg

SEQ ID NO: 580166 - DNA, 127 bp, Homo sapiens
agaggatcggggtgagaagctggagaacagtgtagttaggtgtggtcctaacccacattgagtggtggcatgtggattggtctatcaaaaattaaatagaagcgttagggggctcactcttttattg

SEQ ID NO: 580167 - DNA, 1235 bp, Homo sapiens
gaagaggaggaggaagaagaaggtgatggtgaggaagaggctggagatgaagatgaggaagctgcagtcacgctacggcgcaagctgggcagctgaagatgatgaggactgacgatgtcgataccaagaagcagaacaccgacgaggatgactagacagcaccaaaggaacacgtcacactaacgaaaaaagaaagggccggccgtgttccacaggaagcccacggaagggcgccacccagcaacaacgagtaaccaagacaacatcggaaccaaacgaggacaccaaacgacgaagaaggacacactccatacaaccagagcacacagaggccacgccacagaagaacaacaccgccccaacaacacagaagcaaaccaacagaccaagcaccaaggcgaactcccacatgcacgacagagaaccctcaaaactaaccgcaggcaggagacacccgcactaggcaacacccacgaaccgcagaaaccgcacgacgcgcacacaggacaaacgtaacggagtaacaagacacacccacacaccaaacaagacaaacggtcctacgaccgcaggtaaaaagaccacacccaagcaccataccgccacggccaggacacgcagagaagccacaggcatacaccgggcaaaaaagaagcaccaaccgccaacgaccaataaaaggcacaggcgagacacaccggagaatacaccagagaaggccaagagccacgcggcgcaacaggccggcagcggcagacacgacgacagaccaacaaaagggaccagggaaccacgcggcgcccgacccaggaggagcgccagagaaggaagagagaagacaaggagggaggcgcgagggcagcgagaagcgagagcccgaagaagccgcgaggcgacgcgggtgggaggggggaggcgagacgcgaggcgcgggggggaggaggaggggaagcggcgccggacgcgggaggagggggggaggagggagcgaaggaacgcgcgcggccggcgagcgcgagggaagagagcaggaggcaggaggaccgggaagggatggcgcgagaaccgacggccacgcagagaaaacaaacagaagagagcagagacgagaggcaggcaagaaggcggacgacccggagacacggccaagcagaagaggaagcaaacgagcgcggaacgggagcgcagaggcggcccagcagaggaacgagaagcgggacacaccgaccgagccc

SEQ ID NO: 580168 - DNA, 695 bp, Homo sapiens
gcatggtgccatggctcacatctgtaatcccagcacttttggaggctgaggcgggtggatgcttgaggccaggagttcgagaccagcctggccaacgtggtgaaacactgtctctactaaaatacaaaaaaatagggctgggcgcggttgctcacgcctgtaatcccagcacttttcagaggccaaggcgggcaaatcacctgaggtcaagagtttgagaccagcctggcaacatggtgaaaccccatctctactaaacatgcaaaaattacctgggcatggtggcaggtgcttataatcccagctactctgggggccaaggcaggagaattgcttgagcctgggagatggaggttgcagtgagctgagatcatgccactgcactccagcctggcaacagagcaagactctgcctcaaaaaaaaattaaaataaatttaaatacaaaaaaaaatagccaggtgtggggtgcatgcctggaatcccagttacttgagaggctgaggcacgagaatgtgtgtgaacccaggaggtggaggtgtgcagtgagccaagatcaaaagaagacaactgactccagctgggtgacagagtgagactctgtctcacaaaaattaataaattttataacttcagaaatgctggggatctcatgttctttttagcataatgtaatttccttaggaatgtttagaa

SEQ ID NO: 580169 - DNA, 1360 bp, Homo sapiens
ggggcaccggggcggcgggttggtctacgctgtgcgcgggtgacgtcggaggcagcggtggagcggagcggggccgcctggggcctcatccaagtggccgcatgctggcaggcacgttagggccccacctgaccactgcgctggctggacctgaatgaactgcagggaacgggggccagagggaggacccatgccaccactgagcctggcctgcaggccaattgaaactccaaactgttggaggaaccttagccaccctgccacaatccatccggccgtgcgtgtaccaaggcagcgtgacaggacacgtgacaccagcagaaacccaaccaccgaatgggcaatcaaagggatcgtttcccacaaactgagggaagagaccgtcaaccggagcacatccaagggatccacgcaattcggacgggggcccccattgacggcggggaacaccaccgaattacatcgccattggcacacgcggtcatggtaaccacgagctagtttggaacaaccttattcacgttgccttaggttgcgcacatctgaacctaatcccctcgttggcaccttccgccacgaagcaccaaagaggtggcgcattcaccgtttcccagtagaaagccacaaacaaagtaagacttccgatttaccaccacaccgcggagcaaagaccctgtcttggagcgctgggcactacacaacttgtgcgacgcgaaggaacttctagcttgggcgggttacacaaacgccggcgtggaccttcccaacatgcacggggctgcaacccatggggcgaaccggcgtcgctataggtaacccattacggcggagcaaaagttcaccggggaacccaaagcagggtagtcccggttggccgctggtaagacccgaactgccacgacgccgttgaccgccttgtagcattgaaatttcgacgaaaagacgcgataacaatgcgcccgacgtgaaagcactctcctggacagaacattacgaaaggaggagaggcgtgacagcggaagggggagagcaaccggacccacgtggcgcatacatatgtgaggacacgcaacacctacacccgagaagcgagaagagactcagttggaccacagccacaccaaggcagggaccacgccgaatcaagttgagagaatccaaacgaacgcaaaggaaatttccccgcaaccggagcagcagacaagccagcccacagaggcagcagcgaggtgagtccgcaccaacgtccgggcagacaacaagacgagagccccagcagaacagaaagcaccacaggagcgatcacagagaggagccagccaactaggagcagagcaaagacacagggagacacacagct

SEQ ID NO: 580170 - DNA, 254 bp, Homo sapiens
  misc_feature (17)..(17): n is a, c, g, or t
  misc_feature (48)..(48): n is a, c, g, or t
  misc_feature (86)..(86): n is a, c, g, or t
  misc_feature (192)..(192): n is a, c, g, or t
gaggcctggggcatctntgtactgaaccccaacaaaaccaaggtccanggaagctgtgagggtgcccatccccacctgcttctttnattcccctatggacacctcagctttggattcatgcaggacctccagcagaaggttgtctacctgaagctacatggcggtggagtacaatgtgtccttcccccacgnagcacagtggacattctcggctcagaatgcatccctttcgagatctccaagcaccccttggg

SEQ ID NO: 580171 - DNA, 938 bp, Homo sapiens
tggtcaaaaaagccagttttttttttattggtaaagctctgccaaaaatcttctagggggtgccaagggtcaccggccacactcgccccaggttgtccgtgtacccagcaaacagattcgggccttcagcaaaccaaggccagggaaggctgcacgggggtgtggtttcttgccttcgcttggcgtggttactgtgattaacttccttttggcttacagttcactcatacaagtgattcttttcccttctaaatctcccagaatctttgatgctgtggggcctgtgttggcagcacacagccagatacgcggtatagggctgaacgcacaggggcgttgagtaattgtccccaccattcatagcgttgtaaggggtggttggccttcgttgaaagattcccataaacaggggccgggccatcctggcctccagaagcacagaggggatccatctgggagagacagtcacggggtccagatacgccggggtggggcatgggggtgggtctcacgctggcagtaagccagggttccatacctggaccaagttggtcccacgcacaggaaagacgatgatagggtcgtggctagtggggcgacaacgcggacaagaacccactccggagggctctacatccctgaacaggggcttcgggcaccaccccagggttataccaatcaagctgaggggtaaactcccggaaaatcccaagaaacaattcgccggtctgtcaaaggaaaaaggcaactccagcatctcttggtgaggggccacaaatccctctgggtggtgccgtcggtggacccccagagggggaggctccacaccagggacggaaggggaatgcccttgaggacaacccatcacacaaggggtgccgaagcgggaaacccaggccaccggcaggccagagaggtctcaagggaagattcgacgg

SEQ ID NO: 580172 - DNA, 327 bp, Homo sapiens
  misc_feature (9)..(9): n is a, c, g, or t
  misc_feature (16)..(16): n is a, c, g, or t
  misc_feature (81)..(81): n is a, c, g, or t
tcaagtgtntccctanttaagttgggttgtttccttacctgttgtttttgaggttttttccctaatagtctgggtaaaaancctttggttatttgatttatcagcaaatattttttgtatgtaacttggcttttcattgtcttaatggtgtcattcactaagcaagattttcattttgtttttttttaagacggagtctcggctctgtcacccaagctggagtgcagtggtacaatcttggctcactgcaacctctgcctcccagattcaagcaattctcatgcctcagcctcccgagtaggtgggactacaggcgcacaccaccac

SEQ ID NO: 580173 - DNA, 170 bp, Homo sapiens
ctgacctagaggatcccgtgctctgtggaggacgcaaggaggggcagcctttgaaaacgaatccctccaaggaaatgtttccaccgacctaagaagtattactaaaaagattcagtcccaaagaattttcaggggtaactttaacgatgtgttttgattaacgatttgag

SEQ ID NO: 580174 - DNA, 532 bp, Homo sapiens
aggagtggtttctgtgaaccggtgctaataatacgacattggttctatttctgttcccgacgtgaattactgattcacttatgccacctttcttggacgtctcaacaaaatgggttaattcttaggagcaatagcagatgttcatggagtagatttgttcctcagatacatggtacccctttcacccagccccagagtggcccatggactaggcagtagaggagccattgccttgagtgtctttgcgtttcccaagaatgttgttgtagaagggcactaatgtttagtgagttgtcagctaatgggcccagcactttggtgattgtgttggttttttttaagtagagatggggtcttgctgggttgcccaggctggtctcaaactcctggctataagtgatcttcccaccttagccacccaagttctgggattacaggtgtgagccatcatgcctggccaggcctagcactttggagacactgtatgcgtgatagcagtttttttttttccctgtgggagtaggagttctcg

SEQ ID NO: 580175 - DNA, 112 bp, Homo sapiens
gcccccttaagacacagtagtgatattgtaaatgcgattatggaattaacaatgcaaccatatgggagcaactttttttggtgtctcaaaggagtaactgcagcttggtttg

SEQ ID NO: 580176 - DNA, 399 bp, Homo sapiens
gagtttccacccccaccccatttgcgggcaaaaaaggtttagtttgtccacccccattataataccaggactggttacttggttaaggaggggtttagaaaatctgtcccttttaaagcccccttacttacaataaagtacttgggaaagtggttttcaaaagtataaatatcctgtatttaaatgatcaccctctaaacattttatcatttattaacccccccggccggggtctattattaaattcaaatctccccccggcaaatttggggtctcaatttttacgggccctttgtttttaaaagtgtctgctgttgcaaaaaaaaaacattttctgcctgagttttaatttttgcccaaagttaattttaatctaaccaattaaacccttttgccttc

SEQ ID NO: 580177 - DNA, 444 bp, Homo sapiens
aaagacaggctattttatttcaaaaaaagaaaaaaaagtgggctctgggaacaggattagtccaatcgggccttcagtgtccctggtggtgattaagtccttctacgatgatgtggacaatgaatcccatgcctgacactgcatcccggtccatcggctgcagaccggcgctacgggatccaggcccagatggtgaccacggacatccagaagatctagcccatgggtgaccggctgtacatcggtctggccgggctcgccacatgacgtaccagacagttgcccagacgcctcaagttccggctgaacctgtatgagtgaaggaaggtcggcagatcaaaccttatacccatcatgacacatgctagggcaaactcttgctatgaaaaaaggtatggcccctatactacactgagaccagtccatagccgggttggagcacga

SEQ ID NO: 580178 - DNA, 170 bp, Homo sapiens
aacaggttgatgctaggatgtgtgtttagagagagagtctcgatatctgtcagggatctgcaagctatttcggaacaataatgaaagatgtgggagtagcgcggatagtggtgcaagtggcaaggggtggtctcccagtgctatgatgtgggaagtggcaagctccacgc

SEQ ID NO: 580179 - DNA, 220 bp, Homo sapiens
ggactccacagtgacgtagttctcagagaacccgtactgctgacatatgcaaccacacaccaccgagacttgcagacacgtggacacagatacagtctcatgcacagacacacacacaaggacatactacacagacgtgcacacacagttacatatgcatggaagacacacaccatgcacacagattctgacacatagacatgcacacacacacacacat

SEQ ID NO: 580180 - DNA, 290 bp, Homo sapiens
cccccggttttcttttttaaagggggatccccccccccccgggggccccggcccctttttttttgggggggggggcccccaaaggggggggggcccccccccggggggtttttttggggggggccccccccccgggggggggggggggggggttttttttttttttgggggcccccctctcggcccccctttttttttcggaaaattacccccttggggcccccccccgggggggggaaaagacccctttttttttggggggggggggggggaaaaacccccttttttta

SEQ ID NO: 580181 - DNA, 629 bp, Homo sapiens
cccagcactttgggaggctacggtgggcagatcatctgaggccaggagttcgagacctgcctggccaacatggcaacaccccgtctctaataaaaatataaaaattagcctggcatggtagcatgcgcctatagtcccagctgctcaggaggctgaggcatgagaatcgcttgaacctaggaggtggaggttgcattcaactgagatcataccacttcattccagcctgggtgacagagcaagactctgtctcaaaaaaaaaaaaagggaaaactctgtgttgagggactttggttagtaaatccctctcagtattattccctccttttccccacagcagcttcctttaccggtcacctagaagggagcgggtctgtactacactcccatttggggtgtgacttaggccacaccacttcttaatcatctcccaatttccttagacattctcgattttcaggggcgggtaccctcggtgtacctcggaactttggaagcggtcactgggtttccaaaaagggcccacggcgggggtaacgaggatgggccctttacaccacttagtggttccccaagatttcttcacccgctaaaattaaatctcctttggagacgacaacacaaaccta

SEQ ID NO: 580182 - DNA, 551 bp, Homo sapiens
  misc_feature (31)..(31): n is a, c, g, or t
  misc_feature (75)..(75): n is a, c, g, or t
  misc_feature (103)..(103): n is a, c, g, or t
  misc_feature (125)..(125): n is a, c, g, or t
  misc_feature (263)..(263): n is a, c, g, or t
tttggaaggccaaagccaggcagttcccctnaggtcaggagatttaagcccagttgcccaatatagagaaccccngttttctacctaaaaatccaaaaatcanctgggcgtggtgttgcatgccnagtaatcccagctactcgggaggctgaggcaagaggatcacttgaaacctgggaggtggagattgtggtgagctgagattgcaccattgcacttccagcctggacaatgagaatgaaactctgtctcaaaaaaaaaanccaaaaaggccgggcgcggtggctcacgcctgtaatcccagcactttgggaggccgaggcgggcagatcacgaggtcaggagatcgagaccatcctggctaacacggtgaaaccctgtctctactaaaaatacaaaaaattagccgggtgcggtggcgggcacctgtagtcccagctactagggaggctgaggcaggggaatggcctgaacccgggaggcggagcttgcagtgagccgagatcgcgccactgtactcccgcctgggcaaaagagcgaggctccgtctt

SEQ ID NO: 580183 - DNA, 161 bp, Homo sapiens
gttcccaatctcgaaaacatctattctggggaatccgggataaaccatagtggttaaacccaggggggccaaatataacgtttttccccgagtatagtaggaggccccctcctctcccagagccatatgagagccatgtactcgcatatagtcgggacaga

SEQ ID NO: 580184 - DNA, 184 bp, Homo sapiens
caggcacaggagttatgtacatgcactggcatattatacgtgcccaacaaatcatacttgcacatgaggagcatgaatgaaagaagggctgtgatggtcactaacacacgagctcaccggtgttcatccttctttccttttctttttttttttggctacgtatctccgaacaatcaccagggcg

SEQ ID NO: 580185 - DNA, 220 bp, Homo sapiens
cggaacatagccgacgctcagtcggcgtcacatctcattcagcactatcgcatccatgctcaagaaaggccttaccagtgtcagctgtgtgggaagtgcttcggccgaccctcctacctcactcaacactaccaactccattctcaagagaagaccgttgagtgcagttactcctgaaaaacctccagtcagaacgttctcaacatctttggctttctcc

SEQ ID NO: 580186 - DNA, 385 bp, Homo sapiens
caggtctagcccagagtagacacccctggttgctcaggtctagcccagagtagacacccctggttgcacaggtctagcccagagtagacaccactggttgcacaggtctagcccagagtagacacctctggttgcccaggtctagctcagagtagacacccctggttgcccaggtctagcccagagtagacacccctggttgcccaggtctagcccagagtagacacccccggttgcccaggtctagcccagagtagacacccctggttgcccaggtctagcccagagtagacacccctggttgcccaggtctagcccagagtagacacccctggttgcccaggtctagcccagagtagacacccctggttgcacaggtcgacgc

SEQ ID NO: 580187 - DNA, 157 bp, Homo sapiens
gctccgcttttaccgctgcacagccttccaaaaagctgattataggcgtgagccactgcacctggccaggcccttaaaaacttttttttaattaagtaattgttttgagacagggtgttgctctgtcactcaggctgcaggattgtttttttgtttt

SEQ ID NO: 580188 - DNA, 519 bp, Homo sapiens
cttaagtttgggtaaaaatttgcggtggttcttcattatttgttcaagaagcattagagttttcacaaacttggtgtaagttgctctttaattgtcttcctgtggatatgttttgtaggactctctgctttttctaaatttcactactcacatcccacaacattatcttcccataattctggcaaaaaggagtcctgggatacctctgaagtgtggcccttaaatcccagttcctgttcatacctgactcccaccaagaaagacttttaacttgaaagtgaccaaaacaaataggaaaaaaaggaaccatcaggaagcagaaggtatgcagtgagaagaatgctttagactcttgaggaagattatcttttgtcttctcagagagataagaaatggtattacattcaaggtgctattaaggaagaaaaagaatagaaaagagtacttacaaataaaaagtaacagtagacaactatttagaagggctaaaagataaaggaaatactctttaaaaaaaaa

SEQ ID NO: 580189 - DNA, 554 bp, Homo sapiens
cgcgcacaggcctggaccaagctacccacatctgaactatgtactgatcttcttattctcaaagtctgcaagatgactgatgtgcaataccatggctatgccatgtgactttacttgacctggatggtcagtgtcccaatatttcactgactttagtgggggtgcacatatgccataagttcttccatctatcatccccatcactcaccatccatgtaatgacataatcatgtcacagagtgacctcggaatcactattcctagctgagtatactaaggctcactatctaggtcaggttcaatagtgtctgtgtctcctctaaaccctccttcatcatgcctaccttgaggaatacagcaagtgatcattcacgcaaggctcaaaggattacagctttctctgccataaagattattgctcaaatacataccatacaacaaaccaacccatttcccacaaatcttactgtctgccttctcacagaatacataatgccttctatagtgtctcttccttctggtgtactctttcctaactgaacttgttctttatc

SEQ ID NO: 580190 - DNA, 209 bp, Homo sapiens
cggtgactcagaggatcccctcggaacgaggtactggactcgcgaagaggtagggacctggggctgggggaagagggggcggtggcccctgggcaggggagagcccagccggtgactggctcaggcagcctcggccatctcctcacggcattggctctcctgagctccagtgcctgcagccatttgatcttggtctggactctccaagt

SEQ ID NO: 580191 - DNA, 146 bp, Homo sapiens
  misc_feature (39)..(39): n is a, c, g, or t
aaagacggcgatattgctctgctcagtatggtcattcgngcacacgccgaggatcagacggacaggtcaaagcgaagtcgccgatcttcacgctgaagatcggcgatttcggtctggtgcttcggcgtgtgcagtctgggggctgg

SEQ ID NO: 580192 - DNA, 862 bp, Homo sapiens
  misc_feature (283)..(283): n is a, c, g, or t
tttctgccattttgttatcgcccgttatgtttcatgcctccaattattgtccaccccccggcaaaaccatgctgacccccttcctgccaatatccccttgggctctaattataccagccaccattgtggcctgtgaacaaccacggccctcatagtcgccttcctatcaatgaattggtcaatgcctaccccccatttgccccccgtggggtacaccacagttatgtcacgccaaccccctccgtatcgttccccggcgccaaccaattttcatacagttcgncccccgggtgttacactccgccgggtgtatttcgtgcctggcctactcgcgattcaactggactgcgcaagtccacccttcccgagtctattcatctcctcttcttcaaagcggcacttctcaaccacttcatcatctccccaataaaagcctttttgtcatcaacgtatcttttgcacaaacactccttgctaccactcgcgccgtgcccctcccccgctattttaccacaacatgcggataagacctcttctctgtgtcgttaataaacccaccctcttctctcctgtacgccaaaagctccatctctccatacttaccatggcaattcacccaaatatagtcccccaccccctcattactccctcttgtccaaaaattctccccacccaccgccatggaggctcccacatcatcccccaaccacccatgtacacaaccacatctagacaccatcctatatctcaccacgatgggacacaacccctctcatgttctatacaacacctatccccccattttctcttccctaatctccctcctaaccccgaccacatcaatatacccgggtttccacgc

SEQ ID NO: 580193 - DNA, 276 bp, Homo sapiens
ggccccctgaacagtgagaagccatgcctctgtggttgtcagcccccgtctggctgtggtttgctgtgccacccccggactgtcaccccccttgcagtttttctatctgtggctctcatttactctctttcttcttcctttctcatgggcttcccctgcaggaagtacacttactgctatgtcacaaggtgcaagcgaatgctcatgctgtgccccctggctccctttgggattttcctggggccccagggactagaaatgagaccaggtggtctt

SEQ ID NO: 580194 - DNA, 391 bp, Homo sapiens
ccctacccaggttcctggtgtgtgcatagagaaacaggacagcttgctgctcttgttacagaggggcgcagatgcctgagagaataggaatgatgcccgctcaccaggaagtataagctacttgccttcatacttcaccaagcttgaaaatacatcacccatcgatgtgtggagaggaagtaaagtttaattaatgcctaattggattgaggttgatgaatgaggtggcgatttggtgctgtgaaaattgttaacggtaataagcttactaggtcagggtaggtctaaggaggagtaagggccaggtattggctcgtaaagaaggcctaagatagggggatttgtggcgttgttgtgatggctagggtagcaatccgagtatttgcggacg

SEQ ID NO: 580195 - DNA, 542 bp, Homo sapiens
atcccagcactttgggaggccaaggtgagcggaccacctgagatcagcagttcgagaccagactggccaacatggcaaaccctttctctactaaaaatacaaagaaaaattagccaggtgtggtgataggcgcctgtgatcccagttactcaggagtctggggcagggagaattgcttgaacctgggaggcagaagttgcagtgagccgagatcacaccactgtactccagcctgggtgacagagagagactccgtctcaaaaacaaaacaaaacaaaaaaagacagaaaaaaatataatatatatatatgtatatgtgtgtgtgtgtgtgtgtgtgtgtataaaataaaatataaaatcacatgcatatcttgggtaaatctgtctagcgtgaaggggtctcagacatgaatctaggcaatgggcgaagacacaatcgttttctcccacaagagagtcaacttactcagaaagaacacaagtggcatctctgggtggacccaattatatgactctaaaatattaaagcaaacattgacgag

SEQ ID NO: 580196 - DNA, 199 bp, Homo sapiens
cccgcgaagcaaaattgacgttaatattattcaggatgcctggcgacgccagtaatcgcatgacagatacaaggctttttgcggtgcgccggcgcacttgatggggagcggtggctgagaaaatatcgcctggccgcctttcatttcgcggaccagttgccaggtatattcggcaagatcaaagcgataattagaggtg

SEQ ID NO: 580197 - DNA, 320 bp, Homo sapiens
gtaaaccataatagctaaccctgtggctaatgttagtcctacaaaggccatctagtccccaggcaagaaggagttctgcttggggacagggctgttaacatctttgtttaaactataaactacattcctctcaaagacagttcagccgacacccaggaatgaacaaggatggcttgagattagaagcaagatggagttgattcagttagagctcttccgctatctcagccataattttgcaaaggtggtttcgaataatccacctggacattctctggcccacctcaaacgtgcatccagagtctcaccccttctcactg

SEQ ID NO: 580198 - DNA, 81 bp, Homo sapiens
aaagattttatactacatcttgttaaagtcctatgaatgtgtgtgtgtgcgctattaaaactgctttttctcagtttgata

SEQ ID NO: 580199 - DNA, 466 bp, Homo sapiens
ggtcagtggacagaaaagtactgagaggaaacaccgggggtagtggatattcagagcaaaccaacctaacaggattcttgctgaagacaggccagagtgatcagacaccacctgggggacagtggaagctgaggaacctaatcaggttgtgagggtaatcaggtagcgagggtaatcagaaagcgagggccagctgggtgcagtggttcatgcttgtaatcccagcactttgggaggctgaggcgggcagatcacctgaggttgggagttcgagaccagactggccaacatggtgaaaccctgtctctcctaaaaatacaaaaattagcctggtgtgctggcgggcgcctgtgatcccagcttctcggaaggctgaggcaggagaattgcttgaacccaggaggtggtggaagttgcagtgaaccgagatcacgccactgcacagagcaaaacttcgtcttaactc

SEQ ID NO: 580200 - DNA, 770 bp, Homo sapiens
gttgaaaagaagtagaaaggaagctcggcaatatcttaccccgccgtgtttaccacatacacccatcgacctcttagcatcaccctagtattgaggaggacatccgactctgtcgccaagtagacagcgatgtttatactgcgtcgctgcaggtacccgtagaactcgatgcagatagtgtatgacataactcacattgtatcacttaatagtagtggcacctgttactcgactatggctcctacgaaggtgttgcatgctgagtctcttagctttgtataccaggtgatacagttgaggcctgtcccgtgacaggagtgcgggcatgagcatcatgcaaggcacgacgagaggatccctactggaggctcttaacttctatttaaatggcaatagcaggtatctctaacagagaacccgacatggtgccttaaattctacctaaacctagtcattagagtagatttcggcgtatggaggcagactctcgcgaatcagagaccctaaacacttccgagtcacgtacatggctaagacgttcagccagtcgtagctgaatctactatactcctattggatccaatgagcttgatcaacggaacatagttatcctagggtataacaggcgcgaatcctattgctaagagtccatagtcgatgcaactaagggtttacgacctcgatgttggactcaggacaatcccgagtggtgcagccgctatgtgacaggttcgtcccgttgcaagcgattgaaaagtcctacgtgatcc

SEQ ID NO: 580201 - DNA, 986 bp, Homo sapiens
taaagattgggctcaatgatatatttggccagttattttattttttctaaaaacaatagaaaaaaatcaactttaaaaagcaaaagcgtacttaaataaaaaaaattagggtttatagtcacctatatatactaggtactgatatactaggattggaaattctggtgtaactggcgtataaacggtttgtattgaaagttatttacttttaagtggggaatatttacaggaagaaacattggtggtaaatcttaaaattttttaaaaacaattcttaaatcacaaatctggtgtaaaggaaaaaaaaaaaatgggtaacgcttaaaaaatgttctttaatggcccaaagtccaattggagggcagtttacattatgggctaaatctttcagtctcaaagactcaggccaagggttggtcgaggttggcattggactcatgctttgtgaaacaagttctcatagggtgatggcctcgaggacatttcgtgttaaaaggaactcgtttcccttactttcccttacgcacaagaagttccgatagcgtgtccaagttgggtgttccaactgttctcgatgagtattccgaaacaagtcctcttcagaaagtgacctttggcacctctgcttgtgacggacaggattgtattgcgggggctattaaagcataactacctggggggctttcattggtgtttccaaatccgggagacgcgggcacccaggggaaaaaaaagccccgataaagaaagaacacccccggggggccaaaagcttgtgttctcccctgaaaatacccaggagcgagaaccagggagagagaacaggggagaacaacgctcagaacatgacatacactagaccctggtagaaaacaccctctgagaagaaaaacacaaatacaaaagtgaaaagaagaacaaaaaaagataagaaaaataagagaaaagaaagaaaaatagaagaagagataaaaaaaaatagatag

SEQ ID NO: 580202 - DNA, 385 bp, Homo sapiens
gtgaagactattgttagttcatgggcaggaaaaatacaggcaactggcgagatgtggtgccatagtttgctgactcttgcttttaagtatttgtatcgttgacaagaaaattgttttgtttagccatccccaaagttagtattttattctgatttgggcctataagaaatatctgggccgaggcgagtggatcacaaggtcacgagatcgagaccatcctggctaacatgggtgaaacccccctctctactatagatacaaaaaactagcctggcatggtggcggcgcctgtataccaactctttggaggctgaggcaggagattgcgtgaacctggaagcggacttgtttgacccgaaatgggcccttgacttccgcttggccg

SEQ ID NO: 580203 - DNA, 306 bp, Homo sapiens
  misc_feature (17)..(17): n is a, c, g, or t
ttgcccccaaatttttntttttttccctcaaccaaaggagggttttctccaggccagggtgggattttaattgaatttttaaataaaaggattggtcttaatgttaaaaccaataaaaaaagcctgtggtttttcccgtccaacaaggaaacccctttgtaaaaaaacccggagtcccggatgggggcttaaaccgggtttttttatcccccaaaaacccaaaatgttaaaaaccccaggaaggggttgggtttagaaaggggttttgggcctcccccttaaaaaaagggggtttgggttttttta

SEQ ID NO: 580204 - DNA, 727 bp, Homo sapiens
  misc_feature (50)..(50): n is a, c, g, or t
  misc_feature (471)..(471): n is a, c, g, or t
accgacgatcctattgtcatcatgggccgccgcccgcccggtgttaccgntattgtaagaacaagccatacccaaagtctcgtttctgccgtggtgtccctgatgctaagatccgaatctttgatttgggacggaagaaagcaaaagttgatgaattcccactttgtgccatatggtgtcagatgaatatgagcaactctcttctgaagcactggaggctgcccgtatttgtgccaacaaatacatggtaaagagttgtggcaaggatggctttcatatccgagtgaggctccaccctttccatgtcatccgtatcaacaagatgttgtcctgtgctggggctgacaggctccagacagggatgcgtggtgcctttgggaagccccagggcacagtggccagggttcacattggccaggtcatcatgtccatccgaaccaagttgcagaacaaggaacatgtgattgaggntctgcgaagagccaagttcaagttccctggccgccagaagatccacatctcaaagaagtggggcttcaccaagtttaatgcagatgaatttgaagacatggttgctgagaagcggctcattcctgatggctgtggtgtcaaatatatccccaatcgtgtcctctggacaagtggagagccctgcattcctgaaggcttcaatagttctcctataccctaccaaatcgttcaataataaaatctcgcatcaagttaa

SEQ ID NO: 580205 - DNA, 723 bp, Homo sapiens
  misc_feature (723)..(723): n is a, c, g, or t
cttttgcatggcaaaaggaacagtcagcagagtaaaccagacaactcacagagtgggagaaaatcttcacaatctatacatctgacaaaggactaatatccagaatctacaatgaactcaaacgaatcagtaagacaaaaaagaaaaaaaaaaaaatcatcccaagaaaaagggggctaagggagatgaaatagacaattctcaaaagaagatatacaaattagccaagaaacttgaaaaatggctcaagcaattactaaggtgaatcagggaaaagtgcaaatgtcaaaagccacaaagcgataccaccgtactcccattaaaaagtggccataatcaatgtaattacaactacaatagtagactgttgacgttggaattgcagcaattcagggaaccactttctacactgcggggtgggactttgtaaactagtctacagcgtgctagtggaaaaacagcgttgggagaatgccttctaaaaaaagcttgaaaaggtagaagctaccatttggatccaggcaatcccacttactggggcgtattcataccccggagagaaaaagaacgtcatttagttcaagaaaagatacttggcacccagcgcaagttttatatcgcaggcaccaattcagccacttgcaaaaatcggtgggaaaccaacccaaactgcccatcaattcagttgaatgggattaaagaaacgtcgtggtatactaatan

SEQ ID NO: 580206 - DNA, 201 bp, Homo sapiens
cacaccacctgagtcaagcacatcatttcgtatctggagcaacaactcaaaatcttcctcatatgtatcaaaactgggatctcttcctttatctgtacggaactttaagagcacttgaaggagaaagtagtcggaggtcgtgcgcttcaaagcagcctttgctttctcacagtacattttgtgtgatgaattgatttttct

SEQ ID NO: 580207 - DNA, 512 bp, Homo sapiens
  misc_feature (37)..(37): n is a, c, g, or t
  misc_feature (71)..(71): n is a, c, g, or t
  misc_feature (94)..(94): n is a, c, g, or t
  misc_feature (153)..(153): n is a, c, g, or t
  misc_feature (215)..(215): n is a, c, g, or t
  misc_feature (218)..(219): n is a, c, g, or t
  misc_feature (221)..(222): n is a, c, g, or t
  misc_feature (226)..(227): n is a, c, g, or t
  misc_feature (234)..(234): n is a, c, g, or t
  misc_feature (243)..(243): n is a, c, g, or t
  misc_feature (253)..(253): n is a, c, g, or t
  misc_feature (258)..(258): n is a, c, g, or t
  misc_feature (299)..(299): n is a, c, g, or t
  misc_feature (347)..(347): n is a, c, g, or t
  misc_feature (508)..(508): n is a, c, g, or t
cggaggccggggccggggcccgacgtccccgcggggncccggtgaccgcgaggaggacggcgtgggcctgnagcccgcggccgtggcccgctanctattgattgggcacatctaacatgtcattttaggaactgttggaattgcagagccaangttgggactaaaacgtacaaacaattggtagctggaaacattcctaaaaaacaacgttcgtnaannanntatnnaaaatanattttttanaaataaacanaagcntcttgaaatttcaaccaagatccgattaccatttttacgtnaagtttttcccattattaaaaatgtatcccgggaccctcgctttaatnatctttcaggggaatataatccttaggtgttttacaaaacataccaattcttaaatgacatccgagccaaaaaaaaaaaacttgtcaaaaaacagtttaaaaagcacctttcatgagattatcattataaacttcagcaacttcttcagcgaatggagcangcaa

SEQ ID NO: 580208 - DNA, 205 bp, Homo sapiens
cctggggggtccccttttttcccttcaagccaagcttcctggtcaggattagtttccagctaagtttgcaagccctagaggggtttttcccggctgtttgtgaagcctgggggaccccccggccactgggggatttgtgggtgaaccctgtttctttttaaaaggcttttgaattttttttcatggtttaaataggtcggcccca

SEQ ID NO: 580209 - DNA, 122 bp, Homo sapiens
ggggggggcccctttggggaaatccccccggggggtttttttatttttttggccaccgggggggggggggccccccccgtttgggttttttttttccccccgaaaaggttttgtttttttta

SEQ ID NO: 580210 - DNA, 137 bp, Homo sapiens
gctgcggggcttgtgccaatctggccatcaccgtccctcggaagaggcacgcacactccagaggtctcgttcattgatcagatttctctctgggtgtctctattcctaagtcagagttactctggctggtgccgctg

SEQ ID NO: 580211 - DNA, 844 bp, Homo sapiens
  misc_feature (54)..(54): n is a, c, g, or t
  misc_feature (68)..(68): n is a, c, g, or t
  misc_feature (72)..(72): n is a, c, g, or t
  misc_feature (77)..(77): n is a, c, g, or t
  misc_feature (79)..(79): n is a, c, g, or t
  misc_feature (93)..(93): n is a, c, g, or t
  misc_feature (97)..(97): n is a, c, g, or t
  misc_feature (99)..(99): n is a, c, g, or t
  misc_feature (105)..(105): n is a, c, g, or t
  misc_feature (114)..(114): n is a, c, g, or t
  misc_feature (117)..(117): n is a, c, g, or t
  misc_feature (119)..(119): n is a, c, g, or t
  misc_feature (128)..(128): n is a, c, g, or t
  misc_feature (134)..(134): n is a, c, g, or t
  misc_feature (136)..(136): n is a, c, g, or t
  misc_feature (138)..(138): n is a, c, g, or t
  misc_feature (141)..(142): n is a, c, g, or t
  misc_feature (144)..(144): n is a, c, g, or t
  misc_feature (151)..(151): n is a, c, g, or t
  misc_feature (153)..(153): n is a, c, g, or t
  misc_feature (155)..(155): n is a, c, g, or t
  misc_feature (165)..(165): n is a, c, g, or t
  misc_feature (179)..(179): n is a, c, g, or t
  misc_feature (187)..(187): n is a, c, g, or t
  misc_feature (189)..(189): n is a, c, g, or t
  misc_feature (194)..(194): n is a, c, g, or t
  misc_feature (203)..(203): n is a, c, g, or t
  misc_feature (209)..(209): n is a, c, g, or t
  misc_feature (219)..(220): n is a, c, g, or t
  misc_feature (231)..(231): n is a, c, g, or t
  misc_feature (233)..(234): n is a, c, g, or t
  misc_feature (236)..(236): n is a, c, g, or t
  misc_feature (242)..(242): n is a, c, g, or t
  misc_feature (251)..(251): n is a, c, g, or t
  misc_feature (253)..(253): n is a, c, g, or t
  misc_feature (261)..(261): n is a, c, g, or t
  misc_feature (285)..(285): n is a, c, g, or t
  misc_feature (287)..(287): n is a, c, g, or t
  misc_feature (291)..(291): n is a, c, g, or t
  misc_feature (294)..(294): n is a, c, g, or t
  misc_feature (306)..(306): n is a, c, g, or t
  misc_feature (321)..(321): n is a, c, g, or t
  misc_feature (330)..(330): n is a, c, g, or t
  misc_feature (335)..(335): n is a, c, g, or t
  misc_feature (341)..(341): n is a, c, g, or t
  misc_feature (354)..(354): n is a, c, g, or t
  misc_feature (387)..(387): n is a, c, g, or t
  misc_feature (391)..(391): n is a, c, g, or t
  misc_feature (401)..(401): n is a, c, g, or t
  misc_feature (405)..(405): n is a, c, g, or t
  misc_feature (407)..(407): n is a, c, g, or t
  misc_feature (422)..(422): n is a, c, g, or t
  misc_feature (470)..(470): n is a, c, g, or t
  misc_feature (476)..(476): n is a, c, g, or t
  misc_feature (479)..(479): n is a, c, g, or t
  misc_feature (485)..(485): n is a, c, g, or t
  misc_feature (495)..(495): n is a, c, g, or t
  misc_feature (508)..(508): n is a, c, g, or t
  misc_feature (551)..(551): n is a, c, g, or t
  misc_feature (558)..(558): n is a, c, g, or t
  misc_feature (572)..(572): n is a, c, g, or t
aggcagcggctcaggcgaccctgagtgtgcccccaccccgccatggcccggctnctgcaggcgtcctncctnctttncntgctcctggccggnttcntntcgcanaccgggganaananaatttgaanattgantncnatnntngcataantngnaccatttacnattacggagccctnaccatttntngggangattacatncccttnaagcattatnntggcaaatacntnntntttttnaacgtggcnanttatttangctttacgggccattacatttaantnaatncantacaggaagagnttgcaccattcggtntggtcattntgggntttccntgcaaccaatttngaaaacaggaaccaggagagaactcagagatcnttcntaccctcaantatntncgaccaggtggaggntttttccctaatttccagctctttgagaaaggggattttaatggaganaaagancanaaattntacactttcntaaagaactcctntcctcccacctcggagctcctgggtacatctgaccgcctcttntgggaanccatgaaggttcangacatccgctggaactttgagaagttcctggtggggccagatggtatacccatcatgcgctggcaccaccggaccacggtcagcaacgtcaagatggacatcctgtcctacatgaggcggcaggcagccctgggggtcaagaggaagtaactgaaggccgtctcatcccatgtccaccatgtaggggagggactttgttcaggaagaaatccgtgtctccaaccacactatctacccatcacagacccctttcctatcactcaaggcccagc

SEQ ID NO: 580212 - DNA, 691 bp, Homo sapiens
tggaaacagagtcatgctctggcccggtctggtccaggcgggagtgtaggggtgcggtttcggctcacggcagcctcgcggcctcctaggttcaagcgattctcttatctcagcttcccgaggtagctgggactacaggagtgtgccacttgcacccactaattctggtattttgggggagaaaccccatctctactaaaaatacaaaaaattagcgtgggctgcgggtggtgcgtgccgtgtaattccagctactccagattgttgaggcaggagaagtggctgggacccgggaaggcggcagggttgcagggggccgagaatcgcgcaacggtactccagcccggggcaaccagaggtgagaactccgtctccaaaaaaaaaacaacaagggggctaaaacccctcgtgcaaatcggatccgcccggctcactaaagcttctctgcagtgggagaactccctaaagagggccgcgtctcgcgacagttttcccacagaaggtaaactctgcgccgagcaccccacgcacggcggcttaccgggggaaaacctcgggagcctccttagggggcaacggcggggaactcactccattcccctgaggattccccgagggtggcagcggggggggaaactcctggcccagccgacccccagggggggccactagggggcacagtatgccctgt

SEQ ID NO: 580213 - DNA, 387 bp, Homo sapiens
aaggctcagccttctttacagtagaatatcctgaagtagtcagttgttcaaacaaaagatctgagggagtaggtgtaagtcctgcagagttgagatactaaacgactttgcatacacaaagggtccattagaaagatgttgagtataggaactaattctgacgtttataatgcacatatattactagaatgttccagtaacgagcataatgctgaaccaattacttcacctttcagtttaaattcctcacatgtaaatgtaacaattaccatctatccctcagtgttgctctgtggcatcaatgtgttactttattaactaaaatgtcatggtctggcgtggtggctctgagtacgttaagagcattatttgcgttattcctggtcc

SEQ ID NO: 580214 - DNA, 311 bp, Homo sapiens
tcttggggggggcccccgttccttaaaatttccaaggggaaaaaaacccctggtaaaaaagccaaaatgccccccaaaaacccttttttttccgggcccccccggaacttttttggggagggacttacccggcccaaaaggaggggggttggttaaaaggggttaaaaggcccaaaaaaaaagggttctttttttttccccctttgggccaaaaaggggggggtttttttttttggcccgttttgggggtgggggaacccaagttgtccccccaaaacccgggatttttttttgggggggggttttcccca

SEQ ID NO: 580215 - DNA, 477 bp, Homo sapiens
  misc_feature (44)..(44): n is a, c, g, or t
  misc_feature (46)..(46): n is a, c, g, or t
  misc_feature (344)..(344): n is a, c, g, or t
  misc_feature (371)..(371): n is a, c, g, or t
  misc_feature (380)..(380): n is a, c, g, or t
  misc_feature (393)..(393): n is a, c, g, or t
  misc_feature (458)..(458): n is a, c, g, or t
ccacagctgatgctctctggaaagtgccacctcctggaaggagncncaaccaacacaaaaattgaacattaaaccaccaaagctaagaatcctcatggtgtctattgcatcccccgccacctccaccagaacaggtgttggtatctctggctgagagatccatagatggttcacatcacaggactcagtgcagacaacccccaataccagcccagagccagggtagacttgctgtgtggctagacccagaagagagacaacaatcactgcagtttgggatcacagggaagctacatccatagggaaaaagggggagagtactacattcaaagggaacacccctngggaccaaaagattttgaacaacagcntttcagccntaggaattttccntttgaacagagggttaccccaattgaggaagggcaaccaggaaaaccaacctggggtattttggncaaaacagggtttttttca

SEQ ID NO: 580216 - DNA, 396 bp, Homo sapiens
ggatgcatggtgacactgatgtatagaggagagaccggatgagaggacttgactgagcttgacaggtcattgtaaggaggtaggctgtaggcacaaagaagcatgaaaacaggcaaggttgtgcaggagaaatcaagggcagagcttcaaggagagagggcgtgatcaaccatgttgattgctctgaggtgtcaggaaggaggaacatagataagtgatggatgggtcaggcacggtgattcatgcctgtaatcccagctctttgggaggccaagactggcgagtcatttgagcccaggagttaagaacagcctgggcaacatggcaaaacaccatctctggcaaaaatataatcaggctggcgttgtggttcgcctgtagtcccagttacctgaa

SEQ ID NO: 580217 - DNA, 116 bp, Homo sapiens
gctattttcacgtagagacggggtttcaccagtgttggaccaggctgttcttgaactcctaactctcaatgtgatccgcctgcgctgggccctccgcaaagctgcttgcgagatta

SEQ ID NO: 580218 - DNA, 1425 bp, Homo sapiens
cgcacgccggaagacgtgcgccactacctgcagggccgcagcagtatcgcagggctgttgctgaaggccaccaatgagaagctgagtgtttacgccgccctgcagaggcagctgctgagtcccggcacggccctcatcctgctggaggcgcaggcggcctcaggcttcctgctggaccctgtgcggaaccggcggctgaccgtcaacgaggctgtgaaggagggtgtggtgggccccgagctgcaccacaagctgctgtcggccgagcgcgccgtcactggctacaaggacccctacactggccagcagatctctctcttccaagccatgcagaagggcctcatcgtccgggagcacggcatccgcctgctggaggcccagatcgccacgggcggcgttatcgaccccgtgcacagccaccgcgtgcccgtggacgtggcctaccggcacggctacttcgacgaggagatgaaccgcgtcctggcggaccccagcgacgacaccaagggcttctttgaccccaacacgcacgagaacctcacgtacctgcagctactggagcgctgcgtggaggaccccgagacgggcctgtgccttctgccactcacggataaggctgccaagggcggggagctggtctacactgactccgaggcccgggacgtctttgagaaggccaccgtgtctgcgccgttcggcaagttccagggcaagacggtgaccatttgggagatcatcaactcggaatacttcacggcagagcagcggcgggacctgctgcggcagttccgcacgggccggatcacagtggagaagatcatcaagatcatcatcacggtggtggaggagcaggagcagaagggccggctttgctttgagggcctgcgcagcctggtgccagccgccgagctgctggagagcagggtcatcgaccgcgagctctaccagcagctgcagcgaggtgagcgctctgtgcgagacgtagccgaggtggacactgtgcggcgggctctccggggtgccaacgtcatcgcgggtgtatggctggaggaggcggggcagaagctgagtatctacaatgccctgaagaaagacctgctgccatccgacatggccgtggccctgttggaagcccaggccggcaccgggcacatcatcgaccccgccaccagcgcccggctgaccgtggacgaggcagtgcgtgctggcctggtgggccccgagtttcatgagaagctgctatcagccgagaaggctgtgacagggtacagggacccctacacagggcagagcgtctccctgttccaggccctgaagaagggcctcattccccgggagcagggcctgcgcctgttggacgcccagctgtccacgggcggcatcgtggaccccagcaagagccaccgcgtgcccctggatgtcgcc

SEQ ID NO: 580219 - DNA, 733 bp, Homo sapiens
atccttagtgtagtgagctcttaaaagggacagaaatgtgcacttggggtgctcggattttaaggcagcagcttgccgatcctcccagctgaataaagcccttccttctacaacttggtgtctgagaggtttgtctgcggctcgtccttctacatttcttggtcccctgaccgggaatcgaggtaactgagggatggccgaggtagccccttaggcagcttaggcctgccctgtggagcatccctgcaggggactctggtcctagctgagtgacgtgatccaaagagcactcctgggtacgaacattgcctgggtggaacgcctcaccagaacagcacgtagcaggccctgtggaggattaacacagtggctgaaccaccgggaaggaactggcacttggagtccggacatctgaaacttgaattgacaagccgacatcagtatccagcagtgaatccaacggagtgtgtcccaagaaaatttgtgtctcgtgattgtggctgtgcatattacctgttcatctctggatgcataaactccctacaagtgcgtctgggggcagttgtacagattgcggagcgatcatctccacgatgttcttctacagcccactaaatcctccattttattcatgtctcctgggatgggttcctgaattctcctttgcaagttattcaacaagctttttatggttaccaatcggcgcacggcggccacgggaaaccgtggggca

SEQ ID NO: 580220 - DNA, 174 bp, Homo sapiens
gaggcgcagctgagcgcgggttgcttgctgcgatgcgagggcgacgagacttaaggacctgtgagggctaaggtctggcactgcgcgtcagtagccgggccttctaagccctgggagagcgatggcccagcacaggcaggaagtgatggacccaggctcttggtgagcagcaca

SEQ ID NO: 580221 - DNA, 662 bp, Homo sapiens
atttttttttgagcatctatatttcagagaattttgtttggcgttttttctctggtattgatctggcaattttccatgatatcttctaacagcgaggtgaaaaatttgttaaagatgagctaagcttgtaaattgtgtaagttagggcatcacataaaaagaaaactcaatcaagggaaacatgaatggaatatttgctattgagaagcctagcggtattacatccaatcagtttatgctaaagttgcaacatgctttaactaaaagtcaagtattctcgaaggaaattcaaagggcaacagcggaaagaaagcagcaatatgaaaaacagacaggtaagaaggccagcaagaggaaacttcgtaaagtctcaaaggtaaagatgggacacggaggcactttggatccgttggcctctggtgtcctggtaattgggattggagcgggcaccaaaaaacttgcaaattatctttcaggcaccgttaaagtctatgaaagtgaagccttgtttggtgtttccactacttcaggagatgtagaaggtgagattttgtcccagaactccgttaaacatttaaatttcgatgatttaaagactgtggaggaaaaatttgttggacaattaaagcagacgccgccaatatacgcagctttgaagatgg

SEQ ID NO: 580222 - DNA, 188 bp, Homo sapiens
gtgcttgaggatccgagtggttgtgggtaggatctgctgcaggttcagcctgtctatgcggcggatgtcactgaaaagcagggcagacctgccctcaggtgaagaactggttcagcagctgaaggcaggcactgtcctggagcgggtgttggtgctagagctgagctgtgagggtgacgacgaggaca

SEQ ID NO: 580223 - DNA, 444 bp, Homo sapiens
  misc_feature (341)..(341): n is a, c, g, or t
  misc_feature (360)..(360): n is a, c, g, or t
  misc_feature (404)..(404): n is a, c, g, or t
atgatgctaagtgaaaaagtggtcactaaagactacaagcgtgtgccaccatgcctcgctaatttttgtattttttagtagagacaagagtttgccacattgcccaggctggtctcaaactcctgagcccaagccatctgcccacctcgtcctcccaaggtgctgggattacaggggtgagccactgcaccctgcctatttatttacttttcttagagatgggggtcttgctttgttgcccaggctggtctcaaactcctgggcctcaaaagatccacccacctcggcctcccaaactgttggggattacaggcatgagccattcttcacctgggccagtnaatgtatttcactccaagnaacaactcatgaattagggaactgtttattaatcccctttctgnagggggagggaaagagagggttcagagaggttaaatgtat

SEQ ID NO: 580224 - DNA, 164 bp, Homo sapiens
  misc_feature (72)..(72): n is a, c, g, or t
ggttttattgccacagatgacattactgatctatactcaactcttggaatgtttgggaaaatatcttacagngcatcctatctcaaaggggaaagacactactttttatttgcagcacttcctaatacagtgcttcatatcagctctcttctttgcagggacac

SEQ ID NO: 580225 - DNA, 372 bp, Homo sapiens
accctcacagttgcagtgtgcttttgctaggcagccggcagagatggcccacatatgaccactgcctttcaaccctacctgttttaaggtggactcacttggattgagaaactggtattttcccctcacttgcacgtattttggatgtataaatattttcaaaagataagtttgactaatacatgcacaccttccttgactatcaccatccaaacccacagagatgactgggaatttccaagtcatgtaatcctaatgttgatttgagcatccacagcctgtcttagaacactttccaaccaagactggaaccagcactttggcacttgcagaatcacagccttcccttcacagccttcccttacgagaagt

SEQ ID NO: 580226 - DNA, 282 bp, Homo sapiens
gtatggatgatccagacccagttatattctttaaggtcactttggttgctatgtgcagaacctggatgtgttgcattcagaaaactattatacatttttttaagtgatcttaatgcaaagaatgattatacaaaaggacattttccttagttgattatacctctgtgagccatatatgttcttttctggattcttgggtttttttgagacaggtctcagctctgttgtcccaggctggagtgccgtggtgcgatcttgggtcaacacgacctccacctccca

SEQ ID NO: 580227 - DNA, 436 bp, Homo sapiens
  misc_feature (226)..(226): n is a, c, g, or t
  misc_feature (337)..(337): n is a, c, g, or t
gtgtggtcgctctagagatccaacaagagtatcagcatacgagctatccagtctcgagtcttaatttgcatgatttgagcagtgtactgttgtcctttcatgttagtgcttcttcagagctctttagggcaggctgtgtgcaaatctctcagcattgttgttgtaagtattaattctctcattatgagctagttgctgatatgaaatctgggtgaaattctttctnaagaatgttgatattggccccactctcttctggcttgtagagtttctgccgagacatccgctgttagtctgatgggtttccctttgatggtaaaccgacctttccctctgnctggccttaacattttttccttcatttctactttggtgaatctgacagttatgtgtcttggaatagctgcttagttgcttggaatagctgctgtagttg

SEQ ID NO: 580228 - DNA, 378 bp, Homo sapiens
taccgtatatatctgccaacactaaagctgtgaaggctctaagtaacacacacagaagatagccattgtgactctgcaggagagacaaaaaataagccgggcgtggtggcgggtgctgtagtcccagctactcgggagcgtgaggcaggagaatggcatgaacttgggaggcagagtctgcagtgagccgagatcacgccactggcctttaaacttgggcgacagagtgagactctgtctcaaaaaaaaaaacaaaaaattttaaacccactttatatggggggtaggattaatatttaaaaggcggggctttgtttaatggttacaacacctcccatgagttgcccggaataaagtgtgctcaccggtggaaaatcc

SEQ ID NO: 580229 - DNA, 207 bp, Homo sapiens
ctccgcttttatccctctaaaatcttcacttcctgaagaaacaaacaaacaaaaaagccactgagggcccttggactaaatccaggcctcagttgctgtcgcataggtcatgtcttgtccagactctgggcagatacataattcgagtcacacaggtgggtcaccagagaacgaatccagcctgcaaatggcctgtgcaatcttcag

SEQ ID NO: 580230 - DNA, 171 bp, Homo sapiens
  misc_feature (40)..(40): n is a, c, g, or t
  misc_feature (75)..(75): n is a, c, g, or t
  misc_feature (111)..(111): n is a, c, g, or t
  misc_feature (151)..(151): n is a, c, g, or t
ttccttatagccaatgccttgaccaaagcttactaatttngccacatttccttgtgggttatgataatcttaatnaattcacaactctaccaaattataatacagtctttnattatgccaccatatgaatgcagctgcaaattcaattttntgaaatacaaagtcctttcc

SEQ ID NO: 580231 - DNA, 549 bp, Homo sapiens
  misc_feature (53)..(53): n is a, c, g, or t
cctttctctttacgcatatagtatattaatttgaatgtcacaaaatctattanagatattttgttatccattttccctcactgaaatgaaaccttcacggaatggggtctttattttgttcactgctatatcgccagtggctgggacaatatttggcatgtaaatattagttgaatttatatggatttgcaaagcacctttatatgacagttctatacttgtatccgcattgtccttcctacaggtctttaaaatcagagaaacaggagaaatttatatccagactaaacctgcattcattttattctttaaatcttgccatattgaagtactttaaatcctggtatagtaagtaaccctaacatgtgattgaaaacatagaattattggaattgtttggttaccactaagcttgaaaacagattcccaatgaggagaaaaaacaattctattgagaggtcatatggataggaatgagaggacagtcaaatgttggtacacccaatttgttaggtaacctagcgtttggctcatcttattatgggaatt

SEQ ID NO: 580232 - DNA, 319 bp, Homo sapiens
ctgttttggggggggttgggggggatttttgcctgtttattggggaaatttgtttttgccaaaccggttttttgggggttccggggcccccttctttatttgggtggttttgggggcccaaccgggttccgcccgtttggggggtttggatatttattgactttgtcctcggattggttgagggggaaagggccccccaacacccccaatccaggttttggaggcattgagcccccgactttcttgggttttttttttttgtccccccctgggccccccccccccgccctttgggaataaagggccctccttttgccca

SEQ ID NO: 580233 - DNA, 546 bp, Homo sapiens
aggcccctttgtgtatgtgatttacagctactgagccggggctttaggctgggtgatctccccccagatttctggtccttgactacaccatgtaccacgtgataatggtatagaatttcaaaaaatgatcacgcgccatgtttccaggctggaagtaactcttgggctcaagtaaacctccatcttggcctcaaaagtgccagattacgggcatggctactgacccaactattgtaacattccgttatactaatgcttacttgttgttcttgaactgccactatattgaccactgttttaagctccgcaacatttttttagggataaacctgaacatgaaaatgaactttatgttagctggcattggatccatacctgtttatttttatcaaattagctaaaagcgctgggaaagcagcatatttttgaaatgccattgaatataaaacgagagtattcatattatggtaaaaaaaaccctggccctaaattagacttttatttttatgcaaatgaatcagactaaaaaaccctatggaatttcag

SEQ ID NO: 580234 - DNA, 567 bp, Homo sapiens
aacagtatgactctggtaatggcttcatagctaaagtataaaaccaaagaggagggaagaggaggagaaaaagaaagaaaagaaagaaaggtgacatactgtgttgaaaactcataggtactagtgaagtttttgggagctggcaaggctctgactgatgagggagggatggtgctgagaaaaaccagtctagagtcacagtaattcatttcagcagcaaggagttaacactggtcttaaagttacagcaggtcactttggcagctggccttcaagataatcccggggcagacgctctgtgtcccagcttttcctctcccctggtccctcgactccagtttagttgggtgtgacagggtaagtccaattcgtatcatcgattttcacagactctatactcgctgagagcagaactcaaggggctcagttgccactgcaagctccagaccaagcacagcggcaggagctacgtcaatcccctccaggaagtaacaagagtccaggaggcagaagctgctggagaattgtgtcctattggccgatggcataccgaactccccctgtctc

SEQ ID NO: 580235 - DNA, 1009 bp, Homo sapiens
  misc_feature (772)..(772): n is a, c, g, or t
tgtgggagccggctacgaacacaggccccgccgggggccaaaaggccgtaaacgttcgcgaaacgaaccctctgccgcccgtagaacggcgccctaggggatcgaaaaacggcggcccacaagggttattccatgcgactgaaggggggcaccgcgcgccggggcaaaaagcggcgcgcccgctcgagaccgttgggtcgccagcaagggcagattgagacgggggcctcttggggacccgggaaacgccggcccgcgcgggacgcccacttcagaggcacgcacagaggtcaggccctcgaagctcatagctgcgtgcgaagtatagactaacacgggcggcgcaattacccagggagcgccctgccgggctctccaaagaggaaccgcgacaaccaaccggcaccagaggaacaccccgggtgacctcgcccgtagtaatcgctaggcttcaaggaggcccctggagcctcggggcactaggtcgtgacaccgatagggctcagggaatccattgagctcggaccctggcgaaggcgcacggtggcccacaaggccacgtagcatgcccgacgccgagcaaccgaggacaagcgcggcctcccacgagccatatgggacatggcgcacacaacagtcgcctatgttcgctgccccagagcacccgtcgcgctgcacatttgtgctaccgagggtagaagacggagcgcccgtctgggaccactgaggatggccatcgtgggcaccatttcgtccttgtcgtcacggcacnactccgctctggcaggcgacgtggctcagtggcgtacgtgtcgtggtacatgagcgtggctgcgggcgacccttcgtgccacgccccactcaccacagccagccaggctggtctcctactagcctgtattgttgtggggtgggggtatattgtgtaaccaactgggcccccagcccctcttttgcagaccccttgtcctgacctgttctcggcaaactaactaggaaccccagggga

SEQ ID NO: 580236 - DNA, 167 bp, Homo sapiens
  misc_feature (38)..(38): n is a, c, g, or t
gaaaaattttttaaaaccccaaaatttatatggaactnctaaagccccccaaaagctaaaccagttttgagcaccccagaccaaagctaaaagtcttcataccccccgatttcaaattatgttccccagctagaggaactgaaccagcaaaggacgggcctttttta

SEQ ID NO: 580237 - DNA, 81 bp, Homo sapiens
ctgacgcggtgccgtccccagcacggtgattatgtcccagagctcggctgccacctccaccggaatcgcctcagttgatag

SEQ ID NO: 580238 - DNA, 147 bp, Homo sapiens
cttcgaaaacttgagacccttcgccctggtagacacctagcatgatgtcatagttgaggaactcgccctgtccatgaggatactcagggtcatcaggaatgacatcaccatcaatcacagggcccaagcccagttggtacccggact

SEQ ID NO: 580239 - DNA, 1259 bp, Homo sapiens
  misc_feature (280)..(280): n is a, c, g, or t
gctgttcccctttctcccgctgtgtcccctctgttgtttatgtgaagatgaaggtgcggaagacccacacgcgcggtgtggtatgtgtctgttccgcccccgcccgcgaaggtagtgtgtgcgcctcaagggagagcgcttttttttcgcgccccccccctccgcgggatgctgtgttaaggcccctcttttttatgaggtagttggggacacacgccgtctccttcgggggtcccagccgctgtgtgtatattgcttcctggtgttttccacaaggagngaaccacgcggcggtggtggtggccaacaggagaggcccacttcggggagaagccctttgtctttccatttccggcctttagactgaagtaaattggttcttcccccaatgtccgggagcccctctcaacgggccccacatatttggggcacgataaagcacactcggtgggcctcttttggggagagagttttttcctctggagagaaaagtaattctctctttcaacagcttcgaggggtttagtgccacacagagaaccccgcccacagagactcgggagagagagattgtgtgtgctcccagagagactttttctgtgataaacacctcctctcttcgggtgtccttttaaaccgagtgtactcttttcgggcgccacacaaaaaaccccacctctgggtggtcacagagtgtgtctctcacagagttggagagaataccctccgaggaccaaaagagcccacggtgtgagaggtatatccacacatttgaggcgtttcacatgtggagattgtgtaaaaatatatggcacacgcagctttctttatccgcagagattgtttgtgtgtgttcacacatgagagtgtgagaagccacagggtgcacaccctgagagagccgaccacacaattataaataaataaattcactgacctcgggctcttgggagaaaattcactgtgagaaaattaaagttctatttctctataaactctctgccacggctcttcacaggctcaattctggttaatggcactaagctctgtgcacacttcacaaaaaggcttataattaagtgacacacccaccaccctcttccacgccactagagagttttaaatatgcccacaactaagaaagcctatgtgtgtgtgctttcttaaatgtgtgtgcccacatggtggagtctttgctaactgaaagtgtttgaacatgttttgagattttttttaaataaattattatttgaccacca

SEQ ID NO: 580240 - DNA, 841 bp, Homo sapiens
  misc_feature (8)..(8): n is a, c, g, or t
  misc_feature (11)..(11): n is a, c, g, or t
  misc_feature (24)..(25): n is a, c, g, or t
  misc_feature (27)..(27): n is a, c, g, or t
  misc_feature (30)..(30): n is a, c, g, or t
  misc_feature (50)..(51): n is a, c, g, or t
  misc_feature (74)..(74): n is a, c, g, or t
  misc_feature (79)..(79): n is a, c, g, or t
  misc_feature (81)..(81): n is a, c, g, or t
  misc_feature (101)..(101): n is a, c, g, or t
  misc_feature (112)..(112): n is a, c, g, or t
  misc_feature (261)..(261): n is a, c, g, or t
gcgcgatnctnacacgtgaaagcnntnatnaccaaggccaccacacaccnnctgtccaaaaaggccttccgatnacggntnaatccctatttacttacccnccagaagtttntttcttcgcaggatttttctgagccttttaccactccagcctagcccctaccccccaattaggagggcactggcccccaacaggcatcaccccgctaaatcccctagaagtcccactcctaaacacatccgtattactcgcatcagggntatcaatcacctgagctcaccatagtctaatagaaatacaaccgtaagacctaaataagttcaatgcacgtgcttgattagcaacttttgactgggttgctctattgtgtacgcctgctctacataagcctgcagagtacgttacgagttctccacttcgaccatttcctgacgggcatctgacggcatctagagcatttatttgtgagccacaggcttcctacggacttcacgtcagttattggctcaactttcctcgagtatcgtgcttcatccgccaactaatatttcactttacatccaaacatcactttggcttcgaagccgccgcctgatactggcatttggtagatgtggtcttgactatttctgtatgtctccagtctaattgatgagggtccaaaaacatccgaccagaacatgcaaaaactctctgcgggccccagggaaccaccgataatccctcgaacccctcccttgggcaccgggaccccataggcctaggaccccggcgcaagccggctcccgaggaccaatctggcaccacggtgtccgaggacccgccgataggacatccgat

SEQ ID NO: 580241 - DNA, 375 bp, Homo sapiens
agcgctggcagtaacggatctgaacaaccaagatcaagccgaacacgcggaaaagagcgccgcgcaaacggaacgggtggtgcgtaccatcgcgaacaatctgcagaagttggctgaggcatcgcaagaagcgatgaccaagatcggtacgctcgacgagcgggcgcagcagatcagcggcatcgtcaatctgatccgtgagatcgccgatcaaaccaacctgctcgctttgaacgcggcgatcgaagccgcacgcgccggtgaacagggcgcggatttgcggtggtcgcgacgaggtacgcaaactcgccgagcgcaccgcagtggcacttccgatatcgcacgactggttgttcagatccgttactgccagcg

SEQ ID NO: 580242 - DNA, 222 bp, Homo sapiens
tggttgattagaggatccccttctcagccagtctgacagcaagtcgaagctcaccaaggacttctccgcgctggagtccagctgcaggacactcaggagctgctgcaggaggagaaccggcagaagctgagcctgagcaccaatgctcaatgcaggtgtgaggacgaagaagaattccttccggtgagcagctggaggatggaggaggaggccaatgcacaa

SEQ ID NO: 580243 - DNA, 779 bp, Homo sapiens
tctgctaccggtaactaaaatggaagcgttttgggggtcgcggcccgaacttggggcggggggctccggccccaggacagtttataccgaatctccgtccactctcccgattctcctttcagtggatctccgggcgtcgtgcacttttacaggaggctccaatctcacgccggacccagaaaccccatgtggttgaccggggaccctcagctccctcgcgcgtaaagtttcagagggcggaggttggtgatgtgccgcaaaacattgcgtgggactcctaccggcctcctgtggcctcgttccccgaaaacattcctctctctcgcattatagtggcgagtctcaacaagcagttcaccatgtgcgtggggtgccctcgtgggcgaactatacgcgtgattttcccagtatattgtgtgaacgcaagttctcctgcggccaaaagtgggtgattgtgagtgaggagctttcgtgggagaagtggcacacagcttattagctcctagaagctatttcatctcatgtggctgaccagggccaagtgtacagccggcgcctcgaagatgaccccttttggtggaaccccatggtgtctatcggaggctatgctgatggaaagagctctccccggttatgtggacatgcttggttgtaccctatgaagcccctttcgttggccactgttttatggggcatactgtggctcagcctctgtgcgaaaaagttctggaaaagcagccagtgttaagcaaacagaggcccggaattattaaacgcgg

SEQ ID NO: 580244 - DNA, 193 bp, Homo sapiens
aatgttcatcctagtatgtgtatatagtgtgtgtgtgtgtgtgtagtgtgtatgtgtgtgtgtgtgtataccttagaattctatacaggctgtatagactataaaaaacagttataactcttcctccccagcgtacatgccttataatttcttatccttctgtacccttactcgagtgcttagatcacaagga

SEQ ID NO: 580245 - DNA, 172 bp, Homo sapiens
  misc_feature (60)..(60): n is a, c, g, or t
caactcagctgtagtttgtaaaagaactccagtgagtctctataatagactacgagagtnggctttaacgagtatctgcagcacactaatagctaagacccgaactgggtattagataccccactaatgcttggccctttatcgaagcgggtatcctctagatgtcgatcct

SEQ ID NO: 580246 - DNA, 271 bp, Homo sapiens
  misc_feature (12)..(12): n is a, c, g, or t
  misc_feature (39)..(39): n is a, c, g, or t
  misc_feature (51)..(53): n is a, c, g, or t
  misc_feature (72)..(72): n is a, c, g, or t
  misc_feature (76)..(77): n is a, c, g, or t
  misc_feature (163)..(164): n is a, c, g, or t
  misc_feature (180)..(180): n is a, c, g, or t
  misc_feature (185)..(185): n is a, c, g, or t
  misc_feature (189)..(189): n is a, c, g, or t
  misc_feature (202)..(202): n is a, c, g, or t
  misc_feature (213)..(213): n is a, c, g, or t
  misc_feature (223)..(223): n is a, c, g, or t
  misc_feature (247)..(247): n is a, c, g, or t
  misc_feature (260)..(260): n is a, c, g, or t
ctggcccccgcngccaggtttaacaactcccagttcatnggtcccccggtnnnccagccagggaggctcccngccnnccagcatgcagctgcagaagctcaacaaccagtatttcaaccatcacccctacccccacaaccactacatgccggatttgcacccnnctgcaggccaccaganggaangggncaaaccagcactntccgagattgnaaccccaagnacagcgggggcagagcaccccggngttcggggcggcnagcaggacccc

SEQ ID NO: 580247 - DNA, 119 bp, Homo sapiens
tatatatgggggatgtgagggaaaatcaagaatcgaatttgaaaggtctggaagaagtgcaaaaaaatgtgtacaagagataatgcaaacagggttataacggcaacattgccacaagg

SEQ ID NO: 580248 - DNA, 307 bp, Homo sapiens
  misc_feature (23)..(23): n is a, c, g, or t
agcggggagccattttggagccntggtgtcagtttccaactctggccttcaagcggtggcatttttttccaaccctcccctccctcttcggtcagctgtctgtcgtgtgcaaggtaaatagaaaaaggaagaaagcaatgagaagaacagacaaaaacaaaaagcaaacaaagaaaggaatcgtgaagtggagacgggaggagagaaaagaggaggagagaaagaagtgccagaagaaaaacgaagaaaaagcagaaaaaagaaaaaaacagccccaaaaaaagaagagggggaggagaagaaaaca

SEQ ID NO: 580249 - DNA, 551 bp, Homo sapiens
attgatttctttatttttgtgcggcttgtacttctcctgaaaaaaaacattggtcgatgttgaaaatacttctttgagacaggtctcactctgtcgacccatgctggagtggactgatgccatctaggttaactgcagcctctgtttccggggctcaaggtgatcctatcccctggtgcatgccatcatgctcagctaaatttaaacggtgtattcgtagagatgaggtttcactatattgcccaggctggtctcgaactcctggacttaagtgatccttcctcttgggcctcccaaagtgctgggattacaggcatgagccactgccccagccaagactgtcttttctccattgtattgcgtaaggcttccttgtcaaagatcagttgactatatatggtgtggggctatttctgggctccctatattgttcccagtgataatagtctatatttttcaccattaccaccctatcttaattcactgtagctatatagtgagtcttaaagtggggtaatatcagtcttctgacctttcttctctttcaatct

SEQ ID NO: 580250 - DNA, 366 bp, Homo sapiens
acctgtaactagaatggatgtgtttgatcagagtgcgctttaaactgaagctacagggagagaaatgtacaagctgtatcctagatgcgccgaagagctcatttgaaaacaggaggcaatttcccatacctgtgcacaagtgcaaaggtcaatctttatgtacagatacatttgctgcaattccatggaaccaaatacgcggccattgacccatcaatggtcattgccaaggagcttgaggtgcaaaaaggcagccttggcatcagccaggaggagcaatagtgtgtctctcgctgtcaatgatgagttgacccggagtgttcttgtatagtcagtggcatcagcacccgtcagccggccttttcc

SEQ ID NO: 580251 - DNA, 362 bp, Homo sapiens
gtcctgatgaagtctccgaccaacgccggctagctgccgaacaggcttgcgagaagggcgctgcgcatttcctgcaggccatgcaacgcagcgcgcaaccggttgccgctgtgatcggcatgctgcacatcagcgcgtacttgcgcgagcccggctggttggtcgaattgttcgctggccaagtggcgcgctatcggcccagcgcgcatgccgatgtggaagtgcaggaggccgctgcgccgttgttggtcaaatacggcctgacgccgttgctggagctgccgcaatcattgcctgcaggtttaggcgcgcgtttgcatgagcaaggcgaaagtgcccgggattactggctgcgccatgca

SEQ ID NO: 580252 - DNA, 450 bp, Homo sapiens
tcaatacggttggactgtgatcctgtcctcttgtcctgtaaaataggaggcacttcaaggttctctgcgtgggtcaatagagtgcagacttgtgttcccatgctactcaggagcgccacggatgtgcgcatgatggttgaagctcagcgagatccctgaactatgcttgcgacaatgtcctgtagggagagctcgcatctatgaggattactgaaaggttacctggtgtgtgtgagaggcgcatcctcatagtcctcagtatagttagcgagtgcaggaagctggcgggaatcattttgcgcacaggcagcatgccgagcgtggatgcgaggcgtggtgatgcgttgtgcatgtagttcctgcataatacgtgggccccaggcacgaggtagccgtggagtagtaccaccactttggggcgattcaatggcaagctaacaacattcaaag

SEQ ID NO: 580253 - DNA, 289 bp, Homo sapiens
  misc_feature (23)..(23): n is a, c, g, or t
  misc_feature (177)..(177): n is a, c, g, or t
  misc_feature (200)..(200): n is a, c, g, or t
gaggcagggtttcactgtctctnttgcccagactggagtacagtggtgtgatcatgacacactgcagactcgacctcctgggctcaggtgagcctcctgccccagcctcctgaacatctgggattgccagtgtatgccaccactccctgctaattaaaaaaatttttttgttttttnagagacaggttctcactatgttngcccaggctggtctcaaactcctgggactttaaccttatccttcccgccctgggacttccaaaagtgctgagagtacaggttgttgagc

SEQ ID NO: 580254 - DNA, 187 bp, Homo sapiens
gctccccaccccgcatcagctctgtcaccaggtacgcgtgtttgccatcatcatacacatctttcagagtgatgatgttggggtgctggccataccgcagaagaatctcaatctcttctcgtggtcaatggcctctttgctcaggccaaagtcagtgagtttgatgtggccctcctcatccagaagg

SEQ ID NO: 580255 - DNA, 294 bp, Homo sapiens
agactcctttggaagggacaggggctgaaggttgagttgataaaccaatggccagtgatgtaatcaatcatgcctacctaatgaagcttccctaaaaacacaaaaggagttctgagggctcctggacagcttcacactccttaagggtggttcaccctgcttgtcttttctcctatacctcgccctatgcatctcttccatctggttattcatctgtatcctttgtaatatccttcacaataaataaggtgtttccctgagttctatgagccactagagcaaattaatcaaact

SEQ ID NO: 580256 - DNA, 941 bp, Homo sapiens
  misc_feature (420)..(420): n is a, c, g, or t
cctgtgttcggcgcccgtcggacttattccgctgctaaccacaaacacgtggtgcactgtacctataattcggggcatgactcggtcagtcctaggcatccgtgtgtcaggccttcacgtgattcgtgaggcctgagcgttggagtcgaagtccacggtagaaacatgtcatgggtacatgatcgacaatcttactcacactgtctatctgtcacgggacgcaaaatagcattttgtcattcaatcattcctctccataggtaatatcgcgatcaattaatcggacgagctaggggatcctgagtagtttcctataatagtccggtggcgctcgattatgggcagtcttgcgcgcgatcataaccagacattataggctttctggatcatccgttcactcgtgccctctgcgtctcttanctcgctggctctgtatttcgctatatgtcggagaggcgcggacgcagggagcccaagggttgagagacatgtctgagacccgatcccttaagtcctgcgtgaaactaccttccgcagcgctggaagcctgcacgttagagtcctaccccatgctttgctacctttttaactcgaagactaggttgtcgtcctcttattcttatgggtgtcctatttccactgttactattccacttctccgatttaggcctgtatccacatcctcgtgcgatacacaccattgataaatgcctgctcttggtctgatgcgatggttaaatcagggggagtccctactttcgtccatatgtcctccccagttacatagcctgggtggttgtcacttatactaactaacaagaacggaaaccttaaaatcagcttcttttgaccccgcggaaggagggttaaccccaatttttacaagaacctaattccgagatttggggggcacccggagggaaaatgtttatacaaaaaag

SEQ ID NO: 580257 - DNA, 571 bp, Homo sapiens
  misc_feature (273)..(273): n is a, c, g, or t
  misc_feature (341)..(341): n is a, c, g, or t
  misc_feature (425)..(425): n is a, c, g, or t
  misc_feature (462)..(462): n is a, c, g, or t
  misc_feature (472)..(472): n is a, c, g, or t
  misc_feature (499)..(499): n is a, c, g, or t
  misc_feature (518)..(518): n is a, c, g, or t
  misc_feature (559)..(559): n is a, c, g, or t
  misc_feature (564)..(564): n is a, c, g, or t
  misc_feature (571)..(571): n is a, c, g, or t
gggcaagaaccggctcatctttccaggcgagaaggtgctcttggcgtggtctggggggccttcgtccagctccatggtctggcaggttcttgagggcctgagcaagattctgccaaaagactgcgctttgtggcaggagtcatctttgttgacgagggagcagcctgtgccagagcctagaggagagatcaaagaccctggccgaagtgaagcccattctgcaagcaactgggttcccatggcatgtggtggccttagaggaggtgttcagcntgccaccgtcggtgctttggtgctctgcccaggagctggtgggatccgagggggcctacaaggcggcngtggacagcttcctccagcagcagcatgtgctggggggccgggggttgtcctgggcccgaattcaaggggaggaacagccaccncagcccccgttgaacccccagaactgggcaagaccgnttgcccttgnccagattgaggttttttcccaattttnttgttcagtgaggacattnattgccaaggaaggagttttgagaccttgcggacccattgntcttncagttgn

SEQ ID NO: 580258 - DNA, 893 bp, Homo sapiens
aatatttctttgtaaggtataaggacttagttgacatgatagtgtgcagatgaggaagatatgccattaagtatcttcagttttgtgaataatgaattagaagattttaattatctatctagcaggatgtttttgagatgggcattctccgtctggtacgtaggatctagcatatcctcactatatctgtggatgattacataggtcgaggggagcaacgagggtaccagctatgggggctgaaagacatgagaggtctatccggtgtggacatggaatccacgcgagtcgccttgggcatatagtaatacctagaaattggctttaccttaagcagggcacacagcatttactacacacagctagtgtgtgaagcaaagcactgtgctgtagagggtaaaactgggaatcacaatgaaagaatcttgccaaagtggtctcatgcagcaatgtggaaggatctgtgtcaaattattttggatgtaaagatgcctgtgtctcataatatgaatgtatcgcggatatacaagatatgacctaaaggtgtgaggagacactataattaccactgtgaagaatgatgtagtcatcctggttcatcttttctgcaatgattggttctctaaaattcctatatgtaacttgccgttttgaaaaggtagaggctgagaataaaggtggctagtgtgaactatgagccccaatttgtgggggaggttgaatccggcctggatgggatagggggtaccacaggggcattacgcgaccatttgtgggaggagacttccttcaaaggtgaccgggaaggaggagagaaaatgggggggaaaaaagggccccaaggttgtgtaaaaaaaaaggtggcgggcaaaaattgcgggagaaataaagca

SEQ ID NO: 580259 - DNA, 887 bp, Homo sapiens
gcgggcccaacgagggagtggaatggccgcgggcggctcgacgacagctgaggcgacgcgagatggcggcagcttcagtcggcggcgatctcaggagctggtcgctgtctgggctaagcaagattggagctactcgtcgtccacctccagctcgcgtaagggtgtgctgtgctgactgcggcccatttgtggatgcgaacatgcgggaggcaagtgatcccccctgtgtgcggggcttggacagttgctctctagagattgctaactggagtgaaccagcaggagactctcaattaccagtttgatgccttctatggggagatggagtactcagcaggacatctatgcaggttcaggtgcagcccatcctaaggcacttgctggaagggccataatgccacgtgtgcttgccgtatggagccacaggagctgggatgacgcacacaaatgctgggcagcccagagcaatcctggtggtgatcccgcagggctctcatggagctcctgcagattcactaagggaggagggtgccgatggtgccggaccatggggccctttctgtcaccatgtcttacctagagatctaccaggagaaggtatcagacctcgctggaccctgtcttcgggagacctgtgtaaatcctgagcatgacttgccgggggaatatcctgattccgggtctctccgcagaagcccaatcagatagcgtcttgctgaattttgaggcggcacttcgtgcccagccaggtcgaaattcggactgtaggagccgacccgggttcaacagggtcgcctcacgctgtcattcttgtgctccctggtcacaggtgggccagcgggaacggttgggcccatttcgcaggagaaggacaactctactgattg

SEQ ID NO: 580260 - DNA, 337 bp, Homo sapiens
atctagaggatccgaagctctggaaaaggggagctggaaaggggatgggttgggaagataatcttcccgtggagttcaaccgcccccagccaaactctgatcatccccaaccgaactcctctcgaccttcaggtgcttattctcttctctcctcctctgctgcgcctctctgctcttgtgtcagtggagtttggggggttttatgggtacatgatgggtgtgtggtgggccagggtggttttggaaaaagcaacatttgggcggggaaacagggataacttttcatttggggctgtggtttccaggcttgagggtggggcctttgtgggggaacatc

SEQ ID NO: 580261 - DNA, 902 bp, Homo sapiens
aagaggcaggctggaatggaactcagctctcaccgctgctgtcaccatggccacggaggagggtgtacagaaagactcagcgcgaaatttcagaggacactatgatgttctggacaaggcctcagctgcatgtagggctgatggaagcaaggttgtctgcaatataccagcacaggcaacatcagcaggagctactcaggggagttcagcagcggctcatccaggctcccttccaagtcacagatgctgctgttctcaacaatgtagcacactcacatttgtgcctcaatggcacaacagtcaagcacaggttttcagcacaacagcaaggcaacccacagtagagccagggaggaagcaaccagtttctctcatcactctgagcagacttgcgcaacgcccagtcggagcgcagcagcacagaagcacggcccaggcctcacaaggcatgaaaaatctcacgacagttcacactgtggtactgactgccttgtgagcacatcacataagccatccaaaaaggccccggctccatgcggccagactaccacacacatgatctttgagcccttctcctccatgtccagcagcctcagtatcaccagacatctacacccatcaacccagtcaacccaagtggggtcagtcaatttttgcagtgggggcacatcatttcccaagtgagtcagaccatcaagccacgggcgtccacggacctggttaactcgtccaccaccatgtctttattggccattaacactcatcccgctaatggcacaacagaggggatacctctggccaaagagacaagtcacacagaaacagtgaacgttacaagcttataatacagagtttggggcaggttcagccatctgccctgcagcttgagagtacactgggag

SEQ ID NO: 580262 - DNA, 147 bp, Homo sapiens
cacgagggtcaccctcacactgattctatcagcgacagacagcttctgcatcacggagtgtttgtattcagtatctccattgcgttgtctggtgagaacatgcccatgatacagctgttaccagcatccctggtcacagatgggaac

SEQ ID NO: 580263 - DNA, 175 bp, Homo sapiens
cccggggtaactcaccactgataagtggggtgcagatagggatatatcatagcctgctgagcttctgggctgacttgtgaccttgccgctccagcagtccttcttgtcactgctttgatcacacccaccgcaactgtctgtcacatatcacgaacagcaaaacgacccaggggac

SEQ ID NO: 580264 - DNA, 428 bp, Homo sapiens
caaataccagatgagagatcaaaatgtgtatactggaccattgataactctggacttctcaaagatggtcatgcccagttacttaagggacaccttattgatgaattgggagtacatactgttgccaactgaaggttggaataagacttgtcaagctggtacacattgatggaaggtacaagaagcaaatagcaagaaaggttggaaaacagggtatgtgagtaaagcactacaaagtagaagtataaatcacagaattgaaggctatgtgaaactggaaacatgaattatgttgtaactcgaagatttagcaaaactgacacaatagaatccattgaaaaggaagtaagaaaaatcttccgtattccagatgaacaaggagtccagaatgtggaacacatacatgagtaacacatttgaaccggcgg

SEQ ID NO: 580265 - DNA, 598 bp, Homo sapiens
  misc_feature (2)..(2): n is a, c, g, or t
  misc_feature (434)..(434): n is a, c, g, or t
  misc_feature (454)..(454): n is a, c, g, or t
  misc_feature (473)..(473): n is a, c, g, or t
  misc_feature (524)..(524): n is a, c, g, or t
  misc_feature (545)..(545): n is a, c, g, or t
  misc_feature (568)..(568): n is a, c, g, or t
  misc_feature (595)..(595): n is a, c, g, or t
gnactgtttagccacaccaccatccatctccagaactgttttatcttccccagctaaaagtctaccaataaacaataacttcattctcccctcccgccactgttgggaaaaagctgagtgtagggagggaaactgaggcagggcttgcatagtgtcctttggaatgtgtctagacttgctggctgcttgcttctagccctcctaggctcctgttcccattatctcaagtagcaggacatgttccatataaatgctaaaccatcacagctgtaaatcatgtgcttaatggaacatgtggaggtgttgacctccacaggtctcaacacctgtttctttgttggattaccaataaataccgtgggctctcagagttcggggccttcgcagcctccatacatagtgatggccccctggtgtcccactttttctctcantgtctttttctcaatccttngactctgctgggactttgntaacccccacgaactggtgttgggtctgattaccccaaaaattccaacccntggcagtcgacattctgctgnctctatgaatttggactaagtanctcatataagtgggaatcgtccaatanttg

SEQ ID NO: 580266 - DNA, 906 bp, Homo sapiens
  misc_feature (215)..(215): n is a, c, g, or t
ccagtttcaccccagaaacaggtctaaatttttcaacgccaatgctcctaacttaatgctctcgggtccttttataaggaagcccccttctgaaaataggtttgtcttggatcccccccatgccggcccttcccgccctgggggctcccccacccctcgctgtagatggtcccctcttaagaatatcatggggtataatcaacaactcgtggcgnccacaggggtagaatggccgtcatcgacactaataacatagcagctctcgtgtgtcgtgcacaaacacatacatgcgagctctctttccccgcaaagatggatgtcccgaccacacatagatgacgatggctcgccacgcataggatgtctccgccctcccccctgtcaggagggtattcatacataataggcttctctccgcagagcagctagttcttgccacctctcacagatgtcttatcttggtagaatccctctctggggcacacacatcagtcgtcctctctgagaaaacattaagcgaaattatctccccgcacaatggtgttcttctgagcccccgcgggtttgattagtgctccacgaggatggatttatatcccagccacctctctgggggcgagcaaaagcgggggcgatcaacccgacgggacacacgacgttcgactctcaccccgcgccccaacaggtgaaaacccgcgctctcttactcatgaacataccacgcaaagtatgcgacgaacagtggggtggggaccccttaagacccacagctcctacaggagaagctcgagagcccaaagaataccgcctggagacccataggaggcgaaagggacccactaagattactagctcgcccccccgcccccccccccggggccaaaaaaaaaccccccctttcaaaac

SEQ ID NO: 580267 - DNA, 413 bp, Homo sapiens
  misc_feature (86)..(86): n is a, c, g, or t
tttatttatatacagtgcatgacacacacttagatctactctcctatagatatgcataaacacgcacattattatgcataatgtantactcaggcacgcggtctgtgcatcgagtgaacccggcgcgaggggtgagagtgtggaacccaacgtacccaatcacagattcgcgagagcataaaaaaaagaaagaagaagaagaagaaagaaaagagaaagaataaaggcatcctcggatgtctctgagctcagctggcggaagaaggccggccgggcgaggtctggccctggccagcggcgcagccccgagcccgcgggagcccctagtgtacagggcagagccccctctgcgcgctcgcggcgctgacagtgggacagggcggagagcgcacaggtagaggctcgctcgtgcc

SEQ ID NO: 580268 - DNA, 154 bp, Homo sapiens
atacttccccagggtgtcgattggaagctgtccagtggctacagcttgtggtgatagaaactctcagtgcaggggtggggtctttatgtcctgtgccagtagatccaaacggtaaggaatcgttttagtatggttacagcagctagtagagagc

SEQ ID NO: 580269 - DNA, 247 bp, Homo sapiens
gtcgacccggttgccacatgtgaaaccccctcttctactaagaaataccacaaattagctgtgtgttgttgggggccctgtaatctcagcttctcaggagagctgaggcaggagaatcactttagacccggaggtggaggttgcgagtcagtcgagatatgttccacgggactccagcatatgggccacagagcgagactccatctctacaaaagagcaaaaaaaaaagggaccaggcggcgggttg

SEQ ID NO: 580270 - DNA, 82 bp, Homo sapiens
ccattctgagcagaagactaagaagcaagaagattatcagacatcaataaatattctttaaatactctcatgaatgtcgacg

SEQ ID NO: 580271 - DNA, 169 bp, Homo sapiens
ccggtagtggcaaaggggggcagcccactgggaagtggaatatggaatgagcgcaaagaacaaaccctagcatttgacagaacggactgatactcatgggggaacagcagagccccacaaggcggccacagaaggaagttccaagggtacattgtttacaatttagact

SEQ ID NO: 580272 - DNA, 864 bp, Homo sapiens
ggcacccggaacaacaaagcaaggaagacggagtccgagcctcgggggctctaacaacgggccgggcgggagtccatggagactgggagcgcgcccgttcatcctcatccttgtctccagcttctccttcgcatccgacgcaaccggagcagcggtgccgccggtctcagccaacgtcctcttcccacggatgtgatctccgtggtgaacgctaaattttaaaaccaccccagtggttgcagacagtgatgtgcttgggacattctatttacaatgtagtctggtgttaagaacaggatgtcttttaaatttaggaagatgggttgggagcggagcaaatgtattttataaacgcgtgatgtggggaaacggtatagtgagagcttaagaaaaaccttagaattacagctacaattgtggtctctcagggaaaatttattgtgcctgggagcaaacaagtgaagaagaagcttaaattggggtggcaagacgcttagccgtagtctggcagaaactaggtttcagggtaactatttcacacggatttccaggtgtgtcaccgttctggcaggtgttgtacccttgtccattgtgaaatcggtgtggcaggaattcacaaagaacaattagacctcattgttagtaacgaagctggaattcatccggcgtggtgccacccgggtaaaattctctaagaactaccttaccgcatttttccacgcggagcgttccacgctgacacggggccatgtgaagcgggtggcctgcggcgcgcaacatttccccttgtgtgggacgccggacagatttttttccccccgtcgtgcgggaatctaggcgccttaacgggcggggcacagaagg

SEQ ID NO: 580273 - DNA, 264 bp, Homo sapiens
  misc_feature (1)..(1): n is a, c, g, or t
  misc_feature (7)..(7): n is a, c, g, or t
  misc_feature (20)..(21): n is a, c, g, or t
  misc_feature (30)..(32): n is a, c, g, or t
  misc_feature (104)..(104): n is a, c, g, or t
nctgatntaaccctgagagnnctcattgtnnnggccaattgacacattttgaagatacagcttccttctcggccataagatcatcaaactgcattaataaaatnatagagcttgataatgaagtaggctgagaataatctaatacaaaaccaatagcaaattttgaaatgcatccacttgcaataaaatgttatctataatgtagtagattcttcaaatgttaacccttaaattactcagaattttaagaacaaagttaaagct

SEQ ID NO: 580274 - DNA, 409 bp, Homo sapiens
gcacacacaagcatttaccaaactcctatgcaccgcactgctatccacacgacaatcaagaggacctctcacaaggcttatggtgaacttctcctgaactgttcccaaatcttcacttttccctgaagaaaagtcttgttgattagtgaaacctttgccactagtgttctccattgtatacaggtaatccatataaaaagccccaaaccgttgcattccagctatctcagtgtatgtctccttatgatgagtcgaatccaagatacattctgcacgagtaccattattttctgggcttcggtaatcaaaccatgactctgtcaggtatgtgaaacctttcgtactcaaattgtcaccacacatgaagaaacaggcttcagtttcacttctattcatattctcttcacaa

SEQ ID NO: 580275 - DNA, 372 bp, Homo sapiens
  misc_feature (304)..(304): n is a, c, g, or t
cggcggacgagctccaccgctgaggccaacgaggccgagccttttattgttacagacattatgtcgacgctttcgaagggtatgtgggctttgcaataaatcatcacttatttaacattcataaccctatttttaatcaactaaatggggactgaagataaaataattgtgcatgtagaacagaagatatgccagttttatgaaagtccaggttattattttaggtgggggggggaatgattgatttgggtggtctctcttgtcttctttaccattggcccaggggggggagtgtgtggattgnttttcgccagggtgtctgcactgggtgggggggggagggggtgggcataggccatggtatgtggcggg

SEQ ID NO: 580276 - DNA, 163 bp, Homo sapiens
gaccgaagtctgagctctatccttctcagcctctggaactatattctgtcttacgggtcatcagtactcgggccgtctgccattccagcctcgggccctgagatccctgaagccccgatctctgtctcctgggccccagctagctcagattctagccctggga

SEQ ID NO: 580277 - DNA, 1058 bp, Homo sapiens
gcgcagggagcttctgctgagggtgtgcagtgcggagcttgacggaaaccgcagataagtttattattctctttgaaagatagagattaagtacaactacttaaaaaatatagtcaaataggattactaacgatattggcttagcgttaagtttttaacgtaatatttaatagcttaagattttaacgagacaatatgacacgacttagcaagagtagcatgaggaaggccaacagactaaacagcgtttctaacacatgacggcagagttgacgcatgaacgcttcttcatggcgtaaaacacatgtctttacacaaagacaacatcgagagcacaggactacagagcacccgcaatctaataccaatagacagggcaagagccttatagacttcacactgcaaggtgcacttaacacagcttaacagttgaagattaaaacacgtcgtagcgtgacttaaccactcactctggaaaggccgatcattatcacacaacgagactcaaaccccgacacggatgacttccaatgacccttgaacattccaatcgaccgccagtgtcaggacacttggcagttcacattaacaagcgcgataattacacacaggccatttacactaacagaggccagacagacacagcttggaacagacttaacattcgggcagcatgtgcgctaggactggaaaaccaaaatgggaagaaagaactatgaaggccttcggcacagggtggcacaacaacctggcacaagcacgcaggaacaacgcaacgagacgaaaaacaaacgacaccacacccaagagaagcccggaccacagccccctccgaacgaccgggtccgagccgacgacccaccacgctgagcgaccacgaagagccaccgcggctgaaatgggacccgagaaggtacatacatcaccccaaaagagaaacacggggaaacaacacagcggggcgagacaacgaccacgacgaaaccaaaagcggaagcacccccagcagcgcagcaaaacacaagagcaggacacgaggggacgaggccactaacaca

SEQ ID NO: 580278 - DNA, 176 bp, Homo sapiens
ctcaacgctttatacttccttcaatgctttacttcattagctctagaggtccatgcatacttaatattatacttgaattcagtacggaagtataaagcgttgagaaagtataaagcgttgaggaagtataaagcgttgagaaagtataaagctgaggaaggtataaagcggttgag

SEQ ID NO: 580279 - DNA, 175 bp, Homo sapiens
tgctaactgaaatgaagaatctctaagggctcatcaataggatggatatggctgaagaaagaatcactgagttgaagatatgtcaatagaaacttcccaaactgaaatggcaagagaaaaaaacgggaaacaaaatcagaatattggagaattgtggggcaaaagtggttacatg

SEQ ID NO: 580280 - DNA, 278 bp, Homo sapiens
  misc_feature (69)..(69): n is a, c, g, or t
  misc_feature (122)..(122): n is a, c, g, or t
  misc_feature (209)..(209): n is a, c, g, or t
  misc_feature (256)..(256): n is a, c, g, or t
cggacccacccaagagaacccgggctgctgtttcgcgactcaccagcacagatttgctcagaaacctcncccaagattgggcagaagttactttaaaaagacttggttcagctggttcacgngtgtcacgcctgtaatcccagcactttgggagccaagccagatggatcatgaagcccaggagttcgagaccagcctgaccaacatgntgaaacccccatctctactaaaaatacaaaaatttaacagcagtagncgagactctgtctcaaaaaaaa

SEQ ID NO: 580281 - DNA, 312 bp, Homo sapiens
aatcaacaaccttcctaggccttactactaataattattacaatttgacttacacaacttaacggcttcaatggaaaatccaacccttacggagtcggctttggacccatatatccccggcccgggtcccttttccaataaaatcttcttgagtagcatatcaccttcttattattagctatagaattcgcctcctttacacccctaccatgagcctacaacgacttactcgccataatagttatgcatcctcttataatcatcatctaggctaggctggctatgagcgctcaaaagggtgagctgaccgat

SEQ ID NO: 580282 - DNA, 364 bp, Homo sapiens
tccatacagcaacctgacccagcaccctgctgcgataccagactggggctacgtagaggataagcagagagatgaagatctacctcaggaacgaggcaggatatacgagacaaactctacgccgatacacatacgctctcaactatctcctatggaccccacaagccccagttataacagccacggactacagcccagccctaacataaatcagagcaagagccggatagagtacaaggctatttaatatgcttgaactgccgggcaagacaacatctgtgtagcctaacctgcagctggaaatgtacaggggcgcagaaccatagtgtaccaaggtagacaaagaatagccctgaaccacact

SEQ ID NO: 580283 - DNA, 134 bp, Homo sapiens
gttatccagagacccgatcaacacatcgagatggtcatcgtagtgcatgctatcctgcgctacacacgttcaatccacacattttttttttcttgcatgcatttacctgtgagatcaatccacacattacttat

SEQ ID NO: 580284 - DNA, 483 bp, Homo sapiens
  misc_feature (167)..(167): n is a, c, g, or t
tgctctctgagatccagggctgtcgagctcattgaagcctgcaaatgggacagcactggccttcctccttttcattcagccactggacggggctggcccacgagccagcagataaaagaagtcatttaagcttcgatttcagataaaagacttgaggttcatgaaangctccagcataacagtgcagcttctgttctgtgctgcaaaacacattagaatacaaacaaaggggctgctccgtggagcctgcaggatcccgaccctgtccaggctgggtgccaggtctgagggtttgggcgtcctctccgccaatgagaaatccacctggcggcctcctctgtcctgttcacccacccactcccatccactctgtcttcttaccttaatttgcacctacttggccttaatgttggcagaaaggttacggagagacagtttaaggtcaagtgcaataaaatgatttcatttacccaaaaaaaaaaa

SEQ ID NO: 580285 - DNA, 217 bp, Homo sapiens
  misc_feature (73)..(73): n is a, c, g, or t
ctggacctttctagaagggcagcatataaaaacatcagtcccgaggagggacaacaatactacctcactactncatctctgatgactggttgttcaacacagtggagtgtgtaaggtatatgttttataattcataaccataggctcgatcatcaagagatactttcgaatttcattttccttcagatatcttaagagtgctaaatttctactgtct

SEQ ID NO: 580286 - DNA, 243 bp, Homo sapiens
cagaatctgaaccatcgcaaaagggagtcaagaacccatatgttttgaggttaataaaaagcctccaatgagactccacagcagacatggtttctcagactattagaaatcgcctctgaggtagactgtaagggaaactgactccatactgggattgactactatttttctgctgcacagacaatatcctccagatgcccactggacaaggagaaagccccacaggaatttaacggagtaaca

SEQ ID NO: 580287 - DNA, 212 bp, Homo sapiens
ttgcctgccgcgttggagttggtctgggccgtggcctgagctgcgctcttggccccagggccaccaacgccgcccccgtcggcttcttttttcttgttctctgctgcctttcagcactcgaaggggtccgattcgtcgtcaaataactggtcgaataggatggtaccacgcagaatgcgcctatagccgattctgagatatcatcaactggc

SEQ ID NO: 580288 - DNA, 131 bp, Homo sapiens
gatatagggtgactactaccgcataccttgcccaggtggccaccggtgaccactaagagagcgcatcattaactcagcccggtcacgcctatccagagaggccatggaacatcgagcatgaacgtgagatg

SEQ ID NO: 580289 - DNA, 919 bp, Homo sapiens
  misc_feature (224)..(225): n is a, c, g, or t
  misc_feature (536)..(536): n is a, c, g, or t
  misc_feature (591)..(591): n is a, c, g, or t
  misc_feature (599)..(599): n is a, c, g, or t
  misc_feature (607)..(607): n is a, c, g, or t
  misc_feature (660)..(660): n is a, c, g, or t
  misc_feature (663)..(663): n is a, c, g, or t
  misc_feature (678)..(678): n is a, c, g, or t
  misc_feature (688)..(688): n is a, c, g, or t
  misc_feature (715)..(715): n is a, c, g, or t
  misc_feature (722)..(722): n is a, c, g, or t
  misc_feature (732)..(732): n is a, c, g, or t
  misc_feature (735)..(735): n is a, c, g, or t
  misc_feature (751)..(751): n is a, c, g, or t
  misc_feature (753)..(753): n is a, c, g, or t
  misc_feature (756)..(757): n is a, c, g, or t
  misc_feature (763)..(763): n is a, c, g, or t
  misc_feature (776)..(777): n is a, c, g, or t
ttaagctgcagtgactctggcctccaagtgctgggattacaggcgtgaaccaccacgcctaacctgagctgggctagcagcaggaatcacattaaacattgctggtaacaatcgcttagtgccagtagaaagagttacaggtgaagatttttggattctttccaaaattttaaagaattgtctgtatattaatggtttggatgttggatataaccttctatgtnntgttggtgcatactatgctgcgaaactgcttcagaaacaacttaatctcatttacttaaacctcatgtttaatgatattgggcccgaaggtggagaattgattgctaaagtgctacataagaatcggactctgaaatacctaagaatgactggaaacaaaattgaaaataaaggtggaatgttttttgctgcaatgctgcaaattaattcatcattagagaaattagatctgggtgactgtgatctgggaatgcaaagtgtgatagcatttgctacagtactaactcaaaaccaagcaattaaggcaatanacctaaaccgacctatactgtacagtgaacaggaagagtctacagtccatgtagnccgcatgntgaaaganaatcactgtcttgttgcctacacatgtgtaagcatgatataaaaaacagtggnatncaacagttatgtgangcactgtatntgaacagtacctgcgctaccttgatgncagctgncacaaaatanctnatgatggaatggtgtntntgnntgatgnactgaaagcaacnntaccctggaagtaataaatcttttctttacaagaatggagaaggccggcgcaactatcttagtggaactcttacctaccaacaggaatcttatagcgtatttggtttttattcatcaaacacacaaactactttttattctg

SEQ ID NO: 580290 - DNA, 133 bp, Homo sapiens
ggacccgggcactgtggcgctcactctgttattcccagaactttggaggctgaggctggtggatcagtagatcctggaagtttgagaccagcctgggcaacagcaagacacttacttctttttcttttctttc

SEQ ID NO: 580291 - DNA, 222 bp, Homo sapiens
  misc_feature (62)..(62): n is a, c, g, or t
  misc_feature (69)..(70): n is a, c, g, or t
  misc_feature (79)..(79): n is a, c, g, or t
  misc_feature (81)..(81): n is a, c, g, or t
  misc_feature (97)..(97): n is a, c, g, or t
  misc_feature (111)..(112): n is a, c, g, or t
  misc_feature (141)..(141): n is a, c, g, or t
cactatgctgcagaaaataatacaaatgtgtcttcgaacaatctacagtcaaaaagtgcacncccgatnncttcatagncngattctgaagtagtcncatccatgagtttnnctggaattgaatgaacttagtctaatatntcttcaagtaagtaattaagaagtcctgcttccttgcatatcataagaaaaggaactatcacagatagcatctgagtgtct

SEQ ID NO: 580292 - DNA, 989 bp, Homo sapiens
atccgtatttcgccgccaacattgtggtttccacaagacctgtgcgggccggttaaatatctgtgggcgcgctagatccaataatatcgcgttcggcgggtgcgcacagcgcaggttgaactctgccgtagatcagtgtctgaacaaactcctgatttgctacttgttaaaaccttgacacagttgtgcgggaggccatattggtgtggtaccattggagaaatggcctccccggcgcccctcttttggtatgcatgcattgccagtgccgcaacatactctcgtggggtacagcgacaggtatcccacgcgcgtacatttctgctgccgcgcccatggcgcccccgtggaagactcgtaataaaatgggggagacacccacataagcggtccccccactattcgcttgagccccctctggtaagccaacagttttattttttgctagcaaatcgcccgtcatttagtgaaaattgaggccttggtcacaaggaggcactagatttgtccttcgttgttgctgagtaggtccgtccgcattcaaactgacgggggctaagttgctcagtacccttgcgtgcggcagcccactcttgattaggtgacattatgctgacagtccgggcgagaagtaacaacagtggaattaatttcttccgccgaggcgtcggccacacaccctgcttatgtacaggtcaccccgtgtgggtgacaacacagtcccgggtcgccgaaggttttgctctgcctcgtagagagtgacacgagcgccttaatgacttttagcccccgcccgtgtttttgtacacccgaggcggagtcctctccgccgcccctgttctatataaaagtcctgtagtacagggattatgttgattacaacggctcccgctttttctgcgataagtcagaatactgcaggggggcaaaccgaagtgtcacttgctagcgtaaccaaaaacaagcccgtgtggaaaaaacaaacaaga

SEQ ID NO: 580293 - DNA, 81 bp, Homo sapiens
  misc_feature (36)..(36): n is a, c, g, or t
gccgcggacacggccgtgtattactgtgcgacagtnccgtacagtggtgacccgagaggctttgactactggggccaggga

SEQ ID NO: 580294 - DNA, 331 bp, Homo sapiens
agagcatcctcagacgcgtgcttcaggtgagcctcagatctcaccatctgggaaactagttgcccctggactgtttagccaaatgacccagtgcattttattttattttattttattttattttatttatttttcagacaggaactttttctgttgcccaggctggattgcagtggtgtgatcatagctcactacagcctcaaacttttaggctcaagtgatcctctcacctcagccacccaagtagctaggactacaggcacacgctaccatgcctggctaatttttgcttttttttttttttttttttttgtagagacagagtctccca

SEQ ID NO: 580295 - DNA, 1449 bp, Homo sapiens
atttatttgaagcacagtaaaaacaaaaaaattggtacccttgtggaaattcagtggcacaaggtacactgccataaacttgcagggacattatacagtaaaaaagcaacaaaatcaacagaacatcacaacaggacaaaacaaaattctcctgttccacaacactgccttcacatcaattttacctgcccaaacagaccatttacaaatattcacggtcaatacaactgctccaccatccataacacaagcatcagctctcactctacctcacacaactgctacagcacatctcaacacacccatcgggtcatcttcacacacgcaacacacaacaccaacaccaccactggcacatggcacaagccttacaatcatccaccatctacaccctccgcgggttccccgcgtccggaggccctctcgctacccatctttcctcctaccactcttaaccccactattcacgtgcatggacaagattccaggtcccaccatatcccatctcgtaggcacccccttagaatcccaccaccctaaacatggacacccgacgctcacttccctctgcccccaaaaaagtccgaacacatagctcaagcggccacttgcgccacccatatcccccaattcaactgtggcaaaacccaccccgttctcgatagggctattgcacagggctcggtacatcacagcccccatgtcatttttaatgcttcttcaattaacccattcttagttgtcgcccaccgagcgcccagcccattcccaacaacaaggtatgcaaaacaatcctactagggcgccatccgtgtcatccccacacaaggggacaatacacccccacaaaggagacaatagggacacctaccccgccccacatcccactatacacacgtgtccgctatactccccgctgctcactacccatagtttaaacccatattcgcagcgtggctactcttatccaacaacactattggcgcccccaccaaacgagttcttacaccctctccaacgcttgtataaacacacacccaaactcactccccctccaatctactcacttcataccactctcagtagcaccccaaccgccacatccttactaaaccatcaattcaccacctcacacaccctcacccacgcgccataatacctctcctttctccctcactacctattcactcctaccaaacctcgacctctcccatacgcctccctacacccacaccataacgctattcactcaacccctctctctcccatactcacactcggatacccgccctctcactccctcccactctcaccacccgtcgtatactaaataatttgctcccctccaccccaactcacacacctccctacataactcctccttctaattcagattcttcctccaccactatatataacaaattactcacttttcctcctccacaacaa

SEQ ID NO: 580296 - DNA, 1175 bp, Homo sapiens
acaagtgccatcctgatgggcacctggaaaacaagcccagctctggtaggaaactgctgacgtcatatcctggggtgacatgtgggcttgttgtatcaccaaggaggacctcactgagatcagggacatgttgctggccaataagtgtgccagctgctggccgtgctggtgccattgcacccatgtgaagtcaactagtgccatgcccaggaacagctggtctcaggtgccctgaggaagacctcgctttttccagggcgtaggaggtatcaaccactaagaatctccagggtgcacctattggagaatccctgatgttgattgtagcaggcatgatcaatgacgttgtgagacaaatgttgggatgccaagcgaatagccgactgcatgcatagaacaatgctcaaacatcttccaccgcttctcctatatgcggcatgggtcgattcacaagccagggtagtaacggacaattgggcaggccatcatactagacccatgagagattgctattgactatcgacagcatggaaacggtcgtagacattcatctgcatatccattggaagtgagtgtccggcgaaacgtatcgcacacggtggtactagttactagacacgattgggcctacgcacaaaactagtactgaccattcagatacacccacattactaatacatacgaaacgtggtaacacaaaccgcgagtccttgggaccatggctactagattgagagaaccggtgagttcaacaatcctatacacagcaaatttaggctagaaagcaaggggtacaaaaggagacttaacattaggggcattgactcccacattcgtgccccttatagggagcactagattagagcccctaggtagaggataggcataggcaaaaccaaagagactggcgtccccttggcatgcatgggacatggcaagcacccacaaagtacatacacagggacatggcaaggacccaaagcgacaaggcaagacccacggcacgagagcaacagcgcaacgcacgagagaacatgagagaaacaaacgagggcgaccaacgggacacacaacatcgacgacacaaaaagagcaagcaccaacaatatcaagcaagcagagacaaagcgcacaacgacaagggcgacaacataaacgagcacaaacgaacacac

SEQ ID NO: 580297 - DNA, 1043 bp, Homo sapiens
  misc_feature (215)..(215): n is a, c, g, or t
  misc_feature (222)..(222): n is a, c, g, or t
  misc_feature (224)..(226): n is a, c, g, or t
  misc_feature (229)..(229): n is a, c, g, or t
  misc_feature (231)..(231): n is a, c, g, or t
  misc_feature (233)..(233): n is a, c, g, or t
  misc_feature (236)..(236): n is a, c, g, or t
  misc_feature (241)..(242): n is a, c, g, or t
  misc_feature (249)..(249): n is a, c, g, or t
  misc_feature (256)..(256): n is a, c, g, or t
  misc_feature (260)..(260): n is a, c, g, or t
  misc_feature (266)..(266): n is a, c, g, or t
  misc_feature (269)..(269): n is a, c, g, or t
  misc_feature (273)..(273): n is a, c, g, or t
  misc_feature (285)..(285): n is a, c, g, or t
  misc_feature (372)..(372): n is a, c, g, or t
  misc_feature (392)..(392): n is a, c, g, or t
  misc_feature (395)..(395): n is a, c, g, or t
  misc_feature (408)..(408): n is a, c, g, or t
  misc_feature (412)..(412): n is a, c, g, or t
  misc_feature (414)..(414): n is a, c, g, or t
  misc_feature (427)..(427): n is a, c, g, or t
  misc_feature (434)..(435): n is a, c, g, or t
  misc_feature (439)..(440): n is a, c, g, or t
  misc_feature (444)..(444): n is a, c, g, or t
  misc_feature (446)..(446): n is a, c, g, or t
  misc_feature (448)..(448): n is a, c, g, or t
  misc_feature (451)..(451): n is a, c, g, or t
  misc_feature (454)..(454): n is a, c, g, or t
  misc_feature (457)..(457): n is a, c, g, or t
  misc_feature (464)..(464): n is a, c, g, or t
  misc_feature (467)..(467): n is a, c, g, or t
  misc_feature (482)..(482): n is a, c, g, or t
  misc_feature (542)..(542): n is a, c, g, or t
  misc_feature (553)..(553): n is a, c, g, or t
  misc_feature (566)..(566): n is a, c, g, or t
  misc_feature (614)..(614): n is a, c, g, or t
acagccggtctctctgcaggcgccgggagaagtgaccagagcaatttcggctcctacaaccagcacaacttctggtcctggaactaccccaagccctgttcccacgaccagcacaacctctgcccctacaacaagaacaacttctgctcctaaaagcagcacaacctctgccgctacaaccagcacaacctctggtcctgaaactactcctaganctgttcntnnnacnancncanccctnntcctacnaccagcncaanctctgntcntacnaccagcacaacntctgcttctacaaccagcacaacctctggtcctggaactactcccagccctgttcccaccaccagcacaacctctgctcctacaacnagcacaacctctgcccctanaancagcacaacctcngccncnacaaccagcacancctctgnncctnnaacnancncanccntgntcctacnacnagcacaacctctgcncctacaaccagcacaacctctggtcctggaactactcccagtgctgttcccaccaccagnataacctctgnacctacaaccagnacaaactctgcccctataagcagcacaacctctgccactacaaccagnagaatctctggtcctgaaactactcccagccctgttcctaccgccagcacaacctctgcttctacaactagcacaacctctggtcctggaactactcccagccctgttcctaccaccagcacaatctctgttcctaccaccagcacaacttctgcttctacaaccagcacaacctctgcttctacaaccagcataacttctggtcctggaactaccccaagccctgttcccaccaccagcacaacctctgctcctacaaccagcacaacctctgccgctacaaccagcacaatctcggccccaacaaccagcacaacgtctgctcctacaaccagcacaacctctgcctctacagccagcaaaacctctggtcttggaactactcccagccctattcctaccaccagcacaacctctcctcctacaagc

SEQ ID NO: 580298 - DNA, 1114 bp, Homo sapiens
gtgtagggggaagtaacagggtttgctgtttgtaagtagaaatgttgggaagttgtagtgagaaaggtgacgtgtgtggttgctatgattcggcggtctacaaagtgggtagagatacgggtgtgcgggtgaagtttgccgagaggtgtgcaagatgtttgcgcggtgcgcggcggcggtgtgccgcgtgtgcgaggtgtccagaggcaaaagtttgggggtttaagagaacagtgaatagagggtatgttggttccgtctttaggagagcggttgttgttgttggggtgagatgaggtggcgcgataggggttggaagtggaagggggacgtttgtaggcgtgggaggttaacttttgccagaagcagttaagggtggcgcggtggtagagagtgtgtagagagtaggagtcgtgcgaaggtgttgtggtgttgggcatggagccgcgtggcgcagccgtgagagagggagaggttatgtgggggagaagagatagagagggcgcgtgtgggcgttggtttagtcatgcttctttagggttttgggtagcagggcgcatgcgtggctggggcgcaaggtgtcgcagtgtgtgccctgtgccccctgcgtgttgggtttgcgtggaccgtgggaggagccgcgcagggtgtaggcgagtgacggtcgtgtaggccagtgtgtaaagtactaggagagagtgagtatgcagagtagagcgtaagtgtctagtgtagcgttggagacaagtgcgcagaagtatatggaacgtgtgttagggtttggtggcagtaagctgtgtggtgttgcgtcagaagttgtgtgcgctgtgtcaggaagcaaactggaatggacgaagtacttagtttagagctaatgccagatgttgctgttctagtgaaaagtcgtaagtgtctggacttatcgttcctgtgttgctcagtggcgctaagaaataaggagtcaataaggagatgatgttgaagtgtaattgttgtgaatgtgtggaaaatataaagcagggattcagcgcttaataaaggtaaccttctgacatctgttgttaatccccctttgactcttctcctttatttaacctcgttaggtttgagatgg

SEQ ID NO: 580299 - DNA, 112 bp, Homo sapiens
tatgcagcaaggaaagtgagggagcatgccagaaggacttgccagaggtgacccagctcgtgaggtggtaacgcactgggagaacagaactccagacgcaggcccagacact

SEQ ID NO: 580300 - DNA, 366 bp, Homo sapiens
ccaagccctgaaccaggaatcaaggggaatcaccctcccacccaccccaaaacacacatgcgcatacagaaacgtgtgcacctggctgggcgtggtggctcacacctgtaatcccagcactttgggagcctgaggtgggcggatcacctgaggtcaggagttcgagaccagcctggccaacatggtgaaactccgtctccactaaaaatacaaaaattagccgggtgtggtggtagacacctgtattcccagctactcaggaggctgaggcaggagaatcgcttgaacctgggaggcagaggttgcaatgagccgagatcgcgccattgcactccagcctaggtgacaagagcaaaactccatctc

SEQ ID NO: 580301 - DNA, 803 bp, Homo sapiens
  misc_feature (215)..(215): n is a, c, g, or t
  misc_feature (222)..(222): n is a, c, g, or t
  misc_feature (224)..(226): n is a, c, g, or t
  misc_feature (229)..(229): n is a, c, g, or t
  misc_feature (231)..(231): n is a, c, g, or t
  misc_feature (233)..(233): n is a, c, g, or t
  misc_feature (236)..(236): n is a, c, g, or t
  misc_feature (241)..(242): n is a, c, g, or t
  misc_feature (249)..(249): n is a, c, g, or t
  misc_feature (256)..(256): n is a, c, g, or t
  misc_feature (260)..(260): n is a, c, g, or t
  misc_feature (266)..(266): n is a, c, g, or t
  misc_feature (269)..(269): n is a, c, g, or t
  misc_feature (273)..(273): n is a, c, g, or t
  misc_feature (285)..(285): n is a, c, g, or t
  misc_feature (372)..(372): n is a, c, g, or t
  misc_feature (392)..(392): n is a, c, g, or t
  misc_feature (395)..(395): n is a, c, g, or t
  misc_feature (408)..(408): n is a, c, g, or t
  misc_feature (412)..(412): n is a, c, g, or t
  misc_feature (414)..(414): n is a, c, g, or t
  misc_feature (427)..(427): n is a, c, g, or t
  misc_feature (434)..(435): n is a, c, g, or t
  misc_feature (439)..(440): n is a, c, g, or t
  misc_feature (444)..(444): n is a, c, g, or t
  misc_feature (446)..(446): n is a, c, g, or t
  misc_feature (448)..(448): n is a, c, g, or t
  misc_feature (451)..(451): n is a, c, g, or t
  misc_feature (454)..(454): n is a, c, g, or t
  misc_feature (457)..(457): n is a, c, g, or t
  misc_feature (464)..(464): n is a, c, g, or t
  misc_feature (467)..(467): n is a, c, g, or t
  misc_feature (482)..(482): n is a, c, g, or t
acagccggtctctctgcaggcgccgggagaagtgaccagagcaatttcggctcctacaaccagcacaacttctggtcctggaactaccccaagccctgttcccacgaccagcacaacctctgcccctacaacaagaacaacttctgctcctaaaagcagcacaacctctgccgctacaaccagcacaacctctggtcctgaaactactcctaganctgttcntnnnacnancncanccctnntcctacnaccagcncaanctctgntcntacnaccagcacaacntctgcttctacaaccagcacaacctctggtcctggaactactcccagccctgttcccaccaccagcacaacctctgctcctacaacnagcacaacctctgcccctanaancagcacaacctcngccncnacaaccagcacancctctgnncctnnaacnancncanccntgntcctacnacnagcacaacctctgcncctacaaccagcacaacctctacccctacaagcagcacaacctccactccacagaccagcacaacctctgcttctacaaccagcataacttctggtcctggaactaccccaagccctgttcccaccaccagcacaacctctgctcctacaaccagcacaacctctgccgctacaaccagcacaatctcggccccaacaaccagcacaacgtctgctcctacaaccagcacaacctctgcctctacagccagcaaaacctctggtcttggaactactcccagccctattcctaccaccagcacaacctctcctcctacaagc

SEQ ID NO: 580302 - DNA, 127 bp, Homo sapiens
cgtcctcgaggcctaatacagcacacccttcctgctccccaggtgacagccaagagtggcctagacgaactggtgagtgacctgctccaggaggcccacactgacctggaaagggtccgcgccatct

SEQ ID NO: 580303 - DNA, 372 bp, Homo sapiens
aaaatcccctcgggataactggcttgtggcgcccaagccctgttcccactgaccagcacaaactctggccctaaaactaggaaaaaactttttggttcctataagaccagcacaacctctgcttctacaaccagcataacttctggtcctggaactaccccaagccctgttcccaccaccagcacaacctctgctcctacaaccagcacaacctctgccgctacaaccagcacaatctcggccccaacaaccagcacaacgtctgctcctacaaccagcacaacctctgcctctacagccagcaaaacctctggtcttggaactactcccagccctattcctaccaccagcacaacctctcctcctacaagc

SEQ ID NO: 580304 - DNA, 361 bp, Homo sapiens
tccggaattccggccatgggatcacaggcatgtgctaccacatctggctaatttttgtttttttagtagagacagggtttcgccaagttggccaggctggtctcaaactcctgacctcaggtgatccacccaccttggcctcccaaagtgctgggattacaggcgtgagccactgcacccggccctattccttgctttttcttatttatttgttctgcaatgatgtttcagatcttttttttttttgggaattgaacttttctttaaaacccattcggggtttttaaaaaaactctttcatttttaagggagggatcccccctttttggtccggggggggaaaagaatggaaaaaaccctt

SEQ ID NO: 580305 - DNA, 305 bp, Homo sapiens
  misc_feature (204)..(204): n is a, c, g, or t
tcgaacgtgtatcccagcagtttgggaggcgaggctggtgaatcacgaggtcaggagttccagagccagcctgagcaatatagtgaaccccctgtctctactaaaaatacaaaaattagccgggcatggtggcgcgcgcctgtagtcccagctactctggaggctgaggcagtagaatcgcttgaaccctgggaggcggagatngtagtgagccgagattgtgcctgggcaacagatgcgagactcctgctcaaaaaaacaaaaaaaagggctttacttgggcgtttcccataataattcatagg

SEQ ID NO: 580306 - DNA, 264 bp, Homo sapiens
tgccagatgtgctagcttcctaagtcccagtggtgccccagtcagctggcctgggagcacctcccttgctctacattggggcccaggaagagaggccagctcctcacgggcgatagggtgtgcagcctagcaccatgtccatgagcccatgaatcacaggcacgaatacctctataacggcctccggtggaatgggaagaagcactatcaaatgcagacctatggaggaagcgacgcttggacgtttagagttgagggtttatt

SEQ ID NO: 580307 - DNA, 188 bp, Homo sapiens
tagaggatccgctacaccagcatcaggtgcacgtttcttacgctgcagtgcacacagtggagacgtgcggactcactgagtcgcaagagcatcccagcttcagagctcttctcacgacgggtaccttctcaagtatggcgtgccgatgccatcctcgccatgctgccttctatcgtcaacaaggacgg

SEQ ID NO: 580308 - DNA, 223 bp, Homo sapiens
tgagactcgcatcatcctagggcttaggatatcccagcctaccaatatgctcattcagcatctaactaggcatggtgatgttggccctgatctcttcattttttctggaacctcagatttcctacagtgagcatggtatataatgcactagcccttttgattctgatacagttataatattctagtgtgttctagatcattaggtctcagagggtgggatacg

SEQ ID NO: 580309 - DNA, 218 bp, Homo sapiens
ggatatgaggatcaaaaagcggcgtgtttgtgcaaaactcaatgagtccccctcaaacgccaggagggtagaagtccttgaagtgggggcagtgaagccgtctttgttgttgtgagggtgctggacattgacaggctgacccaatgagcgctagaagggccggccctgcacctgggccagatagcctgtgagtccaagaagcacccagttccaaggcg

SEQ ID NO: 580310 - DNA, 183 bp, Homo sapiens
  misc_feature (29)..(29): n is a, c, g, or t
  misc_feature (82)..(82): n is a, c, g, or t
  misc_feature (119)..(119): n is a, c, g, or t
  misc_feature (145)..(145): n is a, c, g, or t
  misc_feature (162)..(162): n is a, c, g, or t
  misc_feature (183)..(183): n is a, c, g, or t
tacagacagaggttcaggatgtttttggntctgacatagcccaaaccagggcagaggctgtggccaggggggggagctgggnaagcctgggggtcagaggggggtgggggtggacaggntctatggctacggtttttcagccgcncagccgtgctgggcccncgatggcccgtgggggtgggn

SEQ ID NO: 580311 - DNA, 342 bp, Homo sapiens
gatatcagagaccttcaatttcaaaatttttaggtcaactactatacaatccagcaatgcgactactgagatttatccaaaggaaaggaaatccatataccacagggatgcctgcaccccatgtttactgcagcactgttctcaatagcaaagatatggaatcaatctaagtgtccatcaacagttgaatggataaagaaaatgtaatatagatacacaatggagtactttttttttttttttttggattggagacaaagttttgctttgtcgcccaggctggggggcagggccccattctgggttaaccgaaaactccacctccgggtttaaagcaatttt

SEQ ID NO: 580312 - DNA, 328 bp, Homo sapiens
acatttacagaagggcacatgaggcactgccatacccatggattgccagatgtgggtaggcttcgagataaaaactgcacttccaaagagggggaaaaagaaaaagaaaaagaaaagagggcgggggtggtggctcacgcctgtaatcccagcactttgggaggccaaggtgggcggattacctgaggtcaggagttagagaccagcctgaccaacatgctgaaattccacctcgtactaaaaatacaaaattagccgtgcctggtggcgggcgtccataatcccagctactggggaggctgagaaaggggaattacttgaaccgagg

SEQ ID NO: 580313 - DNA, 255 bp, Homo sapiens
aaccggcgcctctgcagtcggtaactcctttggcatgagttagaagaattcggcaggcctgtaaatatagtagcctagttgaacaatgtgaaggactttcgtaacggaagtgagtgcaagatcaagagtaattaccaatcttaaggttattgcattggcactttgagttaagattattcttttacatcctgcaggactagcattaattgacagctgacccaggtgctacacagaagtggattcagtgaatctagg

SEQ ID NO: 580314 - DNA, 311 bp, Homo sapiens
  misc_feature (3)..(3): n is a, c, g, or t
  misc_feature (64)..(64): n is a, c, g, or t
tancccttccctgacccatgccatatttattttgagaattgaatgttttttggcccaggtgcangtgtcacgcctgtaatcccagcactttgggaggctgaggcaggcggatcacaaggtcaagagatcgagactatcctggccaacatggtgaaaccctgtctctactaaaaatacaaaaattagctgggtatggtggcgcacacctgtagtcccagctactcaggaggctgaggcaggagaatcacttgaaccgggaggcagaggttgcagtgagccgacattcgcgccactgcactccagcctggtga

SEQ ID NO: 580315 - DNA, 620 bp, Homo sapiens
ggagagaggataagaagggataagttcacttacctgtgtacagggacttgagcactgagacacttttcatctggatgcagtggggttgagctcctcagcaagcctccgtatacagctgccctgcctacacctgtcagagctggtaggttctcgtcctccctgctgctctcaggagtgttcaagggtggatggcaggtaatggggcctgaggtacttaaggctaatgatatgtgggggacaggtgcccatctaccagccttcatcaggtaagtgaaagggctttgggtgtcaggtggcagctattccccaccaagagattcagggtcacaggtttttccccacacctgcagaatctcagggcctagccaccgccaaacttccaaatcccactctttgtgatatgtgaagctactcatttcttacccttggaggctgtatgtggcaatttccagcccttcttatgcatgtgtgatcccacctctacccctatagattgtaataaaggctcatagtgaagaagactggagggaagactgattcagcaagatcatagggtgggatctttagattttctcactttgacaacccccgaatgatacacgcagtttgtgcatgtgttt

SEQ ID NO: 580316 - DNA, 145 bp, Homo sapiens
aatacctggatggtgatatctggatgtgctagaacaccagaatagtacagcaggttacaggaatacttaaagatgctggagtacacaatttaacaattcaagtggaaaaggaggctgaggcaggagaatggcatgaaccgcggag

SEQ ID NO: 580317 - DNA, 443 bp, Homo sapiens
tccactagtgtaggcgttggtgttaatgtaaaattatgcagctgctatggaaagcagtttggtggttcctcaaaatggtaaacatatggacatcatatgatccagcaattccactcttagatatacaccctaaaaaactgaaaacagggactcaaacaaatatttgtaaaccaatggtcacagcaacattattcaaatggccaaaaggtggaaacaacccaagtgtccatcaatggatgaatggataaacaaaatgtggtataaacaaagaatgggggccgggcgcagtggctcacgcctgtagtcctagcactttgggaggccgaggcaggcggatcacctgaggtgaggagttcaagaccagcctggccaacatggcaaaatcccatctctactaaaaatacaaaaatcagccccggagtgtggtgcgtgcctataatccc

SEQ ID NO: 580318 - DNA, 768 bp, Homo sapiens
  misc_feature (454)..(454): n is a, c, g, or t
  misc_feature (458)..(458): n is a, c, g, or t
tgccgcgccgcgcgcctccgaggctgcgtccgggaagccggctccccgagcgctccggcctggcccggtgccccggacctgagtgcgtcccatggatggcgcccgggctggcccaggcggccgcgggggagagcgactcccgcaaggtggcggaggagacccccgacggggcgccgcgctctgccccagccctgaggcgctgtcgccggagccggctgtttacagcctgcaggactttgacacgctggccaccgttgggcactgggacgttcgggcgggtgcacctggttgaaggagaaggacagccaagcattttcttcggccctcagggtgatgagcattcccgagcgtcatccgcctaaagcaggagccaacacgttaacacaatgagaagtctgtcctgaaggaagtcagccacccgttcctcatcaggctgttctggacgtggcatgangagngcttcctcttacatatgcctcattggagttacgtgccgggcgggggaggctctttcagttaccttgcgcaaccggggggcgcttctccaggcaccagcgggggctcttctactctgcagaggatccatcttgtgccactcgaggttaccgtgcactccaaagaggattgtctacaggggatttggatcgccggagacattcctgtggggtagggttgcgcgttaggctcgggcttggttccgccaaattgttaccggcttgccctttggaccccggttctaccccgattttaggagcgcgagggcgtata

SEQ ID NO: 580319 - DNA, 112 bp, Homo sapiens
caagtccaacagtcaagccagcagcagcatggcaccaggggcacacaccacttcatagcatgtggccagcaaccatctctatcggtactcaacagttccatagctgcacact

SEQ ID NO: 580320 - DNA, 1192 bp, Homo sapiens
  misc_feature (525)..(525): n is a, c, g, or t
acacatcaccagaaggggcatcaccagaggttgcatcaccagaggcagcatcactagaggagggctcgctagaggtgggatcaccagaggtggaatcaccagaggccagtgctccggaggctggatctccggcatccagatcaccaggggctggatcgccagaaactggttcagcaggcagtttagagactggttctggagttatattatggggagacaaaggttcacaatttaaatcatcatcctgcttgttttttacattaacacttaggatacagggtgtttccttccattctgctttacttccttcaggatcaaaacaaatctcttcaatgccattcacctcttccttgtctttaatgtaatccatgttttccaaaggtgaggttgggtccaaatctccattttcatggttgccatttaacagctggacatcagttttcaacagttcttctttgacccttgacacttgctcaagttgctgacgatcactcactctcatcggttttcgagccttaaagactnttttctgagggtcttctaaactggccattcttgatctttaagaaaaagagaaagagagttaaatactgaaacagaagcaacctattggagacttaatacaattgatctaagagagatgcaagcagaacctcatgtaaggttaagacatggaaacctactgcttgtggatactaattacatattactggaacggggaaaccaaatccaaaatggccatagctactaggaaatcaactggaaaggttaaggggaaacgggacaaggttttttccaatatggattcacagggtttggggaagttaagccaaaaaagggtcgttagggaaaaaaacccactaacattgcggcccgaattgggctcattgggcaatatgcccttaacggggcgtttaacaataatgtgccgccgtttacaaaggcgggctgggaataccctgggggttcccaattaatgccctgtgggaaatccctctttggccactgggggacaaacgcaagacgcccccacgaaggcgctttccacaaagtggcacctctaagaggcaacgggaaatgtagcgcgtaatatcttgtcacgcgcacaaattcgttacacgtcatctttatcccacagggggcacatcgcaacaaccttataccgacaccccccccacgggtggggtggtct

SEQ ID NO: 580321 - DNA, 437 bp, Homo sapiens
taacaaagtaaacattggggaaatctgggtaaagagtatatgggagttcttgtaagtataattgtgtgtatatacacacacatatacttttttttaaatgtagatactggggaagcatattaagaacgtactgtgaaacaaaacaaaagaaaaatagatacgtgggcttctaccctggaaaattctgatacaggagttctcatggtaggtctcgggaatctgtatttttgaaggtgttcttggtgaggataatgcacatctgacaagacattaacctctgagctcgaagtaatagaaaactgtaactaaacatccatgtacctggcacctactatttaaaaaaacaaaaatgggcagggctaggagggtcacgcctggaagcccagcactgtgggaggaccgaggctggcggatcacgaggtcaggagaacgagaac

SEQ ID NO: 580322 - DNA, 132 bp, Homo sapiens
atgttaagacacttcaattgtagtgtgctgcactctgagtagatctatacaggcgatcaagggtttgcttgtgctattaagatcgagagtgtagataaggtcatggatcaaaagacataaatgattggaagg

SEQ ID NO: 580323 - DNA, 504 bp, Homo sapiens
gcctcccaaagtgctgggataacaggcatgagcactgtgcccggtcctctttctttatttctaataatacttgcttatatatctgggtgctccagtgttgggtgcatatatattaacaattgttatatcctcttgctgaattgatccctttatcattatataatgaccttctttggctgatataaatgtagcttcttctgctcttttttataggtttccatttgcatggagtatctttttccatacctttattttcagtctgtgtcttaatagatgaagtgtgtatcaccatattttaaaacccattcagccactctgtgcctttaaattggagagtttagcccatttacactcaatgtaactgatacgtaaggagtaacacctctgtcattttgtgactgtatactaggctggttatatccattttgatgaggtccagttgatcagtttctctttaatggaatggtattacatagtaatctacaaaattgttgctccccaaga

SEQ ID NO: 580324 - DNA, 375 bp, Homo sapiens
gggcggggttcggtgggggtttccaacccccaggggcctttgggattcccccctgggagggggggggggctccccctttcccgggccaaaagggggggccttttcccagccccgccctttttttggggggggtttttttaaacccctttttccccccaaaatttttccccccccccttttttgggggggttggggggtttttcccccccggggggcccaagggtttttccttttttccccggccccccggtttttttttttttttttccaagggggccccccaaaaccaggcgggggggggccccccggggccccttttcccccgggaccccccctttaaatttccccgggggcccttaattcccttttttggga

SEQ ID NO: 580325 - DNA, 925 bp, Homo sapiens
  misc_feature (23)..(23): n is a, c, g, or t
  misc_feature (25)..(26): n is a, c, g, or t
  misc_feature (28)..(28): n is a, c, g, or t
aaaaaaaaaaaaaaaaaaaaaananngnaatagttcctcggatgtaaactcaggataacggtcttgccggttttggccaggctggtcttgaactcccggactcaagcaactctcctgacttggccacccaaagtgttggaattacaggcatgagccactgcagtagccctgattgttttaaatagaagaaggtctttagacaaactcaaccaattgttaaccagaaaatgttggaagttacctcctaccccgcccgcctttgagtcgcccggcctttctgcacctaacacacgtcattcttaaatatatctgattgatgtctcatggctctttaaatgataaaagcaatgttgtgccccaaccccggtcaccttgggcacatgttctcaggacctcctgacgactgggttcacacgccatggccactcatcttcggctctcactacatctttccacttattataagtgccaccaccccccgccatttcccccacccacttcacgtcttttgtcatatatacacctcacactcccccatcctctaccctaacaccatgtcgtcaactccacttctctttctctagtcgtctctaactcgttcatatatgcctactcgcaacccgcctctcatcttcaccacccactcccccctctagatctatcttcgctctatgttcctttagctgtgtcccatggacggatactataccaccacttcagctttctgttgatcttcctttctttccatctagtcactttaacggttgtataacgccttcatctatcccctccagctcctattttacgatccttctttcgctttagcatgaccgatcaccttaacagtctacacttagactaactaccattcaacaatattccatctcctcactcactcttttcacctcacccgtcttatttcatg

SEQ ID NO: 580326 - DNA, 395 bp, Homo sapiens
  misc_feature (9)..(9): n is a, c, g, or t
  misc_feature (50)..(50): n is a, c, g, or t
  misc_feature (87)..(87): n is a, c, g, or t
  misc_feature (113)..(113): n is a, c, g, or t
  misc_feature (152)..(152): n is a, c, g, or t
  misc_feature (172)..(172): n is a, c, g, or t
  misc_feature (216)..(216): n is a, c, g, or t
  misc_feature (224)..(224): n is a, c, g, or t
  misc_feature (230)..(230): n is a, c, g, or t
  misc_feature (239)..(239): n is a, c, g, or t
  misc_feature (241)..(241): n is a, c, g, or t
  misc_feature (243)..(243): n is a, c, g, or t
ctcggattncattcgaaatcccgggttctaaaccccactctgctactaanttgtctgaccttccccatttataaactgttgtgggtnaaaggtgggactaggtgaactctganaaccctgcactcggcgcggacgagggatttaggggaaantgtgctgtattccccgcganccttccccaagggccccgcctcccgggtgaatccccggggccancgcagctnaggcancgatcctgngncngcgggggccggcagcttcctggaaagttacttcttgttggagccggcaataggcaaagtgtgttctgtgaaaatccgcagagccgagattgactacgttccgggaatgagagggctgtgtcattcccctcaattcctgctgcattgacggcg

SEQ ID NO: 580327 - DNA, 390 bp, Homo sapiens
acgcggaacagtaccaccctcagaccatgtgaacatgcgtcttcctgtatcatgtcctaagggctgaccaggactggtgagcaataacacactgcaggaggcccctaatttgccatttccacaccactgccccatccctccagcccccttaagttggcagcaggccactctgtcttgtctagtaatggtgatggagagcctgagtgattcttaatcaaagaaaatgacaactccatttacatttgtacagatctgatattcacatttggatgtatgcctaaaggtacctgggttgaaaatatgtggtgtaacattgctttatcttcctcaatcatcctgacacagccttggacttaatagggagtgggacccagaattatgaaatcatcg

SEQ ID NO: 580328 - DNA, 114 bp, Homo sapiens
atgtgtgaaccgcgcgcgaattcatcgaaacaacgcgctcaaggtcgccaatcttgacgtctgagtcgccggaaatccggccgatgacccgccgggccgcgctcggcgatttcg

SEQ ID NO: 580329 - DNA, 3752 bp, Homo sapiens
ggcacgaggcctggctgggacggaagttgcaccacaagtacaattagtttcagttttgtttcttttccaggcacccagcaacggcggcctccaggcctcaggccccctcaccatcctagaggtcaagatcagctctggctagttctcacaggtctgacccaacaagtagcactgacatttttacgtttgctggatgtacacacggaagtggaggaggaggaggagaaggaggagggcagctccttagctcaagagcaagtggcccaaggcctcagaagactagaaggaagttcctggccattcagcatggtttcccacgggtcctcgccctccctcctggaggccctgagcagcgacttcctggcctgtaaaatctgcctggagcagctgcgggcacccaagacactgccctgcctgcatacctactgccaagactgcctggcacagctggcggatggcggccgcgtccgctgccccgagtgccgcgagacagtgcctgtgccgcccgagggtgtggcctccttcaagaccaacttcttcgtcaatgggctgctggacctggtgaaggcccgggcctgtggagacctgcgtgccgggaagccagcctgtgccctgtgtcccctggtgggtggcaccagcaccggggggccggccacggcccggtgcctggactgtgccgatgacttgtgccaggcctgtgccgacgggcaccgctgcacccgccagacccacacccaccgcgtggtggacctggtgggctacagggccgggtggtatgatgaggaggcccgggagcgccaagcggcccagtgtccccagcaccccggggaggcactgcgcttcctgtgccagccctgctcacagttgctgtgcagagagtgccgcctagacccccacctggaccacccctgcctgcctctggctgaagctgtgcgtgcccggaggccgggcctggagggactgctggccggtgtggacaataacctggtggagctggaggcagcgcggagggtggagaaggaggcgctagcccggctgcgggagcaggcggcccgggtggggactcaggtggaggaggcggctgagggcgtcctccgggccctgctggcccagaagcaggaggtgctggggcagctacgagcccacgtggaggctgccgaagaagctgctcgggagaggctggcggagcttgagggccgggagcaggtggccagggcggcagccgccttcgcccgccgggtactcagcctggggcgagaggccgagatcctctccctggaaggggcgatcgcacagcggctcaggcagctgcagggctgcccctgggcaccaggcccggccccctgcctgctcccacagctggagctccatcctgggctcctggacaagaactgccaccttcttcggctgtcctttgaggagcagcagccccagaaggatggtgggaaagacggagctggtacccagggaggtgaggagagccagagccggagggaggatgagccgaagactgagagacagggtggagtccagccccaggccggagatggagcccagaccccaaaagaggaaaaagcccagacaacccgagaagagggagcccagaccttggaggaggacagggcccagacaccccacgaggatggaggaccccagccccacaggggtggcagacccaacaagaagaaaaagttcaaaggcaggctcaagtcaatttcccgggagcccagcccagccctggggccgaatctggacggctctggcctcctccccagacccatcttttactgcagtttccccacgcggatgcctggagacaagcggtccccccggatcaccgggctctgtcccttcggtccccgggagatcctggtggcggatgagcagaaccgggcactgaaacgcttctccctcaacggcgactacaagggcaccgtgccggtccctgagggctgctccccttgcagcgtggccgccctgcagagcgcggtggccttctccgctagcgcacggctctatctcatcaaccccaatggcgaagtgcagtggcgcagggccctgagcctctcccaggccagccacgcggtggcggcactgcctagcggggaccgcgtggctgtcagcgtggcgggccacgtggaggtgtacaatatggaaggcagcctggccacccggttcattcctggaggcaaggccagccggggcctgcgggcgctggtgtttctgaccaccagcccccaggggcatttcgtggggtcggactggcagcagaatagtgtggtaatctgtgatgggctgggccaggtggttggggagtacaaggggccaggcctgcatggctgccagccgggctccgtgtctgtggataagaagggctacatctttctgacccttcgagaagtcaacaaggtggtgatcctggacccgaaggggtccctccttggagacttcctgacagcctaccacggcctggaaaagccccgggttaccaccatggtggatggcaggtacctggtcgtgtccctcagtaacgggaccatccacatctttcgggtccgttctccggacagttaaaggggctaggactagggtgagagggagtggggagggagagggcaggaaggaggcagagctgtccgtgggaggtggaggccgaggacattttcctgaagggcaggggttggcaacttttcaacatggagtgccaaactgctaacccgtcttctagtgtgtgagaatagggaccaaggtggtggcgtgaccttaactctcagaagcagaggaggcaggtgggtggagggggatgctgggaattcacctgcctcttgctttttgtgggtggctgctgccaccaccgccgctgctatatagtttaggtttctgaggtttgtgagcctgtcctgctttgcattcttcaaaaccattcctgatagagtagccgagggagagtcttggggccaagaagggcccagggtgggtcaggcgtgtgcactgtggaacagagctgagaccccggccccccttggactggcacagggtcctacagagtcagaggaggcctgagatttcgaatgggcagtgaatggcctcttctgccagccacaggcaggatgctccttgatcacggcatcccccggcggtagtacagggtgagcttgcaggagggtctgcaagtgcagacagcagctggggccaaagaggtgttaggttcaaaggctgcgaagagaataggctactggaaaaccaaacccaacagaattcacgtccaaaaatccacattctccatcgcttctcagccttttggctaagattaagtattaaaaaaaaaccaggctctgccaggcgcagtggctcatgcctataatcccggcactttgggagtctgtggcaggaggattgcttgaggccaggagtttgagaccagcctgggcaacatagcgagaccccatctctacaaaagattaaaaattagctgcgtgtagtagcatatgcctttcaacgtagctactcaggaggctgaggtgggaggatcccttgagccgaggagtttgagtctgcagtgagctatgatcgcaccactgcattccagaccccatctcgaaaaaaaaaaaaaaaaaaaaaacagaaacaacagaaaaagcaggttatccatcacttctcagctaagatcaagtgttaaaataaataaataaataaataaataaataaataaataaataccaagttatgagtgcaagaggcagtaaggaaat

SEQ ID NO: 580330 - DNA, 210 bp, Homo sapiens
tcaagattcggcacgaggtaacttactactccggaaaaaagaaccatttggatacataggtatggtctgtgctatgatatcaatgggcttcctagggttttatcgtgtgagcacaccatatatttacagtaggtatagccgtggccacacgagcatattgcactccgctaccataatcatcgctatcctaccgtcgtcaagtgtttggct

SEQ ID NO: 580331 - DNA, 707 bp, Homo sapiens
gggcttttgcttgtagctccagccagagctcggttagggcctcatcgctctgctcccgctccttagggaagcctcggtgattctgccacagcctcagcctctgtggctctgtgacctgccggtattggatgattcgtatctaagactctgggacactcctgaagtcgggaaatggaactcttaacattcaaggatgtggccatagaattctctccagaagagtggaaatgtctggacatttcccagcacgaatttatatagagatgtgatgttggagaactacagaaacctggtctccctgggtgttactatctctaacccagacctggtcaccagtctggagcaaagaaaagagccctacaatttgaagatacatgaaacagcagccagacccccaggtcactacaggaaaagatatcttcattaaagtgcaacagcacactgagagcaacacaccaccacagcagttaattttggaaaggccactgtaagctccactagtgactgacattttacagatgacagattgaagcaagcagcaacattgaatgctttatcaggccaattgctgaaggtttctctctggatctggatgaatcataaatttgggcaactctgtaaaattcttggaaaagcctatgtggtatctgaggtaatcttttctaccttgattccatgccactggctctccattcctgggaagagaa

SEQ ID NO: 580332 - DNA, 1212 bp, Homo sapiens
ggcacgaggcctggctgggacggaagttgcaccacaagtacaattagtttcagttttgtttcttttccaggcacccagcaacggcggcctccaggcctcaggccccctcaccatcctagaggtcaagatcagctctggctagttctcacaggtctgacccaacaagtagcactgacatttttacgtttgctggatgtacacacggaagtggaggaggaggaggagaaggaggagggcagctccttagctcaagagcaagtggcccaaggcctcagaagactagaaggaagttcctggccattcagcatggtttcccacgggtcctcgccctccctcctggaggccctgagcagcgacttcctggcctgtaaaatctgcctggagcagctgcgggcacccaagacactgccctgcctgcatacctactgccaagactgcctggcacagctggcggatggcggccgcgtccgctgccccgagtgccgcgagacagtgcctgtgccgcccgagggtgtggcctccttcaagaccaacttcttcgtcaatgggctgctggacctggtgaaggcccgggcctgtggagacctgcgtgccgggaagccagcctgtgccctgtgtcccctggtgggtggcaccagcaccggggggccggccacggcccggtgcctggactgtgccgatgacttgtgccaggcctgtgccgacgggcaccgctgcacccgccagacccacacccaccgcgtggtggacctggtgggctacagggccgggtggtatgatgaggaggcccgggagcgccaagcggcccagtgtccccagcaccccggggaggcactgcgcttcctgtgccagccctgctcacagttgctgtgcagagagtgccgcctagacccccacctggaccacccctgcctgcctctggctgaagctgtgcgtgcccggaggccgggcctggagggactgctggccggtgtggacaataacctggtggagctggaggcagcgcggagggtggagaaggaggcgctagcccggctgcgggagcaggcggcccgggtggggactcaggtggaggaggcggctgagggcgtcctccgggccctgctggcccagaagcaggagaatcatttgaacccaggaggtggaagttgcagtgagctcagatcgcaccattgcactccagcctgggtaacaagaatgaaactccatctc

SEQ ID NO: 580333 - DNA, 724 bp, Homo sapiens
  misc_feature (4)..(4): n is a, c, g, or t
  misc_feature (81)..(81): n is a, c, g, or t
  misc_feature (84)..(84): n is a, c, g, or t
  misc_feature (99)..(99): n is a, c, g, or t
  misc_feature (102)..(102): n is a, c, g, or t
  misc_feature (116)..(116): n is a, c, g, or t
  misc_feature (127)..(127): n is a, c, g, or t
  misc_feature (216)..(216): n is a, c, g, or t
  misc_feature (222)..(223): n is a, c, g, or t
  misc_feature (225)..(225): n is a, c, g, or t
  misc_feature (233)..(233): n is a, c, g, or t
  misc_feature (235)..(236): n is a, c, g, or t
  misc_feature (238)..(239): n is a, c, g, or t
  misc_feature (293)..(293): n is a, c, g, or t
  misc_feature (297)..(297): n is a, c, g, or t
  misc_feature (315)..(315): n is a, c, g, or t
  misc_feature (347)..(347): n is a, c, g, or t
  misc_feature (370)..(370): n is a, c, g, or t
  misc_feature (373)..(373): n is a, c, g, or t
  misc_feature (375)..(375): n is a, c, g, or t
  misc_feature (380)..(380): n is a, c, g, or t
  misc_feature (389)..(389): n is a, c, g, or t
  misc_feature (396)..(396): n is a, c, g, or t
  misc_feature (470)..(470): n is a, c, g, or t
  misc_feature (496)..(496): n is a, c, g, or t
  misc_feature (500)..(500): n is a, c, g, or t
  misc_feature (518)..(518): n is a, c, g, or t
  misc_feature (527)..(527): n is a, c, g, or t
  misc_feature (600)..(600): n is a, c, g, or t
  misc_feature (626)..(626): n is a, c, g, or t
  misc_feature (641)..(641): n is a, c, g, or t
  misc_feature (707)..(707): n is a, c, g, or t
tggnttcttttctagtggtcatgtgactcactctgcctaaaaaaaaaatgcttctcttatcagggattcctttactttttnatnatcgattccatgttnttntttcgctcttctcntcttgacagtntccctgtggtttcactgtcaggtgaaaacagtacatctttctcgagacttggtggtccctatacgttaataaaaaaaaaaaaaaaaaancccccnncngggggggngnngnngtttcccgggcggggggtgggcgccttggggccggctgcggggattcccctggngggngggggtttttggtttttncgcggggggggggcccgtgttgttttgccttncctggggggcccggggggggccnggncngcgtntggcgttgngcttccnggggggtcgggtgtccgggttttcgggtgggcgtctttgcggcttgggtctccccctttttcctggttgccggnggcgtctttcggtttttgtccttcgnggcncggccccctccctccttnggctctgtnccttcctccctctggcctttcctttcctgggtctgaaaaacttggggatatagcataagaagaaaaataatcncccataatattcccctttctgtagcnactttagacctgggntactagaaaattcctgaagaaaatttcaacgttaagtctgtggctttgttgaatcaagcccccctnattaatatttagaaaac

SEQ ID NO: 580334 - DNA, 545 bp, Homo sapiens
  misc_feature (270)..(270): n is a, c, g, or t
  misc_feature (277)..(277): n is a, c, g, or t
  misc_feature (305)..(305): n is a, c, g, or t
  misc_feature (362)..(362): n is a, c, g, or t
  misc_feature (380)..(380): n is a, c, g, or t
  misc_feature (475)..(475): n is a, c, g, or t
aagaagagatgaaaagagagtgggggcgtcttcaagtaaaatgcctggttgtgccagacatttcacaagtctgaaatcaaatgggattagctcaactagctggcgtctatcaagatatataaatactcaacacccctgcccctaattcaattggagggttctccaattttttacgcggggggcccgaaaaagcccaaaacccttcaaaaagacctcgccaaattttaaatcaagagggggccttccccccagtacacttatctcactaantataccncctccaaaaaccacattatcactccagnccttcaccgagacctaatttgacgccccctcccataatttcctcattatacctactncgaaacctctaaattttncaaaaacctccctctcttttcctttttccctccccttccttatatacacttacttatcacccctctccctttctacattcccaacatctactttncccttgccctcaattttccttcctctcttaccctatcctctcctcctctctcttgtctcattcactactt

SEQ ID NO: 580335 - DNA, 815 bp, Homo sapiens
  misc_feature (634)..(634): n is a, c, g, or t
  misc_feature (657)..(657): n is a, c, g, or t
ggcacgaggcctggctgggacggaagttgcaccacaagtacaattagtttcagttttgtttcttttccaggcacccagcaacggcggcctccaggcctcaggccccctcaccatcctagaggtcaagatcagctctggctagttctcacaggtctgacccaacaagtagcactgacatttttacgtttgctggatgtacacacggaagtggaggaggaggaggagaaggaggagggcagctccttagctcaagagcaagtggcccaaggcctcagaagactagaaggaagttcctggccattcagcatggtttcccacgggtcctcgccctccctcctggaggccctgagcagcgacttcctggcctgtaaaatctgcctggagcagctgcgggcacccaagacactgccctgcctgcatacctactgccagggcgctccgacgtgctggtggtggtggtttccatgctgagcaccgccccccgagcccatccagcaacattcgtgttccaagtcagcatgtccaccaaggtttatgaagggtgatagctgcaagccactcctcagggcacaggagctgcacagcattttaacccctatcgtcccacccactcaagcaatcaccctaggtcctngctgcttgccaacccaccagaanggagataggttcgcctccagctacaagctcaccattcaccatgggtgaccagacctacaacgagatgggggatgtggaccagttccccccacctgaaacctggggtagcctctgaacagagggctgggagagaaggcagagaccagtccttcagtaag

SEQ ID NO: 580336 - DNA, 3698 bp, Homo sapiens
ggcacgaggcctggctgggacggaagttgcaccacaagtacaattagtttcagttttgtttcttttccaggcacccagcaacggcggcctccaggcctcaggccccctcaccatcctagaggtcaagatcagctctggctagttctcacaggtctgacccaacaagtagcactgacatttttacgtttgctggatgtacacacggaagtggaggaggaggaggagaaggaggagggcagctccttagctcaagagcaagtggcccaaggcctcagaagactagaaggaagttcctggccattcagcatggtttcccacgggtcctcgccctccctcctggaggccctgagcagcgacttcctggcctgtaaaatctgcctggagcagctgcgggcacccaagacactgccctgcctgcatacctactgccaagactgcctggcacagctggcggatggcggccgcgtccgctgccccgagtgccgcgagacagtgcctgtgccgcccgagggtgtggcctccttcaagaccaacttcttcgtcaatgggctgctggacctggtgaaggcccgggcctgtggagacctgcgtgccgggaagccagcctgtgccctgtgtcccctggtgggtggcaccagcaccggggggccggccacggcccggtgcctggactgtgccgatgacttgtgccaggcctgtgccgacgggcaccgctgcacccgccagacccacacccaccgcgtggtggacctggtgggctacagggccgggtggtatgatgaggaggcccgggagcgccaagcggcccagtgtccccagcaccccggggaggcactgcgcttcctgtgccagccctgctcacagttgctgtgcagagagtgccgcctagacccccacctggaccacccctgcctgcctctggctgaagctgtgcgtgcccggaggccgggcctggagggactgctggccggtgtggacaataacctggtggagctggaggcagcgcggagggtggagaaggaggcgctagcccggctgcgggagcaggcggcccgggtggggactcaggtggaggaggcggctgagggcgtcctccgggccctgctggcccagaagcaggaggtgctggggcagctacgagcccacgtggaggctgccgaagaagctgctcgggagaggctggcggagcttgagggccgggagcaggtggccagggcggcagccgccttcgcccgccgggtactcagcctggggcgagaggccgagatcctctccctggaaggggcgatcgcacagcggctcaggcagctgcagggctgcccctgggcaccaggcccggccccctgcctgctcccacagctggagctccatcctgggctcctggacaagaactgccaccttcttcggctgtcctttgaggagcagcagccccagaaggatggtgggaaagacggagctggtacccagggaggtgaggagagccagagccggagggaggatgagccgaagactgagagacagggtggagtccagccccaggccggagatggagcccagaccccaaaagaggaaaaagcccagacaacccgagaagagggagcccagaccttggaggaggacagggcccagacaccccacgaggatggaggaccccagccccacaggggtggcagacccaacaagaagaaaaagttcaaaggcaggctcaagtcaatttcccgggagcccagcccagccctggggccgaatctggacggctctggcctcctccccagacccatcttttactgcagtttccccacgcggatgcctggagacaagcggtccccccggatcaccgggctctgtcccttcggtccccgggagatcctggtggcggatgagcagaaccgggcactgaaacgcttctccctcaacggcgactacaagggcaccgtgccggtccctgagggctgctccccttgcagcgtggccgccctgcagagcgcggtggccttctccgctagcgcacggctctatctcatcaaccccaatggcgaagtgcagtggcgcagggccctgagcctctcccaggccagccacgcggtggcggcactgcctagcggggaccgcgtggctgtcagcgtggcgggccacgtggaggtgtacaatatggaaggcagcctggccacccggttcattcctggaggcaaggccagccggggcctgcgggcgctggtgtttctgaccaccagcccccaggggcatttcgtggggtcggactggcagcagaatagtgtggtaatctgtgatgggctgggccaggtggttggggagtacaaggggccaggcctgcatggctgccagccgggctccgtgtctgtggataagaagggctacatctttctgacccttcgagaagtcaacaaggtggtgatcctggacccgaaggggtccctccttggagacttcctgacagcctaccacggcctgggtaacgggaccatccacatctttcgggtccgttctccggacagttaaaggggctaggactagggtgagagggagtggggagggagagggcaggaaggaggcagagctgtccgtgggaggtggaggccgaggacattttcctgaagggcaggggttggcaacttttcaacatggagtgccaaactgctaacccgtcttctagtgtgtgagaatagggaccaaggtggtggcgtgaccttaactctcagaagcagaggaggcaggtgggtggagggggatgctgggaattcacctgcctcttgctttttgtgggtggctgctgccaccaccgccgctgctatatagtttaggtttctgaggtttgtgagcctgtcctgctttgcattcttcaaaaccattcctgatagagtagccgagggagagtcttggggccaagaagggcccagggtgggtcaggcgtgtgcactgtggaacagagctgagaccccggccccccttggactggcacagggtcctacagagtcagaggaggcctgagatttcgaatgggcagtgaatggcctcttctgccagccacaggcaggatgctccttgatcacggcatcccccggcggtagtacagggtgagcttgcaggagggtctgcaagtgcagacagcagctggggccaaagaggtgttaggttcaaaggctgcgaagagaataggctactggaaaaccaaacccaacagaattcacgtccaaaaatccacattctccatcgcttctcagccttttggctaagattaagtattaaaaaaaaaccaggctctgccaggcgcagtggctcatgcctataatcccggcactttgggagtctgtggcaggaggattgcttgaggccaggagtttgagaccagcctgggcaacatagcgagaccccatctctacaaaagattaaaaattagctgcgtgtagtagcatatgcctttcaacgtagctactcaggaggctgaggtgggaggatcccttgagccgaggagtttgagtctgcagtgagctatgatcgcaccactgcattccagaccccatctcgaaaaaaaaaaaaaaaaaaaaaacagaaacaacagaaaaagcaggttatccatcacttctcagctaagatcaagtgttaaaataaataaataaataaataaataaataaataaataaataccaagttatgagtgcaagaggcagtaaggaaat

SEQ ID NO: 580337 - DNA, 155 bp, Homo sapiens
acactgtgatgcatactctgctcgcgcgaagctagcgaggacgggcctggcaggtgacggcagcatccgagtagcaggagcaggtgggggccgcacagccaggctggggggctgcagagcaggggcccacacggtcacacgagaaacggggacgg

SEQ ID NO: 580338 - DNA, 357 bp, Homo sapiens
  misc_feature (105)..(105): n is a, c, g, or t
  misc_feature (137)..(137): n is a, c, g, or t
taatacagagtctcactctgtcacctaggttggagtgcagtggtgtgatgtcggctcactgcaacctctgcctcccgggttcaaacgattctcctgccccagccnctctagtagctggaactgcaggtgtgcaccancacgccgggctagtttttgtattttaagtagagacggcatttcaccatattggtcaggctggtctcgaactcctgaccccaagtgttccgcccgcctctgcctcccataagtgctagaattacaggcctgagctactgcgcttggccccttgcggtacttttggcccaacctcctccactggctggggacgcggaggccgagagagaagtcacttgccct

SEQ ID NO: 580339 - DNA, 92 bp, Homo sapiens
ctgttaaattcccaacccgatgtttgacagatagtagaaacccaaatatttgttggtttaaataaattaagatttaaaaaggaaaaaaaaaa

SEQ ID NO: 580340 - DNA, 2961 bp, Homo sapiens
  misc_feature (1759)..(1760): n is a, c, g, or t
ggcacgaggcctggctgggacggaagttgcaccacaagtacaattagtttcagttttgtttcttttccaggcacccagcaacggcggcctccaggcctcaggccccctcaccatcctagaggtcaagatcagctctggctagttctcacaggtctgacccaacaagtagcactgacatttttacgtttgctggatgtacacacggaagtggaggaggaggaggagaaggaggagggcagctccttagctcaagagcaagtggcccaaggcctcagaagactagaaggaagttcctggccattcagcatggtttcccacgggtcctcgccctccctcctggaggccctgagcagcgacttcctggcctgtaaaatctgcctggagcagctgcgggcacccaagacactgccctgcctgcatacctactgccaagactgcctggcacagctggcggatggcggccgcgtccgctgccccgagtgccgcgagacagtgcctgtgccgcccgagggtgtggcctccttcaagaccaacttcttcgtcaatgggctgctggacctggtgaaggcccgggcctgtggagacctgcgtgccgggaagccagcctgtgccctgtgtcccctggtgggtggcaccagcaccggggggccggccacggcccggtgcctggactgtgccgatgacttgtgccaggcctgtgccgacgggcaccgctgcacccgccagacccacacccaccgcgtggtggacctggtgggctacagggccgggtggtatgatgaggaggcccgggagcgccaagcggcccagtgtccccagcaccccggggaggcactgcgcttcctgtgccagccctgctcacagttgctgtgcagagagtgccgcctagacccccacctggaccacccctgcctgcctctggctgaagctgtgcgtgcccggaggccgggcctggagggactgctggccggtgtggacaataacctggtggagctggaggcagcgcggagggtggagaaggaggcgctagcccggctgcgggagcaggcggcccgggtggggactcaggtggaggaggcggctgagggcgtcctccgggccctgctggcccagaagcaggaggtgctggggcagctacgagcccacgtggaggctgccgaagaagctgctcgggagaggctggcggagcttgagggccgggagcaggtggccagggcggcagccgccttcgcccgccgggtactcagcctggggcgagaggccgagatcctctccctggaaggggcgatcgcacagcggctcaggcagctgcagggctgcccctgggcaccaggcccggccccctgcctgctcccacagctggagctccatcctgggctcctggacaagaactgccaccttcttcggctgtcctttgaggagcagcagccccagaaggatggtgggaaagacggagctggtacccagggaggtgaggagagccagagccggagggaggatgagccgaagactgagagacagggtggagtccagccccaggccggagatggagcccagaccccaaaagaggaaaaagcccagacaacccgagaagagggagcccagaccttggaggaggacagggcccagacaccccacgaggatggaggaccccagccccacaggggtggcagacccaacaagaagaaaaagttcaaaggcaggctcaagtcaatttcctgtgccagccctgctcacagttgctgtgcagagagtgccnnctagaccccacctggacagttaaaggggctaggactagggtgagagggagtggggagggagagggcaggaaggaggcagagctgtccgtgggaggtggaggccgaggacattttcctgaagggcaggggttggcaacttttcaacatggagtgccaaactgctaacccgtcttctagtgtgtgagaatagggaccaaggtggtggcgtgaccttaactctcagaagcagaggaggcaggtgggtggagggggatgctgggaattcacctgcctcttgctttttgtgggtggctgctgccaccaccgccgctgctatatagtttaggtttctgaggtttgtgagcctgtcctgctttgcattcttcaaaaccattcctgatagagtagccgagggagagtcttggggccaagaagggcccagggtgggtcaggcgtgtgcactgtggaacagagctgagaccccggccccccttggactggcacagggtcctacagagtcagaggaggcctgagatttcgaatgggcagtgaatggcctcttctgccagccacaggcaggatgctccttgatcacggcatcccccggcggtagtacagggtgagcttgcaggagggtctgcaagtgcagacagcagctggggccaaagaggtgttaggttcaaaggctgcgaagagaataggctactggaaaaccaaacccaacagaattcacgtccaaaaatccacattctccatcgcttctcagccttttggctaagattaagtattaaaaaaaaaccaggctctgccaggcgcagtggctcatgcctataatcccggcactttgggagtctgtggcaggaggattgcttgaggccaggagtttgagaccagcctgggcaacatagcgagaccccatctctacaaaagattaaaaattagctgcgtgtagtagcatatgcctttcaacgtagctactcaggaggctgaggtgggaggatcccttgagccgaggagtttgagtctgcagtgagctatgatcgcaccactgcattccagaccccatctcgaaaaaaaaaaaaaaaaaaaaaacagaaacaacagaaaaagcaggttatccatcacttctcagctaagatcaagtgttaaaataaataaataaataaataaataaataaataaataaataccaagttatgagtgcaagaggcagtaaggaaat

SEQ ID NO: 580341 - DNA, 163 bp, Homo sapiens
gggaccagtcactgtgtgatactcatgacaatgtgcctacgcgaagatcttttggagatgaatttcccaggtgatcttaatgcttctggtattgggatgtctacgtctctagcaaggccagtgaagttttcctcaatttatccccccagaatatgttttccaa

SEQ ID NO: 580342 - DNA, 943 bp, Homo sapiens
tagagggaacgtaggccactgggcaccttgcccttcaaggagtcctgtgttgggagaccggccacgcccttggcttttgacctgtgttgaaatccatcttggtggactcgtttttaacccaaactcagtgcattttgtaaaatagttaagaatccaagtcgagaacacttgaacacactagaagggagaccccgcttagcatagatttgcagttacggcctggtatgccaagtcgccagcccagctgttccccttcgggatacatgaggtgatgctggcgcagcagactgcgtatcaatgtctcgcatggtcacagtagagatccccgcaactcgcttgtccttgggtcaccctggcaattccatagcaatgtagcttgtccctgtagctcccacggttcccaggggcctaggctgggtagccctactagcctacccctactatgccgcaggccgccctaccctaccgttaaggcagcctatgggacgcagggcacccatctgtccctcggtcgccgtgtggccagagtgggtccagtcgtcccctaacactcgtgctcgctcagacactttggcaggatgtcttggggcctcaccagcaggagcgcgtgcaagccgggcaggcggtccacctagtaccctactagcccctagggagcaccaccacctcctgtgtgtgatgtagctttctctccgctcagcctgcaagggtctcgatttgccatcgtatttatatatcttacctctacttttttctttatgtgattataggaagtataactactgctagactggcagaattgattaacagtatctgtggggtcagcctctagaaactggtctatctaggtagttcgtggaccctcgtatacagcatatcagataacacgattacgtgtatcgacggtccttgtatacattactttccaggggttatttcgctt

SEQ ID NO: 580343 - DNA, 1008 bp, Homo sapiens
  misc_feature (407)..(407): n is a, c, g, or t
gtgactgcatccggggcctggaccgttgactgtggagagagctcggaaacacagctgcatcatctgtcctgatgcggagtatcttctatacactcagagatgcaatctccaagtcgtcaatgaacttgacagcttcctctatgcggacgtcttcgtcgtgattgcttcatctggcattacccatatcatcctactcactcatccacgatggcttagcaagcattagcaaggctcctcgcgtgtgcgtcgtgcaatggtccagcgtagctatgagaaacaacctatctgtgtgatgggtctctccagttgtcaatccctctgatagactagcttgagtcaatacgaattgaccggtgcgcggaaaatagcgcgagaagcttatgaattcgtaatgttgcacgcgcaancaaggtgtgaaacctctcgagacaggcaaatcccccccgcggaccctgtgtgaacgacaacgtgtacccaacaattgcaatggctatgtatcactgtggcccccagcaagagtaagtcatacataatccagtcagacttggaggcgtgaacactcgtctgcgctggctaggtccgtatgcgctgtccttctcacggtaacttggccctcgaggtggagccttcttcacttgtttccgcctaagacaaggtggcccgacggaacttggccgtatgagctccttccgacactgggaaagggcgtttctatagaaacaggccaagtgcgggatggaaatcggacctaaggctggagagcggggcccaaaggaaaagttaccagtggggcagaggcagcacagtggaacccagggcctccacaggagagcgggacgctgcgctcgctcgcgcagcgggaagggtcaacaaggtacgcgcatcgtacaagggggaacctgggtctggaagcggccaacacaggggggaaacgcggaagcggacggacacagagggagagccccccggcacacggggaagttggaacacgaggacacggaaccgcca

SEQ ID NO: 580344 - DNA, 175 bp, Homo sapiens
gaggatacccgaggcagccagcatccaaaggctgggataaggtgtgagcaccagccggcaatcatatactcattaccttccttacctttcttccttcctttctaatctctctctcttcttttctttctttcttttcttttcttcctttcctttattttttattttttttattttt

SEQ ID NO: 580345 - DNA, 374 bp, Homo sapiens
cacgcgatgagtcatacattacctgttggtagcccccaagtggcgtgcagtgacacagtatcttctctgtcttttcatcattctttgtgtgggcattcggcgtgtgcagcaacaacttcgtccatcacgatctcaacccttggtgacaggtctgtgcatcggcgtgtggtatgggtactcggcgtgtgcagtatggatgttcggcgtgtgcagcaacaacttcgtccatactgatctgattttaagaagtatatggaggttcggcgtgtgcagtttggaggctcggcgtgtgcagtatggtccctcggcgtgtgcatgcacacgccgaggatccagacccttggtgacacaagtcttaatggacgaagttgttg

SEQ ID NO: 580346 - DNA, 128 bp, Homo sapiens
tgagtgccatgtagtgctgtgtactgtcagagtggtcaggtgtatcacatgttcatgtatactcggcggtctagactagtatcagactctgctgctcctcactggctaaaggcagacctgactgtgca

SEQ ID NO: 580347 - DNA, 740 bp, Homo sapiens
ccccgttggcaaaaattctctcgcccaaagggggtaaataacccctcctagatgttgccgcccgaggagttacaaatagccttttcgcccagcaattttcgtcgccccacgggtcattacgtcactctttggcaaccactacggttcccgctctggccggtgccacaccgctccgatggtcccccccccgttggttcgcagtgtgtaggacacacagaatgcgataggggcgagactccttgtgtgtaaataatgttgcgctagtcactcatgtgacgtacgacgggcactatccgatttataaaagccatgtcctggatatctcctaggaggagcaggaagccctctggagcgagctgtgcttggcgcataatacgcctcaggagtccactcgcttagtagcgaggccacgatctcttcgcccgtctccgagatagatggatctcgcccataagatatctccccacgctcgttgataatagtgttagcgagctttcatacatccccctacgtggtgtattctgctgactgtgttctttgaaagcaagatgcgcgtgcacgcactactagaacctaggctcctgaacgagtaggatgattctggtgctatcctatgcccccggtcgggcgattatttatctatcttgcgaaacaggctatcttctatgcgtgtaacaagatgatttctgttcataataaaataggtgaagaaaaacagacacaacaatagatcaagaaat

SEQ ID NO: 580348 - DNA, 1063 bp, Homo sapiens
  misc_feature (393)..(393): n is a, c, g, or t
  misc_feature (397)..(397): n is a, c, g, or t
  misc_feature (405)..(405): n is a, c, g, or t
  misc_feature (410)..(410): n is a, c, g, or t
  misc_feature (414)..(414): n is a, c, g, or t
  misc_feature (428)..(428): n is a, c, g, or t
  misc_feature (432)..(433): n is a, c, g, or t
  misc_feature (442)..(442): n is a, c, g, or t
  misc_feature (450)..(450): n is a, c, g, or t
  misc_feature (465)..(465): n is a, c, g, or t
  misc_feature (469)..(469): n is a, c, g, or t
  misc_feature (477)..(477): n is a, c, g, or t
  misc_feature (485)..(485): n is a, c, g, or t
  misc_feature (489)..(489): n is a, c, g, or t
  misc_feature (497)..(500): n is a, c, g, or t
  misc_feature (527)..(527): n is a, c, g, or t
  misc_feature (890)..(890): n is a, c, g, or t
  misc_feature (922)..(922): n is a, c, g, or t
  misc_feature (944)..(944): n is a, c, g, or t
  misc_feature (950)..(950): n is a, c, g, or t
  misc_feature (955)..(955): n is a, c, g, or t
  misc_feature (975)..(975): n is a, c, g, or t
  misc_feature (986)..(986): n is a, c, g, or t
  misc_feature (991)..(991): n is a, c, g, or t
  misc_feature (1041)..(1041): n is a, c, g, or t
atgagctttatttatatcaaaagatctaattcttaaacattataaaaatttaaactttactttgaaatattttatttaatattttgatttataatgatttgtcttttgccttttaattttataggcaattttgaatattttgaaagaaaagattttgaaaatatgaacaataacttttttacatttaatttacatcttcaatgaaaatatattccagttttgtatactttgaatactttcaatcttttatatcgttattatctctagaacattaattatatacacatcttcaacatgacataattagtaatttttctaaaattgatattacagaatatataatcccaaatacatttttatgacttacttttcattttaacatcatcagactcnaaanagaatacncaggnatgnacaataatacggtntagnnatttttacnttggcccnaaccacattcctgcnacangcatagcnttacatgnatgnggagattnnnncagtaggggggcatatgtgtcacaganggggggcatattcgggttatcagcgtgggatatggagtgagagttgggatagattgaactcgaggtggtgggtagccctcgggactcgggccccaggccccgccatgtgttaagagtgggtctggttactgaatatcttcagcaagggagtagcgtgattgatactgcatttgaggacgattactccagtggagacaatgacatcagttaggaggttgagctacctcttcgtgagtagcgttttctatctgtagctggagcttctgaatgaaccctctgacttcttcccatagcctatcatctgagaagttttgagccctgcaactataggtttccttgtcagcaagttcctggccataggcntatccattttcagaccaggcattttgacagcncaaccacatttctggataaatngaaggncttcnactcctaactaaaaggaaanttgagaatccncaggngtctatcttgagtttcaaacccaggggtcatgcaaaatcaaacaacaccnttaaccccagagattgtgcagg

SEQ ID NO: 580349 - DNA, 398 bp, Homo sapiens
  misc_feature (69)..(69): n is a, c, g, or t
  misc_feature (102)..(102): n is a, c, g, or t
attttaaaaaatgcttaacctatatattgcccatatatgataattcaacttaaatttattcagatagancataacattcagttgactaaactattatttatnaatttattttgagacaatgtctcttattgcccaggctggagtgcagtggcaagatcagggctcactgcagccttgaccacccaggctcagatgatcctcctaccttggcttctgacacgccaccatgcccaactaattttttttgtattttttttgtagagatggggttctgccgtgttgctcaggctggtcttgaacttgcgctcaggatccgccaccctctgcctcccaaagtgttggaattgcaggcgtgagccacgagtgccagcctgggcaacagggtgactccctctcag

SEQ ID NO: 580350 - DNA, 994 bp, Homo sapiens
ggttgaactcagagcctggcatctcctggcgtgggctctggaagtgatcctggggactcgggtattgaggttgatgaatgacttaggagaggtaagtgctttgactctgtggtgtaatcctactttgcctggaagttgtgagtttggcctttccggaacttgacatgtgaggggctctcatcctgggcgaaatcttgtctctggactgagctgttgaggcattacttcgctcacttcgggtgaatctagcatatcgggactttattcatgctcggcattttatcttctagataccgctgacgagtcacagataagatggatgtctatcatgggtagcttgtggagttgtgtatcgctgtccgattgatcgtggtgtgctgtgcgattcctcttgaactggtggcaatcgtggtgtccagcgtctggagcttggcccgtctctttgagatgatgctctggtttgatccataaaagtttcttgggtaaaggatgattgacgttaaaggacatagttttgtgcttgactgttgttgatctctaagctacatgagagtaagatggtggcttgaatatatgccagagagttgtaggactggcttggggggattatgagaattagtacctgcttttggctcgaaagaattcctaatgagaatgattgggggtttgataatccggtgaaaggatgcttggtctgagataaagggtgtttggcacggcaaaagtgccgagggatcgatcatggtgtgccggagtgtatgtgcagtccgaacgaaggggggcagtacgagtcgtgccaatagtcaccgtaaagcgtgtaaggcttcataaaagaaagttggagcgcatgaatatgacgtgcgactgtacggtccctttatacggtgttgttcgggcaccatgacatttgcgaggacaacattgactaccaacatcgaactatacaccaaatgtggagtaacatgactgatatttacctctctctcaataccag

SEQ ID NO: 580351 - DNA, 128 bp, Homo sapiens
cggtacgctatgaggacttattattgtatggatactgacacgtcgtactttcctccaggcattgcctgctgccgctgcctggtgtcacgctgcttccgggggcatacgcagcgggaaatgatacactg

SEQ ID NO: 580352 - DNA, 216 bp, Homo sapiens
aagatgtttcccagacctgagaagcaaggatctaactaacatagtatacagctttgtatcatcctcaagtcaacactactgaaactttttacaaaaagttttaatcaaagtcctccctgaatgttttcaatggagaaaaacttcaatttcatactcttcattgtccagcatttctatggagttttcatgaagtaataactatacctcacagacatt

SEQ ID NO: 580353 - DNA, 433 bp, Homo sapiens
  misc_feature (251)..(251): n is a, c, g, or t
  misc_feature (395)..(395): n is a, c, g, or t
  misc_feature (416)..(416): n is a, c, g, or t
  misc_feature (429)..(429): n is a, c, g, or t
ctagctccaatgtggataaaagcttgcaggaaagtttacagaaaacaatctacaagcttgaagagcaactgcataatgaaatgcaattaaaagatgaaatggagcagaaatgcagaacttcaaacttaaaactagacaagataatgaaagaattggatgaagaggggaatcaaagaagaaatctagaatctgcagtgtctcaaattgagaaagaaaagatgttgctacaacatagaattaatgagtaccanagaaaagtggaacaggaaaatgagaagagaagaaatatagaaaatgaagtttctacactaaaggaccagtttagaagacttaccggaaagcaagtcagacctcaccagcttgcctaatgagaaagctgaccacagttacagaancagttggaagaagcgaatggncttctttgggacngaat

SEQ ID NO: 580354 - DNA, 1068 bp, Homo sapiens
gtgaccatatagcccataacaacggggccgcgtcatctctcctgttgacctccgggctaatgcatgtcatgtgtctcctaatccatgatggtcatcctgctaggctgtgctatgcacaacaatagcgcactctccccatgggtgaccgcgagagtgacatgaagaaagctgatactacggacagcacacctcaacggttctccaaggactatctgatgggataatcctggatccgagttactctcagagagctcctcttcccattcgcagtgaattgtccgtgaacctgtaggatgcagttccagacatgggctcgcatagcccagcagacttaggagggcagaggggctgcccagacagggtgtcaccccggtaagattgcccttccaagctcgccactgctactcagtgatcagcttatcattggacggatcgaagggtgtaatcgtgtcaccatgcatacttctataatttgtcgtcaaatagaaaccattgacggtgccacaatgaactctacccagcattgtgtcaaataaactgacttttgccgtcatctctggttttcccggtcccctatgaggccttcgaaagctaaattcgttatctccacttggtgcgatatcacggcgagggtgttattaccggatcaaggttgagcgtaggccagcgggcgttctcgcggcttcacgtcaattcgtggtggtcaaattacccgtcatgtagtgctgcttcagtccggcgaactaggtatgtgctctcatcatccccaggcatcactgggatgctgaataccgccgctgaatacctggcggtgggatcatgaggtggactattaccggtgagtcttcccactatggcaccggtcttaacgtcactggccttatacgaagacaaggacgacttcaactggtgggggaccttatcccacaatcctgggggtggcaaaccatgacgcattgtaaaaatgccacactagaccatagaaagcggggttttaagcattcggaacaacgtaaagtaggccaagtgtgcacaggccacaaaaagctaccaacattttcatctgaa

SEQ ID NO: 580355 - DNA, 112 bp, Homo sapiens
atctcatatgcggtgagccatcgcactccagcggtgaaacaagagtgagactccacctcaaaaaaaaaaaagtaaaggattagggtctgggcgcgatggttcaccgcatttg

SEQ ID NO: 580356 - DNA, 257 bp, Homo sapiens
gagatggaggttctctcggagtatctgggaactgtgccttttttttttcctcaggctgctggaggaaaactgggactcagacaggaaagggaaagccccacagacaaggtagccctggccagaggcttgttttgtttttttgtttttatgaggtgggatatccctatgcttgcctaggctgaccttgaacctcctgggtctcaagcagtctacccacctcagcctcctgtgtagctgggattatagattggcggcac

SEQ ID NO: 580357 - DNA, 701 bp, Homo sapiens
accgcgtgctcgtcgagctcactggccgcagctctggacattcctgacagaaacaccttgagcttgatggtaccctccagcagcaatggcagtgacggcgttggcggcgcggactgtggcttggctgtgtgtgggctgtgagtgaccatgcaatgccctgatggcttctggctcttgatcatgtcctgagaatgtcgacctgtgggctgcgggctccatcctgggaatgccggtggggccttctgtgaaatgagagagcagtgctgacagagtgaacgatatttccggtgaggctcacctgggtcccaagtccagccctggatctcccaatggccttccaatccttaaactgccaatcgacccaccctgtttcctacctggtgccttgggcgcccccatcccccaacagaactccctgggcccccaatccagtataccctaagccttgatgtcccgaccgttgccaacgtatagggcactctcaggttacgctgcacaacagtttcagtgccccctagaccgtttccacctggcgggtctccaaagacaaacccacggctacactcctcctttatcattaccatctcccgcgatgagttctcctcaggtcgtgcgaaacaccccaaattcttctgcacagtgtcaagatcgactgccaaggtttgctccagctgatccctcggccttaacaactgtaaccg

SEQ ID NO: 580358 - DNA, 511 bp, Homo sapiens
tgccttcatacaccccatctctacctttaagagggagagtgaagtaatgcttacctgaatactgtgtgtatagtcttattggaacaatctcatagattagatccttaaaaccacggctcaacatttcatctgcttcatccaaaacaaacattatgatccatttaggcgctagttagaaacaaagtacatactgtcatttctagatctactcagtgatacaattatgacttatcaactatgttaacagaataaaaaaaactactctcttaaagacaatacttacaaaggtatcttctgtataacatatcaaacactctcccgggtgtaccaacaacaatatgtggtgcttcagcctgaagtttatgcattacatttcgaacatttgttccaccaatgcaggcatgacaagtggctcccatatagtctccaagtgccagaattacctttaggatctaaaacccaagccttaattattattccgcagaactccaggatcaatgactaattttta

SEQ ID NO: 580359 - DNA, 163 bp, Homo sapiens
tacatacttggtccactggtgcagaatcagtgggaaagacacatgcttcaaaatcaaattcgcactgttgagagtactggctgataaaaatagcaggatggagggcccggcgccatggcttaatccttgtaatcccagcagtttgggagactcaggtaggagg

SEQ ID NO: 580360 - DNA, 266 bp, Homo sapiens
ctgcaaccaacttctgcaattcagaggatcatgcttgctctggccatgggaagactgcagagtagaaaggtgatgtgccgacaagctcccgacaatggatcaactgggagcgtatccatcatgtgctttcgtgaacgcagttcgaattgtaagagaaacgcgaatcaggaatgagtttcgtccatttcctagactaaccatggcgcagagcaagcatggatccgtctgaattgcgagaagttggttgcagggccgatacagtgaaa

SEQ ID NO: 580361 - DNA, 221 bp, Homo sapiens
agcacaagtcatcaacaaactgagtaaactattcttgaggggcactgacaacgctgttctttgacacttgcatttatatctttttacttgcaacaagaatatactagtgtatatgagtctgacagtgtgctagggtctgtatgtagggcaaccactgcactgatgcccatcaattttgccacttcaacaggctcatcacacattcacatcagttagcctgt

SEQ ID NO: 580362 - DNA, 193 bp, Homo sapiens
ttttggggcccccccccccgggattttttcggggccggggggcgggttcgcccccctgtgtttttttttttggcccctccgcccttctgggtcccggggttcccccccccctggggttttccttttaaccttggctcccggaggggccgggggggtttttttttttcccttttacttttggtttcccccccca

SEQ ID NO: 580363 - DNA, 209 bp, Homo sapiens
tcatcccctttggttttttacatacaagggctggttttgttacccaggctggctttcaaggtccatagtctttaagagatcctctcaccacagtatggccaaaagtgctgggcattgcagagtgctgattcatggacacccatgactttgcgtgtcctttacttacatggatccaggacccatgaacccaaagcgtcaggcactcgtat

SEQ ID NO: 580364 - DNA, 236 bp, Homo sapiens
  misc_feature (200)..(200): n is a, c, g, or t
gtagctagcgctgtctcacggtcctccacgggagctggcgctggctgatggcaggtgcaggagcacctcgcttctctccggatcttccagcaccttcacttcagctttatccgagacaggcgagctccactgcgaccaggctatcatgggctgagagtagtctcatttctcatctcacacccgacacacctttccatggngagtgaaacgtgccccgaggtgcctgtgtccaggtt

SEQ ID NO: 580365 - DNA, 360 bp, Homo sapiens
cacgaggaagaactaccaactggctgaaaatgcttgtaggatgggaaaaatacaagaacactgaaaagtttcatatgcgaatttacaaaggaatatcactccagctcacaggtgaactctggggcctccttcttgagatccctaagatgatataagagacatgggatctgtatagtacattaaaacacagagcacggtgctgttcacctgacatcagacacatacacctgcatgtcaaccgcacatttcgggaccacattatgtttagagacagatatggtgttaagcatcaatccttattccatgtgcttgctgcctactctatttataacacggaagtcgggtattgtcaggggatga

SEQ ID NO: 580366 - DNA, 1070 bp, Homo sapiens
ggaccacacccacggtgaccacgccctcgctagccgcagaaggtgggctccccgcactcgaccgaggtggacgagtccctgtcggtgtcctttgagcaggtgctgccgccatccgcccccaccagttgaggctgggctgagccctcccgctgcgtggaccccgggcgcgtgcgctcggcgttccccacacgatgtgtgacctgtgccctggttgtcaccctgttgaattttgagcatcgcaaggcggtggccaaatggccacccggcacctggcgtcccccggcagctcgaatgacatgcaagtgcccggtcacaggaatcgggcaggtgggcttgggggcctgaggagacgccagccacatcggtcagcgatgtcccttgaccaccctgtctgactcggatccctgtgcccctggtcccccggtgccggcagactcatgacgaagacaacagagggcttcggagtccctcgccacagaccctttgccctgagcccagtacaaaggtgcacgcacaccactggctgaaccaatccagcatcctgacatgccatgaacaccccgtatcatgacattcacctactcaatcatctgcaacaactcaatactgtactaaacctttcagaccagcaaccccattaaactccttgcaccacgccacatacatacacaacgaactacccgctcacccaaattaccataccactctgcctaaatacactaataatatcctcagggggccatatgcctgcaatgggtgtacaccagagcacaacgcgaaacactatcagatgccctacggtggattacaccccaagcatgaaacatgggactcgcctcgtgcataaccaccctgactccagaaatcctaaacctcaaaacacccgacacataagcttgaccaaacttgaagcaacatcacagcacaagatcccaacacacgcaacactactcgacgatatataacccactccctactactcaccatcctcgactctccccgtcaacacttatatacatacattcccaccctacaaaatacttctctcaaacatctaaaaacataacaac

SEQ ID NO: 580367 - DNA, 267 bp, Homo sapiens
tccttagtgtcaaaggaaaccatgggaacgcagcatccaatttgatcgacaggagacggggttagcagaccacgagggggtgtattagtatagttctatagctgtttccacgtgtgtcgtgtaattcatcacaaggattttgagaatggaaactgtcactaatcaaatatacaaaattaatgagtagtttacaccattgcaaagggtaggtagtgaacagtcgagcagaacaaaagcaataagactctctgggcacatattatggag

SEQ ID NO: 580368 - DNA, 178 bp, Homo sapiens
attttgacttaaaaagatgaattgggaaatctttttttctttattttagggtcaagaggtacatgtgcagatttgttacatggggtaaactttgcatgtcaaccggagggagggtttaggtgtccatttgtttttgtcaccagggtaatcagcataatacacattaggtagtttaagt

SEQ ID NO: 580369 - DNA, 322 bp, Homo sapiens
  misc_feature (34)..(34): n is a, c, g, or t
  misc_feature (44)..(44): n is a, c, g, or t
  misc_feature (284)..(284): n is a, c, g, or t
aagtttgatcggcgaagaaaccgagatttttcgnaagcgcgccnaatctccgctgcggcaccgtcatcgtcgctcgcccaggaacacgactctcctgccaccatgtacggccggatcctgttcaaggacggcagcgcccaaatgattgaaacccttaaccagtctgccgccagtgaaggcctccgcgacggcccaggaagaaggttgtccccccagctcctcaggaggcactccgtaggcattggtcacatcgacgatgatcttgcccgtccaggtgggcaagnccttcgcgacatctcggtgggactcgaaacggacagcc

SEQ ID NO: 580370 - DNA, 981 bp, Homo sapiens
taaacttcagtttgaaatacaattaaaaacaaggggtagcagggagtggccttcagaacagttagagtggcagggacacaacttaaggccgtggcttctggggccaaagacacgagccctcctgtggggagcctgtgtgtggggcccccttcccttcctgtgtgtaaggctctcgatcgtgggggtgtcgtgacactttcgtgatttatacatttctcaatactgtggtctggggtgcccgtgggcaacattgtggccttctctatctttctcgtgcttctccagacgtggctccgtggtgtgtgggagggtgacaaggcacacggggccgtgacagcgtgaacgccacaaacgtgtgcagggtgtccacagagaggatctgtgtgcgtattccactgtggaggccgtgcactcagacagggtttcccactctctagacacgccgggctctccaaacattaaagcgaggggttcctcaacaacagctcacaagacactccaagagacgtctcctctcacagcgggtataataggggactacgtgggaactaatccgcgggggggacacacacaacaaggcgaccaccaaagagcggtgcttcacgtggtgaacgggacgttggtgagagcggcccagcgccccatattctccttcacgagtgagccaacacacggggttgaagccagtatcccgggacgccccaccatcacccaagggtggacccctttgtgggggagaacaaacaccccggtgtactgtcgggcttcctacacagagaacgcacgacaacacttcccttccgagggaggacaaggtcccacaaggtaacgagagcccccccaccgaaggggaggaccattattatcgtccattaccccccttttgtgcgtcagaggcgctaccgcggcccacaatcaagcaggcacacacttaggggggcggccacaccccataatacaagtgaaacagccattcacacc

SEQ ID NO: 580371 - DNA, 851 bp, Homo sapiens
gtggagaaaatttatcacctaaaatatacccatcagtataaggcaagcaaaagtcttaacatggcagccattctgcctttgccgtggccctgtcctgtttagttcttagtgggttaatttttgtactttgcagaagaaacttcagcaagctagaactggaaggtactttaatttttcatatatattgtatttttttttaaatggaaggctcatttacttgaaaggtaaaaactttcactgaatacaaatagaaaaagtgatgtgttaatatcatatggcttttggtccatcttgggggtaagttattactcacttcatgtttttcacctataaaatggtcaagctagcaaaaaacactctggttttcctacatggggagagaagagacctgccagattatcagacctcttcacggttcaaagaccatctcctgtaaaactgacctagtgggacaagcttgaattggaactagactggtgaagtaagcctgtaactggtcattaaattggtataccacggtaacggacttagatgagttattaaatacccaacgataagggaaaaaggccgcctaaatctatgagaattcctcggggccaacaagcacggggggacacgaacggtgtaatcgagtaagttatgggcagccattaataagtcaaaaatttccagaaaaaacaaagcaaacaaaaattgtggcgcgtcccctgcgaagctcagaacacagtgggcggcggccaatggaagggaacggccacacgcgaccacagaccggcacacaaggggacacaaaaaaccgggacaggtgcgaacacaggcgagaagagacacagaaggccaacacgcgcagg

SEQ ID NO: 580372 - DNA, 360 bp, Homo sapiens
gccatgatgaacagtgagcatgtccttattattcaatgggtctgtttacagagatggtggtaatttacgttcttgtaaatttgcagcaatttattaagtaaagacaagttatagtctgcagacccgagaccaggacaattcctccgatgaaattggctgcatcaaaggtagactttcgcacaggttgtgaggtgggaatcactgtggttgtttgttgtacctgatgtagtaactgtcttggaagttgtagaaggggagggctgaactgtgggtttagctgtagaattggctgttggcactggagtggccgtggaaacggaacagaagtctgtcgtgttccccacttgacaatcactaact

SEQ ID NO: 580373 - DNA, 260 bp, Homo sapiens
ctgctgcttttgacgtctagagtgatcccatcaggcgattactgtggggagcggggtccggtgtgtgagtgccttcgtcctgggcaaactgtgtgctgcggctggaaaggtggactggcggctcgcccgtcactgcaccggacgttcgtggggaagctggagctaaaccattcgtagacgacctgcttctgggtcggtggtttcgtaggtatccctgagctgcctcgccacagtcttctgcctgatgtggtaccgaggct

SEQ ID NO: 580374 - DNA, 181 bp, Homo sapiens
gatccccctatgtctcgtatcgtactaattcatttcttcagtctttatatacgtatatatcacccttgacatattatatatcagttcatttactatctgccttccccatcagaacataaattctataacaacagacactttgcctgttctgttcactgctagaattcccaagtactgagaa

SEQ ID NO: 580375 - DNA, 213 bp, Homo sapiens
gcgagagagagaagatcggggggctgaaatccatcttcattctaccgctccgccggtgttggtggaatgagcgtagcatggtgtcttgaagagaaaagcatttgcttgggcaggactctattcagcccccacctagaaacatcaccgctcagagaaccgagctaactcccacacatgccgtgtggtccttgacactctggacacatgggtcgc

SEQ ID NO: 580376 - DNA, 306 bp, Homo sapiens
tttttttttttctcagttagtttagaaagtttattttgccaaagttgaggatgtgcccgtgacacagcctcaggaagtcctgacaacatgtgcccaaggtgctcagtcacagcttagttttatacattttaaggagacacgagacatcaaacaacatatgtaagaagtacactgtttcggtctggaaaggcgggacaacttgaagcaaagctaggaagacttgaagcagagaggaggcttacaggtcacaaataggtgaggcacaaatggttgcattcttttgagtttctgattcgcctttccgag

SEQ ID NO: 580377 - DNA, 204 bp, Homo sapiens
ggacgaagactccgggaatagccttggtctgcccaacagaccattggctaccttctcatgtctggtcacagagtaactgctttgtcgtgggtacctctccgtccaccttcatgtacacagtgggcacctaccttcacaaatgtactgtgaacatcatgcgaggcttaggggcgcacgtgacattaggtgtggtccaagggggtt

SEQ ID NO: 580378 - DNA, 154 bp, Homo sapiens
aacgccatctcctaatgaccaagaccccatacccacctgtgtgacgctagcctttttatacactgtcctcctccaccttgatggacccctattgatgcatcctgcctaggctggacttcaccccttcctccctgtccccacgatccaactgtcc

SEQ ID NO: 580379 - DNA, 235 bp, Homo sapiens
tcctccaaggtactaaagaaatacgggagaggggaaaaaaaaaggtccttcttgacacagcaccatcttcagaatgttaaaaaaaaaaaaaaacattctctcctttctatctcccattaccacaataaattcaggggcaaatccatggccgccttgtcccctggtaacaaagggtgaagccgccctccgggaaacgtgaggacagggctcctgatgcgcaggcttaaagctctcc

SEQ ID NO: 580380 - DNA, 129 bp, Homo sapiens
  misc_feature (95)..(95): n is a, c, g, or t
ggaaaaacgtttaacttttatttgatgcttctgaacataataaaataaatgaacctaaaacagcgctataggcatcctgctagggattatacatnccatttagggtaaaatacatgggaacgatccgca

SEQ ID NO: 580381 - DNA, 105 bp, Homo sapiens
  misc_feature (105)..(105): n is a, c, g, or t
gaattcaaaacgctgcacgcagcagtacttctagagtcttccacgcttcgcactagctttcaccacccggtttgggggtagcacaccaagacagtacccatgttn

SEQ ID NO: 580382 - DNA, 295 bp, Homo sapiens
  misc_feature (64)..(64): n is a, c, g, or t
  misc_feature (158)..(158): n is a, c, g, or t
  misc_feature (270)..(270): n is a, c, g, or t
aattagccaggcgtggtggcatgcacctgtagtcccagctgcatgagaggctgaggcagaaganttatatgcacataggaggcagaggttgcagtgagcccagatcatgccactgcaatccagcctgggccacagagcaaaactctatctcaaaaaanttaaaagaaaaagaaaaagaaaaagaaaaagaaaagttaaaaggcaggtataagatgatcccatttatgtaaaacatacaaagcatacaaaacaaagttatgtgtgtatgtntaaaaggatgttaaaggatgttaac

SEQ ID NO: 580383 - DNA, 813 bp, Homo sapiens
  misc_feature (50)..(50): n is a, c, g, or t
  misc_feature (60)..(60): n is a, c, g, or t
  misc_feature (64)..(64): n is a, c, g, or t
aataaatcccttcacagagaacaaccgaaataactaaaaaaaaagtttanagtgactccngctntctttggcgtccaaccttagaacctcaactgacatatagcattgggcacactccagcagacgcccgaattcaaatcctggaaggatggaaggaacgcctggagaatatttgggatgagacaccactgtattttgctccaagcagcctctttgacctaaacttccaggcaggattcttaatgaaaaaagaggtacaggatgaggtttttttcaagaaatttggcctttctgtgggccatcacttgggcaagtccattccaactgacaaccagatcaaagctagaaaatgagattccttatcctggattcccttctaacatggcataaaaactgggactctctccaggctagcctgacttgctttagattctaaagacaagtggccatcttcctccacaatgaataattgacagggaatagactgtaaaaaaacaaaatgtgctctatggcctacacgtaagaatctgaggaccgctaactttattgagggacacttcatgatacacgctcactgacacgatgctaacgaaccgatagcatgacgactactacacacggcccccaacggcaggtttcaggatattacaagcagcgcgggggacccgaggcaaagcccgacatataattaacatcaaaagaactaactcctcaacgagccatatgctagacctattcatagggagcgcttccatagaactaaaaaacgacctcctccatatactttgtacgccccgccgcactcctaaaatc

SEQ ID NO: 580384 - DNA, 276 bp, Homo sapiens
tgactcttgaggaaacactgcggtctgctatatctacattagcatggagcatctgtcacagactaatgacccaatattgacacattactatttttggttttggagacagagtggggctctgttgcccaggctagagtgcaatggcacaatctgggctcactacaaactctgcctcccgggctcaagcgattcttctccctcagtctcccgagtagctaggattacaggtgcctgccaccacacccggctaattggtgtatttttagaagagacggg

SEQ ID NO: 580385 - DNA, 385 bp, Homo sapiens
  misc_feature (172)..(172): n is a, c, g, or t
tcggatacgtgcatcaggttgtgggctctcccaggtctgagtgtaccaacctcctcctcgtcctcctttaaacagaagtcctcaggaagaggtctgctggcctctggttctgaagcctccatatccttgtccgggcttgctattcttgcagcacgctctgtgtgatggtccnatatgcttcatgttcagcaagctccgcttcaaaaatgggggtccagtctgggcccatcagtgttgttcagtgtgctagctctgtctagggccagcgtgtatgtgtcaacttgggccagcttgttgctcttgactgcagttggctgctagcttgctttgccttccttcgtggagacaccgcatgtttcatcttttcccgctgcaatacacttgt

SEQ ID NO: 580386 - DNA, 517 bp, Homo sapiens
cagtctcattttcccctgaggctagctataagaaactggaatccctgttccccaacgtgggttatagaaaccacaattccttttccccaaagccagccataaaatctgaaaatattactctaatttttcttccgctcttctgtgtaaaaactggccataaagaaattatcttacctaccttgtctaactgaaggtaataagatcctcatttcaaaaaaggcccctgccacatagccaaaaggaagaagtgcatgctcagacaggtcaagaagaatctagacagacaggcctttctgggtttccctactcaatctattagtattaggtcatatcccttttgtccagtcatatttcttcatgactgttcataccttgttgaacctaaggattaaaatggtcaattttccctgtgtctttggtcttcattctgaaggcttatgttggaaatgtggtgttcaaatttcatgtaaagctatgatcaaataaatttgtatgccttttctcctcttaaaaaaaa

SEQ ID NO: 580387 - DNA, 590 bp, Homo sapiens
gagacgggggtgggcgccgagcagcgccggcctggcctgctgatgctcgctggggcctgggcctgtgagaactgcgctggggcgcgccggggcctgatggtctcccatggccaggggcgcctgggacccccagagcccatcagcccggtgcagcgccttgcggccctccggcgcgccgggcaaggcaagccgaggcgggtcgacaggattggtgggaatgacttagggacacccgggaagggcagtagggggctggaaggtatggtgggcatggagctttcaggggcaaaatgtcacacactgggaaggggaatgaagaggagttgggaacaaatccccacagatttaacaccagggtggtcccttgtgaaatttgactaagatggggacttctccgtggttttgggtcacggtcttccagtcataaaggaaagttaaaagagatcagattcacggaagagaaggaattcgcaaagagagggggttaaaggaagacgaagcaaagcaaccagtgggtgactggagaaatgaaaggacttcaaagggaattctgcacaggattcgaacagagacgcaactgtgactatgac

SEQ ID NO: 580388 - DNA, 528 bp, Homo sapiens
ttattacgccccaaactctaaccctaaacttaaccctagctcctaaccctaaaactaaccctagctcataaaccttaacgtaagtctaaccctaacaatagatttaaccttaacctaaccccctagaataatattttaccttgtggggactaataaaatgtccccagttttcttttctttttactcttcttgtgcggacacacaaacaaacgcacacggctcactggagtgtgtaagggctgttcagagagaacccttcactggagtgtgtaagggctgttcagagagaacccttcactggagtgtgttagggctgttcagagagaacccttcactggagtgtgtaagggctgttcagagagaacccttcactggagtgtgtcagggctgttcagagagaacgcttcactggagtgtgtaagggctgataagagagaacctttcactggagtgtgttcagggctgttcagagaggacccttcaaatgaagtgtgtaagggctgttcagagagaacccttcactggagt

SEQ ID NO: 580389 - DNA, 475 bp, Homo sapiens
tgacacagagaccttgttcacgtgtttatctgctgaccttctctccactattatcttatgaccctgacacatccccctctccgagaaacacccaagaatgatgaataaatactaagggaactcagaggccggcgggatcctcgtctgctgaatgccggcccctgggctcccttttttctttctccaaaaaaaaaaaaaaaaaaaaaaaaaaaaaatttttgggcggctgggcccggaaaaggtttttaagacccttacctgttggggggccgcgccccagtaagttaagctgtgcacctgggccaaacgatggtcccaaggagatcccggctcaaggcataggggctggtttctctacacaattaaaaaagcgccgggggcaacccgcgtgtcgtgacaaatccaggtgggagtcggagccaccatacggttctatcacgggagccaaacgagcgaataaataccggagcggata

SEQ ID NO: 580390 - DNA, 446 bp, Homo sapiens
gaaactaatataaggtacactgcttttgtctgtttttttaaacgtcattctttctctctaccttttcccacacacaaaacatacctcacagatagttttcaccaaatcacagatcaaagaggaattcatccatcctattggagactgttggtgtatcagcagtggccgttttccaactcttgaactacagctaagcagtacagtcgcaacacaaggtcttctgagactagctgcaactgaagtcatgagttcactctggcctcatgtgcctctgcatgctggctcccgaggttgccaggctaagatggagaccacatgctgtcaatattaagaccacttctgaggtggatatgtggacatacccgtcctcccgacatttgagagcctgaagtttgtgaagaaggagtttaaggctgtcctcaactacatgaggtcatgatctcact

SEQ ID NO: 580391 - DNA, 430 bp, Homo sapiens
caccattgcactccagcctgggtgacagactgagactctatctcaaacaaacaaacaaaagaatagggctatatcctgaacataaaacaacaacaacaataataataaattctaaatatcaattttgagccatagtttataaatcacatattctggatgaggccaagccaggtatgcggcaggccctgtaccaggcactgcacatggagtgatgggaaagatcaacaatgctctgccctcagggaacttatattctagccagagagacaaacccaaagaaaggaaatacaataatagcacattgtgatgaatgctgggaaagaagcaaacacagtactggaatccaagataataagagactacaattgactggcctctgaggagaagacatttaagctgaaaagctccattattagatgggtcaaagggg

SEQ ID NO: 580392 - DNA, 1265 bp, Homo sapiens
  misc_feature (346)..(346): n is a, c, g, or t
  misc_feature (973)..(973): n is a, c, g, or t
tggtccgcccaagtgcactttccagtactccttaccatgttaacaacttgtctcccctatataaatgcgtagggggtttcatggtaaattgtcctttgaaggtattactatgaaggagggcgtcagcgggcgcgggtgtcgtactcgcagctttctaggggccgctgctatcagaaatcaagcgactgctatctcgtcgagtattagctgtgctaaatcgactccttactgagcccttaagttccactaaggggcatacacgataggatttcctgggggtaaaaaaatatgttagctccgaattttcgtgtgcctcacctctaaattggggtgtacaccctattgnacctataaacggatttttgaacagtgaggatcactttcgcaggctatagcatttgtggtaggcgcttttccatctcagggggtagcgctgacaaagtggcgggtataataatgagggccgtggaacccagagaaaggtgtggtatggaagcgatatgacacacgggagaagattaatagtagcaatttaactcaaatgatgaggggcagtcacccctttaaagagggggcactcgtgaaacaacgactccgcctaggggttcctttctagggaccttgtttaagatgacctgtgggcgtggactatcgacacaattcgtgtgtttcctgggggccagcacagccctgggtctatttcggggtgggacctttgcaacccttgtcggtttgctgggacagccggtgttgtaggtcgagggccattaaacgaaccatttgaggggtggcggaggttcatctacctgaaaatgtgcccgctaagttgtcgcgcgggcgcctcctccccacgtggcacaatttgcgcgggtgtgggtttcccaaggagaatccttggtgtacaataggcgccccaggggtttatccggtggaagcgctgcaaacattaactcccgtgcctaggttccgagancgagtgtacgcagttctattcctggaaaagaccaagccagtgtgcacataagcagatgagaatggtctataccaccggccatactactagtctcgggaggacagggggagagaagtatacaagtctgcaaataagacccacttctccattttgaagcaaacaggcggtgggtagcacataaatggaagcagcgcccacggggagagtacaacaaatctcagggtggtgtatagccaccgaagttggggtcgacgagctgcgctcacgtaaaccacattggaaccccataccc

SEQ ID NO: 580393 - DNA, 104 bp, Homo sapiens
aggatagcgtcagattagcacagcattatttgataaaccagcacacaaaggtttaaaacagttttgagaagtgaagttagctgtcttgaggtcaaggggaatcc

SEQ ID NO: 580394 - DNA, 855 bp, Homo sapiens
  misc_feature (491)..(491): n is a, c, g, or t
  misc_feature (549)..(549): n is a, c, g, or t
  misc_feature (586)..(586): n is a, c, g, or t
acccacgcgtcgcggacgcgtggggccacatagtgctgtgtgctgagctgacctacactctggtccacagaggaagcggaacgcatggtgtataccatgtagcacgaatgagagcaacaggcaggggagagaactccaatgtgcgctgaacaactttgatagctgcagcacagggccattcgaagatgctgactacgagcttccgcagtcgaagctcatcgttggagtacgtcataggcctctgaaggcgggagaggtccaccctttaattcatgagatccttgggggaggccttatgcgctgtgtcactagtcttcccggtgctccgaagcgagcaagacgacatgttccaatgacatgatgtttgtaatgtgatacgaagtatgcgaacgagcgtgtgcggcgtcgcatgggccgtacgcatgcagagcgcacctattcaacccaaaataatcgtggcggacataccgattgtaacccaggttatagtngaacgcacagttcgcaaatatgtccgtcttagacgcacacacgtacacaaatggggcntacgcggcacgtgaacgcaaagtagcacgggacctcntgtatttgtactgaactgcatgtggtacacatcttgaaaaggggcgcctcgtatacgcgtaccggacggttcgtcaaaaggccatatcgtattcgccatataaatggcgggcaagggggcgacatgcaacaaccattggtcccgttttcggaatgaatggcacataaccaggttatgcttcagattctcaaatccaaacatagggggcgcatgccaaggctccccctgtggaatgggactcccaaaaaacaaagacaacatagatggca

SEQ ID NO: 580395 - DNA, 173 bp, Homo sapiens
tctcttcccttgcactattcgggagtttggccaggttgggggagcactatggattaaaaaaaagataggcacactcatgacatggtgggagagcagttaagcagttctgatctcaagggcccactatgaggcatcagtatatatacagggccagtgtagggcatctcgtgggc

SEQ ID NO: 580396 - DNA, 373 bp, Homo sapiens
atacccagtgtgtttcctcttttctcttccttggtagatttgatgccagaagaaaagaaaattttagttatgaaaaaaaaaaaacttccctgtaaaatagaaaggaaagttccattagcataggcttataaggaagtatattatttggaagactagcctgctatctggtctttctactcatataatttatttttgtttttaaattttttttctatttttagtagagttggagtttcactgtgtttgcgggctggtctggaactcctgacctctagtgatccaccagccttggcctcctaatgcctatttttattgtttttgagatagggtctcgctctgtcacccaggctgtgagcagtggcacaatcttggc

SEQ ID NO: 580397 - DNA, 406 bp, Homo sapiens
ttgttccagtggctctcggagtccctgttgagtgcagggaacatgatggggaggactctggcagtattgtcacttatgaggctcatgatgtactgattgttccagaaagagagagcacgctctgccacctggaaatgggggctagagacacactcggacagctggcggaagaggggttccatcactttgtggagaataaagcaccctatgtacacagacaaaagccgtactgcctgcgcccctggaacctgggtgcggtctttctcagaccctggcccctccaaggtacctataagggacaagataaggcctgtccaacgtagcacacacaaggaaataaataggtgttggcaggagccatgcttggggcaccgatccctgctatcttctttgtagttttgggaac

SEQ ID NO: 580398 - DNA, 699 bp, Homo sapiens
aagaccagcctgcctcgccctcattctggcatctttggacagaaggtcacccacccctggcaagcaaatgccgtggatgtgcgcacccagactcatcgtggccctggaccagggtggatggtgatgggttgcccaacccagatgaaagtcttttccttgacccagggggaccagtccagttttgccaaaggactcttatacctgtttaatatttgtcttcctaattgggataatttgatgtaccagattgactagaagtgaaactgccaccactaacttccccctgctgtggtgtgacctgagattggtgacaccggccacagaccccacgagcttggcttttgaaacaccactcagggcttttgtgaaggttcccccgctgagatctttcctcctggttactgtgaagcctcgttggtttgctgctgtcgtttttgaggagggcccactgggggtaggagccgttgaacctggggaccaacctcacttgagctgtgcctagaccatgtgaattcctgtgttgctaacagaagatggcccgtaagctcctgtgctccgcgagggaagcatttcctggtaggctttgatttttctgtgtgttaaagaattccatctactcatgatgtgttaagcattaaacctttttggacctggatttgtgttccccttaaatgtggaaataatcctattttttatgga

SEQ ID NO: 580399 - DNA, 359 bp, Homo sapiens
  misc_feature (40)..(40): n is a, c, g, or t
gcggagctttatcgcgtacagttgcgaagaaaaacaagtngacatgccaaatgactatcgccccgtcacactcaccctggtcatcatgaagtgcttcaagaggctgatcatggtccacatcaaggacagcatgccagacacaccggacccactccaatttgcctaccactgcaacagatccacggaagaggccatttctatcgcaattaacacatctggacaagaggaaaacctacagtatgttagaatgctgttcattgactatagttcagcattcaacactatatgtttccctccaagctcgacacccagctcagagcctgggtcttgacgccatcctccgcaactggtacggcggg

SEQ ID NO: 580400 - DNA, 411 bp, Homo sapiens
  misc_feature (1)..(1): n is a, c, g, or t
  misc_feature (363)..(363): n is a, c, g, or t
  misc_feature (398)..(398): n is a, c, g, or t
nactttgctcaggaaatatttggttgctgaaaaagagctttgctcagcagggtcaaatataaattcatcttggcattccaacttctcaagaatctggatcctccccatttcgccttggccaggtagtaaatctcatttggttccttcctgtttgtcattcatgccttcacatctttgcttacactgggtactccatgcttgggactcttgttttctaggggcctatccttcctacccatctaaatgccactccaaaagtcttaaagcttgctccctggaccctacatctttcttctaggccttcctatggcaagtaaggactggatcttggcccttctctggaatcccggcagtactcattgnggggagggtaaattgtttttatccccttaatcatnttcaggggggcta

SEQ ID NO: 580401 - DNA, 380 bp, Homo sapiens
atcgagcttaccctctcagctcccaaagtgtaggatacagcgtgaccacagccagcccctgtctcttttttaaaaacacaatttaacagcagaaagacaccatctgtgctgttagactcagattcttaataagctagtacttcttaattcaatcactaaattattaagaccttttcactgctccctttataaagtcttcttgggagtgatataagtgcttcttataaccaagctctcaaagagaagataaaattaaaatctgatgggtaaccattaacaataagacaagtggggtacccaatttctccgaggacccctctctgcaacagagagctatactctttcttgggcctagtaaacctctgctcttaaccttaaaa

SEQ ID NO: 580402 - DNA, 388 bp, Homo sapiens
  misc_feature (195)..(195): n is a, c, g, or t
ggatcctctgctcctctatgcagagtgtatacaatgtcagcactgtatgtatcatgagtgtgatttactgcccgtgcctatcggtacttgcttcacagaaggtcctaacttgcaagaacgtgcccaatgtggcgtggctacatctcacgaggaaggacgcgcttgttgatgtgacgagtgcgcgccactgctgangcctgtgggaagggacattggttcgttgaacttctcccggcagtttccgctgcgaatgcaagacgggttactaattttgacggcctcagcaggatgtgtgttcgttgtcaacgagtgccagcgctacccccggcgcctgtgtgggcaccagtgcgagaaaacgctggggctcctacctctggagctgttccgt

SEQ ID NO: 580403 - DNA, 230 bp, Homo sapiens
tggtgggatcattgcttgaacccgggggtggaggctgcattgagccaagattgtgccactgtcactgggtgacagagtgaaggagaccctatctcaaaaaaaaaaaaaaagggcctttggtattcagttttaaaaatagctctaaaagagtcccagagtgacaggtgaaaaaaatgtctttagttattaataaccatcccttttccaccacagttaagtttatgttaagg

SEQ ID NO: 580404 - DNA, 864 bp, Homo sapiens
agcgggtcactggcgctatcggcggacccggctggcgcagttgcttccccagaaaggagagattcctctgccatggagtcctacgatgtgatcgccaagccagcctgtcgctgatcgagcaagcggatccggtgtgattgaaacgtcctggttctttcgctggtgatcagatccccaaatactgcttggctcgaaaactatgtgggccgacccaacgcaccgttcgttgtccatggcagagagccctctgaagagcgacgatcgttcatctgagtcccacacgtctgacggagcaccagacgggctcgcttctcaactccgcctatcccactggagcatggcatcggtcaaggcattgggaacagacatggaaccgcatttggcaataatggttctacattcctgaattggcactcacggcctcgacgagacatttcttctaagcagggggagtccacttccttggtgtcgtcccgtggagcctggaaggggcgccctttgtgagcagcgccaacagacaaagaaaagcccggagtagagcggacggcttgccccgtaacagttttctcctttcagacgcagcccttcacactgtggccccagcctcctttttcagtctccactgcgcaagcttgtaactcaacgctcctttacgcctaccaaggcagggcaccagcctggggttgcggtgcttggagtttctgggcgcgagtggcgagtcgccccattgcttgtgccccactgcgtattgagggtctttgccgatggccccgactccattcatgcgccatcggagatcgcgggggcgggaggtctctccggttccctgcgcctctaactgcgtagaggaggggtatgatgcca

SEQ ID NO: 580405 - DNA, 174 bp, Homo sapiens
ccgcttctgccctcacaagacctgggagaatgtaggtccatggcagattttcatgtggacactttagtacattttatgcaggtagtttcctgacatatttaacattggtgatatagtaaacaataagaaggtactaacagtgcgtgggacttacagcgtatgactccaactgcg

SEQ ID NO: 580406 - DNA, 175 bp, Homo sapiens
accctgatagtttcttctccctccatccctgaggttctggccttcccaaactgcttttgatcttttgattcctctgggcagaagcaggaagcggcagaagcaggaagcagagaccgagacaggagagagattcaaaggttctagtctgaactgaacgcttgggggacataccttt

SEQ ID NO: 580407 - DNA, 142 bp, Homo sapiens
tgtcttctggtatccagttcctcctttattgtctgctcgcctgttctcagcatccacccggcgcagcatctcatcctgaatgttgcttcttggcctcacctagggctgcctcatgcttggccacctggccccgagcgtaagt

SEQ ID NO: 580408 - DNA, 504 bp, Homo sapiens
  misc_feature (344)..(344): n is a, c, g, or t
gaatccctaattggtccggccgctgcatggacactcatcacagccagcgcagctgcggaatgcagcactccattctaaggcatgcagagcacatctaactgatcttctccctgaacaagaataatcactggctcatgtatcaggggtgggaggttggggctgtggaggagaggcagaaagcagaactaaagccttcaaaaaccatgatgcccaacgtttgctgaaatatttttgtctgtaaagccaggagattttgttgcctgcttttgctgcacattaagaggatgctagaaaaatcaagcttgtttgcttctgcattcaaagctttctagatgcaccaactntaaaaatcggtttcttcaagttaactacgtagatttgttgttccaaatgcctctagcctcgacatgaatcccaccttttcccccttcctgttttgcctggttaaaagaggtgcctgcatgtcactattacccccctccccaaatgagaaaaggatttggt

SEQ ID NO: 580409 - DNA, 934 bp, Homo sapiens
tgtttaaccctgcacaggtaccagatgcagttcaagttcattggtacacccttcaaatttagatccttgtcagaaacaaggatttaaaacatctgagtagaaggtagaatgtagacgtacttcatcaatagaagaggtcattgaccagaccaccgctcttgataaggagaggcaggttttccgacgaagacgcaaccaggatgtgaggagccggtacaaggcgcagccagctccaccggaattgaactcggaatcggaggactactcccccagctcctctgagactgttcgctcccccaattcgcccttttaataagacccttttactcgaagtcctagcttaaccctttaagactctgagatttccccctccctccccaaacttctgtaaaacaggttcatctgatctatctagcactcagtgctgaccggcagaacagaaagtgtgtttgggtacctttgtagcaagttccctttactgaatgagaaggcatgtggtgttgtgacaatggtaatttgctgctaattggggtccttaaagggttaaggctaatttgcgattttttttttaacatagaagtaatgaatgttttcatcagtcaaactaggatctgcagtatgtaacatagcaatgttagccctctgagtgcatagaaattttcttgaaaatcctggctggggggaattttcaggcctggaatatttcacagcatatttgctggaatttctggccgacaaggggttgttagaaccaaaaaagggcccgcagagagtttaggtgtgctgggaacttctcgtggggtaaaaagagcaggttagtcaggagaggcactttttgattgagagggaggcataaagggagtgtgaaactgggttgggaaagtgggggaccaaaaggtgcggcaaaagtaacacggggtgagggaaaaaatag

SEQ ID NO: 580410 - DNA, 345 bp, Homo sapiens
ggcgactccagcatcatgttaggaaaacttatttatatttggaataaaatgacaaaaggccaagccccgtggctcatgcctgttattccagcagtttgggaggctgtgatggatggatcactggagcgcaggaggttgagaccagcttggacaacatggggaaatcccatttctattaaaatacattaaatagctgggcatggtggcatgtgcctgcctgcagtcccagctactctgcagactgaggtgggaggataaatggaggctggggtctctggttcctggcagtgagccaagatcacacctctgcactctagcctgggtggtagagcaagaccttgtctc

SEQ ID NO: 580411 - DNA, 249 bp, Homo sapiens
tttttccccccccccggggggtccccgggggggggggccctttcccttttttttggccccccccccccccaggttttttttttccccccttggggggggggggcccccccccccccttttcctgggaaaggggttccccccggggttcccctcttgggggccccccttcctttgaagggctccccccccccccgggggtccccccttttttaccccttttgtttccaaaaacggttttggggtttccca

SEQ ID NO: 580412 - DNA, 396 bp, Homo sapiens
  misc_feature (10)..(10): n is a, c, g, or t
  misc_feature (12)..(12): n is a, c, g, or t
  misc_feature (20)..(21): n is a, c, g, or t
  misc_feature (33)..(34): n is a, c, g, or t
  misc_feature (37)..(37): n is a, c, g, or t
  misc_feature (40)..(40): n is a, c, g, or t
  misc_feature (42)..(42): n is a, c, g, or t
  misc_feature (47)..(48): n is a, c, g, or t
  misc_feature (58)..(58): n is a, c, g, or t
  misc_feature (62)..(62): n is a, c, g, or t
  misc_feature (65)..(65): n is a, c, g, or t
  misc_feature (67)..(68): n is a, c, g, or t
  misc_feature (72)..(72): n is a, c, g, or t
  misc_feature (76)..(76): n is a, c, g, or t
  misc_feature (82)..(82): n is a, c, g, or t
  misc_feature (86)..(86): n is a, c, g, or t
  misc_feature (93)..(93): n is a, c, g, or t
  misc_feature (104)..(104): n is a, c, g, or t
  misc_feature (108)..(108): n is a, c, g, or t
  misc_feature (119)..(119): n is a, c, g, or t
  misc_feature (125)..(125): n is a, c, g, or t
  misc_feature (127)..(127): n is a, c, g, or t
  misc_feature (132)..(132): n is a, c, g, or t
  misc_feature (134)..(134): n is a, c, g, or t
  misc_feature (139)..(139): n is a, c, g, or t
  misc_feature (143)..(143): n is a, c, g, or t
  misc_feature (149)..(149): n is a, c, g, or t
  misc_feature (154)..(154): n is a, c, g, or t
  misc_feature (156)..(156): n is a, c, g, or t
  misc_feature (159)..(159): n is a, c, g, or t
  misc_feature (343)..(343): n is a, c, g, or t
gggcaaaaanancctcaaanngccctggttttnnatntananggcannactcctgtgngtanganannggangcancctctnactnatggccnccgcatccccntggntatatggaaanccggantncggangnggatnccantttggnacgtnanatntgctccaagtacatctatgaccagtgcccagcagtggctggatatggccccattgaggagctcccagactacaaccggatccgtaggggcatgttttggctgcgcttttaggcgggaagcctatgtaagcaagagggcagggccggggtttgtggtcccccccccaccacaaacacagcacttnggctcctttaacctgtgccacaggtgaccaccaataaaatcctttgctgagaa

SEQ ID NO: 580413 - DNA, 518 bp, Homo sapiens
cgactaatgatgaaactctggtacatcaattgatatgtctgttctttctgtttcaaacagatcaaaaggagcacgtcgtggacaaatagaagggctctgaattccaactgtccttcaactgaaaaatgcttcactgccaagtgatcttcccagtcattggtcaagctcttatagaattctccgtactcctcattagtaatatcgtcgggatttctggtccagatgggcttggttttgttgagctcttctggatcgatgtacttttccttaatcttcttcttcttcttctggtcaccatccttcttttcttcttcctcatcagaaccaacatcttcaatttcaggtttgtcttccgactctttctcttctttttctttttcttcttctttgtcttccttttcttcagcctcatcatcgcttacttctttatcacgttccttctccacaaaaagagtaatgggatatccaataaactgagaatgtttcttcacaatctcctttattcttcgttccggata

SEQ ID NO: 580414 - DNA, 444 bp, Homo sapiens
gagatatgactccctcaaacctgtgaaagggccaccagccttcaccgtgacactggccatactgcaaagtgcaaataaaactacaacgagcacgtagattacgtcacttacatcctataaagtgggtttatgtgcagcccctgccaaaccagacccctaggatgggggccgagctaagcggtgcaccccggtccccatgcggggcctcctctctgcttctgcacagcgacttccgactgtgacttgccttattcaccagcacgcaggggaatcgccagtgagaaaatggaatcctgccacctgccaaaaagggaaagcggcatcaggcgggcctgggagcctctcgcaatcaaacctgccccagctcgggaaagctagctgcggtccctgccttcccatccccttccctcgggcctctgactaacaacaaatgggcttatcact

SEQ ID NO: 580415 - DNA, 117 bp, Homo sapiens
atcatttcatcaacttcttcatctgttaaattctctccaaggttagtcatcagatggcgaagttcgtgcagcactaatatagccattgccatcattatcaaacagacggaatgggga

SEQ ID NO: 580416 - DNA, 592 bp, Homo sapiens
  misc_feature (163)..(163): n is a, c, g, or t
gagatggagtctcactctgtcgcacaggttggagtgcagtggagtgatctcaggtcactgcaacctttacctcctgggttcaagcaattctcccacctcagcctcccgagtagctgggattacaggcgcctgtcaccaagcctggcaattttttttttttttnttgtgtattttcagtagagacagggtttcaccatgttggccaggctggtctcgaactcctgacctcaagcgatccgcttgcctcggcttcccaaagtgctgggattacaggcatgaacccactgcacctggccctatttctttttttaaattattttttgtagagtcggtgtctcactctgttgcccaggctggtcttgagctcctggcctcaagtgatcttcctgcctcagcctcccaaagtactgggatgactttgggcacgagccacagtgcctggcccctgtattttatttctttttatggatgaatactatttcatcatatggagagatcatattttaattatgccgttatccattgagggacatttgggtattttcctcttttttttttggctactgtgaaaagtgctgctacaaatattcac

SEQ ID NO: 580417 - DNA, 402 bp, Homo sapiens
  misc_feature (143)..(143): n is a, c, g, or t
gctctaagatccgagttagggtaccagtagctggatcggcatgcacacacaacaagtaattttgtattttagtagagaaggtttcgcatgttgacaggctggtctcaaaaaactgatctaacttaagtgaccaaccaccacgngctcccaaagtgctgggattacaggcgggacgcaccatgagaaggcctattcattaattcttaatcacacctgtccttagtccttaatcatataaacatatatgtttaacacattagatattacataaggtgatattcacatttctgccatgtaatgtaatcacattatctaggaattaggatgtggacacatccttttggggggtcatcagtcaatccactacaccacaattacagtatcattgtttcatggccctta

SEQ ID NO: 580418 - DNA, 230 bp, Homo sapiens
tgaggcaggtggatcacctgaggtcaggagttcgagaccagcctgaccaacatgtttgtgaaaccccatctctactaaaaatacaaaaattagctggacgtggtggcgggcacctgtaatcccagctactcgggaggctgaggcagtataattgttagatttttggttagtcataggtttcagttattttagttttgtttcttttttttttattttttttttcacacgcg

SEQ ID NO: 580419 - DNA, 406 bp, Homo sapiens
  misc_feature (22)..(22): n is a, c, g, or t
taaaaatgttttaccaaaattngataacctccaaacctccatatcctaaactcccccactttagataacccctaaacctaccttccataaaagggaacaaaagccttaatacttgcctatcagaggtatggcaaaagaatcccttttccttcacaattagtttccaatttctgtcaaaaccagcacccctaccctctactgataatcagacttctggcagtagctcacacctgtaactccaacattcagaggccgaggcaggtggatcacttgagttcaggagtctgagatcagcctgggcaacatggtgaaaccctgtctctacaaaaaaatacaaaacttagccagacttggtggcatgtacctgtggtaccagctactcaggaggcggaggcaggaggatcgc

SEQ ID NO: 580420 - DNA, 1283 bp, Homo sapiens
  misc_feature (957)..(957): n is a, c, g, or t
  misc_feature (1153)..(1153): n is a, c, g, or t
taagttcaattattttctggttttttggggatgggtgttaatttgcttatttaaaaaaacatgtgtttttgtgaaaaaacttaaattaattcaagtgccgtggcagcctcaagtggaattatgtggtaggtggcattccccggggggagtggaagaggtggatttcccaacattgtgcgtgctcttgcaaatgtgtcccgtggccaaagaggggaaagtctcgacagccgcggacagccctttcgacagatagcccaaacgagggtgtatttccagggtctcagacaagggtctcagtgttctccatatacccgagtaacctccgtgttaacgtgacaagacaagaatgtgaagcgcacataggcacacattcttggttctcgtgcggtagaacttctctgtgtgacatatattgtggtgtggacacgcgggacaagcttctcacacacaaggggctgtgcgatctccttgtgtgtggagcacgggactctctgtgtgcgtgtgtatacgcaaatgtagaacacaccacaagcgcgctgtgtggcgccctagggggcggcacatattgcccccaggtctccggagcccctgtgtgctgtgtgggaaacccccgcgtgtctcccgagcgtgtgtgtccgtgagtcccgtgtgagagagtagtgggtctcctcatatgcgagggaaccccgaggagagagggggcgtctccccccaaaagtgtgtgcaagcccgggcgagagagcacaatctgggggggatatctacagaaaaggaggagattccaatccactgtgggggggcccccccccgcgatgggtgatgactgtgtccccccaaagagtgtcccggagaaaaaacacaagaggggccccgggagagatttggtctccccaggggggcggcccccccccgcgggggtgggatataaccccctattaaaagacacaatgatgaggnggggaatttctcccccccgggagaaaaatctctccccaacggataagaatctaaccactattttcacgagaggaccaggagaaaagaggcgacaccccatttctattgtgggtgcccccccgtgggaaaagccaggtttgggggggaacacccctgtgtaagaagcagacctcgtgatagggaacagactattaangcagcggattgtcagcaccccaagaggtgcaggtattatactcctctcgactcatctaaacaagcaccaccacggggggagacaccccctactctcacagatacagcacgggagagcagtcactccacag

SEQ ID NO: 580421 - DNA, 321 bp, Homo sapiens
aggacttccgctctcaccaccccactgcctctttgagtgggtggaaggggggtaggaggaggaagaaaaacaacaacaaaaaaaagaaaccctgggatccatctgtttttttttggtggttgtgtttttgttgttgttgggggtgggtggagagcggccgctccccacccacctcgtcttcagaaacagcaaagaggacctcctgctctctggcttctcgctctccttagctcctttggtgccctctgagttcgcggggcccatgtttccccttgaggctccccactgaccagtggcacagctcgctaggacggcaggctc

SEQ ID NO: 580422 - DNA, 323 bp, Homo sapiens
  misc_feature (15)..(15): n is a, c, g, or t
  misc_feature (58)..(58): n is a, c, g, or t
  misc_feature (72)..(72): n is a, c, g, or t
  misc_feature (116)..(117): n is a, c, g, or t
  misc_feature (144)..(144): n is a, c, g, or t
cttattctttgggancttagaatctttgtaaaattatcctgaaagaaaattgttcaancctattattttgantccttagaacatctaccttggattagcagattctttaaagatgnnaaatatatggtctttcaaataatcccntcagaaagtgggcaaaaaacatgaatagacagttctcaaaaaatgatatacaaatggccaaaacatatgaaaaattgctcaacatcactaattatcagggaaatgcatgttaaaaccacaatgtgataccaccttactcctgcactaatggccataataaaaaaataatggatgtggtt

SEQ ID NO: 580423 - DNA, 140 bp, Homo sapiens
acactgctactttggcggtccgcccggtgctcacctgtgtcgccggaacttgtcccgggcggcatgcacctgcgcggtggttgcatacacgttgaccaggctccatcttcccgatctttggcggtccgcctggtgctccc

SEQ ID NO: 580424 - DNA, 282 bp, Homo sapiens
tgctcaggcggaagctgttgatattcatcgctatccatgaacgaatcgacaagggcgatcgtgcgacgaataatcgcatcctcgtatcggcgcatgttttgcaaattcattcgcaaaaactcggcatttttaaaacctatttctcgtagcaactcagcggccatattgtgaaacgttgtcatatgaagcatatgcttgcctttcacttcatggaatcgcggcgactgagccactcgttttcgcgcgtcttcgatgagcgtcgtattgaacgggggaccgagc

SEQ ID NO: 580425 - DNA, 217 bp, Homo sapiens
tcagcactaggcggtcatcatcgctgacactcctatgtgtgcctctccgggccctgtgaccctcacggcagaggcaccggttctcttggatttagagtatgtgtttccatgtgtaatccagtgttccacaaatctagttagcgtggtcttcccaagagtggaacggttcatggtacaagagtccacgtggggtacccgagctcgatattcagtaatc

SEQ ID NO: 580426 - DNA, 704 bp, Homo sapiens
tcagtagcagacacagcataaatatataatgttccgcttgctagcatttccgagcacgatcgcccatggatagccgtgactcatcatggcgatgtggtgcaagctgcatcagtgaccctactactaaatgctgtcctcctcctgggccgtgcagcagtggacttatcatcctctgtaacagcccacactatgcggtgtagacggaggtccttagcttgttacccgggccaagctaggagtgtccgcatagcttttactctgaccagtggggattccatctaccttgaggcgtgcttggctgggccccgtttccacaccagcacatggtgagacagggtagcttatcaacaggctgctgggccttaatactgacagtgagtgtggcgggtcacagccaggaaaggactaacacagatgccctcccagcccccactgctggcctaattttagaataccacggaaaaaagctttgatgaagacaacaggaagtcaacacagcagagagtggtgtggacaacccagaagccagcctcacgcattccatgcccacagttaacgatgacaacaacagcaataataatactaataataaaacaaaggtacaggtgacaagcagcgcttggagtgtgctgctagcaactggggaaggcgcgtgcacacttgtcgagatcggggactctaaagtgaccgcgagctccagctgg

SEQ ID NO: 580427 - DNA, 389 bp, Homo sapiens
ctttggggccctaaaatgttgggcaaaaaggggcccccccccccccttttttttatggtttttttcccctttgggccggccgaaacccgttgcgggcttaaagggaaactggttttttttccaaagccttttggggggggggggccccgagggaaaggttcccccctcccaacaaaaaaaggttggttttttttttggggggagggaatttttttcgggccggccgagggttttttcccctttttgtttgccctttgggtgggtcgggggcccctttttataaaccggtttccctttttaaaacctttcgcccggcttaaaatttaccggggtttggttttatttggtttttttttttccccttttccctaaaggggcccttttttgta

SEQ ID NO: 580428 - DNA, 168 bp, Homo sapiens
tggaacccattatcactgatagtactgatcatatatcaccatcaggatatcaggttttaaaaaacagacactagttttaaaaggtttttgccttaataaaccttattcagaggcactcagtaactttcagtcttaaaaggcataacacacactgtcagtatgagagaa

SEQ ID NO: 580429 - DNA, 438 bp, Homo sapiens
  misc_feature (400)..(400): n is a, c, g, or t
  misc_feature (412)..(412): n is a, c, g, or t
tttacagttctgctcacggccatgatttattacagtgaaaggatacaaaacaaaatcagcaaaggaaaaaagacacatggggtgaagtcaggggaaactaagtgcaagcttccaagaatcctctgccagtggaatcacagaggatgagcttaattctcccagcaaccagttgtaacagcacttgtgaaacactgtcaaccagaaaagcttgttagagactgagtgcctggggtttttactgggagctggtcacaaaggtagtctctgcctggcacataccaaaattccagactcctagaaggaaagcaggtgttcagtagaaactatattgttttacagtttagatatagtaagctctttgatcagtctgggaatggtggaaccccctgaactccaagtnccagatgccaancaagggcaaccttgtaaaccaggtct

SEQ ID NO: 580430 - DNA, 793 bp, Homo sapiens
ccggcttatgttattagaatctttggatgtcaacaaaactggctgtgatgttgatgaccttagggaggtgtagctggtggtagtatcctaaaaggagtattaaaggtgggccaggagatagaagtaagactggtatcgttaccaaagatagtgaaggaataactcatgtgtaaaccaatctttaccaaaattgtatcacgtattgcggagcataagtgatctgcagatatgcgtgctcctaggcggtctaatgggagttggaacaaaaatggacgcccgacgttgtgccgggctgacagaatggtggggcaagtacttggtgcagtcggagcttgacctgagatatgcaccagaatgtggacatttcctatttcctgcttagacggcttctaggtgtacgcactgaaggaggacaagaacagcagccaaggttcaaaagctgtctacgaatgaagtgctcatggtgaacataggatccctgtcgaacaggagggagagttattgctgtcgagggtgatttgggtaaaattgtttgagcaatccagtgtgcacagaaggtatgagaaatacaattgcccttagccgaagagtagaaaaaaactggcgtagaatggtaggggtcggataagaagaggagtgacgaaatcaagccaacagtagatgatgacttgaagaataccagtttaataatacattcggatggatagggacgtggaattcctcttaactaacaaggggtttattgtccaatgcaatatgggaattgatttcaaagtcgttaccttaagaggta

SEQ ID NO: 580431 - DNA, 705 bp, Homo sapiens
ggggggtggccaggtcctaactataatcaccagaatactttagctcccatgtagaactgaactcaagtattcgccatctggctcgcaacacttggcgcatgtgatctagggccggtgggtactccataggggcattggtaggacgcccgtggtagatcatgatgcacaggtagctcaaggccataatcatgtctacctgccataaatagaggtgtacgccttatggagataaatgtatatggcactgaggcgtcgctcatagatacttcaaggattcacacgcagacacacggagcagcaggactgtgaccatggggaacaacacgacgtaaagaccgacgacacagcacgcgggcatactgtagccaaacagtcaaggggggcacggcaatagggatcccgataggagcgccagagcctttcaggttccggaagacaggcggtatccgccgaggatggccccaggaggagagagactggaagctctaacctttacagataacgcaagggtgtcatccctgtggcacccatcacgcttgattgagagagacaggggcataaggacctatcataggggaaacgaagatgaaagggaagaggacccaggggatagaaaacaccgcgtaggatggacgagggtctcattagggggccataacacacatcaggaagggggcccaaatctgggacgcctacctaaactta

SEQ ID NO: 580432 - DNA, 130 bp, Homo sapiens
  misc_feature (83)..(83): n is a, c, g, or t
  misc_feature (127)..(127): n is a, c, g, or t
gtgaagtactctctgtggcatactgtggatgcgcaccagatgcagagtctgagagctggatgaaccagtgatctctgcagagnctgcgatctggccccgagtcagagtgaatcggcatacagtattntgg

SEQ ID NO: 580433 - DNA, 504 bp, Homo sapiens
  misc_feature (5)..(5): n is a, c, g, or t
  misc_feature (38)..(38): n is a, c, g, or t
  misc_feature (184)..(184): n is a, c, g, or t
  misc_feature (232)..(232): n is a, c, g, or t
  misc_feature (408)..(408): n is a, c, g, or t
  misc_feature (429)..(429): n is a, c, g, or t
  misc_feature (454)..(454): n is a, c, g, or t
cgcgngaatcgtacatgaatgagggcttgttaaaaagnccttccttcctgcccctagaacaccgtattagagtgccccatggtgtgcttccccacagcctgtaactcgtgtttgtattcatgattgtgatggttagaactcgtggatagtttgtggaatcatccattaaacatactgcttaaanagtgttgcgtgactcagagacagctggaaggggcaccttaggagcccntcgcttcagttgctcgcttctgggtgtgctccttcgaggcccagataagacagggaacacttgtgagcacacagagcagcatctgatgcctgtggtgtttggcatgtgcccctgtctactgaccaatcagtgtggcatgaggcccacgccacccaaactttcactttccaaagagntagccgtcctccacccagtancatgtcctagcctgtctgcatttgntagtggtaatattctttatgtataataaatttttatacccaagcaaaaaa

SEQ ID NO: 580434 - DNA, 154 bp, Homo sapiens
ccaagggaggttggggattgtgggacaaggtcccttggtgctaatggcctaaaggggcctaaactgtgggcaaatccagttttttgtgggcttggggaacctctcacgttgttgtgtcctggtgagcagcccgaccaataaacctgcttttcta

SEQ ID NO: 580435 - DNA, 1396 bp, Homo sapiens
  misc_feature (280)..(280): n is a, c, g, or t
  misc_feature (1244)..(1244): n is a, c, g, or t
  misc_feature (1396)..(1396): n is a, c, g, or t
aacgggtgactgcgttgtatgatgaagaaaacactcagtgagaatgccgctgttacccagtggcactctcagtcgatgtgagcagaaagcacactggtccacagacctctctggcgttaacaagaggtcactacactcggctccacttcaagtcactgccacaatccacataaacgggaagctccaaggggtaaccagcgtgcaagacgggagcccatcacgtgaaggggcctcatcctttatttcctgtaaagcacactcagaaaccgacaatgcaaancatcttcctgacaggccacacatgacatacagacacgtgtttatattttaagctgccctgttggtttccgaaggcatgaaatccagaccttcaggtcccccaaccctggccgcctcctttgcccacctccatcggccacctgaacggaatgactcctgcgaggagaggacgtggcagccgatttaccgtaaccaccaccggaaggcacctcgctcctgactcccgagccctgagtccatcgcagggatgagcggagatgaagtcatcggccagactcagaagctgacatgttccccgcccggcaccaccagaccccaaacactacagccggtgtcttccttttctgaaggaaacatttgcaatcagcacagtgaaagggaaaggataaagtcccccggggaagaagtgtgaccagggaggaggagggaggagaccactgggactgccccccgtgccccccatgtgcccagccggtccttcctcccgtttccatagcacctggttcaggcatcgctgtgggcactttctcactcggccccataattcacacttgcttattcacttcctccactagataaaaatcatgctggggcacggccggcttcccagcaccgtgtctaatgtcagagcatggggttatgcagggcaaggtggatatgctcctatgtcagtggagccagtggagaagcggggaggcccccctgcctcaaggtgtgccgcttcaactggggactgttctccctttgacacaagcaggcctccaagggacaggtgtggcattggagccgcatgggctggatcccggaaaggtcggaccaggggccgtcagaggggctttacaacgagagcctatatgtaactggaatggcctggaaactcccggtgaaagcaccagggcccctccacgacgaagtgactgatgaagactcacggcaacccacagggacgcatgagcccaacaggncaggcaccgcaggaaagagacacaagagcgacaacacgcgagaagacaggcacgagggacagagcacaaaccgagactccatcggaggccgaacggagccacatcagcgacatcaatgagacagcgacgacgaacgatcactcagggatagn

SEQ ID NO: 580436 - DNA, 463 bp, Homo sapiens
  misc_feature (280)..(280): n is a, c, g, or t
  misc_feature (446)..(446): n is a, c, g, or t
aacgggtgactgcgttgtatgatgaagaaaacactcagtgagaatgccgctgttacccagtggcactctcagtcgatgtgagcagaaagcacactggtccacagacctctctggcgttaacaagaggtcactacactcggctccacttcaagtcactgccacaatccacataaacgggaagctccaaggggtaaccagcgtgcaagacgggagcccatcacgtgaaggggcctcatcctttatttcctgtaaagcacactcagaaaccgacaatgcaaancatcttcctgacaggccacacatgacatacagacacgtgtttatattttaaggtaagaaatgatcatttttactttattctaataagagcttcagttttcctttaaatcatgcagatagcaaactattcaaagcagagggtgataggggatttccgctccaaccgnatcacccgttcgggtac

SEQ ID NO: 580437 - DNA, 103 bp, Homo sapiens
ggtttttgggggttttttttttggaaaggccccctcctttaaaggggaccccggggtttttccctttgggaaaacccgttttaaaaaatttctttttccttga

SEQ ID NO: 580438 - DNA, 879 bp, Homo sapiens
tggtcgactgtgtgcagagttgaatggctgtattcaaggacaccttggaaccatcgggggtgattagggcattcaaaagcaaggatccgagctgaagttaccacatgccctagaatgatgatccgtgatccccgaactcatgccattgtctcatgagaaccttctaatttgatggacttaatcccgagagtatttagaagttcatcaaagtagtagtatgcacgcatctcgtcctcatagcgaagaatctggtcaatctgtagttccgtctggacagacatgtttctcattccatgaatctataactgcatttggagaaggaatcaaaggataagtacaatacctcttttatatgggattttagtcccatttcttgcgtggcactataggatggcatccagaaggcatttctgatagagggccttcagcttcagtccttgcagagccaagtctggggtcagactagctaggtagaagaaaagccaatgggcgggcgtgaacctgagtcgatcgttggttcactgagatatttctgcctcccaggttcatagtcaattctgctgcctctagactccgtagtgagctgggattagaggctgctgctacagcccgggattgagcagctaacgaaagggggacctgacacttgcctaaccttgagaatcttcatgtctccagggagtcgcccataatgcagaaggggacacgggccaaagtgctttgacaaagagttttttggccccggtcaagatgcccttatgttgggcaagtggggttcacaaaaccccctgtgttctttggaaacacccgtcctccttggtgctggaccatttggcccaccattttggggagctcccaaggaaggcgtagccgctcatc

SEQ ID NO: 580439 - DNA, 363 bp, Homo sapiens
tgggagtgtatggggagggctcacctagactgctgcggtaatggacgcgggaggcctggcactttacactgctcgtgttgcagcagccggtgcagcgtattcacctccacgcacgtggggctagatcatgtgaagttggcggacgtggggtcgacctgactccgaggaatctcgtaaatgaccgtcctggtcttgcagacagcggggacagcttcctcgatgcttctcttcctccgaatgggcaggtgtttctgcttctcgacaacatgcttagtggcatggacccccgtgagctctcaggctggtgtccaaagaatcctcactccctacggatgacatctccaggagtcgctggaagtccct

SEQ ID NO: 580440 - DNA, 1328 bp, Homo sapiens
atggcgacccttcgagcgtccattcaccggcgcagagcccattgcaagttacgtagtcagtgcgtgagtgcatcgtccagtaccacagtggtgtcaggctgggtgtccagaattgggaatgcctgctgggagctctagtgcctggaacagggcatccagcccgatggccagatggcaaggtggagcaaagagtcgatagtggaggagggagagtgatttcctgtacaacgaccttctctcagattgataacggggtagcgttggcgatggcatgtggccccgggccagatgtggtgtagactatggaagagccatcagtcgatctgaatgacagtttcagccacctgggcgacctataaccgacaagacatcattgccacgccatgcagccaagcgtcactcgagcagagccaaagggagagactgcctgccaatcaactgtactggcccggaggggctcatacaccagtgtggtggaatggacggatcagtttgacccctcaggtgtccgtgcctcaggaagttccgtcaaatcgcttgggcattgacgccagcatgcagctgggtccttcaaggcggcgtatcatattgaggtattttcccacaagaatttatgggttgggaggggaacatggattcgtggggtatacagctctcggctggctccagtgagaaaccgtaatctcatggtatgatatactgagcgaagagaggtccaaagctaggcagttctcccaatataaccccgggctgccgccagagatttccacaacgctggatcgatagatgccacttgacgaaactccgcatgcgtacaagcaagccaacgaaccaagcacctgggaagcacttcttgaataggtgccctttcaatgggtaagaccaattggacgggcccatactatggagagcatgatgggaccgtgaacgacaagcctcggatatctcgaagactgccccaaagcttagcactaaaccttaagcaggcttaatacgagcacagacaagagtgtacaccacaccaacgggtcaccgtaagacattggaagggagcccgtgaactggtgagacggacgaaaatcccagacagtctggagtcccgaacccggaaccacatgccagtggcacataggcaccgggaccaggcggggaagagcaccaaagcagacgtatgggacggacacaccagcgtgatgtggcagacaaacaaggggaagggacgccacggggaaaaggacgtggaaggacaaggggagagccaaaaaaggaaggcgccaaagcacacacgaggtgacgaggagacaccccaggagagagacagcaaaacc

SEQ ID NO: 580441 - DNA, 748 bp, Homo sapiens
gagtagtgtaggaatactgtagaaatactttttcagaaacgaatccatagctgacaaattcactcagtgccccaatatatggtgattattccggtgataaagaactagatacaaagacctctgaaatggatgataaaattgtgtatctcataaaattttattcaaaatgaaactaaaagtacatatgtattatacacttgaacatgtgttggtaatatctttaaaattttcctttatgtccattccatagggaaaaacacacatatgcacacaaaatcagtaatctgtggggaaacgtggtagtaataatggagattcatcaatactcatataatttcactaatagacattactgtgcataatctcctatacagtccttctaaacaaaatttcaattaaccagatgaactgaccttaagttttttcatcttattttttgtccacatgcttgtgatgctgagaaacaataatgtggccaaattgcagacatcaagaaagcaggcaggaaaaattggaaaaattggagattaattccaccaggtggatacaacagtttccgaggaaaaataccaatttgggtctagaatctccaagttctgtgttcctaataatggtaataagcatattaaggtgaacaagttctataagtggtactagaacaccgattggccaggggtgtcttcaaatgacatacctgtcgggccacttttgccatctacacttgtaccaagagtaatggtcaacctag

SEQ ID NO: 580442 - DNA, 918 bp, Homo sapiens
ggatcctgcgtgcaacgctcttgtgcgtatcagatctggttgatgtgcgaggtcgtctcggtctcgccgccataaggtgggccgtttcgcgccccctctatctccgggcttcctttcctctggatgcgccctccagtgccagatttccaatgccgcccatcgacccgcgggcaatccctccctggcctgtgggaattttccaggtggttccccctcgactgggaactttttaccagcgaactgtgtgttttgaagtgcacccgtccatcatgagaaggcatcgccggagtctcgctctgtcaccagctggagtccatggggccatctcggctcactgcaacctccgcctcctgggttcaagaccattttcctgcctccccctcctgagtagctgaactacaggaagctttcattggcttttgaggaaaatgatccggccaccatccaggattaccccccatggtatatcaccgattttgtagaactgctgggagaacccgcgagagataacatcccattgtcaaacagcgtcccaaccacttcagatgagaattttaccaggtacaccgattgatactcgtttgcttaccattgcctattaccacttgctatagaaagttggtgaccgatgatctgcacctcgtcaagttaactacccgtcttgggatcctccaagaatggtgttcgtttgtgttttaacttgtagttcccgtattatatgagtcactcattgaggttccccggagagttttcgtaatctgcatttctttatgtatatttcccagctatatttcataccaaatgttttaagaatggagaggtccattaacacctttactcttagggaaatagattcggccgccctccgtgaatattggtttttttccccttggtaagtccataaagtttaaccctgga

SEQ ID NO: 580443 - DNA, 292 bp, Homo sapiens
atctgcgctgggtctgatgttacagggccatatgcagattagcgcctggaagcgctggtctcagagccaggtgtcagagcataggctctgtacagccaatactaacggtgtgggaactaaaagaattaattaaaatttctgggctctttttcaccatccataaaaagaagaaaataggagcacctacttcatagggtggttcttgaggattaaatgaatgaacatgtgtgaaggtagctagaagaatacgtggcacaagaaagtgttagacaggtgttaactattgttatta

SEQ ID NO: 580444 - DNA, 1769 bp, Homo sapiens
  misc_feature (358)..(358): n is a, c, g, or t
ggagtgtgtttgtgtattgttagttgtgggagctagggtggttactggttgttgaggtgggtggtgtctgtggttcggcgagttgtttatgtcgcttgtgagtgtgtgtatgtgtcgtgtgatggtgcatagttcgtttggtgtgtggtgtgatcagttgtctggcttgtgcagtcgtaccgcttcttgtgtttgtgcgtccgcggctagctgttgtgatgttcgcgtgtgtcccctctttgttgggtgttcgcacagagaccgcagacatagcccgactttttttggggggtcactcccccctttgttttggaattcttcgcgtcaggggggtgccccaccacacagacgtggttgntgtcaccgcggaattaatggccagtgggccctttgtgttgatgaaatcgttgttccgcggctcccctgtttgattctgtggttgtgagcaccgggggttcctcactcataaaggggttatgatgccgtggagagtcccttcgtggtgtttgtgctcgaaaatttttgtccgtgttccaatcatgaaggggatttccgcgccgcgtctgtgttaagcagatagtcctctcactgtggtgggtgctccgcgccctagaagtggtttcgttgtcttgtccgcctcggatagctgacacccctcccttggttgttttcgcaaggctccgcgttttattctgcgggggaataatgatttctccatcgttccacaccggcggggggagaagactctccgtgtcgcttctcaggtgcgtttccgtcccaacaggtgtttccctccgggtaagatacccgccgttgtcgtaagaatttttggccaagattttctagagctctggtgaaagataaatctttagtggtaatttcccgccccacggtgataaggtgtactcaacaagagccgtcttttttcttccgagggagcacacactgctgcctacgagtgcatgttatatgagtgtcccccacgttctccccgcgcccctctcgtgaggtttttctctctcgctgttttgttgttctctcttcggggggggtatccccgctcacgcgcgccctggtgtgatcggatggtctcttatgagccccgctcgtgtatttattgtccccctcacctactggtatacactctcgcatggtgcgctctcttgagaaaaatagatctttctcacccacatagagatatttataaaaaaacgttgggctcacaaagagaatgctcttgtggcacacacaagatgaaggtaatagtagagatgcgcgtgtgtgtgtgggcgccttcacagagagttcttccttttgagttcaacaacgcacagagttttctctcctcgatatatctcctcgggcaccacagaggtgttataaatataaggccacgcgagataggtgtctccctttcccctgcgtctacacacacactccacccgagaatacacacgtgtggtgtgccacacaagttgtgagatagagagggtgagaaggtctcaccacacatcacaaggtgtctcaacatgtaagataagagtgtttatagtcttggccgtttagccttttggtccaccgtgatagatgcaccagacgtatgagctttgtgtatacaccattccacctggctgtccaacattctttggggtccattgctccaagaaaaaactggccagaatgtccgggcccttatatatccagagcaccctgggcaagcccccgcgcctatattaaggcaccatttgaataaattcttattacccagt

SEQ ID NO: 580445 - DNA, 1154 bp, Homo sapiens
  misc_feature (90)..(90): n is a, c, g, or t
  misc_feature (527)..(527): n is a, c, g, or t
  misc_feature (610)..(610): n is a, c, g, or t
  misc_feature (1012)..(1012): n is a, c, g, or t
ccgcttgttagtatacactcatgaattagtttactcaagctagtttgttgtgtttgtagaatcgtatgtcattggtatatgtgtcttgtnctctcgtctgttgaccgtcccttgcgttcccccgcggtttttacacactcatatggggtttctccctctctggacccgtccccgatcttttgtgtccgagcctcgccatctttttgcgacaccaaatacagttttcctgtcccgtcgcggaattatccccgggctcttccccctcttcctccccggggggtcctcgttctttttgttcgccggctgcggaacccctttattttttcccggccgccgggatccgcctttgtgccgccgggttttcttatgcgaccacaccgcttttttcagcgcgcgcgcccctaagttttgtttctttcccccctcctcctccgcgggtcaccgtgcctggtgatggggtctcgcccccccgccaattccacccctgtgtatcgtctggaacacaagcacggcccccaaatttgggngttatattgattcgcttcccacaaagaaggacaatcttcctatttggttcgaagcagattctctcctctgtccgatttaatangcttttgttgtttggacacgcatctctgtctcatcctccccgggtttgtggccacctctccccccggacgtttgcgacaaccaggcgtgttttgtcgccaacgtacgaagacgaattattcgtggggcaaaaatcacaggtcgctgagtgtcccgcccgcctagttgtgtgggagtcctcccgaaaaggtccccatccttcttatgatgtaggggttctaaacccaccaacaacacataatcgtcgagtgaattctgggaaccacaaatggccccctctgatgctctacctcgagacaaataggcaactttcatcgggaccacgcttttggtagctgtccaacaagcatcctattcgtaggtaggattaacaccgcgtatgctgttaaatcaggacgtcatngcccacccttcggtttggcatactcaccccttcgctgggaggttataaagagggtcattactgccctccaccccgcttttccacttttggccctcttttctttttgaaaaaacagcggggcccccttctttttacaaaaaca

SEQ ID NO: 580446 - DNA, 759 bp, Homo sapiens
tttttttttttagtttccagaggtgagatctttattgacttatgtaatttttggcatacaaattacttaagtatatttacaattcttacataatgtacattttagaagataatgtactttgctccatttacaatgacaaactactgtaaaactacattcatggaattagatacaaatcctctacatactaataaaaagtcaatggactgttggttatacattctttaaaatataccttttcacaggtagccagaaatagtacatgtaataagtctttatgactggaatgatccagaaatatcacaaagcatgagtaaacacatatataaaagtagctcatcatttccaaaagttaacctttagcctttgtgtcaaataaatggtggccacaatctttataatgtgaccagctttccctgtgtaatatccaaaaaatggagggtggggaggttgaagaaaaatcagaaaagttagcaaataaagatagtgaaaagaacaatggcgaggtttatgtaatcaaatcttggtatgtgttcacattatcacattttaagggggataaatttatgtacaccgacaaagatgtccccaaaccatatctggtgcatgtcattggcagcctcagaaactgatagtatgtgtgattaaatactttataagatggcgtcatacgttgtttgcacctgttgatccaaattggttaacccattacctcaaataatcggtcacaatggctcgtacccacgaagagttccggcg

SEQ ID NO: 580447 - DNA, 1506 bp, Homo sapiens
gcatagatccactgtatcgcaccgataaagacaagaagtgagatcaaagtcacaaagtcgagcaatagtctcacaggcatggtgtttgatcacctagatcaggtggctgtctggtcggtaaggctcgtagtggtctatcttggaaaactaggatctattaagctcttgtctatctgttttactaagagatcgttgcacgtaagaagacactagacttggcatgtaggtagatatatagagcatagtggttgttaaaatggcttagtcattgatttatggtatgctgaggtttaaatatcatctaaatggcagggggtgtaacttaagttgatttttcactaaaaaggggattgggagaatatcatgttgaagctattaggctcatagatggtagagtaacggcatcgttttgggtcaaatactcgatattgggtgattggtgaaagggactagtgaagactttaatatgatgatgttaacgtagacgatgtccaatttaaaacgagaagccattgatggggcaactatgtacaaaacgtgcaacataaagttctgtaaaggcattgagattggtgtgccgatagtggcattttgatactagagagttatgatagcggcgtttgttgcattagggttgggatgggagtctccgttatcatagtcagagcgggattttgtggaatcatgtcaatcctccaagccacgtttacaattgaattcggcgtgcatgaaaggcatttcattcgtacaaggggttgtgctacgcgtagacgcatggtgggtacagagaggcgggctcatttgttgctagggaaaagtcttaagatgtcttctgaaaatttggtctatgtgggttgagtatgaagtccacatgagtgagttaaaatcgcctgaataggtgttagaggagatgggaatgggcaaatgtagagaagtcgatacactcgagtggagtgagttactaaatagagtcatgaaggtgggggtaattcagtggaggatcgaaacgttcatgtagaggaaaggatagggggcttgggtggctggtggagtggggaaacaggccaaataacgatataagacaagtgcatttcgcacagggtccgagtttggaccgctgggagagaaataacgggcgttgaagtttagaaaaacactttccctgtgggtcactcgcttgtagccactattcacacatgggtgtctcttgtgtggcccaaaggggactgaagcaaattggtggacgaactgtgcgcagacaaatagggcggcctgagtgtggagtcggctccatattcgacaccccttccaacacacactagactcttgtgcccaacccatacgcgaccccgtttagtaactatgtgtatgcccagcggtgacaacaacacctagaacagaggtactcacaaccactatactagaccgaggaggagagagacacaacgaccacatattggatgagcaatacacggcgtccacctcactagtaatgatccatacaaa

SEQ ID NO: 580448 - DNA, 1362 bp, Homo sapiens
taccggggcgtccctgagtttattgggggcacacccggacgagggcccggcacctagaaaaaaggtgtgttggggcctctgggtgggtgaagctgtggtcttgtggctgacggcgcaggacccgggggggcagcgggaacttgatctgggagtcgtggaactgcttgacagccggccgggggcacttgcgtggccgggatctccttccacctttcagtgactctgaagtggagtgtgggcctcgggcgcgggtgccgggacacccatgtgttcctcggatagcacgtgggtgtcaccaggcgccctgtggcgggtggtctcaggtctccgcggtgtatttccgcggtgtcacctgtgtgttgtgtgggtgtgccgactctcgcggggagtctcaataggcgccgagccgagattccgcgagagtttctttcaccgcggcgaggggggggaaattctcctcaaaaacacacctgtggccccacgagtgtgagacacaagaatcctccccctgtgagagagacacttctctttcactcttctctttataacgtggagaattcccaagagttccccgagaaaaggcgggaacttgtggggcgacgaacctgtggattagggcgcgcaaaaagattccgccattgcgggaaacaagggggcgggcgtagtggcgccattaggggggggggttggggcccagtgacaggagacccccatctacctctttggtaacctcctccgataagctgtgtggcccagaaggggcccttacaaggggcgggtgccccactcgccgggcgaatgtgggggggttcttaccaaagaagcggcctgaaatagtccccccaataatataagtaagaaaggagggttttaaattaacgcgttttcactgggagttatcacggcgcccctagatataagaactatttttcccaatctaatattggggtcccaagagtaccctggtagtatccccctttttccctaaaacacttcaccaaaagaaaaactacaaagttaatatatgtattaacactttttcttggaaagagcgcccgagaaaaatataaaaccgggcttgtaaaaaataatcgggcgggcaacaaaaaacaagagaaccccaaaagggcggcccccaacaccgacgagacgcctttaataataacaaacaacaaggcagaagaaacaccccctacagaaaaacacaagggagccgcccacgtgctgtgaaccaaaaaacgacgacagcggggagaagaaagacacagaagaggccagatattaaaacgacagaggagcagtggacacaaaatactcgatcccgccgaaaatataaaaaaggatagccgcgggcagaggcac

SEQ ID NO: 580449 - DNA, 101 bp, Homo sapiens
acccctctaggaaagaaattttatgaagttaaatacaagtcttgaataggacattttcccttctgtattcgaggggctctaaaaataaatattgctcccga

SEQ ID NO: 580450 - DNA, 812 bp, Homo sapiens
aataacaggctaggtacgatggctggggttaaaattcggacgaggggcacctgaacatttcttctgtgcacagtgtggagccttcttaggtcccgaagggttccacgagaaggacggcaaggacgtacatgtacgcaaggactacttcgacatgttcgcacccaagtgtggcaggctgcacccggagccatacctggagaactatatcatcagccctcaacacgctgtggcatccatgagtgctcttgtgtgccgggaatgcattcacgccatatcgatgaacggcaagcattcattcagagcacgacgggcagcacctactgtgagagtgcactaccacgagcggctgcaggactcgctgatgattcatggcctagccaatcaatgacacatcaaacggaaacgactgcactcaacgcgccacatggacccaaggaaagttccaacccacacaagacaccaatgttacagtaacaccgactgaaactggtcacatggcccaagacaccacccaaaaacatggacgccattccatcattccctctcaatatttaccagcaaatgacaacgaccaggagagggaccagggaaaatagagcagtagtaagagataatggcacgcgaggctcatactttcgaatcccattcaataccataccacaccgaaaacttaactagtactattgtctacatggtgcatttatataggggaagaaaaacacacggcctcaccctccagaaccaatggacagacattaaattccaatcccatccaaaagagcagaaaacccaaaagagagcaacagaaagct

SEQ ID NO: 580451 - DNA, 449 bp, Homo sapiens
  misc_feature (102)..(102): n is a, c, g, or t
  misc_feature (445)..(445): n is a, c, g, or t
aggcatcaagctatatcacccaacaataaccgtcagcgcatgattcccttgtcgcagcatacgtcgatacgcgctaatcagcttttccatatcaagcatgancgaggcaaagagttgcccctctaactcttctgaaaaggtcactcccggataaatctccatttcattgagtcgcttaatggaaaactgtttacgcagttcatttcgatccagtgattccagtcggtcgattgtcgcggctaactcctgattccaggtcaatccaaggaagccatctatgccatcttcgaggctgtgttcaccaagcacggcacgactcagcggatcattcttcgcgggacaaaagcagaggtgcctgcagccaaagtgtaaaaaatcccagcgtttatcaatatccagtcggcgtaatcctgaaagcgtgtcatgtatattatccatcaaaggntttt

SEQ ID NO: 580452 - DNA, 287 bp, Homo sapiens
cggaggccacatcaacagtcatgatgtgtggctgtttatcttccatctgcacacctggttcaaggtatcctctgtgcacaagggcaggtgaaggcacaagatgtgacttgtgcatgggcacactgctcgactatggtgtgttatacggtattaagcagatgcctaacgcgactgctatgaatccttcacaaacacctggacggacattatggctgtatcatacgctacctgcacgccagtggcgcctcaatatactatatctgtctcttgctacacatgcggcgagg

SEQ ID NO: 580453 - DNA, 447 bp, Homo sapiens
tgtctaataatagagtggtacatttgttacaactgatgaacctacattgacacattattatcacccaaagtccatagtttacgtgagggttcactcttggtgttgtacataatatgggttttgacaaatgtgtaatgacatttgtcaaccgttatagtattatacagaataatttcactgccttaaaaaatcctctgtgttttacttattcatccctccctctcctttaacccttagcaactgatcttttcactgtgtacatagttttgcttttaccagaatgtaatgtagttgaaatcatacagtacaccgctcgtcacccacgtcatacctttggaaaatggcatgatccaggcaagcaatctcgtctacgatcatttggtggtgttccagtaagcgtagcaggctcctctcatagtgtacactcgcttattattctctgataaa

SEQ ID NO: 580454 - DNA, 196 bp, Homo sapiens
ctgggtaatgtattgagaccctgtttctacaaaaaatttttaaaaattagccacatgtggtgatacatgcctggagtcctagctactcgggaagctgaagtgggaaaattgtttgagcgtgggacgttggggctgcaatgtgctctgatcgtgccactgcacttcagcctgggcaagagaatgagaccctgtctca

SEQ ID NO: 580455 - DNA, 132 bp, Homo sapiens
  misc_feature (25)..(25): n is a, c, g, or t
accttcttaagggccggcgtctttnttacaaagaaaccaaaataataatgtttgtgtggtaccgagacagtgttatccctgtagattcgagatgtatggtaaagaaaagatggacctgtcccggggtatttt

SEQ ID NO: 580456 - DNA, 321 bp, Homo sapiens
gctcggcacctcctgtgaatccagcagcgaaatggattgtgtccttgccttcgcctctgggctcagcgagacattcacctcaacagaagccagatcatggttcccagaccgtttgagcgtcaccgaaatatccgtaaagtcagtggccgacgagtaggagagacgggcgggctcgtctgatagggcaacatttacccaaagcaaaagaacgcagatgctccatttggtattcatggctgcctccagtcaaaagaggtagacactctcacgagtctccaaacttaagtgtaggaaacgtcgcaatcagcaatactccgtttc

SEQ ID NO: 580457 - DNA, 306 bp, Homo sapiens
  misc_feature (75)..(75): n is a, c, g, or t
ttccttttccatatttgtaactctctctgttgacagtgagaaacctgaccctcattatctgtaatgcatttgccntatttgaacaatactagaatatagtttcaaaatcctccatctcaaaaaaaaaaggaaaaagaaaatattttaaaaattagctgggcgatggtggcatgtgccttgtagtctcagctacttgagaggctgagttaggaggattgcttgagcctaggagttcaatactgcagtgagctatgaccgcaccattgcactccagcctgggcaacagagtgagaccctgtttctatt

SEQ ID NO: 580458 - DNA, 347 bp, Homo sapiens
actacagatggtgatttaaaagacgggtcaaaacaacacaatggtgtgaagtgagatacagtaatcatagtgttctttaacatccagaatcccaagagtgtttagtcttcctgaaaagaatactctctgacactgcacaagaaagagagtaagcgttatcacatatgttcaccttgtggccggaaactcggagaatgccgcaatatggccgtaagagcgctatgggcgagcggatcacccgtgtaaaatcagcacttggtaaggaaacaggtatataacagcgcacgcaaaggggtaagccccatttcggggcgccatattggggtaggggctgttctatacaaaaa

SEQ ID NO: 580459 - DNA, 341 bp, Homo sapiens
gcgtcgacttcctgtaaatccaaaactcacttaaaaatcattaaaattggcatgatgtcttgaaatttcaccaacatgttgtggtaaaaaaattgtccgattttgggacaagtgttggtataagcttcttgcaaaccggagcttctctcaagaagcatgatggtttcgatagggaatatgcacctttgtgggcgaaacgacatacgctgcctcttcatgccttaatttttcacggaggcaacatagaccaataggagtgtcgtgctaaaatttggacctattttgggtttgtttggcctgtcgacgcggccgcgaatttagtagtagtagtaggcggccgc

SEQ ID NO: 580460 - DNA, 555 bp, Homo sapiens
cggctggtacgcctggagtatgggatgtctggccctgcaatgtcaagggagggggctcacccaggctcctgtagctcaggggcaggcctgagccctgcacccgccccactgactgtccagcccctgactggggcaccccatcctgaggggctctgcattggccccacctgaggcaggcgatctgaccgacatctggagccctggctggatgttacaggcgtgcaaaatggaagggtttccccttctgtcccccctcgcatcagaagacctggatgccctatgacaccggatctataccaacggccaaacgcacgcagtattacgcccgtatctcagcagtgatgggcgaagagccgatagcggacccagattaacatgggaaccttcaccatcagctccaaaccaccggatgcaacaactcggagcgtccgtagaagcatatacgaccggcgagaaacagaccttcaccggggacgcatccaaagaatgcccttgcagccctcccgcgtagactttgtgagccacgcctcaatccggcccaccactgtgcaggcg

SEQ ID NO: 580461 - DNA, 108 bp, Homo sapiens
ttacgcagctcaggtcagctggtggaacacagctcgtatgactggatgtgtgaatgcccaagtcggacaggccttagagaacaatggattccattaagagactcagct

SEQ ID NO: 580462 - DNA, 115 bp, Homo sapiens
  misc_feature (3)..(3): n is a, c, g, or t
gcnaagcaattaatgtgttttgcttccttcgtacaaccaatatgaaaaaagcctagtaaatgggggtcggaggccgggcgttgagaggcccaccgtctagagattgctgcagccg

SEQ ID NO: 580463 - DNA, 945 bp, Homo sapiens
  misc_feature (265)..(265): n is a, c, g, or t
  misc_feature (282)..(282): n is a, c, g, or t
  misc_feature (287)..(287): n is a, c, g, or t
  misc_feature (300)..(300): n is a, c, g, or t
  misc_feature (302)..(302): n is a, c, g, or t
  misc_feature (310)..(310): n is a, c, g, or t
  misc_feature (324)..(324): n is a, c, g, or t
  misc_feature (329)..(329): n is a, c, g, or t
  misc_feature (339)..(339): n is a, c, g, or t
  misc_feature (350)..(351): n is a, c, g, or t
  misc_feature (367)..(367): n is a, c, g, or t
cgtgacgcgttgggggcgcatacaagtgcctggtgtgattggtgcacaacccgtgtaccagagtgtacatcctcccaaggagacacccatgacccttccaggcacggtgcctggaccaatgttgctgcagggatgaggcagcatttcagctgtgaggaatggtcattggattcatgtgtttatctgtaaaaatggttgtcttaacttcttaacctcatattggtagtgattgataaaaattggttggtgtttcatgacatgtggncttctttgaaatagcangtcanatgtggtgaccananttgtggangagatttctgtcanatggnaaatgtgtangttcgtctaanngctgatggttatgtangttgctcaggcactcagatgacagacagattctgggctgctgggagtgttctgtgcctcttacatgccctggaggcctcatggtctcagtgctgaggtcgggcacagctgtagcaaacacctggcggtaatgtgcggtctgggccgagtctacagaggaatttgtgttgtctaaggccaaagggggaagctagactgtgattgtaccacctaaaaattctgtaatttcaagccaaaatgtctgcggaaatcaccagttgatactctctgtgaatcagaacaggggggcaaggcctgggttgaaccgtgtctaagcagcactgtgggggaatccgacgtaccacgaacgtgggaatggacctttttattaacttttcctaactgctccaacaggcaaaggccttttttgacccctggtttcggtctttccacacaactggtttgcccctgggataagcgctcactcaacaaagggccctcttccatcggggacacacaacaaacgaaacacaaacaaaaaaagaggggcgcgcaagatacccgggcacgctgcacaccttatagggcacatgtatatag

SEQ ID NO: 580464 - DNA, 1430 bp, Homo sapiens
agcgggaggggcagtctcagggaacgtcctaggggtggtgggcagtctccacagcctccacaagggtagattaccaccttcccgccacttctagtgatacaaggtctcctgactctggcatgtattccacgacaacactacgtatgcaggtaatcggaaacgttggtgactctagctgcctgatctctttcacgcaggcatgccgctcggaagaggaaaaccagactcgcaaacagaccccggcatactcgcggtccgcggtacacactgtgggcacaagacagattaccacagcaaaggaacttctgatcgacgcacaacttattccctggaccaagctacaacggcgcctgcgacatatgaatccatctagcgaattcggtccgcttgcccatccctgggaacactctaataggagagtcccgcaaagaagggcccacgcaacacacaccacatacacaccacattagccctacgattggcgcggacacacgtggccttcaccttacacaaaggtgaccaaccttcaacgctggcgcaggcgccaacactaaccaccccatgggttaaacacccaactttatcatggcgactgggctctgccccaagcaagcacacacatgccctacgcattcggcacaaaccttcttctccccttccaattttcaagacttctattcccattgcaatcatttctccgtcggacagctagcacaatcacatcagctcgtgaacggcatatggaaaacgagctcccggcgcccgcatgagcggcctatggcgcacgttactcacaacgcatgagggcatggcacaaacataccatccacgacatatcgacctttgtacacaacttcctccaatgcgacacttcaccccaagcggctatagtcccaaaccgaacaatctgagtacacttgccgtctattctcaacggccccactcccccttggcaagctatacatgcgccttgggcaagccatcgttctacattcccacgggtacataccgtagcacacacacaagtcgtgccgactataaacgccccggagaaaccctcacaagatcttaccagtgggaaccacttatgtaagattaacgaatctacagtcaacaatatactctgatagtgcgacgtaatacacagctgggaaccacaatacgatagtacacgtggagatccataacgaagggctctatgctaccaatccattctgcccaacacacccgacgcgtcctttggaacactccccatcttatcatgagccgcataggtacattatccacaactcacacccataactgtctctacgtccgaccccagatatctcacaaaaaatacgacatatgaccatcaggtcgggcaaccatcaaccccagtaggcaccactctagcacactactcaaccatagctcgaacggcatcccct

SEQ ID NO: 580465 - DNA, 768 bp, Homo sapiens
  misc_feature (355)..(355): n is a, c, g, or t
  misc_feature (498)..(498): n is a, c, g, or t
  misc_feature (625)..(625): n is a, c, g, or t
  misc_feature (643)..(643): n is a, c, g, or t
tggaattgttaagccacctctgagcagtgtatgtcaggacttgttcattaggttggcagcagaggggcagaaggaattatacaggtagagatgtatgcacatgtgtccatatatgtccatatttacatttgatagccattgatgtatgcatctcttggctgtactataagaacacattaattcaatggaaatacactttgctaatattttaatggtatagatctgctaatgaattctcttaaaaacatactgtattctgttgctgtgtgtttcattttaaattgagcattaagggaatgcagcatttaaatcagaactctgccaatgcttttatctagaggcgtgttgccatttntgtcttatatgaaatttctgtcccaagaaaggcaggattacatctttttttttttttttagcagttggagtgggggtagggtatctgggttatcagaatactcatatagcttggggatttggaatgggtaaatattcatgatngtgtgaacaaatcagtgatacatacggtacagtctcagtcccataaaatgggatgttgtgcctacacacgaggatctagaagaatttgtcaaactataaacggctggtgattggtgaatgacttggntcttggctgtgggttttncaatttcctataagtgcacatactaacttttaaaaaataagggttattttaaaaggccaaaaaaaaacaacaagacaaacaaacaagagaaaaataaacaacaaaaaaaacacacacaggagggg

SEQ ID NO: 580466 - DNA, 359 bp, Homo sapiens
ctgctgagatgcatacctttaccagagcgtgtcatgcaacagctgtcagaagagcaacttcatggcttctagaaatcatgacataaccccacactgacacagccaatttgtctcttccattctccacagcttaccatagcattttttctttaagttgaaaggtactgcatctttaattcataccaggtaccgcagttttacaagggaccaaattccaagtcaagacagttaccaatctctaactcaatacgattaccaatagcacgacagaggattaactaaaaagccaacaaatcggtcagagaaaccacacgcaggagtcgggccatgcgctatgctaattgttggtaccaccaagc

SEQ ID NO: 580467 - DNA, 805 bp, Homo sapiens
  misc_feature (355)..(355): n is a, c, g, or t
  misc_feature (662)..(662): n is a, c, g, or t
  misc_feature (680)..(680): n is a, c, g, or t
tggaattgttaagccacctctgagcagtgtatgtcaggacttgttcattaggttggcagcagaggggcagaaggaattatacaggtagagatgtatgcacatgtgtccatatatgtccatatttacatttgatagccattgatgtatgcatctcttggctgtactataagaacacattaattcaatggaaatacactttgctaatattttaatggtatagatctgctaatgaattctcttaaaaacatactgtattctgttgctgtgtgtttcattttaaattgagcattaagggaatgcagcatttaaatcagaactctgccaatgcttttatctagaggcgtgttgccatttntgtcttatatgaaatttctgtcccaagaaaggcaggattacactcctctttcttcttttccttctctagccagtctggcacctgggcccgatagatgatatctcatgtggactcactcaagaactacctcatactagccttcgggacttcttgacatggcgcaaactactctcatgcatgtgctgaacaaatcagtgatacatacggtacagtctcagtcccataaaatgggatgttgtgcctacacacgaggatctagaagaatttgtcaaactataaacggctggtgattggtgaatgacttggntcttggctgtgggttttncaatttcctataagtgcacatactaacttttaaaaaataagggttattttaaaaggccaaaaaaaaacaacaagacaaacaaacaagagaaaaataaacaacaaaaaaaacacacacaggagggg

SEQ ID NO: 580468 - DNA, 203 bp, Homo sapiens
taaaaaaatttcctcacccattaaattacctaatgcccctgggccctaaaagaaaaggcccattttcactgcaaaattccaaaacctcctgccaaaccaacctcccaataccccaaattcaaggacacctgcccaatttgaagaaggggcccaccttctgctaaatacccccctgggctccacctatttcccaaaattttttt

SEQ ID NO: 580469 - DNA, 1426 bp, Homo sapiens
  misc_feature (491)..(491): n is a, c, g, or t
gggacagtgatgtcgtctggaaagcctggcgatggcgaatccctggatggctccggcgtgatgtgctagggaagacaggggaagctggaaggtgcggttaacttccttgatgagtcatccaaggtcattggaatgtattgatcctgtaggatgttgtcattcgtagggcagcagaacaagatgtggggctcgcatatgcgtgatgctggccaccagtcctgatatgtccgctttcgacgggcaaggctagctggtgctcgttgtggccggcatgaccaatgcattcccgtgcagggtctatcccagaggcgcacacctaggcacaataggaacctcgaccatcatcggcaatcacaatcttagcttgccttcaaattcatcgcggcgcgagcgacatggtacgggcactcttagtagtatcgacacgcaaggagcaggaagcataccacattggaaccatgtatggggccaccagtgtctccggctacggnacgcacagaggacatggggttggtcgccagacttgggcgttgaacgcctgtcgccatagggatacgacgcaataacgacacccatcgttggtctcaacagtacgaccttggtagtcccgaggaccccccaggtacacacactacgctttcgtcgctgtggtggcacgcagaccaggagacaaaacgctttccaagtctttggcccgagtgggatattttgacgcatgctaattcaaacgcgtagcggtacttcagcacctaacttcgcaaaggcggtgagtctaccgctactttttgcatattggtccccttggcaccgctttggatttgttggctaagaccatgtagtgccagagtaacctggtgtaaggcacgggcacacctggttgtgcgaaaggcgcgcaagagcggaggacgtcccggcacggtcgtgggcattcgaattcctaattggtcttccaacaacgcgagtacattcaaccgcccgtcgttataccttcaacgttgttgcggggcctttgtgaatcacttccacgaggtcgacaggcttgtttgcaagaacgaccaaatagggcgaacggccatttctgggaggcataaacacgcctttgagctggggtgacctcttgtactccttcgggcaacgccaaagtgttatacacgcaaccgtgggccaacgttatcttatccggacttgttacgcttatgttgccagtcggcggttgtctccctgtggcaaacgttgtgtgttgtcccacaacggttggccttgtggcggtcctggtcaagcgacattcgtggtgttaccctccgaacacttggggtctgcaagctcctcgggaaccacaccgagggtacatacagttccaaatccacgacagggtgttttacccacaactcgaaagcttagcgtggtgcaccctatgtggtttctg

SEQ ID NO: 580470 - DNA, 427 bp, Homo sapiens
gtttttggggactgtagaaaagaaaggagttgaggcctggtgcagtggctcatgcctttggtcccattactttgggaggctgaggctggaggatggtttgaggctggaagttcaagaccagcctgggcaacaaagcaagaccccttttctaagaaaaaaataaaataaaaaatggatgtgatggtgtgtgcctgtggtcctgggtagctaggaccataggcatgcaccacacacccagctaattttttattctttgtagagaaggagtcttgctatgttacccaggttagtatcaaactcttggactcaagcaatcctcctgccttgacctctcaaagtgttggcattacaggtgtgagccaccatggccagcctatgaactgtttaagtggatgaccagcctaggcaagaaagatgccatctctta

SEQ ID NO: 580471 - DNA, 127 bp, Homo sapiens
cacgagggccactcggacaacatcttctcacgccagtcatacctctggaacttcggagtcgacttgtacaagctcttcagctactgcgacaaacgctgtagccccacagacgtgagtctgattccca

SEQ ID NO: 580472 - DNA, 462 bp, Homo sapiens
  misc_feature (17)..(17): n is a, c, g, or t
ctgccattgaatttggntgcccttcaggcccacctggcccaggaaaaccgtgtggtggcctttttcagcctggctttactgcttgccccactggtggaaacgcttattttactggaccggctgctgtaccttcaggaacagggtttccatgctgaggtcctgcccattttcagtcctgaactttttcccaaaaacctggttttggtggccaccaaaatgcccctggggacaggctttttttgttttggaaactgaaaacagctgatgcagcctgaggagacatttcagaccccatcatttgaaagtgcccaaaaagcacagtggcaaagtacatttcatccaaaaaaacagcatcctgcatcctccaaagttctggttccttcagttttatcccctttttttccttccatggattatgtaaaacattgtaaagttttaattaattaaaaattggatatttga

SEQ ID NO: 580473 - DNA, 262 bp, Homo sapiens
ggaaaatctacctggttatcgccgtggaggggaatatcagaagtggaacggcacagcctggtgaaggatacggaagcagaaaaactgttccggatcccggggagggcggaaagaaaaaaccaaataaaaaaaaaaaggccctgaatgcaggtagcccagtgagcatattgcgccgctcaggatgctttgtgggcccccaaaaatggggaaaaaaaaattttttttcacgcacaaaaaaaataaataataatggagtaaaaaa

SEQ ID NO: 580474 - DNA, 113 bp, Homo sapiens
gtcgcaggagaaaaaagtcgtcacgtcatgcgagtgcgcagggggcgtggagagtagcagtagagcaacaaagtacatataggacagtgcagcgaggacaaggacttcccgca

SEQ ID NO: 580475 - DNA, 709 bp, Homo sapiens
ggagacacgtctacaaggacctgcggcagatcgagctggcctgtgatccctggaagacgtggacagctggaaggcctcgttcctccgagtctctgcgtctaccccgagaaggaccaggcagaaaactgaggatggggcccaggagaacgagcttctccatggacccccaattggagcggcaggtggagagcattcgcaacctggtggactcatacttggcgcatcatcatacaagtccatccgttgacctcatgccaaagaccatcatgcgcctcgatgatcaacaatacgaaggccttcatccacctagcgagctgcgtggcctacctatagctcctcggatagaccgagagcagcctcatggaggagtcggctgaccaggcacagcggcgggacgacatgctgcgcatgtaccatgccctcaaggaggcgctcaacgagtcatcggtgacatcaggcagccagtcactgtgtccacgcctgtagccccgcctgtcgatgacacctgggtccagagcggccaggaggcacagtcccagtccagagacgccggaggcggtgtccaggcaatagcaactaccacggtgtgacgagtgcccgaaggcagaagatggggggccaatgtccatgaagtgcactccatgattgccctcgcgagccgatgcagggccagggtccctcaaacccgtacgcacacgaatacccatag

SEQ ID NO: 580476 - DNA, 247 bp, Homo sapiens
atgagccaatgcctgcatgttctcactcaccaattttcccctaatctccctgccccatgcacaaaggctcactgctcacagcaggggagaacacggaaggcaggctagaagcaagaagcagctaagacacagcttgcacctataaagatgcggggccatccccacgagagaaagagcaactttgaccaagtaccaacttttttaggtgcttaagtcaaggacattaaaggacaatattgtgggcaaa

SEQ ID NO: 580477 - DNA, 145 bp, Homo sapiens
cgtagatcgtcaactgctgcgcgctgccggtgccggtgccactggcggtatccacggtcagcgtgttgccccaggcgctggctgcgggtggagtcgcgactacagatcgatatggggtaccgcagctcgaacttcgttaaatcat

SEQ ID NO: 580478 - DNA, 163 bp, Homo sapiens
cggagtatgtgtggatcacacgagccaggagatccagaccatcctgggcacatctgtagactccgtctctattatatttgtttgtatatatatatatttgtatgttattattgacatggagtttcagtcgtcacccagggcagaatgcaaatggtgccatctc

SEQ ID NO: 580479 - DNA, 1350 bp, Homo sapiens
gggggaaaagggggggaaagaaagaaagagaaaaaggagggcgagtggcgagcacgggcctcggccgccacccacacgcccctgaagctgtgctcgtccccctgctgcggggcttccctggcctgccgcccttctggccatctgtgcttgctcccctggtggccctagtgccttcgtgacttcctgctggcctggccctggctgcgggcccaaggctgcccttcaaggggatcgatggcccaaggtgtaggcaaggttgtccaacccttgcctttgttggaaggacagatgtcctttccttcaagcagaaccaaggtgattgcggtgcggtgaacaatttctcccttcggatgatcatttgccccttctgcagatttcccatttgttgttacacaggaaactttggggccaagagggttccaaaaggggccatagaaacgtttgggccctatttggcgatattccgggccaacggttggttaagcgaggacaaaacctactggaaccctagtttcggttctacttggtccgcgtgatcccggagagaaaccccatggaatcgaacgcaccgtgcattgtccgcaggcccttttaagtaggggatttaaattttgggcccccgagtgtcgcggcacccgcgggcgagacgtttatcatattccgcgacgcggaacacacacccgcagctatttcttgggggcccaaagagaaaacactataaacctgttggcttaaaccgacgcagaattcggattcacactatcaaacacgtggttattccgacgtaacttttcccgccatttttttcggaggcgtaaagttttattgccccgcccagaaaaatttccgctttccgaagtaaacaacgatgcgggcggacacatatccggggccaagaggcgtgcgcccaaagtgaagggaaaaagctcttttattcccccaaacgctgaggggcactataaacttttctcgtatccacactattttttccctattaaaagagggcggccgataaaatcttcccacacttttaagcgacggcgccccaacagtttttatccatgcttcccacgcgtatattaaagcggtaagcacacaagcgccggggaaatttcccccctttataagaagaccaagagccaaaattttccatttttcacccgtattgtgggcggacaaacttattatcccaagagggcgctgttttatttaacccccaaagaggcgatttataacaaccacgcgcgatcgccgttttgggggcattttttttacaacgccaactcctttttgcgggaccacaacaccacacatgatcgtcactaataataacagcaccatcacacgtca

SEQ ID NO: 580480 - DNA, 327 bp, Homo sapiens
gaacggcatggggaaggagggaaaagattgagaaaaggggggagagggcggggagaaagggggagaagaggaggggaaaggaagaaggcggggaaggaaggggagaagaagggtaggggagagaggggggagagacgcgaaaggggagaaagggaaagggggagaggggaagaggaaagggggaggagggggggagaaagaaggaaacggggaagtgagggagcgcccgaagaagagaagaaggaggaaggggacaggaagaggggcgaacagagagcagagcgaagagacaagaggcaaacggaggagaggaaaggggggcgggcg

SEQ ID NO: 580481 - DNA, 884 bp, Homo sapiens
cacctgctgcctgtcgcctgcctgccatttttgatgtgcatggacagagtcctggttcttgggaccagcttggacgacagtgtgtgtgtgacttgaaataactttaccaaatggaaatgctatttttgctgaactatcttctccatgcggacatggccaatgtgctttgtaacagagccagactggtttcctatctcccaggattttgctcttcagcgttacccacgggtggtcaatcccaaagccttttcagactgcagtgactcactcaggtctcggactgacgctctcactggctggctgcttgcccctccagcatacttctgcctccctcgcaaccagctgtgcgcccgcactcgcaacactactgggacccactcacctggcccaccctcccagaatcaccacgcgcaccccacgcctactcccggcccccccccctaccgctacacacgactcgtccacccttcccctgccgcacctgcctccccccccacctacaccaccactcccctgacaactactacaactccacaccacaccctcgccccttccacatcctctccctcacccctcccacacccccaccacaccaccacacccacgacaaacatcccccaaacacaaccccacccacacacatatgcaccaccccacccacacctacccccacacaccctcacacacctatcaacaacaactcccacacaactactaccaataaccctcacacccctccctatctcaactcacccacataaccacaacacacctcacccaactccctatcaataatcacacaccacaccccacacacccatccacacaaacacacacacccacaacaccctacaactaacacaaatacacacacaataaaccac

SEQ ID NO: 580482 - DNA, 260 bp, Homo sapiens
ggcccaaatacatttttaaaatgaccctggagcaggcacagtggatcacttgagcccaagagttcaaggccagcttgggcaatacgacgaaaccccgtctctactggaaaatacaaaaattagctgggcgcatgcctgtggttctagctgctggggaggccgaggtgggaggatcgcttgagctgaggaggttgaggctgcagtgagctgtgatcacacccctgcacttcagcctgggcggcagaccgagaccctgtctc

SEQ ID NO: 580483 - DNA, 286 bp, Homo sapiens
  misc_feature (36)..(36): n is a, c, g, or t
tgcccctagcctgggccccccccgacaaacttcaantgggtttctgtttttagaggtaccccaaaggttccccttaagggcagcatgtccaagccccttacccccaatttggccacaggaccctcgctcccctcccccggagtgtttgtgtggggaggggcttcccctgttccccaaggggtccttgggctccccctggcccatgttttgtgtttcagtaaaaaaagacctgttcccccctttgtgtgcttccctcctgcctttaaattcccccagtgtggcccca

SEQ ID NO: 580484 - DNA, 479 bp, Homo sapiens
aacctttccttgtcattcacgacttggctgtttggcacaagagacctagcattcagcctatctcagttttcaacatgccttcctcactaatcttaatcatttctagcttttgatttaatgtgagacctgcaactctttcacttgaacacttagaggccattgtagggttattaattggcctaattgaagatgtctggccagtgcagcagtcagaatacatgcagcatttatcaattaagttccttgtattatatgggttcagttcatgatgccccaaaacagttacgatagtaacatcaatgatcacagattacagatcaccataacagatataatcatagtgaaatagtttgatatattgctagaattaccaaaatgtgacacagagacacaaagtgagccacatgctgttggaaaaataacactgatagaattgcttgacacaggattacaacaaaccttccatttgtaaaaaaaaa

SEQ ID NO: 580485 - DNA, 239 bp, Homo sapiens
ttctgcttttacagtgaaggtgattattttattcaatagatttaggttttgttcaatgaatttagaacttactgggaggctttcacttgctcagaatagggtcagagtaggaaggttatctttgttggtgcctcagcctcctgagtagctggggactacaggcgtgcactggcacacctgggctaattttttttttgtatgtttagtaggagatggggggtttcactgtattggccagg

SEQ ID NO: 580486 - DNA, 1149 bp, Homo sapiens
gggtggaggcctgtctgtgtgtggcgcgggcgaggtggaggcccaggactctgaccctgcccctgccttcagcaatggcccccggacagctgcctggccactactgaactgccgtgggttgaaaaatataggccagtaaagctgaatgaaatttgtcgggaatgaagacacctgtgagcagagctagaggtctttgcaaggtgtaaggaaatgtgcccaacatcatcattgcgggccctccaggaaccggacaagaccacaagcaattctgtgcttggccctgggccctgcatgggcccagccactcaacgatgccatgtttggaactcaattgcttcaaatgacagggcgcattgacgttagtgaggcaataaacttcccaatgtcacgctcaacaaaaagtcacctcttcccaaaggccgacataaagatcatcattctggatgatcgcagaccagcatgaccgacggagcccagcaaggcttgcggcagaaccatggaaaatctactctacacgccactcggcttcggccattgcttgtcactgcttcgggataggatcaatcgagcccattcagtccccgctgagccagccctccggtaacaccacagctgaccgacgcccagatcctcacaaggctgactgacattgttactcgagcacggacgagggataacgctacacctgatgacgggccttagacagccatcctcttcaacggcaccaagagcaacatgaggccacgcgcttcgacccaccctgccgccaccccgttctacgggacctcggcttccatccacgcgggacgaaacggtgcatcaaagggacatgagtacgcagacccacacccaatgacatggtaaacgggagaatgtacccagaatgggcggcagtgccactagctggcgaacaccgaaacgaacactgacccaccatctgaccgctacgagggcaacaacacgaaggaattcctgcacaccctctccccccgttcacacgctccacatgagcaatccggaacgcgagtctccagggatgtgactccccccttagatccgaaagagaaccctccacagaggaccatcagcatgatcacacaccgccgcgcacacgacactcaacagccgcacgacacccgcatcgcaccc

SEQ ID NO: 580487 - DNA, 232 bp, Homo sapiens
aggagaattgcttgaacccgggaggcagaggttgcagtgagccaaatttacgccactgcactccagcctgggcaaccaaatgagactccatctcaaaaaaaaaaaaaaaaggaacccttaaaggaaagccctttaattttcatggttgggaagattaaattttgtggaaaataaatatggtaaatatcctcccaaaaataggctatagatcaaatataacccctataaaaat

SEQ ID NO: 580488 - DNA, 259 bp, Homo sapiens
  misc_feature (188)..(188): n is a, c, g, or t
agaggaaatgaggccgaaacccatcagggatagattctaggggccctgtaggccaaagtgaagactgaaatgtatcctaaaagtcatggacaaccacaggaaaacgtggaaagctggggatgacatgatggtatttacatttaaggcaattactgaggacaacagatgggtggacacgaccccacacngaagcaagactagagtcaggaggcaattcactagcagaggaaatagatcaacttgctgggtcatgatggag

SEQ ID NO: 580489 - DNA, 1478 bp, Homo sapiens
  misc_feature (237)..(237): n is a, c, g, or t
gcctggaggcttacggggaccctgcagcaggtcgatgacttctggagcacggccctgcaggcctggtcagtagctgtcaagaccacacggatttggcctcagttccctgtgagctaccgtgggtcactccagagtcagagaaggttcagcattcggcgtatagacatgggctgcgccaagacaacgtggactgctggtccactcgtacgcatgccacgaggatgctgcgaccatctnccgcgagtctagacggggcacaggggctagcaggcccgggacgcaaggaggaagctgtgcgcaggagcattggccgccgagctcccatggtcagctaccgggattcgagcgccagagacggtacgtctctggtttacatagttgtgccacacggacacgaccggaagacttctcttgctggcatcccccatcgaacgtgttcgtcacatcatcgctgcacaatcggcgccccattgcgttgggatcgaaatcgtagtcaatcggatccgagctgggttggcagactcgcggaattccccttcacttgcgtaatccgcccctgcgcagcgaacacgtctggatcctacctaacgaacaggggcaaaacaagctggtgggctgaagggcacgttcgatgcaatgtggcgggtccaatggtctacacacattgagcagtgattcctaggaattgttcgggagaaaccgctcctatctagtcactgcgctggactcttagatggggggccgaggggcgtccaacaagaggcagcagaagcatgcccggaacgcccctcacttcccttgatggaccctgtggtgttgacccagccgataagtcgtccccagttgggtgcctttccgtacccccgggggaacccaaggtgacccttttggccaaagggcggcttggccgggggaccagccgaaaagcaatagtacgggatgtcacaggaaaacggagggctttggtggggaacttgggtagtcgtctcacagtgtgcgccacttctggaaccggaaaccttgtgaatttgcttggaaaagcttgcgccattgggcaccatcccttcccacgcgagggggtggcccggcttccaagaactttgacgacgaaacttctcccaactactccttggagaggtaccctttgtgtggcacacagtatgtgggaaccctaaaagagtcgccgggggaactgggttccctgtgggaaaaaaacggtaatcacagcccctccttcgtgggcccattccagtatactggcgcacacgacttgggtggcgaccccccctactaaccaaactgtttgcttgggcgtctaccaaaacagcggtcttggtcccaaggcttcctacatgcacaaacaagaaaggggcgcgcagatgcggggcgtatacatctattaacaacgtgtggcacctactgacataagtctgttgtggtgttacctcctccacaaaaaagacagcgcccgaaggaga

SEQ ID NO: 580490 - DNA, 907 bp, Homo sapiens
  misc_feature (907)..(907): n is a, c, g, or t
gccaaggcgaggtgctacccacctactgcgatgtctctgaaatgtgaccaccaggactgattcatgaccctcttgatcaaggtgactcgtgccacgcggtcctcggtgcctcctctcgtcgaagcacgccgtgtgcccatccgatctgtcgtctcaattcacaattgctctgggtgacctacattgagccgtcactggtcctggtcgcttcgccagagacctgcgtgttttgctgacagccagcaagacaataaggggctgtccgctggtgggccgtctacgattgtgggctggtcgggttcctgcgtcggccgaagggagtgagtgatcatagaacacagatggatagccgccgttctcggggcccgtgaatcgagactgagggggcatggacccttagtctgccctcgccgcttggttaattgtagttgtcaccagtgacacgcaggccgactgtgggtcgagagtggactacagggctgaccaagagtcccaacgttgcaccaacgttgatccacaagaccaggtctaattgttttcaagtacatctaaatgtaaccattcatagcgcgaaggaggatcgaatcttcgcattgtttcgttagcacctggcccctcgcggacatcacaacaaccgagctacaagggatcgactcaactttggcaacgaggaaaagcctttcgagttgcgatgtaacagatgggccccctggatcgcgcatcgcaacctctgtccaatcgggaacggttgcgaatgaggggactccttttcttttgcccgtaattacacagaaggaggggatcgcagcagttcttatctagggcccgttaaccagccgatgtgtaacgaccctttggacgaagcggccaaaaaaccgaataatactccgcccgtgccagatggtan

SEQ ID NO: 580491 - DNA, 547 bp, Homo sapiens
gttgatgacataaactaaatataacctgaaaaaggttcaacattatgttttattttgacagtgctacccatgtgacttaacatgttaaatagtcctgtttacctctcttttgggtgcttcaagggcctctgtagtatcccaaatttagaggtcagaaaagacaattttgaagttgaaatttgatttagggaagcctattaaatatattaaaagtttaaacacttgatgttatgaaatagaattccaggtcaccgtaagtcattcatttacttaaaatcatgacttaaaaaagttttaacagggcaaaaatctttactcattgatagagggaagacatcttcacaaaccgatctgcctctagtctatcctcttccataaccataccaaggtagttaatttacaaaggcaaaccaaattgacattatttggtaatatttacctgaacatcatctttaaagagagaaagcccagatggtaccacattttcatccttatagaccctatttcttacttgatgaccatcagagggactttcccttctgttggg

SEQ ID NO: 580492 - DNA, 495 bp, Homo sapiens
ttgattgggtcggtatctaatgcgagtatgtacaggctagtataatacttaaaccccttatttggctatggtggttagatagagtattcctttgcaacttagtgctatgacttattacatggtcgtattcatgcttatgacagatgaagaattataagtgccagtgtaaaggattaagaataacatacaattcagtagggtatggcaggctgaattgtacatggtaatgtatcaggggagtgtgatttgggctaaaatatatccagatcctagtaagttatagatgtcgggttatgacgaggatactagtatccctagctatgattggtgcttatttggccctatataaggaatgttcatatttggataatcggagtccatgttataaacagaattgaccgatgcaagacaactgctaactgtgcaacattgacatgagaataaatagtagtgtgtcacggggacaaccctctgaatgtacctatgtgtcagtgg

SEQ ID NO: 580493 - DNA, 607 bp, Homo sapiens
gaataggtcagcggccaagcgaaatgcaaatcaaaatcacagtatcatctcacctcagttaaaacgatttttactgaaaagacaaatataatagctactggcaaggatgcagaggaaggggaatgcaggtacaccattgatgggaatgtaaattagtacaatgacaatggacgacaagtatggaggttccttaaaaaactaaaaatagaattactatatgatttcacaatgcccctgctgggtacatatccaaaaaaaaaaggaaatcagggtatcaaagtgatatctgcattccccagtttattgcagcactattcccaatagctaagatatgggatcaacctacttattaacaagtgaacagataaagtaaatgtggcacatatacacaatagaatattattcaaccataaaaaagaatgaaatcctgtcacttgcagcaacatggatggacattgagatcattttgtaaagtgaaatgagccaggcacaggaagacagacatcacatgctctcactcatatgtgggagctaaaaaaaaggggatctcatgggaagtagaaagttaatggtatttataggaggttgaaggacaggggggtggggc

SEQ ID NO: 580494 - DNA, 623 bp, Homo sapiens
agcgggggtgcgcactgcgagcaccgagcacagaccacagaacggggatgtctgtgcgttcggagtgaaagaggggtggagttcctggtgactggccgtcggtcccacgagtgggtggtagtggggtgctggtgagcgtgggcgagctctgctggtgcactgcgcggtccttcactgtgacccgagacgctgcagagctactcagccttcgttgcagtcgtcactcgcatctggctaccatgctccccgctgccctgcgctcggctgggctggcatcgggcccggggaaatgcggagcagtagttcggtgtagcactgtttgcggcgaggagaacggaaggagaggagaaaactgcactggatcaaggaggtcttcccataggcctgcagtagggctgtttaccagttggcacagcaacgggaacagagcgaggagcatcaatctagaagcatggagatctgcctgcatgtctgctgcagggcttaagatcactggaagcacagaaacaaagaggagattgctcctgatcagtatagactgggtgtactgccaagcagaagcaagaggggaggagggaactgcctccggatcattaccggtgtagatcccaagagcattccca

SEQ ID NO: 580495 - DNA, 290 bp, Homo sapiens
  misc_feature (33)..(33): n is a, c, g, or t
  misc_feature (81)..(82): n is a, c, g, or t
agaggtaccccatagcgacaccgtacaaacggnggatgtactcgttatttcgagcgtcaattttattacgaaggaagtaannggggggtccgcttctaccatttccatatcccttatcaatgaatcatctttatctgaagtagtggtaacagcgcttaacattaagcggaaagcagataacctgtcttatgcaagccagggtatcaaagccgataagctcaccactaccaggatccaggatgtgaacaatgccctggctggtaaaatctcaggtatccaggtacgctcgg

SEQ ID NO: 580496 - DNA, 231 bp, Homo sapiens
tctagaggatccctgtccagctgagtttcttttaaatagagaggggtctcactgtgttggtgaggctggtcttgaactcctgaccacaagtgatctgcctgcctcagtctcccaaagtgttgggattacaggcgtgagccactgtgcctggcttgttgctgttttaaaaacaggggctcgctctgttgcccaggctggagtgcagtgacacaatcagagctcactgtaaca

SEQ ID NO: 580497 - DNA, 217 bp, Homo sapiens
taaactctctcaccctaaaaccaataaaaactcttagtccataggagctagcactcctaaccaaaaaaaaaaaaaaatttgtccagaagcccctctcaggtttatactccaaaataaacttgtctttgactgtggagccacttttcatgtgtcttttctctttctttacttctaacatttggtgctgaaacctgggatgggtgtggggcgataacat

SEQ ID NO: 580498 - DNA, 653 bp, Homo sapiens
  misc_feature (360)..(360): n is a, c, g, or t
atttaatacaatttacaacacacctgctggcactttgatcttggacctccctgttgtctgaactaggtaacctgacctctccctttctgatgacagtaggtttactgccacctccagagaagctcactgccgaggtcctaggaatcatttgcattgtcctgatggatagttcttattcctttcctggagcagaacaattcttccccgaatacaagaacgcagaaagcacgtcattgtggccattgtcctgacaacagttgttattacattggtaaggaaagaagaacttgggaagagagtttgctggcctgtacttcgaagaactccagtctgctttctataaatttctggccagcattntaccttcctcatggattggtgtgtttcgtaacagcagtcatcatccatgggtgacaataaatggtttggctttcaaacatgctgaacttaactgtgcagtgctacaagtaaatcgacttaaatcagcccagtgtggatcttcaatgatatatcattgtaagcataagctttagaagtaaagcttcattttatatttcttaaatagaatatttggattgctaaatctaaaatgaatatgttattgctctatcaaaattctaatcaatattgaataggatgcccacattctaaag

SEQ ID NO: 580499 - DNA, 1494 bp, Homo sapiens
gatcaccttaaatgtaaatgggctaaatgctccaattaaaagacacagacatagcaaattggataaagagtcaagacccatcagtgtgctgtgttcaggagacccatctcacgtgcacgagacaccacatacggctcaaaataaccgggactggcggaagatctaccaagcaacatggaacaacaaaaacaaaaagcacggggttgcaatcctagtctctgataaaaccagactttaaaccaaccaacatcatccagcaagcagcacacaagacaggccatatacatcaactgggcaaagggacatccaattcgaacaagaaagcagctaactcatcgaaaatcatatcatgcacccgaatcatcaggcagcaccccagaatggactaaaagcaagtcctatagagacctacaaatgagacttagactacccacacacatcactagtggagagactttaacacgcccactgtcaaaccattagacagaaagttaacaaggatatccaggcttgaaactcagtactgcaaccaagcggaccctaatagacatctaacagaactctccaacaccaagatcaagcagaagtatacatacttctcatcaccacactccgacacttactacccaaaactaggcccacatcgtcgaccagtccacagcaactccatcagcccatgcgacaagaactagactcactaacaacacttggtctctcagcaccacagtgccctccaaccttagaacatcaagcatacaagcaacattcactccaaaaccgatccatggctgcacacatgcacaacaattggcctgactgaaccacgggcacatcactcgacatgcacgacacaaccaacgcagattctatgaacaccacttgaactagcaggccatacaccagcattggcgacatcttcccacagctgtatcgacacaattcggaacaagtccccagaactagcgacagctcagcaagacccaacccattgacacacgaacacgacaaccaactccccggcccacaccaacacgtcgaaccaccccacacacagagcgaacaaacacacaaagagacgcgttgatcctactggccttggagacggcggtgggagaagagcgagctacagagagaggagggagaggagaagcagaaagagacgacgaagaagcacggagagacggagacagaaacgacgcgcggcacgcaggacaggaggagaggagaagaagcgcggaagcaccacgaaacaaaaaacagaaagcagacgaataagacgaagcaaacgggagagcgcacgacaaggggccgccgacaggcaagcacagcaaagcgcgggccgaaaactacaccgacagacgagcgacagccaggcaacaaacaccgagacaaaagaagcaggagggagagaagagacacccacacaaacacgtgacagacagcagaggcacggccacaacagacgaacaccaacgacgagccgcaggaccgacc

SEQ ID NO: 580500 - DNA, 110 bp, Homo sapiens
atacacacacacacacacacaacacacaaccatgtactttctctattctttcactcaacaactatcaacacggaatatttttgtagttggtccagaagtgcgcctggtgt

SEQ ID NO: 580501 - DNA, 1441 bp, Homo sapiens
ctggttactagtgtgcttttgtattggtacttcttcatgtgtgggccggacacaattttttctgttgttcgttctgtacacactcgtggtctctggggtcatgtggctgtttgttgttccccccgttgtttcctcctattacgtgtgctctgcacgacggtgtgtgttgattgataacgcctcccgcttgtcttgtgggaatccccccctttgtcgtttgatgtttgcccaacgggcatccgacataagtgtgttttgcctactctggaaaacttgggctgtttaaaaaggtggttgttttgacaaccccgccgtttttggggccccctgatgatatgcttctgtgaataccttttaatttctggtttcccctggtattccatgttgggggatagtataatattcggcgataaatttaattcttttctgcgggggggtcctctacttctcacctggtgcctggtaagtataaagtcgcctctttctatggatgcatcttcttggttctcccacccttggtgaaatccccacgtgggagcccctgtctctttactacccctcctcaacatgtggtttcctaatttgggggccttctgttgagtctgttctgggccctgtttttaccaggggataatgcttgggggtgttcgtgaatttttgtggccccaataccatggggtctgtctgttaaggtgcttctttttggggtccttcgttttggttgtgtccctcctttgtgggcacatataatccccgtgtcccccacgaattcttgcgttcccttcgccccccttgcacacacggttggggattcctggcaaactacacggggggtctctggaaataagatacggtgctactatagtgggatgcactgtagtatgcgattttttgcgggggcacagaaggggaccacaggcgttcctctctgggggaaatacctctcccatgaggtctccttttatcccaaaggtattgttaatatatggagtgtcacacgtgtccttgtggcttcctcgattgatggagtaatatggggggccaccacactcgcgggttctatatgtgtgaacacatgccacagagccaccttccaactggcctactctggcacgttaactcgagagtttgtctggggtttccgaaagaagggtccctccctctttttgggggaaaggtcacagcccacgccccttcccaaaggtcttgaatgtttccactttcacccccagccccttccgctcttgcgtatagtgacccaccctatgatcttccccaagagggaactggggtttctggggtccacttctctgagtcacgtgggtaatttgaaaaatttgagttttcgatctttattttttctctgtaaacttccaagctggcttttcccatattcaattcactgtgatttatgccaataaagtttgcccatgattttcca

SEQ ID NO: 580502 - DNA, 776 bp, Homo sapiens
  misc_feature (105)..(105): n is a, c, g, or t
  misc_feature (124)..(124): n is a, c, g, or t
  misc_feature (194)..(195): n is a, c, g, or t
aagccaagcagcgctgggatgatcgtcattggtctcagaaaaagttagatgagatgacggacagggactggcggatcttccgtgaggactacagcatcaccaccnaaggtggcaagatccccantcccatccgatcctggaaagactcttctctgcccccacacatctggaggtcattgataagtgtggctaanngaaccaacacctatccagcgtcaggcaattcccattgggctacagaatcgtgacatcattggtgtggctgagactggcagtggcaagacagcagccttcctcatccctctgctggtctggatcaccacacttcccaaaattgacaggatcgaagagtcagaccaagggccttatgccatcatcctggctcccacccgtgagtgggctcaacagattgaggaagagaccatcatagtttgggaaaccgctaggtatccgcactgtggctgtcattggtggcatctccagagaagaccaggcttcaggctgcgcatgggttgtgagattgtgattgctacccctgggctgtttgattgagtgtgctggagaacccgctttgaccccccccccggttttttttttggggggggcggggggggttttttggggagcccttttttgggaaaggggccccgggcctttgtgcttaacccctaactgtggttctggcatgaggcagatcggatgattgacgatgggcttctgagccagatgtccagaagatcctgtagcacgatgcctgtctagcacacagaagccag

SEQ ID NO: 580503 - DNA, 107 bp, Homo sapiens
acctgttgtcgttaattcgccagaatgagctgtgtgcttctcttcactggctgtcctcatgaatggctgtgtatgcatgctgttgcgtgcgcattccctgtctctag

SEQ ID NO: 580504 - DNA, 655 bp, Homo sapiens
ggggagctgggactacaggcatacaccaccacacctggctaattttttgatttttaaaaaatgttttgtagagacggggtctcactgtgttgcccaggctggtcttgaactcctgagttcaagtgttcctctggtctcagcctcccaaaatgctgggattacagatgtgagccacctaacctggtctttttatttttttaaagagccaacatttaaataaggagatttcacatcacagtcgatttctggggcttggttgttgttgtttttttgttttttttttttttaattgggaaaagggatttggcccggtgttgcagacgtgggtctggaactcctaggctcaaatgatcccctccgggccggggcacgggggctcacgccggtaatcccagcacttggggaggcctaggggggccggatcacgaggtcaggagatcgagaccttccgggctaacaaggtgaaatccgggctctactaaaaatacaaaaaattagcgggaaaggggggcgggcgcctatagttccagctactcaagaggcggaggcaagagaagggatgagcccaggaggcagagctggcaggggggggagatccggccaggaatccagcctgggtgacagagcaagatccgtttcaaaaaaaaaagaacgc

SEQ ID NO: 580505 - DNA, 442 bp, Homo sapiens
ctagaggatccccctggcaccactgcatggattcattcttgcccttgacagctggctacgtgtgtttgtattttagtaggggtgctattgattggcacatattgtcccccctggagtttatcgggtggctagaaagcttttatagtacctaaaaagtatactttgatcatatggcctgacaacaatcagatattctaatctctataagcaaaagcaaggtaggattgcctccaaatgttgacaggtcttagaccatagccactgttactagatctaatgtgtgggctacttgcctggagaggccgaaccctcttggatgcttgtttgttgctccatgctgccgccgagtggcttgatgctccattacaccctccttggatccaaccttccattattgctgatcgctctcgagggcagattattccatatgtttgatctggtc

SEQ ID NO: 580506 - DNA, 184 bp, Homo sapiens
tccctcgtcaggtcagcgtatattactgttttctttttcttgttcttgtcttcttctgcgctgagtcaatgcctctcccatgaggtcactcttttcttcatcgggctctttcatatctaagggttcattttgagtgtctacatgtactatggacctgtacgcttccatgacagttgccctacag

SEQ ID NO: 580507 - DNA, 294 bp, Homo sapiens
ataggtaagctgtttctgagacttcttttcatttctttatatgtgtatatagtgaattcttattatttttaaaattttatttattcttttatttttatttttgctgaggagcccatagccttctcctcctcctcctcctcctctcgcctcatctgtctcccggcctgataccatatacaggttgttgaattcaccgtgggtagcaagctagtcataaattgcacagtgctttctctttttatgctttctgccattaacatcttacctttccggtgatcctttagagtccacctg

SEQ ID NO: 580508 - DNA, 1294 bp, Homo sapiens
taaagaatatatctggtattccttgggcgtggtttaaaaataaatttgtcctagcggaatatctcgaaaaagcggccctaaaaacaaagaccggtgagtgttaatatctttcccccacaattattagcggataaacgagatagcaccaaaaaaaaaaaaaaaaaaaaaaaaaaaaaaaaaaaaaaaaaaaaaaaaaaaaacaaaaaaaaaaaaaaaaaaaaaaaaaaaaaaaaaaaaaaagagggggggggccacaaaataaacaccccccgagaggggagaccacaaacaaaccacaacccacccatattttagaaaaaaagaggggcccacaatatgaggagcaaaactaataacaaaaacgaacagcaacggaggaaaactaaaaaacaccatccagtgtaaagaataaaaaaaacaacgctaaataggatgagtcaatcactagaagcagcaagcaaacccaaaaacaacacgggggcgggggagcacaacaaaataggtggcgagaacacaacacaccaaacaaaagaaatataacaacaccaccacaagccaggagacacaaataacaaaaaaagagaggaaaacaacgacgagtgggcaccaccaaaaagacagcgcacgaaaaatattagcgggaagagagagaaataaaatcttagacgcgacagaagaggtgcgtatataataaactaaagacgaaaaataatatatacaaagaggggggccgatcttttttatctatataaaataacaagcactagggacgaactagaacaaaaagtaggagaaaaagacaacgaaaaacgaaaacacacagaacagaagagaaagagtagctaagataagagaagaaaaaagagaccgcgaacacgaagcaagataacacaatgacacgacagcagacgaatagaagacgggggcggaaaaaaagaaagacagatagagagaacaacgaaaacgacaacacacaacacacaaacacaacaacgcaacaatcaaataagaaaccaacgaaaacaccaaaccgaacagcaggcacccacagcagcgacaacacaacacaacaacacaaccagagactgaacaacagagagaagcagcggtgaggagccaaaacaaacagcactagacaacaaagacaacccgcaaacaaaaaaaaaacaacacacaacaacacaaaaagaacgaaacagacacgaaaacacaacacaatacaaggaaaataaaaaaacaaaaagcaacaacaaacaacgaaggaacaaacgaggaaagagacagagaacacacg

SEQ ID NO: 580509 - DNA, 1444 bp, Homo sapiens
  misc_feature (215)..(215): n is a, c, g, or t
tcgctctgtggcttctctgtctgttctgtgttatttgttgttgtctcttctcttcttcttctcttctcttctgttttgttgttgctcgcttttgtcatttctcgccgtctcgcggttcgcgctgcctcttgtctgttctctgcttctgtcagtcttgtcgttatttccccgtggcgtggttttttcgccgtgctgtgtttgggtgaccctgttgngcttcctgttgttcctctcactggttgttgtttgactttccttggttgacccccggggtccgtttcctgtcctgcggtacttgtggccttggtcctcggctgtatctggaattactccatgttcaacctccaggtataccagtctattgacccaatttacgccctattttaaggttgaccaaccgattagtatacctatgtgtttggttactaattatatatcctatgtgctgtgctcacctgggttcctggaaattttcctcggggtaatatttctcttcgtaactcctaatcggcggttcccgggatcctggtcttccgggtgtttagacttcgttctagcgttgacggcgtaaggcatagggtgaatgagtcctcagtctctgataagggtaaatgtgtgcttggtgagcttctgctgtttgtctctttggtcttgcggctgttgtactccctggcgtttgtggtctggcggtaggttgctcttttcgtgctgtgttgtagccctgtatagtattttagtacttgtatagcatgaagggttgtatggagtaaaggcctatgtttgttccgtatagtaccttggttatttgacgaggttactttcgttctagtttgttatagtaccatgtagtccgtagatacttactttccagttttggtttcttgtatatagatgtcctctgatattcgttgttgcagctttatcttggttcgagttgggttcaggtatccttggttcttgtagactaggtggtataggtaatataatattccagttctacgaatattttcgtcttagctatacttatatgtagattgtggcgtattcagagggtattagtgtatagttttaccatactggtgtgtatgtcacgtctaataagtacttatctatggctactagtaatcatctagtattctcggtccaggtctcttatgagtacgtggcatatctaatatgtgttattaatggggttctcgaatttagtttggatagggataaatagactagtggtgatatatcatggtatatatataatatatgtgaggtcgacatagcaacgacacatcatagctgataatattatatttctgagtgacctagacgaaagagaaggagtagaaaggatgattcttctttggcctatcatttggtacagtctcatttccaagtcatgtatatctgttaccgcctccagtatcagagtactttcgtggttggtggt

SEQ ID NO: 580510 - DNA, 122 bp, Homo sapiens
ccctttgggaggtcaaggagggaggatcccttgggcccaggagttcaaggccagcctgggcaacatagcgggacgctgtctgtaccaaaaataatttttttaaataaacgatattatgagga

SEQ ID NO: 580511 - DNA, 475 bp, Homo sapiens
atcgaaccttttggatctctgtcagaaatgaatgtttatttctttcaagttttatcaagtattaatacgttttatttatattcttttaaatgttttattcagtagttctgtgaacttcagactttgttgttcagcctaatcgtatgcttctgtaacttctacacattttataagaactcattcaaagttgtagtcctaccatagtgtttcagggttccttgttgtgtacacttttactataatggcaaaatgtttcaaaatcattcagctttttaaagaaacttattatgcaaaagacactcttgaaatgctgtgcatttgagctgaagtgaaagaatttgtttcatgttgtactttgcattattttaagttttcacatctttaatatgcttttctatgctaattatattagaaatctataaatataagtggtttctttgtttaaactagtcattaaaaattaggttgaaaatga

SEQ ID NO: 580512 - DNA, 603 bp, Homo sapiens
ataataatgctgagtaaaagccacaccaataaaaaatttgttttttaagacggagtctcactctgttacccaggctggaatgcagtggcgtaatctcagctcactcactgcaacctccacctcccaggttcaagcgactctcctgcctcagcttcctgagtagctgtgaccacaggcacacaacaccatgcatggctaattttggtatttttagtacagatggggtttcaacatgttggccaggctggtctcgaactcctgacctcaggtgaactgcctgccttggcctcccaaagtgctggaattacaggcgtgtgttaccatgctctgccaaaaaaaaaaatttttttttggagagggtgtctggtcctggtggcccaggctgtattgcatgggctcattctcagctcattgcaacctccgccgaagaagctctcttttggtcttggcccttagctacagatagggcacccagggggcaagaaacttacggcgtatggaagagaaatcccagtttcctatccaggctccaggcagggcctaggtaatggccgggagccccttttgacttaagcctcagggtaaccgagctcgaaatcgaat

SEQ ID NO: 580513 - DNA, 505 bp, Homo sapiens
  misc_feature (36)..(36): n is a, c, g, or t
  misc_feature (355)..(355): n is a, c, g, or t
  misc_feature (504)..(504): n is a, c, g, or t
cggaaaaaatactgctggacgcacagcatgagtctnggacggagtagctccaagagctctcactgtgacagcccacctcgctcgcagacaccacaagataccaacagagcttctgaaacagatacccatagcattggagagaaaaacagctcacagtctgaggaagatgatattgaaagaaggaaagaagttgaaagcatcttgaagaaaaactcagattggatatgggattggtcaagtcggccaccctcagcatgaggaacacgagcgtcatgaagaaagggggcatattctctgcagaatttctgaaagttttccttccatctctgctgctctctcattttgctggccatcnggattggggatctatattgggaaggcgtctggacaacctcccaccaagcacctttttggatgaagaacttgggagtcttgacttgggttccgttagttggattacttcctgagccttggcaacatagcttcacttgaagagctggttana

SEQ ID NO: 580514 - DNA, 300 bp, Homo sapiens
taagcatgcactccagcctgggcaacagagatgaaacttcatctcaaaaaaaaaaaaaaaaattttatgttgggttggggcttaagggctcatgtctggtataccccaacattttgaagaggctagggcaggaggatggcttgaagggcaggaggatggtttgaagggggggatttggaaaacaagcccttcggcaacacaggtaacaaccttattctctacaagaaagattaaaaaatttggccgagtggtggtggcgcattgcctctagttcccagcctactcaggaaggcgtgaggc

SEQ ID NO: 580515 - DNA, 709 bp, Homo sapiens
gggacgtgattcctgactgatacagtgcgtatgacgggagggcagaggggctaagcctagctgtctgggggtgctgtggtggtggtagactggctacacaaagctggtctcaagaacgtgtcttggaaggggccgtcgaactgttgcagcgttagtccaagactatagttcagaaacccattcatagatcttggtccaacgtatgcttgttgaacacgggcaagagtcaaattcgcgtggacatgctctggagtacactcaaataaggctagtagtgagacccaggtcttcccggcaggattgtcgagtccagaccaactgtttgtccagagttcatcacatgtaaacatcatcgtgtacctacgcagcaaacattcagtcgcgggacgtggatctgatgttcgcaggtgacaggtaggtcatggctctgacttcctgtgggtaccacaagtaagagtcactaccaggtacgttacagccgagatgaggcagacgattggcagggaaatagtgcgctcggatccaggcagtggcatcctgataggatctctggtcaggaagtcggccggagacaggcagctattcgtaggtcagggggatcgacctaccgcggttgtactatgatcttaccagtcaatgacatgttatgctactaggggattcgaggtaccggcattctctggtagctgccaggcagagaaactagatc

SEQ ID NO: 580516 - DNA, 377 bp, Homo sapiens
tgggatatggtctctctctgtcacccaaatgggattgcaggggcgtgatctcagctcactgcagcctcgaccttcggggtcttaagcaatgctgtcacctcagccctgttggagtagctgggatgccaggtgcctacccctacaccgggctaattttttggtattttttggtacagactggcgtttggccatgtggcccaggctgtgtctccaactcctgatgttcaagcaattccctcggcctcggactgggccaaagcgcagggattaataggctgtagagccaccactcccagtctctggggtggggttctctgtgaatctgggacaccttccttgtagggaagcaaggaggaggcaggcccacgtgcaggcct

SEQ ID NO: 580517 - DNA, 197 bp, Homo sapiens
cacgaggatcttccacatgactgtggaaaccctaaaagaaagtcaatctgtattaacaaaatttcggaaaaattcattcacactacgcccgtcccaccgcgctgtcgacatcctccccgggaatgcaggcccgcgggccggcagagctcggtgcgtacgcagcgcggaaccgcgggcgcccgcgtggaccgcggccg

SEQ ID NO: 580518 - DNA, 880 bp, Homo sapiens
  misc_feature (146)..(146): n is a, c, g, or t
  misc_feature (296)..(296): n is a, c, g, or t
  misc_feature (299)..(299): n is a, c, g, or t
  misc_feature (323)..(323): n is a, c, g, or t
  misc_feature (503)..(503): n is a, c, g, or t
atgcgcgacgcttccatcaaaggacgtgcacagccttatgatcccaatttttacgatgaaacctatgattatggtggttttacaatgatgtttgatgaccgtcgcggacgcccagtgggatttcccatgcggggaagaggtggttntgacagaatgcctcctggtcggggtgggcgtcccatgcctccatctagaagagattatgatgatatgagccctcgtcgaggaccacctccccctcctcccggacgaggcggccggggtggtagcagagctcggaatcttcctcttcctcncanccacacacaactagagggggaganctcaatgggctatgacagaagagagggagacctggagaccgtttacgacggcatggttggtttcagtgctgatgaaacttgggactctgcaatagatacatggagcccatcagaatggcagatggcttatgaaccacagggtggctccggatatgattattcctatgcagggggtcgtgnctcatatggtgatcttggtggacctattattactacacaagtaactattcccaaagatttggctggatctattattggcaaaggtggtcagcggattaaacaaatccgtcatgagtcgggagcttcgatcaaaattgatgagcctttagaaggatccgaagatcggatcattaccattacaggaacacaggaccagatacagaatgcacagtatttgctgcagaacaggggtgaagccaggtatcctggagaaggttttcctaacgactagtgcacacactgaagcgggtctggctctttttaatctggctgcggttaaaaagcacaatctcctggcaaagggttcccccctagggtgggaacttgttgtccccata

SEQ ID NO: 580519 - DNA, 756 bp, Homo sapiens
  misc_feature (146)..(146): n is a, c, g, or t
  misc_feature (296)..(296): n is a, c, g, or t
  misc_feature (299)..(299): n is a, c, g, or t
  misc_feature (323)..(323): n is a, c, g, or t
  misc_feature (503)..(503): n is a, c, g, or t
atgcgcgacgcttccatcaaaggacgtgcacagccttatgatcccaatttttacgatgaaacctatgattatggtggttttacaatgatgtttgatgaccgtcgcggacgcccagtgggatttcccatgcggggaagaggtggttntgacagaatgcctcctggtcggggtgggcgtcccatgcctccatctagaagagattatgatgatatgagccctcgtcgaggaccacctccccctcctcccggacgaggcggccggggtggtagcagagctcggaatcttcctcttcctcncanccacacacaactagagggggaganctcaatgggctatgacagaagagagggagacctggagaccgtttacgacggcatggttggtttcagtgctgatgaaacttgggactctgcaatagatacatggagcccatcagaatggcagatggcttatgaaccacagggtggctccggatatgattattcctatgcagggggtcgtgnctcatatggtgatcttggtggacctattattactacacaagtaactattcccaaagatttggctggatctattattggcaaaggtggtcagcggattaaacaaatccgtcatgagtcgggagcttcgatcaaaattgatgagcctttagaaggatccgaagatcggatcattaccattacaggaacacaccaccatgcctggctaattttttgtagtttttgtagaggtgggaggagatggaaggtccgccta

SEQ ID NO: 580520 - DNA, 1615 bp, Homo sapiens
  misc_feature (146)..(146): n is a, c, g, or t
  misc_feature (296)..(296): n is a, c, g, or t
  misc_feature (299)..(299): n is a, c, g, or t
  misc_feature (323)..(323): n is a, c, g, or t
  misc_feature (503)..(503): n is a, c, g, or t
  misc_feature (910)..(910): n is a, c, g, or t
  misc_feature (1300)..(1300): n is a, c, g, or t
atgcgcgacgcttccatcaaaggacgtgcacagccttatgatcccaatttttacgatgaaacctatgattatggtggttttacaatgatgtttgatgaccgtcgcggacgcccagtgggatttcccatgcggggaagaggtggttntgacagaatgcctcctggtcggggtgggcgtcccatgcctccatctagaagagattatgatgatatgagccctcgtcgaggaccacctccccctcctcccggacgaggcggccggggtggtagcagagctcggaatcttcctcttcctcncanccacacacaactagagggggaganctcaatgggctatgacagaagagagggagacctggagaccgtttacgacggcatggttggtttcagtgctgatgaaacttgggactctgcaatagatacatggagcccatcagaatggcagatggcttatgaaccacagggtggctccggatatgattattcctatgcagggggtcgtgnctcatatggtgatcttggtggacctattattactacacaagtaactattcccaaagatttggctggatctattattggcaaaggtggtcagcggattaaacaaatccgtcatgagtcgggagcttcgatcaaaattgatgagcctttagaaggatccgaagatcggatcattaccattacaggaacacaggaccagatacagaatgcacagtatttgctgcagaacagtgtgaagcagtatgcagatgtgaaggattctaatgcaagatattttttcttttttatagtgtgaagcagtattctggaaagtttttctaagactagtgaagaactgaaggagtcctgcatcttttttttttaatctgcttctgtttaaaaagccaacattcctctgcttcataggtgtnctgcattggaggtgtagtgaaatcttggctgttcaccagatgtaatgttttagttccttacaaacagggttgggggggggaagggcgtgcaaaaactaacattgaaattttgaaacagcagcagagtgagtggatttcatttccgtaatggtcggggggtttaaaaaattccccccatgtaattattggtgaacaccttgcttggtgggtcactgtaacattgggggggtgggacagggaggacaagtaccaatagtccacatgtccctggcatctgttcagagcagtgtgcagaatgtaatgctcttttgtaagaaacgtttatgattttcaaacataaattttagtgaacctatttcgggggccattttttttaaagacagccatttnaacatgggggtgaatttccaaccaccccaaattaaacactagtttaatttccagcctcctggtggaccatattagtgctccttgtgggcatggcaaaataatgggcaactcgtccggggatccgaaggctggaaccacatggggggagaaagcaaaaatatacgcgtaaaaagcgggaccgggggcggaatgtgccccttaaccactctgtgcgccacaggggccacacggggcgtacgctaaccaatcagcgcacttctacatagtcgggcagccactataatcagaacagcgagacagaagagcgcaacgatg

SEQ ID NO: 580521 - DNA, 1558 bp, Homo sapiens
  misc_feature (146)..(146): n is a, c, g, or t
  misc_feature (296)..(296): n is a, c, g, or t
  misc_feature (299)..(299): n is a, c, g, or t
  misc_feature (323)..(323): n is a, c, g, or t
  misc_feature (503)..(503): n is a, c, g, or t
  misc_feature (853)..(853): n is a, c, g, or t
  misc_feature (1243)..(1243): n is a, c, g, or t
atgcgcgacgcttccatcaaaggacgtgcacagccttatgatcccaatttttacgatgaaacctatgattatggtggttttacaatgatgtttgatgaccgtcgcggacgcccagtgggatttcccatgcggggaagaggtggttntgacagaatgcctcctggtcggggtgggcgtcccatgcctccatctagaagagattatgatgatatgagccctcgtcgaggaccacctccccctcctcccggacgaggcggccggggtggtagcagagctcggaatcttcctcttcctcncanccacacacaactagagggggaganctcaatgggctatgacagaagagagggagacctggagaccgtttacgacggcatggttggtttcagtgctgatgaaacttgggactctgcaatagatacatggagcccatcagaatggcagatggcttatgaaccacagggtggctccggatatgattattcctatgcagggggtcgtgnctcatatggtgatcttggtggacctattattactacacaagtaactattcccaaagatttggctggatctattattggcaaaggtggtcagcggattaaacaaatccgtcatgagtcgggagcttcgatcaaaattgatgagcctttagaaggatccgaagatcggatcattaccattacaggaacacaggaccagatacagaatgcacagtatttgctgcagaacagagtgtgaagcagtattctggaaagtttttctaagactagtgaagaactgaaggagtcctgcatcttttttttttaatctgcttctgtttaaaaagccaacattcctctgcttcataggtgtnctgcattggaggtgtagtgaaatcttggctgttcaccagatgtaatgttttagttccttacaaacagggttgggggggggaagggcgtgcaaaaactaacattgaaattttgaaacagcagcagagtgagtggatttcatttccgtaatggtcggggggtttaaaaaattccccccatgtaattattggtgaacaccttgcttggtgggtcactgtaacattgggggggtgggacagggaggacaagtaccaatagtccacatgtccctggcatctgttcagagcagtgtgcagaatgtaatgctcttttgtaagaaacgtttatgattttcaaacataaattttagtgaacctatttcgggggccattttttttaaagacagccatttnaacatgggggtgaatttccaaccaccccaaattaaacactagtttaatttccagcctcctggtggaccatattagtgctccttgtgggcatggcaaaataatgggcaactcgtccggggatccgaaggctggaaccacatggggggagaaagcaaaaatatacgcgtaaaaagcgggaccgggggcggaatgtgccccttaaccactctgtgcgccacaggggccacacggggcgtacgctaaccaatcagcgcacttctacatagtcgggcagccactataatcagaacagcgagacagaagagcgcaacgatg

SEQ ID NO: 580522 - DNA, 685 bp, Homo sapiens
  misc_feature (610)..(610): n is a, c, g, or t
  misc_feature (681)..(681): n is a, c, g, or t
cccggaaattcggccattatggccggttgcaggggttaacgcctgaaatcccagaattttggaaggccaaggtggccggattacttgacggtaggagttgaagaccagcctggccaaaagggggaaaccccaactttactaaaattccaaataaatgggctgggtgtggtggtggccgcctgtaatcccagttattaaggaggctgaggcaggaggatcactggaacccggaaggcagaggttgcagggaactgagattgtgccattgcactcaagcctgggcaccagagcaggactccatctcaaaaaaccaaaaaccaaaaaaaaattattattaaaattaaaggaattaaaaattaaaggttttttaaaaaagcaatctaattgccatcacataacatttctgctctgtacagttaaagccagccaaaatcaggatggaaatctacaaaaatctaaggaaaggaaaccattgcaacccaccattactattcttaagtaatcaattttcccatggaaaaaaaattggaaacctgttccgacaggcaaggactttgaaggaatgccatctacattctcttcctaattgaaatgccccaataacttgaanataacccctctaaagattggaggaggccccgccagtgtggctcatgcctgtatttccatctttgggctttnagcc

SEQ ID NO: 580523 - DNA, 1636 bp, Homo sapiens
  misc_feature (146)..(146): n is a, c, g, or t
  misc_feature (296)..(296): n is a, c, g, or t
  misc_feature (299)..(299): n is a, c, g, or t
  misc_feature (323)..(323): n is a, c, g, or t
  misc_feature (503)..(503): n is a, c, g, or t
  misc_feature (853)..(853): n is a, c, g, or t
atgcgcgacgcttccatcaaaggacgtgcacagccttatgatcccaatttttacgatgaaacctatgattatggtggttttacaatgatgtttgatgaccgtcgcggacgcccagtgggatttcccatgcggggaagaggtggttntgacagaatgcctcctggtcggggtgggcgtcccatgcctccatctagaagagattatgatgatatgagccctcgtcgaggaccacctccccctcctcccggacgaggcggccggggtggtagcagagctcggaatcttcctcttcctcncanccacacacaactagagggggaganctcaatgggctatgacagaagagagggagacctggagaccgtttacgacggcatggttggtttcagtgctgatgaaacttgggactctgcaatagatacatggagcccatcagaatggcagatggcttatgaaccacagggtggctccggatatgattattcctatgcagggggtcgtgnctcatatggtgatcttggtggacctattattactacacaagtaactattcccaaagatttggctggatctattattggcaaaggtggtcagcggattaaacaaatccgtcatgagtcgggagcttcgatcaaaattgatgagcctttagaaggatccgaagatcggatcattaccattacaggaacacaggaccagatacagaatgcacagtatttgctgcagaacagagtgtgaagcagtattctggaaagtttttctaagactagtgaagaactgaaggagtcctgcatcttttttttttaatctgcttctgtttaaaaagccaacattcctctgcttcataggtgtnctgcattggaggtgtagtgaaatcttggctgttcaccagatgtaatgttttagttccttacaaacagggttgggggggggaagggcgtgcaaaaactaacattgaaattttgaaacagcagcagagtgagtggattttgaaacagcagcagagtgagtggattttatttttcgttattgttggtggtttaaaaaattccccccatgtaattattggtgaacaccttgcttggtgggtcactgtaacattgggggggtgggacagggaggacaagtaccaatagtccacatgtccctggcatctgttcagagcagtgtgcagaatgtaatgctcttttgtaagaaacgtttatgattttcaaacataaattttagtgaacctaaaaaaaaaaaaaaaaaaaaaaaaaaaaaaaaaaaaaaagaaagaaaaaaaaaaaaaaaagaaaaaaggaaagagagcagaacgcagaagagaagaaacgacgagagggacaagagtgcagaaggaagagaagaaggaaaacaggaacacacagaaagaacggaagctaaacaaaaacaaaggggaaagacagagcaaaaagacagcaaagcagagaggcaaaaaaaacaaagagaagaatacaaagaagaagaaaaaacaaaacgagaggagagaaaacaacaaagaaccaagacaacgaacaaagacagagagagaaaagagacaaacgaaaagagcgagagagaaaaaaaaaagagaaagaggaagaaacaaacaaagagagcacaagaaacaagacgg

SEQ ID NO: 580524 - DNA, 249 bp, Homo sapiens
caggatcaaggtgaaagggagaaccccatgggggaacttcgcatccgcaaactctgtctcaacatctgtattgggggagagtggagacagactgacgcgagcagccaaggttttggggcacctcacagggcagacccctgtgttttccaagctagatacactgtcagatcctttggcatccggggaatggaaggattcctttcactgcacagtgcagggcccaggcacagaattttggggaggctttag

SEQ ID NO: 580525 - DNA, 415 bp, Homo sapiens
ggggcgactctagaggaccccaagctccaacaagaagaatataagattactgaaaaggaactgagaaacaagagaattacaaacactggttttgaaagactaaactgacagactgaaagagaaagagaacacaggtatgaaccccagacacagccgaaggtaaaaacaactaatctaatttccttccttccattaaaaaatggaaaaaacttaaatacctcaccactgcctgcgcattttaccagaacctcaaattcccagctcagctgatgatcacagacaaacagcaacctcagcacaaagctctgtgcaatcctcagcactgtgaggccaatggcttggaatccacaaaaactgagctccaggcacacttgcccatcctagtataaaatccagaggaggttactgccttctc

SEQ ID NO: 580526 - DNA, 257 bp, Homo sapiens
cattccactacttgagttgtccgatctgtagatccactaatgaatatttgtctactcatttgtagatgaccatactccatctgtatttcccactaatgttctcagacatttgcccgggactggagacccctcttggcaagtgtcgtcgtcagaaccactaactattcggttaccacagtaactgtaagcatgtgatcacgtcatcatcatgtccgttgcagcaccttaggagatttgagttctcctcgcctccagtt

SEQ ID NO: 580527 - DNA, 736 bp, Homo sapiens
tgcttagggtttgatttgctttcagatttatggatgcaaatccctgaatatttgtgaaaataggctatgaggcctgcattcagtagcaatagtaactgttttcaaaagatgcatacaatatgcaattacagagctgagggtacaggccatccttgcgttaggatttagcatagttttaacacgcagtcaacttttgagcaccaataatttttagctctctttgcttgtccttcggaattgggagaacactactatttttatcagtcaaaagacttttagcagtggtttattcaggaaaactatttatagggtagagagaagagactttctggtcatagtgcaatcgtgcagggcaagctatttctgtgttaaatttggctgtattatttgctgccactgactttgggacatcagcctggcatattctatcaaaaaagtagaattaacaaaatcagcagttgcaaactgtgatttagaaaaggggcttctattatacttcatccttatggcatgcacagactgagaaacatatgaccccaattctttttacaatcatgacaatttgtcaagtcacttcaaaaaagtttatagaaaaattgctgtaaatgcaggaagtgcacatctggagttgaatgccaggttacatttctgtgtggtgccaaatagcttgattaagaagcacataaacccagctgcactcagtgatccagatatttgagctgcatagacatgggaa

SEQ ID NO: 580528 - DNA, 232 bp, Homo sapiens
  misc_feature (180)..(180): n is a, c, g, or t
ctcatcaacacttacatctccgtgcccaaggagaacagcacgctcaactgcgccagcttcacggcgggcatcgtggaggcgtgctcacacacagcggcttccctgccaaggtcacggcgcactggcacaagggcaccacgctcatgatcaagttcgaggaggcagtcatcgctcgagatncccgctggagggccgctgacctgccggagataaaggatacagagagcccctc

SEQ ID NO: 580529 - DNA, 242 bp, Homo sapiens
caaggtgaggccccagctctgagtcagcctgcttgttggaaccgtccgggaccctacccgctaccgtgtccatttcatcgcggactgtgcggctgggggtggggggcgggactctcacggtgacatgtttacagctgggtgtgactcagtacagtggattttttttttatttttttttttttatctttttttttcccttttttttatttgtttttatttacaaaccaccggggtttccgggc

SEQ ID NO: 580530 - DNA, 1825 bp, Homo sapiens
taccaagtttagagttggggttctagagcgagtacgtagcgtttataggtttagctgtactatattcctatgtccctagctgcggggagcgtagaggcagatacggccggctttgctccaggcctacaggagtaggtgcaggttcgcagtccctagtacaatcattctccgatgtccggtcagtctgaaatctctgatttgttggtctctctgtggacatgtgtgttgtcgcttgtgtgctcctcatgactcttttctctcttttctcgttaatctccgctcggtaatgctgtgatgtcttttgtctttcttgtttggtccttgggtctttgtgattgtcggtgtgcttgtgtctggtttcgttgttggtcttgctctctttcctcgctgtacgtttcctcggtcatgtcgcgtttttgtcttttgtttgtctttctgtgctccttcacggctgtccgttggttcgtttgctggtctcctgttgtttgtgttgtctcctttcggcgtatcacttggtggtctcttgtgtgcttgtgcgcgcgtttgtgcctgtggctctgttctgctctctgttctgttgtgctctgctttgtcggttcgctacttttcatctctcccttcttcgtcgtgcctgctttttgtgtgttactgttttgtctcctgttggctttgtgcttgtttgtgtcttgcgtcttttcttgtcctgggcggcacgtgttccttatgtgtcgctcttgatgtttgctctttgtgtgtgctgtggcgtctactctgtgcgtttttcttgttctgtgttcctgtgttggtgcagtcttgcgcgcggcgttgttcccagctgtttggtgccttccgttcgcttgcgcgtacgtgctcggagctctctcgctccgtcttgtgtcgtctaccttggtccacttggttctttctctgagggacacgtttttctcggctagtttgtcaggtaccttctggtatgtcctttgtactctccagtctagtgctttggtctccgtcagtttgtgcatcgcctgtgtcattgctggtgtattttgtgcgttacgtcctagcggctgtgtgcgtttgctgtcgctgtgtcgcagcgtcgcccgcttcgtgtggccacgtggcagacgcgtctgcttatcggtcgtgcacgcgcttccgctcgtttggttccctagcgtcagcgtttcgtccgctgtggggctgcgctgctggtctcgctgcgtttgtctctcgcgtcggtacgtgtcgcgacgtctccgttgtcgttcctagggtcgctcgtcctctgtctgcgtccgtgcgtgcccgatgttcctagtggtccgttcacgtgctggcctcgtttcgttgtgtgtgcgctgcctcctctcagtgcttctcgtccgtcttcgcggacacagtggtgtctctctcctgtctgtcctgtcgtgctattatggtcttggcctccgttgtgcgcccgtacgtctactttctttggtcgttttccggttgcgtctctgcccgtttggctccccccgtttgtttagcgtcgtcgcttctccgcttcctcggtcgctctgttgctcgtagtgctgggggtgcccgtgctgcgcgtggcgggcgtctcaaggacgtccggtctctcattggagtctgtcggccgggtcgcttgcgctactcgtcgcgtgcccttgttgcgtcctgtctactgagtgtgccctgcctgtcgcctacggctgtctctctcagctgctcggtggcgcctagttgtcggtgcggtgtttattgcctcgcgttctctgttcgtcgtcgatgtctgctgttctgctgctgtgcc

SEQ ID NO: 580531 - DNA, 314 bp, Homo sapiens
aacgtcagcactccttggtggagaacaagaaagtcagctggtggtgattgcacacgacgtggatcccatcgagctggttgtcttcttgcctgcccagagtgtgaaagggggatcatacacctggcaatacacaccctcactggggaagctgaacgtccagatcacagaatgatttgaccttacctggagctgagagaaatttagagagctgagcaaaatactggggcaaaagaagcagtaggaagagccctgtgggaaatcttggtccccatggcagccatttctgactttgtctcacaaggaggtgctgacgg

SEQ ID NO: 580532 - DNA, 1225 bp, Homo sapiens
  misc_feature (750)..(750): n is a, c, g, or t
  misc_feature (922)..(922): n is a, c, g, or t
tggggggtaaagaaacagtttaattttggtttaaacgattttatttccaagaaccattggaccagggaacaatccctcccactattttttttgggctatggattatctattaaaggttccacaaatatccatggttcttggggaaatatacatctggggagaattcactggtattggacgcccatattcctggatatttcaatggggtgacacagagacacaaagaggtgctctggagagagaggggtctggaagatgtttcttacacgagggaagatgttagagtgcgggggagagtgtagaggccaggacacaacacctctatatatccctctgagagagtgtgttctgggcggcccaaacactcttgtgtttcaaaagcacgcaaccagcgcgcaaatatttactcgcggcggagcgccattatctctctacagacaggagtgtgtgtggtgtctccgctggaggagatctcaccacaaggagcacatctaccattggagcgcagactaccgcatgggctgatagaagagacgatctgtgatatcagcgcgcaaaaaaacagagggagcacacatttgagaaagggcggtttgttatctgcgctctgcccgctaataagatggtgggggggtactccccctagatgttgtggggggggggaggaccaaaaattttgttggtggcctactaacaacgacacacatccattattactacgccgagggggtgttgtgtagtctatacaanaaaattgttgactcctctttctgatattaaaacaccatggtggtgaggcaaaaatgctaccataaattatccttccccgccaaatatgctacagttgatcatcctagttgtaatatgcctccccttcgaatgatgaaggaaaacaactgctgcggcggagaatgaatgttgnccccttaattaagcggccacaaaaacagaagacagagcgcgccgctgtggtaatctaaataatgttggggcgataactatatagtgcagtcggccccatacataaggctaataagaatgatcagcacacatgttctccaagactggtgggcatgatgtggcagcctatacaaagagtgtgaaaaagaagaaaccaagaggggggagacgcggagacaaaagaaagctggggcaaaacaagagagggtgccgccaagacaacgaggcggtggaacagaggggggggataattctgcaccgacaa

SEQ ID NO: 580533 - DNA, 165 bp, Homo sapiens
accaagaaagagagctgagttttggtgtcacgtgcctgtggtcccagctccccgggagacttgaaggatcgcctgacgcctagagtttgaggctccagcgtgttatcatcacatctgtaaatagcccccacaaaaaaaaacaaacactgccctatatcctacaca

SEQ ID NO: 580534 - DNA, 295 bp, Homo sapiens
acggtgcccagcccataagtgaaacttaatttgagcctgtattaaagaaaaacagagctgaagctcagccagccaaagcagccaagaaacttacataactaaggcttctccgcgggacagaccgaagcaggcaacagtgtgactgtcaccaatccaagcttttctttggtttacttctgcatccttcttatcaaagccttcaccctgcattccctcaaccacttctggtttgcagctgctcaattcaagaatgtatttgctcaaataaactattttgccttttaaaaaaaaaaaa

SEQ ID NO: 580535 - DNA, 1227 bp, Homo sapiens
  misc_feature (161)..(161): n is a, c, g, or t
ggctgagtaggaacgtggatggaggcacgcaatgaagcatgccgctgtgtgtcatctcaagacttgaatttactcgcatatcgcacaagactaacgtgcagacgtcactagttacataggtaatcctatgcgtggcacggcaccgtccgcttactgactcnttacctggtctctaaaaataggggcgcgtgtactcttaacacaactcctctagaagagaggagggattagtcaacacgtggtgttgagctgaccgcgcgggcatgctgggcgtcctgtatctttagcaaaaccatccatccctatgaatgatgcacagagccctgaggggctgggctgggcgtgggctgagccacctggtcttctctacagttcacagaggtctttacagctcatttaatcccaggaaagcaggcatcaagagctagaatgtgaatataactttcgtggaccaatactaagcaataacaagaagcccagtggtgaggaaagtgcgttctcccagcactgcctcctgttatctccctctcatgtccctccagggaaaatgactttattgcttaatttctgcctttccccccgtacacacatgcacttatgggcctttaggttatagctggaaaaaacaaaatagctacctacaaacctggaatttacccaagaaacagaaatgaccacgtgaaattgcctctgtccaaacattccatccgtgctgtatgtgtactgtgtgtgagtgtgtgaagacgcaagtcatcttgaatatgggggtcgacaccacataaaggacagatagggacgcatccaacagagggcatgagcaccgggaacaaccctatcggctggaagagatacgcacatttgcatggaccagcaactcatcattctcaggagagacactacacgctaataaccagggaacacaaacacaaacgaaaacgaccgccgcgccccacagaatgcgcggggggagcccacgaagcgctaccctcgcgacagaggaggcccacagagggggaaataacaaaggcggccgacaaacgacgcgcgcacgaacgagctgcctgcagcaaaacacgcgcgaaactaacaacaaacacgacgacgacaaccaacagtgacaacggcagcgacagaatataacactaacgcagcagcaacaaccagcgagcgacaaagacaacaatctagcgacaccgcacactagcagcgaaggtgcgaagcgcgcca

SEQ ID NO: 580536 - DNA, 310 bp, Homo sapiens
  misc_feature (2)..(2): n is a, c, g, or t
angtcactgtgtatttttaagtgttgatacattaaaagtcgctttatggaagatgagtaaattttttaaatacttggaaattttattccttgttaacttctacagatcagggcatgcaaccaaaagcagcttaaatgaaatactttaaaataaaatatcaggaagctatttttagatttcctctggcttatgtttctactttaggaccctaattgttcttgtaataaaaacgttatttgccgtgaattcaatggctcagggtaaatttttgggctaaataatttaaaggtttcctccaattgacctatcc

SEQ ID NO: 580537 - DNA, 198 bp, Homo sapiens
gagcgcaatatgacggagtgcgcagcatcaggcaggaaactttattgaatattcttttctattggtggtagggaagttgagaacctaaagcgtatccaggttcagagaggagagagatccgacaggaagagatgagcacagagggcccaccatcaggagagagtcgatgacagggggtcctgagagcagagggactga

SEQ ID NO: 580538 - DNA, 151 bp, Homo sapiens
tttttttttttaaaaaaaaaatttttgggatcccggcccctcccgggggggggaaaaaaagatttttaaatttgggccaaggttaatttaattttaaatgttttaaggaaaaaaccgccttttttaaaaattaaaaaaaaggtttttttta

SEQ ID NO: 580539 - DNA, 230 bp, Homo sapiens
ttgtcacggttggctctcgtccacggttggctctcgtccatggttggctcgtcgtccagggttggctcctcgtccccgtgttggctactcgtccacggttggctactcgtccccggttggccactcgtccacggttggctcctcgtccacggttggctactcgtccacggttggctcctcgtccatggttgtgctactcagtccacggtttggcatcatcagtctcacgc

SEQ ID NO: 580540 - DNA, 282 bp, Homo sapiens
tctagaggatccctagtgtttggtttagggccgcttatgaatgattccccctagtttgtgtagaatgtcgtttcttggtaaacgcttgcgacagtgcgtgaatgaccaaaaaagagtgagggtgactccctgccaatgagcagtatagtggcagtgttttgtttcttatattgcccctcacgccaacagaaacggatgaatgttctaatgggccttcatattcagttaatactgatagtgctcgccccagtatccaaaagaaaggaagtataaagcgttgag

SEQ ID NO: 580541 - DNA, 382 bp, Homo sapiens
  misc_feature (37)..(37): n is a, c, g, or t
  misc_feature (59)..(59): n is a, c, g, or t
  misc_feature (78)..(78): n is a, c, g, or t
  misc_feature (110)..(110): n is a, c, g, or t
  misc_feature (170)..(170): n is a, c, g, or t
  misc_feature (347)..(347): n is a, c, g, or t
  misc_feature (358)..(358): n is a, c, g, or t
  misc_feature (368)..(368): n is a, c, g, or t
gggtccctctgcccccaccctgcccagggctccccancagcctgaggcccctaaggaanaacagccctcaatggtgantcctattggtgttatgagttgtgtccccaaanagatatatcagtgtcctgacccacagtacctcagaatgtgactgcatttggagatagggntcttccaggggtaaccaaggtagaatgaggtcgttagtgtgggccctaatccaatatgacggctatccttataaaaagaggaacatttaggctggatacagtgctcatgcctataatcccagcaccttgggaggctgaggcaggaggacttgcttgagctcaggagttcaagaccancctggggcaanatgtcgaaangctgtgtctaccaa

SEQ ID NO: 580542 - DNA, 252 bp, Homo sapiens
  misc_feature (6)..(6): n is a, c, g, or t
  misc_feature (61)..(61): n is a, c, g, or t
  misc_feature (116)..(117): n is a, c, g, or t
  misc_feature (218)..(218): n is a, c, g, or t
  misc_feature (235)..(235): n is a, c, g, or t
gaaaantgagcaacccttttttccttgcccccgttagtgaacctgtggaaagagataggcncatctctggagttgatcgttactatgtgtcaaagggtttggagaacattgattanngaagcattttcctgattgatgaaaaaataactccagttaatggccatctaccctgctagaagggttacagtgtattatgtagcatgcaatgtgttatgtangtgccttaactaaaatnaaattgaaaaaattgca

SEQ ID NO: 580543 - DNA, 129 bp, Homo sapiens
ggacccatagagtgatcactccaacccctaatggggttcagaagcttatataccatattgaggtgacaggaagaataggggcttagattgttgacaaaacaggttacaattgccaaaacaggttatggg

SEQ ID NO: 580544 - DNA, 314 bp, Homo sapiens
agcggcccctactcactactaaattggcgcgccggctcgacttccactctgcccgatctcattcctttcgattcccatccactacattccctcctcctccactcggctcgattccatcccattcccttccattccattccattccacttccattccattccattccattccgttccattccattctattccgtaccattccattccattccattccattccattccattccactcttgttgattccattcctttccattccgttcggtttgaaggcattccattccattcgatgatgattgcattcggtcgacg

SEQ ID NO: 580545 - DNA, 355 bp, Homo sapiens
  misc_feature (268)..(268): n is a, c, g, or t
  misc_feature (325)..(325): n is a, c, g, or t
ttgatcatggcacaccctttaatgggtttccatcaatcccaccagctcccatccagcgcgaagcctgcctgcgatccggcagggcaccatttccggcctcggtcccccacccttcaagatgccgttcaaggccacctgacaaccaagttgggggtaaaggggcacttcactgtccgctctcagcttggtgaatggacaagggtttgggaacggcacttggagggccctctagatatagagttaactttgaaaaacaacaagaacaagnaagcgcgcttagatatcctgaggccagctacgtaccagctttcattgtataaacgtngtggcatatagtctattacggattattcgg

SEQ ID NO: 580546 - DNA, 299 bp, Homo sapiens
  misc_feature (48)..(48): n is a, c, g, or t
  misc_feature (70)..(70): n is a, c, g, or t
  misc_feature (98)..(98): n is a, c, g, or t
  misc_feature (108)..(108): n is a, c, g, or t
tcgtgccctttttgcaccccacttggcgtgtatctcagggacactctnactctcatcatgccctcaccgntctattgtatacgcttcacccagttctnaattattttnccgtttttttctcaatttgtcttgcataatcatcagtatttttcctttttttcttcgaattagcattaaattttattaaatttccccttcccctagcgtaccgtctaccggtatcatcggtcattttcggttgttttttcttgtctccctgattcctttgacccccaaatcgtatgaatttgaaaatgttg

SEQ ID NO: 580547 - DNA, 740 bp, Homo sapiens
  misc_feature (10)..(10): n is a, c, g, or t
  misc_feature (13)..(13): n is a, c, g, or t
  misc_feature (389)..(389): n is a, c, g, or t
  misc_feature (584)..(584): n is a, c, g, or t
ggcattacantantggggtcgattacatttcttacagaaagtatggtgtaagaaaatggcatgggatttggaattggagcctatcctgggttcaagtttactttcccactgccgagaaagtctatcacacagcaatgtcactttctacaaattactctcagtctctgtttccctcagcttgttacgtggaattaaaggcaataagacgcacaaaagagctctatgagcagtaaatcactatacacatatttgttatctacagacagcaaagaacactcacatgtaacttgtctttgcaaataatggacatagtttatctttcagatcatgtatatcttgcttataatcccggcacctaacacagtgtctggctcacagtaggcactcanatatttactaagtgaggtaaatggatagtccccccttatccacagtttcaatttccatgttttcagttacccacagtacagtacataccttcaatatagtacaatattttgagagagagcaagacggtgtgtgcatgaaagagttcccaagcgcatattcacataacttttattatagcatactactatcattgntattaatctcttactgtgcctaatttataagttaaagttaatcatagttatgtataggaaaaaatatggtgtatataaggtttggtacaatctgcagtttctggcatccactgaggagcctgaaattatccccacaataagggagactacttgatt

SEQ ID NO: 580548 - DNA, 813 bp, Homo sapiens
actaccaggagccaacatgagtctcggggactgaactgctgtggcccggagcagcgctgctggtgctgttgggggtggcagccagtctgtgtgtgcgctgctcactgcccaggtgcaaagaggtcagtagaaaatctaccagcagagaagtctgcgtgaggaccaagcagagcttgtacggggtcccggtacctactccttgggtcggcgcaggcatggccaggaccgcctggtcggacatgggaccacactgaggatagggatcgaagctgttgcaattctaccccagcctggaggatccaagcatcttccaggtaccagaacttcagcagaggaagcagacacgggtcggaggaagcctacggtagaccccattgctcatggcatgtattacaactgggggcggttctcgaagcccctcagaagatgatgatgccaattcctacgagaatgtgctcattgtgcgagcagaaaagccacagagacaggtgcccaggaggagggcataggtggcctctgcagaggggacctcagctgtcactgggcctgaagactggtcgccacttctggtctctgtccctctgcctccccggaagcaagatgaggaatctgaggattatcagaactcagatcagccatcagtggcgcgagttcatggaaggtcatggggcaaactccgagagagaaggatcccctggccggtgggaagccagacgaagaggaggggaaccggatttcgtgatggggcaggggggggcgggaagcctagggcgaccaagaaaaagggcccgggcagagggccggggttgggca

SEQ ID NO: 580549 - DNA, 1077 bp, Homo sapiens
attcaaaatgatatttaaaagctcagtgagatacaagagaagacatattaacaacacaaaaaattgaaaatcaattcaagatatgaatgagaaattcaacaaagggataaatattataacatttaaaaataagcaaacagaaaccctggaattaaagaattcaataaatgcaaaatatacatttgatggcttcaaaattagactaaatcaactggaagaatgaattatagaacctgaagacagatcttttgaaattacacaccaaaaaaaactgaataaaacaataaatacaagcatatttgacctatggggcaccattacagttatccaatattccaattttgagatgtgtccccacgagtgtgacagagacggggcaggggtatagaagcagtctgtttaacaaaataatacctaaaaacttgtggaagtctacgaaatttatacagccatatataggaagctcagagatccccaaatagatacacctcaaaaagttttttttccaagtcaaactgtcaaaacgtcaaagaccgagatttctaaaaacagcaagataaatgcattctactcacactatcaccgggatcctcgtcagacaacactgtgaattttttcacggagaaaacccatgcagggtccacgaagcacactgcacattgacctattttaaacctggttgacacgacacagcaacaacaaacaacccctggacattcaggagaaattagaatggccctcaaacataaaggccttcaatacattccagaaacacataaatacatccacaaggaacacgccaaacattaggggggaatcatgattaacccaagctaaagccgggggcccccccaaccgaaaacgcgctacacggaacaatcccccaagccggtgcgacaacaacagcggaacacaccacaccaccgaaaaacacaccccgcgagactaaccacacgacgcggcgtaacaccgaccacgcatcccacgcagacgaggcacagcgagcgccgactccccacgagaccacacaagacaacacagcaagcaggcgcgcacgaccacgacagaaacacgaac

SEQ ID NO: 580550 - DNA, 92 bp, Homo sapiens
gggtgttgttaaacaaacccttaagtttatgtttgagggatggacggcaaaggaacccattttattattaaaaatgaatgattaaaattgga

SEQ ID NO: 580551 - DNA, 1222 bp, Homo sapiens
gcccagtgaggacaggaacagagagtagcatgtcctataataaaggggcttctgggcaggtgcctgggcacagatgtctgtacagacaggtgtgtgggcctagcaggagagagcagagcccagaaatgtctttggcaggcccacgtactgacttgaagctaacagtggcgcatgtcgccatggggttaggcccttgaaaagagtatcctaggtctccagtggcccctcaggacccagggtcccagctgctgctaggcagatgtgcacttgattgagccgcccggccttgccagtcctctcataccccttggaagaggaacacagtgcgctcctacaaagacactgggcgcattaacagcaatcaatggtgcacgagaggttagagaaactagcgggaagctacgcgagtcacgagcggcgtacactatttggttacctcaaaggagtaaatggaaactggcattcctcatataacccccctttttgctatataatcacacttggtaacggcaattcccccacctgttaacactctaaaaacttttgtgggtctggctaggatcgttaaccaaacaacacgaaacaaccaaatatcagtctagcaacaaacacacaatctttccgacacccgacgtagcagacccgccgaagacaccatacttcatgacaaacaccaagcgcacgaggagcccaccccagagccccacgaccacgcacacacgtgcacacgctgggtccaaagagagcggggccaccaaaaagaacaccacgggccacaatagaccatacacgggccggagactaccccccagaaaaaaaaaaacgcccccggataaaacagcgagcgaacatgaacaaaaaagcgacgaggagcgtaccgcgagaacaccgagggcacaatacaacacgggaagacccggggacgcgctaatacaaatacccccgccgcgagggggaccgcgaggaacaccgcagccaaacacgagaacgcaacgacaacaccccacagtagcgacgagcgaggagcgagggagagaaggcagaggagggagagggagacaggggggaggccagggtcgagggagagcagacggaagcgcgagcacgcgcaggggacgcggagagggtgagcagcaggcggagagcggcgtgaaggaccgatagcatacgaggtcgcagcaagaaaaggatcagtatgcgaagagaggagcgtgtggggggg

SEQ ID NO: 580552 - DNA, 307 bp, Homo sapiens
  misc_feature (221)..(221): n is a, c, g, or t
ggtaagagcggtctggtggaactgactaaacggtaccatacatctgtcctaggtagtttttgcaggtagggaatgaacattaatatccagatactcagattttatacccatattctcaactaaaagtggtcagtagttaaataaaactgtgagtagaccgctcttggaggaggggttcattttccaataaggatggctgttggtggcatcaagaacagatntcggagttcccgtcgtggcgcagtggttaacgaatccgactgtgaaccatgaggttgcgggttcggccctggcctgctcaggggtg

SEQ ID NO: 580553 - DNA, 144 bp, Homo sapiens
aatcagtcagcaaaaccttgccctctacttggtctgaccaagtgtaaacatcagcctagacaacttactaccaggtatgcagcttccaaacgagcagccatcactgaatacaatgattcagcaacagatatgcagcagcctatg

SEQ ID NO: 580554 - DNA, 619 bp, Homo sapiens
atttattatgctaagttaagtgggggagttttatttccttttttttgattgtttttggggtgtgggtaacaacttgaactcagggtctgaatcctagcttccatacatactaattatgtaacatttagggaagcacttaaccgctaacataataatcctacaatttttggggcgcgggcaattactatgcggatccattaaaaagaacgcccaacatgttcaccagtgcgcgacaccaaccctttcactataatcttacaaatcatgatcataaataaacaaatcaagtgagaggatcaatcccaagggccccacttaaccaacctctaaaaatatttagcacccataccaacatccgacctccctctcatctccccacgcaccattcatacccccataaaccccccccaatacgatcaaaacaattttaccacttcttcctcaccttttacgaaaaaaatcttctactctctcaccacacacatttatttacttaataaaataaacggaccccctcccccgataaccccctgtaacccctccacaaccgggtccatataaataccccacccacacacccccccaccacccgcccctctctatctcaataccaaaaaaa

SEQ ID NO: 580555 - DNA, 365 bp, Homo sapiens
tgctctgttactgactcagtgaacctggctgagcccatggaacagaatcctcctcagcaacaaagactagcactccacaatcccctgccaaaagccaagcctggcacacattttcctcagggaccatcttcaaggacgcacccagaacctttagctggccgacacttcaatctggcccctctaggccgacgaagagttcagtcccaatgggcctcctttaggtgtggcctttaaggagcgccccacagctatgcttgtttcctttaggaatcctttcctaccaaccctggtcatttcttagcctgacagcaaggaacaacatggggtactcacagggaatctagccctgcatacatctatcaccc

SEQ ID NO: 580556 - DNA, 425 bp, Homo sapiens
aagccgtatctacaaaaaaataaaaaaattagccaaacgtggtggcacgtacctgtagttccagctactggggagaccgaggttggaagagggggttgggggcatctcttggcctgggaggttgaggctgcagtgaaccataattgcaccactgcactccagcctggatgacagagtgagaccttgttaagaaaaaaaaaaaaaaaaaagggaaaaaaaaaaaaaaagagaaaaaattatacccagctcccatagtcccttctaaaatctgtgtcaccaaaaattggtagaccaactttggaaattgggcaattgttctccgtgggtgctccttttacaaaaattgtcaggaattgtgctctaaagtataaaagacccttctcctataggttggctcttgatttcatacaggaaattctggtgcc

SEQ ID NO: 580557 - DNA, 313 bp, Homo sapiens
aaaaatttgcagcccttttaatacccaaagcaaaaggtaataggctggatgggggaccaaccttaattcacatacagagcccaagtttagatccagactaattgggaaataagttaaagtttgcagggccttagggctgaaagccaaaaacactgtccttttggcagccatggaagcgaggatttccttttttggtttaagggcatgaaccccttcggttgctccatagcctggggggcctgcagcacggccactgccttgtttattttggcatggagggattctggaaactccaccatgagcaacagctccg

SEQ ID NO: 580558 - DNA, 958 bp, Homo sapiens
  misc_feature (321)..(321): n is a, c, g, or t
  misc_feature (348)..(348): n is a, c, g, or t
  misc_feature (395)..(396): n is a, c, g, or t
  misc_feature (417)..(417): n is a, c, g, or t
  misc_feature (443)..(443): n is a, c, g, or t
  misc_feature (474)..(474): n is a, c, g, or t
  misc_feature (479)..(480): n is a, c, g, or t
  misc_feature (486)..(486): n is a, c, g, or t
  misc_feature (507)..(507): n is a, c, g, or t
  misc_feature (544)..(545): n is a, c, g, or t
  misc_feature (547)..(551): n is a, c, g, or t
  misc_feature (555)..(556): n is a, c, g, or t
  misc_feature (560)..(560): n is a, c, g, or t
  misc_feature (563)..(563): n is a, c, g, or t
  misc_feature (573)..(574): n is a, c, g, or t
  misc_feature (577)..(577): n is a, c, g, or t
  misc_feature (579)..(580): n is a, c, g, or t
  misc_feature (583)..(583): n is a, c, g, or t
  misc_feature (588)..(588): n is a, c, g, or t
  misc_feature (591)..(591): n is a, c, g, or t
  misc_feature (596)..(596): n is a, c, g, or t
  misc_feature (607)..(607): n is a, c, g, or t
  misc_feature (615)..(615): n is a, c, g, or t
  misc_feature (623)..(623): n is a, c, g, or t
  misc_feature (625)..(625): n is a, c, g, or t
  misc_feature (632)..(632): n is a, c, g, or t
  misc_feature (644)..(644): n is a, c, g, or t
  misc_feature (654)..(654): n is a, c, g, or t
  misc_feature (660)..(660): n is a, c, g, or t
  misc_feature (662)..(662): n is a, c, g, or t
  misc_feature (666)..(666): n is a, c, g, or t
  misc_feature (671)..(671): n is a, c, g, or t
  misc_feature (683)..(683): n is a, c, g, or t
  misc_feature (732)..(732): n is a, c, g, or t
  misc_feature (763)..(763): n is a, c, g, or t
  misc_feature (813)..(813): n is a, c, g, or t
  misc_feature (907)..(907): n is a, c, g, or t
gtgagagccaggtgttctgttcctgctcctacgatgccaccacacactttgagacaacctgcaacgacatcaaagacatctacaaacgcatggctggcacggcctttgactttgagaacatgaagcgcaaacagaacgacgtctttggagaagctgagcagtgattgtggccgcccccagcccctgctgccccagcctgtgtctgttctcctcgagggctccagcatcctctgcttcccccaccacgttcccatcacccacctcattgatccactgaccaaatccttaaccctagcgatggcttgggagatggggggttcnatagcatcctctttcttggccctcccntatcctaggaaaagagggttcctctccttgtgtgtgtctcttcccannacccctaattcttctgctctntttgggaagacgtggaggaaaaggtnacttctgcccccaccgctcttacccccactntagtnncctttngagatgcccccacctccccanaaccaactctcgcgtgttggagagaaggggccctccnngnnnnnagtnncatnccnccccgataanntantnnaanttatnaantttgncccaccctttntgagcctncagccttncngtgtggnctgagggctgtngagtgagctnccccancncctnccagnccttggccagcntgggggagtggggaaggcttgggcatggccccgttggaggttgatttgntgttttgtttcttgtctttgtgttctgtggnacttgctgagagaaaagaaaagtgagccaagcagaaggaggtgggaaaanggacccaaaccccagtgtgccctgccccatgccctcctcttaggggtgggaaacccttatcttgcaaagtgaatgtgtccccttccccaccctntagtgtatttcacagaaaacgaggcctcccaataaaacggttgaaacatga

SEQ ID NO: 580559 - DNA, 712 bp, Homo sapiens
ggaagtagctacagttgtgtcccttcctgctttgtagcgtgtttcttatgcttattgtcgggacgtggtatctccaccattatctgtctgcacgaaagatgtcttgctgttcatcgctgaacattttgaaatgaaatgcagaattttatgtgactgctttttagcctcacagattatgctgtgaattttacaaaaatttatttgctttgtagataatttattgtaccaaagctgtggtgatagcagcatagagtgtctgtgaaccaaataatgtagcagttcatgcacatttgatcacatagggtgtacactagacgcattatttacaagtgtcagtggaacaagttatgtgcatgtacgtatgtgcttaagagcaaaacctggaactgtagtggaatccatatgccaatagcagttgtacagcaatctgtgtacttgaatcatagtaggattgacatctaattgcaagattacaacatgctgttaccattctaagtgtgtacaggcttctgaaggtaaagggacactggatacagaatctatggaaccagcagtggatgctgtattcctgattagacgtacttgtaaatttgaaagcaagatcttgagttgcagcaacaggtccagagtatgagtgcgagcaaaggagaactctcatgcgtgatctgagcagataggctggtatgtaaagaggtgcctcgtgtggagatga

SEQ ID NO: 580560 - DNA, 134 bp, Homo sapiens
tctgttgtactctgcacttttgcagctctgggccgtgctgctgcacctctatctgcgcgtacctgcagcagtggcttcaccttggtaaacagccgccaccacgtgccagtgtctcagctggagggggccgcgcg

SEQ ID NO: 580561 - DNA, 91 bp, Homo sapiens
ttttaatttaaaattatgagttttcatttttgtttaccttaagtgatgcttaaaagtggcatgtattaggcacattaggtttgttgaagca

SEQ ID NO: 580562 - DNA, 600 bp, Homo sapiens
  misc_feature (15)..(15): n is a, c, g, or t
  misc_feature (24)..(24): n is a, c, g, or t
  misc_feature (98)..(98): n is a, c, g, or t
  misc_feature (512)..(512): n is a, c, g, or t
gacgagtagtcgagntatacactntatttttcaatgtacaattatttttcactacagatcgtccgtgatgcaatatatcaaagtacaatccatatgtntctgagtcctgaatgaatacttaacaaaaatgttcatatttgtccttgaacatgcagtgtcttgtcctgcaaacacatacggacttttcattttcatccacatgaagttaaacatacaaatgcactgctccaaaaataaaccgttaggtgcaagaaaactacagagcaagcaatagtgcttgcgcgagagtctgcacccaccctccaaagaaaagatcaacattggaacaaagaagactctctcataaggtggacaattcactagaaatccagaaacccaaaacactgtgaaaccaaatccatatttctttggatttaattactgcaaaatccaattgttgagactctccccatgtaaattgttttcatctgttactcatattacagccacaattcacctgtttcttcccttgnttttactttattatttacgatgtgagctggtgagaaattataagaatgatttctataaaatttagtacaccaatttttagatgcaagt

SEQ ID NO: 580563 - DNA, 845 bp, Homo sapiens
ctaagcacagttctattggctccttatcgagccgagctgggtcagtcagagaaagcttctaggtaaggaccacatctacaacgtaatcgtcgacagcccatgcgagttgtaataatcttctctcatatggtacgtacccatcataatcggaggctgtggcatactgactagttcccgcataataagtcggtgcccccgatatgggcgtttccccgcataaacaagataagcttctgactcttacctccctctctcctactccgtgctcggcagtctgctatagtggaggccggagacaggaacaaggttgaacagatcataaccatccgcttagcagggaactagcatctgcacacctggagcctccgtagaccataaccagtccttgctccttacgactctatgcaaggtgtctccgtcgtatcgttgacggggccagtcagattgtcagtcgacaatcgaattatcaattataaaagacccccttgccatagacgccaaatagccaaagagccccgtcttccgtcgtgatccgtcctaagtcgacagcaagtccgtacgttctccgtatctctcccagtcctagctgctggcactcactatactactaagcagaccgcaacgctcaaacacgcaccttcgttcgatccccgtccggcaggtagggagagcccagttcctataccaagcatcgtattctgattttttcggtcacccgtgaaggtgtatatacgtgatcctaaccaggcttcggaaataatgtcccatattgtaacttaactactccgggaagaaaaaagaaacccttttggattccatagggtatgggtctggctatgatatgg

SEQ ID NO: 580564 - DNA, 107 bp, Homo sapiens
cctcctgtgctgtccctcctcagtgctgtccacctcctctgtgctgcctccgctgtgctgtccaccttctctgtgctgtccacccctctggccctcctctgtgctgt

SEQ ID NO: 580565 - DNA, 432 bp, Homo sapiens
  misc_feature (64)..(64): n is a, c, g, or t
atcatttttggcccagacctggggtgccccagccatcgccatccattgcattccaccgcaagantggtggtcctagtgatttggactcccctcggagggatttggggtggccacagtccctggacagtgatccaaacaactggccgccccccaaggggtttgtcacctttagggagacctatttcctccccccccccaaaaaccttttgtgtttttgcctagggccaggtggtcctggcagcccaaacgagtttttcatttttttttgtgggccaggtagttttgccccaaacgcaggattttgaggttgcaactggttttttgatgggggccttttgttcaacccaggaacccccgccttttggtttggtttaaaaccctacctggggaaagttttttccttattttccataaatggccggcctttttgga

SEQ ID NO: 580566 - DNA, 563 bp, Homo sapiens
acggactgacgaggcttacgggaacagacactctagatacgggtcgggcttccaggcacacaaagcttccgcctaaactaccatccagggtcttacagaattccttatccaccatcataatattccatatagcatggcttctggttaaggaactaacgttacagccaaagaagtgcagcaaggggcccaggctcagggaattcactgctctcaccaggttccccaccaccctgaaatagctggcttgaaagaatggtggaatggccttgggaagattcagttacagtgccaactaggttacaataccttgcagggctagggtaagattctccaggagtctgtatatactctgaatctgtatctaatatatggtgctgtttctcccacagccaggattcacagatccatgaatcaagggggggaaatcaaggggtccctatcaaccctagtgacccactagcaaaatttctcctccggttacagagatcttttggtctgctagcctagaggtttcagttccaaagggaggaatgcttccggcaggagacacaaggattccatgg

SEQ ID NO: 580567 - DNA, 132 bp, Homo sapiens
  misc_feature (5)..(5): n is a, c, g, or t
ggctntgtttcttaggagaactgacaaacgagtctatggctgagtgtggtgtctcatgcctgaagtcccagcgctttgggaggccaagacaggaggattgcttgaggccaggagttcaacatcacccggggc

SEQ ID NO: 580568 - DNA, 185 bp, Homo sapiens
tcaaagtaactgaacgagggccggtgtacgagcctttgcacagcctgatgcggcgtcccggagcagccagttcttgaacctgcatgagggaatcgtggcgtgcagcctggatgacgatgccggtgtcttcgtattcgctcagcaggtccatcacaatgcgatgcgagcggtcatggatgtcgggg

SEQ ID NO: 580569 - DNA, 354 bp, Homo sapiens
cttccactgatcgtcctcacttggtcattggcacccacttcctttcgccagctcatgtcatgaagttgttagaggctattcccagccaatactcttcccccactaccattgccactgctatgaacttatcagagaagattaataacgattggagtcgctgtaggcaactgtttaggatttgtggcgaatcgaatgttgaatccttactacaatcaggcatatttgcttgcagaagaaggcagctcaccataggaggtagatcaggtgctggaagagctcggatcttgggaccttgtacagtgcctgatcttgctgcgttggatgtggactgtgcccgaacatggagttaggggt

SEQ ID NO: 580570 - DNA, 682 bp, Homo sapiens
ggaaaagccaagaatcacttagtggaagaatgatgtcctgactgagacagggataagaaggaattgggtggagaagagctagcatagaggttgtggtagagttagaagggagatgagaagaaaacactgtatatatacaatagaatactattcagcctttaaaaagaaggaaactttgtcattgccacaacatgaggggacctggaaggcattatattaagtgaaaaaaaagccaagcacagaatgacaaatgctatgtgatctcacttatatgtggaatctaaaaaaagtcaaactcatagaagcagaaaatagaacagcagttaccagagatggggttgggaggaggggacaggattggcaagatgttggtcaaaggacacacaagtttggttagagaggagacataagctcaagagatctattgtccctcatgatgactataattaataacaatatattatatacctgaaaattgccagcctgggcaacatagtgagacctcgtctctataaaaaaaataaaaaaattagctgggtgtggtggcacacacctgtagtcccagctacttggtaggctgaggcgggaggattacttgagcccaggaggtcaaatctgcagtgagccatgatcataccactgcactccagcctgggtaacagggcaagaccctgcctcaaaa

SEQ ID NO: 580571 - DNA, 213 bp, Homo sapiens
aaagtttttaaaatatcccttaatctaccccaaatgtaccataattaccacttttattttaaaaatacctctatctagattgggggttcttctctgtcaatctggtttcctcttataaaacaagtcaattctcaacagcctacgattaataagggaaaatgtaattaaatgcagaagtagtctatttgccaacaggtccttccaggtacttcc

SEQ ID NO: 580572 - DNA, 722 bp, Homo sapiens
ccagacctttcaaaaggtggagttttgcccctcgcgggcattccctggaaaaaagtttgggaaacccttgtctcaacggtggttggggcccaatggaagtctctaaagccctttagtgtgcgccccaccccaaagcaagaaccctagggccccttccggtactttgtcgccatgacgagcgccaaacacatgttaacatcaccttctctggttaccttaaaaggaaaaaggattgagccaggcggctacccatatgcgagtccgaatttaaagaacatgaactgaacgatgctgcacaagctcactcaccactctgtcacgggctgcagcctgggaccggggaacctcctggcttctgggaccatcagcgggccggacccagaaaacttgggctccatgttggaactgtcgtgcaagggaacaaagcccatagccctggggaatggtcagtccaggaagtttattctgaacgggaatatagtcatcataacagggtactgccagggggatggttaccgcatcggctttggccagtgtgctgaaaaagtgctgcctgctctcctgccatcatgagattttctctgctcttatgcaaacaaagggctcaagcacccctttcaaccctgtgactggggtcctccctcggactgtaggcctggcccgccattcagtgacaaataaagccattgtgctttaaggcctgccctgcccaaattataaaa

SEQ ID NO: 580573 - DNA, 245 bp, Homo sapiens
tacgacgccaagcgtgacggtttcgccatcgccggcggtggcggcatggtggtggtcgaggagctggaacacgctctggcccgtggtgccaagatacacgcggaaatcgtcggctacggcgccacttccgatggctacgacacggtggctccaagcggcgaaggtgcaatccgctgcatggaaatggccatgtccactgtcgacacccctatcgactacctgaacacccacggcacttcgacccc

SEQ ID NO: 580574 - DNA, 615 bp, Homo sapiens
gaccgctctcttctaggagtgccccagcctctcccaatcacgcgggagtgctgtctgctcactctagtgtgcgcccagacccctgagagcctgtcgagggaaggttcgccggcccccctggagcctgagcctgcgcgctgctcagcccaaactcgctgtcatccatgaagcccggtttgccctagagcgccccatgggctctcctctgtcccagtcagccagtcttaatcaccgctccatgcggcatgctaccacaggccatcacagtcctgtcgacctacatctgtggccaccccattgaccacctcgacctcccagccacccgtcgtgcagacggttcatcgtcgtccaccatgatcctcacgcggtgtcggtcaccagtgtggccggactggccccagcgaacacgtacactgatctctggacaagctgctggctcaccccggcatgccgtgctgtacccttcctaaggcagaggcccaggagaatggagaccacagggaagtcacaacgtgaaacgtaaagcctatccccgccattggccacgccgacgctcgagctactgcacagccggatcatccagacggcacagaccaccccggtccagacggtgaa

SEQ ID NO: 580575 - DNA, 148 bp, Homo sapiens
tacgacggctgcgattgcagtcgtgatcgatttccgcagcgagggctcaagcctgagggtgcgggaaaaactcgaaaggctcggctttcatatcgaagctggggtgagatgccacgagcaattcctgctgtcggtgcggaggcagcat

SEQ ID NO: 580576 - DNA, 453 bp, Homo sapiens
aactcagcctggtcaggaacgtcagcgagcctctaccccgattgggagcagcaatgggccccgcctcactgcatctgaagtgcagcagataccctgctggatccggaggggtgtaagtcagtggtggtgtctgcaaaaatagccatcagtcagtggtcgatggcgagcgaaagctcagtacgaaatagaacaaacaccgaccacatagtatgcggttatgggatttactataatgaccacagagctcccatacaaccggaggggaccttctgggggttgcctttgccggctcatctgccttggtttatatccccatctttgtccctccccctgtgctctcaggcaatagatcattggctatttctttacctcctgttttagcctatttagccttttagtgcgctctctttactacctgatttgtcaggtctgagctacgttgcccgccccgtc

SEQ ID NO: 580577 - DNA, 339 bp, Homo sapiens
tcctagacccaggcatagtcaaagtagagggctgaggagttgtggcaaaggagcagactggacctgagaccctaaccctggaattttcaaatatagaataaccctcattctttgctgtggtgcctctagtacacagtttcggaagctgcttccaacaaatcatgtgtattgaccacctactccatgtcaggcactttaaagacacagccttgccgagcgtggtgacttacgcctgtaattcccgcactttgggaagccaaggcgggctgatcacttagggttaggagctcgagaccagcctggccatacacggtgaaaccccgtctctactaaaaatac

SEQ ID NO: 580578 - DNA, 403 bp, Homo sapiens
  misc_feature (71)..(72): n is a, c, g, or t
cacacggggaaagccacaaatgtcttgaatgtggggaagaagacaaagtacacaccttatccgacaccaannattcatcaaaataaagtgctgtcggctgggcgtggtgctcacgcctataatcccagcactttgggaggccaaggcaggcagatcatttgagatcaggagtttgaaaccagcctggccaacatggtaaatcctgtctctactaaaaatacaaaaatgagccgggcatggtggtgcatgcctgtaagcccagctattcgggaggctgaggtaggagaatcacttgaacccaggaggcggaagctgcagtgagctgagatcatgccactgcactccagcctgggcaacagagcgagactccatctcaaaaaagaaataaagtgctgtcatttcc

SEQ ID NO: 580579 - DNA, 326 bp, Homo sapiens
  misc_feature (12)..(12): n is a, c, g, or t
ggattcccgganccccaaggaagtccctgtattcccaggaattccccccatgggcccacgagcccagagacgggaacccaaagatggaagggggccttagaaataaattcacagagacagggaccagaagcaggagaagggtcagagagtggcggagaggcggagcggaggcaataatgtaacgttgcatctcggtgagcggggcggagcccaaggccggagggacagcggcggctctggaaaaggagcgcgacggagaatttgggacctggccggggtcaccggaactcagaacaaagggcacaaggaagcaggcgagggcctgt

SEQ ID NO: 580580 - DNA, 788 bp, Homo sapiens
gcacgaaagcttatagtgctcatggcagaacaagagcacggtaaacgtcagcgtttcctgcggcgttaccgtgaccacatcaaaaaggcggtagaagaggccgtcagccgccgctccatcaccgatatggagcatggcgaacaaatcagcattcccggacgggacatcgacgaaccggtgcttcaccatggccgcggcggcaaacagaccgtggtgcatcccggcaacaaggaattcaccaccggcgaacatatccagcgcccacaaggcggtggcggcggcaaaggtccgggcaaagccggcaactctggcgaaggcatggatgaattcgtattccagatcactcaggaagaattcctcgaattcatgttcgaagacctcgaactgcccaacctggtcaaacgcaacctgaccggcaccgataccttcaagaccgtacgcgcagggatcagcaacgagggcaacccgtcgcgcatcaacatcatccgcaccctgcgctcagcccatgcacggcgtatcgccctgtccggcagcagccgcgccaaactcaagcaggccaaggaagagttggcacgcttgaagcgcgaagaaccggacaacttcggcgatatccaggaaatagaggcggaaatcgaaaaactcagcgcgcgcatccaccgcgtgccgttcctcgatacctttgacttgaaatacaacctgctggtcaagcaacccaaccccagctccaggctgtgatgttctgcctgatgacgtttccggctccatgaccactataagctttcgtccac

SEQ ID NO: 580581 - DNA, 937 bp, Homo sapiens
aagtctggtgatgctgccatagtggatatggtacctggcacggcccatgtgtgtcgagagcttctcagactatccacctttgggtcgctttgcatgtcgtgatatgagacagacagcttgcggtgggtgtcatcacgagcagatggacaagaagggtgctgtagcgttggcgaggtcaccaagtctgcccacaaagctcatacaggctaaatgaatattgatcgcctaataccctgtccacaccacagtcttaatcaggtggtggaagagcggtattattagaaaggtgtatgtgtaaatattggacatgaaagttatagtagtacaagaactggtaaatgataagcgagatggatagtgaaaaccttcagagaggaaaggagaatgtatgtgagagcactgtgggttgcttttgtgcgtgtgggagtatgtaacgtatattagttgattgatgatcagtgctatagaaatggaaacaacgttgacgcaaggaaattgtctacagaagtttatgatgaagcactattaaaatagttatggaggaataaaaaaaaaaaaaaaggggggcgcaaaagatactgagggggcaagttaaggggtaaccaagtattgtaaaaagtggtccctataggtgaggtgataaaaggtaggcacgtgccgtggtttatcaaaacgctccgtgaatggggaaacgctgctagcttggaatctttgctgacgcgaaccattacttcgcgggggttgacatttaattggtacaagtcctaacgaaaatttaaactctaaggtacatgtaaatttacaggcataacggttaaccagactgatatgtgccgagaaaaatagtataggaggtgatatgcaacatttacaacgggataacagaaaatcatagagtgtaacaaagatataacgagagcaacgtacatataataac

SEQ ID NO: 580582 - DNA, 221 bp, Homo sapiens
atccatccatccatccacccattctactatccatccatccatccatccacccatcctaccatccatccatccatccatccacccatccatccacccatccatccatccatctatccacccatcctaccatccatccatccatccatccatccatccatccatacatccaatcagtcacgtgtccaaccatctatccatctatcttctatccatccatcgaa

SEQ ID NO: 580583 - DNA, 519 bp, Homo sapiens
tcccctttgaggacttcatacaaagctgggcattaagaaaaccacaatgcatggccgggcgtggtggcttacacctgtaatcccagcacttgggaggccgaggtgggtggatcacccgaggtcaggagttcgagaccagcctggccaacatggtgaaaccccatcactactaaaaatatgtaaattagtcgggcgtggtgtcacgtgcctgtaatcctagctgctcgggaggctgaggcaggagaatcacttgaacttgggaggtggaggttgcagtaagctgagattgtgccactgcactctagcctgagcaacaagagcaaaactcagtctcaaaaaaaaaaaaaaaagaaaaacaaaaaaacaacacaaaaagaggggcgagagcgccgcgaaacagagagagtctatctcgcccgcgagggaggcgaccaatggttaaccgaattacaccagggttccgtggacaaagggggggcctataaagggggcgagagataattaggctaaggaaccggg

SEQ ID NO: 580584 - DNA, 474 bp, Homo sapiens
tcgaatcgacggttctctaaagacagtacacaaatggtcagcaggccatacgcaaggtgtcctgacactaatcacccaggagaaggcaatcaaacccacggtgtgaaatcacctcaccacgtgctaagatgactatcgtctaaaaagaccagagataagtgctggtgaggatgtggcgaaaggggaacccttgtacactgttggtgggcatgtaaattgggacagccattatagaaaacagtatggaggttcctcaaaagcctaaaaatggagctaccatatgacccagcaatctcacttgtagttatagacccaaagcaactgaaatcagtatgttgatgagatacctgcacccatgtttcctgcagcactctatacaacaggcaaagcacagaagcaacctaagcatctatcaactgatgaatgggataaagaaaacagtagatattcgaaatggaatactgttcagctact

SEQ ID NO: 580585 - DNA, 164 bp, Homo sapiens
aagttgtgcagttctgcatggcactctcttcctccttcctctcagaggacacagaactgtgctgtcgctttgatgtgtactttctagagtccctgtgctggccagagacgattcctgtgtggcagccaccgatacacctatgtagggctcagcgaacataccat

SEQ ID NO: 580586 - DNA, 114 bp, Homo sapiens
caatggttgtgatgtggtggtggtgaagtcacagcgatgcattcttggtggacgtactgctggatgcctgtgaggctggaaggagataattttccttgtgtctaagaaccattt

SEQ ID NO: 580587 - DNA, 264 bp, Homo sapiens
gatagttcattcaggcatcatggcgtgtgcctgtagttccccactatctgggaagctgaggcgtgacgatcactttagcccaggatttcaagggtacagtgaactaatagatcatgccagccactgaactccagcctggggaacagtagctaagaccctgttttagggggacaaaaaatctatctaagctcctatgtgccatagatgttacaacactcatagtctggaggaatcaccaagtctttaagaaaatggagacaggtg

SEQ ID NO: 580588 - DNA, 132 bp, Homo sapiens
taaggagcccaagctgctcccagtccatgcttcctagtgcgctaagaaacccctgtgtgcttcccatcatgtgctggccgatcctcctcgatgactctaaggtggctcgctgcggtcggagcccaccgccaa

SEQ ID NO: 580589 - DNA, 425 bp, Homo sapiens
gctgccccctccatttacatgatcaacctggcagtctttgacctgctggtggtgctctccctcccaggacccaggaactgcatggctgtaaaaggaaggtccttggaggggatcagcagtctcagtgtgatgtgacaactatggacctgtgggtgtgccctggggacccctgacccatccccaaaccctgtggaaaaaagggccttttttccgtggggacccgtgtctgtgggaacgggcacaggtccatttttcaggcccctacggctgctcggcaggagggccgaaagtttggacccccataactgcaaccccagctggcccataatcaacagtggggccccccagcccaggaggggcgggcggttagctttggaaaaaatgacttgattaatttgattcgcccaataaataaattcctctga

SEQ ID NO: 580590 - DNA, 400 bp, Homo sapiens
cttatgtgtaaaagtagataataccagcactgctgcacacacagggcaatattttcttttttttttaaaaaaaaaaggcaataaatattggttaaaaaaattatacaggctgggtgcggtgtctcacacctgtaatcccagcactttgggaggccggggtgggcgtatcaaccgaggtcaggagttcaagactagcctggtcaacatggtgaaaccccatctctactaaaaatacaaaattagccgggcgtggtggtgcacacctgtggtcccagctacttgggaggctgaggcaggagaatcgcttgaacccaggagtcggaggctgcagtgagccaagatcacgcctccgcactccagcctgggggacaagagctagtctccatctcaaaaaaaaaaa

SEQ ID NO: 580591 - DNA, 496 bp, Homo sapiens
  misc_feature (242)..(242): n is a, c, g, or t
tttatcttttccttccctcaatgctacttttctaaagtcttcatattttcctctttaaatcctaagctattttaaattacggtttaaaactttacgcttagccatatcctagttacctattgacgatattttttaaataattgtaataatctcgtatctttcaaagaggaaaaatcttatctgcggtttcctcaagctccgcctgccccctcaagcagataggaagctcaacccactctggncaaccaacactgcaattgcaaggttggcaccttacttccctggggatccccagagttggtcccaaggagggagaatgggttctcaatacggtaccaaagatataatcaccttggtttacaaataatttttaggactcacgttaactcacaatttatacagcagaaatgctattttgtatgctgttaagtttttctatctgtgtacttttttttaagggaaagattttaatattaaccctggtgcttctcactca

SEQ ID NO: 580592 - DNA, 153 bp, Homo sapiens
tcatattagttatccacgagacaactactgtagcatctaacacatatgtccttctagatacgtgtgtgtgagatacatctgctcaaaaatgaaattacagttgtgttgcaggcttttattattaagtgccttttaagtacatgactgtgccag

SEQ ID NO: 580593 - DNA, 430 bp, Homo sapiens
  misc_feature (87)..(87): n is a, c, g, or t
  misc_feature (127)..(127): n is a, c, g, or t
ccctccccccagctgcccatcctgagcagcgtccatggggtaggtttgtcactgccagaccagcagtgacatctcattgtcccagcnagtgggcatggaggtccaggggagtcagggttgatccaanacgcccccgcaggggaaggtttgaaagggggcaagaaacccaccccttttggccccaaccttccattgaagttgggcaccttacttccctggggatccccagagttggtcccaaggagggagaatgggttctcaatacggtaccaaagatataatcaccttggtttacaaataatttttaggactcacgttaactcacaatttatacagcagaaatgctattttgtatgctgttaagtttttctatctgtgtacttttttttaagggaaagattttaatattaaccctggtgcttctcactca

SEQ ID NO: 580594 - DNA, 152 bp, Homo sapiens
ctccagcagcacttctcgttgttcagagagatgtcaggaaacatgactctgcggtcgaggtgctcggtagggctgctcgcccgatctccgcctgcagggttgaaggtgctgatgttgctgctgctgttgctgacgtccccgtccgcgggccg

SEQ ID NO: 580595 - DNA, 135 bp, Homo sapiens
gaggtggctagtcttcttctagacgacgaagagttggagaagaaactgaggctggggcaggaagagaaactggcaacaggaggaaaccaactgagtgaaagagcgcaaactgtgtgccttggatcatgggatcct

SEQ ID NO: 580596 - DNA, 299 bp, Homo sapiens
  misc_feature (58)..(58): n is a, c, g, or t
  misc_feature (106)..(106): n is a, c, g, or t
  misc_feature (185)..(185): n is a, c, g, or t
  misc_feature (252)..(252): n is a, c, g, or t
  misc_feature (282)..(282): n is a, c, g, or t
acagtattcatgactccacaagatccaggcagaatcaagtcaacttgccatcagcagngatcatttcaagaatgtactctggaattggctttcccttcttccctgnttccctctgactggtatgacactcctcttccctgaaaatatttctgtaatctacctgcctattagaaggtacagcttgnactttatttcaagatggtactttactatgacattctccctgatgatctcaatgggctcacttctttnttcttatctattgcagtaggtattttatgntatttttatttgcctct

SEQ ID NO: 580597 - DNA, 750 bp, Homo sapiens
aacccaccctttgagagtgcatcacacaacgagacctatcgccgcatcgtcaaggtggacctaaagttccccgcttctgtgcccacgggagcccaggacctcatctccaaactgctcaggcataacccctcggaacggctgcccctggcccaggtctcagccgttccgaggggttatgcctgagaactctcggagggtgctgcctccggtctgtccttcagtcggtcgccggatggtgccctgtcattcagtcgggtgcgtgtgtatgtatgtctgtgtatgtataggggaaagaagggatccctgactgttcccttatctgattatctaccttcctcgcttgttataatgaaggcgtgaagctgtatgtaaaaaaaaaaaaaaaaacaaaaaaaaaaaaaaaaaaaaaaaaaaaaaagaagagaagcgagagaagaaagacagagaagacagggagggagacagaggacagcgaccaaagacgaaaggcaaaagaaggagaggagcggggcacgagggagaaaggccggcagggggcagaaggagaagggacgagagcagagaggagagaagaaacaaggagcaacagaaaggcggggagacagggggggagagaggcgaccgcggcgacgaaggaggaggagagggagaggaagagaaggagagagagaaggaagcggaagaagaaggaagggagagagagggagggggagcagaggagagggagagagacgaggcggagggcggggc

SEQ ID NO: 580598 - DNA, 168 bp, Homo sapiens
gatctgtaacaagcattatcacaggcaggaatcaaaaataagtgaatacaaacaatgatacatttgattttcctctgaccatagtgttctcaactctatggaggatgcatatccagttaacaagattggagcgagacttgtaatgcagtccatcaaggaaggtgattt

SEQ ID NO: 580599 - DNA, 314 bp, Homo sapiens
taactctcactaaagacaatttagaactataattaaaaaatacgcctgtaatcccagcactttgggaggccgaggcgggcggatcacgaggtcaggagatcgagaccatcctggctaacacggtgaagccccgtctctactaaaaatacaaaaaattagccgggcgtggttgcgggcgcctgtagtcccagctactcgggaggctggggcaggtgaatggcgtgaacccgggaggcggagcttgcagtgagccgagatcgcgccactgcactccagcctgggcgacaggaggcggtccgtctcaaaaaaaaaaa

SEQ ID NO: 580600 - DNA, 743 bp, Homo sapiens
  misc_feature (19)..(19): n is a, c, g, or t
  misc_feature (115)..(115): n is a, c, g, or t
  misc_feature (124)..(124): n is a, c, g, or t
  misc_feature (127)..(127): n is a, c, g, or t
  misc_feature (159)..(159): n is a, c, g, or t
  misc_feature (182)..(182): n is a, c, g, or t
  misc_feature (186)..(186): n is a, c, g, or t
  misc_feature (197)..(197): n is a, c, g, or t
  misc_feature (205)..(205): n is a, c, g, or t
  misc_feature (216)..(216): n is a, c, g, or t
  misc_feature (242)..(242): n is a, c, g, or t
  misc_feature (247)..(247): n is a, c, g, or t
  misc_feature (251)..(251): n is a, c, g, or t
  misc_feature (289)..(289): n is a, c, g, or t
  misc_feature (339)..(339): n is a, c, g, or t
  misc_feature (373)..(373): n is a, c, g, or t
  misc_feature (377)..(378): n is a, c, g, or t
  misc_feature (382)..(382): n is a, c, g, or t
  misc_feature (386)..(386): n is a, c, g, or t
  misc_feature (741)..(741): n is a, c, g, or t
tgggttgtttttcagggtncatgttgtttctcttggctttgaaattcacccttgggtctcttagcagaggatctagtgttaaggcttgccagaggcagatgggttccttgacccntgggccggngangggcttgccgcaggcaggcgcgcgtgtggtgncggtcgttcgcgagaccattggntagncgtcgcagganaagccagntccttttaggngatacaggtaggtggctgtgattganagggnaggnaacatggttcctcagcttcctgctgatcgacacctctnggaggggctgctgggttgttgaggtcctttgtttcttcctgggagcaggngagaaatgggatctaagtttacctactaactaanattnncgcntgtnataccagagagctggagtgggtctgctcagatgttcaggaagagaaaggaatgacaaagcctttggctcagcaggactggagccttgacaggcactgaccaagaaagcctctaggtgggccagggaggtctgtgggaaagctttggatcaatggtactcaagggtgcacagtggcacagtggccttagttagaatttatgaagacgaaaagaacacaagtcagaatttagaactgaagtacctgcttcttataggcctgtagaggaaaagcgagatcatccttctggccaggactaggggagaccaaggcctgttctttcctaggggctgagtttgacagaactggattgcagcnga

SEQ ID NO: 580601 - DNA, 688 bp, Homo sapiens
tgcagtagctttcgcctgcaatcctttattatgatagacctaagcggtcgaatcacgagggcaggaaatggagaccatcctagataacacggtgaaacgacgtctgtactacaaatacatgaactaatctgagcatgtgggcaagcgccatgctagtgcaggtactagccaacaggaggtagctgaatgtctggaaaccgaaaggcacacgcttggacatagtcgacatggcatcattgcagcactgactgagagaacgagtgagactccagatatattcaggaacacaactgggtgacatggccagggcagccaactcgtcactgtcgaacatagaccatcactaggttaaaatggaacctaaattcttaggcactatgcacatattgctctatagtgatagagcccacatgtaagtgtgcagtgttcactaacatgaagactgtgaaacacagtgatataccgatctgagagaccttgctgcctgctattgcctaatagcctgaatacaataaaggccctaacggaccgcacttactatcggtcactcagcctgagagtacgaggtaccacgttagcgcaactatgcgttaaagctccgctaacattttggttaactaagtagtcttaacacagaggcctaatccgccaaatcatttttctgaaatggacgaacggcatgcgctct

SEQ ID NO: 580602 - DNA, 156 bp, Homo sapiens
cctcatcagcttatatcacatatcacggagcttagtgtctcacatatagggatggccctgccatcccatccagttcatcgagccagaccttgggcactgtcctcaccttcttcttgcccttcaccctgaaaaagccttggttccctaaagtcctgc

SEQ ID NO: 580603 - DNA, 387 bp, Homo sapiens
ataacgtcatgcgggacggtcataacactgcatattcttcgattgtccttgactccatcacactcctgctattcctcattctctgctgctgcagttgcaaacatcctgtggcgagaggaaggtaccaagcttcatagtttggcgtcatgcctgtgatcatgtatatatggttctatgatgggccgtcttaccatgatctgccaccagctttcccacacaaagcagccctatgggagcaggaagtcaatgtcaaattcaagtggcatatgcattgaatcaaatttacaatgtactcctgtctttaatgagaaatttttaaatgcaaagctttcattaaaagtggcttgtaacctctgctgaagcagaacagacggtaagggagatgag

SEQ ID NO: 580604 - DNA, 707 bp, Homo sapiens
tctccattgcttcatataaattagggtcacagcttatatcttgatattcccccataccctttaaaattagtttctcattatctcgcgtttttcttatctatatactttctacccatgtatgtgcaatgtccttaccccacgacaatcacagagtttatgaatatactttcgtgctgactattgaaaatctgcactgaatatgtatcgaggcctcaagtttctcacccctgttcatttctactccgtcccaacgtgtcatctttcgcacgacgtgtactccggtgctgctacataggtcatcgtcgatagagtgtcagatgcgtaaaaatagtcaagtccaatgcacactcctgcatgacacaaaaatgaccaaactagacatgtgtctaggtacggcctactactgctgcgtgccttgtcagagagggccaagaagactaaacttgcgctgcaatcattcgcatctgtgctttccaagtggtcacagctacattcctccagcatggataaaagccgagaacagtcaaatacctaccaagagaatcatcgaggaaggcagaaacgatgtttagcaacacgtattactgcactcggttcactgcttaagaaaacctgccttctggaatatttgtaaactgaaattcagtatgtgattaagagatgtttaaatatgtcttgggtctactcacggggttaaaaatatagcc

SEQ ID NO: 580605 - DNA, 655 bp, Homo sapiens
ggagaagccctctagcaggggctctggcctttcaagagtctctgtttcccccttttcttccttttacacccaataaaaccctgtcttactcatcattcaaatgtgtctgcgagcctgaattttcatagccgtggggaaaaaagacgcgcatctttagccgaactaggaaaagtcctgcaactattttagcgcccaacgtggaggtcgagaaacggccgtcaaactccaaatgttgatgcacttgaacctctgatgatggccccttctggcctgggaacccttaaaataggcctctgatgggagccctgattgccatttcccccaaatagaccaccttatccagcaggaatcagttaagatcagtcctcgtctaatccttcatctaaatggcagtaagattgtgcctctttagaggagggaatgaatctgtccttgtaagagtccctgttttccccctttgtctccctttttccacacaataaaacccttgtctttactcaccagaagaaaaaaaaaaaatcaatcacaacaaacatctttggggggccgcctcggcggcgctcaaaaagagttttacacacacccatccgttgtgggggcggggccccaaaagttagcgaacattggggcacacgcgggtcccaagaaacctcgc

SEQ ID NO: 580606 - DNA, 407 bp, Homo sapiens
  misc_feature (16)..(16): n is a, c, g, or t
ttcccccagggacccnttaaccccccgggccccttttgggggccccaaataccccgtttgtccaaaaaaccggggggggccgcgtccgaaatccccggaaatttgcccccccccggcgccccgaaaaaaaaacccggggaaaaaaaattaggggggctttccccccgggaacccccttccaaaatttgttatttttcccgggcccccccccaaaaaaaaccgggggttaaacccaaaaaaaaaaaaaaaaaaaaaaaaagggggccccccctcttttttttttttttttttttttttttttttttttttttttttttttttttttttttttttttttttttttttttttttaaggatgttgcatttcgtttttttaaaaaaaattttgtaataaaattatgtatatt

SEQ ID NO: 580607 - DNA, 741 bp, Homo sapiens
tacgccggtcagcgggtcggtgcccagtggggccctggatggccctgggataggggaaccgcggtggctatccgcggaggtttcggcagtggcatccggggccggtggtcgcggcctgtggacggggccggggccgaggccgcgtgagctacgctggagtgcaatggtcctggaggataaatggagtaggatagccctgtacacctaagtaatgggcctgctatggtacaagggacatagaatgatacaaagtaccctaggaggtatgatactaatactactatacataccacgtggccgtaatataagggggacatacgaggagaatcgatatagcatatatcgtataccatagggcgtgcgctcgtactacgaaggcatagcaggggttataagcaacggatataatagcgcgaaggtgccaggaagagccaggcacgcctgttggccggggcacgaagacgactaccacgaaggggctatacaacaggtggccaatataatgtatgggctagataacggagtgggcacctaaacaacttgggggcaccaacggattctagcggtaactaaggcgtgtaagtattaaagggtaggctaacacaaagggggaacgggtaggagcacaagcgcaggcgcctattacccggtgtggaggtgaccaattccaattaccctatggggcccaaacggccttactaccacattacaggtacacaccccgttggccggccaggaatg

SEQ ID NO: 580608 - DNA, 295 bp, Homo sapiens
ttttttgggaaaaaattcccccgggatttttggggcccggttggtggggggggtggtttttgggattttccggggggaattttcacagggcctggggaaaaccccccgggaatggatttttttaccaaaagggggtgggccttttttttaaggggggggggtttgccctttttttgtttaggctttgcttttttttgcggggggtttttaggtggggtttggggcccccccccggtggttttggtttacccctaattttttggggggaggggggggttttaagccgggccccgga

SEQ ID NO: 580609 - DNA, 336 bp, Homo sapiens
tactcagcaatggggataccttcgtgagaaatgcatcagggaggagaagttccagtagtgacatggtctgacttgttgaaaatcactttgcttatattatgcaccagtgaaaatgagaaaatcggccaggggcagtggttaacgcctgtaatcccaggactttgggaggccgaggcaggcggatcagggtcgggagttcaagaccagcgtgggctacatggagtaacaccatctctactaaaaatacaaaaaacttagcgggacgtgttgacgggcgccatgtggttccagctactcgggaggctgaggcaggaggatggcatgaacctgggaggt

SEQ ID NO: 580610 - DNA, 783 bp, Homo sapiens
cgcgtgtcttttccatttgtggttgtgcccctctgtggtttttattcagggaccgggtatagtcttccccgtccccttgaggggtggtctttcccccatgtttttagagggcggtgttctttttgaaggtatcgcttgggttccccctttggaaaggggcttcccccgtttgtctttacttttagggtaaacacactccccctccgtctttgcttttttcatttccctgctccatgtttcccccaagtctaatgggggtttgaaatttgatgctccccttgtatgtttgcctattaatggcagggccctttcctttgtggttccccctcctatttccagtgcttgggagaaagtttgccctagagtggttgctccccctttgttcaatgagtggggggcatgacgcgccattaaccatattgggatgttgccacacgaggtaattagcaatcccgatgcctagtgccccaggttgtgaaaaagggagggggcttttgttaattgcagtcgataaatttgactccatggatgagcccgcaggagcagtattagttttctgcacaggtgtgaaggaggcccctagtgtgtctgggtgaggttcgccccccagtttttgtggaagagcaatcttgttttagagtttatcaaacattttttggggtgcgtgtgtagtcccctctaggacctttaaccagcacaaatggtgactacctttgaagggatgtgctgtgaaaagtgtcactgtgataaaaacaaaagtcacaaacaaaaaaggtaccaaaa

SEQ ID NO: 580611 - DNA, 278 bp, Homo sapiens
ctggtatcgcagcctgctctgattcactgtgtcacaaggctgtgacgccttcatgggagacaattattgtgatgccatcaacaagcgagccttttgcaactattacggtggggattgctgcaccttcacagtgaagaccaaaaaggtcacccattccctatgttctgtgatctacaaggtgactgtgcttgtcggcgaccccaggcccaagaacacaggcggaaagaactccggggatacaggcatggctacaggaaggaccagaagttggccaagga

SEQ ID NO: 580612 - DNA, 190 bp, Homo sapiens
agatattacaccaggtgcacacagtgacgttaagccaacaggatttaatgcccttattcgtgctaagtcatgattatctgaacagagatgattttataccctctaggatctgtcccgattggctagggtgtaacgcccagcattggcgggaaaaatatacctaggaatgggtaatcacagacggagatcc

SEQ ID NO: 580613 - DNA, 108 bp, Homo sapiens
atgctgtggaaaacacgctgcagagtctgagctggctgagtcagctgtcagagtccctgctgactccatcacacactcccccagcttcactgggcatgaaggaccttt

SEQ ID NO: 580614 - DNA, 173 bp, Homo sapiens
atctgattcccgatcgatgtgttcctgtgatccccaaccaagtttccagtatctgagaagttgaagcgcaggacaggctgccttggggccgagcactgaatctgcccagaggatgccatgcgctggtcccagcagaatttttatgggatcatccttcctggcacatcactgcg

SEQ ID NO: 580615 - DNA, 648 bp, Homo sapiens
agatcatctacacagaaaatcaaagaaacatcaaacttaaccttcactatagagcaaatggacccaatagacatttacagaacattttatttaacagctgctgaatacacattcttctcttcacacatggttcattttcagggataagaccatatgttatgttacaaagcaagtctcaaaaattcaagaaatgaaatcatataaagcgtcttttctgactgtaatgaaataaaactagaaatcaataagaagaggaacttggaaactatacaaacacatgaaaattaaataatatgctcctgaacaatcactgatcaatgaaaaaactgaaaagaaaattttaaaatttcttgaaataaatgaaaatagaaacacaatataccaaacatatgagacacagcaaaagcagtattaagagagctcacagcaataaatacctacatcaaaaaagtagaacaacttcaaataaacaacaatgcctctgaaaacactagaaaagcaagagcaaaaaaactaaaatgggtagaagtaaggaaagaaattctctcacattcagggcctcctaggggaacctcaaaataaataatatctggccttaaagattacaacaagtttgtggcagaatctgatgatgggagttctttgagg

SEQ ID NO: 580616 - DNA, 220 bp, Homo sapiens
  misc_feature (10)..(10): n is a, c, g, or t
  misc_feature (19)..(20): n is a, c, g, or t
  misc_feature (131)..(131): n is a, c, g, or t
  misc_feature (170)..(170): n is a, c, g, or t
  misc_feature (173)..(173): n is a, c, g, or t
tcggcacggngtacatggnnatgtgtgagcttcaaataatggcattgtcaaacgcatgctattaatatcgtgagccttcaagtcaaaatgtaaactctttctgctatgcaatacactttcctactgatgtntatgagaatgatgcttagccagtagtacatttgtcaagnttncttcctaggcatagtctcaacagcaatttttgaaagtaaatatttgg

SEQ ID NO: 580617 - DNA, 827 bp, Homo sapiens
tgtcaccttgacaatattaagtttgctagctcctgaacacataatgtctttctatttatttaggtctttaaaaaatttctggctgggtgcagtaatcccacacctgtggtcctagcactttgggaggccgaggcaggtggatcacgaggtcaggagatcgagaccatcctggctagcacggtgaaacccgtctctactaaaaatgcaaaggattagcttggcgtggtggcgggcgcctgtggtctcagcctcccgagtggctggagttacaggcgtgcgccacacacccagctaattttgtgtttttagtagagacggggcttcgccgggttggccgggctggtctcgaactcctgagctcaagcaatccagccaccttggctcccaaatgctgagattacaggcgtgagccaccgtgcccagccccagcaatgtttgtagttttcatgttcatgttttgatgcttccttggttaaatttattccagagaggaataatgaagtatctgttgtcttattatagatggttttcttaatttccttttcagatgtgtcatggccagtatatagaacatacaagggagtgtggtataaatagctggaactgggctaactgcattggacagctccagtggtggcgaagcgagtcacaggggtcacggctaggaggcgcaccggcccgcagaaggcggccgtaaccgcacctggggcgacaggcgacgctggcaacgaaacgcgggacagggaaggggaacacgcgagaagaaccggcgggggggccaccagggggaggcgcaagcacccggaggacaccggaatcttggacac

SEQ ID NO: 580618 - DNA, 1109 bp, Homo sapiens
cggacgcgtgggttacaaaataatgaagcaattagctatgtggatctgagagttattgtctggggatgtgtgttgtggttttgcttttaattgttgatagactgtattaataaacatacaacacaagcgggccttgtgttgctggtccctattcagtagtttcctggtggaatcggtttgcttctggtaaggtaaaacagcgttcgtgacccatagctcagctatgtctgaagttccagaggtcacatcagcagtcttactgctcttgaaaagctcgtcacgaggcgtgtggcgtgcgttcaacttaggatagcacgtcgacgacagcataacgttggagtggttcacgatttgtcacatgcctgtaccatcgtactttatacttagaagcagataaaggcatcagacacgagaacggtgctcatctattctgaggtagcattgactgcaatggttgctcttgaagcggttaagagcaagacgtgtgtgtacagggttaaagaactggctggaataataattatgaagcgtattttaagggccgtttagttactagttcttagttattgaagctatacatgagcggttaacaacgagtgtgattaacgtaaaaaatctggctggtgaattatcatggacacttgactggttgctagcagttaaatggggtcccaaaggggggagtattgatacgagtcaactatgtggggattggcaataaagtctttgggactgatgcgctcctttatccaatgtcttagactacaagggtttatataactcacgtataatactactgcaagatcaggagaacaccagacaagacagaaatgacaaagaaaagaaaaagcaaaaaaagaaaacaaaccaaaaagaaaaacaaagcgaagaaacaaaaaagacagaaaaaacaaacaacggaacagagaaacaaaacacacaaaagacaataaacaccagaaaaaacaaaccaacaccgaaagcgcacctgcagaacaaagggaataaaacaagaaaattagaacgaccgaagagcacatgccctgtcgaccgcgccacgccaacacaaaatagagagaacgagcaacagcaccactaaaagggataaa

SEQ ID NO: 580619 - DNA, 140 bp, Homo sapiens
tccaagccagcctgagtgacaagcaagactccatctcaaacaaacaaacaaaaaagtatgctgaagcagaatccatctactcccagtgccagctattaaccaaacacatagttctagtgtaacactccagttattctatt

SEQ ID NO: 580620 - DNA, 90 bp, Homo sapiens
catggatttgctggtgcagtacaactaggcttaatagggacatgccattgcactccagcccgggcgacaagagcaaaactctgtcccaaa

SEQ ID NO: 580621 - DNA, 239 bp, Homo sapiens
taaatgggaacccaaaccccccctttttccaaaaaatggggcttttttttttctgtaagcccccggggggcccttttccctgggctttttaatttagcctttagggagggttcccttggaaatgatcttttggggatttttggcccttgggttcaaaaagttccccaatggggcccccgcccccctgcctgggggggggaaaaatgggaaataaattccctataaatagttttgaaata

SEQ ID NO: 580622 - DNA, 508 bp, Homo sapiens
cgtccacattacctcgctgtccgtcctcatactcctcatcctcatcttagtgctcatcatactcttgtactctgccatcctcctcctcttgacgtggctagtatatacattcctcctccttaagcctctgctcctcgatcctagttagtccttgatttgtgactatgctggctctgtaacgcccctacgtctcgattgcccaaacctcctcagcgtatgccatacatcgtggtgtgatgaggaatttgtcaaagatggtgcctgacttggaactgccagaggtcacaggcccagtcacgcaaaagttatcataggcatagatatctgggtatcgggagaatactacgagagagatgtcaatgtatctcggcgtgaatccaagtgtccttgtaatctgggttgtcgatctgccggggcttccactcacccttgtactcagggttctgaatcactgggggttcccactctccgtccatctcttcatcccagtcctcgggcttcttagcat

SEQ ID NO: 580623 - DNA, 471 bp, Homo sapiens
  misc_feature (371)..(371): n is a, c, g, or t
  misc_feature (391)..(391): n is a, c, g, or t
  misc_feature (398)..(398): n is a, c, g, or t
  misc_feature (426)..(426): n is a, c, g, or t
  misc_feature (448)..(448): n is a, c, g, or t
acacctggctgattttttaattttggtagagacgagggcttgcatgttgcttaggctggttttgaacccgtggtctcaagcaatccttccgccccagccttccaaggtctagacagttctcacaaaacccttcttgttatccttagctttattaacaagccttgcctcattatggggctgttacttttcttttagggttaggagccaccactcttttttttaactatggccttctgttttttgtacgtgtttgtgagtgggccttttaacatctgtactcaaggaatggcttttcgattgtggctaggtctcttcaggattgttccctttttaaatttggaaataggccagagtgggtggggcttacaccngtaaatcccaggcatttttngggaggntgagggagggcagatccgcttgaaactnagggagttaaggagacccagcnttggggcaacatgggtgaaacct

SEQ ID NO: 580624 - DNA, 239 bp, Homo sapiens
  misc_feature (77)..(77): n is a, c, g, or t
aggtggggtttcaccatgttgcccaggctggtcttaaactgagctctagcaatctgccggcctcagcctcaaagtgntgggattataggcgtgagcccatgccctggccctaaaatttctttataggctaggtacagtggctcatgcttataatcccaacacttagggaggccaaggcagtagaatctcttcagaccagcctgggcaacgtggcaagaccctatctctacaacaaaatt

SEQ ID NO: 580625 - DNA, 1551 bp, Homo sapiens
  misc_feature (36)..(36): n is a, c, g, or t
  misc_feature (80)..(80): n is a, c, g, or t
  misc_feature (107)..(107): n is a, c, g, or t
  misc_feature (120)..(120): n is a, c, g, or t
  misc_feature (128)..(128): n is a, c, g, or t
  misc_feature (132)..(132): n is a, c, g, or t
  misc_feature (139)..(139): n is a, c, g, or t
  misc_feature (151)..(151): n is a, c, g, or t
  misc_feature (181)..(181): n is a, c, g, or t
  misc_feature (211)..(211): n is a, c, g, or t
  misc_feature (215)..(215): n is a, c, g, or t
  misc_feature (339)..(339): n is a, c, g, or t
  misc_feature (355)..(355): n is a, c, g, or t
  misc_feature (436)..(436): n is a, c, g, or t
  misc_feature (924)..(924): n is a, c, g, or t
  misc_feature (945)..(945): n is a, c, g, or t
  misc_feature (996)..(996): n is a, c, g, or t
  misc_feature (998)..(998): n is a, c, g, or t
tcgctcggaagggtctttgttccctgcagccctccnacgggaatgacaatggataaaagtgagctggtacagaaagccanactcgctgagcaggctgagcgatatgntgatatgctgcanccatgaangcantcacagnacaggggcatgnactctccaacgaagagagaaatctgctctntgttgcctacaagaatgtggtaggcgcccnccgntcttcctggcgtgtcatctccagcattgagcgagaaaacagagaggaatgagaagaagcagcagatgggcaaagagtaccgtgagaagatagaggcagtactgcaggacatctgcaatgatgtnctggagctgttggacnaatatcttattcccaatgctacacaaccagaaagtaaggtgttctacttgaaaatgaaaggagattattttaggtatcttnctgaagtggcatctggagacaacaaacaaaccactgtgtcgaactcccagcaggcttaccaggaagcatttgaaattagtaagaaagaaatgcagcctacacacccaattcgtcttggtgctggcactaaatttctcagtcttttatctatgagattctaaactctcctgaaaaggcctgtagcctggcaaaaacggcatttgatgaagcaattgctgaattggatacgctgaatgaagagtcttataaagacagcactctgatcatgcagttacttagggacaatctcactctgtggacatcggaaaaccagggagacgaaggagacgctggggagggagagaactaatgtttctcgtgctttgtgatctgttcagtgtcactctgtaccctcaacatatatcccttgtgcgataaaaaaaaaaaaaaaaaaaaaaagaaaatcgtacgtcgactttcgatttttcacagcctcagcctaggaaaangggtccatggggataaacagntgggtatttggtttctaaaactcagatggggtcacataaattgccagggantnccgaagtttggatttggattaacattggacgggattactggggtgttcaaattttttaaaaactggaaccactggtgattatgggggtttgggtaatttacgcagaaactccttacggggtagaaaaaaataggacctgaattatggttgtaaccttttggggaagggtttaatctgatatcaaaataatctttgaaatacaattccttgtaagttggaccgaaagtttagagattatttgtgatggggtggaacttgggttgggacccccattattgtggtcttgacgttgatggtattcccagtaatgcgggcggtggtcggaagttaaagaccttgactgtgtgggcgggggcgcgtaaagtttgagccaatggtccaggggttcccttgggaacgaatccggagggaacttctgggagaacggttaaacctgaatttggtgttaaaccccaggagccttctagaaatttgatgacatgaggtgaagaggtcgtacaggaaactacgtgtaatatcgtgagtaaaaaaaggggggcaccatcagagagcg

SEQ ID NO: 580626 - DNA, 424 bp, Homo sapiens
  misc_feature (24)..(24): n is a, c, g, or t
  misc_feature (48)..(48): n is a, c, g, or t
  misc_feature (54)..(54): n is a, c, g, or t
aggctggggacccaaaatgccaanggccccgggtgctaagcgccccancattanttcatgcaactgaaagtcaagccagataggagagttgtaaaacttgtctacaatgagaataagcaaggaaagaattaagggtcatttcacatttaaaaattcagcttacccacttgaagctgtcagtgctttgtgtgtagaactttcaaataattaacatttctcaaacatcaaaacacagctagaggtgtgcataaataaagaggcacaggtcccaaaatactatttttactttttgaactggtaggactaatagaaaaataaatgaatacaattgtttagattaactagttcttatggaaaagaagcacgggagaaagtagttgttaaccaatacttgattatttgttaatcactactacataagata

SEQ ID NO: 580627 - DNA, 634 bp, Homo sapiens
  misc_feature (238)..(238): n is a, c, g, or t
  misc_feature (380)..(380): n is a, c, g, or t
  misc_feature (388)..(388): n is a, c, g, or t
  misc_feature (392)..(392): n is a, c, g, or t
  misc_feature (394)..(394): n is a, c, g, or t
caacaaaactggacggaacgcctcgatccacaccctgctggatgccttggagaggatggaagagagacatgcaaaagagaagattcaggacctcttggtggactctggaaagttcatctacttagaagatggcacaggctctgccgtgtccttggagtgaaagactctttttaccagaggtttcctcttaggtgttaggagttaatacatattaggttttttttttttttaacatgtntacaaagtaaattcttagccaggtgtagtggctcatgcctgtaatcccagcactttgggaggctgaggcgggtggatcacttgaggtcagaagttcaagaccagcctgaccaacatcgtgaaatgccgtctttacaaaaaantacaaaanttancnggatgtgatggtgtgtgcatatattctcggctactcgggaggctgaggcaggagaatcacttgaacccacgaggcagtgacgctgagattgcaccacgtgactccagccggggacacagagcaagactctgtctcaagataaaactaaaataaccttgaaagaattattggcccgactgaggtcacatgccaaaggaaaatctggttctcccctgagctggcctccgggtgttcccttat

SEQ ID NO: 580628 - DNA, 506 bp, Homo sapiens
atacatttgtagaatttatttttccgtcagtcatgtaaaataaacatactcttcttcctcccctgaagattgccaccaacaatcttcagggaagcctctttttattttttaaatatcccaatagaaaaaaaatggcgggcttttttaaagactgggtagatcaaaaaaattaatcatactcagagtatgtctccaaatgaaatgaatggttggtagaacataggacactgggaaaatctcctacctctttcttcacagatattgtgaatagagacgcacagacaaaacgcactgctgaccaaattgatgaagaaaatcctggccaaaatagttcacactcaattggagtgagaaaaagccccatagtgaacttcctgcttgtccaccacaatttatactattatccagagagaaaaacacacaattcagatccacttcatatttctcctgtatagtactacttgctgacaagtaggggaaaaatctctaaagccctgacgatggtg

SEQ ID NO: 580629 - DNA, 916 bp, Homo sapiens
gatagaaaggagaggagcgaacatggctacgcgtgggaggtttgggagtgtctctgtgaccatgttgatggcgctgctacatctgttcgggactgtaccctcagtgcttcgtgccaccaagaatggaggggacatggtgttatctagaacaatggttactcaagttgaatggacattggtcgtaacatacatgacctgtgaataaggaatgcctggagacgagagttccggacgcgcttgtgagagccccgactcgagtaaatgagtccgttgatcgtcatgttcacttgctcatccatatttggcatagacagtagtgtcatggaggacgcgagctcgagtgcaagaattacctacgatcctgatctaatactcctgggcagatactaccacgtgtcgattcatcaacacgtgatattgttttgccaatggtaggagtacagatgaaggctctgactgtattgctgatgctagtgcatgatttcagctccaagctttcatcaacttacctgccaaaggtaaaccccagacggggtgataccgtatgagtcacaggtagcggggtttatcagttgtgcatgattgcccggtgtgatccgccgactgacttgttgtccttattagagggatttagacgcacctaatttagtgctggtgcccgttatgtaggggatgggggatggctcgaccaatgggtggaactagtagctatctcacgaagaacgtaatatggggaatttctcttataatttataactagggatgggacttcaagcagtcgagtgtgctcatgtgctatgtaatgacaattctggcgcaggtgtggacacgcacccttagaaggagcactcatatgttccatagaaattccactccggggacaatgtgaattatattccatggaagcgtcaggccc

SEQ ID NO: 580630 - DNA, 561 bp, Homo sapiens
  misc_feature (238)..(238): n is a, c, g, or t
  misc_feature (380)..(380): n is a, c, g, or t
  misc_feature (388)..(388): n is a, c, g, or t
  misc_feature (392)..(392): n is a, c, g, or t
  misc_feature (394)..(394): n is a, c, g, or t
caacaaaactggacggaacgcctcgatccacaccctgctggatgccttggagaggatggaagagagacatgcaaaagagaagattcaggacctcttggtggactctggaaagttcatctacttagaagatggcacaggctctgccgtgtccttggagtgaaagactctttttaccagaggtttcctcttaggtgttaggagttaatacatattaggttttttttttttttaacatgtntacaaagtaaattcttagccaggtgtagtggctcatgcctgtaatcccagcactttgggaggctgaggcgggtggatcacttgaggtcagaagttcaagaccagcctgaccaacatcgtgaaatgccgtctttacaaaaaantacaaaanttancnggatgtgatggtgtgtgcatatattctcggctactcgggaggctgaggcaggagaatcacttgaacctgggaggtggaggttgcagtgaaccgagattgcgccactagactccagcctgagagacgagcaaaactgtctcaaaaaaataaaatgaaatacataaata

SEQ ID NO: 580631 - DNA, 291 bp, Homo sapiens
accttatagtgtttcacgggacgctccctaggaccagtttgacagaagacgaaaaaatacaggtttgttctaccaacggatccatacggtatggtggcatgaaccataaatagttgctacactagtgactcacacctgtaatcccagcaccttgggaggccgaggcggggagatcacctgaggtcaggaattcaagactagcctggccaacactatctctgctaaaaatacaaaaatttgccctgctgtggccagcgccagtaatcccagctacttgggaggccaagaatt

SEQ ID NO: 580632 - DNA, 155 bp, Homo sapiens
  misc_feature (52)..(52): n is a, c, g, or t
  misc_feature (117)..(117): n is a, c, g, or t
cctcccacctcagcttgaaagccaggaggcagaggtgcagcgagccgagatnacgccactgcactccagcctgggcaacagggcgagaccctattcccaaagagggggaaaaaaatntcaaaggaaattttgtttgaaaatggaagtggagattt

SEQ ID NO: 580633 - DNA, 721 bp, Homo sapiens
tcatacggaactgtaagtccattaaacctctttctttgtaaatgcccagtcttgggtatgtctttatcagcagcatgaaaatggactaatacagtaaatggtaccaggagtggggcgttgctgaaaagatacccgaaaatgtggaagctactttggaactgggtaacaggcagaggttggaacagttggagggctcagaagaagacaggaaaatgtgggaaatttagaacttcctagagacttgttgaatggctttgactaaaatgctgatagtgatatgaacaataaggtccaggctgatgtgttctcaaatggagatgaggaacttgttgagaactgaagtaaaggtgactcttgttatgttaaagagactggcggcattttgcccctgccttagagatttgtgaaactttgaacttgagagagatgatttagggtatctggtggaagaaatttctaagcagcaaagcattcaacaggtgacttgggtgctgttaaaggcattcagtttcaaaagggaaacactatacaaaatttgaggggtgcattaaagtttggaaaatttgcagctgacaatgcaatagaaaagaaaatcccattttctgaggtgacttgggtgctgttaaaggcattcagtttcacaaggggaatactgtaacaaatttgaggagtgcttaacgttgcgaaatttgcacctggcatgcatagaaaaaaatccagc

SEQ ID NO: 580634 - DNA, 657 bp, Homo sapiens
gacagagtctaatccctttctatgtagccaccagcatgatagcacccagcaactttctgtgcaggtgctcgtggttggtgccttcgccaaaaggtctatgcacatcatgctgatttcctactcgttgggcatttccgagaagaggagccacaggatattggtcccacttctattcaggtttctgttttgcacaggtatatgccgtgaagtggcgtctggggtgtggggagcaagaatattctcgaaccgtgacactagcgtacaggaaggccgttatgctgggacagcctgagctctggtatggccacttgagaagtttcgccagagtcctgggaacctcgatattctgacattgggaaaaacacatttaatttatctcctgtgtttcattgctgattattcagtatactgttgagttcgtcatttgcgaaataggatataatacgcgtgagagtgctgtgaaaaagcttaagggtgtgtggatgggacaggatcaataatgcctgaggctgattgacgacatctacattacagtgcttattccctaagcgtgtagaaagttacgctttactgtgtgctagagccacagaagtctaatatcgaaatataatatgatattgtcaggtcttatcatttcagatgttgtatggaaaggga

SEQ ID NO: 580635 - DNA, 248 bp, Homo sapiens
tgggtgtgtggatgaccagccagatcgccagttatgcatgaccggtgatagatccaaaatactagccacatttgttcccatttttccatttctaaaacatccttaaagaaaatcatatatggggtcacaccatcctcacggtagtccaatagagcaaacatgccatctggattcatgtattcacccacaaaagaactggtagttttagaaattaagcaaggatgatgcttgatttgtactggcgcccc

SEQ ID NO: 580636 - DNA, 316 bp, Homo sapiens
gcatacctgggtgtcgcactcggaccgtactgtgcctgcgtccaggcgttctggctggttgcctcctcgggtgactgactcgccccggtggggactacgatgtggtttcgacacgacgactatcccactactgacttcgttctgtggctgtgacactgttctacttcacggacgactttgtacgggagacttcgtctagacgacggtagagtttttttcgtgatagtggttcactggcataagtggcgttggcttgccatgattgtgaggggtaggcgtcaggtagttagtataaggcggggggtagtaaggaggg

SEQ ID NO: 580637 - DNA, 103 bp, Homo sapiens
gcacctactgggatgtagacctgttggattcaaaagtgatcgaattctggacagccaactgaatttaccagtctgtccaaactgtatggcactcatactgctc

SEQ ID NO: 580638 - DNA, 551 bp, Homo sapiens
  misc_feature (506)..(506): n is a, c, g, or t
cccctttgcttcatctcgttctggttcattggctcgggagttgcacctcggcggaggacgtctcatgcagacttccccatatacagggagtgttgcattgaaggtctccgctggaccttctcgtccagaaggtgattttcaaaacgcgagcaatgctgccaatgcagctggtttctcttgacagattgagaagtccagcttcaaaagttacctgccatttaagcaaggtgtttgtcaagcagcatcatggttcattttatggaaaagactttaaggagtcgtcaggatttatccatagattgctgagaacaatggcaatcatttttatttttcacagcagtttgcacttctgatttcaggttaaacgctgacttgtttttagtctgcttaggggatcgtgacttggaaatttttatcattctgatgagcttttttgtagtgtccacaatgtataaaatatttcctaggtgagatctattttctccatttattgatgcattgcaggncaatttgagtgatgtgtttcaggaaaattcttcctcagtttaata

SEQ ID NO: 580639 - DNA, 101 bp, Homo sapiens
  misc_feature (91)..(91): n is a, c, g, or t
gcagtggtcgcttcttctccttgacggagtcggtttgtcactcaggctggactgcagtgctcgttgcaacctccgcctgccgggttcaagncattctcgtg

SEQ ID NO: 580640 - DNA, 428 bp, Homo sapiens
  misc_feature (8)..(8): n is a, c, g, or t
cacagagntggctatcatgaaacaaaagaactgcactggcattttgcaagcttatatttgaatcccagcttcattgagtgttttttgtgtggcactgggaagtcacttagcttctctgggcacctgtattagtctgagttctccatagatacagaaccaacagaatgggtgtgtgtgtgtgtgcgcatgtgcaaagtgatttactataaggagttggctcccacagttacagaagatgagaagtcccaagatctccagtgagcaagctggagatccagccaggagggttaatggtatagttcttgtctgagttcaggcctgaaaaccaggaaagccaatggtgtaagttccaattcaactccaggaaaagaccaatgttccagctcaaagaccatcacacagagagagtgaattctctcttactcagc

SEQ ID NO: 580641 - DNA, 1064 bp, Homo sapiens
taaaaatccctcaaaaacggtttattatacaagtgagtttggagtcccgaggggctaatcggaaggattccggggtaccgaagcgcgggccaccgaggggcccccaaacactttgtgggcacctcgcagcgaacgagagggctcagctcacccaggcgagggtctccggctcaacacgggagtgcagagagtgctctttgagaacacctcctctcgtgggaaacgcctcaatcacaaatatttctcgtggataactgaggcccaccgaggggctttgggaagaagtggacgtgacggaatagcatataaatcgtgggcccaggtgtgaaccacccaccctttatacagggcaccacggggtgttcttacacccagcaaaattcgcctcctgtgtgcccgaagaaaaggcagaacacgtggtcctcccaagacaagctgtggcacacgtggcagcgagtgcggcgggatctcaaaatcaatctctccgagggggccgcgcccgaataccaccttgtggagtggaacaccaaatgtgcccgcgaattgtgcaagggtgcggccccacagagctgtgctacgacgagatcatatcagtaggagggatcccggaaaagaacgcgtgtccacaaagaactgggcaaggcgggcgcccccttggggcagtgggcaagtgtgacctcccgagaggtgtgtgggcacttcagaaaaaacgctctcaacgcacgcgccgggaggcagtgaaaaacctcctatagaacgcggccgtgtataaaaggggaccaatgtgggagacagtgagaaacgcaaccaaagtgttgagacccacggagggagacgccgattaaatcccccccttggatgatggagcagcaagacggggagttgtaaacctccacaaaaaaaccccagaatatgagccccgcggacaagtctatcacaaataacactcctcccggggggaaccccgaggggaacgccgagagaaaagcagcggggtgcccccagagaacaagtaacaaacccggggatggggggaaactaacccgtgccgggaggaaaaatcg

SEQ ID NO: 580642 - DNA, 662 bp, Homo sapiens
  misc_feature (43)..(43): n is a, c, g, or t
  misc_feature (51)..(51): n is a, c, g, or t
  misc_feature (58)..(58): n is a, c, g, or t
  misc_feature (114)..(114): n is a, c, g, or t
  misc_feature (136)..(136): n is a, c, g, or t
  misc_feature (144)..(144): n is a, c, g, or t
  misc_feature (222)..(222): n is a, c, g, or t
  misc_feature (233)..(233): n is a, c, g, or t
  misc_feature (249)..(249): n is a, c, g, or t
  misc_feature (327)..(327): n is a, c, g, or t
  misc_feature (442)..(442): n is a, c, g, or t
  misc_feature (457)..(457): n is a, c, g, or t
  misc_feature (473)..(473): n is a, c, g, or t
  misc_feature (497)..(497): n is a, c, g, or t
  misc_feature (516)..(516): n is a, c, g, or t
  misc_feature (553)..(553): n is a, c, g, or t
  misc_feature (556)..(556): n is a, c, g, or t
  misc_feature (567)..(567): n is a, c, g, or t
  misc_feature (581)..(581): n is a, c, g, or t
aggcagtaggatcacttgaggtcaggagttttgagcccagtcngagcaacntggcaanatcccgtctctatgataaaaaattagctggacatggtggcacatgtctgtagtccnagctacttgggagactgaagtnagagaacngcttgagcccaggagtttgaggctacagtgaaccatgatcatgtcactgtactgtagcctgagcaacagagcaagacnctgtctctganaaggaaagaaaacaantgcaagtttttatcactttgtgagtgtagccaagttggaggagaaatagacaataataaaagagcactgaataatgangctgagtggctggttaggctcagttgctagctaaatggcttctaaaaaattcaataaagttacagctctggggacagtcatgtagtcaaagaatgaatgctaaattcattacaantgcccatggtctttntttacatgccttctantgaaaaattcctaagtgcctaaanagcaagtctgcaatgatancagctgtttattaaagactacaaaaaagaaatggagnccnggcgtggttgntcacatctgtactncttgcatttagggaggctgaggcgggtggatcacctgtggtcacgagttcgagaccaacctagccaacatggtgaaacccc

SEQ ID NO: 580643 - DNA, 324 bp, Homo sapiens
acaacgctgagtgcccacacacacacacacacacacacacacacacacacacagtatctgtatcctgtctacacttctcgtgtaggactgagcagtcccaatcacgacactggttcaccgttggagacaacgctgtacgagagtagagggactcggagacgttctcttccagtggagaaatgtacacaaatatgagcatcttagcactcccacccagagagcttctgcacgatgtatgtcagtgggctgtcccggataacgcacgtggtgtgtgggccctcggtgtgtgcaagaaggtccacagagagcgacacgcactgtgcc

SEQ ID NO: 580644 - DNA, 436 bp, Homo sapiens
gtcaacattagacagatcagtgagtcagaaaatcaacaaagatacccaggaattgaactcagctcttcaccaagcggacctaatagacatctacagaactctccaccccaaatcaacagaatatacattttttttcagcaccacaccacacctattccaaaattgaccacatagttggaagtaaagctctcctcagcaaatgtgaaagaacagaaattataacaaactatctctcagaccacagtgcagtcaaactagaactcaggattaagaatctcactcaaaaccgctcaactacatggaaactgaacaacctgctcctgaatgactactgggtacataacgaaatgaaggcagaaataaagacgttctttgaaaccaacgagaacaaagtaatagttgacttaaaaaattttagcacactgtcactatgatg

SEQ ID NO: 580645 - DNA, 430 bp, Homo sapiens
gggtttcgattaattctacacctatcaaggacatcctcatgtgaatttggatggagttgagtcatagaaaaatccatttaaattaataactaaggccagtcttcaaaggaaaaaaaattaggcgggaggttcttgtttttgaaaaaaaggatttaaattccccttccaggacagagggttattatgggtaattgtatttaaacggccctcagccccaccttgtctgcctgcctactcccatctgtgctaagacctctgaggttatgagggaaatccattcaccaagccctagaggcagctccattagctctctgacatggtagcctttcacttcctccattacctagctttgagcaaaaggtttcctctattatgttttgtaggggatatggttgaggataattctatagtgatttggtcctgagattag

SEQ ID NO: 580646 - DNA, 375 bp, Homo sapiens
agcggggctttggaatgagacatggctgttactactgagagctatgttgcttactgaagagatattcaatgagcgattatatattctgtgatgccgtagacagactggagcgtgttatgattatgcctcatagggatattacaacgaaggggtatgctatgtggtaatggtcagggggattgagaattagtggtgaggcgtatatataccattagccgcctatttttacaaagtactgcggcaatgtactattgacccagcatttggtggcctcaggcatgtcctaagtggagtcctgtaaagaggtatcttaactataaaagctattgtgtaagctagtcatattaagttgttggctcaggaagtttgatagtt

SEQ ID NO: 580647 - DNA, 304 bp, Homo sapiens
cagggcaaactgctcgggtttatggctaaataagatagctacaaagataacaacctacatccctccctcaccattggcccgcgagaaaactccttagggaaaaaggacagatacaattcaaagtcatcccttggaggctcacttgagacaaatgcataactgatggcttcctcggccctatggttcacgtaaaaatgtaggttcacggagccagacacaatggtgtattcatcggaaggctgatcaaggactcaaaagaatgcaagttttggtctcttatctacttcgggccgggaaaccccct

SEQ ID NO: 580648 - DNA, 208 bp, Homo sapiens
cacctggtgatcggtcacttgttctcggctctacttgttctcggtctacttgtctctcggtctacttgttctcggctctaccttgtctctcgagtctaccatgtctctcggtactaccttgtctactcggctctaccttgtactctctggtctaccttgtctctcggctctaccttgtatctcggctcctaacttgtctctctggctc

SEQ ID NO: 580649 - DNA, 892 bp, Homo sapiens
gataccattgacctttcaaaggttctccagcagtatttaactgatgcaaaaggaacacacttgcaaattttctactttgacatgacagaccctcctcttagttcaccacaatgttcaaaaggcacaagtccctcgcttcggaacgcaagagagcattgacctttcccaaagagctacacggttcatactgaaggatgatatgagaaatttctcacttttggtcaaacacttgtactctccaggggccctctaagaccaactccagcagtcaaaacattcaaaaacgactcacttttgagcatgaaatcaattggatgctcaacaccaagggcaaaccagatcatgtattctggataaggtgacacaatcatctactattcatgatgttaagccaacaagtttcacaatcgcatgtccatactgtggtacccttctcgagtttggtctgcagctagaatgtggcgggccttttttgaacggactacattaccattcaaagtatttgcacgcttcctcccatggtcacaactgtatgctacagacctaggtcaccaagtccagtttggaccacaagtgttttggtgaatacacaaggacctctgttaatataactctcttgttatttgaggatcccatgtatctattgcgcaccagagagtgtagaagaattacggccaccagtgtacattggctgtcctgcatgtatactacatcgataactgtggaacttatgtccccacgtttgcgggaccgacttgcaattgaaagagggcctacgggatatttggatgcgaacataacaccaattccaccattggacaggacagcttggcacttctggaacggcactacaggggttccaacaaacgccggaaaccggggtccatcagaa

SEQ ID NO: 580650 - DNA, 752 bp, Homo sapiens
gatgtgattattatgcattgtattcctgtatcaaaatatcttatgcaccccataagcatatacactatgtacccaagaaagttaaaaatttaaaattcaaagcaacaaaggtgcaatgaggtattaacccagatgtagctgattagtattaaaaaagacaaacacacagctgtcatcaagtaacttcattcatacaaaaaatgcatattctcaatcccatagattcatatcaattatctgataaatgattcttagttatacaagttcagtgtataggtatgcagatagagcctaaacaggtaatgaaataagagacttgcattaagcgttcttacaagtgagacatatgtccaagaaagaaatagagagtatggtataggttagtacgagctagcttaatatgatataatagggtaaaggaaaataataaacatcactactgcattgaggtcaggacttagatatgaaaagggaaccaacaaagaggcgtatcacaaagataagatcacctctatggaggcaaccacacactgaaaaaaaagtacaacacacaaaacacctaatgctccaatgactaagggaaagaacctataaaggaacatagaccagtatatagcaatctacgagacaaagggagcagataacaacaacaaaaatcggatccagggaaaacaagatagaatgacaggaaaagaaagaaaagaacaacaggacaaaaagaacaagaaaaaggatggacaaacaaaaaccaa

SEQ ID NO: 580651 - DNA, 548 bp, Homo sapiens
  misc_feature (495)..(495): n is a, c, g, or t
aggaggaagagctcagatagaaatggagggagctgctctcacgctgcatgcagtgacagtgcccagggctctgatgccactatcacagcttgtaaagtgttagacaggtgtcttgtgtgcgactgagaggcaagagttgatcctgcccttccctttgcgactaggcgaaccctgactttgtttctgcaaaggcacctgcatgtgtttgagttcaggttggcataatgtgaggaggtggggagatcacttaacacacatgtccatcgtgatcgtactacaccacaggcccgaggttgctgctcacttaccctttgtgctaccaataggagcggttgaggccattatatgactcgttaaacatcagagtgcactatgctgaggctacatcctacgctatacatacgacaacctgcgtataactatcatattcctggacgctactcggactgtcccgcttcatacaccacaagaaacatcctatcatgtgtcggtgtntgcgattcttgtaacaagagtacttttaaatagtttcgaggatttgagacgct

SEQ ID NO: 580652 - DNA, 1136 bp, Homo sapiens
  misc_feature (452)..(452): n is a, c, g, or t
  misc_feature (459)..(459): n is a, c, g, or t
  misc_feature (499)..(499): n is a, c, g, or t
  misc_feature (586)..(586): n is a, c, g, or t
  misc_feature (630)..(630): n is a, c, g, or t
  misc_feature (637)..(637): n is a, c, g, or t
  misc_feature (688)..(689): n is a, c, g, or t
  misc_feature (708)..(708): n is a, c, g, or t
  misc_feature (711)..(711): n is a, c, g, or t
  misc_feature (732)..(732): n is a, c, g, or t
  misc_feature (744)..(744): n is a, c, g, or t
  misc_feature (789)..(789): n is a, c, g, or t
  misc_feature (791)..(791): n is a, c, g, or t
  misc_feature (819)..(819): n is a, c, g, or t
  misc_feature (822)..(822): n is a, c, g, or t
  misc_feature (889)..(889): n is a, c, g, or t
  misc_feature (892)..(892): n is a, c, g, or t
  misc_feature (900)..(900): n is a, c, g, or t
  misc_feature (908)..(908): n is a, c, g, or t
  misc_feature (914)..(914): n is a, c, g, or t
  misc_feature (927)..(927): n is a, c, g, or t
  misc_feature (1049)..(1049): n is a, c, g, or t
  misc_feature (1051)..(1051): n is a, c, g, or t
  misc_feature (1105)..(1105): n is a, c, g, or t
  misc_feature (1129)..(1129): n is a, c, g, or t
gtaatcctttatgaccctcaatctcgttcgattcattacttatgtcccgcatctgagtcactagaaacttcatctgggtcgttattacatgattcaattacctataattccgcgctactagtgtgcactcccacaaagcgtacctttagtattgctacaatactaagcgaaacgcgaagatgatattgtagcgccaatcgcgagaccacaatagaccttgatactatacaactgatgctcatcaagacactatacattggtactagaggctactacctatcagaacaatctgatagagagcactgaaagcactagatcatactatcataacataagctaatctctgtaattcaattattagtttcgccattatacttctactgtctcatcgagaacatcctgatcatctttacagtatactgcaagtcatccaattttatactatgtaaaantcgtagnctcgatggtctacactaccccatataatgcatgacggcgncgtgcatgttgtatatatactggagacatgtacgtgcatcatatatgtattataaaccaaactgtgcacgcctaggtcacctatgcntatggctgtaactacatataaggagaacatcaactcttagacanctactanttacatgcctcattactaattcttaaagattgtattcttagttactagttnntacaacgcaatattacaanagnacaccttgaacccctgcatantatatcttatantcatcacaatatatcaaagcgcaacctcggtggtgctccccagtntnaaccagttcactcatataattcctcggncantttaatttctacttatttattcactctgttcttatagtgttcctcgactctcctttaacttttcttnatntgaactantctcattntataantttttatgaaganacaaaggtctcttgttccacctcttcacaaccattgtataccaaaactttaatttctaattcaccttaattataaaaaaacctcttatgcacacaattaacattaatcatggctttattttntnacccaatacatgattctaatttaagtatcttccattataataaacacttgatcnattgctattcctaagtggcacatnacagtaa

SEQ ID NO: 580653 - DNA, 275 bp, Homo sapiens
cgttcactatttatttagaatgacttagcagcccttttaatttttcccagagggctcaaccccccttggagtgactccctagcactggccatggtcagggttgttggaacattttaccttgtccttccagaacccaggagtcaagttttaaatccggcccaacagaccggctttgagggcatttagtctcagaaaaaaaaaatgtagaaggatttcggaattagaattttgtgtattgtatctgtagttttgtaataaactaacgaaaaataaaa

SEQ ID NO: 580654 - DNA, 480 bp, Homo sapiens
aacaccgtgggccccttgctggcggctgcaactggtgccccagcccctttgtacctcgggggcctgccttagcccatggccgtgcaaccctggccccccgcctacttcgggtgcattaggaggctggcggtgaaccggtcccccgtccccattactcgctttgtggaggtccccggggcagtgggggccagtggctgcccaaccgcctaggacacaaccaaccccggcccctggtcagggccctgcaattgcctcacaccgccccttgtgctcgcctcataggtgtttatttggactttaagctctacgggggacagatcttgtttttgaaaatggtttaagttatagcttttttaacgaaaaaataaaatactgcaaaatgtttttatatttggcccctccccccctttttaattgtgaaagatttgtccccaatcatccctggttcccccttaaaaattaaaaagtaacttctgggta

SEQ ID NO: 580655 - DNA, 107 bp, Homo sapiens
  misc_feature (28)..(28): n is a, c, g, or t
  misc_feature (88)..(88): n is a, c, g, or t
  misc_feature (104)..(104): n is a, c, g, or t
gtgactgtggccctggcatctcctcatnatggtggtgagcactttaaaggcgagaaggtgttccgtgttaacgttgaagatgaaaatnacattaacataatccncga

SEQ ID NO: 580656 - DNA, 243 bp, Homo sapiens
tgtcctcaaagttacacttctttaaaaataatgttcttggccgggtgcgctggctcacgcctgtaatcccagcacttcgggaggccaaggcgggcagatcacgaggacaggagatcgaaaccatcctggctaacgcggtgaaaccccgtctctactaaaaatacaaaaattggccagcgcggcggcaggcacctgtaatcccagctactcaggaggattacgtgaactcaggatgcttcttga

SEQ ID NO: 580657 - DNA, 563 bp, Homo sapiens
gatctctcgacgacgcatcaaaatcagtcaggcaaccttggaattatgcgtatttgtcacttcattaggaatgtacagtccttgcgagtaccagatcttgtgcgaagtggtgagggttccggaatgataaaacactggctactcctactgggattaccattttaaggcaggacccaaattatggcataatggaatccatggataggaaggcggtgggagggctttaagaacaccggtccgaaggagctattaatttttccgggtagaacgggagtgttttaagaagagctggaatttggcccaggtctttggtaaaattttggcaggtaaggtgccgaagtgtaattccggcccagaagataaccagagaaaaacttgggagcgaaaaaaaaccaataaaaatccccccaacaaaatacagttgttcgtgtgattccatataatttcttaaaaatagtttagtgtgaccaaatatacagtgctggagtagaaaaaagaaggctagttgagacccgattttaaggcgcttgtatgacttgatgaatgcgtacgggtaccgagct

SEQ ID NO: 580658 - DNA, 194 bp, Homo sapiens
cacgtaacgccttccgcggccacgctacccctacacgagtaggagtagcactgccgctagccttggagtctaggcctcgggcgcgggtccagccgccgccgccgcagatgctgatgttggtggcagatgttcaaactcgaactttgactttcgaagccgagaaggcgatacctgtgcgtaccgagatcgagctc

SEQ ID NO: 580659 - DNA, 190 bp, Homo sapiens
  misc_feature (189)..(189): n is a, c, g, or t
atttttggccgcacgctccttctcctgactaccgctgttcgctctcgccgaggaacaagtcggtaaggaagcccgcgcgcagagccaatggcttttaaggataccggaaaaacacccgtggagccggagtggcaattcaccgaattcgaatcacctaacaaggccgcacgtaaattcttggaaaaggtnt

SEQ ID NO: 580660 - DNA, 142 bp, Homo sapiens
cctgggatagcattcgacagttcgccattaacttttgccctgtgtggctgcaaaggaaagagccagtccatcatcaaaatgaagccaatcacgtctctcgtctttgcttgcaaattattacgagtgatacgatgtaatcaca

SEQ ID NO: 580661 - DNA, 795 bp, Homo sapiens
gagtctcgtccggagactggcagcggcggcggggcggggcggagctcgagccccagcggtgagggcgggcgggcgggcgcgggggagggaggggggccggtcctgcgacgactccccggacggcgttctcctccgagcggcgccggtatcgcgcttggcgggggggcggggtacagcccatccatgaccatgggcgacaagaaagagccccgacaaggccaaaaaagacaagcggaaacctgccgcagcacgaaggcgtaggggatagtagcgtctgcacccttcagaaacagtgctgacgcccttttacatgcagcaatctgcgatgtgagcgaaaggcacctccaccagaaaaacctcggatcaattctcagctggtggcacacacacagtggcacacactagtatgccaccccaacaccccctagaaaggacgacagcagcgaccaaacgttgccaccgcaggacaacagacaaagccctgcaggaacaggaccaagcgcaaaaattcagctccctagctggttaaccaaaccagtagtagcagcaagccaagacccagccgacacacaacctgcttcagcgacgggctctcgaccactcgaaacaacttttctgaaaacaactacgtgggggccgcggcccacaagtgcaaaagcaccgtgggccatacgtgtacacaataggaccctgccgaagcaacggatcggaaccccagcagaagaacccccggtgagcaccgacgtcggaccacctcaaggggtgaggcaacacgccctaaaagagccaaggcaa

SEQ ID NO: 580662 - DNA, 1104 bp, Homo sapiens
  misc_feature (814)..(814): n is a, c, g, or t
  misc_feature (839)..(839): n is a, c, g, or t
  misc_feature (844)..(844): n is a, c, g, or t
  misc_feature (852)..(852): n is a, c, g, or t
  misc_feature (857)..(857): n is a, c, g, or t
  misc_feature (861)..(861): n is a, c, g, or t
  misc_feature (888)..(888): n is a, c, g, or t
  misc_feature (925)..(925): n is a, c, g, or t
  misc_feature (1002)..(1002): n is a, c, g, or t
  misc_feature (1005)..(1005): n is a, c, g, or t
gttgagaaactacacattatgttattatctatgatggggttgtctctccggtctcacagtaaacaacggctgtgtcgtgttttcccatgatttgtgtatccaccctttgggcactaatacttgatcaggctttaaacacaggaatcttgggaacaagtatgtcatgacttcatcctgtttgatccagtcgcgttatctccccgaggggttaccaagccgccccccctgggtatcgacgcggttaactggaaaggggacaaaaggggccctcccccgtggcctgcacttgtcccatgggcctccctggacgcgcagccccctgtgcgggttcacccggtgccagccggggcagctgacacacagctaaggagcccttatagcctggcgggggctggcagagccacacccccaaggtgcctgtggcccacgagggcttcagtcagccgctcaactcctccacagggcaacttttaggaaagggtttttagctagtggtttttcctcgcgttttaaatggcctcagccccgcctgcaagtggctaagaaagcccagcacaggtgcccacatggtgctatctgaacacaagtgcctcaagcttctcccccggcaccgggtcacaggccctgggagaccccgctattattctgcgtttcttctgccacaaagagactctcgtgggggccaattcaacaacctggccctgtggcacagcggaagccggagccacgggttcttgtggtgcctacacactctacggtttgcttgtccccctcgtgcccacactgctgtatgatttgggggccccccccctgngccggtggcctttgggctgcccccnctggngtgagggnggggntggngctcatggcccttcctccttgctcccncccctggcagcagggaaagggctttgcctgacaacancccacgctttatgtaaatattctgcacgttgttacttaggaagcctggggagggcaggggtgcccccatggctcccncgnactctgtttgtgccgagtgtattataaaatcgtgggggagatgcccggcctgggatgctgtttggagacggaataaatgttttttcattcaaaaaaaaa

SEQ ID NO: 580663 - DNA, 325 bp, Homo sapiens
ggctatggcacacacacagagtaaatactacttcacacccactagaatggctatcataaaaaagataatcactggcaagaatgtagagaaatcggaatggtgatatattgctagtgggaatgcaaaacggtgcagctgattttaaaaataatttgggcccgtgcagtggctcacgcctgtaatcccagcacattggtaggccgaggcaggtggatcacctgaggtcaggagttcgagaccaggcgtgggggcacacacctgtaaacccagctacttgggaggctgaggcaggagaattgcttgaacccggaaagaggagagtggg

SEQ ID NO: 580664 - DNA, 133 bp, Homo sapiens
tgctgacagatgtgagatgctcgggcgtagtgtgcacgtgctctggatactccagtctctcttcaggataaaaggtccaacccagtgtcttcaaaatgccagtggagcacactaggaaggagaaacggtgacc

SEQ ID NO: 580665 - DNA, 226 bp, Homo sapiens
agactaagtccctgtcacttctctggctctcctctcctgctaatcttggtatcctaattaatatcttctgccattgcgatacgctacagcggctgaaagtaagcgccatagaccaccttggctctcgtggttttgcaaagtattggtctccaccgccataagggccagagcttctgcctcctacatgtcctcccttcatcggttccaaatttgaagactgattgtt

SEQ ID NO: 580666 - DNA, 563 bp, Homo sapiens
ggagtcccccagtcgcttgttggacacgtcatctaggcgttttaagagttccaagcttgtcccgctagcaaacatctatgggcccggacaggatcctccgaggcctcctgctggcgcggtcgactatggaagtacacagagtggcactggctattgtgtttttacgatggtcactccctggatggcctgcaggtccacttttgtaccagtttagggttcctttcatgcacgactaagccaggcagaatcggctcacgctggcctgtctgctgttcatgtttgtgtctgtctgtcctgggaggcctggatgtctgtgctcccaactcaggacatccttccttccccaccaaggaggccatgattcatccaacacttcaccctgggaagcccagagctggcactaataggcaaggggcctctcaaggaaccttttgtagtgaaaataaacagggggccgtggcccggatgcccaaatgcgctcagatgcccaaacgcgtgcagcctttccgccagctcctgtattacaaagtgagtgaattcccaacaagcgcctgtgggtaccg

SEQ ID NO: 580667 - DNA, 192 bp, Homo sapiens
agtactaaatactttgcaaggcctcagaagctctgctatccacaggcaggtgagatattaccttccctaccacctggcagtcatagtctatgatgcgattcagctttgtggaagtgcttctgtaaagaacttcccccaacttaagatgatcttaatttgcttacttgtttactgtcccgctgaggagaaaat

SEQ ID NO: 580668 - DNA, 292 bp, Homo sapiens
  misc_feature (288)..(288): n is a, c, g, or t
acctagaggactcccttattccttctttattgactctaagtcactgtgacacagggaaaaatgaatttgaagaactgtgacataaaaacttgagaaattcattattacacagtgaaaccccatctctactataaacacaaaaaactagccgggcatggtggcgggcacccgcagtcccagctactcaggaggctcaggcaggagaatggcgtgaacctgggaggcggagcgtgcagtgagccgagatcgcgccactgaactgaagcccgggcgacacagcaagactcngctc

SEQ ID NO: 580669 - DNA, 1133 bp, Homo sapiens
  misc_feature (151)..(151): n is a, c, g, or t
  misc_feature (492)..(492): n is a, c, g, or t
  misc_feature (522)..(522): n is a, c, g, or t
  misc_feature (718)..(718): n is a, c, g, or t
  misc_feature (801)..(801): n is a, c, g, or t
tttttgttggctgttgcttggggccggcggtgacggtgtggttgcagtggcagaggcggcacagcgagggcgaggcgagtagtgctcctgggtgtgcagaatgctatctgtacggtgtgcgagtgcttgctgccgtcagctgtgctgcccntgtggaaccgaccccgtcgggtcgccgccagttttttatgcctctaattggcgcttcttcccccgcaccccgggccaggtctttgggcgagtccccccgcacatctctgctgtgcagccccttatcaggtctccctttgctcggcctccgccacaatcaccccgggttttcccctctcgccgacgcaatacggtgccacggcccacattcttaagcgcacacggaggggcctgttggtggtggaacacacgaggacaccacgtgttggggccacgccggcgtccctctccctccatatttgggggagcacgcgcgccgtttcccccgaggagctcccacgncgggggcacgaaacaagggttgtgtggcgnccctctctagggggggaccccttgtggatggggggcctttcttttatcccctccacccggggcccgaccggtgccccgcggttagagtgttcgtaagaccacgggcattctatctctcgccgagtatcacttctcgtgcgagccccactctactggtcgccacgagttgctccaggattactcaatgcgcgcgccnatcattattggtgaggcgacgagtgtgataagatgcctttctccaagaagcccgcgtttgtcttcgccaacaacacaatgagnagccgccgggtatacctcccagcaattatggggggagagatgtattattaagcactcctaccatcgtgctatataaccacgaagaatctccctctttatggcaagcaccgcccaccacaggcatccgtttcaaaggcaagcggtggaaccccctctccccaagatggctcccctgttgcacaaagagaaatgatctgcggtatgactcccaatgaaggcaccatgtctctccgggcgactcggagccgcgcttctaggtagtcaaacacccacccatttttaggagtttttcagaaaaaacaaaaacaaactttgggcccgcggacataaca

SEQ ID NO: 580670 - DNA, 261 bp, Homo sapiens
cagcgtatgcacattcactttacatacgtgtactatcatcatatttttttgagatagggtctcactgtgttgctcaggctggagtggaatggcactgatcttgtgctcactgcaacttccacttcccagtgctcaggcaattctcctgccccagcctcccaagtagctgcgactataggtgtgccccactgtacttggctaattttttttttttttttttgggtagagagggggtttggccattgttgccaagtctgggtc

SEQ ID NO: 580671 - DNA, 85 bp, Homo sapiens
attcggcacaggaacagaatttcatagcccaggctgccgtgttgtttgactcagaaggcccttctacttcagttttgaatccaca

SEQ ID NO: 580672 - DNA, 89 bp, Homo sapiens
ccttaagactccgggctggggcccccctccgagggcagcttccggccttgccggccccattaagggcttcagaagtgaaaaaaaaaaaa

SEQ ID NO: 580673 - DNA, 325 bp, Homo sapiens
ttcagaatcagccatgaagctttgtgtcaacttggaattcaaatcaaattttgccaaatccagtttgctttccctttgaattgctagatgtcgcaggtctattatgtgacaacaacttgaaaaagacttctatcccgtaacatctctgtagagaattgcacaggtaactatcttcatcaagactttgatggcaccataccatcactactcataaagctacatagtgagagagttgtgtgttgtgatcaatcccatagtgtctgacctctcaagcgctcgtcatcaagcgctaagactcagtcatcagtagtgtctcacactaagc

SEQ ID NO: 580674 - DNA, 85 bp, Homo sapiens
  misc_feature (79)..(80): n is a, c, g, or t
gccgccccagcggaattgtagaattcggctcccctagtgcccgtgggccttgtttccaaacaggctggtcgggaaccgnnagatc

SEQ ID NO: 580675 - DNA, 205 bp, Homo sapiens
tctacctcgcgggtgctctacctcgggtccaaagtgcgggattacaggcgtgagccactgtgcctggccgaaacagggtatttttgggtcgcccaggctggagtgcagtggtacaatcacgggtcattgcagtcccgacctcttgggcttaaacagtcctcccagcttaacctcccaagtagctgggaccacaggcacccgcgag

SEQ ID NO: 580676 - DNA, 305 bp, Homo sapiens
cccctcccgtacacagcaattatcacctgtattatatttagccacgacacacgacagcagatgtcatgtgtgcgacacacctccctgggcaaggagatttttgtttaaattagagatggggtctcgctatgctacccacattggtctccaattcccgagctcaagcaatcctcccatatcagtctcccaagtagctgggaccacaggtccccaccaccgtgaccagctccaatatttttttaattgtggttaaaaaaaatatcaaataaaatttgccattctaaccttttttttttttttttttt

SEQ ID NO: 580677 - DNA, 108 bp, Homo sapiens
ctagaggatcccaatgctctggaacaggggggactcagtgttctggatgattctgcagtggaactcatgcccgctccaacggacttgcttggctgtgcacaccctgag

SEQ ID NO: 580678 - DNA, 180 bp, Homo sapiens
gtacactagtatgccatcatctaagccactgaatcaagtgtatatcaggcttatttcaacattccaatagccctggttttcctgctatgaatctagtatacgtggtcaaaggttatgggggacatttgtagaccctaggaacataccccagaagtgaaaagatgggagctagggccacaa

SEQ ID NO: 580679 - DNA, 365 bp, Homo sapiens
gatggccaaagtgggcttccagaagcttctttttcccctaattgcgggcctcccccatttgcatgcaatgactattttgtaggacccatttaagcagaagggaaaaaagtaggcagaaatgagcagttcgctcctccctgataaaagttgtcccaaagggttgcttaaggaatttgccccccagcttcccccataaaaggatttcatgagcagatcagggcccttagcaaatgtaaaaataaaatttaactttcatttggcaagcaaagaaaaaaaagtttaataccagataagcttttgatttttgtattgtttgcatccccctgcccccaataaataaagtttttttttagttcccaatttga

SEQ ID NO: 580680 - DNA, 435 bp, Homo sapiens
acctgactccaaacaggacagagagtagtaccattgttcattttcaccacgaggatttcatctcaagaaaacattttctttgctcatccataagaagcaactcttcatcaattcaagttttatgatgagattgcagtattcagacacatcttcaggataattctagttctcttgctatttctacatctgcaggtatttcctctactgaagttttggatccctcaaagtcacccatgaaggttggaatcaacttcttccaaactcctgttcgtgttgatatttgaccccctctcatgaatcatgaatgttcttaatggaatttagaatggtggatccttttcagaaggttttcaatttactttgcccaggtctatcagagaaatcactatccatgacagctatagccttattaaatcttatttcttaaataataaa

SEQ ID NO: 580681 - DNA, 647 bp, Homo sapiens
  misc_feature (196)..(196): n is a, c, g, or t
  misc_feature (526)..(527): n is a, c, g, or t
  misc_feature (537)..(537): n is a, c, g, or t
  misc_feature (568)..(568): n is a, c, g, or t
gctgtccctcactcgccgccgacgacctgtctcgccgagcgcacgccttgctgccgccccgcagaaatgcttcggttacccacagtctttcgccagatgagaccggtgtccagggtactggctcctcatctcacccgggcttatgccaaagatgtaaaattttggtgcagatgcccgagccttaatgcttcaaggntgtagaccttttagccgatgctgtggccgttacaatggggccaaagggaagaacagtgattattgagcagagttggggaagtcccaaagtaacaaaagatggtgtgactgttgcaaagtcaattgacttaaaagataaatacaagaacattggagctaaacttgttcaagatgttgccaataacacaaatgaagaagctggggatggcactaccactgctactgtactggcacgctctatagccaaggaaggcttcgagaagattagcaaaggtgctaatccagtggaaaatcaggagaggtgtgatgttagctgttgatgctgtaattnntgaattaaanagcagtctaaactgtgacaccctgaagaatngcacaggttgctacgatttctgcaaggagaaaaagaattggatatcatctctgattgatgaaaaagtgggagaaaggtt

SEQ ID NO: 580682 - DNA, 322 bp, Homo sapiens
ccagggggccctccaaaagcttttttatgtccccctgggacctgtgtcctgttcaaaattggaaaaggggggggccggggtcagctccctttgtttgggggtcagcacccgcccccccagttgaggggctggccttgggggtttgctggcccggggggggatagtataggaagtaaaaggggaaggggggttaaataaaaaatttttaataggcgggggttgggggagagccccaattttggggggggggggagggtagggaaaaggatcccctgggggaatcccccctttcagaaccaataaaataaaattgcccttttta

SEQ ID NO: 580683 - DNA, 123 bp, Homo sapiens
atgggacagatgtcattacccacattgaggtagagctcactctcccaggtcagaagagccacatatatactgcagtcagaatccactgagtaagcagctcctattcagcataaaggcacaggg

SEQ ID NO: 580684 - DNA, 427 bp, Homo sapiens
tcctaactcagcaatcctctggctcagcctcacaagtagctaggataacaggcgcaggccatcatgaccaacaaaaagaaatttttaatatggatggcatgatgaattatttggattatatggagttaaatagatttcctcattggttaattggtgcggtttcctctttatggtggctataagaaaattaacaattaactatatgggtcactttggtgacctccatggtattcctatggggcaaggcggtgctagactcaccagaaggtatacttattttaatttttaggacggatgtatacggggccctggtatacatgtgtatacctagggcagttaactgattactcttttaagagggagaagatcctcaaaattcgggattttaggctggacactttaaagccggaaacagctactaaaggtg

SEQ ID NO: 580685 - DNA, 255 bp, Homo sapiens
ctcctagaggatcccttccaaagtgctgggattaaggcgtgagcaccctgcctgccttttcttcatgtattgttattatgtttttttttggagacagagtcttactttgtcacccaggctggagtgcagtggcgcaatctcatctcactgcaacctccgcctcccgggttcaagctattctcctgcctcagcctcctcagtagctgagatgacaggcccacgccaccacgccccgctaattttggtgtaattagt

SEQ ID NO: 580686 - DNA, 120 bp, Homo sapiens
tctagcaggatcctcttatttccttctttatgaaatactttttgttaatagggacaaccaaagaaaaatacacaattttatatgtgtagatcatataaatacaataaagaaggaaaataa

SEQ ID NO: 580687 - DNA, 833 bp, Homo sapiens
gccggagtcccgaggataaagcttggggttcatcctccttccctggatcactccacagctcctcaggtcttccccaatcctagggactcggctgccgggaccgctgctatgtgacgacattttcactcagatgccgggagggcaacctgcagttcgtcgcgattcgcactgctggctggacaactgcggagcaacgacctcaaccacagggggcacgatcatggcttctacctcccttgccggctgggccgtgcacgagagggccgcgtctgtctgttggttgatgagtgttgattcatgcggggggcatcggatctaatgtaatgaactctgtggggatgactaccccccttgcatcttggctgccagtcatggacaccgatgaatatgtgtacagaagctaattgcatgttcaacggcaagacatcacagtgcagtgaactgaacacggtaattgtgcccctgcactagtggcctcgttattatggaggccgaatgcatcaaggtgagcagagtgaccctgtggtgtgcgaatactggaggccccttgtcgagctagtctgtagacacacgtatgcgacgcaagatgcccttgtgttgcacagagagccaaagggtctaccccgtgcagcagatgcttctccgagagcggtgcgagagaaagatgggccagaatctcaaccgtattccattcatggacacattctggaaggggaccacctcgcactcggccccgtgagtcagcacgtgtgggaagaagggttgtccatcggaaaataatcctggcctcttggggctgggttagggtgaagctgggtacctgaccttgccaa

SEQ ID NO: 580688 - DNA, 85 bp, Homo sapiens
aaaaaaaaaacaatacaaacaacaccaacaacaactaaacaacacgccacaaaaaacaaatagagctagctataggcctggtgtt

SEQ ID NO: 580689 - DNA, 269 bp, Homo sapiens
ctagaggatcccgtgctccagttcatcgcgttttcagcacgccgtaatcctcagacagcgtctggtcacgtcagcaagcaggggatgtcagggggcccaagcctccctctttccggggggtgttgatccaagaccaggtgggtgaactgagagtccaccgagtacgcccgagcatttcacagaccgcagcttgcgcgaaggtccatctgcgacgtgttagctgatacgcgattgaagatggagagcacggcgtaccgagtctacgaatt

SEQ ID NO: 580690 - DNA, 131 bp, Homo sapiens
acaccttgcaccgtgtatctctctattctttcacctagcctgtagatttgtgtgcttgacgcccggtgtcaccgtggctgacacctcaagagacatatggctatgtacatgaatgtgtctccgtgtagtgt

SEQ ID NO: 580691 - DNA, 1019 bp, Homo sapiens
gggagaagctgtccctgcggtagaatgagcgggtgcccctcactgcgcctgctctaatcaaagcctgcggatagcgccgaggtcccggcatgtgatggacacgagagcactggagaaggaggttcaggctcttcgggcccaggtggatggcgtggcgtttccaaggggaggctcctcacaattgcactgagatcccacggaggtatgggcacattcccccgggctacatcgtcacaggtagtgctgtgtgatgcagcatgcgcgtgtgggatgatcattcggagtcctcgcagccaaggccaggtgactggaggagcttgcatgtctggttctcacacctgaggcggtggtcagcttgcagctgcgcatgcaagtcaggcagaatggattgtggctcctgggccttgatgggatgactcgtaagccaacgggcttcagccaattgaagccattgaagaaggcctactcatggaaatagcgtgagtccgaaaaggtgtatgcaacacagcacggtgctcctccatgaagggcccgggcatgggccgtccgggaaggcagccagccggtcagcatgtggtagggcacctgaaagcgagtagctgtgggtgctatcgagaagcagtactcggcaggaagtgcgctggatgatgggggcatctcatgcgggccggcctgaggacgccgcgaggtacgcttgtgccctcctgtctagccacggattggccatgatgcttgcttgagcctagaagcaaggaatcttgatggccgcctgtcaggaggagatagaccaggttgcgcggtttcatttgcttcgcagggtcattgggcaattgcttggtcggcgccacacgagcggcgtccctgggacgtagaggtgcggttcgggtaagggaaacgactcagtactaaagaaggagggtgccggctccggaagaagtcagatatccaggagcaggtcctctggaatcccgacgctttggtgggcaaaaaaggtgtgcggtaacactaggacctttctg

SEQ ID NO: 580692 - DNA, 1152 bp, Homo sapiens
  misc_feature (1)..(1): n is a, c, g, or t
  misc_feature (783)..(783): n is a, c, g, or t
ntaccccttttgtatctactgtctccctgtggggggttcctacacccgaatttccaaggggggcgctgctccgccccaccccaaaatttgtgtgatatgggtaactcacacggctggtcctacgccctaggtcctctcgtcctcgccacacgagggtttggatagtgaacccccttcctcacagagccccaaccgcgtttgttttctccacagtcgaatttctcccatctgcttcctttgtttccccctggggacgcaccctgggtccccacaaccagagccactgtttgctgtggcgccgcctcacagaagaccccgcgtgtgagcacgcttgtttcggcccacggccgccctccgcccgaggggccacccccggggaaacacacacacatgggtgtggagaaatatattggtggggcccacacgagaacacacaccgctcggtgcacacgctgggcctccctctggggagaccacctgttggccccccctcgggagaatctcactctcgagaggataaagtcccccccgcgaggggagtgataagaactgttataggcgggtgatgactggatagaggggaatctttcaccgcgggggtcccctgctgtctgtctatatatattggccacgccctcgtgtgtctctctcggagagttcgctccacacacccgcggggtctcacatgttttcacaaactctaatttgttctagagaccacactgttcttcgccacgccttctttctcgtggctcgttccacctctgtggggaagtctaaagntgcttctcacacaacacgggcacttcacacccacgtgtgagacccacttcttctcacgcccttcttctgagggctctggagagaaaggcctcgtttctgagagcctcacccctattcacgtcacgtaagaggaagaagaatgtccacgagaaaaaatattctcttcacggagaaagttctcccctgcacgaattttttttccctgttaaaatatcacggaaatatatggccgggtgcggtggctcaccacccctgtaaatcccacgcacctttgggagaggctgaaggcgggcggaaacaccctgaggtcacggtgttcgagaccagcccggcccacatggtgaaaccccgtctttacttaaaatacca

SEQ ID NO: 580693 - DNA, 518 bp, Homo sapiens
ggggcgtatgagagtaggggatggcttaggtttaggcttgggtgttcacaggttagatataaagaggtgtcatgacatgatggactcacgaggccaagagaacagacagaaaaagaggccctctaagtggctaggtcttcagggctggtgcccagaagaaaaaacccgagttgtagaaagacctggggagtaggcccagagaatgtcctgaagatggggagatcactctggaagcctgcacaaggatggtaggtaggacacttaagagttaggcagagaaaagatcatataacttggtgagcataaattctttgttacccaacagaaaccaaaaaaaaaaaaactggctttttttcccaagagggtgcagggggcagggaccccaattggtgttggtacgcccttttgtattacctgcaagtggggaccggtttaattcccctctgtggtgttccactattgccggttggaattccatgtggtaatccattaatgacagttggaattaggtgtgggta

SEQ ID NO: 580694 - DNA, 197 bp, Homo sapiens
  misc_feature (104)..(104): n is a, c, g, or t
gtgatctagaggaccctcacactagtcaagtgcattaaagtgctttgttatcactcaagttggttttagaggagacgaatgactactccaatctctggcttacncagtaaaggactacaagccctttgggcactttgcatggatgccatccacttgagtgaaccaagattcacataatgaaagccaccagaagaggt

SEQ ID NO: 580695 - DNA, 361 bp, Homo sapiens
tgctatgtatatttcatttccataacgtttttgaaatgacaaatctagaaatgaagagttgattagtggttgtcaggagttatggagggggtgggagcaggaagtcacgggttgtggctataaaatggcaagatgagggaactttatggtaacgaaaatgttctgtatcttgacagtatcaatgtctatatcctgattataacattgtgctattatatgctgttaccattggaaaaaaaatgggtaaacggtacacaggatcttgattatttcttacaactacatatggatctacaattatctcaaaattaaaagttaatttttaaaaacaaattcaggccatacacatacaaaactaaat

SEQ ID NO: 580696 - DNA, 98 bp, Homo sapiens
gcggccgcctactactactactgctcgaattcaagcttctaacgatgccggggacatggaaataaagcaccccatcggccctgggcccctgcaaaaaa

SEQ ID NO: 580697 - DNA, 112 bp, Homo sapiens
agttagagaggtggcagcacagacgaggtggacagccagaggagggttgacaccttcctctaccagctgccaggaacagtccagccatgctcctcagcctcctctgtgctgt

SEQ ID NO: 580698 - DNA, 329 bp, Homo sapiens
  misc_feature (329)..(329): n is a, c, g, or t
ccccgttcactttctacacacgttactttgaagtcaccataaacttcagtatcatcaggccaatatttatagcatttaacccggccaacctcaactaaatttgtaaccatcacaatgcaagcagattgttcttgccaaatcatcctccagaaatcatacactgtttcatgaacgggaccttgggttgcaatgtaatgacttggtctctggtagccatcaatatagttggcattaatataatctgaggaaggatcatcctctacgggttgcaaaatcactctggagtgatcatatgctatgcgtacgacagtgaccgggatactcatagn

SEQ ID NO: 580699 - DNA, 662 bp, Homo sapiens
gcaggagttcaagaccaggctgggcaacatagcgagaccctatctctaaaattaaaaaaaaaaaattctctttttttgagacggagtcttgctctgttgcccaggctggagtgcagtggagcaatcttggctcactgcggcctctgcctccagagttccagtgattctcctgcctcagcctcctgggtagctgggattacaagcgcatgccaccacgcctggctaatttttgtattagagtagagacggggtttcaccatgttggccaggactggatctccaaatcctgacctcaggtgatccacccacactcagcctcccaaagttctgggattacaggcgtgagccaccacgcccggccaaaaaatttatagtattaaattggctgggcatggtggtgtgcacctgtagtcccagactacttggacactgaggtgagaggactgctagagcctaggaggacgaggtagcacgcgaaccgcgagcataccgacgcaacagcaaacaccgtgatgacagagcaacgagatcgcaacacaagacaaacaagaaaaacaaaaaaccatacgctagaggaaagacataacgcggaccaagcacaaatgaagaaaacgagagccaccaaaggtacgcaacaagcacagcgaaacagagacgaacca

SEQ ID NO: 580700 - DNA, 87 bp, Homo sapiens
ttttttttttttggttggttatttatttacttgatacacttcattttttagagtagctttagggttacagaaagttgagcaaaaagt

SEQ ID NO: 580701 - DNA, 154 bp, Homo sapiens
  misc_feature (19)..(20): n is a, c, g, or t
  misc_feature (26)..(26): n is a, c, g, or t
  misc_feature (106)..(107): n is a, c, g, or t
agtgcaggatgtacattcnntcccantgttatgcagacatacagacggtatcggcatacgttatagactgtatactcagtgcagagatctatgagactgcatttannctcagaggggccaagtgttaatgccccatgccccttccgtttaaggg

SEQ ID NO: 580702 - DNA, 241 bp, Homo sapiens
acctgggaggcagaggctgaggtgagctgagatcacaccaaatgcactccagcccaggcaacagagagactctgtctcaaaaaaaaaaaaaaaaaagcacaaatggtattctgtatctgaaaattgtttggattaacttttgattcttgcctggttaaagaattacaattcttacctcagatcatgcttaaactatcttatttcttctcatcacaataaaataaattagtgtcatttttat

SEQ ID NO: 580703 - DNA, 132 bp, Homo sapiens
gcgactctccggagtatacatgagccaagcatggatcggtgcgtatgatcgacgtgtatacacgagtgcggtacatgcctccgtgtacaagtgcgtcgacacagtgagcaccgtgctcgagctccaaatata

SEQ ID NO: 580704 - DNA, 361 bp, Homo sapiens
taagatctatcagctattcaaaaactaaaagtctggttagcttacaatcttatgaatatggtacgcgtcagattatcgtttgtgtgactctcctattagtgtatccgaatacctgctgcttgacttcctcaagagctcttacccagtctcgcacagggagaacccgctcgcgagtgctgtaacactccagagaatttgcctgccattttctaattacggacaaaaacgggaagcaggtgtgggacacaagctctttcacagaagtaagcagaaggcttccagtactgatataattcattcacactcacgagtcccttgatctccccaactgtcctaggtggtagggataattacccccatt

SEQ ID NO: 580705 - DNA, 145 bp, Homo sapiens
gttaactatgccgtggtgcaaaactgtagaacgttgcttattcactgtgccttggtggcattgcatgtctgcgtctcgagtgtcctgttccctcctcatgcaacatcgtgcattttcaatacactctactgtcctccagcacctt

SEQ ID NO: 580706 - DNA, 335 bp, Homo sapiens
  misc_feature (73)..(73): n is a, c, g, or t
ttcttgatatttatccaagggaaaaaaatatacatatataaagatttaaagtccgggtgtggtggctcacacntgtaatcccagtactttgggaggctgaggcaggcagatccctgagatcaggagtttgagaccagcctgaccagcatggtgaaactcggtctatactaaaactataaaaattagatgggcatggtggtgcttgcgtgtatgcccagttactcgggaggctgagtcaggaaaattgcttgaacctgggaggcagaggttgcagtgagctgagatcgtgccattgcactccagcctgggccacaagaatgaaattccataaaaaa

SEQ ID NO: 580707 - DNA, 383 bp, Homo sapiens
atgtcagaatctcttttgtttttaaggctgaatagtattctattgtgtatataaaccacattttctttattcatctgttaaacgcttaggttgatttcataacttagctattgtgaataatgctgcaatgaacatgagactacagacatcccttcaacaaactgatttcagatgtttggggtaaatacccagaagtgggattgctggatcatatggcaattatatttgtagtttttttgaggaacctctatactgttttccataatggctgtaccaatttacattcctaccaatggtgtgcaagggttcccttttctccacatccttggtaacacttatctttcatcttcttgataaaagatattcagacaaatgagaaatga

SEQ ID NO: 580708 - DNA, 405 bp, Homo sapiens
tctggatgcaagtgtctccgttaccaattgctataatctgttggctgacactcccatgaatttgccaagcaatcaggttgaaacacaacagaaaatcacagagagcacttccagaccacaacgcaaattcttagattttggttttagttccagacaaaaatgttcacttcaaatactctttaggggatccaagaatgtctgaattgtagaaaatttagaaaacacagtttgcagaaaggaactgcatttgtatttgcttctggtatgaggagcctgtgtctctaatcagtccgggggcttgcaggaggggagagtggggctgagccagggctctggaagtacaaggataagaggtgatcttaatcgctaccagctgctttgtaactgggtgggacccagactgtg

SEQ ID NO: 580709 - DNA, 355 bp, Homo sapiens
atgtggatgttgctgtgttagttattacagatcctgcagaatatccgccatatcgtcgggcgtgttcttcttcctgagccaggatgtcttcgaagatgcgacgggtagtcgggtctttgtcaccgatgtactggattatctcgcggtagctgtctaccgcgatccgctcggccaccaggtcttcgtataccatttccttcaaagtgttgcccgccacgttattgcgcatgggagtttttcgacagcaggtcggggttgaactccggctcgccgcccagttgcacgatacgctcggccagtttgtcggcgtgctcggcttcctgggtcgcatgttccaggaactcatcggcagcca

SEQ ID NO: 580710 - DNA, 414 bp, Homo sapiens
gctcggcaccctaatattacgcatgaggtcgtcaggacgttcgcaactggacaggatgggggacagagcgtcaacaagatccctctccccgttagtaaggcgggcagcgcacacctgaccaaacagatcgggcttcgatccgaagttggagtacaccgcccccttggtgaatccggcatccgtggcaatgcgtcgcagactggcgccgacatagccgtcccgttcaaagttgtgggcggctacggcaagtattctgcttctcacctcatcgcggtgaggtcgttctactgcggcaggcatcacaagttgtcgtctttcgaggaatccagaactagatcggtggcggtaccaccggtatcggataccaatggtatccgtctctagggtccagcccaaatcggtcggctagggtag

SEQ ID NO: 580711 - DNA, 112 bp, Homo sapiens
agtagagtattgctgacttatccttcttctgggaactttgtcccagaggggcacctgccgtgtattatggtgatcacgtgggcccctcactgggaaagtatctcccagatat

SEQ ID NO: 580712 - DNA, 343 bp, Homo sapiens
tggagtagtcaaaaaaattagcatggtgacatgcacctgtagtcccagctactcaggaggctgagtcaggagaatcacttgaacccgggaggcagaggttgcagtgagccgagatcgtgcccccactgcactccagcctggcaacaaagtgagactccatctcaaaaaaaaaaaaaaaaagttacacgaaaaaaaaaacaagggcagaaagtgcaatcacttttggcaccaccctaacagaaaatgacataaccgggctggggagcgggttgctcacacctgtattcccaacacttggggaggccgaggcgagtggatggctagaggtcaggagtccaaaacc

SEQ ID NO: 580713 - DNA, 669 bp, Homo sapiens
taaaagccgggatggtaaccagaattttcttttttcccccttctcagctgtaaatatgatatctcctttacagggccccagcttaagggcaaagtgagttattgtgtaaacaaaggcgagggacaaaagagagttaacatcttagaacaggtggaaaaagccaggggtggtggtggtttcgtgggaaaccaccaacacttgcgaggtttagctttttctcccagggtttggactacaagaaaagaaaaaccagtgcttttgtgcaagaattaaaaagtggtggttgaggtgtgccttaaatttaaccattccccactttttattcatatttccaccactcacttcgagggcttttaagaagtcaggtgctcaccggggcggagcgggtagtacattctggcttcttaaaaagctaagtccggggtcccgtctgatttagcgtcccaggaacttccgtgagaaacacccgatcgcagagggtaatttctcgggagttggttggcaggaataccggggagtatggccacccggttccacaatgcggtaatgaatccagcaggaaggtaaggtctcagggtcccaggaggggcagcaggggatgtgcacaggggccaaaaaagggttgtgcgcagatctgccgaaggactgaaggtgggcagagggggtcca

SEQ ID NO: 580714 - DNA, 261 bp, Homo sapiens
cgacgatgactgtgccttcacaggcaaattactcttcgggtccgaaggtttggatttaacgcgctccattgccccggcgtggcacgccattcgaagcccttccgggctggaactggtgtcgtaggagcctggggtgtatcgtactccctgctgtcggtgtctcctcactcttctgagctcttattactaatcaagccctgcttcaagttaactaatatagactgaatgattaacaactgatgcccaataaacctaactgca

SEQ ID NO: 580715 - DNA, 443 bp, Homo sapiens
tcgaatcgacggtttctccacgatacacaggcttccatctaaagtcacgcttactaaaagggaaaaaaatgaaccagcaaagtatatagagtagcgtgacatttgcttattttctagactttacatttggctaccgaaaccttttaattcccttgtgtaattttacctgttagtccaaagagggaccgctctttgggcactaaggaaaaaaccttgttgagattggaattattatttaaaaattcaggcaaacagaattcttggactggaaaattactttggccaaacagaaaaattgcactaagagggcttcttaacagcagaatgggttaaggtgggggaataattaggtgagcttggaagaccgggttaattaaaaatatgggccataggagaaaaaaggagaatggcaagggatggcccttattctaccagatatagaa

SEQ ID NO: 580716 - DNA, 216 bp, Homo sapiens
tgtattttgagtcaggtctagctctgtcacccttggctggacgcactggtgtgatcacggctcactgcagccttgacctccctggctcaagcaatcctcccagctcagcctcctgagtcgttgggactacaggcacgtgccaccacgcctgacacattttttaaatttttgtagagacagtgtttcaccatgttgcccaggcaggtctcaaactcc

SEQ ID NO: 580717 - DNA, 1194 bp, Homo sapiens
  misc_feature (298)..(298): n is a, c, g, or t
agcgggaggacaaactggctggtaaaccagcagggaccaggtcaatatgaggctcaccactctggccacgcaacgggcctgcggatggacgatcgtcacagattcacgaagagctctcaaggattggaagggaggacccttgaagaattgtcactctagtgttgcaagtgctgtggtcccgcgtgtaaccgtaatgtccgtggtactaatagaagtatgccctgcaacaatgaatgggggctaatcacctcagtcattggagagtgcgttcgccggactgagtgggagacacctacantctacccgtccatgggggacgcgactgaaacatctattcacatgaggttgtgatgctgtacctgatgcataaaataccctccgtctctattctctatgtagtccgtaaactcttggtgtgtgtacaatgatgtgaaagagacgaagatgccccgggagctggggtacattcgctttcttcatgggcatccaggcccgtcaatccgcttgttgaacaggagcacggcaaggtcaagctcgtatctactcgaaggagagacaagtggatgccggttgtctgtggccgataggcagagcaggacggcgacacgaccttgattcgcgaacgagaaaggatcgtaggttgtagatgtctggggtgctctcgtccacgtggggggaatcctatatcgtcgttagagggggggcagggggagcgcaaccgtggggggaaaggaatgcccaaaagaaattgctggccttcagggaaagaaaataaactttggaacacgttgcggttggaccctttccgtgtgcgtgcaataaggtaggccaggaaagggttgaccatcccgtgggccaacgactaacggaaagcaaattgtaaagaaacccaactcgcttggaattggacgaagtggcttaaaagcctttcgcggatgccatggtcggggagagaaacatttgttctgaaccactaagtcctaggggaatttgcggtacgttgctatggcttcgaaggcattccccagggagggaagatacgaacggggtggtaccataaaatttacagggaagagccaacactctcgcaaatgtgctcaatacacccagcgttgtaaataatggtaattaactataagtttcccgaaagaacaagaagggggttcgaatacacacgcaaggtgggactaggaa

SEQ ID NO: 580718 - DNA, 356 bp, Homo sapiens
ccggaacccaagatggctgcgctgctgctgagacacgttggtcgtcattgcctgcgagcccacttcagccctcagctctgcatcagaaatgctgtgcctttgggaaccacggccaaagaagagatggcgcgggtctggaataagaatatagggtcccgtgctctggctgcccacattactatctacagttggtctcttaccatggcgatgtccatctgccaccgcggcactggtattgctgtgagtgcagatgtgggacctacgtactgtgatggactgtatggggctggcagccatgtgaagcggaggctgccaggatgatctcactacacattattacattgaccctctttgtg

SEQ ID NO: 580719 - DNA, 749 bp, Homo sapiens
  misc_feature (47)..(47): n is a, c, g, or t
  misc_feature (219)..(219): n is a, c, g, or t
  misc_feature (224)..(224): n is a, c, g, or t
ttggagcgagtgtgaggctatcggatgatctctcattcccagccaanatgtgatgtgcagtagagcaggagacgaaacacagtccatccattccagacccatcgatgtcacagtagagagagaattgctggttagctttcagaggtatgaaacagagaagctcgctctgttgagctccactatcggcgacgacacgacaatctatctcagtgatatcangagtntgctccgtgtctctgtcaggctacgggcagagtgcataaagctgggtcttcttactagtcccgcgctcacaaatataaggagtatttgaaatagagagatcccgcacatacggaattctgagccatgtgttacagtcgatgcatcatatagctatgatatcttcatcacactatggtgagtatcagtgcagcagcagtgcagcatatagatatggaatcagtcatgagtataaacgagagtagtagtcattctagcatcctgatcgccttctggtgcttgcagtaaacctgatagtaagatgtctgccacagagtgtagatcctagtgagctgtcgtcctctaaggagccagggtgtctgcaataccacaggtagctggctgatacctactccatgtttcaagtagaatacgtcagtagtctctggacggtacatatcctagccgtgtgtaagagagatcatgaggcagcacagaagtcgaggcatgctcttcgggagtgccaggaacgactcattctgtttcag

SEQ ID NO: 580720 - DNA, 323 bp, Homo sapiens
  misc_feature (2)..(2): n is a, c, g, or t
  misc_feature (68)..(68): n is a, c, g, or t
gngccattgtggaaagcagtataaagttttctaaagttatttaaaatagaactacgactgggcgcggnggcgcgtgcttgtaatccaaacacggcgggcccatcactgaggttaggagtttgagaccagcttggccaacatgacgaaaccccgcctctattaaaaatacaaaaattaaccaggcagggtagtgcacacctgtaaccccagctactcaggaggctgagacacaagaatcgtttgaactcgggaggcggaggttgcagtgagttgagaacacaccgctgtactccagcctgagcaacagagcgagattctgtctt

SEQ ID NO: 580721 - DNA, 386 bp, Homo sapiens
  misc_feature (297)..(297): n is a, c, g, or t
  misc_feature (355)..(355): n is a, c, g, or t
tgtcctgcctgccagggtccaaaacgcggaagatcattaccccaccaagaaccccttcacgtggcttttcctgctggtgtcctgccccaactacacctacaaggtggggtcctggatcggtttcgccatcatgacgcagtgtttcccagtggccctgttttccctggtgggcttcacccagatgaccatttgggccaagggcaagccccgcagctacctgaaggagttccgggactacccgcccctgggcatgcccatcatccccttcctgctttgagcgctcacccctgctgaggntcagcccctcaacccggtggcattttgggggaggagtggggcccccagctttccagcncccggaataaagcccgcctgccccagtcgga

SEQ ID NO: 580722 - DNA, 925 bp, Homo sapiens
gaacagaaggccaccgaaaagcagcacatcacgttagccttggagaaacaataagctggaatgaaagagcgggtcattctgactctgcagtagctaaagagcattagaacatcacagaagtgaaatactcggctgaacagggacatgaaagatagaagtaagtcgagagatgcccatggaaaatgacaatgagaaccctagcttcgccgacaggcagctgcaccacactgatcatcttgcgcagatgtccttcagcggtacaacgaacgaggaattgaatgctctgaatttgatgctagcaacggctgctctgagaaacatctctgaacgaaggaaagttacaagtttcgtcgtcgtcagacaagaggcgaagttgacaactttactctggcatataaatactgcctatgccagcactccagcaggaagtcgaaggcgaggctgctatcaggagccatgcagttgcgtcgagagatggaagcccacgcatagaagcctcgactcgaacttcttggcgtttcgagtggcagggcattcaacagctacacgctgatgaaagacgcttcatcatgcgtgacacacgaccgtacttatctcgcgctgtggtagttgcacgttgaggccatcaagagccaacatgtctctgatcatgaaggttcacccaagacgtttatagccgctagctatgccctccagagtccctgaccccgtggggtgtacagtgaggagacgccttagagcccggtatcctaatgcgtgttcagaaactggtcgcgaagggtagcagatgatttgatgaaaacgagacaaagagcgttgtaccaggtacttacctcatcgtacgtaacagtagcctggtcctattcccaagctcaggaaacgtgataggccgccgcgaagagctcgtgcccctgaggcattttac

SEQ ID NO: 580723 - DNA, 453 bp, Homo sapiens
  misc_feature (120)..(120): n is a, c, g, or t
  misc_feature (134)..(134): n is a, c, g, or t
  misc_feature (153)..(153): n is a, c, g, or t
  misc_feature (160)..(161): n is a, c, g, or t
  misc_feature (182)..(182): n is a, c, g, or t
  misc_feature (232)..(232): n is a, c, g, or t
  misc_feature (249)..(249): n is a, c, g, or t
  misc_feature (265)..(265): n is a, c, g, or t
  misc_feature (333)..(333): n is a, c, g, or t
  misc_feature (380)..(380): n is a, c, g, or t
  misc_feature (386)..(386): n is a, c, g, or t
  misc_feature (428)..(428): n is a, c, g, or t
  misc_feature (445)..(445): n is a, c, g, or t
ttttttagagttaaagatagagctttatttccaactctgctctaccacactagcgtttcccaccaactctgggggcagagaccttcacaggcttcacaatcttttgtttaggtgctgccnttgtgggggccttngcagcaagcattgctgtcntctttgnngcctgcttagccttttttgcntccttggcagccctgatagcctggtctcggtgggctttctaacctctggnttctgattcctcttggncattatatcagcaagngatgcaccagtgatggctcgttggaatttgacttcacggcgggttctttccttttgaatttcttccgnattgccctttcttgggtttccttctgtagaggaaagtccagtttaantgccgnggattccttttggaaaggaatgctgaccaaattttgcattangaaactggaaaaccttnccgtcggc

SEQ ID NO: 580724 - DNA, 136 bp, Homo sapiens
gcggccgcctactactactactactactgctcgaattcaagcttctaacgatgtacggggacatgctgtaggaaaaatgatgcttatagacttgctcacagcaagattgccacaaaccttcagtttgtccaaaaaa

SEQ ID NO: 580725 - DNA, 397 bp, Homo sapiens
gagtcgagctcggtcccaagtttattagaaaaaaaagacttgaggtgtgagaatgtgatgagacttcagagatcaatagtccaactctcggccgggcgcagtggctcacgtctgtaatcccagcactttgggaggccaaggcaagtggatcacctgaggttaagagttcaagaccagcctggccaacatggcaaaaccccgtctctactaaaaatacaaaaattagctgggtgtggtggtgcgggcctgtattcccagtttctcaggaggctaaaggaggagaaccacttgaaccaggtaggcagaggttgcaatgagccgagatggcgccatcacactccagcctaggcaacagcagagtaagactctgtctcaaaaaaacaaaaacctttttata

SEQ ID NO: 580726 - DNA, 108 bp, Homo sapiens
aagaactctctttttcttatctcttcctccccagtttttggagtgacctccctgcttgtagctgcatctggtactcgtttaggtgacttccacagtgacgttcctcat

SEQ ID NO: 580727 - DNA, 131 bp, Homo sapiens
tattactggcattctcccactggctgtcatatggcactgtgaaaaggtcacattccaggctgacatactgaccacatttgtgtgggagatctcaacaaaagaatatttgtttctgggaggctgacatcccc

SEQ ID NO: 580728 - DNA, 338 bp, Homo sapiens
atagaatttgcttaggatgttgttttgcaaagtatttttatgaattacaagagagaaaaactggccgggagctgtgtctcatgcctgtaatcccagcattttgggatgccgaggctgatggatcacctgaggtcaggagattgagaccagcctggtcaacatggtaaaactccatctctactaaaaataccagtaaaagataaaaaattagccgggcctggtggcaggcacctgtaattccagctacttgcgaggctgaggcgggagaatcacttgaacccaggaggcagaggttgcagtgagctgagatcacactactgcactccagcctgggcaac

SEQ ID NO: 580729 - DNA, 692 bp, Homo sapiens
  misc_feature (473)..(473): n is a, c, g, or t
  misc_feature (477)..(477): n is a, c, g, or t
tactcaccagctcaaaacctgactcatctcccgtcaccccacccacagacccagccgatgactcctcttcctttgaccccgtggattttctccctcctcgacagcatcatgatcctccaccagagcatcatgatcctccaccgtatgtccctgctccggctctacccctctcccccactctctccaaccaacccacttctgactctgagacctctctgcctcctcccctcacccgctctcgggcccaatgtgctcagcaaccagctcccttgcttcctctccgggaagtagcgggagttgaggggatcgtccatgtccacgtccctttctccttctacgatctcttacagattgaagaacgtctcgggtccttctcctccgatcctgatacttacatcaaagaatttaaatatcttactcaatcttatgaactcacttggcatgatctctactttatcctctcttctaccctncttncagaagagaaggaaagagtgtggctcgcagcacaggcatatgccgacgaccttcatcagcaggatcctactaagcccgtaggagctgctgctgatccctgggaagagccttcctgggaataccaacccacagaacctggccaagtgtactgtagccatatgattacttgcctcattgcaggccttaacaaagctgcccataggctgtaaattttg

SEQ ID NO: 580730 - DNA, 146 bp, Homo sapiens
  misc_feature (74)..(74): n is a, c, g, or t
gctttgggtcctcctgccctcctcacgcatgtcaattttggcaatcggaatcaactcaaccctggcaccaatantggaggccaagccccaccctaactacacacggcgtttttcttccgcccttggcaagcggggcgtttacaatc

SEQ ID NO: 580731 - DNA, 85 bp, Homo sapiens
ggggaagggagaaggatgacaagagggtagaaggggggaaaaaaaaaggaggggggctaaggaagaaaagaaatagagagagatt

SEQ ID NO: 580732 - DNA, 1322 bp, Homo sapiens
gtaccgtacctcatccctatgctctaacatcacagagaataggcgacaactgctgattgggaactgcagacaaacttgccgagacggagcaacgccctgtcgggaatgccgattagagctgcctgtggtcctttccttacggtccatgactttgctacgactagtatgtgtgccacacagacgtagtcctctcgtacccatatcatccatcgacaggagatggtacaagacgtctggccaatatgactaatccatgatttactacttagcgtagtgatctcagcgttgcctcggctgctctacgacagcggaacaaaggtgttgaatcgaacgactctggaggcgtgccctatgttccatgacgctgagccagagacctccaacgcgttctcgtagttcgaatagaaggcgtaccaagcaatgaaggtgactagctggggtggtgcgacgtgacacgcgagcacatcgaagcaaggttccaacccccaagtgatagctcgaccctggacttgctagtcgtggggagtccctaaccagcccttgggggcaccgagaagcattctacggcgcgagtttcgtaaacgcataaacctcacccaggctttccattgtaggttacccgtcgtcccccgactttcctcgccgttgggtttggcggtggcgtccccgctggcacttcggctccacgccattgtgcgccgaacttgtcactgctgcttccaacccattgttttaggatgcggtaggttcgtccgttggctttcccatccttgtggggggggacccccctttgggtgcacgttaagctgaggagaggccaagggtgcgccaacagtgcgttcgcaccgcgcgtttggtgcccctttctatccccggcttggaagaggaagtccacaggtgcagtacaatggaacaccttaggttctgttcgccgaccatcttgcacatctggacgaacgcccccactactgtgctttggcccccaagaaggacaaccgatactccttaggacgccatacggcggaccccattttgccgtctcgcggttaccccacgagttcggatcgccaatggttggaacccgggtggtttgccacttgccgttgcggaggacccccatcgagtggataccgtccatctcgcctgggttgtattggccctcccggatccccttgtgtcccggtccaatgggcggcctcgcgcatttccccgtgcggccattccccgttcgggcgccattgcggccctatccctttagcccggccgatgcaaggagttctgggcgtcggtaacgcctttgtcccctttggtgggacaccgcc

SEQ ID NO: 580733 - DNA, 380 bp, Homo sapiens
  misc_feature (295)..(295): n is a, c, g, or t
cacccattgccgttttaataatctgataacccagctcattgataaacccgatatcttcagcaatggtaatgaacttcagcggtgaaatgatcccccgctccgcagacacccaacggcacaacgcctccgcgcccagaatggcgggtgttaatatcaacgatcggttgatagacgaggaatagttcgccaatttccattgcatggcgaatattacgcgcaatccagatattctcttctatttcgttgagtttcgcgtcatcacagaaaataaactctgagaacatatggtcacggntactggaaatcgccagtttcagttttttctgcgtaactccaggggttttccccctggcaaaggtttcacaattggcaggcttttt

SEQ ID NO: 580734 - DNA, 123 bp, Homo sapiens
tcaagtaaccccctttctctcgctagtcctttctactaaccggatcctcccaaatggcacgtactaaaagtcggtttacccatgaagtcctctatttcctcattacgaatatttgccttcccg

SEQ ID NO: 580735 - DNA, 128 bp, Homo sapiens
gactctcgaggatctccaacggaactttatccagtgcaaacattggatgtcaagagtggcctgtggtacttggagacaaggaatatcaagtaattgacgtgttacttgtcttgtcagattttaagaat

SEQ ID NO: 580736 - DNA, 254 bp, Homo sapiens
ccctgatatcccagcttacgaggcacctgacattatgtgaaaccccatctctatttaaaaaaaaaaaaaaaaattagccaggtgtggtggcgtgtgcctgtagtcccagctacttgggagtctgagacaggagaatcgcttgaacccaagaaggcagaggttgcagtgagccggagatcacaccacttgtactctaagcctgggcacacagggataagcactccatctcacaaaacaataaaaaagcataattc

SEQ ID NO: 580737 - DNA, 497 bp, Homo sapiens
caacgatggtcctcagctggtagccccaaaatagtgggtagggacttgtggtcatttagttccagtatttaagacaaatttgtgtttgagagaggatttcgctactgttgcgccaggtctggagtacaatggtgtgatcatggctcactgcagtctcaaatgcctgggctcaagccattctcctgctacagcctcctgagtagctgagactgccgggacataccaccacgatccagccgattttaaaattattaaaaaatttttactttggtttatttcttgctggagacagagtctcgcttggtcatccaggctggggtgcagggggacaatcatggctcagtgcagccttgaactcctgggttcaagtgatccctccacctcaggctgcccaagtagctgggactacaggtgtatgctattacagctggctacttgaggtatatgtcgtagagactgggttttgacatgtggcccaggctggtttggaactccca

SEQ ID NO: 580738 - DNA, 148 bp, Homo sapiens
agtctacgcgtgaggacaagatgctgtggcttcactgtgatctgaggtacaaacaaactactgtggtgggtaatggtcgagctccgggtcagtcccatgtgcagttgtccaatggcacttgacctcaatctactcagtgtcaaacgga

SEQ ID NO: 580739 - DNA, 191 bp, Homo sapiens
ttagataaatacaaaattatcaatatagaggcgcataaaaaacgtgcccattatacatgctgaccgataaggcaaattataaccaaatagcatgtagtataagcagccctcatattataataaaacaaggagtctgcctcatccatttccaaaagataaatttccgactgatcgggataaccaaacttaca

SEQ ID NO: 580740 - DNA, 1151 bp, Homo sapiens
cttttttctttgcggaatcaccatggcggctgagtaccctgtgacactgtatcctgcaaaacttgggagtggcctttcaaggctctctatcgtctgctcagtcacagcggggctcagagtccgcagtgctctccgctaccaccccacttccatatttggccaaaccaaccgcatcccctggaatttctaccggcaaatttcctgaccgggccaaggtcccagcagtttagagcggtgatggatggcgattctcgtgtgtttgagagtcaacgccattgcctacttatgtgtagcaatgaggaagctcgcgggagacaggtactcccatgtaggtcaaggcaggccacaaggatggttgcaagtcgagagttgatggcttttggacttggattttcctcggactcactatatgtgaccactcacaaggacgcaaggttaacgcttggagggatagtgtacaccgcaacggcttcgcggtgcattctattggcaactccatcgaactaaataacctaagtgcctccgagcttgggagcacacttgggccaacaggcaacggcaacacggttggcacggtcggacactgtcttagagggggctctgccttgcgggattggcttttcacctcttgcagattggacgcggcatggggcacatttgatcgtgcgggtcggagggccgtaaaccaggatgttggagcatttggggcttgggaccattcagccagtggttccgcttcgttagcgagccctcggtggtttgggatagcggcttcattatttacacggccaagtggtatcccctaaagaaaagccccctgtaccatttatgccctaggcccactgtgggcctttcttttacacccaaaaattgaggccgaaaactccggaacgttggggttttccccgttccagacccttgagccagttttaagaatccgcaaaggacaccagccgcaaagtatgttagccacccggtgtgaacattggattactttgggggagacccgacactaaggcttgaacaacaaccgtgggttgctttggcacgacacacgcgcactctcgcgcccgccaacggattcttggtgacttgggccctagagacaacgaaacaggttatatgtgggcacaggaaagggaaaaccacgc

SEQ ID NO: 580741 - DNA, 140 bp, Homo sapiens
cctaccccagacagaaatactatatttcttctctgggatcttatcttatcagtgaatcttatgctggtttagtagaagtcctaatattcatgtggatcactttgtacttgtctgttttctttggacgtggggtaggaggt

SEQ ID NO: 580742 - DNA, 147 bp, Homo sapiens
agtcgaaacctgtacaacaaggttgagatggggcaaaagagagccagtgaagatacaacttcagtgttcatcatccaagaaatcttcagtcaggaccaaaagagagatgccaggcatgatttataatccctccctggtggaaaagta

SEQ ID NO: 580743 - DNA, 111 bp, Homo sapiens
tctctacgtgactacgtgcacgatacgacacttacgacactttgtagaacgactgactaacgatgtacgacggtgacacggttacacttgcgtttgactactttgctacgt

SEQ ID NO: 580744 - DNA, 1948 bp, Homo sapiens
ggacgagagcacaaggagatccaccagcagaggcaggaggacgaggaggataaacccaggcaggtggaggtgcatcaagagcccggggcagcggtgcccagaggccaggaggcccctgaaggcaaggccagggagacggtggagaatctgcctcccctgcctttggaccctgtcctcagagctcctgggggccgccctgctccatcccaggaccttaaccagcgctccctggagcactctgaggggcctgtgggcagagaccctgctggccctcctgacggcggccctgacacagagcctcgggcagcccagggcaagctgagagatggccagaaggatgccgcccccagggcagctggcactgtgaaggagctctgaggacagggtcctcagagctcctgggggccgccctgctccatcccaggaccttaaccagcgctccctggagcactctgaggggcctgtgggcagagaccctgctggccctcctgacggcggccctgacacagagcctcgggcagcccagggcaagctgagagatggccagaaggatgccgcccccagggcagctggcactgtgaaggagctccccaagggcccggagcaggtgcccgtgccagaccccgccagggaagccgggggcccagaggagcgcctcgcagaggaattccctgggcaaagtcaggacgttactggcggttcccaagacaggaaaaaacctgggaaggaggtggcagccactggcaccagcattctgaaggaagccaactggctcgtggcagggccaggagcagagacgggggaccctcgcatgaagcccaagcaagtgagccgagacctgggccttgcagcggacctgcccggtggggcggaaggagcagctgcacagccccaggctgtgttacgccagccggaactgcgggtcatctctgatggcgagcagggtggacagcagggccaccggctggaccatggcggtcacctggagatgagaaaggcccgcgggggggaccatgtgcctgtgtcccacgagcagccgagaggcggggaggacgctgctgtccaggagcccaggcagaggccagagccagagctggggctcaaacgagctgtcccggggggccagaggccggacaatgccaagcccaaccgggacctgaaactgcaggctggctccgacctccggaggcgacggcgggaccttggccctcatgcagagggtcagctggccccgagggatggggtcattggccttaaccccctgcctgatgtccaggtgaacgacctccgtggcgccctggatgcccagctccgccaggctgcggggggagctctgcaggtggtccacagccggcagcttagacaggcgcctgggcctccagaggagtcctagcacctgctggccatgagggccacgccagccactgccctcctcggccagcagcaggtctgtctcagccgcatcccagccaaactctggaggtcacactcgcctctccccagggtttcatgtctgaggccctcaccaagtgtgagtgacagtataaaagattcactgtggcatcgtttccagaatgttcttgctgtcgttctgttgcagctcttagtctgaggtcctctgacctctagactctgagctcactccagcctgtgaggagaaacggcctccgctgcgagctggctggtgcactcccaggctcaggctggggagctgctgcgtctgtggtcaggcctcctgctcctgccagggagcacgcgtggtcttcgggttgagctcgcccgtgcgtggaggtgcgcatggctgctcatggtcccaacacaggctactgtgagagccagcatccaaccccacgcttgcagtgactcagaatgataattattatgactgtttatcgatgcttcccccagtgtggtagaaagtcttgaataaacacttttgccttcaccc

SEQ ID NO: 580745 - DNA, 329 bp, Homo sapiens
ctcatttgagttccgtcagtcattagcgacactgtaaatggaagaccagccactggctctgaaaaaaataaacctcgcagttgtggattccagcattcatggcttttacgtgtttgcatagagaggggtggcccgccagtcccggggcagcctggggccagggtcggtgggaggaaagcaaggctgtaaacactggagtctgtaccggctcccagtccgtcctcacaccatgttatgggagaagggtcacaaggtgtaactcaagcaacttaacacatgaaagtctaaagtccactcttgacatgtaagtctgtgcgtgcgttaactga

SEQ ID NO: 580746 - DNA, 164 bp, Homo sapiens
gcccgagggtcagccccctgggcagaagggtggccagtgggcccaggcccctgggaggggatattcccccccccattgtcaggcccctcaagctcctggagacaaccacgtggtcgcctgtactgcgctaactcctgattaatacaatggaagtttctgggcaa

SEQ ID NO: 580747 - DNA, 191 bp, Homo sapiens
cctgctgaagcttcccattacgaggagaaaaggcaccactgtgcccagccttccttgccctgacattgggactcttcccttggtacgaccacgtctgtgctcattctccttcccaccaacacccatccgtccttctcagacaaaccactcactgggtaccccacctcctctctcatatgcccatacacgcg

SEQ ID NO: 580748 - DNA, 123 bp, Homo sapiens
tatctgttcatctgcttttgcattttccactctatttcattgatctgtgtatgtcccccatgctgatgaatatatttgtcttgcataactactagctatatccataatgctttgaagatcagt

SEQ ID NO: 580749 - DNA, 308 bp, Homo sapiens
  misc_feature (9)..(10): n is a, c, g, or t
aaaaaaagnnagcgacccacaaataacaaatttggtgtagtctattaatgttgtgcattataaaggatgcacctctatgtttgagcagtttcttggttatcttttatcctcagcttgatatatcctgggacatctgaaaagagctgcttgcaccacactagcttgcaggcatattgtggcacttttatccctggattccctgactgttgtccgtatgacacagtcaactgtgagtgcttccatccctacgcaggtagtcttggcctatatatgaaatcttgctgtgcattgtgccaatgaatgaacca

SEQ ID NO: 580750 - DNA, 421 bp, Homo sapiens
attcacacgggtgctgcggagggggagttataagagatttttttgtacactggaaaaattagaatatggactgtggccagatgtggtggctcacacctgtaatcccaacactttgggaggcccaggcggggggatcacttgaggtcaggagttcgagaccagcctggccaacatggtgaaaccccatctttactaaaaatacaaaaaaaaattagccgggtgtggtggtgggcacctgcaaatttcagctacttgggacgctgaggcaggagagttgcttgcaaccggtaggcggaggttgcagtgagccaagatcgcgccactgcactccagcctgggtgaaagagcaagactccgtctcggggaaaaaaaaaaattttgaaatgcatatgggatataactgaataagtgtaaagttttt

SEQ ID NO: 580751 - DNA, 238 bp, Homo sapiens
ggccctgtttcaaaaaaataaaaaataaaaaataaatttcctataatcttcagatatattcattcctttacatattgtctgtggttgttttccccctttaggtcaaaagtaaccggcaaccttttcccagtatttacccctgttatagacatctttaaatatggtttacttttgcctgtttttggactttataaaaatgaagtaataaagtattgtctgtcttgcattttttgctcca

SEQ ID NO: 580752 - DNA, 305 bp, Homo sapiens
  misc_feature (21)..(21): n is a, c, g, or t
ggggccaaagccccccttttntgcccccccccccggcctgtggggagcccctaaacccttccgggcctagacccccccctttgtgggatgggggccaaaccccccccccccccggggggttgtgagggctgagaagaaccatgtccaatgttttttatactccgatgggggggcggcccccatgaaatttggtctggatgaaagctcccccaaaatgggccgccctttgggttattgggcccgaaacctaaaatggttggtccgaaaagccttttttcccccccgaaatatggctttttttttga

SEQ ID NO: 580753 - DNA, 296 bp, Homo sapiens
gactgattaagagaacactagcatcaaaggcctggggaaagagtgggtatgaacaagagaaactccgagtacagagataaaatagtctggcaaattcaattaaataaactaggcccaaaatatttgtagaagtagtagggccaacgtagttgcgacattggtatacttaaggcttgtattagttcattcttgcatttctataaagaaatacctaagatggggtaatttataaagaaaagaggtttaattggctcatgtttctacaggctgtacaggaagcatgatgctggcattaa

SEQ ID NO: 580754 - DNA, 310 bp, Homo sapiens
ggtgtgggagcaggatattccctcgcggtgccccggactggaggctatgtggggggggactttcgtacacgagtagatccgaggctcgaagggaggtgaggtgcccgtagggggatgggggcgataggaatgtttagcgggctgggcgggcggttgtgattcctccctagccgtacccaggtcgctcccgattgtgggcggggtctgaatatagaggggcgattcgggaatagcatgggtatggtgggggctggctggtttggcggctgaggttatggtagggcgatttgcagtgatgggtcatgcagca

SEQ ID NO: 580755 - DNA, 272 bp, Homo sapiens
gtctgaagataaggctttaactgctgtcattgtttaagatttagcaagacttggtgttctttttatatccaggagtcaacgccctgtaacttaaaggcacaaggactttaaaagcaagaaagttacgtggatatagtaaccttgatctaaaagaaaaatctaacctcagtcttcttctaagcaaattaaaacctaataccaacggcataggacttatcttgataaaatgtaaaactcgtcagaccagcttaccaaaacgcaacaaaaaaaaa

SEQ ID NO: 580756 - DNA, 427 bp, Homo sapiens
  misc_feature (52)..(52): n is a, c, g, or t
  misc_feature (61)..(62): n is a, c, g, or t
  misc_feature (69)..(70): n is a, c, g, or t
  misc_feature (80)..(80): n is a, c, g, or t
  misc_feature (90)..(90): n is a, c, g, or t
  misc_feature (92)..(92): n is a, c, g, or t
  misc_feature (95)..(95): n is a, c, g, or t
  misc_feature (98)..(98): n is a, c, g, or t
  misc_feature (112)..(112): n is a, c, g, or t
  misc_feature (114)..(114): n is a, c, g, or t
  misc_feature (116)..(116): n is a, c, g, or t
  misc_feature (118)..(118): n is a, c, g, or t
  misc_feature (120)..(120): n is a, c, g, or t
  misc_feature (133)..(134): n is a, c, g, or t
  misc_feature (138)..(138): n is a, c, g, or t
  misc_feature (142)..(142): n is a, c, g, or t
  misc_feature (151)..(151): n is a, c, g, or t
  misc_feature (159)..(159): n is a, c, g, or t
  misc_feature (161)..(161): n is a, c, g, or t
  misc_feature (163)..(163): n is a, c, g, or t
  misc_feature (184)..(184): n is a, c, g, or t
  misc_feature (198)..(198): n is a, c, g, or t
  misc_feature (203)..(203): n is a, c, g, or t
  misc_feature (213)..(213): n is a, c, g, or t
  misc_feature (235)..(235): n is a, c, g, or t
  misc_feature (250)..(250): n is a, c, g, or t
  misc_feature (259)..(259): n is a, c, g, or t
  misc_feature (269)..(269): n is a, c, g, or t
  misc_feature (289)..(289): n is a, c, g, or t
  misc_feature (299)..(299): n is a, c, g, or t
  misc_feature (344)..(345): n is a, c, g, or t
  misc_feature (370)..(370): n is a, c, g, or t
  misc_feature (403)..(403): n is a, c, g, or t
gttaatattcgccttggacggccccgggaataaggcttgcggcttggtcagncctttccanncccaaannaagcatgggnagttgtcccncnggntgnaagcctggcagtgncncnantnagcccaagtggannacancaangaatatttntccaaacncnantaggctggctaacggatagtnagcttgtgcccctncctangtgcctgtgntgggtgtccacctgtgcccccncctgggtgccctatnttgacccangaaaggccanacctgcccctccaaactccncagtatgggnccctggaggggtaggccaaggccttttcatgcctccccctaaaanntgaatagtgacgccctcccccaagnccacccaaccgcacacaggcctaaaggtaaccnataaagtattagggaaaggtgtga

SEQ ID NO: 580757 - DNA, 1048 bp, Homo sapiens
agcggctctatgtagacaggaactgaatgtatcaacttcgtgttgtatcccaatcacctagcacaaaggaaaaccactatcctacttagagaaggcgtttctgaatttcttaaaactgtggtcactaactgcatactttttgccaaacttttcttttgtcaggctaacactagtcacaggagcagctaacgatcaaagatgctaagatgttcctgatatccactagctgacactgaactaagctaaccaacggtctccactgagcacctgcatttaccaccataaaagctgacttgcggctacttgcgctagcaactacagctctggttaagtacatgtcaatcacacacactgataccacgtaactgcctaactggcctggcaccctcttgctcgcgggtccacgcaaggtgccatgctagcgaaacactagcctctagcacgcaactgacgcacacgactcccgcctgcataccctctctctcgctcgactctgctccgctctctactccgctacccacgcaacactaacatactccacttccctgttcaccgtaggaaaactactgcgcgaagccctaacaactctgctaccaaaaaaccaatcccttgcatctggctaaccgaacaacacgctgcccctcttactggctctacgactaccaagtaactcctgagcgactctcaatccctcctggcataccccttctgatactcctcttacaacacactgctcaactactctgaacctcgtgatgaaactttcccacgcctacgctcgcgccctacctccccccttaaacaattcccactctccactcccccactccccacctcccgacatctcccacccacgcacgcaaccgaggacacttcatcgcactcacatgaatccgccacaagcgccctggcaaaccctggacacacccgagccacccgcacctcactccgcgcctccacccttggcacaacccccacacacgaccacgtccccacgcgggcacccaacacacccgaacaaccccatacacaggacaccatccacacc

SEQ ID NO: 580758 - DNA, 434 bp, Homo sapiens
tggaccaacccgggttttggggtgcacagcgccaggttaacgtttaagcctgcccccctgagcccaggaaccgggaggcctgcgggtttacccaaaatccgatcaagcccctgtcctcatgccaccggctttgggtggggttggtttaaaacccgcacccggcagttctttgttaaaaatttgagggaccccccagtcctggggggtccccgccggcagccttttccaagccctgggtccagcgagggtcccagcccaccctgcaaaaacggagttgggctccaactgggggtggcatggactttcctttcaaagattcggtttttaaaaaaaggcatccctaatgggttcttttttttttccaatgatttggaaaaacccttttatggcgggaaacttttttggccacccccccaataaaccttttgttttta

SEQ ID NO: 580759 - DNA, 244 bp, Homo sapiens
tattaccagatcagttgcactctttcccgattctcccagttactgtggcactctaccacggttcccgcagtgctgatgggtactctggctcaaggcccaccggaagtcatccatagtaactgctagagagtactgacctcgggatcaatggtctcatcctctaggtcaaagagatccatcttcttgcggatggcttgcaaagcagcctctgagcacagggctgctaagtcagcacccacatgcc

SEQ ID NO: 580760 - DNA, 387 bp, Homo sapiens
gtgtattgagtggcatgtgatctagcaattccacttctggatctatatcccaaagaagtgaaagcaaggtcttgaagagatattgcatgtgcacattcatagtagcattattcacaatagatgaaaggtggaaaccacccataatgtccaagaaatggataaactggataaataaatgtgtggtacattcatacaactggaatatttatctattcaccctataaaaaggaaattctggctgggcaaggtggctcatgcctgtaacaccagcactttgggaggccaaggcagaccagatcacctgaggtcaggagttcgagaccagcctggccaacatggtaaaaccccatctctactgaacataccaaaactacgctgggcatggcg

SEQ ID NO: 580761 - DNA, 824 bp, Homo sapiens
  misc_feature (68)..(68): n is a, c, g, or t
  misc_feature (71)..(71): n is a, c, g, or t
  misc_feature (80)..(80): n is a, c, g, or t
  misc_feature (99)..(99): n is a, c, g, or t
  misc_feature (102)..(102): n is a, c, g, or t
  misc_feature (251)..(251): n is a, c, g, or t
  misc_feature (624)..(624): n is a, c, g, or t
tgctttattggatttggaggagatgtgatcaggcggcaagtcaagggtggcgccgaatggggtatcanctnagtttgtangggggggggggaaaaccanaanaataacatccattgtgatacagctccaaacaacttcagatgagtttttacaagttacacagattgatactgtgttggttacaattgcctattacaacttgctatagaaagtggggacagatgagtctggactgggggggggaactacantgagggatcctcaaaagaaggtttgggatgttttaactggagttccagtattatatgatcactatcgatttcctggagagggttggaatctgaattctttatgtatattcctagctatatttcatacaaaggggtttaagagggggagaggaattaaacacctttactcttaggagtatagattcgggagccttcagtgaatattggtttttttccctttggaatggcaataaaagtgtatccatggggtgagagaaaaaaaaatcggggctcgtgtggcgctcaggcggtgggaagctctgggggcggtttccctttagggggggggtaatttcatgatccctcggtcacctgactcggcttggctcgggcngttcgggtggggggaagggggggtcaggtcacttgaagggggggggtacgggtgtgccacaaaagcgggggattacgcgggagaagacatgtgagcagaagggcccgcgaaggggcaggagccgggcgagggggcgcgtgcgtggggggttgtcctaatggtgccgccctcctggcgaggcataaaaaagatgtgaacgt

SEQ ID NO: 580762 - DNA, 120 bp, Homo sapiens
gtaatacggcgctatttcatgaagcttacttcatcacagtcaaccaggcactgtaactggtgggtaacaaacagaactgtcttggacttgagatgtatccggatagcactatatgcagat

SEQ ID NO: 580763 - DNA, 1153 bp, Homo sapiens
  misc_feature (49)..(49): n is a, c, g, or t
  misc_feature (109)..(109): n is a, c, g, or t
  misc_feature (1053)..(1053): n is a, c, g, or t
tccttttgggtgccgctgccgtcgcgacccagggaagtgggcagcagantgtggggagtgtctgcccttcgaggaagctgggaaatgagggtggtcccggcgccgtggncgtggagcgccgtgccgtccctgcagtgacaccgaggtgctcctagccgtctgcaccagcgacttcgccgttcgaggctccatccagcaagttacccacgagcctgagcggcaggactcagccatccacctgcgcgtgagcagactctatcggcagaaaagcagggtcttcgagccggtgcccgagggtgacggccactggcaggggcgcgtcaggacgctgctggagtgtggcgtgcggccggggcatggcgacttcctcttcactggccccacgcttcaaggacttccagaggatgtacagggatgcccaggagagggggctgaacccttgtgaggttggcacggactgactccgtgggccgctgcccttcctctcctgatgagtcacaggctgcggtgggcgctgcggtcctggtggggccgtgcggtgagggccgcgcgctgggagccgcatgccctgggcccaggcctgaccctggtaccgaagctgtggacgttctcgccacactcaaccccatgagcttccagccaaggatgccctggccgattggaaatgctgtaaaatgcaaactaagttattatatttttttttggtaaaaaagaaatgtccataggaaacaaattcccgtgtcttaaaacgccttggtgtgccgtctgatactgttctctaaagacgttaggagtcacggcatctggcctgcggttgggtgaagcactggccgttgggcacagtggatgtgtgaaaaggtgccattcagagttgttattctcatgacggaagttttggagccaaataatacgttttttattttcattttatttttaaaggatgagctttggtccttttcaggccgccggttgtttccgttcccgagaataaagacgaggatccgaccagccagaagccggagtctgtctttcgccaggtccggtgcccacgcnccgtgttcagggcctcgctggacgtaccccaggcgccacctgcctcggcagacacgcttgtcccccggcgacttccctcagccctctgctgcatttccac

SEQ ID NO: 580764 - DNA, 1740 bp, Homo sapiens
  misc_feature (1640)..(1640): n is a, c, g, or t
gacgtgaccacccggactcgaagcccgccccgcccccgcccggctcgccggctccggggtctgctccgggggtcgcggacgcggggccgggcggcggagccggcgccagagcatgcggggcgcggcgcgggcggcatgggggcgcgcggggcagccgtggccgcgaccccccgccccgggcccgcccccgccgccgctcccgctgctgctcctgctcctggccgggctgctgggcggcgcgggcgcgcagtactccagcgaccggtgcagctggaaggggagcgggctgacgcacgaggcacacaggaaggaggtggagcaggtgtatctgcgctgtgcggcgggtgccgtggagtggatgtacccaacaggtgctctcatcgttaacctgcggcccaacaccttctcgcctgcccggcacctgaccgtgtgcatcaggtccttcacggactcctcgggggccaatatttatttggaaaaaactggagaactgagactgctggtaccggacggggacggcaggcccggccgggtgcagtgttttggcctggagcagggcggcctgttcgtggaggccacgccgcagcaggatatcggccggaggaccacaggcttccagtacgagctggttaggaggcacagggcgtcggacctgcacgagctgtctgcgccgtgccgtccctgcagtgacaccgaggtgctcctagccgtctgcaccagcgacttcgccgttcgaggctccatccagcaagttacccacgagcctgagcggcaggactcagccatccacctgcgcgtgagcagactctatcggcagaaaagcagggtcttcgagccggtgcccgagggtgacggccactggcaggggcgcgtcaggacgctgctggagtgtggcgtgcggccggggcatggcgacttcctcttcactggccacatgcacttcggggaggcgcggctcggctgtgccccacgcttcaaggacttccagaggatgtacagggatgcccaggagagggggctgaacccttgtgaggttggcacggactgactccgtgggccgctgcccttcctctcctgatgagtcacaggctgcggtgggcgctgcggtcctggtggggccgtgcggtgagggccgcgcgctgggagccgcatgccctgggcccaggcctgaccctggtaccgaagctgtggacgttctcgccacactcaaccccatgagcttccagccaaggatgccctggccgattggaaatgctgtaaaatgcaaactaagttattatatttttttttggtaaaaaagaaatgtccataggaaacaaattcccgtgtcttaaaacgccttggtgtgccgtctgatactgttctctaaagacgttaggagtcacggcatctggcctgcggttgggtgaagcactggccgttgggcacagtggatgtgtgaaaaggtgccattcagagttgttattctcatgacggaagttttggagccaaataatacgttttttattttcattttatttttaaaggatgagctttggtccttttcaggccgccggttgtttccgttcccgagaataaagacgaggatccgaccagccagaagccggagtctgtctttcgccaggtccggtgcccacgcnccgtgttcagggcctcgctggacgtaccccaggcgccacctgcctcggcagacacgcttgtcccccggcgacttccctcagccctctgctgcatttccac

SEQ ID NO: 580765 - DNA, 1854 bp, Homo sapiens
gacgtgaccacccggactcgaagcccgccccgcccccgcccggctcgccggctccggggtctgctccgggggtcgcggacgcggggccgggcggcggagccggcgccagagcatgcggggcgcggcgcgggcggcatgggggcgcgcggggcagccgtggccgcgaccccccgccccgggcccgcccccgccgccgctcccgctgctgctcctgctcctggccgggctgctgggcggcgcgggcgcgcagtactccagcgaccggtgcagctggaaggggagcgggctgacgcacgaggcacacaggaaggaggtggagcaggtgtatctgcgctgtgcggcgggtgccgtggagtggatgtacccaacaggtgctctcatcgttaacctgcggcccaacaccttctcgcctgcccggcacctgaccgtgtgcatcaggtccttcacggactcctcgggggccaatatttatttggaaaaaactggagaactgagactgctggtaccggacggggacggcaggcccggccgggtgcagtgttttggcctggagcagggcggcctgttcgtggaggccacgccgcagcaggatatcggccggaggaccacaggcttccagtacgagctggttaggaggcacagggcgtcggacctgcacgagctgtctgcgccgtgccgtccctgcagtgacaccgaggtgctcctagccgtctgcaccagcgacttcgccgttcgaggctccatccagcaagttacccacgagcctgagcggcaggactcagccatccacctgcgcgtgagcagactctatcggcagaaaagcagggtcttcgagccggtgcccgagggtgacggccactggcaggggcgcgtcaggacgctgctggagtgtggcgtgcggccggggcatggcgacttcctcttcactggccacatgcacttcggggaggcgcggctcggctgtgccccacgcttcaaggacttccagaggatgtacagggatgcccaggagagggggctgaacccttgtgaggttggcacggactgactccgtgggccgctgcccttcctctcctgatgagtcacaggctgcggtgggcgctgcggtcctggtggggccgtgcggtgagggccgcgcgctgggagccgcatgccctgggcccaggcctgaccctggtaccgaagctgtggacgttctcgccacactcaaccccatgagcttccagccaaggatgccctggccgattggaaatgctgtaaaatgcaaactaagttattatatttttttttggtaaaaaagaaatgtccataggaaacaaaaaaaaaaaaaaaaaaaaaaaaaaaaaaaaaaaaaaaaaaaaaaaaaaaaaaaaaaaaaaaaaaaaaagaaaaaaaagaaaaaaaaagaaacaacgaacacataaagacgcaacgaaaaaccacacagagagaacagaagcggaggcgagagggcgacgccacatgacagcacacgcggaccgacggagagcacaacggagagcacaggacacagcgagagcggcagacagaagaagcatagcgacagccaggtaggacggcgagggcaccaacagaggggggcagggaggcgcgcaagcaagacaaagaacagagacgccacggaggagagaggcacacaccccagagacaaaggaggcagaaagggacgggacagggagagcagaccaaccacgcgggtggaggaaagggagagagaagaagaggaccgaggaaacagaggaggaagaaagaagacggcacaaaaagcgccgagcggcagagaggggaaagcaaatagcacaagccagaggaaagccaccagccaaagcgcac

SEQ ID NO: 580766 - DNA, 1705 bp, Homo sapiens
  misc_feature (1605)..(1605): n is a, c, g, or t
gacgtgaccacccggactcgaagcccgccccgcccccgcccggctcgccggctccggggtctgctccgggggtcgcggacgcggggccgggcggcggagccggcgccagagcatgcggggcgcggcgcgggcggcatgggggcgcgcggggcagccgtggccgcgaccccccgccccgggcccgcccccgccgccgctcccgctgctgctcctgctcctggccgggctgctgggcggcgcgggcgcgcagtactccagcgaccggtgcagctggaaggggagcgggctgacgcacgaggcacacaggaaggaggtggagcaggtgtatctgcgctgtgcggcgggtgccgtggagtggatgtacccaacaggtgctctcatcgttaacctgcggcccaacaccttctcgcctgcccggcacctgaccgtgtgcatcaggtccttcacggactcctcgggggccaatatttatttggaaaaaactggagaactgagactgctggtaccggacggggacggcaggcccggccgggtgcagtgttttggcctggagcagggcggcctgttcgtggaggccacgccgcagcaggatatcggccggaggaccacaggcttccagtacgagctggttaggaggcacagggcgtcggacctgcacgagctgtctgcgccgtgccgtccctgcagtgacaccgaggtgctcctagccgtctgcaccagcgacttcgccgttcgaggctccatccagcaagttacccacgagcctgagcggcaggactcagccatccacctgcgcgtgagcagactctatcggcagaaaagcagggtcttcgagccggtgcccgagggtgacggccactggcaggggcgcgtcaggacgctgctggagtgtggcgtgcggccggggcatggcgacttcctcttcactggccccacgcttcaaggacttccagaggatgtacagggatgcccaggagagggggctgaacccttgtgaggttggcacggactgactccgtgggccgctgcccttcctctcctgatgagtcacaggctgcggtgggcgctgcggtcctggtggggccgtgcggtgagggccgcgcgctgggagccgcatgccctgggcccaggcctgaccctggtaccgaagctgtggacgttctcgccacactcaaccccatgagcttccagccaaggatgccctggccgattggaaatgctgtaaaatgcaaactaagttattatatttttttttggtaaaaaagaaatgtccataggaaacaaattcccgtgtcttaaaacgccttggtgtgccgtctgatactgttctctaaagacgttaggagtcacggcatctggcctgcggttgggtgaagcactggccgttgggcacagtggatgtgtgaaaaggtgccattcagagttgttattctcatgacggaagttttggagccaaataatacgttttttattttcattttatttttaaaggatgagctttggtccttttcaggccgccggttgtttccgttcccgagaataaagacgaggatccgaccagccagaagccggagtctgtctttcgccaggtccggtgcccacgcnccgtgttcagggcctcgctggacgtaccccaggcgccacctgcctcggcagacacgcttgtcccccggcgacttccctcagccctctgctgcatttccac

SEQ ID NO: 580767 - DNA, 396 bp, Homo sapiens
  misc_feature (5)..(5): n is a, c, g, or t
ctgcnaatgaacctattcccaaataggcccccattttgaggtccccggggaacatgaactttatttattattattatttgagacagtctcactctgtcaccctagctggagtgcagtggtgccatctcagcttactgcaactttggcctcctgggttcaagcaattctcctgcctcagcttcccgagtagctgggattacaggcatgtgtcactatgcctggctaatttttgtgtttttattagagacagggtttcaccatgttggccaggctggtctcgaactcctgacctcatgtgtgatcctcccacctcggcatcccaaagtgctgggattacaggcatgagccaccgcacctggctgggacatgaactttagggcacacactatttaaccc

SEQ ID NO: 580768 - DNA, 899 bp, Homo sapiens
agaggaaggtgctctcagactgatagattagaggagacagactaactcgtaatccttgtgggacttgaacgagagtggctaggggaagggctgttaaaagataagggaccagtatagaaaatccattctaaataggtagtctcttgtaggaggaacaattcaactgtcttgaggggataaattagagggtaccaagtttatgttctggaatgtacccttggggatgggcgctgtccatagtgtataggtaccgagaggagtgaataaggtggtgctctcgagtcaggctgcttattcccagagagagctgggtgccggaggggcatcgtggtctgtgcatattcagggaaatgaattaggttctcccaggtgctctgttgatgaaggcatggaagcggaagctatcatttgaagaacacaaggcaaacacagttggaacgagttcgttgggatatgaaccgtgacaatagatctaaagagatgccgtggttaaacagtttgcctttatagtaccagttcacgaataaatatggttactttagagaaatcctgtgtaactgtgtgagcatcccacagaaagcaagcaaaatttatttcctatcaaaaactgaggggataaataaccgaagtccagagttcacagtccgttctcaataatgaagcgttccgaaaagcaaaaagcaggggaccattatgagcacagaagaaaggcaaaggttgtgtcagtgatcttataaatttagacatggtaagatcctgggtttaggaaaaaataaccgaggggggaccagggagggaaatggtgagaagattggcatggacggtaaaaagggttggggtcttggggtatatgagaaagcgataggtgttaagggaaagtgggggaaaaggggatttga

SEQ ID NO: 580769 - DNA, 185 bp, Homo sapiens
tcatgtggcgagtgggtgcttaagggtgtttggcttactggtataattgtctgggtcgcctaggacgtctgttagagaatagtgttactgtccttaaggcgagaacgacgagaagttacgccgagggttgtctattgatttgtagtagtcactgtggtggacactgtgattcttctcgtgaatgg

SEQ ID NO: 580770 - DNA, 326 bp, Homo sapiens
cgttctgagatggagtctagcccttgtcgcccaggctggagtgcaatggtgcgattctcagcctcacctgcaaccttccacctccccaggttcaagcgattctcctgcttcagcctcccaagtagcttgaattacaggtcatgtgccaccaatggccggcctaatttttgttatttttagtagtagtacagagttttcacccatgtttggtccaggtatggtcccaatctcttgtaccttgttgtatccggtcccgtccctttgtgcctccccaaaagttgtctggtacttacgagtgttgttgtagtgcacccctagtgtcacag

SEQ ID NO: 580771 - DNA, 875 bp, Homo sapiens
tccgtcatctaggactgcatgggctgaagcagaacttggagtatatatcctggagcatgtcagtcgttcaatagtatgtaaaatgacctcgcttaaagcctgctccagaatggtatctcttatagatggttcatgtcctgttgaggatttaggtctggagcacacaacgcttgtggcgattcctagccaagtgacgcgtgttagcgtatatgcctgaatcaaagtatgctgttgtgaaatgtactaagtctggagacctctacgtacatggcggcagataaagtagcatctgttgcgttctacgtttggaagacaactagtttgagactatttcaacactttcaggtgtagattaggaaaatggtacttgcagtcatccattaattccgtgataaagccgtctccatcttttaactgcaaatcagtgtgagcgatggcgaaaggaacgggactggtggcacacagcccgagctcatggtatggagagactacggtgtagcgtcgtcagacaagctgccatggattgtctagtggacgaagatggcgtttcacagatgttgcacggtcctgaagttcaaaattaaggctgtccttgaagagggaactgatgtggtataaagatgttcagactggaaaggaatttgtcggaagaggaggaattggggcataggtattcgttagtgatggggggcaaaggaaactgtgggtaaatagtggcaagaagggaggggttaaaagcattcgcggatttaagaatgccgtcaggaatgggaaaacaggggcaaattatcctgggtatggcggaggggatggtggaaatgttgggacagcggggaaagggggttctcagggcgaaaatgggggatgcacacacg

SEQ ID NO: 580772 - DNA, 86 bp, Homo sapiens
tttgcttttttaaaaaaaaaaatccccttccccgcttttttgtgccaccaccctttggcccttccaacccccccagggttttttta

SEQ ID NO: 580773 - DNA, 422 bp, Homo sapiens
  misc_feature (21)..(21): n is a, c, g, or t
ttttccacagggttttttaanttcctactaaaatccacccaccatgagaacatagcaagcatgtggatgcagggctgtgtgaggaacttggggcaaccatccaatcaaccatgcccagccactgaccttaaagacctccccctggcctggatagagaaagcaatgcatcaggaatagttgcaacacaacatgattttgccccaatcactgaagttatttgggatccagagtattttctagcctgaaagatacctgtatgtatctcagggaaggacacctgttccctgatatatgtgttctataaattaaactgggcaagagctgtcactcacttaacaggtggaatataagggacttggagggataaaggggttaacccaagctacattcaactgccttcattattatttgcacctggtgaa

SEQ ID NO: 580774 - DNA, 165 bp, Homo sapiens
tggatcacgattgtgatctgtggagtagctgagttgatctgattcagactgggtccctgcttaaaaccccgtaactccatcacttcctggccaagtccaaacatggcacaaaaggcccagtgtggctgggtcacgaagggtgatctgtggctgagataacaaatt

SEQ ID NO: 580775 - DNA, 111 bp, Homo sapiens
  misc_feature (21)..(21): n is a, c, g, or t
tagaggatccccctcatggantccactctcggaactcctggtctcgagtgatctgcctgctcggcttcccaaagtgctgggattaaagtgccctgagttagagagtgggat

SEQ ID NO: 580776 - DNA, 223 bp, Homo sapiens
ctgatcttgaaactgtttcatcttctcacacagattactattatttccaagacagcccggaactggggctggttaatgcaggtgaggaaccagcggttggtattgggaaaggcctggctgtaagaaggcttttgtgcctgctaatagagccacaacagggtgcagacaactgtgatgtcagccaatgacactcgtttgatcatcagaaaagcattcgtctata

SEQ ID NO: 580777 - DNA, 90 bp, Homo sapiens
tgagctgaacattctttattaggctgaagccatacccttgaagtaggcattgtgttcccaagttcaaaatattgaatctagggaaatagg

SEQ ID NO: 580778 - DNA, 172 bp, Homo sapiens
  misc_feature (170)..(170): n is a, c, g, or t
ttttttgtatttttagtagagacggggtttcaccatgttagccaggatggtctcgatctcctgacctcgtgatccgcccgcctcggcctcccaaagtcctgggattacaggcgtgacagctggcgcctggccaggctcagaactttcaatcagctttttttttttctggntg

SEQ ID NO: 580779 - DNA, 186 bp, Homo sapiens
ccgacgatcaggcgactccacctttgggggtagggcataactgataaaggcagcagaaacttctgcagacttaaacatccctatctgacggctctgaagacagcagtggttctcccagcacaatgtttgagctctgagaacagacagactgcctcctcaagtgggtccctgacccccgtgtagcca

SEQ ID NO: 580780 - DNA, 275 bp, Homo sapiens
  misc_feature (15)..(15): n is a, c, g, or t
  misc_feature (23)..(23): n is a, c, g, or t
  misc_feature (31)..(31): n is a, c, g, or t
  misc_feature (80)..(80): n is a, c, g, or t
  misc_feature (157)..(157): n is a, c, g, or t
  misc_feature (176)..(176): n is a, c, g, or t
  misc_feature (202)..(202): n is a, c, g, or t
  misc_feature (224)..(224): n is a, c, g, or t
  misc_feature (254)..(254): n is a, c, g, or t
tcagagttaaacctngagtgccngcgtccgngagaattcagcatggaatgtctctactatttcccgggatttctgctccnggctgcaagattgccacttgatgccgccaaacgatttcatgatgtgctgggcaatgaaagaccttctgcttacacgngggagcacaatcaattaancggctggtcttctgatgaaaatgacnggaatgaaaaactctacccagngtggaagcggggagacatgaggtggaaaanctcctggaagggaggccgttt

SEQ ID NO: 580781 - DNA, 408 bp, Homo sapiens
tttctggaagacggcagagttgccgccatcctgcgggaagaggaggctctggacctgcagcgctgcttctcttgcctagactctaggaactatccgcgctccactcgccacaacatactcaaaggaacggcgagaaccgggacccccctgccgggacccggcactgacccgacaggatgctctctgatgactttgacacagcgatcgaggccatgcctgtaagctccctatatcgacgagcatgagcaacacagccaagacgcctaacaaggatcatcctagtaccacccaccaggctcaccaccaccccgcgctaccgcgaccagccttacgcagcactatcctcttccgacacggacgccgtaacaggaccctcagccctccccacgcaccctcggcccgccctgc

SEQ ID NO: 580782 - DNA, 696 bp, Homo sapiens
  misc_feature (1)..(1): n is a, c, g, or t
  misc_feature (70)..(70): n is a, c, g, or t
  misc_feature (78)..(78): n is a, c, g, or t
  misc_feature (116)..(117): n is a, c, g, or t
  misc_feature (124)..(124): n is a, c, g, or t
  misc_feature (127)..(127): n is a, c, g, or t
  misc_feature (129)..(129): n is a, c, g, or t
  misc_feature (140)..(140): n is a, c, g, or t
  misc_feature (182)..(182): n is a, c, g, or t
  misc_feature (188)..(188): n is a, c, g, or t
  misc_feature (192)..(192): n is a, c, g, or t
  misc_feature (194)..(195): n is a, c, g, or t
  misc_feature (200)..(200): n is a, c, g, or t
  misc_feature (207)..(207): n is a, c, g, or t
  misc_feature (232)..(232): n is a, c, g, or t
  misc_feature (236)..(236): n is a, c, g, or t
  misc_feature (245)..(245): n is a, c, g, or t
  misc_feature (249)..(249): n is a, c, g, or t
  misc_feature (254)..(255): n is a, c, g, or t
  misc_feature (295)..(295): n is a, c, g, or t
  misc_feature (301)..(301): n is a, c, g, or t
  misc_feature (324)..(324): n is a, c, g, or t
  misc_feature (328)..(328): n is a, c, g, or t
  misc_feature (346)..(346): n is a, c, g, or t
  misc_feature (369)..(369): n is a, c, g, or t
  misc_feature (379)..(379): n is a, c, g, or t
  misc_feature (422)..(422): n is a, c, g, or t
  misc_feature (517)..(518): n is a, c, g, or t
  misc_feature (521)..(521): n is a, c, g, or t
  misc_feature (523)..(523): n is a, c, g, or t
ngtgtcaagcagcagcagggcggtgggaacagctgcacctgcactgtggcagctcggagggctccctgangtccaggnggaggctttctcaagtgtgggtgcgttgggtgcgaggnnggggggnctngncagctcccgtngtgtgggggggggcccaggatggttcctcaccaccgggtggngatgtnctgngnncctgngcactgngccctaacattactgactctaaacnagancccagtgcncacnctgtnntcaacgtcctcaccccacggcattctgagtgagggaggcncagggncacccactccctggactcacttntgtncccccgagagaccttgcncgggacatgtacccacctatgcnctctactgcncacctcagccctgtgggacccagtggtgttgtggggagtcctnacggccagctaaggacaggatggtgatgagggggaggggaacgaggggcacctggttttggttcatgatgcttccaaatttttcagggcctcctnngancntggataccgctgcatggtagggtgggtgtagcttgctagctacatgttctctgctccatccctcgctggaaatgcctgtcccgatatggcccacgggtcctgctgttgcccctcaccatgctccctgatgtgtccaggctggcctgggggtcgtgctacctgaggcggcagag

SEQ ID NO: 580783 - DNA, 471 bp, Homo sapiens
aagcagctgcttttgttaaaaaaaaaaaaaacagcagagattaaatataccgatctataagactagatttttctcaaatctgaaagaacagtctagaactgccaatgagattaaggattaacacagtcaagactgcagtagattttcttaaaccggttttgttttattgagtttacaattttaaccttttaatggtcaggataaaaaaaaaacacccgattactgaagatttcagttttctttttagtttgcatacacttaacgtatagtgagggcaaaccatcattgctatgttgtaaatctcattttattttaaacagtcatttatttttttttacctgttttttatacagtagtaaaaacaaatatctacaatctaaggctacagtagatcttataaagttattttgcttgtaaactattacacaataataaccacttaagtagcaaaaacagcctactggagattta

SEQ ID NO: 580784 - DNA, 144 bp, Homo sapiens
aggaagagaaggcagctgtgactgaggcagtgcgggccctgctggcaaaccaggacagtggtgaagtgcagcaggaccccaagtaccagggtctgcgggcacgtggccgggagatccggaaggagcttgttcacctgtacccca

SEQ ID NO: 580785 - DNA, 218 bp, Homo sapiens
tgttcgtggggccttagcctatgaatgtatgatatttagaaaattaacatggtctgaatgaatatataaaaggcttagcactttaagaatcaagagccggcggggatagtggctcacgcccagaaaagacgtatggtctcaagaagtgaaaggccaagggtcacttcaccaggctttttctgaacttccatctccattaacatcctgacctgaagaac

SEQ ID NO: 580786 - DNA, 977 bp, Homo sapiens
  misc_feature (273)..(273): n is a, c, g, or t
tcccccttaaacctttttaatgtggggcctccaaaatcctggggccacccttttggggccaggtgtgtcccctctaaaaaatgtcctggttttaaaaactctaaatactcttaaaagcggccccccccaaaaaaaaaaccccaaaggggccccacaaacaatattcctccttatccctttcgtgaagaggttcaccgaaacggccagttgtttttactcattttcaccccagctctttatacacctcactcaacactatagaggtgtgcgccnccatgtggtacacacaacacacgagtctcgtgaaagacaccagatctcttctcccacccagcgtgttattacagaaaggggcggtgtgggcagagtgatttataagagagcgagataaatagtataatcctatctaagacagcccctcttcggtgaaacactaatctctgtggaggacgagaaactttgtggtgagacaacttgatgcccagagacctccccgcaacagacacccatctcgtgtgtcccccccaacgcgggcctttgtgattatgagcaccaccccccacaccggaagacacgtgttccgtgctccctcaatatatatccaccgagaaacagggacaaagcggcagccccccccacagagggtgtgcgcaactactctcagtgagagagaggcctctctcacaacacgccacactctgtgggtgcttctgtgcccccgagaggaaaccccctcatatatacacacccagagtggtggtcgaagtatgataacccaccccagaagaacatctgccagaagaaaaattattgaaggggggcccccatttcttataccaccagcgatgtatctattaacaccccccgaacagagcgggggcggacatccaaacagacctatttgactcctcgtacgacgaccatccagcagacaaaaccttgtgtggcttgtcgacctcgtgtgttgaacacccccc

SEQ ID NO: 580787 - DNA, 652 bp, Homo sapiens
agcggaggactgggtgcgcctgcagggatcggaagccggttggggtgtgagaggttttctctgctctagcgaatagcgggttttggcagcaagttgttgcatatggattatataaacgtgaagagcaggggaaatactagaaagtagtccattcatctgatccacatgcgtgtggcagcccaaggcttagtccgtaggagcaatgactgttggtatgggctattccatgtatcgggaattcgtgggcaaaaccgtaagccttagaagaagagatgctgtctgtggtctgtgttggaggagcttgcttataggttagatgtcgttattattaaagttaccatattattgttggaaataaactaatttgtatgggttaagatggtaacatggcgattttgaatattggcttcctttcttgcaggcgttgatttgcttggtgaccgaattactagtgactagtattactaactaggtcattcaaggaagtcaagttaacttaaacgatgtcgacctaaatgcacttgatggtgttgaaatgtccaccttcttaaatctctaaggatgaacttagttctaacagaagataacaggccaatcctgaacggtactccctgatatgctgcagaatgtcagatatttgggatgttgctaa

SEQ ID NO: 580788 - DNA, 358 bp, Homo sapiens
ctggtctgactctagaggtatcccctgcagcacacaacagcaggaggttctagagaggaggaaaagcctgcaaagagggggccgtactgtcggccgaggccgccctatgccagcatgtggtctgcagtgcggtacgggggcctgaggccgtcgccgtaggtctcgatagggtagtctccatccatttccatgtgcatctccagcgtgtcaaggggcatcatcgctggactacatagggcggtaggtggcatccaagtcatctccgaggacaagaacccagattaccggaagcgcgtgtccgtgccgctcacgaactccctcttcaagcatgacccggctgcctgggacgctggccaga

SEQ ID NO: 580789 - DNA, 364 bp, Homo sapiens
  misc_feature (82)..(82): n is a, c, g, or t
  misc_feature (86)..(86): n is a, c, g, or t
gtcttaaataggattttacacacacacacacagaatttaaaattataaatcaaaggcaatcattctaaatgtactatgatancgtnttaaagatgcaagtaagcgtgtagaactaactaatatgaacagcactactcattacctaggagaaaggtgactggttttcacacaaagctaagcctgtaacagtcatcctaatcacaatggcttataaaagcatcaggtttccagtagagaaactattctaggaaagtcagtaaatctcttgaaagtttcacatctggaaaaccaggataaggctacaactattttgaaatctgaacaaggtatcagatgaaagagtaagattcccagccataatgta

SEQ ID NO: 580790 - DNA, 250 bp, Homo sapiens
aatggcaagtgtacgagctgttcccaaccctgaaatcaaccactaccagacagcacctccttcaggttatttcatggcagctaaccgacagactcagaaccgtgctgcatactatcctcctagcccaataggtcaagtatggccaagtcctcggtggactgctcagggtgccagaccgcatccattccactgtgtgcccggtgctttccgcccagctgctcctagatcaccctccgctttcgaggggatc

SEQ ID NO: 580791 - DNA, 895 bp, Homo sapiens
atcaaaaaatgaaaagaagttattagaagtgaagcgaaggtagtgtcttttccccagaaccccattttttggcttgctttgtagccacagtgcgtattccggaatctataggcgcgctctaggccttacttgcccgccacatgttgggacccgttaattccggtctggaaagtctataaggcggttcaaactttgcaggcatcctgaaaactttggcctgtggaacttgttaaaggaaatgtccattgtccaatatggccctatgcccctggggaccatggggtcttcccacggtgcagcccggaagtcccggccgcaagggctccctgataaaccgcggctgcaggcgccgagaccccgcgtgtccccccccccccgtgcaacgaaagggagtgccacctattatcggaaagaggcggccttcaagtacaaacaaaaaatggaggctcccctcttaaaattaggcaaagggcgcagttccaacactaggacacgccccgaagctcttctagcgcccccaaagcactgagggcacgacaacaccattaacagatggtatggtaccccacaacactccctcaggggagttgctcccaacatcattgtgtgaaaacctgataaccctcgccctctcatctctttgtggtgccctcttattccccctaagtagttcacggcgagtcccacagccatcactcgtgcccgttataatggcactctcggagtagtagcccaccaccacaccctgtcatggggtggccacacagcaacctgggataaaagcgcgccaccagtcatgttatggggcgccacgctctaaggtttgaagaccaccccgccatgccgctcgcgaatccccaagacagtttcccctaccctttttcgcccccataaa

SEQ ID NO: 580792 - DNA, 1198 bp, Homo sapiens
ctggtgcaggccgtctcggggaagcctcacaggacatggctcgagcctcaggtcgatttggagaggacttcagactaccttcctggaagctggtgtggagatggcagagccaggctccgagaccaggaggtaccgagcccaatgttgtgtaccaacttgaagggcatctccagtgtcttcaagcaaacttcttctggctgccaaggtccctgtaccacggaccctgcatgcccctaacctcaagagtcagctggcatgcagcatgccagggcaagataacatgacagacatcaatcagctcatcacgtatgatgcacccagacaggacacccggaccaagaaggcagcgtgataacggcccgtgcgggcaataggagcacggtccgggcaactccactaggagaacccagaccagcccaatcacatgacatagtccgatacatacaggataggcctgcgacacggagatacatgcgagaacgtcaaaagagtagcatgggaagaagggccactgcaatggaccattcaacccaaaacatgccacagcacacggcaccacctgcacagaacgctcaggacgatgcgcaaaacccacccagaccatacaacaagaggcaacataagctgcgaacaaccacccggaagggaacaggactggcaacaaagacatagcacatactcgcgagctcggccgcgaccaacagaagccccgaaatagcccaacgactgggagacagcaaccggagcataagatgggaaggcgcgaacaacagaaaaggcccagagggaccaacaccaagaggcacacctgcagcatgacgccatgcaccagaagtaaggggacgagccactgagcatgaacgcccaggggcccccaggagggagcaacaggagagacgccacaccaggtacgacgcacaacacaagccgaacgtaggcacaaacggcgggaaaaaacacggcctcggcctcggccaaaggaagatacagtcggcgaagagaaccaaccgcgaagagccataacgggccaaagaaagcaacggaaccctcccagagacagacaaaaaacgaagaggaggggcactaacagcaacaacagagaaacaatagaagaagacaacactcaagaggagccacacaggggcagcgaaaagagagacgaacaaggaacaaacgcagaacggaagaagcagctagg

SEQ ID NO: 580793 - DNA, 612 bp, Homo sapiens
  misc_feature (32)..(32): n is a, c, g, or t
  misc_feature (78)..(78): n is a, c, g, or t
  misc_feature (87)..(87): n is a, c, g, or t
  misc_feature (93)..(93): n is a, c, g, or t
  misc_feature (107)..(107): n is a, c, g, or t
  misc_feature (123)..(123): n is a, c, g, or t
  misc_feature (131)..(131): n is a, c, g, or t
  misc_feature (217)..(217): n is a, c, g, or t
  misc_feature (220)..(221): n is a, c, g, or t
  misc_feature (232)..(232): n is a, c, g, or t
  misc_feature (239)..(239): n is a, c, g, or t
  misc_feature (241)..(241): n is a, c, g, or t
  misc_feature (244)..(245): n is a, c, g, or t
  misc_feature (257)..(257): n is a, c, g, or t
  misc_feature (307)..(307): n is a, c, g, or t
  misc_feature (338)..(338): n is a, c, g, or t
  misc_feature (340)..(340): n is a, c, g, or t
  misc_feature (358)..(358): n is a, c, g, or t
  misc_feature (364)..(364): n is a, c, g, or t
  misc_feature (377)..(377): n is a, c, g, or t
  misc_feature (388)..(388): n is a, c, g, or t
  misc_feature (397)..(397): n is a, c, g, or t
  misc_feature (400)..(400): n is a, c, g, or t
  misc_feature (412)..(412): n is a, c, g, or t
  misc_feature (438)..(438): n is a, c, g, or t
  misc_feature (446)..(446): n is a, c, g, or t
  misc_feature (453)..(453): n is a, c, g, or t
  misc_feature (487)..(487): n is a, c, g, or t
  misc_feature (493)..(493): n is a, c, g, or t
  misc_feature (523)..(523): n is a, c, g, or t
  misc_feature (525)..(525): n is a, c, g, or t
  misc_feature (531)..(531): n is a, c, g, or t
  misc_feature (560)..(560): n is a, c, g, or t
tgggaagggatttcttgtaacaacgcatcttntatttggaatgactattaaaaaaacaacaatgtgcaatcaaagtcntcgggcatnttgtgnactttgggggatgntcgctccaaccgagtnttgttatnttcaccgttccagtttttaaatcctgagtcaagccaaaaaaaaaaaaaaaaaccaaaacaaaacaaaaaaaacaaataaagttttnggnntgttttttttnttttttntnttnnttgtgtgttttnttttttttgggttttttttttttttttttttttccgcctagaagcatttncggtggacgatggaggggggggggttgtcanantcggtggttgggggtccncatctnctggaaggtgganagcgaggccangatggagcngcngatccacacggngtacttgcgctcaggaggagcaatgntcttgatnttcattntgctgggtgccagggcagtgatctccttctgcancctgtnggcaatgccagggtacatggtggtgccgcnanacagcnctgtgttggcgtacaggtctttgcggatntccacgtcacacttcatgatggagttgaaggtagtttcgtgggatgccaagg

SEQ ID NO: 580794 - DNA, 120 bp, Homo sapiens
taagggcacccggttcaaagaccttgacacctggtggagtcacagaatcatagaccctgggaagaactttttatagcgttatttatttaaagctttacaattgtttaccctgctcaggga

SEQ ID NO: 580795 - DNA, 152 bp, Homo sapiens
actggtgactggaatgaggcggaacagattgcctgcatggaggcccgcccaacatctgcctagcatcggctagacaactggatcccgtcattagcagaatctcaacttcagacccgtcaacacattaagaaactggaagaggtcagcgtagt

SEQ ID NO: 580796 - DNA, 845 bp, Homo sapiens
  misc_feature (830)..(830): n is a, c, g, or t
attgtgtagctatacctagcaggaataaatactaagtctgtgtcagtattcttccccttggtttcagttatctattgctgtgtaaaaaaccatcccaactttgttgcttgaagcacccaggattcattgtttctcataagaattttctgctggtctcatgcggacttgctcgtgtcctagctgggatggctggattgttcatcttgcagttggtgctggacaatggtgggctctctctcagtggctttcatgcacaaggaggctcacacaggcttcttgatacagcagcctcagagcatcagaagggcaagagtggatgctgtctggtctttgaagtctcactcagaagtcacctgttgtcacttctgtgttctattagtgcaactgagtcctgaggcttgcccaggtttgcactgaggaaatcgattccacctcttgctgagaggagcagcaaagaatttatcgccacttttaacccactacaacctcaatttcaactgattgtctctaatgacttcttctgtaagcatccaaaacatcccttgattgaaactatctcaaggtgacctatcttccttcaacaatattttgtggttcgaaactatgtcattaagagagtgactttgaaaacctatataaggacccagatgtgaggtgactgcctagtctgaggaataatgactttaagttatatttgtagagaagtggtaaagccacgaagcagacccatggagaaatgcaaatctgtcatcagccttgaaggatgggacaaatttggtggtgccctggttaaggaggaaccagccctggggcttgctggcaaagcctangagactaatttgtaa

SEQ ID NO: 580797 - DNA, 1283 bp, Homo sapiens
ggaagtagtgcctcccgctgctgctatgggagatggcaccccgtgacaagcaggagtagactgtgccttgctgttaccatgacatgctgcagtacagtcgttctcccagaggtgcttgtgactgcggcgtgcggggaacacgcctgttgagtgtatcacttgatgataactactgactcccctgcgtagggtgttgtcccgcatatgtcgtcaagcaaacctgccaattctgcttgtgtggggtacgtgagagccctcgcgcactgggcaatctgtgaaccactgcgcgctaattacatcactgtgcctcgtgataacctaccaagctagactatgagcgactgaagggagttgttcacccgctaggtagagacgctcaacttgcagggacactcttgagaggggttttctatctaagattctagctcgtgtcacttcactcgctaccacgggactgggactcccccttcacggatcaattcaagatgggctcatccacattgcttgtcagtatgtgcggccgaagctgtacttctcacgatatcgcctgaggggagcttgttcggaaatactgacagtcgaattgacgtgggaatgccaccttgttatttgctccaccatgggtgaaccacgtggcctgcgcggccttaattccacttgctgaaccccctcggctcccattagtgtccctcatttcccttaacaagatgcccctcttcttagaatacaattccataagggcaacttggtatggcccctaccgccgaaactggccctttttttccatttacgcccacccgaacgcaatcattggagggaacctcccacactgtggtcgcccctgtgaagccaactcttccccctatcgaacactaccggctgaaacggcactcgccttgtgttaactaaagggggagttgaattaaccttcaccaaacttttccccccatgctgtcaactctaggtcaagcgtcggttccctggaccatactttacacacaacacggaggagaacctaattccctcttatggcgctctgtggctttccttcctctccgaaactacattacctacggcagagttctgggactggcatacaacagggcacttcccactacccctttattgcataccccactatacgccccctttcccactcgtgctctatattccacatctgcgtctttgttctgtcgacgctcctccccagattaatcgggttacccaacaactctctaattcacaatacgtctctccaccaagctttggctcacgtcagaacc

SEQ ID NO: 580798 - DNA, 501 bp, Homo sapiens
  misc_feature (28)..(28): n is a, c, g, or t
actcaatgaggcacactctcttgtggcnctccatatttttgggagcactttgataaggacggctggtccctgtggtactcagagtatcgcttccctgaagaactccctcagaccttcatgagctgcaatttcatccctggaatgttccagcgactggcacagctgaggaagaatgccttcgccagtgtcatcctttttggaacccacaataacagctccatttttggagtttgggttttccgaggccaggagcttgcctttcccctgagtccagattggcaggtgggcttcgagtcatacacatggcggaaactggattctggcaacgaggagacccaaacgctggttcgaaagtactttttctgggagggggccttccagcatgtgggcaaagccttccatcagggcaagattttcaagtgaacatttcttgccctcccctaactgcctgcccctgcccttcagggagatgggggtccttaaagggaactggacctttta

SEQ ID NO: 580799 - DNA, 154 bp, Homo sapiens
gcatcatcactctatccattccaatgcactgcactccattctttcctcaccattccattccactccattccaatccactccattccattccattccactccactccgttccattccactcaactccattccattccattctattccattccgtt

SEQ ID NO: 580800 - DNA, 416 bp, Homo sapiens
tataccacagggccagtatttccctggtaccaaaaccagacaaagacgcaacaaaaaaagaaaactacaggccagtatctttgaacagagatgcaaaatccttaaaccaaattcaactacatatttaaaagatcattcattgtaatcaagtgggattcatcccagggatgcaaggatggttcaacatactctgatatggtttgtgtttgtgtccctgcccaaatcttacatttagttgtaatccccagtgttggaggaggggcctggtggaacgtgattggatcataggagtggagttctcatgaatggtttagccccatctccccttgctactatatagttagtgagttctcatgagatctgattgtttaaacctccctgctctctgtctctctcctactctggccatgtgtgtt

SEQ ID NO: 580801 - DNA, 341 bp, Homo sapiens
attattagataatgtacagatacggactcggtatcaccacttgttaatactgacatccttcaaatgaacaaggtatgtacctaattagtctttacgtattcctcccaattaatggataattgtcaagcccagggaatctttcctttactttgacttcccgagttgtcatcatccattgacaataaacttatctgattgaaatctctcgatccctcacaaaccgagtatctgcaggtatattcaagatcgatcctcatcaaaggattgtgataagtggctaatcctcatataatctcatcgtttccaagcactggaggactcattatcttattccttcttca

SEQ ID NO: 580802 - DNA, 248 bp, Homo sapiens
gtagcatttctattgcctgttctgtacatcatgcatctgggtagcactcgctgctctggagggcggggctgggggtagggccctactgactctgccacacttggagatgtgcacgccctgctctgtagcattaagccccaggatggagaagacaccacgaagccagccaagaagctggtccccactgttgattaagagcaaggatgatggcgtccttgtagcagtttgttattgaaccggatagcttg

SEQ ID NO: 580803 - DNA, 105 bp, Homo sapiens
aggatcaacggtgagagtataatttactatcatctttttcagctgtagattcctttgctagtatcttcttcttcatctgttcccacatccatttacttacatctt

SEQ ID NO: 580804 - DNA, 144 bp, Homo sapiens
  misc_feature (84)..(84): n is a, c, g, or t
cgtagcacactgcagcacaataccagtctggaatgacaaagtgccctcctcttacgaagggctgtcttcctaactaggcagggncgggaacataaccaagaaggatgtcatctttgcaatagacaagcaagtagataagtaaag

SEQ ID NO: 580805 - DNA, 132 bp, Homo sapiens
tattttttaatttttctgtagagacaggctctgctgtgtgcccaggcaaatctcaaatcactggactcaagtgattctcgtgcctcaggctcccgagtagctgggattacaggcgcccactaccacgccaac

SEQ ID NO: 580806 - DNA, 216 bp, Homo sapiens
acttgttctcttttttacacatcttctttgttatacactaattcgttttttttcttcttttttatctttcttctttttccttttcttatctctcttattctttactatttctactcatcttgtcttacgtttttctcttccctttcttctttttcctatctttctattctttatttttttctcttttctttttttttcttcctttactcttttctt

SEQ ID NO: 580807 - DNA, 464 bp, Homo sapiens
tcttaccgtcctagctcgccagtggctgagttactgaacagagcagcattgagcccacgtatgctgttgttagttataagggggatagagagctttggtcctgatagcagaaactgcccataaattgtacaagaatatttgtgcccgtggggtaagactcggcgagagccggacaagtagaggttttctcgctgagacggtaataggtgaatgaagggtaaatgctggggaggtcttggaccatagaggacattcagggtgactgggtcattgtgcatgccaccatctcggtcccgtatttcaccttcatagggtcctgtttcatttctcgtgacagtgggtagaatgaggatcctgttttcaatgggtctgcttgaccctggtaatgacagtgaggctctgaccaatttagccagcacaggtcggtgtagcactcactcttaggttcacaggcgaggctagga

SEQ ID NO: 580808 - DNA, 292 bp, Homo sapiens
  misc_feature (280)..(280): n is a, c, g, or t
taggtggttgtgggtagcacagtcaagagaaggactctgagaccccaagatccggcaggttgccgcagaatgggggcaggagtcgggggacagagagccctgggcacagaggcaagaatcagatggatggcagttccgagccctcctgcctcctgacctcaccggcccactggtctgagctgggggaggtccacaggcctccaggagcctcaggaaggacgcaaacttgcagcagaaggtggtgttggcgcaggggctgctggccccagagccttccagngatgaggagaga

SEQ ID NO: 580809 - DNA, 331 bp, Homo sapiens
catactcttgaccaatggtgcgcttcgggtctgataccaaaggaatgtccatgggtcacagtcctccttgtttcttaggtgtattgacccatgctagatgacaagagtgagaatccacagaagcccatatcacttgacagttgagtttcttaaattcttctgccctatcactgaaaccaatgatctccccttggtagtcagacaggttgatatctttaacctgaccatgtggcataacagctgtggctttgaagttgggggcagggtgcacaattttagcatctcctgaacacatcttcctatcaacagtcaccacacgagtcgcagaacc

SEQ ID NO: 580810 - DNA, 1005 bp, Homo sapiens
  misc_feature (219)..(219): n is a, c, g, or t
  misc_feature (918)..(918): n is a, c, g, or t
atgaccccaatacgcaaaattaagcccgctaataaacttaaattgatacacgtgtacattcgatcgacacgtctcgccaccctcatgccaatcactcgtccgacagtgatggaagacttcgggtctctactccattggagccatggcctggagtcgcgtccaacagtacgacgctacatggactcattctctagaccgagtgctacttagatcgatccnagtaacgtcgcgtctaatcacgcactttatgtgcagtcaatacggcgcacgacaatgcatcttcgcagaatcgatcagacacttcagtgcgctggacatccatcacgctttaccctgtcaacggccaaagtggcagcccatcaacatattccttctatactggcctccttcccatacagcgatcgagagcgaaggcccatagtagttcacggaatcagttatcatcatacattcaggaaagccctgaaaacaatcggcagttaatccctccttgcattgcaaagcgtactagccaagcaagccctttcacttaggcttatgtccctccccgtgaagggccaaagatattcaattcattgcaggggggccacaaggtaacattacacaagcgttaccgtacttcgcggccatcaccgagttatcattttgggcggcaagaacctaagtttcaaattgaactcttgaagggaagggcataacgtacaaggtaacgaacaaggatacccgcgaacacacttcacgaacagaaatagtcattgttgtacccgttgtcaaacgtttatccgaagtcgttttggcccaccctagtcacgtctactatggggcaagaccccaagtaaggcgaagacgaacgttcccaaagccattcacacatacttttgccatatggccgacggaaaaacacggggggaattcaanaagcaaaagcgcccccagttaaagggaaagatcacaaccattccacgaatttccgggaagtgaaacaagatcaagacgatgtcccac

SEQ ID NO: 580811 - DNA, 850 bp, Homo sapiens
  misc_feature (89)..(89): n is a, c, g, or t
tatgtcaactctgcgtatgatctccgctgcattctgtttatgtgggcgtaatactgcgtgtgtttacccccggccacaccggggtgtgngttagatttcggtttgtgagagtcgcccacaacacttggcgttggccgcacccttgtgcgtggaccttgggtttcgcctcgccaaatgctggggatctttcgcccacttctgtgttaacgccgtccagcgttaacggccaccctggggatggttcaaacaagtgcggcccctgggggtgaataattaacaccaaggtgtaaagcacacttcgtcgcaaaattctgggggcagcccctatgggaatctcaaccggggcccccccgagcaccctcgagcagctagccgccatattactgctgaggtggacgccctcccaatgaggctaaagggtcatctcatcgggagatcaattaggaggagccaacatgggctgccccccctcctaaagtttcccggccccccccggcccaaaaaagtgtcccgggaggagaacacaaagtgaaaacaacggctttttacccacgggcgtcacagtccgctttttaacaggagcattgtggagaatggtatgaaatgttcaatcaccgaggtcaccgaattggaggagcaagcctgtggcggtcatatatgttaccccgggcaccctctttagataccttcgaatcccctcgggaccccctggtgttgcgccccgctcactcaacaaccaatcttgtgaaggacgtggatggtcttgtagaaaaactaacaatgaatatccgagaaaacgggggttacaaaggaaaattaacaaggggggtttcccctcaaaaaacataac

SEQ ID NO: 580812 - DNA, 489 bp, Homo sapiens
  misc_feature (375)..(375): n is a, c, g, or t
  misc_feature (440)..(440): n is a, c, g, or t
  misc_feature (479)..(479): n is a, c, g, or t
  misc_feature (482)..(482): n is a, c, g, or t
gtacatcaacaaagacagtaagcatgaagagctaatgctaggagatccttgccttaaagatctgaaaaaaggagacatcatacaactgcagaggagagggttcttcatatgcgaccagccatacgaacctgtcagcccatatagttgcagagaagctccatgcatcctgatatacatacctgatgggcacacaaaggaaatgccaacatccggatcaaaggaaaagaccaaagtggaaatctcaaaaaaggagacaagctctgctcctaaagaaagaccagcacctgctgtgagttctacttgtgctacagctgaggattcctccgtcctctacagcagagtggcggtgcagggggatgtggttcgtgaattganagccaagaaagcgccaaaggaagatatagacgcagctgtgaagcagcttttgactttgaagctgnatatagagagaaactgggcaggagtataaacctgggaanccntctgctg

SEQ ID NO: 580813 - DNA, 430 bp, Homo sapiens
catgtgcctgtagtctcagcttctcaggaggctgaagtggggaggatcgcctgagcccgggggtttgaggctgcagtgagctgtgattgttccactgcactccagtctggggtgatacagcaacactctgtctctaaaaaaaaaaaaaaattaggctgaatgcagaggctcccacctgtgatcccagcattttgggaggccaaggtgggaggatcacttgaagtcaggtgttcaaccccaacctcggcaacagagcatgacccaggctctacaaaaatgaaaataaaagccagatgtggtgcatgtgcctgtagtctcagctatttgaagctgaggcaggaggattgcttgagccaaggagtttgaggcctcagtgaactaggatcatgccactgaactctagcctggcaacagagaccatgtctttagc

SEQ ID NO: 580814 - DNA, 202 bp, Homo sapiens
tagctctgtcagacttacacacacatactttctaccttatcaatacgagtaattaaggtattttttagtcttgcataattttggtcctcttgatgttgaatgaactaaaacacatgacttaaataattaagatgctgtgttttctatattttttcttgtttcccctatagctcttctctgtgaatgctattgaaacttctaa

SEQ ID NO: 580815 - DNA, 212 bp, Homo sapiens
  misc_feature (18)..(18): n is a, c, g, or t
  misc_feature (23)..(23): n is a, c, g, or t
  misc_feature (32)..(32): n is a, c, g, or t
  misc_feature (48)..(48): n is a, c, g, or t
  misc_feature (54)..(54): n is a, c, g, or t
  misc_feature (65)..(65): n is a, c, g, or t
  misc_feature (69)..(69): n is a, c, g, or t
  misc_feature (82)..(82): n is a, c, g, or t
  misc_feature (86)..(86): n is a, c, g, or t
  misc_feature (96)..(96): n is a, c, g, or t
  misc_feature (116)..(117): n is a, c, g, or t
  misc_feature (127)..(127): n is a, c, g, or t
  misc_feature (129)..(130): n is a, c, g, or t
  misc_feature (141)..(141): n is a, c, g, or t
  misc_feature (154)..(155): n is a, c, g, or t
  misc_feature (157)..(157): n is a, c, g, or t
  misc_feature (174)..(175): n is a, c, g, or t
  misc_feature (177)..(177): n is a, c, g, or t
  misc_feature (187)..(187): n is a, c, g, or t
  misc_feature (200)..(200): n is a, c, g, or t
  misc_feature (205)..(205): n is a, c, g, or t
  misc_feature (210)..(210): n is a, c, g, or t
ggaagatgcgttagaaanaaccnatgtgcccngtcgaaagacactgcnggaggnggtgatggagnccgnggggatcaagganaccnggaaatacgngaaggtctattggtattganncctggggcanannagctcctcccnaacttctgtcccnncngtgaaggctgaggcacnncnttttcagatncgggtaaagagcncgttntgagngg

SEQ ID NO: 580816 - DNA, 269 bp, Homo sapiens
ggtttggcattttttcggacttcctatagggcattttggccccttgggccccaattgcccacaagtaggctcgaggccccttttttgcctgtttttcaataggagtttggagggttttggtctggccaagcctttccccgcctcccccaagaagcaagttggtttcctttggtttccttaggcgtccatcggaggcaaaaaaacgtggatttccttggttcttttgtttcaggtcaaagaagggccatgaaggatccccaataaatcca

SEQ ID NO: 580817 - DNA, 232 bp, Homo sapiens
tcttcaagtaatcagaatcttcccgagcagtacgcgcctggattttcttacagcttcaagtagcgatgaagccccaatcataagcaattcagaaagggttgtttcatctacaaagaccgatttcaacgaatcttctcgacaagtgaaggtaggcgtgacaactgaggtagattgcctgtcacgcgatagctttctgagcatgtcatcgtatcttttgttttcgacgaaggat

SEQ ID NO: 580818 - DNA, 283 bp, Homo sapiens
atcccccaattatcggacgcccacagttcttggcagcgtggcgactcctctccgtatactggctcagcaatgggaccaatctgtggtcacccttgtcaccctagacctggccattgtcggccgccagcatcgtgatgtcgatcatcggcctggtcggcagctactggatcgggcgctgggtgccgcacggcaaacgctaattgacgccgtcctcgcccacccgctgtcctaactaccgactaggctgtgatgccgtgaaagacatgctggtgtggatcgattg

SEQ ID NO: 580819 - DNA, 1254 bp, Homo sapiens
  misc_feature (323)..(323): n is a, c, g, or t
  misc_feature (563)..(563): n is a, c, g, or t
cggaacgcctaggctcaagtggatctgtccacctcagtctccctaagtgctgggattacatgacgtgaaccatgtgggaccgatgcccaaacccttcaccttctaatgggcactggtcatgattcagaccgattcggccttgaagaaggttggcacatacagcgtgtgtgctgggcctagtgcttactacaagtgaagctggctacctaaatatatgctgttgttgacctgagattccagcgacaagcacttatctacacataccccagagtactcatgactcacgatacacctgtcttagacagaaacagtgggctctgctntcggaacatgttctcattgacgtctagcctgcatgccgacagacattatatggcttcatgattaagacccttctcacatccttgattcatctaaagacgtgtattcatcacgtggtcaagcaagaactgtaactaggtggtcactacttctcgtgtgccagttgtagagagtgctgaagattgttgccttcatttagatcggtgaagtttctagaaaacatatctatgtctaaattgatntcttctctggttccactactcgatctgtaaagccccatatggcaacatcatgggaagaatagacattatcgtatgtcgatgacgcgtagacgcttttaataaactttacatgattcctcccgtatgaaaggggcgctccaaaggctcaccaaaagcctagaagtagagccgtttgtgccatgataccagacactttgtggcaacttaaaattcaggcgttggttgaaaaccatacttcgggtattggaaggtatgtttgctttcggcttcttggtaagacaaaccgagggaacttcgaattacccgtgaaacgacgggcaaaccacgtttttctttgtcccttacagtatatcaagttcatatcgggccgtttgttcgtcagaacattttataggcatatattaagtttttgtgcattataacagtgtccttataagagttacttataccccgactccaattattcgtgccctcattgcacaccggaccacaattcccattggcaagccaattccaaagaggggttcccccctctgaagttaactttccttgggcaccaggctttccttgaggacaccaaagttttcctttccttatatgggagaccttgtaaagttccgttgtggggcaaagacagtggtttgtgtttggcccatgtaaggggtaaaatatgtgggtttacgccccttta

SEQ ID NO: 580820 - DNA, 148 bp, Homo sapiens
actctttaccctaacaccacaggcaggcacagtggcttacacctgttatcccatgcactttgggaggccaaggcgtggcagactgcttgagcccaggagtttggtatcagcctgggcaatgtggcaagaccttgtttctacaaaaact

SEQ ID NO: 580821 - DNA, 379 bp, Homo sapiens
tccctagaagtcgacgagaactatcatctgacccaggaatctcacttatgggtatacacccaaagaaaatgaaaacaccacctcataaagacgtctgtattatcccattttcagtgcagcattagccaagatatggaaacaaacaaagtgtcaacagttgaatggacaaaactgtggcacatataagactggtacttattcatccttataaaaggagatcctgacatttaccacaacggggaggaacctggaggactgtatgctgcgtgaagcaagccagacagaaaccgacaaaccgtcgcctgatctcacttattttggaatctaaacaacgacagtggaacactccggagaccgcaaataaaaccctgattactgg

SEQ ID NO: 580822 - DNA, 521 bp, Homo sapiens
ccgaaaaaaaacttggcagtcctagacgacgaaaaatatggaacggatggactcaaacaatatgcaaatacttcagtgcctgctctcaaaactgctttactcagtgattccttcctaggcctccaaccatatggccgacagccaacctggtgctactcaaagtatatagaagccttagaacaggagagaattcttcttaagatccaagaagaactagaaaaaaagttgtttgcaggcttgcaacctctcacaaattttaaggctagctcttcaactatgtctttgaaaaagaatatgtctgcccacagcagccagaagtgacagcattcttgtgaatgtttacatcctgctgctgataggttcaaggaattctttaaaccagattctgctgacatgagaagctccagtgatttgtttttttgaaggtctgtatcagagcaagcctaacatctaaataaagtttgattctggattttccaggtgggaaataaataaagaaaatttggcttgtcttaaaaaaa

SEQ ID NO: 580823 - DNA, 343 bp, Homo sapiens
  misc_feature (228)..(228): n is a, c, g, or t
tttgcaggagacaccctatgagttttgatccgacgggttacaccctcgcccatgagcatctgcatattgatctctccggctttaaaaacaacgtggactgccgccttgatcagtatgcgttcatttgccaggagatgaacgacctgatgacccggggcgtgcgtaatgtgatctgagatgaccaaccgttacatggggcgcaatgcgcaatttatgcttgatgtaatngcgcgagacggggatcaacgtggtggcctgtaccggttattaccaggacgcgtttttcccggaacatgtggcgacccgcagcgtgcaggaactggcgcaggagatggtcgatgaa

SEQ ID NO: 580824 - DNA, 436 bp, Homo sapiens
  misc_feature (164)..(164): n is a, c, g, or t
caggtttgttctctttctccctctcgggggggagtgttcccaaaaccggggccccttccctcgtttggtaaagggtttttttcccccccctttccccgggggggggggggacatgggggggcgggggaaaaatataaaaccccccccccccgggtggggtccgngggggcttttttttttttttaaaggccccccggggggcaagggggggggggccggggggggtttttttttttttcctttggggggggggggttggccccccccccccccccgaagggccttttccttttcccgggggttttgggggggggggggggggcccccccccccccgggtttttttggttgggggggggggttttggggggcccccctttttttttttttccggggccccggggggggttttgggcccccccccccccctgggggga

SEQ ID NO: 580825 - DNA, 261 bp, Homo sapiens
cggagctttacgtgggtacgtctacacctcattacagatgcagatctttaacccactgtgccaggccagggatcaacacctgagtcctggccctgcagagacaccactgatcctgttgcaagcagtggaaactcctccacacatatttactaagcactttcaacttagagcttacactgctatcgaacaacggctaacaccaacaggggctaccggagctcgcaattcgctaactcatggctcactagcctgctcctcctg

SEQ ID NO: 580826 - DNA, 120 bp, Homo sapiens
caccagctcggaagccaccgcgcagaacttcgtcaaggaacagggcggcgaataccgctacttcaagaaagtcctcaacggcaagccgctgtatgtgatcacctacggcaacttcgcaag

SEQ ID NO: 580827 - DNA, 1049 bp, Homo sapiens
  misc_feature (831)..(831): n is a, c, g, or t
aggggaaggggggaggtgcggagttgctgctgcgccggctgcttctcccacccccatgcctttgccctaagggggctggatggtcaaggcggcgcgatggctcgagctcgggcggtggcggtggtggccgtgaggctgcgtgtgtcttctcctcctcgccccgggcgccggcggtgatcctagcgagcggcgcggccccgatgagactgctggcgggctggttgtgcctgagcctggcgtccgtgtggctggcgcggaggatgtggacgctgcgagagcccgctcgaccccgcatccctgttaacgtgaacatgattagctggcctccggtggtgggctcggttctggctggtcgtggtggcggtatgtgaaggagaaccgaccagtgtgtatgtgtgcaacagagagaaattatgcgaatcacttccaggctgtctttggtactagaagttacccttgatccaaggaacacagatccttcttaaacaacagcattgagggaaatcgggctggcgtatttatccaattatatcattcttttgtgtcggatctgtttttagcctgtttatgtctagaacatctatcaatgggttgctaggaagaggctcaatgtttgtgttttcaccagatcgagtttcagagactgcttaaaattaatccagagtggaaaacccaagacttcttgattaaggtgctggagatggagaagtcacaaaaattaatgagccctcattttgtaagagattattgccatgatgctttatggaaactatgatttgggcggcttcagaacacagaaatacggagctccttggctaatagtgaagggcncgataggggtccgcattatggtctagggggcggaactgctggaggtgtgaacggcccgcttgttaaggtatgcaggtttgtgggcacagaggggctcttgccttctcctttcccttggagatgtgggggggaacgatgtgtaggaggcgacgattttgttagggtgtgaccaattggactatagcggtcacggaggggctggagaaataaattatgct

SEQ ID NO: 580828 - DNA, 960 bp, Homo sapiens
  misc_feature (41)..(41): n is a, c, g, or t
  misc_feature (63)..(63): n is a, c, g, or t
  misc_feature (67)..(67): n is a, c, g, or t
  misc_feature (73)..(73): n is a, c, g, or t
  misc_feature (77)..(77): n is a, c, g, or t
  misc_feature (97)..(97): n is a, c, g, or t
  misc_feature (125)..(125): n is a, c, g, or t
tcacacgcacacacataccaacacaacgctaccacacacancacagcacccctcattgcaacncccnatcctnaacnacccacgaccaccatcgacnacccatgcaacgcaccgagccaaatcanacaacccaacaagacgccaacaactctcacatgacaaccaacaacaacataaataccacggggacaacccaataccaaacgccaccacgacaaacgatccaaacctaatcacagcagccctacttctcctatctctcccagtcctagctgctggcatcactatactactaacagaccgaaacctcaacaccacacatactcaaccacaccaacccaccaaccaacacaaaacccaaaaacccaacccccacacaacaaccccccaccaccaaccacacacaacacacctaacacacaccaaaccaaccacacaccaaccaccaccaccacaacaacaccccaccacaacaccaccaaacaaacccaccaacacaacacaacaacaacaaacacaacacccccaaactaaccctaacaaaccacacaaccccaaccgacccctaccaccacccaaatacaccccaataacccacaccccacgccccaacaactactaacacacacccacacaccaacacacacccaaacccacatcacacaccaaccccacaccacacctacaaacaccccccaaaccacccaccacctcaacacacacaacaccccacaccacacacaacccacacaaaccacactcccacacacaaccaacaccacacaaccacacatcaacaacttacaccacaacacaaacaatcaccacaccacacccaccacaacaacccaaaacaacccaacaacacacacaccaatcacaaccccaccatcacacaacacacataccacatcacatacaccaccacacctcacacaacacacactcatcccaccaccg

SEQ ID NO: 580829 - DNA, 403 bp, Homo sapiens
gccccttacccctcagtagtggggctgccgaggtagtaagacaggatgccccagttaagtttgaatttccagatagaaaataattttaagaataaatatgttcctatcctaatacatgggacagatgttatttttagagataggatcttgctctgttgcccaggctggagtgtagtggtatgatcatagctcaccacaaccttgaactcccaggctcaagcgatcctcccgccttgactgcctgagtagctgggactacaggcatgcaccaccacgcccagctaatttttcttattttttgtggagacagggtctcactgtgttgcctcacttgagctcaggagtcctaaaccagcctgggcaacatagtgataccttgtctctaccaaaagttaaaaaaaaa

SEQ ID NO: 580830 - DNA, 109 bp, Homo sapiens
aggtggaagttacatcgtctttaaaccctgcgtggcaatccctgacgcaccgtcgtcatgtccagggaagacaggctcgacctggaaggtccaacttacttccttaaga

SEQ ID NO: 580831 - DNA, 210 bp, Homo sapiens
ttaggaaggaggcttagggcatgggaggaggggaaaaaatggcccctttgggccatttacacttgaaaatgtgctccctccccgattatttcagcaacctgcccctttaggggtccccgggaacaatggggggaggcagcagtgcaggaacccccccaaaacagggggggtcagcccctgaacaataaatggccttttatggtagcctta

SEQ ID NO: 580832 - DNA, 292 bp, Homo sapiens
  misc_feature (240)..(240): n is a, c, g, or t
agagatccagttctggtccccactgaaaagaaaagtaaccttcgcagggcggtggtcacgctgtaatcccaacactttggaggctgaggcgggcggatcacttaaggtcaggagtacaagaccagcctggcaacatggtgaaacccgtctctatcaaaaattagccgggcatggtggcacgtgcctgtaatcccagctacttgggaggctgaggcacgagaattgcttgaacccaggagnctgaggctgcagtgagccaagattgtgccactgcattcaagcctgtgtgaga

SEQ ID NO: 580833 - DNA, 1242 bp, Homo sapiens
  misc_feature (15)..(15): n is a, c, g, or t
  misc_feature (200)..(200): n is a, c, g, or t
  misc_feature (231)..(231): n is a, c, g, or t
  misc_feature (364)..(364): n is a, c, g, or t
  misc_feature (379)..(379): n is a, c, g, or t
  misc_feature (390)..(390): n is a, c, g, or t
  misc_feature (397)..(397): n is a, c, g, or t
  misc_feature (409)..(409): n is a, c, g, or t
  misc_feature (421)..(421): n is a, c, g, or t
  misc_feature (444)..(444): n is a, c, g, or t
  misc_feature (448)..(448): n is a, c, g, or t
  misc_feature (492)..(492): n is a, c, g, or t
  misc_feature (628)..(628): n is a, c, g, or t
  misc_feature (675)..(675): n is a, c, g, or t
  misc_feature (791)..(791): n is a, c, g, or t
  misc_feature (801)..(801): n is a, c, g, or t
  misc_feature (871)..(871): n is a, c, g, or t
  misc_feature (874)..(874): n is a, c, g, or t
  misc_feature (922)..(922): n is a, c, g, or t
  misc_feature (976)..(976): n is a, c, g, or t
  misc_feature (981)..(981): n is a, c, g, or t
  misc_feature (1003)..(1003): n is a, c, g, or t
  misc_feature (1070)..(1070): n is a, c, g, or t
  misc_feature (1086)..(1086): n is a, c, g, or t
  misc_feature (1134)..(1134): n is a, c, g, or t
  misc_feature (1151)..(1151): n is a, c, g, or t
  misc_feature (1178)..(1178): n is a, c, g, or t
cttctctgctttctntttctgctcccgttgttgctctggatctgagtgttgtatgtgttgcatatgtctccgtgcctgctatatttattgagcggataatcgaccgtacacaatcgcgcaaggcacgcagaccagcgcgagacgagccaacatgatacaccgctcgcactaccagccttctctaagtgccagccagtacnacagtaaacaccagttgattacatctactcnacatacaagagctgcgaaagagataggtatagtgaaacaaaagaaacgagtcacgagcaagaagtaccagaaccacgcaataaaagataatggcgatttacgcattaccacggactggatgtcgcatcgcgcntcttatggcccgttntcgtgtgtttnatctatngcgtttcaatancttttcatatanataacatgataaagcacaaaatntagnctaataaatatatatagaatatgatcataccacgcaataatatntaaccaccacgtcgacagaccacgatataatcgtatcgaagagaacgatagctatcacgatatagcagatgtcaacatcattgataactcacagacacacgacacctcacctcatgatccgtccttatttatatantcctcatacaatcattaccaataccgtgactatacttagaatacgtntcgtacctcccctatacttgcacacaccacatcactctcctctaagccagctctactctcacgctctcgactctttactactcgtctcacacttgtacacatccacacattactcnactcacatancgactccacacatctatcattcacggtccgccgacccgacgagtcaccgaccatccaacggtgtggtgangangttgtggtcgttctataatatattctgcaaatccacctcatagcatanagtacaacgaaagctcacacacacacagcagatgtcagatagcgactcggtacntctanggatacagaggcgatgtcgcgntagacgatagagctcgcacgggatgcggctgatgaggctgacggagtagagccatcagtgtgagctntagagagagagaggcncgtatctatctgattcaggttatatcacgtatgaaacacacatagacnacattacgtcgcgaggngcgtcgcgtagcgcgagagagtatatntcgtacgcgatgcacgttatctgctagctcactctcgcgcggtgtctggtgtgagtgtcactcg

SEQ ID NO: 580834 - DNA, 1118 bp, Homo sapiens
gacgccttcagcagacccgaacgctcttggctccttcgttacacatcacaccccgtcaacgagcctccaactggcgtcagacgggacccagataagccgagtcatccagcaccccgagtgaagcgacccaagggcgagcatgccgagacaaggcgggagggagtccgacgctgggcgcgggcggggagcgtgcgtccgttcgcacgaggcagtcgggaaggaagggagcggctgctgaatccatggtcctgggtgacatgcggatgcatgacacctgcacgaaccaccagcagcccacacggcagtgcgagcccttccttatagagcagtcagcagggggaacatgctagcggcaagtcttccagtgtgtgctaagatcgtgcagactcctggggcagaatgaggtggactatcgaccagaagcaggtggtcatcctgagccaggatagcttctaccgatgtccttacctcgagagcagcaaggccaaagccctgaagggccagttcaactttgaacacccggatgcctttgacaatgaactcattctcaaaacactcaaagaaatcactgaagggaaaacagtccagatccccgtgtatgactttgtctcccattcccggaaggaggagacagttactgtctatcccgacagacgtggtgcatctttgcagggatcctggcacttctactcccaggaggtacgagacctgttccagatgaagccttttagtgggatacagaatgaggaaacacggatcttacgcagaggtattagggacataggaaaagaagaaggatatgagagatataatctcagaaaataagttcggcagacagcatgaagatccgatgaaaaaaaagatgagagtgaatatccctaaagatacaaaaatgagtagaataaaccatgggcaaaatccagcatacaaagggaaggctccaacgaacacaggacagaaaggataccaagacaaaagacgatgtacaaaccagaacgttccaacacaggaccacctagaacaggacaggataataacgagcgaaaaaaaaagaaacagaatcgagacaacaagaaaaagccggtaaaaaaacgaccagacatgaagaaacacgagga

SEQ ID NO: 580835 - DNA, 360 bp, Homo sapiens
actaaccatagctggcacgtcgtcattggcaaaaccctcatgactaaaacaccaaaagcaatggcaacaaaagccaaaattgacaaatgggatctgattaaactaacagagcttctgcacagcaaaagaaactaccatcagagtgaacaggcaacctacagaatggaagaaaatttttgcaatctatccatcttacaaagagctaatatccagaatttaaaggaacttaaacaaatttacaaaaaaaaaaaatcaaacaaccccttcaaaaagtgggcgaaggatatgaacacacacttctcaaaaaaaataagatatttatgcttccatttctttagaggtgattgaccaaggttcgca

SEQ ID NO: 580836 - DNA, 202 bp, Homo sapiens
cccccccccccttcccccccccttcctcgaggggtggaggggtccccgcccctgggtgggcaggggccgcccctccccggagctccttaggaagaagacaggttggttcattgaatgcccccttttttatttttggtgaggatgcatgcgtggggctgatggtgtttagagtgggggcaacccaataaatcaataaaactca

SEQ ID NO: 580837 - DNA, 99 bp, Homo sapiens
atcgactcacggtgtagcacgggcacaagacgagggcggcgggcggggtggattagaggtcactctcgcccgtacagcgccgtggagaaggacatgtag

SEQ ID NO: 580838 - DNA, 295 bp, Homo sapiens
aaaaatcctaccttcattccattcaaaagggatgaagaggctggatgcagtggctcacacataatcccagcactttgggaggccaagatgggaggatcacttgaggccaggagttcgaaaccagcctggccaacacggtaaaacccggtctctactaaaaacacaaaaattagctgggcatggtggtggatgcctgtaactccagctactctggaggccaaggcaggagaattgcttgaacccgggagacagacgttgcagtgagcccaaatcacacccactgttctccaggctg

SEQ ID NO: 580839 - DNA, 338 bp, Homo sapiens
tcgttgagtaggcatttaacctttctgaagcttcagtctccccatctgaaaaaagaggataataagagtcttccaggctgagtgcagtggctcatgcctgtaatctcagcactttggaaggccaaggtgggcagatcacttgagatcaggagtccacgaccagcctggccaacatggcgaaaccctgtctctactaaaattacaaaaattaaccaggtatggtggctggcgcctgtaatcccagctactccggaggctgaggcaggagaatcgcttcaacctgggaggtggaggtttcagtaagccaagattgtgtgtgaccaagtgcggggatcctc

SEQ ID NO: 580840 - DNA, 538 bp, Homo sapiens
gtgagttctttattaagcctgttcgttcttttaacctttggtctttattatctatagattaggtcctaatgctttggtaatattttgagagccactgctttatatattattgttagtacttggcagtactccttctacaaaggtcctttcattatcctctacaatgcatttctatattacagttttccttctatgaaagtccttacgtgatatgatacaagcactgtgttttgtgcttaaactcttcagcggggtagcatcaaagcttcttggggaacggatcgtatatgtgggtcccttccctagaagaactggttgatgatatggctactgcttctacatcttgagttttttaattatactgtattgtattacagcgtgtagtcacttgagcactgctcctgacttcaagtctggtgctttagccagatgtattaatttccataaatgctctctgtaagagtttggttaaaatgaagattcacttgggaaaacactgcagctttagtctgtgtaactatcttgttatgagtatgta

SEQ ID NO: 580841 - DNA, 265 bp, Homo sapiens
  misc_feature (65)..(65): n is a, c, g, or t
  misc_feature (161)..(161): n is a, c, g, or t
  misc_feature (176)..(176): n is a, c, g, or t
  misc_feature (181)..(181): n is a, c, g, or t
  misc_feature (196)..(196): n is a, c, g, or t
tgtgggtggggggagaaagtttgtggtttttgttcgagggggtgtttggggttttttggtttttnaagtttttttttgttttattggggtggggttttgttgatgtttgtagttgggggagaggtgttttctttttctttgagaagggactttttgaaaanttgttttttataaangaggnaaaagcatttaattnccacccccccaccccccgctcccttctgctccttcaataaaccgaaagatgggttttttttttcaaaaa

SEQ ID NO: 580842 - DNA, 939 bp, Homo sapiens
gagtgcttcccgcagaggtgctggtggtgtggagcggagtgtggtcggtgcgtgtggccgatccgggccgtgggccgtgtggggtgccgggcggcggccgggccggcggacggcgggatgggctgcaccgtgagcgcctgaggacaaggcggcggccgagcgctctaagatgatcgacaagaacctgcgggatggacggacgagaacggcggcgcgggacgtgaagttgctgctgttgggtgctggggacgtcagggaagagcaccatcgtcaatgcacgactgatagatcatccacgaggatggctactccgaggagcgaatgcccggcagtaccgcggcggttgtcttacagcaacaccatccagtccatcaatggccatttgtccacagccactgggcaaccttgcacatcgacttcgcccgacccctccagagcgcacgacgcccaggcagcctatttgcactgtcctgcaccgccgacgcaggcacggcggtgctccacctgcatcgaaccctgttccgcgccgctcaatgccgcacgcgctcctgggccctgacccatggcgtcgtggcacggccctgccatatggccccgctcaagcgcacactacccagcttccacagcacttccagcctgcccctaaggtatccctggaacacgcaagctggcacgccggtactccggcccaacgaaggtgaacctcagcgtccccccagccaccaccccgtccgatgtcgcactaccgttggtaacccccagccgctttgaccagccagccatcgggcgcgcacatccgtctggctgcagacatcaaaaaccattcagcccccttctccacgcgtacaccttagcacaccctatcacacagcaaggcctatcacgaacaccgctaccgagtcttggcgttcacacaccgccgtccgtgtactgtctgcc

SEQ ID NO: 580843 - DNA, 887 bp, Homo sapiens
ctgaaattgagctgcccgtgaagaggcgggcataacacaggcaagacgagaagaccctatggagctttgatatattaatgcaaattcagtacctaatgctaccagatgctgcattaaaaatttcggttggggcgacctcggatgcgagaacccaacctccgagcagtgacatgctagagagttcatcagtcaaagcgaactactatactcaattgatccaataacttgaccagcggaacagagttatcctagggataacagcgcatagtccttattctagagtccgatatcaacaatagggttaacgagctcgatgtttggattcaggacatcccaatgtgtgcacgcgcgctgattaaacggttcgttgtgttcaagcgagttaaagtcctacgtgatctgagttcagaccggagtaatccaggtcggtttctatctacttcaaattcgctccctgtacgaagaggacaagagaagatgaaggcctatcttcagcaaagcgccttcccccgtgaaatgatatcatctcaacttagtattatacccacacccagccaagaacagggttgttaagatggcagagcccggtaatcgcataagaacttgaaagtttaacagatcagaggttcaattcctcttcttaacaacatagaccatgggcaacctctctactcctcattgtagcccattctaatcgcgaagtggacattcctaatggcttaccgaacgagaaattctaggtatataacaagtacggcgaaaggcgcccaacgttgtaggcccctaggggtaatacaaacccttggtgaggcataagaatcttcacaaagaggccctaaaaccgggaatgtagcaataccttaaattacgggcgattaatctacatg

SEQ ID NO: 580844 - DNA, 1064 bp, Homo sapiens
tggaacccggcgctcgttccccacacccggccggccgcccatagccagtcctccgttcacctcttcacacgcaccctcgtgacttgccccaaggacccccgccgacggtccagtcgcctgcgacagaccaccgaccagcacgccgccgcgctactccttagtacgccgcacatgacggacctgcgtccaccttcgcaggctgctgccagaacttaccactcaggacctcagagcgccgcctatcaaccagccacgatcaagcctgcgagctcttacgccctccttacgatttaccgtgtacccatgctcctcaacacagcatctctgaccggccgcactgcactgctgcgcatctcggcaacgcacccatatcgcccaaacaatcacctatctcctatcaacccaactactcaactgacgcgcacgacgcgcgcacaccacatggcactgcacgcacaacgcatcgcactcgacacgccctgccccgccaccccaaaccacgcacgcgctgggccacggaacacctccataaccccatctacaaggcgcagatactccacacgcaccaaccgccccaccgcaccctagccgccacacgcaccactcggcgccaacacccaccgaccggcggaccacccggcacaactgcacacaacctgccgccacacgcccggcctagaccacccacaacacaccttccgctcgccccacaccaccacgagcacactggcccgcacacctacaacgcccaccacccaacaaccacgcgcgaccaacccaacggccacgccaccccaaccccgggccacccccacaccattcggcacaccaacaacaaacgaagtagcgtagcctcaccgcccaacgcttcgagcgaccccggcctcggcaccacttctcccaacatataggaaccgataaactccgaacccaacgtcataacacccccttgggcaaccattgcacaaccccacgccgcatttgcaaacacaccgacccccaaacatccaaaacgcacacccttttgcgcacgtatcgcatccccccagcgggcaaggcaaacc

SEQ ID NO: 580845 - DNA, 366 bp, Homo sapiens
tcggataagccaatagtaattaaaacagcatggtgctgctacaaaaacagacgcatagagtcaatggagcagaattgagaacccagaaagtaaagccacaaatctacagaccaactgtatttttgacaaagttgatagaaataaaaacaacggggaaagaacatcctattctattctataaatggtggtgggaaaatttgctagccaatgcagatgaatgaaactggaacccgtgtatctcaccatatacgaaagttaagccaagatgaattaaagacttaaatgtaagacctaaaactataaaaatactacaagaaaacctaggaaaattgtttctggtttggccttatcgagggggatcctcta

SEQ ID NO: 580846 - DNA, 158 bp, Homo sapiens
atcagaactgaccttccgagttactggtcgggacggaggggggaacccaaaaataccaagtaaaacactacatcatcttcagcttggtcctcttcagcaagcagcacggtaacaacacaatcaccatataagggagcgggcggtggattaagtttgat

SEQ ID NO: 580847 - DNA, 391 bp, Homo sapiens
  misc_feature (108)..(108): n is a, c, g, or t
  misc_feature (117)..(117): n is a, c, g, or t
agtagagatggggtttcaccatgttggccaagctggtctcgaactcctaacctcaggtgatccacctgccttgtcctcccaaagtgttgggattacaggcgtgacacntgcgcccanctagaggaaactttttgagacaagattttgctgtgtcacccaggctggagtgcagtggctcagtctcagctcactgcaacatctgcctcccaggccaagtgattctcgtgcctcagcctcccaagtagctgggacttcagtcacgcaccaccacgcccagctgatttttgtatttttccgtagagacggggtttcaccatgttgcccaggctggtgcctgtaagtcccaactactccgggaagctgaggcaggagaatggcgggaacctgggaa

SEQ ID NO: 580848 - DNA, 989 bp, Homo sapiens
  misc_feature (985)..(985): n is a, c, g, or t
ctttgcaccctggtgagaggattatgggtcaggtcctccacgataggtgattcctgatgtgaggctcaggaaacgccggaatacagctctttgatggcttatcctgtgtggaagtgcaatgagtacgtcttcctgtgctgtcaatgcacctctgtaagccatggtaatcgaatcttgctgggagagaggtcaggaacagtaaagaagaggtctcgataaccagtctgtggtaggatttgcatgaccgtactccattctcccatagtgagtaagcggatgagtcccacagtttgttactggggtataaggaacaagctctgtgatactagtgacatacggtcactgagggtttgactgttcctacgaagcttcatgctcttcttgtcccaagggcacctataagataaggcgtcgacgagattacttgagagagtgctgtagctccggggggtctcatccaccagatcaagtatccatacactctattttatttgactatcctgggaggagtagaacgaccataagttagccgtctatgccattgtattttatcttcagtagagtatagagggaatcctctaggcgaaaatagtcggcttccttttacacagttgtcgtgctttactttcgctcgtaaatagggggaaacgattagtggggtcagttcgcactgtcctatccataaggtgagtctcgcatgtcaccggtgtaccggtgcccgggtctattctaaaagtacttcttatctattattcctttccccctactttcttttttgcacactcgttgttttggccattggtcattcctgtggtaagtccttgaacctgctctgattatttcgtcttcccgggaacgggtgagggtgggtccgaagttttggttcggcgattcgcattctaccccgcggggtggcggacactgtctgtgggccctcaacacttcgttgttcttcaaacctctctcctccttctctcatctccgngggc

SEQ ID NO: 580849 - DNA, 605 bp, Homo sapiens
  misc_feature (3)..(3): n is a, c, g, or t
  misc_feature (5)..(5): n is a, c, g, or t
  misc_feature (559)..(559): n is a, c, g, or t
  misc_feature (577)..(577): n is a, c, g, or t
  misc_feature (602)..(602): n is a, c, g, or t
cgntntcagctgttaataaatatgtgggtaaatatctgtttggggctctcagctctgaagactgtgagacccccaatttcccacttcacacctctatatttctgtgtgtgtgtctttaattcctctagcaccactgggttagagtctctctgactgacctggtcttggcaagtggtgtccatttgtgggggctcatatccaggtcgaagggtcaccagagcaatggttggaatgggaaactagctggaggacacccgagtactcttaaagcaatccctgtcgtgcgtaagaacggggagctcggaagtgtcagggtaacaatgggacaggtatgggggtctggttcatttcaccttggaactttttcacactgggtaattgaggaggaacaagagtatagcgaagtaacagaagaggttacagagcatgtttattttgccagctaaagctaaaagcagcaaaggaaggaagagattcatccctacccttcttgcaccccctcccttattaattttgatgaagatgaccccccaaaatctttcctttcctggaggacacnggggccaaaagtaattgnccccagttgactgtttcgagcaacncct

SEQ ID NO: 580850 - DNA, 215 bp, Homo sapiens
ccccccttttgggggggggcagggtgcccccttcccctttgacacctgctcccgggaatgccaatgagactcctggaaactgggtgggaattggttcaccccacattgagccggggttcggccccgggccccttcccggggcgggaaggggaggggaaaaaaattctccgtctttgggccccggcctcccaaaataaccctttttttggccttta

SEQ ID NO: 580851 - DNA, 1179 bp, Homo sapiens
ctgtgtttgcaatgtgctcgtgtgacgtccttgtctttgtttctgctgtgctgttcgtttgtttcctctcgtgtgtctcttgttttgtcgtctgcagcttgttttggttttgccctttccggtctcttctcttttttcccttgttactccgtcttctcctccagttttcgtttcctggggcgataccttcccgggtcgtgtttcccctaggcctctttgtgacccccttgtacgtgttgtgtcaaatgcggcgtccgtccggatctcggaatcttctaccaagcgtcgattttatttgtagtcttgtatttacttacctctgtcaattgtagaaatttaggctattgcccagatttcagtattgtaaataatgcctgtgatgaccattttgtgaataaatggtttttatgtatttcagattattcccttaggataggtctctcagtgccaagttgtccatacatctctattttgcttatcttcctgctctcttgctgccttagggggtagtaaactgaaacataaagtttacatgcatactaatataaaacatttacctttataagcaacctgatggtaataggtgaaacgtggtaacctgttttaactttgaattcttgccgggcgcggtggctcacgcctgtaatcccagcactttgggaggctgaggcgggtggatcacgaggtcaggagttcaaaaccagcctggccaagatggtgaaatcccgtctctactaaaaatactaaaattagccgggcgtggtggcgggcgcctgtaatcccagctacttgggaggctgaggcagagaattgcttgaacccaggaggccggaggttgcagtgagccaagatcgcgcacatctgcactgccagcctgggtgacagagcgagacctctcgtcgtcacaataataaaaccaacataagatagacaaaataataagcttagacaacttcgtttgctctggattacgtgaccttgatcactggttctctttgtacgagtagcttgggcatctgtatttccactctgtgatgaatttgcctttaaattttggttatgggtttcaccttttaaaataatcaaacatatttatcttttcctgtgtgataggtttttattctgtatcttttcctgttaaacacacagacataccccccaatctgacagtgatatctc

SEQ ID NO: 580852 - DNA, 198 bp, Homo sapiens
attaaaatccccccggtcctttaaaagaattttgaacaatgctgagccggccgctgaaaatttaactcataatttttggtgtagagaaaaagaattccctcttttttttgttttgccccagggaatccttttaataaaattaataactgcccggggtttttgccaggttttaaataaaagtttattttttgcccccca

SEQ ID NO: 580853 - DNA, 869 bp, Homo sapiens
agggcttgggcccacgggcaaaaaagagtgtggcagcagcacgaacacaagcggtagcaagtggacgcagcaagggcccatagacttcccgtgattaaagggccgcaagagacccgcggggatatcctcaagaggactgtgatccatgaacagtcgtgaacaagagttcgtgcgaagagacccccacggggagtccaccccctcaggagtgtcacacgagtcggtcgccccacacggagaatcttggtgaacggacgcccccctgacgaagaactcccgtcgcgcccgcgtaacaacatatgtggatgaccgaggaaagtacccgggtcagaaaaggactcctcggggagctattaccaccacgtggtgtcaaaaaaacagggggaaacaaacacaaagggtgagtaacgaaccctcgcggcgttcttcatagatagaagaaatactgtccacagaaaaagaggcgtggtacaggcagacatatatcccccaccagcgagcgcccccataggggctacatcaggcggcggcaccaccattacagggactaacaccaggagagaaaacaccacaaaagatactggtcccgccgatagcccccctaagttcatcagatttgtggtgcccgggggccccctccgtgcagaccagccccccttgttgtttttcatcctctagaagggcccccaaaaacaggcctcttctttaatacagtagtctattatcttccaccacagtcttaaatacgtcatccaggtagtatcgtgtgccccgcctgcgttgttatcgaataaccacggaaaatctttaaccgcctaggtcagtcaaaacgaagcctttaaaaaaacaggttaaaaaaaacaataaca

SEQ ID NO: 580854 - DNA, 106 bp, Homo sapiens
cagcgaaattgatgcttcttggtattgcgcgtttctcttccttgctgaccctccgaatggccatggtctcgtcgctttaggcccgcctgtttcccggtctcgctat

SEQ ID NO: 580855 - DNA, 648 bp, Homo sapiens
  misc_feature (25)..(25): n is a, c, g, or t
  misc_feature (82)..(82): n is a, c, g, or t
  misc_feature (84)..(84): n is a, c, g, or t
  misc_feature (120)..(120): n is a, c, g, or t
  misc_feature (132)..(132): n is a, c, g, or t
  misc_feature (162)..(162): n is a, c, g, or t
  misc_feature (168)..(168): n is a, c, g, or t
  misc_feature (170)..(170): n is a, c, g, or t
  misc_feature (179)..(179): n is a, c, g, or t
  misc_feature (184)..(184): n is a, c, g, or t
  misc_feature (226)..(226): n is a, c, g, or t
  misc_feature (232)..(232): n is a, c, g, or t
  misc_feature (238)..(238): n is a, c, g, or t
  misc_feature (264)..(264): n is a, c, g, or t
  misc_feature (270)..(270): n is a, c, g, or t
  misc_feature (280)..(280): n is a, c, g, or t
  misc_feature (361)..(361): n is a, c, g, or t
  misc_feature (371)..(372): n is a, c, g, or t
  misc_feature (381)..(381): n is a, c, g, or t
  misc_feature (405)..(405): n is a, c, g, or t
  misc_feature (478)..(478): n is a, c, g, or t
  misc_feature (525)..(525): n is a, c, g, or t
  misc_feature (529)..(529): n is a, c, g, or t
  misc_feature (533)..(533): n is a, c, g, or t
  misc_feature (552)..(552): n is a, c, g, or t
  misc_feature (573)..(573): n is a, c, g, or t
  misc_feature (587)..(587): n is a, c, g, or t
  misc_feature (636)..(636): n is a, c, g, or t
attccccctatatacaggtagtcanctgctggcgtctaaaagtgatgtcggtctgactatagcctatctttattcatctcantntcccagtaacatgtgaagagaaagacttacctgganatctctttaacnagctgatgagagatgatccttcaaccgttnatggtncngaagttttnatgtntgggagaatctgctgactttaccatagaattttgggaatatntttttnggaganaccttttccagttatatcagcgttcntaatgntagcaatcangttgtaaaagcacatattagataaaagctgatcttcagataagttctcagcgtttaaatctttcagcctccaatgctgcantggctgaacnnaaaccggantgttgtattgaagaagtcatacancaagaagtcaaagaaattggaacacacaacatggaaagagctgtgagttatataactcaggctggagaaaaantgtatttcagaaaattcttcaaatttcaggttctcaaaccatttgtntgtntaanccaaattttacaatgcagntactgatgaagtatttctggnagcccagattctgnatattacaacctcacctatgtttattgagaaggtttcactggagccatntattatgtacaa

SEQ ID NO: 580856 - DNA, 232 bp, Homo sapiens
  misc_feature (23)..(23): n is a, c, g, or t
  misc_feature (51)..(51): n is a, c, g, or t
  misc_feature (82)..(82): n is a, c, g, or t
  misc_feature (129)..(129): n is a, c, g, or t
  misc_feature (163)..(163): n is a, c, g, or t
ggaccctgcagaagcagagctcngtatatggcgggaagtccaccatccgcnaccgctcctcgggcacggcctccagcgtggncttcaccccactccagggcctggagattgtgaacccacaggcggcanagaagaaggtggctgaggcaaccagaagtatttntccagcatggctgaattcctcaaggtcaagggcgagaagagtggccttatgtccaccttgaatgactgc

SEQ ID NO: 580857 - DNA, 1222 bp, Homo sapiens
gcgccgtccacgccgctcttgacagtccgaggatcagaaggactgtacatggtgaatggaccaccacattttacagaaagcacagtgtttccaagggaatctgggaagaattgcaaagtctgtatctttagtaaggatgggaccttgtttgcctgggcaatggagaaaagtaaatattatcagtgtcactaacaagggactactgcactccttcgacctcctgaaggcagtttgccttgaattctcaccccagctcctttgtgtggcaccctgatgagtatttaaagcccgtttgaaatgccaaaaaaaaaaaaaaaaaaaaaaaaaaaaaaaaaaaaaaaaaaaaaaaaaaaaaaaaaaaaaaaaaaaaaaaaaaaaaaagaaaaaagaaaagaaaaaaaagagcaagaaatacaagcaagagcgagaagaaatacgagtatcgtcgaagacacaggtaaaaagagaagaaagaagagagagggagagagaacagcaagaaacagaaacgaaaaacgaggaagacaagcaaacagcaaggaaacgagcagcaaaaaggagcggacatcagggagcgacagagagcagaggaggaatgaaacaagaggaaggcagaacaaagaaagagaaaagagaacgaaaggaggagcaacaaaagaaggaggagaaacaagagaaagatggaagagaaggaaaagaacagggaagaaaaagagagaagcgagagagggcgaaaaaaaaaaggaaacaagagcgaaaaagagaagaggcgacgaggcgacgagaagacagagacgaggaagaacgagaacggaaagaaaaaaagagcagaggacaacgagataaaaaagaggagaaaaggaagaaacaaagaaggaagaaagaaggatcagaagagaggaagaagaaacagaaaagcaacgacaacaaagagaaacgaacggagagacaaaagaaagagaaagaagaaaagaaagaacgacagaagacagacaccgagagagagagaagaacgaaagaaaaaagagaacgaacagcacagacagaatagaaaagagaacgcagacaaacaaagcagagacacaaagagaagcataggaaagagagaagagagcagaacagaagcaacagccgaggagcgcataacaagaagaggagagagagataccgaagaatagggcgcgacatccagacgacacgaaggactcacgacagacactgt

SEQ ID NO: 580858 - DNA, 354 bp, Homo sapiens
gcgccgtccacgccgctcttgacagtccgaggatcagaaggactgtacatggtgaatggaccaccacattttacagaaagcacagtgtttccaagggaatctgggaagaattgcaaagtctgtatctttagtaaggatgggaccttgtttgcctgggcaatggagaaaagtaaatattatcagtgtcactaacaagggactactgcactccttcgacctcctgaaggcagtttgccttgaattctcacccaaaaatactgtcctggcaacgtggcagccttacactacttctaaagatggcacacctggtatacccaacctacacctttatgatgtgaaactggggacatgttt

SEQ ID NO: 580859 - DNA, 821 bp, Homo sapiens
  misc_feature (229)..(229): n is a, c, g, or t
  misc_feature (247)..(247): n is a, c, g, or t
  misc_feature (257)..(257): n is a, c, g, or t
  misc_feature (260)..(260): n is a, c, g, or t
  misc_feature (309)..(309): n is a, c, g, or t
  misc_feature (317)..(317): n is a, c, g, or t
  misc_feature (320)..(320): n is a, c, g, or t
  misc_feature (329)..(329): n is a, c, g, or t
aagtaggctagtaggaggccggtgattaatcggccgagggcagctggcggcggcgtgaagtggccggcgagcccggtccccgccggcgaccatgcttcccttgtcactgctgaagacggctcagaatcaccccatgttggtggagctgaaaaatggggagacgtacaatggacacctggtgagctgcgacaactggatgaacattaacctgcgagaagtcatctgcacngtccagggactggggacnaagttctggncgngatgccctgaagtgctacatccagcggcatgcaccatcaagtacctgcncatccccnacnagatcatcnacatggtcaaggaggaggtggtggccaatggtgcctgctggcctgcgtgagtgccattgcatgcatgcatgaatgcatgcatgaaatgtgcctgctgtgcatgtgtgctgtgctgcttggccagatggtgttgttttggttggcctggggccgatggtgggatcccggtgcacaagagcaggatggccaagccatggagaatgaatgcctggtcagacctggcgggctaaacatgtgagctgcctcacctcagacctgggctgctgcgccccctccttgccagggtggcgattcctgctccaccagatctcgggactggatctgctcatgaacaggcaagatggcagtgcgccaggggtggaacccccattcgtgatattgtgacccctcccttttcaggtgaaggccctatacattgcttaaaatctggcactctccggctagaaatgttactggggtttaaggggatgggaaacggctgccaagctggtg

SEQ ID NO: 580860 - DNA, 512 bp, Homo sapiens
gcgccgtccacgccgctcttgacagtccgaggatcagaaggactgtacatggtgaatggaccaccacattttacagaaagcacagtgtttccaagggaatctgggaagaattgcaaagtctgtatctttagtaaggatgggaccttgtttgcctgggcaatggagaaaagtaaatattatcagtgtcactaacaagggactactgcactccttcgacctcctgaaggcagtttgccttgaattctcacccaaaaatactgtcctggcaacgtggcagccttacagtagtaagtattttctcagtgtcagaatactctgacacgatcaattacgtttagtgggggggataagttattaactttataacctcataagaaagtaatttagtctttatgatagtatatagtgtttgtgaatagcttgtgatctacagtgaatcttgtactctccataggatacaatgtattgaacagtacatttgcaaggtatgtgggaagttaatgtaagagcgc

SEQ ID NO: 580861 - DNA, 699 bp, Homo sapiens
  misc_feature (229)..(229): n is a, c, g, or t
  misc_feature (247)..(247): n is a, c, g, or t
  misc_feature (257)..(257): n is a, c, g, or t
  misc_feature (260)..(260): n is a, c, g, or t
  misc_feature (309)..(309): n is a, c, g, or t
  misc_feature (317)..(317): n is a, c, g, or t
  misc_feature (320)..(320): n is a, c, g, or t
  misc_feature (329)..(329): n is a, c, g, or t
  misc_feature (659)..(659): n is a, c, g, or t
aagtaggctagtaggaggccggtgattaatcggccgagggcagctggcggcggcgtgaagtggccggcgagcccggtccccgccggcgaccatgcttcccttgtcactgctgaagacggctcagaatcaccccatgttggtggagctgaaaaatggggagacgtacaatggacacctggtgagctgcgacaactggatgaacattaacctgcgagaagtcatctgcacngtccagggactggggacnaagttctggncgngatgccctgaagtgctacatccagcggcatgcaccatcaagtacctgcncatccccnacnagatcatcnacatggtcaaggaggaggtggtggccaatggccgctgccgcagaggcctgcagcatcataagcatcataaaggccacagcatgggcggcactggccgaggtgtgtttggtggccggtgccaatgtgggatcccagacacatgcatatgccatccatataataatcctggcatacatgctgacaaacagtgagcgcccacccatacccgctgctgcaccccctcctaccaaggtggctaattccactccacaatctcagacagatctactcataaaggaagatgcatgcaccatggggaacccccttcataatttatgacccttcctttangttaaaccctttttcttactaactacccttccatatctgc

SEQ ID NO: 580862 - DNA, 810 bp, Homo sapiens
  misc_feature (741)..(741): n is a, c, g, or t
agcggagggggcatgagtgtatgtttgcattcacatgaaggaattgcttatcacaccagaaattcagacttagtcaatgttggctgaattccttaaagtccaggaagaagcctggacgtagggtccttagcttcgggaatagaaggctacacagataggcacactgtattttgagagcgttgacaacgagctctcgcctttaccctggacttcagcgccaagttccgtctttggtcttggtggataaacagcacagtgtggagatcccgactggtactggcgagtcttacgggatgtttggtagggacgaacgctccctccatgccttcaggagttaggagtgagaatgatcagaaggcaagtatgtcaggtgatggagggcagagtgtcattgctaacccttccaggtctactccagcgctgagatttggtggttctgcatgtgtgatgaatctcgtttcacacgaaatagacgagaggatatttagggctagatgagcccagatttcttcctccctccatctctcaggggagacataagaacctccttcctggaccaaggcaggtgctgccaagttttctagcccgagtgcacatacccagtccttaatgcagacattggtagtgcccatgccctgagtcccactcctgcctcatcccacccttgtccctggccattagctggtggtctagaaacactttagaacttgaagtagtgaacagcctacctacggtcatatngtagagagatgctcaggtgttacaactggaaacactacaaacacatacacagacagcgattttctcttg

SEQ ID NO: 580863 - DNA, 113 bp, Homo sapiens
  misc_feature (71)..(71): n is a, c, g, or t
gacgtagcccactgtacatagtaaagaaatccagtaccccaagagactttacttcagagccccggcttatngttattagatcttttgatgtcaacaaacctggctgtgaaggt

SEQ ID NO: 580864 - DNA, 268 bp, Homo sapiens
ttcttccaacacctcaaacacacttttgcttgagatcatcatggtgctgagaggtacacagcaccgtgtgcacctgtgtctgctctgcaatccaggtcatcagaagcttgtgtgtgtctgataaaggcccttcttgaatttatgttagtctcattgccttcaatgaagcagatgctttaacagcttctgtcactttgttcttgttcttcaagatcatagctatggtaaaatgggacaagcctgactggcaagaaataaccatcacacc

SEQ ID NO: 580865 - DNA, 381 bp, Homo sapiens
cccccgggcccccccggtttgggcccggggtggtggggggccccccctggggggggaatggaggtgtccccccctccccggggggccccgggaaaccccggggccccccccggccccggattgccggcccccggggggggcccccccgggggttcccccccgtttcgggcctttttggttcccgggggccccgggggtcggggggtttttgtcccccggggggggtttttatttttttttttttttttttttttttttttggttttttttttttttcccttttttgttctttttttttttttttttctttttttgtcctttccccgggtttttcagggttggggggggccggggtttggggaagtgttggggagggcccca

SEQ ID NO: 580866 - DNA, 337 bp, Homo sapiens
cagtttgagcaacccaaatctgaaaacttgaaatctgaaatctgaaagagtccaatgagcatttcctttgagtactatgtcagcactcaaaaagttctgaattttggagcaaattgattacagatttctgaattcggaatgttcaactggcaagtgtaagcataatgcaaatattccaaaatcctaaaaaatctggcatccaaaaaacttctgatctcaggcatttttgataagtgatattcaactggtattactatacaaacacaccaaccaaaaaagatagaaaaattctaacagccacatgctattgactgccactcccgtaccaggcctaccg

SEQ ID NO: 580867 - DNA, 648 bp, Homo sapiens
  misc_feature (94)..(94): n is a, c, g, or t
gctaattatcaagcttaaagggtaactttgggaggactcctcccttcactcctagtctcccttggaagagcagtccaggctcagggaagggaanggataggatgacacagtaagtacagaaactgaagctgtcaatagtgaaggaaaaaggggaatcttcgttgctttggcattgacacataagtactttgattaaaaaaaaaaaaaaaattaggggttcaaccatttcaagggattcaattctatagcttttggcagcaagatgatcagttatggcgtgggtaactggcagattctacagaaaagcattttcaaagttctggttggggccatgattgacccctgggaagggaggaaagcaccagtaacaagtggaaactaaagtcctattatcaatggtggactttctggtgcagaatttctggagaactttatagtcagttgggaaaatagccattaaattctttaaagattagactcttcaacagtagctacacattacaaaggcagtatttcaagtgcctgatgctgctgggagtatgcttaatcataatggcttaaagggcatgatcacaaattaaaatggggtaatgagttggccatatgatccatctgaagtccataaacattgagactttaaacggggaa

SEQ ID NO: 580868 - DNA, 114 bp, Homo sapiens
cgcgctgtgttgtaccagtcacctcgactcaggaaacctttcattcctccagtcatgtgcggccgtacaggttggtgaaaatccggtcttcatcctccacgagccccccaagag

SEQ ID NO: 580869 - DNA, 204 bp, Homo sapiens
actatgcacacaaatttcttaaacagtcacctaaagagaaaaatgccagatgtatggtggaaaaaactgtatctaacacctgaaactactacaggactccatcaaatgagtccaccttttagtgataaaaaactactgtactgggcaaacttggcagtcctaaacccacatctactctaacaagtctggaatggtgcataagta

SEQ ID NO: 580870 - DNA, 324 bp, Homo sapiens
gctcgatagacccgagccctaggggcagcattcccctaacagagttaaaaccgacagctctccagtgcctattagatatgggacaaatgtgaagaacggactctgagctgaatgagatcacacttctgagaaccaggctctgcgggctgatcctggcctgccactgaaaccacaccactccccgttctgaaaaatactctgattcccctttctcaactcccttgcttctcagtatacggccgccattgagagagagctacacacccgggcacgtgaccacaccgcctggttgcaacatttctccctatctcagctctgccaagg

SEQ ID NO: 580871 - DNA, 109 bp, Homo sapiens
agttctgggtcccccactcccaactgggctctagactggtactcttaagcttggagaaattttcacatggatgactattttaaaatcaaataaaactattttactgggt

SEQ ID NO: 580872 - DNA, 391 bp, Homo sapiens
aggaccctgtatcgaaacctggtgaaacctgtctctactaaaactacaaaactagccagacatggtggcgggcgctgtaatcccagctactcgggaggctgaggcaggagaatcgcttgaacccgggaggcggaggttgcagtgagctgagatcgcgccattgcattacagcctgggtgataagggtttgatgaccggtcatcgaaaccctctcgctgcgatctattgaaagtcagccctcgacacaagggtttgatgagggtttgatgacagggtttgatgaagtcatcgaaaccctcatcaaaccctgtcatcaaaccctgtcatcgaaaccctaggctaaataccggcacgagaacgatagtcaacaagtaccgtaagggtttgatga

SEQ ID NO: 580873 - DNA, 105 bp, Homo sapiens
agcggagtctgtccttcgggtcctcagcacagccgtgccggcaccggtggccgagctccgtgaccatgaaggtcaaggtcatccccgtgctcgaggacaactaca

SEQ ID NO: 580874 - DNA, 788 bp, Homo sapiens
  misc_feature (495)..(495): n is a, c, g, or t
ggctgatatagtgttcctccactcatctgcgtcccttctccatccgatgaaacccagactgttggtctagacggaaatgaagaccacctgggtgggttagacacggatcacagattcacttctgggcgcagcctagtgcgccctgctgcatctgcgtgctgagcacagagtcctagccatgaagaagtcttgctcgctaacgcgagtagatcgactgaactgctgtgcatattgggaggctgacgcacaagcctaggatgggtgtaccactagtgaccctgcgcaactgcgcttacactacgagtgtgccttgtgtgccatgttgtacgcgtgagtgacggtggatcgccaggatgatgcacaaaatgcatgacacattgcccatgcagttagaaacgcagagacgcaagcggatcacagatgtggatgggcactctgagatagccgctcatacatagagtcttcaaggcgttattgtggcattcaaatcctaanacaacgccttcgcctacgagttgagttgaccgttggatgagaggaaccatgtgtcccacagggtaccagaagacgcgtgtgttgctatgtgcttgaagcaaaatactacaggtcattgatgagggtctggggtcgcctgggaactgaagtttgaccgtggatgtatgtccgaaggcgtgacctttgttcattggtacgtgggatgaggggatggagggaagggcgaggtttgcaggaggtgccgattaagatatgggtgaccttgagaaggatgatgaggaggttggagtgga

SEQ ID NO: 580875 - DNA, 109 bp, Homo sapiens
tttttagttttgtttgggttatttttttttgggcttaactcaggattataaaaactggaacggtaaaggtaacagcagtcggttggagcgagcttcccccaaagtttca

SEQ ID NO: 580876 - DNA, 262 bp, Homo sapiens
gatgttctcctggaccctcagctggtcccaggggttgggccttccgagatgctgtgccaatgctttgaaagaaaattcaaggcatgactcgtgtggacactggcatacaggctgttgccaggccctagaggtcattcctcgtacctgatcagactgtgggcagacatcgtctacttactccttcggcagacaccagagactgtagactgggtgtaatgtagcggtactttgtgcatgaggactggcatatggacattgctgt

SEQ ID NO: 580877 - DNA, 177 bp, Homo sapiens
gatcgccatcatgaacgacaccgtaactatccgcactagaaagttcatgaccaaccgactacttcagaggaaacaaatggtcattgatgtcttcaccccggaaggcgacagtcctaagacagaaattcgggaaaactagccaaatgtcaagacccaaccgatgtcatcttgtattgg

SEQ ID NO: 580878 - DNA, 190 bp, Homo sapiens
tcggtcctccgtacgtggcttcaaattcctggcttcaatgtgaatcctcgcctagcctcccaaagtgctgagactacaggtgtgagccaatgtactgatcttttttttttttttttttttacctttttggactctttggtattaacacttaccttaaaacacatttggtttacagctgtccacaaaatgg

SEQ ID NO: 580879 - DNA, 327 bp, Homo sapiens
  misc_feature (9)..(9): n is a, c, g, or t
cgaggccgntgaagaacatggagaagctgatgttgtagacggttgttgggccgcaccttcccaagccccgccacgaagcccgtttccggccgcgcgatgatgtcaatgaagcccaggatggtgagcaggaaggcggccttggtgtcgggcacgcccaggtccttggcgtagctcaccatgaacacgggcggtacgaagagccccagcaccatgaccgaggcggccacggcgtaaagcacaaagccgcggtcccggaagacgctcaggtctagcaggcgccgggagggtcgcgttggccccgagcccgtgtgagccgtgaccaccagg

SEQ ID NO: 580880 - DNA, 487 bp, Homo sapiens
  misc_feature (2)..(2): n is a, c, g, or t
  misc_feature (4)..(4): n is a, c, g, or t
  misc_feature (7)..(7): n is a, c, g, or t
  misc_feature (11)..(11): n is a, c, g, or t
  misc_feature (13)..(13): n is a, c, g, or t
  misc_feature (15)..(15): n is a, c, g, or t
  misc_feature (239)..(239): n is a, c, g, or t
  misc_feature (243)..(243): n is a, c, g, or t
  misc_feature (260)..(260): n is a, c, g, or t
  misc_feature (416)..(416): n is a, c, g, or t
angnttngcancntngtatccccaaactgccactctaaactcttgaagtaaataaataatctttgccggcaggactatgctgaatctccttaggcactctctaattagatggcctaggtcctcccaattcttagtccttttatacctgtttttcgccttctcatattccatttagtttttcaattcatacaaaaccccaggccatcaccaatcattctatatgacaaatgtttcttctnacanccccacaatatcacccnttaccacaagacctcccttcagcttaatctctcccactctaggttcccacgctgcccctaatcccacttgaagcagccctgagaaacatcgcccattctctctccctaccacccctcaaaaattttcaccaccccaacacttcaacactattttgntttatttttcttattaatataagaaggcaggaatgtcaggcctctgagcccaagccaagccatcgcattcc

SEQ ID NO: 580881 - DNA, 201 bp, Homo sapiens
gtgctcttctatatctacatgagtaagcccagtgctgtgtagaggtagtcgacacgcatgtctgtcaggtggactgattgtatacccaaaatggaaagtggctcgctcgtgtgattgtcagcatgacgtgtaccgcactaagcttcactagcttccttacgctactgtacccaagtggagaggtcattgacgacgctgtag

SEQ ID NO: 580882 - DNA, 1245 bp, Homo sapiens
  misc_feature (1245)..(1245): n is a, c, g, or t
gtcttgtggtgggggagtcgcggtaagtctgtagcccctgctcgcatcgtgtcaacgtcacctacagtgacactgtcatgactccctgaggagaccccgggtcccaccgccggtctccaccctgtgcggtcgccgcctgccagttcctcgccacgtgtctccatcgctctctcatccctgggacccctaaggcggccgatgggcgaagatccctccttcaccgcacgtggtcggccttgtgcgtgtactgtttttcccaccccagagaatcccgtgcgtccccagaccttgtcactcccgtccagcatgctaaagacgcgtatttggcaagctgttgcctaggcttgtctagggacggtggtgtcactccagctagcatccgcgatagatgacgatcggatagcttcttctctatcgctaggttgaaggaattcgatgctgcccatatcgcatatgcgcctactaccttgactatgctcgaacactcacaaaaggctctcgggcggaaaaagcgatagccattgcaatttccagttctgtgtggcggcggggcaagtcactgtgagtaggacgtttgctacccttgtggctgtgcgcatgcgattgagcttgcacagatgacagcccttcacttccccggtttgagcacgctcctctgtttgtgctccccaagaaggtcggggtacggagggactccttagagccagcaattgggagattcggtcccaagtcctcgaaaattcctcctttccctaggtaccgccccattcgtttcccccgctccggcttccgcggcagcggctatatttgcggctcccccatatgttgcggtgctcctatacttgtccggttaggtccggttccacaggacagaacggccaattttggaacacacgccaatgtgagcgcagtatggggtgtgggcgcgctcgcacagaaggcggcattacatatgctatgacgctgttgttcggatgttccggacagattatgccgacagaaccattgctattcgtaggaagatgtggcttcatttactcattgaaagctgcgcttccgaattttccacgcatgcctaagctgttatgacaccttttgccccgttcccagtatgaagctcccccccatatcgtgggggggccccaccccctgcgaacccgagaacacaacacgcggcttcctttccccctttttacgcgaatgtgccggcattgataccaccgattaataggttataaaggaccn

SEQ ID NO: 580883 - DNA, 106 bp, Homo sapiens
ggagctcaaaaagtggggatgagtttgaagatattttagaagagaggaggcatgtcagtaacttgaaatttccaatgaaatgctacacacctataatctataaggg

SEQ ID NO: 580884 - DNA, 975 bp, Homo sapiens
  misc_feature (721)..(721): n is a, c, g, or t
  misc_feature (742)..(742): n is a, c, g, or t
  misc_feature (782)..(782): n is a, c, g, or t
  misc_feature (843)..(843): n is a, c, g, or t
  misc_feature (865)..(865): n is a, c, g, or t
  misc_feature (867)..(868): n is a, c, g, or t
  misc_feature (883)..(886): n is a, c, g, or t
  misc_feature (888)..(890): n is a, c, g, or t
  misc_feature (913)..(913): n is a, c, g, or t
  misc_feature (920)..(920): n is a, c, g, or t
  misc_feature (930)..(930): n is a, c, g, or t
  misc_feature (950)..(950): n is a, c, g, or t
  misc_feature (954)..(954): n is a, c, g, or t
catgtacaccaggacctacggacttatctggacaaggcacccccaccaggcttgccagtcgaaacgatcaaggatctgatgcgccactcttctaacaggcctagatttccttcatgccacattgcctccgtgtcaccgagcatctgcaagccacgaggaacattcctggtgacaagctggtggtaactagtcaacgctggcgtgacgtttggccttggccaggtaagtctacaggcttaccagactggcagcttacagcaccgtgagttagttagcacttgctggatacgcgacgcatccccgaagttcttctgcagtccacatatgcaacacctgtgtgcacatgtggagtgttggctgtatctttgcacagatgtatcgtcgaaagcctctcttctgtggaaactctgaagccgaccagttgggcaaaatctttgacctgattgggctgcctccagaggactgactggcctcgagatgtatccctgtcccgtggagcctttccccccagagggccccgcccagtgcagtcggtggtacctgaccatggtaggagtcgggcagcacagttgctgctggcaaatgctgacttttaacccacacaagcgaatctctgcctttcgagctctgcagcactcttatctacataaggatgaaggtaatcccggagtgagcaatggagtggctgccatggaaggaagaaaagctgccatttcccttntggacactgagagggcaatcnttgcctttatctctgaggctatggagggtcctcctccatntttctacagagattactttgctgccttaatgacattcccctcccacctctccttttgaggnttctccttttccttcccaattntnnacactaaggggtatnnnncnnntgtccctttccccacctttaaanttggggnccttttttanacaggaaaaacaaaacaaanaaanaatgtcttttttttttaaaaa

SEQ ID NO: 580885 - DNA, 318 bp, Homo sapiens
acgtggaagccctgggtgggcgtcccctggctggcctggcttttgggttcaagtctgtatgtatggagtgggttggggcccccaagctttgctgctattgatttgtccccgacagcaggcaaagcctcccattgccctccattttccccccttcatttgaagggcccgtttttcatgggacctgtcttgatctttttcatagggttccaatctgtatttttgtatgtaaagggaaataattttttcccccctaatcgttaataactattgtatttaattgtcctgaaggaacctgtttaataaatggacgggtaagga

SEQ ID NO: 580886 - DNA, 233 bp, Homo sapiens
tgccatcacagtagctcgtacaccgcgttccgtccgtatgccccagtttgctccatatgcctcaattttctccgtacgctccactagtttcctccatatgccccaaagtttcctccatatgcctcaatttcctccgtacgcccgacagtttcctccgtatgccccagtatcctccatacgcccaggtatcctccatacaccccacagtttcctccatacgcccaggtagagca

SEQ ID NO: 580887 - DNA, 942 bp, Homo sapiens
agggccgcctgggggcgtcgatgagtggccggcgggtgcacgcccgctgttgtctcgcagaggggggtcgcgccgggggttgtgtctccgcggggccgcgggtcgcgcagcggtggtctgtgttgccccgagtagttcgtggcgtggttactcatccgaccctggttcgctatgatggccgctggcccctcttcacggcgtatagcgtgctgccccgcgcatactgtggccctttaacatgcgtccgctggggccgcgcctcttcggcgcggattgggggcccggttcacattgcccccgtgcttagcagggcctgaatcatggcgattgtaaggaagcgcgtttgggtgcacgaattgatcctgtgctgaccgccctgtagtgcatatgacccccgggcggtgctacaaagcaggagggcctttccttctgagaggtgcagtttaccaatgggcgggatctccccccaagcgtcagagttataagttgctgggtcctgcccgcgtgctacgccacgggcgattacctcgccttctctgtcctagtgcgtttcgaaaacagagtggaaccttttctcataatggaggcgagttcaccaccggcgaggatccctttctataattgtagccccccactcttcatgagtccattaacaatagaaagcccccccccccactatgtcacccatgtatttatgtcatcctatggacgcagacaatatgggcagtgggatgaatacaccccccaccaaagtcaatttgtaagggattttttttctataagcatattcatgtcatacaattcatatagggaggcacaattgtattgatcacaaaacttatctgatgtatcccccatggctccaaaaaacacaaccaatacttagttgtttttctttgggaaagatccctgaaaccattcattgttactgaaacaaagaaa

SEQ ID NO: 580888 - DNA, 799 bp, Homo sapiens
  misc_feature (378)..(378): n is a, c, g, or t
  misc_feature (414)..(414): n is a, c, g, or t
gcgaattcgataaacgggtataccatgggcggggggttcattaacaagggcatcaacaggtggcacacttcttcccttgtgcaaccccggaagacaagggagcaaggccaacacgatgaatcaaaagagaactttctgaggcctggatagtcacggcataattggcgaatcctgggaatgaagcctctggtatcactctgggtcacgggaaggtacgtgggtatggcaagaaagccccgggagggctaattctaattcacaaggctggtagaagaattgagggaagcacaaaccacaaccggggcttcctaagaaggggactgggaggctgaataggtcacggcacgggttcaatccctggaaaaccacaagaacaantgacgaatcttaaccctgtgtctgggtccgggaacnttccaatcccctgtgagaatgggctgaatgaaagaactcttcggccctttcctgcgttcattcattaaacctgggtcccacatggcgttacagccagggggattccaccatttaaaatctgacccaattatctccaagcgtccctgtgaagatgggcggaatctattccagaacgaaccaacatggcttaaggcccacaattcccatttccagtctaaatttctgaggaaagggtcctttaatgaatctcggtccaattgggaagcgttcttttaaggtgggaatctccttttgaaattcacagggtggggtggtaccagggcgtcctcttttaaagcattacgggggtcccttttaagagcttttcaatctttcaggattcttg

SEQ ID NO: 580889 - DNA, 945 bp, Homo sapiens
  misc_feature (10)..(10): n is a, c, g, or t
  misc_feature (30)..(30): n is a, c, g, or t
  misc_feature (35)..(35): n is a, c, g, or t
  misc_feature (37)..(37): n is a, c, g, or t
  misc_feature (51)..(52): n is a, c, g, or t
  misc_feature (75)..(75): n is a, c, g, or t
  misc_feature (121)..(121): n is a, c, g, or t
  misc_feature (123)..(123): n is a, c, g, or t
  misc_feature (132)..(132): n is a, c, g, or t
  misc_feature (141)..(141): n is a, c, g, or t
  misc_feature (144)..(144): n is a, c, g, or t
  misc_feature (147)..(147): n is a, c, g, or t
  misc_feature (153)..(153): n is a, c, g, or t
  misc_feature (156)..(156): n is a, c, g, or t
  misc_feature (194)..(194): n is a, c, g, or t
  misc_feature (205)..(205): n is a, c, g, or t
  misc_feature (209)..(209): n is a, c, g, or t
  misc_feature (218)..(218): n is a, c, g, or t
  misc_feature (254)..(254): n is a, c, g, or t
  misc_feature (259)..(259): n is a, c, g, or t
  misc_feature (267)..(267): n is a, c, g, or t
  misc_feature (282)..(282): n is a, c, g, or t
  misc_feature (284)..(284): n is a, c, g, or t
  misc_feature (288)..(289): n is a, c, g, or t
  misc_feature (297)..(297): n is a, c, g, or t
  misc_feature (317)..(317): n is a, c, g, or t
  misc_feature (320)..(320): n is a, c, g, or t
  misc_feature (327)..(327): n is a, c, g, or t
  misc_feature (335)..(335): n is a, c, g, or t
  misc_feature (451)..(451): n is a, c, g, or t
ttttttttgncttttcaagagcgatctttnatttncngaaagtcctaaaanngatccatttatcaaaagatgatngatgccccagttcacaaaccatatcttttctctttcagcaaatccngnagccccaanagggctganccngantgaagnggngacatcagaacctgccctccacacccaacagctgggantgcagcctccngcanggcctgggnggatgtgcctggacctctctcggggacagagtccgntccangtgggggnacgtgatgcggtagnangggnngggtctgnggcgtcttgggatgtacaanctngtctatnaggatcancctttcccaccaggtctcctccaatggtccggactaagtcatagaaatcatttcctggggaaattctcagagggcacccagatatggaaatatcattggatcacagccgggatatnggtacaaaggctggaaccttcaccttcctggattaatggttgggatacccagacctggtccaggaaagcgctcgtcctccaccaccagaagagacgggatactcagggaggcgacaaggctcaggggctagctttctaatccaaggcgcaaaaaagcccaaggccggaatacggttgctgggagccaccacgcgtgaatgacacaggctgggtgggtacaatcaaacccgggaagaccaaaaaaagtacaagccagtgtgtccatgaaaagtggcttcccagacgcaacggggagggcgggttaaggggcagagcaggtaacgagtgtaatacacagacctaggggtggaaaaagcgaggccccagggggaaacagtgggtgcggggcgagagacggctgcatccccccctgcacgacttcggtacagccaggggaagacgagagcacaatgagacaacaggaatgaccaccaggaggatagaaaacgaaaaca

SEQ ID NO: 580890 - DNA, 452 bp, Homo sapiens
  misc_feature (272)..(272): n is a, c, g, or t
  misc_feature (419)..(419): n is a, c, g, or t
gactcattacactatgctgtcagacacagtgtgacagctctgagggtagcacctttcacaccttctgtgtcaccagcacactgtggacacttctactgaagccatttcatcttctgaacttttgacagcaccaccatgtctgtgtcaatgcccatggaaataagcacccttgggaccactattcttgtcagtaccacagctgttacgaggtttcctgagagtagcaccccttccatatcatctgtatacaccagcatgtctatgaccactgnctctgaaggcagatcatctcctacaactcttgaaggcaccaccaccatgcctatgtcaactacgagtgaaagaagcacttcattgacaactgtcctcataaggcctatatctgagatgagtccttctgaggccagaacactatcaanacctcctggtgataccagcacacctttgctcac

SEQ ID NO: 580891 - DNA, 991 bp, Homo sapiens
cgtgcgcgtgtcaggcgtgtctctccgcgtgtcacccacaggccgcccgcagaccacccccgccgcgcgcgggacacgacgccccccgcaggaccctggcccatcagcccggaaacccctgagctgcttctcccgtgaggccagatgcccaccctggtgagccccccaaatgactctgctggctccctgtggggtgcaccgtgcatactcaccccgcctggtgcctggtgccccctggtgagcctgaccggcaggggtgtccccaggcctgggcctctagtgcaaaagatttagcccctccagtttgagggactcctggtttccctgacaccccgatttaacgtcacagacacacgattcctgtggcagctgcagggactggcgccccgatggcctcaaaaccacgctgccccgcgcggacctcacgtggccattgcgcctcatgcctgggaccccacgaaggcaagaggaccataggaacgattaggtgctcctgagcggacttgatgtattgcatcattccgcaaagtgctcccttcccttgagggcagccaatagaaagcgcttacattggagagaccgagtccctatacatggggcggcactaaatgccgcgtaaagtggcccccaaaccctatagttgacaccggatcgttatttgacggcttatacgggaggggcaccaaaacgtttggcaagaagaccggggtggatatgtaaggagaaggggggacgcattattgcaatgaagtggaaagaccgcaaagtgggattgaaagtgatctatggatagattacgcgagtcagactgtagtgggcttccttttgtgataagcgtactgtgttgtaagtgaaagctttacatgtatgtgaagtgagatgtggaaggaatgaacgatgtgtgtgacacgcaggatgtatgtcgttttagtatgtatatgtcatatgagttgtatgataatttgtgtgtagcgaaagtagcgtatgtatc

SEQ ID NO: 580892 - DNA, 154 bp, Homo sapiens
tcatgcacagttattgtgaactggcccagcactaaccctgcggagggacttcaatcacatcaatgtagaactcagctttcttggaaagaaaaaaaagaggctccggagttgacaaatggcggggctaacagcaaagcgaactggcctaccgctt

SEQ ID NO: 580893 - DNA, 366 bp, Homo sapiens
  misc_feature (97)..(97): n is a, c, g, or t
tggttgttcaaacccctagtgagcttctagtcctcctgagggggttttgtggtcaggtaggaagcccagggaccttccagctgggcctgcattcccntaatcagtgcccccaagccaccaggggtacccaagccctgaggcttcttggggatcctggcagggctgggttgcttcctgagtgtctcccccgaaagcctgatgtcttgagtggacttcaggcctctccaattcccttacacctctaaggtgatgcctggtagtgggtgtcagcagcctgtcattttatttttatttatttacttttagagacagtatcttgatccattgccccaggctggagtacagtggtaccattacagtcgacgc

SEQ ID NO: 580894 - DNA, 412 bp, Homo sapiens
gtgctgcagccatgcacaggcacgcgccatcatcagtgtggccagtgcacatcatcacctgctcatctcccatctccagcaggtcgtctctcacttttcccgtttggccctttccagtcatcagcatgtgcatttcatgcattctcgttcacagcattgttttgcttgcggcagcatctgcatgttcatgttgccagtctcgttggtccacaatgcatgctcagttggaggtttacattttccatttcaatttttcacaagtctgttctagtgtagcagggcacattcaggcaaagcagcacaacaacatcatgttcagccattttcaatccagggcacattcacagttagcagtccagactcaatggcaaaattccattgtgctcaacagcacacagcaagcacaacattt

SEQ ID NO: 580895 - DNA, 94 bp, Homo sapiens
  misc_feature (11)..(11): n is a, c, g, or t
  misc_feature (91)..(91): n is a, c, g, or t
gctgtgttcancgccttccctcctgcaggcaatcttggacaagttgagcttccctgcggccaggtggctctgcaccgtccgccagcgcctnctc

SEQ ID NO: 580896 - DNA, 541 bp, Homo sapiens
ggcgaggccggcgcggccccgctaattacataagcgggacgtcaataattcgcgggaaaacgcgaaaaagatggcgccccgcgcccggggggccccttcctgagcgccccgggaatggccgacggaatccgcaggagacaccacggcgcgaggacacgaggagacgaagaaaacacgagaagaaagagacaacagcatgaaacgaaagaaacaggagagacgaaacgagaaagaacaagaagagacgcacaagaagcaccgaagagatgaggagaacaacgacgagaagaggagaggaaagaaaggaagaacgcaacgaaaaaaagagaggaaaagaaagaaagaacaaacacaaagaacagagaaagaacaggacaaaagaaacggacgaaagaagagacaacagaaagagagaaaaaaagagaagacgagagcaaacaagaaggaaacaaaagaaacagagcagaaaaaaaacaagacagagagagaaacaaggaggagcgacagcgcaaaaacgagaaaggaaggagacaaagaagag

SEQ ID NO: 580897 - DNA, 175 bp, Homo sapiens
gatatgccaaaagaatatagatgatagtagatatattttattaatagaagggttcatgaatcggagataacaaagtttacatgtgctcagaataataaattatcgtgtctgcattttcttacgataaaggaagacacacgatgctcatccggaaatcagcatacttggcatacat

SEQ ID NO: 580898 - DNA, 606 bp, Homo sapiens
  misc_feature (330)..(330): n is a, c, g, or t
  misc_feature (473)..(473): n is a, c, g, or t
  misc_feature (491)..(491): n is a, c, g, or t
ctatggcttttgaattaattgctgccgaagaaaaagcccaatcaattcgtgcgcatcttgtgcgacttgcagggcagctggcatctcgaggaaaccatgaattgcaccaggatagtttctaattaaaaccgaggcacccgcatcgagcaattcgcaaccatagcgcaatccttcatccctcaacacgtcagctcccgcggtcagtattaaggcaggcaccgatgtccggctttgcacaccaagaataggcgacaggcgaatatcttcgtttaatgctttctcatgcgctagatatgcggcaacgttgcgcattgcctgcaccgtaagagnaggcacttctgcattcgtttttcgtgatgcatatcgctcgtgtgccgattcccggttatcaacgctaggatagattaggacctgagcgcggacgggcaattgttcgtcacgagcagcgagcgcagcatacgcagccaaccctncacctgcactgtcaccgncaacggctagggcgcccgagattcgcaggaaataagctttgtccacaacccaacgcaccgcagcgatcgcatcgtctgcagccgctgcagcggtgctcaggcgcaagccttaccc

SEQ ID NO: 580899 - DNA, 187 bp, Homo sapiens
gtcgaactgaccaaagtcatcatcatcatgaccatggtgttgctcagcaagactgctgactgtttctggcaagaacagcgctcggccacatcctgcagaagccctcaaggaccatagtacgcaccacctgacaccgatgactgcagccgcgagcagagttggcgcccagcctagtcttgctgcgaac

SEQ ID NO: 580900 - DNA, 224 bp, Homo sapiens
gttaggaagagagtagttcagacacgttaggaagagagtagttcagacacttagagaaacatttttgtaaaaaaaaaaaaggagagtgcactcataaaaccatcacatggtcttagcctcataataattctttttggagacccggaattcagtgtgggctctgccaagagctcagagatccagttaaaaggcagactaactgccttttaactggatctctgagc

SEQ ID NO: 580901 - DNA, 87 bp, Homo sapiens
cagagtctctcctcagagggagcactcctcaggagtaattctcctcaggggtaacttctcttaaggggacccttctgtcgtcttctc

SEQ ID NO: 580902 - DNA, 740 bp, Homo sapiens
  misc_feature (670)..(671): n is a, c, g, or t
  misc_feature (724)..(724): n is a, c, g, or t
ccttcggatggcgtttctgagtggacgtcctttttgttgatattgatgctatacctttctgtttgttagttttccttctaacagtcaggtccctctgctgcaggtctgctagagtttgctggaggtccactccagaccctgtttgcctgagtatcaccagcagaggctacagaacagcaaagattgctgcctgttccttcctggaagcattgtccctgaggggcacccgccagatgccagccagagctctcttgtatggggtatcttttggcccctgctggggggtgtctcctggtcaggagacacaggggtcacggacccacttgaggaggcagtctgacccttagcagagctcgagcactgtgctaggagatccactgctctcttcagagctggcaggcagggacctttgagactgctgaagctgcacccacagccagcatttgccccaggtgatctgtcccagggagatggcttcatctataagcccctgactggggctgctgcctttttttcagagatgccctgcccagagaagaggaatctagagaggcagtctagctacagtagctttgctgagctgcggagggctccagccagttgccatttccctgtggctttgtttacactatgaaggggaaaaccacctgctcaagcctcaagtaatggnnggatgcccctccccccggggcaaagctttgagcatcccaaggtcgattttaanactggttgttgctggg

SEQ ID NO: 580903 - DNA, 972 bp, Homo sapiens
  misc_feature (474)..(474): n is a, c, g, or t
ccagggttaaatgatttgaccacgttcatacagctagtaaaatggtagtacctgaattcaaaccaagtgtatatgattctaaagtatattcacttttctccacacaccaacatagtttaaaaaacaaaacaaactcaggaatgagaacactcaagaaggcttagttggtagtaaccctttacttgaagtcaaaacttaagcaataagctgcttccctgatagcttaatgaatatttatgtgtatttgctggcttttatatgcaaattttacatgtttcctttgtaaagattttgggatcctaaagaaccttctcataactgtactttgtgcgttatacagccacttgcatttccttcatggcacaactcactgtgccttgtattttagttgtgtccatatctgtctagcttggaagctctagaaaggtaaggccatgttgtcttcatcattgtggtacttgccatgcctctgtntttttcatgtagcggacattaattgttcagtaaatattttatactcgaggctggaaattaatcatcacaacaccggtaccttgcaaaaacaaggggaagagcagagagaagtcaggaaggatccttagggaaaagctagaggaatgaagcttgaagcagccattttcctcaagattttcacaaccagttgatgcttcttggcccattctcccatttataggccagggagaaagagtcaaaggcatgtgtaaggaaaaataagttcccagttggccccctcctcgtacttgtaggtgaatttgtcattattgtgctgtgtgtggaagcacaagaaggaaggaattaactcgttcttcagaactgctgattgaggagctatttgctggaagtaccacaagtaggcagagccaggttgccttttaagagtaatcattttattagccaaaaatctgggagcactccacatattgaatgccttaatggtcatccactctggaa

SEQ ID NO: 580904 - DNA, 991 bp, Homo sapiens
ggccactcctactcactagctagacaaccttagccaaagcgcatttacccgaataaagtataggcgatagaaattgaaacctggcgcagagtaagatatagtaccgcaagggagggatgaaaaattatagagcaaggcataatatatgcagaggactaacccctataccttctgcagtagctgaagttagactagagagagtaacttctgcaaaggagatgccaaaagctaagaccgcgccgaagaggccagacgatgctacctaagagagcagctaaagagagcatcgacccgtcgtatgtaatggcaataaatagtgggaagatttataaggtcagaagggcgagggaagggtaccgcacgtcgtgggtgaatccgctgggttgtacaaggataccgagtcctagttcaactttggattggccatcgagaacccttctaagaaatctccgcgtggtccagtggtgaactcgtagagcttccaaatgaggaaactagctctccgtgacagggggagggccacttgtagagagagtaggaatctggaatagcccatagttaggcctagtagcaagaccacagaacttgatgaacagcgtacaagtctgcaacactcactaggtagtaacatcccaaacatatacactgatactcctcacaacctagatttgtgacccaaatctttcagccctgactagaagaaactagtgtgaggaataacgtaccgatgaccaacagtctcctcggaataagctgagtcagatcaagacaactgaacatgaaagattaagaagccagtatctacgaatcaaccacacacgtactgagtcacctaatgatcaacacaacagggatgggaacatacagaaggtacaaagtacaggccaaccgacacgtaccgcgtataccacaaacaacctgtagagacaagaaaaaggaacacacacgacaaggacagcacgaccaagagacggcgtcgtttttatttagg

SEQ ID NO: 580905 - DNA, 112 bp, Homo sapiens
ttcttgatctgctgcatatctgggcgtgttcggtgaccatgttgccgcagttcagccatcttctgcagcagtttggggccatgcactggaggggcccacccacatgactttt

SEQ ID NO: 580906 - DNA, 655 bp, Homo sapiens
gaaaagaattttttaaaccatacttcgatttaagagcagcgtaccctaatcgttgtactacttttccgttcaaaatttccatgaaacatatggatttcagttaccaattagtaaaagttgctaaaagtttagataaactaccacatctttctgatggtctgatatttactcctgtgaaggcaccttacactgccggcggaaaagattcattgttattaaaatggaagccagaacaagaaaacaccgtggacttcaaattgattttagatatcccaatggtggaggatccttctttgcctaaagatgatcggaacaggtggtattacaattatgacgttaagccagttttcagcttatatgtctggcaaggcggagctgatgtcaattcacgtttaaaacatttcgaccagcctttcgataggaaggaatttgaaatattagaaagaacatacagaaaatttgcagagttgagcgtttcagatgaggaatggcaaaatttgaagaacctagaacagccattaaatggtagaatagtagagtgcgcaaaaaaccaagagactggggcgtgggaaatgttaagattcagggatgataagttaaatggtaatcatacatcggtggtccagaaagttttggagagtatcaacgattcagt

SEQ ID NO: 580907 - DNA, 872 bp, Homo sapiens
  misc_feature (872)..(872): n is a, c, g, or t
gccccaggcccgttctgctgtggcttgtgtgtcctggggctgcagtcccttacacgagcaagaagatcattgacagggacctgaaggtgggataagccttctggcaggatgacccagggattcctgaaggatcgcacgacttttgagactctagcacaggaagggatcggattcaggggacctggacttagccaccgttctgtggcacgcccggagttcctggctaacctcggaggtggctgaccactaggaggcatacgacacagggactgtggactggtgggcggctggtgtgtgctagctctactggaagatgctggtggggtgagtgcccgtttcccgagggggacacgaggatggaatgaggtgtctggatcgtgcatcgtctaggacaggtgtgactgccgcccttacgcctcggtctttctagttcgtgggctagagggggcttgaggttacattccagagacgcatccgtccgagatagttgccccgagagtaaagccagcctcagggggcctaggtgacgccaggagtgcccgaaggcatgatccgaagtgtccagaccattctttgcagtgaccagccgaaacttggggcaacggccgcttgacttcttggccgcggcagtccattgcccagtgccgcccgctctttccgtttgaccttacgccgtcgtggttgggcccccttggccgggagcccgtcgtcctcgtaactatgcggatccggggcgaacgtttcaaccaaggggacttgaccgggccttgtccgcttgggactccacaaccttggcctttcccctagcaggacctttcactcacataggtcctctgcgcaaatccacggagccggccctattcccggggaan

SEQ ID NO: 580908 - DNA, 317 bp, Homo sapiens
tgaccagaggaccccattggatagcggataagggcgatggagggtgcgaggtcttgcaaaagacgaggtttaaatgcctgtttctattttaccagcagcgaagaaatgagagtcgagttgagaaaatgctcatttaagacagtcagtcacgggacagctgtatactcaggaccagcctgtcatcgataagtccaagccctgggtactgctgctggagaggcaaaggaacaatcttgcctttcagggccgtcggaaagctcgagatattctccaggcattgggttcctcatagcggttgtacaaagggttcaagacgc

SEQ ID NO: 580909 - DNA, 369 bp, Homo sapiens
agtgtcatctttgaagatccttataatattagctcttacatttagttcttaggtcacctttaagttaattttaatatccaatataagtgtagaagtccaatttcattattgcgcatgtgaatatccatgtttccaagcctcatttaatgaaaaagcctattttgcccccattgaattgtcttagcactattttcaaaactcagtttatgataaatgtgatcaatatttgtgaaccctcaattatattggtatttcactctttctaacgctgtcaatttttctcttctcttttgtgttttttgtgagtcaatgtctatctgtgtcatacagtctggactacagctcgtgccatattcctacagcccgggg

SEQ ID NO: 580910 - DNA, 191 bp, Homo sapiens
ttgatctagactccgaccatgagaaagagagagatacaggaagtcaatgtaaatggcagacaggccagctcggtgggttcacattacagctacctaaggtggggcttaatttctttttcttcttcttcttcactatcatcaacctgttggatgaccagatcagcagacccatcttctacgatcaccaccag

SEQ ID NO: 580911 - DNA, 175 bp, Homo sapiens
gggaaaaaataggaaccaacaggaaggcaagggcaaaagggttaagggttaggaggccaatgggaccccccaaagttggggaaaaaaaggaacattgggtggtttggtgggaagtaaggtccttgtttgtttccagcacccagaatttcattaaaggttatttattggacctccc

SEQ ID NO: 580912 - DNA, 1170 bp, Homo sapiens
gcagcggtagcccagtgtctgagtggttgccgggtctccatggaggaattcggctcgccagtgtcccaggctgtctgagctctcgccgccctgagaccccgccggcgcggtcgcagggccatgctagccttgcgcgtggcgctcggtctcgtggtggggccctgcgcggacgctcgttgggctccgggaactgcggacgagtaagcggacgcgaccttgatgggccctgcgtgccgtccgtgcccttgcatgcgttgggctgcactggacgaacgctggaggcttgccgtccggccctctcttgggcttgcgtgattgccccggggtatccgtgctcaagctggagaaacccacgttgtatccggggcctgccgggtggcaaggggctgggtttcccatgtgcccaagtgggcgcgggaagccgggtgctgcacggtttgtccgggaagccgccctcggggcggggccaggttgtgcggccaccggtcgagaaggtcagaccgcccacaaggacctttgttatttgacaaacacgcccagtggggagccaatttcacctggaaagtatttcgttgggtccgaacgttgaccgtagagaaacttttggagctttttgggacgcccaagtattcttggggggcctatttatcgagtatatttgcgggacggaaacgcacttttcgacaataatttggggcagctaaatggacggatatctattggcgctatttacagctttggcgaactttaaaccacagaacttatgaggtaagaggggacgtgggcgcatttggtaatttgaggccttcggagagacacctttggggggcccaatattcgacaacaggatttcaggccttttaggggagacaaggttggcttcttttggatttcgcaactttttggcgttggatttagcacacttacctttagtccagggtaattccttaaataggtggcttaacgccttgtgacacccttaatcgccagcaattctttagattttcccaagttttcgccagcctttgactttgaggtattgcactcgcattatccacacgtgcagagccgtgctcaccgctgcatctgacacctggcctgggccggtatgcccaacagcaactggcttccggcaactatacccgctcacccgttcttctcccccacacc

SEQ ID NO: 580913 - DNA, 356 bp, Homo sapiens
tgacatgataaatcgagctcgtgtacctgttgtgtagcacagtacaggaacgggtcaggcttggggagagccccaagttgagaactagtaagtgaacaattattgtatgaacaacttgttagatgacagctaatcatcaaacaacctgtgtgcaatattatttccataaaacaacgtagcacccttcagcaggaccctataaaactttcctccagcccttgcctctttgcaggtagccccttctctgctgagctgcccactgcaacatattttcacaatttctctaataaatctgcccttctttacctacaactatcttggtaaatggctttaccacctgcaaaactgaccctagg

SEQ ID NO: 580914 - DNA, 931 bp, Homo sapiens
tcaaagcccacagaatcccaaaacgaccaagggtgagccaattccccttcgccgtagctaacctagaagacggttgatcctttttccctcgggaaaacacccttgggaacgaattgggtcccgccaacccctgggcgtcgaacatccggagcagaatctcccgggacaaacggacgttctcccacccggtggcgaacacattggcgtggcttccgcgtttcgtcccgcgaaaaggtgagagcagccgcaaacatcacttttcgatgaaaagaacacccctgtcacttgagttacaagaacccaccacaaccccttcgtaagggtgggacacccccatgggaaccacccctttgagtacactctccagggccgaacgatccccaaagcaccacacgtgtaatggcatccccgcccggcagcccccccgaggcgtgattctttatagctggcgaagacccatctggaaagcataggatcgccccccgtgtcctccactcaccgaacatttcgcgtacagacgtttctccccttcacgctggtcgcttccgttcttcacgaggtgcggatgcacgattcttttgctgaagacccctcgcagctggtaagacccactcacccctcccgaggtggaggcccccgtgacaccccttcgagcaatgtccaggcccaagattcccacgatcaaggaacggcacttccctcccctgatccacgccacgacggttgtatctttgctgggaaacacgctggaagatggagcgccccctcgtctgagacctacccaccatcccgagaagagtccacctctgcaccttggtcctgcgccttgagggggggtgtttaagtttccccctttaaggtttccaccaatttccttgccctttcccttccataaagttgttgcctttcccccaagaaaaaaaaaaataaa

SEQ ID NO: 580915 - DNA, 127 bp, Homo sapiens
ctagtttagaagttcaatagcactaacagaaccacctaaaagacatatataggtaacatttcacccaagagtataacttatattcttctcaaacacacctggtaacattctccatggatacatcact

SEQ ID NO: 580916 - DNA, 138 bp, Homo sapiens
gctctcagcaggcatccccatccaggcgcaagcactgtggcaggtgcatgcatgcacagcccagcaagcccccaaccattttccaccagggccagggcgcagtcgcaggcgcaggggtccacgtttcaacagccccag

SEQ ID NO: 580917 - DNA, 216 bp, Homo sapiens
  misc_feature (152)..(152): n is a, c, g, or t
ggtcatagattacctgtctcacctcccgagtagatgggatactgggcacatgccacacacctggctaatatttgtattttaaggtagagacgagggttcaccaataagttgtcaaggctaggtctcaaaacctgaccctcagggtgatcacnccaccttggcctcaccgaagtgttgggattaatagggtgtgagccaccggagccatggcctggt

SEQ ID NO: 580918 - DNA, 467 bp, Homo sapiens
actagcggaatcggaggaagtacatggaatgtcctcactgtccaccacacctcgaatgaatgcgcagccacttggcaggatgtcgtggccttggcttggatagaggactttgcggctgtacagtgcaacgctggaagccagctcccggctcacatcaaacatggacggttccatgtcgggcacgtagaagatgctgcggatgttgagcggtgcgtccgtcttatagtgcagggtgtagcggggcttgtcgtgaccctgcgcgacgtagcgggtagaactcctcatgttgccactcaccggacatccttggggggtccaatcatccgagatggccttgcaagggtggtacatccgccttccaattcaagtacaaggggaagctgacgaagttgctgtacttcgttaccacatttcggacccggggcctcgttggaaaactcctttgcagccggattccaaggtgggtg

SEQ ID NO: 580919 - DNA, 382 bp, Homo sapiens
ttacaaataataatctaaacttctctggccattcaatttgatacattatcccaaatgtcccatgtgacatggtccacaaggttttcttttgggattctgaagcaatcaatggccatacttgtcattaaaatggcaactgccatctccacttggaccttcaggtgggacccacacacaaaagtctgggccatctgcaggatattgggaagaaagtgttggtggaagctaaaaagaaaagatggatagttttatgcacaagaattaatctccagaaacctgacaactgcataagggattggggtcctattgatagcctccttatgcagaataaactttagggaagaatttgggatccccccaaactaacttacatgattggaaa

SEQ ID NO: 580920 - DNA, 127 bp, Homo sapiens
atccacggccacggagaaggggagcatagacagtgcttcatctatacttgtctgaatagatgaagtagagtggtgcaggtctggatatgcagatcaggaccagctagttcatctattcagcaagtat

SEQ ID NO: 580921 - DNA, 229 bp, Homo sapiens
ttgggccatgtccccattttatctccaaagccagccatggtgtatttctctctgcttttcttccatatttccaacccagaaatgactcctgttcccatatgtgattattatattgcgctaacccaagtgattaaggataatctcactacttaatgacagctgattatttccatctgcaaacttactcaagaatgcaatccagactaacacgacaataggacatcaagct

SEQ ID NO: 580922 - DNA, 817 bp, Homo sapiens
  misc_feature (381)..(381): n is a, c, g, or t
  misc_feature (591)..(591): n is a, c, g, or t
  misc_feature (631)..(631): n is a, c, g, or t
  misc_feature (642)..(642): n is a, c, g, or t
  misc_feature (648)..(648): n is a, c, g, or t
  misc_feature (650)..(650): n is a, c, g, or t
ggaagtagggctggcgtagggccgccatgttgcagcaggatagtaatgatgacactgaagatgtttcactgtttgatgcggaagaggagacgactaatagaccaagaaaagccaaaatcagacatccagtagcatcgtttttccacttattctttcgagtcagtgcaatcatcgtctatcttctctgtgagttgctcagcagcagctttattacctgtatggtgacaattatcttgtcgtcgtcgtgtgactttgggcagtgaagaatgtcaccaggtagactaatggttggcctacgttgggtggaatcacattgactgaagatggaaagagccattgggtgtttgaatctagaaaggagtcctctcaagagaataaaantgtgtcagaggctgaatcaagaatctttcggttgggacttattgcctgtccagtactgtgggtgatatttgcctttagtgcactcttctccttcagagtaaagtggttggcggtggttatcatgggtgtggtgctacaaggtgccaacctgtatggttacatcaggtgtaaggtgcgcagaagaaaaggcatttaaccagcatggtactncatattcgggaagcagttttaaagacaaaacactggagangatcagacttnctggananaagaaaggtaaagtgggtgtgacagtggggaacactggagaagaatttgatcacctttgaggttagtcctgttggacgcggatgtgggttggtttccattaaacctcttttaaaggcacgctcataagttttctcccatggctattgttgccactgttaattcgttc

SEQ ID NO: 580923 - DNA, 528 bp, Homo sapiens
  misc_feature (290)..(291): n is a, c, g, or t
  misc_feature (388)..(388): n is a, c, g, or t
  misc_feature (393)..(393): n is a, c, g, or t
tcccaccacgcgccgctttgttttgggggccccccccccccccccggagagggtggtgtgtgttttttctctttttggggccgccaaaaattttcttaaaagaggggggggtccttttttttccgccctcttgtggggtggggtggtgtggggggtgttcccaccagggggggtgttttttattacccccctctttgtggtgccccccgccggaggggtttttaattttggtgtttttttacccccccgggggggggggcggcccccccgggtggttttttacccggggnnccccggttcttggaggggggtccttttttttgttgtttttttcccccccccccccccctttttttttccgccccggggttcttcccccaatatagtnggggnccccccctcccccaaaaaggggggggggggggtattttttttctttttttttttgggggccgggacccccccccccccccctttttttttttttttttggggggggggtgagggcccccggttccccccccccca

SEQ ID NO: 580924 - DNA, 270 bp, Homo sapiens
gatctgcgcacttcagcctaccaaagtgctgggattacaggtgtgagccactgcgcctggcccacaaataccatttcaagagccaggatacgtaaaactttctgatatggtttgtgtatttgtcccttccgaatctcatttggaaatgtaatcccagtgttggaggtggggcctggtgggaggtgtctgaatcacaggggcagatccctcatgaatggcttggtgttctgcttacagtaatgagatcttgctctgagttcacgggagatc

SEQ ID NO: 580925 - DNA, 680 bp, Homo sapiens
tagtatgtatcaaaatttccttccttttttaaggccaaataatattcagttgtatgtatatagcacattttgtttacctatctgtcagtggacacttgggttgcttgtgcctttgggtaactgtgaataatgctgctgtgaatatgggtatacagatacctctgtgaccctgctttcagttcttgtgggtatatacccataagtggaattgctggagcacacagttattctaattttttcaggatcagccgtactgttttccacagcagccatactagtctacagtaacagcacacaaggatttcaacttttccacattcttgcctatacttgttattttttatttttttttaaatagtggccatcctaataggtgtgaagtatctcagtgtggttttaatttgcatcttcctaatgattagtggtgaacataatttcatgtacttgttggccatttgtatatctctttggagagatgtctcaagtcatttcgaatgagttaaatcattcaaatgggttaaactcccttaaaatggttaagggggtagatggcgtattaaaaaaatagcgtgtagtctttcatgttgaagtccattgtatatcctggatgttaacctcttatcagatgcatgatttgcaatatttctcccatctgtaagctgccttttttttcttaaatg

SEQ ID NO: 580926 - DNA, 825 bp, Homo sapiens
ccaaggcccctctatccagagggtcgaatctttgttctcaggcgggtttgcccgttgttccgaaagtactcttgttggttgaccgaatggccagtttgtcgcaatgggcagacattaattctccgtgcttctgaagggcttatcccctcctggcgtctacaccaagatccccctggtagacaccccaggaggttgtcggcacaggacagatcagccgtccgtttatgagaaactgccccacaattagtttgtttagtggcgccccttttccccctttctctccaacgcatttactaccctttctgaaacgggtattaattatatgggaccacactctgatggatgtttgtttacaccttccacgcaaaaatacccgcaccccgcataaataatgtggacacccacacatttgcgcgccccttgttttatttcaacccgcgtgaagtatataataacaaggctccgattctccctccaaccaacaattatatcatcttcccgtcgtgattcactatcttggctcaaaacactagccttgaaaatggacggaagtgtttatttccacccaaatagttctcttgacgcgccacgatcttgtcataattaccctccctttctctcctaaactctctcgttttaataactcttatccccggcgcctcaggaaccatcttatcattcctttctcccccgaacttcgtctataaccacgatgtgtccacaaaatacacatgtactctccaccccacgatggtgaaacaccatggaccgcttttgtcttatcgttcttcaccgagaatgaagctttccccccccccgcctcat

SEQ ID NO: 580927 - DNA, 595 bp, Homo sapiens
cttttattattatttttaattgacacaataattgtacatattttctgggtgtacagtgtactattttgatacatgtatgcaatgtgtcttggtcaagtcttggtaattagcatatccatcacctcaaacatttatcatttctttgtgttgggaacatttaaatcctgcttttatagttatttgaaaatatacaacaagttgctgttaattatagttaccctatagtgctatagaacactggaacttactcctcctctctagttgtacttatatatccattaaccaacctttggctactctcccttctccgcttcccttccttggctccccttcttctcctctagtagccactattcttctctatacttctatgagatctacttttttagcttccacatgtaagtgagaacctacagtgtttatctttctctgcctggcttatttcatttaacataatgtcctccaacttcatttgtgttgccacaaatgatagaatttcatgttatttttatggctaaaaagtattatttggttatgtgtctatgtatgtgtgtgtgtataaatatccgcacacagcacattttcttgctttatt

SEQ ID NO: 580928 - DNA, 355 bp, Homo sapiens
  misc_feature (336)..(336): n is a, c, g, or t
tcttccgtcctcttccttctttttctgggcttttttcagcctggacaactccctttttggctggatcaggctttccttaagctcggatatggcagcaatatccttttcggaatttttccttcagcttcggcagccttcttttcataaggggtggtggtcatctggcagcagggttattccacatctctcccagtttcttcgcaacatcaccaagggacaggccaggaggttctccttggatttgggggcgatactaagagcagaagaggaagaagaggaggaagtataaagctcaacgctttatacttctttaagtgcagaaggtggttcaggttntggctttttaattaaataa

SEQ ID NO: 580929 - DNA, 642 bp, Homo sapiens
  misc_feature (278)..(278): n is a, c, g, or t
  misc_feature (294)..(294): n is a, c, g, or t
  misc_feature (380)..(380): n is a, c, g, or t
gaacggctcaaggaaatatgaaaccggtcttggaactaatcctggcccggccatcaatccaagtccttcatcggccctcccatccctacgcatccttaacataacagacgaggtcaaggatccctccctttaccaatcaaaatcaatgggccaccaagggtcatggaacctacgagtacaccggataaggggggactaatcttcaattcctacatacttcccccaataatccctaaaaaccaggcgacctggcgattcctggaaggtggacaatcgangtagtactcccggatntgaaggcccccattccggtattaattaattaacattcacaagagacggctctggcacttcattgacgctggtcccccacattaagnggctttaaaaaccagagatggcaattctcccgggaccggtcataaacacaaacacacttttacaccggcttacacgagaccgggggggtttactatacgggtcaattggttctggaaaattctgggggacgcaaaacacacaggttccattggcccattcggtccaaggaatttaatttccccttaaaaaatctttgggaattcagggcccggttatttcacccttaataagaaccccctttttaaccccctcttagaagcc

SEQ ID NO: 580930 - DNA, 275 bp, Homo sapiens
ggcgtctggaattagctttatgtcccggctcccagtagctaaaaaggggtcattcatttcagtgcaattggtgtgacagcacacagagtcagatataaaaatcaagattgctacgtagaatagttaatgtgagatgcccatcaaacatccaggtggataactgcggggcagtggcatgtgagtctcttggagctcagtggtcagggtagaactggagcataccacttttggagtcactagtctcaccccagtatgagatccacgagggcaaagaa

SEQ ID NO: 580931 - DNA, 126 bp, Homo sapiens
tcgctgactcagctatcaccttgcattcattctaaaaaataactattttatatctactagcaccttgttagctccttactagctcctggcacaccccgtgggcagtttactcagagtagtctaaat

SEQ ID NO: 580932 - DNA, 167 bp, Homo sapiens
tgtgatgttagtcaggaactaccaaagtcagccgtgatccacagccatgaatttcacagccatgaagatatgctggttgtagaccccaaaagtaaggaagaagataaacacctgaaatattggtatttctcatgaacttagatatgtgcatctatcagagtgtcaat

SEQ ID NO: 580933 - DNA, 1138 bp, Homo sapiens
tacctatcttctgctgcccctgagcacatcaagcagacagggaaagaggagtcagacatggcccagtcacatcctgagctgctcctggctgataaccacgatggagcccgtgttagtcctgccatctggcactgcactgagtgtggcacaggcaccgtcctgttgatctcacaacacagttctcaagttaggcacgttcttggctccgttagaccaggtgaggcaaactggcggccacagcagcaggtagatgtccatctgccctggtgtcaaatccagctcagcaagtgcatggacgcccagtctttcaaacccaaagggggttacgtccaggtggctgagttcccactacacctggtgctagagtgccatctgggcaccattgctccagacgtgttccgaaccgcttacccagccccacaggcgctcgcaagtggaaggaacagcaggccacgggaggctgggccaaagccccaagggcccagggataccacttgcgcagcaagccgtgcccagcggggctcagcctgccttcagcgcgaactggtgtcccatcccaaccactggaccccgaaccttcacgcccctctctcaacgctcagcgtcgacgaccaaaggcgagagccaaaaaaacgcaacggccgctagagccatacaccccgaagataccagcggcacccgcaaggcggaccgccacacacgcctgcccccgccccaacacctacgcaacggagccaaagccccagacaacgagatagcaatccacaacacggcacccagccacacaccagacccgaataagcacgaccatgactgcatgccacacaacacaacaaacccaacgccgaccacatacacactagcccaccacacctaggccaaacacccgggggcacaccagaaatgggacaggaacaggccaccgcgacgcccacagggcccacaaggacacacgacgacaaccgcacggaacgccaagcgcgcacacccaggacagagaccacgcccccaaaggacccccaaccagcacgcacgcatatacgccacgagcaagcaacaagcaacagcccacacatgaaacagaaccacaaccacccgaaaaggtgcacagcacgagagaccagacgcacgaacgaaa

SEQ ID NO: 580934 - DNA, 373 bp, Homo sapiens
  misc_feature (138)..(138): n is a, c, g, or t
  misc_feature (170)..(170): n is a, c, g, or t
  misc_feature (185)..(185): n is a, c, g, or t
  misc_feature (249)..(249): n is a, c, g, or t
  misc_feature (253)..(253): n is a, c, g, or t
  misc_feature (255)..(255): n is a, c, g, or t
  misc_feature (261)..(261): n is a, c, g, or t
  misc_feature (273)..(273): n is a, c, g, or t
tgttagcttataactatgcttattggtaagataatgtgaagtgatatcgttctaatttgactattaatatgtatgttgtgacgaaatatgcgaggcaggatagttattattagattaaaaaggctgctgttgctgatnaggcttcatagaatgctgatgcaaattcgaantggcagaatgtggantggtattattgttattatgaatggaagaggaaggctcggaaccggtgaatctgatgagtatgcntacnantgatantatgtttgttanacgtggtatcgggattctgaagaatgctgtttggaatatggtcttagaccttgagtaatttgccttaactattatcatgccctggagacgcctacgctgc

SEQ ID NO: 580935 - DNA, 778 bp, Homo sapiens
atcacctgaggtggagagttccagaccagcctgaccaatgtgaagaaaccccatctctactaaaaatacaaaattagccaggtgtggtggcacatgcctgtaatcccagctactcgggagactgaggcaggagaattgcttaaacctgggaggcagaggttgcggtgagctgagatcgcaccattgcactccagcctgggcaacaagagcaaaactccgtctcaaagagagagacagagagagagagagagaaggtccaggtgtggtggctcacacctgtaatcccagcacattgggaggccgaggcagatgaatcacctgaggtcaggagctcgagaccagcctggccaacatgttgaaaccctgtctctactaaaaatacaaaaattagctgtgtgtggtggcgcacacctgtattctcagctattcaggagaatgaagcagaattgctttaatccgggagacggaggttgcagtaagccaagatcatgccactgcactccagcctgggtgacagagagagactccatctaaaaaaaaaagagagagagagagagagagaaaagagaaggaaggagaaggacagatgacgcagaaaaaaaaaaacacaacacaaaaaaaaagaaattgtgtggggcccccgggcccccgagagaacgttcctcaaaacccattgttgtgggccggggggccccaagggttagcggaacggcggcaaaggtggttcccaagagacacccggggccacacaactggcgctgggtccccccccaagtaa

SEQ ID NO: 580936 - DNA, 289 bp, Homo sapiens
gtcattcatgccttgacatccgtcgcatttcatcggatctcttatcgagatcaacatttggctaaccacggataggcttagcaccatttcttcggcattcattacatttcattgtcgtctaaggagattttccccacagagttgctcaacgtctatgatcggaacatatccctaagcagataccgcgttgctacgcatcagacacttcgtcgctctgattctcactcgagtcatcgctatctccagtagtcgaattcttcgtcgaatgctcatcgatttcaatctccag

SEQ ID NO: 580937 - DNA, 503 bp, Homo sapiens
tactttcacagggcctatggcaaaatggagttggtgacttaattattaaataaattgtgccagtgacagtaaagattagagacagaacacctagtgacattgatagcacagtgctacaacatgtgaaatgattaaggaatacacaaatactataatacatatggctccgttaccttgaagaatactcaatgtttgctcttgagcctgttggccccactgtcccactggtcagccctgtctatcgaccatggccggtagcctttctgctcaaggaaaagaacaaaagacagatagaaaaagagtgagagaataaatagagaaaaatgacagagacctgagaggaaagtagagaacaattaaagaaagggaaggtaggaagctgcttagccaagttgcaactggcgagttactgtgagatggtagcaggtgggctatctagccaaaagttgagacaccaaatgtggcattagctacattgtgtggctcaatgaccctgtgaactg

SEQ ID NO: 580938 - DNA, 301 bp, Homo sapiens
catagtccacgtaaaagaactaggaataccaggactgatgcaattctactgggtacactatcgcttgtcacaagacacagacaatcagaccaaagtatatgctgtaataactcacgaaccaagaagaaaaaccacttgactatcaatacagatattttcgtcgtgtccctgtacaagaagcagatcagagctttcatgtggggctacagctatgttccagtggtcaccagcaggtcaccaaactcatctggatacatcattcttgtcacatggccactcaataccgggaaccgagctcgaa

SEQ ID NO: 580939 - DNA, 742 bp, Homo sapiens
gcactgtttgccttaataccctgacagattcatcttcctttcttcctgctaaccttctgctctggactggactcacttttctgctccagggactccttttctgggtttgggtcttgcccttcccaagggactgttcttgtggcccttaactgggaagggggcacggggtgaggagctgacgcctgctcaaggagtgggaagtggggctataggcacgctctctgatgccactctcttccatctctttcccccaaggctccgctgactgtcaaactgggccgtacgagaggcggcaccactttaccgactgcgctagattcttcagaaccaacatcctacaatatcctatttataaatcttcctctgcaccaaagcgacgtcggtctcctcgccctgaactactatcttaccgctcacaggagaaacaacatccccattccccttccaggcagcctgtctcctcacagacactccgacctactgggccacgcctgtcctgtccctcccccacgcattcaccctcctggcccgtctgtgccctcctcgccctccctgcgcggtcacttactcctgccctctctacccaccggcccggcccgggtctcggcgctccgcccctgcctccgccgcccttgtactccctctactcgtctgcccggagctgctcccccctaccctttgccttcccccctatcacctcgcctcttggcatctctttctccaccgccgcggccgctccccc

SEQ ID NO: 580940 - DNA, 114 bp, Homo sapiens
aagagggccagctgagccagatggccaggccgctgtccacccccagctcttcgcagatgcaagccaggaagaaacgcagagggatcatagagaaacggcgtcgagaccgcatca

SEQ ID NO: 580941 - DNA, 93 bp, Homo sapiens
taaatatcatgatgataagccctttcaggctgcagcgggctacgatcatgcccctgtactccagcctgagtgatggagtgagacttcataata

SEQ ID NO: 580942 - DNA, 472 bp, Homo sapiens
ctgggtttgatatattttccttttatatttatacctttgactcttgaacaacacaggtttgaactgcacaagtccacacatacagtggatttttttgtcaaccaaatctacatagaaaatatagtattcataagatatgaaaccagcctataaggaggggcaactttttgtatatgtgggttccgtgaggtggattgtgggacttgagtatgcacagattttggtatggagagaagggggttcctggaaccagtcccccatttataccaagagataactgtagttcattaaaatgttgcctgataagccacttttttaattttaagagatggggtcttgcttcgtttgcccaggctggactgcagtggtgcaatcatagctcactgctgccttgaactcctgggcttaagcaatcctcccagctcagcctcctaagtagctgggactacagccaccatgcgtacctttaaaa

SEQ ID NO: 580943 - DNA, 517 bp, Homo sapiens
tgggaggctgcagtgcatcagctgggcaacagagagtgaaacttcatctcaaaaaaaaaaaaaaaaaattatgtgggtggggcgtagggctcatgcttgtaatcccaacattttgagaaggctagggcaggaggattgcttgaaggcaggaggatggtttgagggcgggatttgaaaacaagcctcggaaacacagtgacaacttatctctacaaaaagataaaaatatccgccggagggtggggggcgcttgcctctagtcccagctactcaggaggctgaggcaagaggatcatttcagcccaggatttggaggctccagtgagctaggaccgcaccattgcactcaagcctgcgcaagtgagggaacctccatctcaaaaacaaaaacaaaccagaaaacccccattgtcttccagaatcttcctcacagcatcccagttcctttcccagtcccttcccatcagacatgggtggctcacttgtatcaccaaaacacaccaggcgcggtcgcgct

SEQ ID NO: 580944 - DNA, 430 bp, Homo sapiens
  misc_feature (31)..(31): n is a, c, g, or t
tttcttagggaacacaaggggcagggatcanggaagcaaggcaagttttgaggacatcccatttgtgatgtgtccactgagttgaacttactaatcctttaaccctggggcagcggagtggtttctaaatgtggtttcccatcagaatcatctaggatgttcgttaaaaacacaaatacctgactgaggctgttgctcactcactggtagagttcctgcttggcatgctccaagccctggggtttgatctctaacatggaaacaaaaaacaagtgcattcatttccaacatacattgtcagatgggatggggtggggggagctgaaaaaactgtattagaaccaactgggtgaaacactccgatgatcctagtactaaggaggctgaggcaagagggctgtgggttcaagaccaacaagctgggctacac

SEQ ID NO: 580945 - DNA, 1270 bp, Homo sapiens
  misc_feature (370)..(370): n is a, c, g, or t
  misc_feature (386)..(386): n is a, c, g, or t
cacctgttccccaaacacctagtaggtgtgctacacctccctttgccagtcatcccgccatggatggggagtctacttggtgccctggcaaacctgtttacactaaggagatgcccacagggagcgggaagctcccaaaccctcagtcattctccagcagagacctttgctcttggccaggtttgaaacgatgttcaacctcgccacgtcaatgtctcagtaaaagacactatagatagttatggacaatacactccaagaatactgggcttatgggtgggttggttttttgttttgttttgttttgttttcaagtcatgtctttatccccatataatggagaatgtgccacttggctaataatgtgttntcaaaactacaagttnagtgatgacaggaaagagggctaaagtagtcccacagaggctggtagaaaaggcgaatcacacttaagcaccagcaggttaaaaacctgaaagggtggccctgacaattcagactataggttttacagcatgccacttgtgcaataggaggtctagggttgaaactttcaagaacgagaggaggtgaaggaaggagacgtttactgctcaaatgccatgcatttcactgcttgccactgaacttgtatttgaatgacttagtaatgcttaatataattgggcaacttttttagcactttggaaagagtcatcaatctttctggtaaattataaaagttttctgagtgagaaaaggtgtgtttggagtttgtttgactttttatattattattgttattaataaagaaaaaaatctacagcatttttcagactccaccctagaaaatatgtacccctgaatttggtttgcagtttgatactcagggaaggatgtattccatagatatcctttccgtataaaacactaacatctttgagaaattcacctaccaactaacttcaattgttgtcactatgcattcttcaatgaaaactagcttatttttccatatagtaatgcagttagggttctcagcactttctttcttctatcctttttttaactcttcatattatgttcagatgatcatactgtcaaggtttgtgtacattactgaaaatttgtattgtataaagctttttgcattacgaggctgtacagggtcattttgacagtaactggtatattcctttgcatcttatgttgcattgccaatttctagtgtatccagtttgaaagtataatatactctaattaaaaaaaaaaaaggttggctataaaaaaa

SEQ ID NO: 580946 - DNA, 208 bp, Homo sapiens
ccctactttcagacactgccctagcaccttcaggcgtcggtgggagagcagggaggagtggagcacctatcttgctagacatcaggacccttaagagcatatatcagagggagcccctgaagctgggtgggcactttcagactaatacttcaaggagagaaaaaagctgttatggcacagttccgccacttgctaattcctggtatcg

SEQ ID NO: 580947 - DNA, 336 bp, Homo sapiens
taaatgaacctatctggactgtctgtctgtcgatgggaaagctggcctcagtttcatgctaagcatcgcgcaagcacttactactccctcaacggtccgtgctgcattttgttaccggtattcacacatttcgtcagttgtcgtcagtataattctcgattatcagaaggtataacggtaattgttttaggaaagctgcaaaaaagtgtctacttttcatggtctgataaacatttcgaagtgacaattcatgtagcagataaaaataggtttttaaaaacagaaaagattaggtctcgatgttttgccaaggctgcactgcagcatcgtcgacgc

SEQ ID NO: 580948 - DNA, 157 bp, Homo sapiens
ttcttgtcccctggaggaggtggaattgggacgatagatcgagtcaatgatggtgtgacattatgctgacaagttatagcttataatcccattattagtgtggaacacacgatgggagggcagaaagcagttttctgtcatctgcaaggaacccacg

SEQ ID NO: 580949 - DNA, 1448 bp, Homo sapiens
tacattggggtagctcaaaaggggaaagaggcattaatagagaaccattcccgaggcacggggcacccgaggggcgaggggcggggtccgaggtgtcctcacgcctcagaccaggaaagcaaagaggcagggggtgaaaccacccgcctggacatggcctaacccgggactctaaagcgaacaccagtgctctcctcccgccagaggaagagaacaagagcccccggggagtggtgaacctataaggagaggggggagaaaagtggctatagtgtgtccagcgcgcggcgctttggagcgcgcagaaagcttgagggccgaggggatggcgagggggccatcccacgcccaactcggggcgccctcaaggggaaggacaacaaacttgggggcgcggtaaaaaaggagaacacggggcagagaggggggcataaagccgagcgtactgagcgctggagagagcgtctgagagtggagaccctggagcacgagcaacgcgggggggactatacccccccgagaaaaaccccgcggcgcacacaacctccggttgtagacacacctctccccagggaggagaatataaaaaatcctatatgatacataaccatctaaagagaagagaaacaaatcttccacaaacgggcacgccaactaataaaatatacaaggggggaggacaccaaaacccagcggggtgaacaacacaaacaggggggcggcggggacgagaccaaaaacacagggacgactgtggcaataaccgacacacccgaaagcaaaaacacacacagggaacccactagaaagcaacgatctaacaagggacaccaaatagatggtgtgccaccccgagcacactcgtggacaaagagccacacaaggagcataaaaaaagagccccacacccacaacgacaccacgcagctacaccaaagggcacaaaaaacagccaacagagaaaaacaacagtgaccaccgtcacgggacaacacaaaccaccaggacacgcccacacacagcgaaagtagcaaaaccaggaggaacaaagaccccgcaaataacgcgaccaaacaacacacaccgccccaccataagacagtggaccaaaagagaaacaaaaacaacacaccacagacaacacaatcaccggaaaccactaccaaacacgaagccaacaaaacccacggcagcacaagcgagacgacaaccacagaccgagccaagagagcaaccacgcaccaaacactcccccagggaaagcacagacaccacacacccagaaccgatcacaaacaacctaacaccaacccgcaggccgcagcacccccacagaaagagccacacacagcatcaagcagaaacagacaccaccacgcaccaacgacgagcaacaaacgcatcacaccagcgaggtcggcgaccccctaccaccccggcgccaacca

SEQ ID NO: 580950 - DNA, 175 bp, Homo sapiens
ctctagaggattccctgtatcccggggagctggaattatagttgcgcatcaccatcaccaccatgcccagctaatttttgtatctttagtagaggcaggtttcgccatgttggctaggctggtctcgaactcctgacctcgtgatccaccctccttggcctccccgggatacagt

SEQ ID NO: 580951 - DNA, 282 bp, Homo sapiens
tcacatgtgatacccacgtttgtggtgggaggctgtgtaggacacaagaaggcaatagacactcagtaaaacgacaacctcgaccagctgcgcaacaaataacagcacaactccgactcccagctagacagttgacctatgagactgtaatactcgattcttcagctagtattgagatgtgaccaatatgcaaacaactcactgcgatacctgaacagcttaagctactacttttgcagcaaaagccttccagctggctcggactggggttaattgttaaac

SEQ ID NO: 580952 - DNA, 131 bp, Homo sapiens
gttataaaggctcagaaaaatctgcgaaaaataacttctgaggtaataaataggattatcccgtatcgaagggcctttttggacaggtggtgtgtggtggccttggtatgtgctttctcgtcgcaatgaga

SEQ ID NO: 580953 - DNA, 394 bp, Homo sapiens
ggtggccgacggtggcttcagcagccacacacctcccctggtcgcgatgcgcgcgttgttcgcacagatgggtcgcaccggcatgtaacgtctggcgcaccgttcgcgctgcgccgctgattttcgccaccacagccgccgcttgtcgccgtggttgaacttcgacttggaagcatttcatgaacccgaaccagaattcgagtaggaccgctttcgacgtgatcattgtcggcggtggcaccaacggcctgtcggccggctgttacctgggcctggaaggcaagaaagtgctggtgctggaagcgctggacaaggtcggcggcatggcctcgtcgggctatctgattcccgaggcgccggagcacctggtccacccttgtgccctggacatgat

SEQ ID NO: 580954 - DNA, 311 bp, Homo sapiens
  misc_feature (148)..(148): n is a, c, g, or t
  misc_feature (161)..(161): n is a, c, g, or t
  misc_feature (222)..(223): n is a, c, g, or t
  misc_feature (248)..(249): n is a, c, g, or t
ctctagaggatcctccggaggccttaaccctggaaaacaaaaagttatccagaaaagtgaaaacaatcctattataccacttcgtccagctgtaaatggcaatatgtagtcataatataaacaatcaatactgaactaaccaaattanaggatatatcacntttgggcagccatggatccggtttgcacttgagaacggcagacgggtgacaagaaacgctnnaggaacttccctacccctattctcnnagtgtcaagccgaagagacattcaccattgaaacaggggttaacgggctcccgggggggtac

SEQ ID NO: 580955 - DNA, 320 bp, Homo sapiens
cacagcacctgagttcaaagggtgaagaactggcctgtgtagttataaaacaaagcagcagttttcttcatttgtagatattatatttaatttaccttgcatttccaatagcattaaatattagaagcgtataagctttttctttttatgcctaggggatatggcttaacactgagaaacacttgagaaacactgccacattctaaggaacaaccaataataagaaaaattatttcatataaaaggatgcagcttgcatataaaatgctgaattcaactgaagttcattatgctgcctttatgtggactcaggtggtgtg

SEQ ID NO: 580956 - DNA, 223 bp, Homo sapiens
  misc_feature (223)..(223): n is a, c, g, or t
ctcagctaattttttgtatttttggtagagattgggtttcactgtgttagccaggatggtctcaatctcctgacctctgtgactacctgtctcgggctctcaaagtgcttgggattacaaggcgtgagcaccttcgccccggccagataatttttaatattttttcagagacgagggctctctatgtttccagactggctcgatcattcatgagaaaaacacn

SEQ ID NO: 580957 - DNA, 214 bp, Homo sapiens
agataagcatttccctgcaggagctgagatggaaggatgatatgcccaacaactacataaaggcagacacactgctgatgatgactagaaggatccttaagtgtgacttttgttttttcatctgttgaggctgtattatctttatccctccaggagcacacatctctgaaataattttagaaacaaaagggggaaatggcttgatggcaaattc

SEQ ID NO: 580958 - DNA, 1102 bp, Homo sapiens
caggtgggggacccgccgacggtctgctgccaccgccgccaccaccgcctctgctcgatggcgtgggaaaggaggtgtgagtcccgggcagcgagccggaggacggcgccgctgccgggagggtcggcaggtgggcaaggcgcatggcaggcatttcagcatcaacactcaaccatcgcaccagctttttatcccaacggactgctggccagtgcagcagggtccaaagcgctggtcaagcaatgtccagcgttcaggacgaatgaaactcagaggactgtgcttacacgtctcgtgaccatctttctcagtacagccatatcctactagaacttgaagcaccactcaaaatatgtggtgacatccatggacaatactatgatttgctgacgactttaacgagatacggtggttctcccaaccagaacacgcaactacctgtttacttggggactatgtggaacaggggaacaaggcagtcactagcgagaccggcatctgcctcgttactggccttacaacacataccaacgtatcctgcagcatcgaataatccttctcaacaggggaacccatgaatgctgcagcattcaaccaggcaactccattgggcattttaccgcacgaaatggtcaagaagcccgcagcacaaacattcacacgtatgggacaacactcttcccaaaacctgcttcgacctgcataacggcatagcaagacacacgaggcatgtcagcaggataatctgaatgaccatgggacggctaagacaacaacactgttcaatcttatggcggccgatctcggcgaactactaccaaccacatgcaaggtacacgaacaacgggacatccaagcgaactcacggcgagccgcccccgagtgaaaccatccacagcctgaggaaaaacaccagcggacacgaataccgccgggacaccggagagcacaacgcaaagatagaagaaaacaatcacacacacagcacgcagccagcgcagccacacacgacaccaacgcgggcgccgaggggcagcaccacggccaacaatgggacaagctagcaaacaccaccacaaaagactagcggcgaccagccccc

SEQ ID NO: 580959 - DNA, 206 bp, Homo sapiens
cagctccccccctgggtttttaaaaacggcagacccaacatgttcctccccccgggtcccttgaagcctgcaggccccagggggggcccccactgattttgacttcaggaaaagtaacccagaggggccctggcctgttgttttcccccattttttggccccggtcatccgggtttttgaagaacaaaaatgcttttgggccccca

SEQ ID NO: 580960 - DNA, 200 bp, Homo sapiens
  misc_feature (73)..(73): n is a, c, g, or t
  misc_feature (103)..(103): n is a, c, g, or t
  misc_feature (181)..(181): n is a, c, g, or t
  misc_feature (193)..(193): n is a, c, g, or t
gtatcaccttgaatttaaaacgtataaagagagccgggttatcattctgcaccctacgtgacatgtgctagtnctccttcttctgtctcctccttaccctggncctgcacccctgtacttaagagggagagggggaggtgctgtctgtatcattttctgcctcgcagtagagggtgcgctntcagggtaactnccgctgt

SEQ ID NO: 580961 - DNA, 322 bp, Homo sapiens
  misc_feature (11)..(11): n is a, c, g, or t
ctcatggttanggtttaataaaattaacacttcttactgcttcatcaaagatataaggtgaggccgggcacggaggctcacgcctgtaatcccaccactttgggagactgaggtgggcggatcacctgaggtcaggaattcaagaacagcctggccaacatggtgaaaccccatctctactaaaaatacaaaaaaattagccgggcgtggtggtaggcacctataatcccagctacaggaggtggaggcaggagaatcacttgaacccaggaggcggaggttgcagtgagtcgagattgcaccattgcactccagcctgggc

SEQ ID NO: 580962 - DNA, 284 bp, Homo sapiens
agtataaattacaataaaattttgtgtatgtgtacagctgtgttcacatccacagtgtaagctgtgatatggtttggatgtttgtcccctccaaatctcatgttgaaatgtgatccccagcattggaggtggggcctgatgggaggtgattgggtgatgggggaagttgcctcatgaatgacttggtgccctcctggaagtgatgagtgagttctcgctgagctcactcaagatgtggttgtttaaaagagtgtggcacgtccctcccccaactctccctctca

SEQ ID NO: 580963 - DNA, 358 bp, Homo sapiens
aagaaagaaggaaactgcagcatacgagaccgtgcagagatatatagtaagagtactgttcggcctgatagagtatatacagagacacaagtttacagcgagagaaggagaaaacgcgccttggttggtacctatgcagattcatcacaagagagctacaagagcctggaagagctgaagactgctacctccatccttactcaccctgggacctgagagacctcttcaatcgcctccttcatgtggtgagggggtcacttcagctgcctgctgtggacaaagaacatcaattcgcatcacgagtgctattgttgcctgtggtggtctcctgtcaagcggacacttgcagagccagagg

SEQ ID NO: 580964 - DNA, 103 bp, Homo sapiens
ccccccccgggggcaatggccggtttaaaaaaagggaatttaaaatttttttcccaaacccccaaggttttttttaaaaaaaaaatttaaaatggaaaaagga

SEQ ID NO: 580965 - DNA, 198 bp, Homo sapiens
tatattttcaccatcctgcaggcactcagccattcaattgcaccagctgcaccaggtgctcacacagcaagtggtattccagtgcactctcaggcacagcacagccagccagcaccaggcattcccaggcacacccagtgttttgatgcacagctcaggcactgcaggcagcacagcgcagccacagccagccagttc

SEQ ID NO: 580966 - DNA, 774 bp, Homo sapiens
  misc_feature (9)..(9): n is a, c, g, or t
tcaatattncacacattagtcattttaaaactatgtattctttctttggagttaaaagtcagttgttgacacttaaaactgaagatgcttgtggagggctggcaggagccctcagcagggagcgttatgcatattctataactctgcttctgaaatctgcaccagggcttctgcaatttatgtctcccttcagctcaaccaggtgccttgtacccaacacagggcaattcctgagagttaattgtgccttgttatttcagcaggacttaggatgaaggtgattaccagctgtagttattcagtgacatttcaattctcctctctcagactcccccttacaaagcttttctgccagcagcccaagacaccttgacttccaccaccccaacacccatggaataacttctaattgtctgcctttcaaagaagtgaactccatagctgtcaacatttgctgtactaattgtttgtacatttggagttagctgaaagggtccggaatctttcaagatgatctgtctcttctgttaacttcctcttattcttggtccacatgtgcttaaggaaaacctggctggatttcctccctatttgagaacacctagggatgaatcagtgaagaccacggttttctccctggccccaacaggctattcctttgaaggcgtttgttaattctgggtagtgaatacacacctgtttgttatagtattctttgtcctcttctgtatttttaaaaacatagattaaaatgaacatgttatatgaagcaaa

SEQ ID NO: 580967 - DNA, 157 bp, Homo sapiens
ctcatgaggaagaatgaaagcaactgtctgccagatcatcctgaaatacagaaatgacatcacggctgctataatggattacggccaggaagatgtactgtacctgcaggagcagagactttgactgtcctggatttggagattaccatgccagtgg

SEQ ID NO: 580968 - DNA, 362 bp, Homo sapiens
ggtcgacaagagacattggttagctctggatgatgacaatggctatggggtcagtcaaccttgtagaaagaataggctaggcacagtggctcatgcctgtaatcccaccactttggggtggtcgaagccagtggatcacttgagcccagcagttcgagaccaaactcggcaacatagtgagagccccctctctacaaaaaatttgaaaattagccagggcatggtggtgtgtacctctggtactagctatcaggaggctggggtgggaggatctcttgacctggggaggttgagtctgcatgcagtgagccatgattgcgccactggactccagcctgggtgagaaagtgagaccttgtctc

SEQ ID NO: 580969 - DNA, 1073 bp, Homo sapiens
ggagtgcagatggtgcgatctcggctcaatgcaacctctgcctcccgggattcaagcgattctcctgccttagccatcccgaatatcatgggactacgaatatctgggactacaagacgcccagccatcacgcctggctaatttatagcatttatagtagagacgggatttcgccatgttggactggaatggtctacgaactcctgacctcaggtgattctcccaccatgggcttcccaaagtgctaggattacaggcgtgacccaccgcgccagaccacttgcaaatattacacagtgccaatgtgtaacttgcagtggtgcaaggacatgacagtttacccaaggcttaccagttgatagcatactggctccacatatggtgatcttcaacagacctaacagacactatcagttcagtattcctcgacttcacaaatacaacatcaaacacgtaatcattaaacatgtgaacctatccatcccatcccaatatagatcctaatatatctacacacttcttatatgtgtgcgtatgccagcattaactgaatgtactgatagacatggagtactaattgcctccccattcacctttctcttgatgcgtcacactaatagtagaactggacggttcgtcacatggtcctggacgtcacggactggctccacacataggagaccaaaacgctgtacacactttcagtacgcaaaagcgtcaatctagcaatacaagtcgctgacagaatgacaaccatgggcacaggtccactgggaaccagaaccaggacacaagcaacatgcctgaacgccctgccaccccgaccctgccatggcatggcctaccatcacactcggacaagcggagtacgaaggccctaacacggagaaccacggcagccgacccacaccactcgtggacccacaggcaacacgacaacgggcccctactaacgtgccaccaagtgcgcgtcaactgcgaaccgacgcgcccaagcaagagcacttcctcgaccaccagagctgccaacccaagcatccggcgcagtaaaatagcactagattcctccaaaa

SEQ ID NO: 580970 - DNA, 2097 bp, Homo sapiens
  misc_feature (1078)..(1078): n is a, c, g, or t
ataaaaaataaaaaaagctacaaaacaaaaactaaaaaaaaaaaacaataaaaaacaaatacaaaaataaaataccaacacatcacaaataagaacacaaacaaaacaacaccatgatacacacgactcacaaacaattgcccgtaggactcatctcgtctcgcaccatcacatacttccccccacccaccctccgctcactgtcgcgcgctccgccgtgccgatgacgccgcttcaccgcgcatgcgcccaccccccgtgcgacatgccttcactacctctcgtgcagcaagcccgctgcccaggcgaccaatgccgcgcctccgccacaccgcctccgccctcgcctccccgcagttctgtgcctcgccatcatccatccaatcctcacccacctcactcacgtgcgccccacgtttatactctattgtagaacaaccacaatatcccaccacacacccctaccacctccacctcccttgcgcagtcctcttgctacaaccatcccccacagcacaactcaacacccacacatacatcccctcatccctcctgatccctacaacacacaatctattatcctcacctcctctgtcctgcaccactatctagccgactcatgtttcaattctctacctcctccgctcctcgtcctacccacacggacggctactatcaacactatccttatctccatctacaccactcactccaccaccccaccgatatggatcgccccctcatctctatactgacctaactcccaccacactcacctcccccacaaccccagccagcacccccagctcgtggcctaccgcctcccccgctcgccataccactcaacagcaccatcgtcgtccctaactccatcaccaacccactccaccaacgaacgatacacaccaccaccaccgactcgagcgccgagtgcgcgtcgcgccgcagatgactcacgcacgtgctatggatcgccgcgcggtgcgctcgtccgtcgtccgtgcctcacgtcccctcgctgctcggccacgcggccacggcctgtgccgccacgcgctgcagctagccaagctctcanacgccagagactccgcagcacgcatcgcgtcgcagcgagagagttaagtcagcgcgacagcgcatagcacggcgcatgctaggtcgttcgtcgcacgtctctcacagctctgcgtgactgggtcgtagcgcgcttcgctggccgctcactgcgctcgttgtcacctcgccgctcatgctagtatccagccgcgtcccatctcaccgccctgcactctcgctgtctgcctcgtcgcgtcgcgcagctcctccaccctaccactccgtcgcacagctcgtcaccaagacactagacctcgtcctcctagcagacgaccactagacggcgcgccatcacatctcacctttctgctactctgagctactcagctacctacgaagactagtcacgactcccaccgatagctcgacatctcgactagcgctgctcagtagcctaccgcatccaccgtccgacgttcacgacacgtcaccgatccaccaacctaccctctacgctacgccacgcgccactgcacccacccacaccatactcccgaacaccaccccacccctacacaccctcccacgccacacactctacccaccacactcactcctgcaccctccccacctctcctctacagtcatactcaggaccgtctactccatgtgactaaccctcgcagtacactcctctcgctacacagccccgcgcccccgccggctcaccacagccagagccccctcaccgccaacacgcctctaccatcctctccccaacttccccattcctagttcaaacacaagatctacacatagcgcactcctaccgcctccttccccaccccccacctatcccctacacctctcaccctaccacatctagccacctctcccctcacgctatacatcacccgcgctccgcctgccccacacacaccatagcactatctacagtcagtacgaacgcacatgctcgcatgctaatcttctctcttctcatgtcagggcgatggtccaacaccaacaccctcatgt

SEQ ID NO: 580971 - DNA, 122 bp, Homo sapiens
tataaaaaaaaaaaaaaaaaaacaccgttagagttgtttaaagtcttctccagcatattatattggtttttgattattcatattttcttcttctttatagccttctacattaattatttggc

SEQ ID NO: 580972 - DNA, 880 bp, Homo sapiens
ggtgatggaatgataaaagtgaagaatcagctccgcgttccttgcagaactggcctatgatctggatgtggatgatgcgcctggaaacagtcagcaggcaactccgaaggacaacgagataagcacctttcacaacctcgggaacgttcattccccgctgaagcttctcaccagcatggccatctcggtggtgtgcttcttcttcctggtgcactgactgcctggtgcccagcacatgtgctgccctacagcaccctgtggtcttcctcgataaagggaaccactttcttatttttttctattttttttttttggtaactccgtgtattacctcctccagccattgaagtacgaggactaaccagtggtgttactgttttcgaaaacttcaaaggggtatctttgggaggaagactacttttcaggggtagcattatagatggtcctttggcaaagaacgcaactaaaaacgcatcaagtttggtgccaaattatctctcctagtgctgggcgtgctcagcaaccgtggtcaccagtgtcctttctctctcattccctccctttcaatcggtctctcttgtgcctggaatcccctttggaccacaaacacttaacttgggtccatcttaccccaccaacacacacacaacaacccaacccaccatcacccacaccacacacctacaccaccacaaaaaaataaacactaatacaattcctctccaacctaactctcacactttactcaccaacaaaacacatacacccacccactaaatacactaaaacaacaaccacaccaaacagcacaaacaaactaattatcgcatcaactcaacgatcactcaacaactctcataacaaatctaacttcatacgc

SEQ ID NO: 580973 - DNA, 1320 bp, Homo sapiens
  misc_feature (838)..(838): n is a, c, g, or t
  misc_feature (1218)..(1218): n is a, c, g, or t
cctgcttgtgtggttgtcgacgcgcaacagccagctgttcgtctcctcaactctctctcgtccggtcagcatcacctcagttgtgttctccccttcaggtggtcgactcacaatacagtgcgacaattactcagagggggggtcgtcgctctccttttttctccgttcggaagaactcaactattattaaacctcgtgggggaaactgacaagcagatgtcgtcgggcgtcccacacccacagagggggatttttattttgtggggggcgcgccacatatatactttttaggctgaaacatgtttcggtgtaacctccaaggtgttgtcgtccccccccctgtgtggtccccagcttggggggccacttttcccccggtgtttgtttagaccgcgtggttcctcccgctggtgattggccttcttgtctgcgcgttgtgaaagagaagcgttgggtgtcccaccaggggaaggtgccgctcgggctcggggccaccatggggcaacagtggccccccctgggccaaataagggttcttgtggtttttgaaaagtggttgccttggggggaatattcaactcttggcccagggacaccacgaataatttacgccctttgggttttccagggaatattttcttttgtagcctccccccgatatctgggcttgtgggaaatattccaggggacacacttccccgttggcgctttagtgaaatacgcaccccccacagtttaggtgggggacacatatgtgggacacaaaagaggcacatacttgcgcaccactcaagaggggccccccctctggggtggacaccccagcgcacacatttcnacacagaccagatgtgttaaaattaggccctgccatttttgtggagaatagcttggcgtgcgcccttttctcagatgtccctctcccagggaagagcacacacatggcccttgtctccttctttcacagaaggccctcagaagggaggttgcttttagagggcacaggtggaagttgtctcgggagagttgttgggcggcctccccttctgggccccggggccctctctcgtgggagacctctggcttccctctccgtggagacactgggcttcgtggtgagagcacctgcacgcctccctgggcacatttccctccacgcgccacgcacccacactgcacaacaataataagaacctgagagtgctatattgtaatttntggccttggtgtgtatgctcttcattgtgtaaaattgctgttctttttgaccaaattaagtgattgttttgtttactgtaagttttaaaataaaaattaaga

SEQ ID NO: 580974 - DNA, 388 bp, Homo sapiens
gctctagcctcactccccgtcctctcccgtcctctccctcctctctgaatgccatgtagaacacagttcaaggaaggaaacatgcaatcactagaccatgaacaattcttatagacacacaaaggtttggtccaaaagaactcatgataattgatccaatgactgtgaagagctccactgagtaggattaagatactgcagatgtagtgtttccatcagggtggctcttcagtgcaccatcggggcctgcttgagggacattaggactgagcgcatgcgggagacatctttggcctgcttgctaaacttggggttaaagtcacactgcctggccacccgttcccactcagtgcctggggacgactcgtctactgtcatttacatcggc

SEQ ID NO: 580975 - DNA, 547 bp, Homo sapiens
caaggatctggccagccaccatgatgtggttggcttccttgtggcaggtactctcctcaaggcgttattcatggacatagtcgatgagaactagtacgcaccagccatgttcccagcccttctggagaggcacggagtcatctgaccatctgtccagtatgtgccctttccatgcataagtttcaaatggggtcatagctcgttcctgggcggttattcgagctgaatcttccttatatgtttatgtgcccgcacctggcatggtttggtgcaggtccatcccataaccacctactataagggtgggaagtaaaagtccctaacagtggttctccaaggctaacagatcctagcagtcttcgcatttgattcagggtaggggcctccccttttaatcctccccacccccccgccaaggttttcatactggcctgggcttgggtgcccatataggaggtatgtatgttcaccaacagtgcggaggggtctcacattgcaaaacattgcccagaccagtaaaaagagcctgcatgccaaaaaaaaaaaa

SEQ ID NO: 580976 - DNA, 348 bp, Homo sapiens
cggtgatctacaggatttcggtatgagagctttctgggcagacttgtgtgacttgccagctccagcagacttctatgtaccactggtttgatgacacccaccggaaatgtctgtctccatatacaccggaaacagtgcaaaggggtcccaaaggtggctagtctgagaagctctcaaaacaaatgggctgccaggaaccatatcaacaattggcagcatcatcagacttcaaagaatatagggccatcttccagctttttaccagaacggcgatcaatcttttccttcagctcagcaaacttgcatgcaacggtgagccgtggtggcaatccaagtacagggggccat

SEQ ID NO: 580977 - DNA, 634 bp, Homo sapiens
atcaggcttttaattgtggtaatccccccgttattccctagggtttgtggaacgagccggggtgtgtttgggcacacatgggggccaagggttttgtgtcctgggttccatgtgatttggctctccgggtcttttccggggaacgccttgttgggggttctgggggtgtgggtggaagaaggcccttccgccttaatgtaccctttgttctttccaaaggccccgcgggcctggtttgtggaagggtttgaccaatggggcccgccttggccctgtttgtgttgccaaaatgtcccgggtggttgggggggtgtttcgcccggcccccccccctttttttaaagaggccccttttgcccttttcaaaaaaaaagggggggcaggctcctgggcctttggttttttggtaagggggggccccccaaagggtttttggggggtggattgaaacctggggggtgggggttgaaaatttttttgggcccctttgggcccccccggttttgttccctttttgggggccgggggcccccaagcaaagcccgcgggccatgggggggtttttaatggggttttgggtttttttttttgccttaaggtttttgggtttttccaataaatttttgttggccca

SEQ ID NO: 580978 - DNA, 396 bp, Homo sapiens
gtacagacagatcagtgccagatgtcctagctagccgtagtccttatgccagtggatacttagagctctcatcttcatactgaaaaaacttacacaaatgagctatacatttaatgggagaaaagaaagaaatgattgtgggccctcttggcattcaagaaaaattcagtgtcagcgaggccacaccaaattgtgtgtgtgttgggagtggtggggaagctgattcagtgtgtccatctctaaaacccaaagtggcctactgaaaatagtgcatctggccaggcacagtggctcacacctgtaatctcagcactttgggaggctgaggcggtcacctgaggtcaggagttcaagaccagcctggccaacatagtgaaacctcatctctactaaaca

SEQ ID NO: 580979 - DNA, 1427 bp, Homo sapiens
tcgcgcggggcgcggtggttctgtatagttactcgtttgcacgcagtgttttacccttattcttggtttagtcttgttgtgttcgtctgctcttatctccatagtggtttttcccctattactgtccctggttgggcctattatatctcgcttgtttgagacgacagcgttttttttttgtgtaccgtcgctggcgatattttttttgtccccacggcggcggccacacactcggtcgtgttatttcctgcgccccccccgcttgggtggctgtgcgtccgccccccccatcacggggggggggtttttttctttcggtgtccggccgcacactggggcttgttttgagcacccctccacggtggttttttttgctatgtgagatgttttttgctcccccatgtgtgggccccccccgctcccttcggtggtggtgtggtccgccggcttttgttgtgtgtttgtttgtgtagtaagtggggtgtttctcgcccccctcttgtgttgtttgtggccccccccctcccccccctttttgtggggctgctcttctctttttatttatgtgtggtgtttcccaccgttggtttctgcgtttgtcccccgcggggggtttcacacccactttttctttgtgtgggcccccccccaaagaagtggttgttttgtgtttttttaaagaagtaggctgtgttttgttttcccccccccccgttgtatttcttcccccgcgcgggtatccctcctcgcggattttgttttatagaaaaaatatatttttcgcgccaccttgtggggacccacacccactttttctgttgccacacagccctcttgtgtttatattgtgtgtatataagatgtgtgtataaaacaaagagaggtgtatataatattttctctccaccccgccctctgtgttctcttctatttaaaagagtttctctccccctctctcttctctcccacactatatatattgtgtgcgcccttcttctctctttaagaatatatatatcttctaataaagagagaagaaaaaccctcctcctctccccccatatataataatatataataaaaagagcggcgctctctttttatataaagagagagtgtgtctctctcccacacacccacactgtgtgtgtgtatataacaccccaccacctctctgcagaggagaaaagagagactctctgtcttgtgtgagagcgcaccacctctctcatagaaacacacactctcttctataaaagagagaccatctattagtgaaataaagataaaaagaggggtgccacacaaatgtgcatccccccgtgttggcccactgtttttgccccgctgttttataaaaaagagagagtagaagaaaaaaaaaaataagcgtcgtttttggtggagtgggggcccccccgtcccca

SEQ ID NO: 580980 - DNA, 709 bp, Homo sapiens
gccggggggggtggatgtactgagcggataagcccacccttcgactgaaattaaggtgatcatccaggtgaagccttggcaccaagtgaattagcgcaagcagctattaatcgtcagcatgccctggatcacaaaccatctgaacagcaattctctaaagaaccttttttaaaatttttatcgagctgccactaaactaccccaacccctacattatacactgccagattgtttttaggtccgggatgtaaaccctaccatcacatgaatccacaatgtggtgcacaaaacaccaacatgttggacacttgatcagtcccgcactagcaggagattgaagaactgccaaacgctttcgacatttccaatttaaaccgttcccacggacgaatgacccaaccctacctgactggatatatttgtctgccctttttcactaagaccgccacccacatactggaaatggggcgtttatccaaaaatggcctatcaaagagttggatcccaccgccgcccgcccctatgatctccttacatgcccgcaacccgtcccagtgccaaattctccttaacaaatcccaggttatggctattagtattcataacctttatacattgagcaggcccctaaacagttacctatcaaaaaacccggaaattgcttcccctaggatatccacgtttttcattcttaataatggagtttttg

SEQ ID NO: 580981 - DNA, 441 bp, Homo sapiens
  misc_feature (7)..(7): n is a, c, g, or t
ccagggntttgtgccggctgcgtacgtgaagaaattggaccccgttttagtcagcctcccgggagaatctcctggaggagcaaggctttatagcactgcggcaggagcagattgacaatcagacacgcataactaaggaggccggcagtgtatctctgcgtatgaagcaggtggaagaactatatcattctctgctggaactgggtgagaagcgtaaaggcatgttggagaagagttgcaagaagtttatgttgttccgtgaagcgaatgaactacagcaatggatcaatgagaaggaagccgctctgacaagtgaggaggtcggagcagacttggagcaggttgaggtgctccagaagaagtttgatgacttccagaaggacctgaaggccaatgagtcacggctgaaggacattaacaaggtaggtatgatgaaggacg

SEQ ID NO: 580982 - DNA, 365 bp, Homo sapiens
gcaggaaagatgggattccagtgggctctctgagcttccacccttagctgagacaactcagtacagttttctctggtcaaggaagtagactactgtttgcctaggccgggtgcagttgctcatgcctgtaattccaggactttgggaggccagggcaggcagattgtctgagaccagcctgggcaaatagtgaaaccctgtttctacttaaaaaaaaaaaatacaaaaaatcagagcctggtgtggtggcacatgcctgtaatctcagctactcgggaggctgaggcaggagaattgcttgaacccggcagacagaggttgcagtgccccaagatcgtaccatttgcactccaacctgggcgaca

SEQ ID NO: 580983 - DNA, 684 bp, Homo sapiens
tacagtggtgcaggagtgtgattgaattctttgtgatggtcatacgcttgttgaataccccaggccctgtattgttggtgcgccgtatgctgctctcatctgatctaaggagcctggtgtccgggaagcctgtgcttaatgcctaccgccaatctacctcaaccccaaaggaactctgccaagccaaggcccaggctttgattcagaatctctctctgctgcgtagtggattgcctcggatttggtgcacccattcaatgtcttgcagagaaattctctgtagataatgtagcagaaaggcatgagttgacaaccagcagtagacccagctgctgtgggcagcgaagccaccggaccacaggtcgcctgcttgtacctctggaagcgctgtacctactgtcatggccttctctgggctattgacttggccaccgaaggaaacgccacgaacaactttgtggcgaagccacactttacgatcaccacctggatgacgcatagcgggctgactgagcacacgatcatccaaccagggaccttagcaaggcctggcgcgcacggcaaaagtagatgtccactaggccatatgtggccagaatattctcgaccaccggagaaaacacgcctctatcctcgtgcgaagcagtgtttccccacccccaagagaggagcgcatccagacac

SEQ ID NO: 580984 - DNA, 624 bp, Homo sapiens
  misc_feature (624)..(624): n is a, c, g, or t
taaaaaatagaataactttattaatcttggaaatcagtaatcccaaggggggccttatacccgggctcatgtggtcaagggcacaccgattggtctcctctctctaggaaactggtgatgaatgctcctctttccccctaaatccctccgaaaagggaggcaacaacttgggcgggatgatgatgtcgaaattttacgctggtcacaaagaaatataaagcttcatcacgggaatctgggaaaagcaagaggaagcaaataatgcaatatagccaaagagcctcttttatatcatctcggtgcagcagcagtaaaggggacagacgaagacctaagcagtttggggggcacgggggcaaagggaaggtaacaagatcacaacgttgtggctcctgacggggtcatatacaggcatcagctgaatggtccccacggccaagttccatcaaaacccagaagatctggcttactggtgggtcccagtggaaagtctcgcatcgggctggactgggcaaccatctaactggcgcacttctggctcgaaaggcttagggggactttggaggcagcaaacaaaacaaacttaccttaggggcccccttgaaagtcgctgggggagatggn

SEQ ID NO: 580985 - DNA, 321 bp, Homo sapiens
aagaatattgaatcttggctgggcgtggtggctcacacctgtgatctcaacacttcgggaggctgaggcgggcagatcacggggtcaggagttcgagtccagcctgaccaacatggtgaaaccctgtctctactaagaagatacaaattatctgggcatggtggtggctgcgtgtagtcccagctactcaggaggctgaggcaggagaatcgcttgagcctgggaagtggagggtgcagagaaccgacgtcacgccattgcatgccagcctaggtgacagagtgaacctctgtctcatgagcagaaatcaattagcaatat

SEQ ID NO: 580986 - DNA, 387 bp, Homo sapiens
gtcgaccacggctcactgcggtctcgacctcctgggttcaagtgatcctcccaccttagcctcccaagtagctgggaccattggtgcatgccactatgcctgctaattttttaaattttttgtagagacagggtttctcagtgttgtccaggctagtctcgaactcctgagctcaagcagtccgcccaccttgacctcccaaagtgctgggattacaggtatgagctgccatgcccagcttcattctttttaaagactgaataatattccattgtatgcgtatgccatattttatttgtctattcatccattgataaacatttggtttctatcttttttttttttactattgtgaataatgttgctgtaaacataagtgtacaaaaa

SEQ ID NO: 580987 - DNA, 224 bp, Homo sapiens
gacaaatggcgagggactaccacataaagcagagagactcaaaaacacacccagagaaagcagaggacagaggaggtcaggtcagtgtgggaggcagggacataccctttcaaagggcggagataaggaggcatgagatcaccgtccatacctaccagggagcgtggagacgcagcccacctcataaaacccagcatgcccctcacagcagatcaccagcttct

SEQ ID NO: 580988 - DNA, 269 bp, Homo sapiens
  misc_feature (57)..(57): n is a, c, g, or t
  misc_feature (222)..(222): n is a, c, g, or t
  misc_feature (255)..(255): n is a, c, g, or t
ataaaaaccaccaccctccagcctggggaacgtagtaaaacctcatctatacaagantttaaaaataagctgggcgtggtggtacacacctgtggtcccagctactagggaggctgagccaggaagaacgctccagcccaggacttcgaggctgcaatgagctataattgcatcattgcactccagcctgggcaacagagaccctgtctcaaccaccaccancaccaccacccctactacccctgtattcaaggnaaaaattgaagttt

SEQ ID NO: 580989 - DNA, 706 bp, Homo sapiens
  misc_feature (48)..(48): n is a, c, g, or t
ccccggtagttccaaacttcttttcgtagagaatataaggaaccgagnagaagcggcaccaaaaagtgtttttcaacccagatctagaacaggtccttcaacaaaagcccacctgctcggggtcataaacatggcatgttcaaaggcctcggaaacttcaagaagccccgagattcaccgtgttttcataggatcctttcggaacacgccaaccaggatgttatctatcagcagataagtggacgtctgttccacacctaacatatcgtaggcttacccataagacgcatactttcgctcactttcccagtgagaaaagtctgtttacgatgtaaagtgcacttgctcaggggctaaacccctatagcatgacttataaaggagaaactgagtcggatagtgaagaatatcctgcctctgagagagatgtcatctgagtagtttttagagcagtcttcttgtgcaagaaggttgcaactacggcagtggttatcaaagccaccagtgtcagtgaaggcaacataggttcacatatggggcagtcccatggtcagtgcctggtttgggcagctatgggcattattggaccgagttctccattaactagtgcgaaggccaccttttgtcgcaactgagtccccccgatccatagatcagcctgtatcagcagtgtgtgatagattcctctacgagaatatttttcccg

SEQ ID NO: 580990 - DNA, 143 bp, Homo sapiens
atgtcgcggataagctcccagagttctctagagactctcttcatttagttctcagtcttttattctctattaatagtatactagcatccagataaattatccactaaatactgtacctaccatcctcatcttaattacatatc

SEQ ID NO: 580991 - DNA, 84 bp, Homo sapiens
tctgtgtacttctgtgccagcatagggggggtggatggggggcttgaagctttctttggacaaggcaccagactcacagttgta

SEQ ID NO: 580992 - DNA, 210 bp, Homo sapiens
  misc_feature (13)..(13): n is a, c, g, or t
  misc_feature (101)..(101): n is a, c, g, or t
  misc_feature (158)..(158): n is a, c, g, or t
cccgggacgggtncccccgccgacctgagttggggggcaacagcggctccagccgggcccactgcttatcggtcagaacagcggaacgagtacgcgatttngacgacaccaccccagcttgccgccagaaccccgccacatatgggagacacgctctngcccttacccgtgcttcctgggggcgtttggctgtccagcgatggggccggc

SEQ ID NO: 580993 - DNA, 443 bp, Homo sapiens
  misc_feature (24)..(24): n is a, c, g, or t
tcgcgaacgtatatccaccatagntatgtaccaatggtgtgtacagatatttaaaatttgcgggagtgtgcgggaagtcagggaccccgaatggagggaccggctgaagccatggcagaagaacaccgattgtgaagatttcatggacattgattagttccccaaattactacttttataatttcttatgcctgtctttactgcagtctgtaaacataaattgtgaagatttcatggacacttatcacttccccagtcaatacccttgtgatttcctatgcctgtctttactttaatctcttaatcctgtcagctgaggaggatgtatgtcggctcaggaccctgtgataattgcgttaactgcacaaatggtagagcatgtgtgttggaacaatatgaaatctgggcaccttgaaaaaagaacaggataacacgttcgcgag

SEQ ID NO: 580994 - DNA, 185 bp, Homo sapiens
agcacgaatgtactcggcattccggatcgaacttcgcaggtgtgcgcgtggccatcaccagttgcaccaggtattcctccacggcatcggccatgtacaagccgaggatttccttgcgggcggcaaagatcgcctgttggctgacgcgccgctcggtgcttggtttcgccacttcaagtgcttcg

SEQ ID NO: 580995 - DNA, 687 bp, Homo sapiens
  misc_feature (87)..(87): n is a, c, g, or t
  misc_feature (96)..(96): n is a, c, g, or t
  misc_feature (133)..(134): n is a, c, g, or t
  misc_feature (136)..(136): n is a, c, g, or t
  misc_feature (157)..(157): n is a, c, g, or t
  misc_feature (182)..(182): n is a, c, g, or t
  misc_feature (194)..(195): n is a, c, g, or t
tggaaatgacgggcttttaatttctcaggaacagccgaaatgacctccagaggttcccagcgaagctgtaacaatccacccgggagntctatgacngggaggagggcgaatcaaatccatcatcttacgccannanttcagcccggggggagctgcntgcctccaaagaaagcggggaccgngggcggactggnntctctcccccgtggtgggaagaactgtgacagcatgtgaaggggtgggcgctgacagacacacggcctgcagcaagcccagccatgtcccccacagatcgacgccaaagtcatttaaaagggatttaggccactggccttttctctgagggaggagcggccagctgtgttgccccggggttcatggggccgtgtctaatcacacagccatgggcaaagaggagtatctgccaagacgcttccatatcactctattctgtctcctacatccaccttgaagttcaccccggttttcccccattggatcttagaaatcgggcttcgggggctaacgtttaacattggtcagttcgggggcctaattcctggtggaattcaccatcttcaaccacaacttaagaaacgccattgttgtgtcaacaccagtcacaggaagccagggcactcttgtctcccatttcttctcaccacacacaagtcatgcatctaccaa

SEQ ID NO: 580996 - DNA, 389 bp, Homo sapiens
tgcgtcgtggtgacaaggagccaggaggaggcatgcctgtgctggagtgaagcccagaccccaagtgatataccacaggggttgggatcagacgtgagttgctccatggtgtcattgcccctgctgatgaatgctctcaagttgagctagcgggttctgagctggcagatgtccttcgtctgctgacgtatggagttcaaccttgcctgtcgttcttgaaggcataagatacggtgataggacggttacagaggtactgcccattcatggcttcaattgctgcatccgaagcatcaaatgaagcaaaattaataaaggcataacctttggagttgcctgtgtcagggtcccgcataattttgggggtatgtaagatgaccccaaaggcg

SEQ ID NO: 580997 - DNA, 1399 bp, Homo sapiens
  misc_feature (361)..(361): n is a, c, g, or t
cgaatacgacgaggagtgagtcggagtgcccagggccccaatgctgaagctgctcgctagctggagtgagaggccacgtgtggctggtcgggttcgcgatagtccagtcagtgtctaaacccccgtgcagccatctacgtcgtgcctgagcaccgctgctttcccctcgccctaggtggctcccttgaccgccctcctgcagtatttatgcgcctcgtcctcccctactctatggccacgtgtgatgctgctcctgtactctgtcttattagcaagctccaggcctgacgatttaacggtctgtgtttcctagctaggttgcgtggtttatattgtgtccggtggaataccttaagtaaantctaatttgcttgtcatgactacccttgtaaatagactagagacatacaagaatagcataacaagaattggaatatagacagacgaaataatagaatagacaacaagacatataagagacagttgaagaggagaggcgcgccgacattccacagtggacaccactcacgccagagaaggtgtgctcccaatgtatcccgtttgtgcgacacacactctcattcggatatgtatgtttgccaattccctttgtattgcacactgcaactaggcggaactaggcccttccttgtaaagaatggcaggcttcgcacctgggccacgtgaataacattccgctagaacttgcattcgccccttaatctaggaagaccaagccagaagaaaacccgtgatatgcccccaactttccccttaaaaagacaaacggggccttataaacttgggcgcgagaatggcggacaagacgacttatttctgagccgacccaaaacaacaactttgcaactggaaaggttatgtaatatggtagggcgaagaaggcaggagacccaccatgtcaaacgaaactgggaccacgaagtttactatggaccaacgcgttggaagacataccccagcgggctaccgcgcaagcaattgcgcaacccttctggcgacacttggcggacatttcgtcgttggcacccttatacgagagagcccgagttgatttttcaccaccagcaggcctttttaatacatcccagagcgaagggccctataatctttctgcatacaataaacatcgaccgcggtgccgaaaaagttggtcgcccccgactcccttataccactttgaacgcgaacacagcatggcgacgacactatccctatgcccgggcagtcgatgtggcactgggactttgtcaaacagcggcgcacggactcaatgtatcgaacagtagcataacaccataaacgaaacaatctgatgtaccatcacagagaatgaatttaacgaaacgcacccgcgttaacatgacgagtactaatgaac

SEQ ID NO: 580998 - DNA, 511 bp, Homo sapiens
ctagaggatcccgggccaggcttggtgatcctatggtaaatatcagaagaggaagggagggtgtgactacagggcggaggggataggggagatcagacaaaaggtgctacaaaatcatgcacccctcttacctgaatgaaacgccggtgctgaaggcagttctaggtgggctagggccgcgtggtgtcacatagtccccaggtgcctgcttcacagggccgggtggtgggatcttaagtgccggttaatatcttaaggagaatttctaggcctgcttctgtgctttctggtttgggttctgttttctggatctcgggcttctcggttgggccagatagggtcttggctaaaggaacactctgctctgggacaagaatcggggagaatggccaaacagaaagatgtgagtgttaaaccaaaaaataaatttccaaaaggttttcctccatccagggtacaaataggatgtgctcatttattcatatatagacaagaaaaaggggatgggctg

SEQ ID NO: 580999 - DNA, 241 bp, Homo sapiens
tgatctacggatccctttcctacgagcgcatctcggtcactgcactcttccgcaccaggtacaagcgatctcctgcctcagcctcccgagttgctagggactacaggcatgcaccaccatgactaggctaatttttgtatttatctatgtagcagatgaggtttttgccatagtttggcctaggcgtggtctcgcaactacatgcacctccaggctgatcctgcccgacctcaagcctccc

SEQ ID NO: 581000 - DNA, 280 bp, Homo sapiens
gcggccgcctaccactactaaattcgcggccgcgtcgactagcaaacccccagcctctggcgaccactggaggagtgggatgaagactgataaaggtatatttgcgatcttaatccccgttttttgccaccttataatggatttgaggggagggaccttctgctccaatagggttgatgggatgctagtaattgaggagactgagtgtcttgactgcaaatgtgttggtgaggaggtttgactgtcattttagtgtgggaacagcatgctactttgggcc

SEQ ID NO: 581001 - DNA, 1305 bp, Homo sapiens
ccacaggtcccccggacttcctgctcagcttaccctgagcagcgcccctacctgctttccctcctgagcaccttgtgttactcagcccacccaagcagcctgctcggcgcccatacacctggcctgatccccatctacagtcaactctagcatctagggcccaaggtggtcccctcgacctatgcctctttcctctctcctcattccacactccgtgcgtcaaccaccctgaagccggtatcacgatccactgagtcccacacaagatcacctctctgacctatacctcccatgacagatgcaagcgggggagaaccccatagagagagcagccccacgagggtaacgcccgcctcaaagtagcgcgagattgcccaagagtgttcccacatggagggcgccaaccgtgcccatcgaacagcccaaccctactcagatggccactcataagccatcggcgggcaagacgcacgcgtgggcgaagcgcgatgaactgaggagcacggggacgagcagaagcgcacggacggacattaccccaacaccggcacgggcggatatcaccgatctggattcatccaccgcacaacgaccttggcgaccgcacgcgccacaataccggaaccaggcggacacgcccgcgccagcgccatacggagtatatcaccactactccagaacgcagccaccccattagaagagcccaaccagacagtaccccagccaagcagcgctaggagatacgcacataccacaacaacgacacacatgcacacagacgaggaccgaccgatgggaacaccacaccgcgatatccagcacccatcaaccccatgggccacaggaaaacacacaaacacacaggccacagcatgagcacgcaaacggggagtgcgcccccaggactacccaggtcattacgcgataaaccccgccatgatgcaaccgcgccagccgaacctatgggaaacgatcaactacgggcgcaccaccgaaaaagcccaaagacactcccccccattaaggcgtcacacaaggggacgtaccgacgcccggagctgggcaaaacccgcaccaaggaagacgccaacgataacagccccccaccaaaggggggggaccacaacgaaagaaacgcgtctactcggcaatccacccgttctcggcccacacacgaagcgacgcattgagtcacacggcgacaccgccacaggtaaaacccccacgaacctacgaggcccgccgaaggcgccgtcacagcaccgaaaaaacgaccagaggacggagcgcacggcacacaggcgg

SEQ ID NO: 581002 - DNA, 220 bp, Homo sapiens
ggccattgtccgaacgagaaatgcaccctcgaaggagaggcctatagagcggacacccacgtacataaggccgactatgagcagagaatccctgcagctgaaagagaagaagcactaccctaggtgaaggaacgccttccacttgtgccgagagaagcccatacgcagctacataatcgtggacactagcatagaactctgtgccgagctggactacgcc

SEQ ID NO: 581003 - DNA, 89 bp, Homo sapiens
cagcgccggggtcttctccacaatggttactggacaaattgggccatggttctggaatcagactgctatctgaataaataagatttgtc

SEQ ID NO: 581004 - DNA, 599 bp, Homo sapiens
aaaaatataaagtgccaaagtagacatataaaaagaacaggagtttaagaccagcctgggcaaaggagtgagaccctgtctcataagagaaagagaggccaggcacagtggctcatgcctgtggtcccagcacttggggaggctgagacgggcgtttcaccgtgttggccaggatggtctctatctcctgacctcatgattcgcccgcctcggcctctcaaagtgctgggattacaggtgtgagccaccgcgcccggccgcttgcgtaatctttgattgacagttgcttctagccaagcattgctctataattttgcctttttacatctatcttctcggtgttaatgatctataagaaagtttgtcaagtaggtcaatgtccatgcagaactgcatagctctgataaggcattgagaataatcacactcttactatatctcttctgtaaaatacaagatttcttgtaaggatattccttgtagtccctagtgtcggggtatggtcagcattagtacgcagtcgcaattacaggcataacgtgtctcaaactagatcagattgtggtggttgtgttgagggccaatctccagttatagat

SEQ ID NO: 581005 - DNA, 331 bp, Homo sapiens
caccagggatgctcctctgtcttaagcttcattgttccaatgggcacatagttatagttcttacctttacttctctgtatatataaggtattaatatttatttctcagtgttacaagatttctcctatcattgattttacgcaatttgaatatggtgagcctgggtgtcagttttcttcatgtttcctgtgctaggggtatagtgagtgttgtgaatctgtggctgtatggttttcagtaaatgtggaaacgattttgcatcattatttcgtttaagcatgtttctctgtttcccagcgccccccaaaattgaatttacagcatagattag

SEQ ID NO: 581006 - DNA, 738 bp, Homo sapiens
atataatactaacattgaccatctcacttctaggagtactagtagatcgctcacacctcatatcctccctagctatgcctagaaggaataatactatcgctgttcattatagctactctcataaccctcaaggaccacacgtccctcttagccaatattgtgcctattggcgatactagtctttgccgcctgcgaatgcaggcgggtgggcctagccctacgtagtctcaggtctccaagcacatatggcctagacgtacgtacataacctaggactattccaatgctaaacagtaatcgtcccaacaattatattactaccactgacatgactttccaaaaaacacataatttgaatcaagcacaaagcagccacagcctacttattagcatcatccctctactattttttaaccaaatcaacaactaacctatttagctgttccccaacttttctcgaaccgctaaaaacacacgtctaaacgtagtaactgaatcctacaccgttaaaagccatggacaggcaaatgcaaatctatcagggacagctataggaagagaaagggtactctctatactaattcccgtaacctgtgcttactataaactcacaaggcaagaataaacatatgtatatctaacgagagccacttataccaaccgggcatcagaccgatgaggacgcccgaaggctgagcagccgtgaacattgtaacgtagtagccatcgcacacagag

SEQ ID NO: 581007 - DNA, 534 bp, Homo sapiens
  misc_feature (92)..(92): n is a, c, g, or t
  misc_feature (226)..(226): n is a, c, g, or t
tcaaggatccaggcaagctctactctacccatgtctctcccaagcagtccttctggattctaactgctcatttgatcaaggtgctattacanaactctccctaccattctagcagctctgcctcctttcaactcttcacatttgtattgccttcccagactgctccagtctatatagctttaaagttcactttgggcccacagacccaagagctaattttctggtntgtgggttgaaacaaagctgtgaatcactgcaggctgtgttcttgcatcttgtctgcaaacaggtccctgcctttttagaagcagcctcatggtctcatgcttaatcttgtctctcttctcttctttatgatgttcactttaaaaacaacaaaaaccctgagctggactgttgagcaggcctgtctctcctattaagtaaaaataaatagtattagtatgttggtaagctattctgacagaaaagacaaaggttatacttgtatgatagtgttttcatatggaagaatgtacagcttatggacaaatg

SEQ ID NO: 581008 - DNA, 741 bp, Homo sapiens
  misc_feature (73)..(73): n is a, c, g, or t
  misc_feature (107)..(107): n is a, c, g, or t
atgctgtgttggcagggctctgatcagtaatgaggggaagacaagtcctgtaagtaaacattagtgagataanatagcccgtgaaacgctggcggtagtctgattgncgtaacaaccatagtgacggggatcattaccagcggaacaccagtcagtaactgctcacatcgctactctcactggttctctgttgttaactgatatctctattgcatgaggaattcgtcccagcaaatgggatggagttaatccctggggtaggaaaccacgtgaaattgggccagctagtggtgctctttggcataggggtgcaaagtcctgtctcgaatatagattgacagttgtagtcgctggagtaagagttagaccagcgaatggagtgttcaggacaatgatccgttgttagatggacttggagtaccagaactaaaacaagagtacattatgcggatgtaggagaatggctatggcgtggcattttccctgagattaggaactacaacttatttcagataatttaacatgattgcaggtgtttagccgaaaagtgggtcgataggaggaaatatgtctcgtgacaagcttatctgaggtggctggccaggagagaagtggacagcaggatagtgaaagcagctgcgagagatatcaatgggaacagaggtttcagaagaagatatagcaatattctgctatctttggggccaggtgattgatggtctctgaatatcgaaccagatt

SEQ ID NO: 581009 - DNA, 212 bp, Homo sapiens
ccccttgtttgctaatgtttaattttgcctcataatttttcccttgtccctgagggtcagaactataatttattccctttctctctgggtctgggccaaaaaacccaggctttgggcctgccccctgccccggaggccctgcccccctgtgggcttgtgggacccccctggccctgggcttccagggccccataaaaaggctttttttttta

SEQ ID NO: 581010 - DNA, 261 bp, Homo sapiens
tggcgaatgacctgtgtgttatcccaggagttggggatggaaggggagaaatcatcggctgtaagatcagatgagaatgaacatgggaacagcctacatcaagaattgtagttaccaaggcacgaaactactacagcaatgttctggtaacatggaacaagaagcaagtgctattatagtcgaggccaacatcgtacatcttctcctggttggtgtccacttgttacaaaatggggcacgatgctctaacccgaaagagta

SEQ ID NO: 581011 - DNA, 328 bp, Homo sapiens
caaaatgtgctctgatgttagcccaggaggtcaaagctgcaatgggcagtcagtccccaaaaacaagctggccagctgggcgtggtggctcacgcctgtaatcccagcacttttgggaagccgaggcggatgggtcacctgaggtcaggagtttgagaccagcctggccaacatgaagaaaccctgtctctactaaaaatacaaaaattagctgggcgtggcggtgggcgcctgtaatcccagctactcgggatgctgaggcatgagaatcgcttgaacccaggaggcagaggttgcagtgagctgagattgtgccattgcaccctag

SEQ ID NO: 581012 - DNA, 570 bp, Homo sapiens
tcattcacttaccattatctacaactatattttattctaatttataacagcataaatgattctacaatgtactttatcatctcaatcttcaacacggtggattccttttaattaaaaataataataataatcaatcttctccataaattgtcttagctctccatagcatacgttatataaaattagagttttgcttccaaaaatatgtttccatgtcgtcgtgcgtgtcgtccagcgctctgagggccaaagcaccaaagacatgagaagtttaaccatcgacttgtcatttttcataaaaactaaacatttccttataggtctggagtaaaatcttctaggcattttagtgctaaaagtcactttaaattaaatgtgaaataaaagctacaaaaagtatgagttctttcaatacaataagttgtgtagctgaagttgtgggctcctttgacatacataagcagtttcaacaaaatatttgctcaggtaagaaaatagaaatttgtctgctttcatttagcatacgttccagtcgatgtcctgcttatccctgccagaacttctgaagaa

SEQ ID NO: 581013 - DNA, 248 bp, Homo sapiens
acggaacgtcgcgcaagtcgacgatggataatcggcggtgctcgacgcgatatccagttgcgtatcgaaattttatgaaccgatgctcaggtttgaaactcgctttccccgaaccccatgacatccatcccgcagccccgtaaatcgccgcgccagcagggttcgaagcagaccgtggacaccattctgcaggccacggatcgcgtacgtgccgagcacggctaccgcgggaacaaacaccaacctga

SEQ ID NO: 581014 - DNA, 1441 bp, Homo sapiens
ggcagtgattggggccccaccatctatgtctggagccggggtaggaccccacaagccaaatctgagacctgctcccggaactgtaccaatcctgatggatgctactgctgccgtacgttggggcccaacccggaactctcctacggagacaactaatgagcgacctggctttctctggtatggagaaacaactggatcctgctgtattgaccccgagatgtccgtggagagggaacgacgcatcaacgagtactagtctaccaacaagtccgctgccccacgttccattgactccaagctcccacagtgcgtgatcatcgccggggttgggatcctatttccgcaaaaatcgttcaccaccaatagaacagcatcctagggtaggccatggagggcacttgctggacccgaccaagtccccatgtcatccgctggacactttgtgaacgcaagctcgctgtggcgcccacttgggcgacggggggctgtcccacagggaacgcggggaaggccctcgtaggccggagcgatacctcatactgtgcaaaagtccgtcggccttgagtttgccaatcgaaaaccgtggagactcaatggggcgatcgaccgggtaggcccctccattgtcgcacaaagtcccttcgtttgatccccaagtacccattcgaaatccccatcgactaacaaactagtgcgtcaagaatggctccacctttgagttgggtcaacatgcacctcgatgacccttgcgattcgcctgtcccaactcgacttttgcctcttggacgccgggagaccgcaagtgacttggccattccttcgctccccattggcccattggcgacccttaacgtggtacagaaagggataataatcccatatcccactgacgggacgaggaaagatgaatacaagtaggtgggacaaggtgcgtgggcctcagagttacccacgatgaaaatccgcttttgggcgatcgaaggtggtgcgccccatggtaacccccaaacaaatcccaggatcaaattgggagcgcatccgtttggcattgtgaacacaacttagcgcggagccgatacaaagcgcttgcgaacccacaagaccacacaatcccacaattgacggattcaattgatagcctgcccccgaacaaaagacacaaaggactaccagagatagcacggaacgaaaaaaaagcaaaaccacagggaacacgggaaagaaagagaagcgacaagcaagaggggggcaccgtgccaagcacagcgccgcggaaccggcggcgccccagggcgcacgggcccgacggtacaagcccagagaaaaccacggatggcacaccagcaagcgagaccgagggacacgagcaccggacacacacgggcgaacgacacgaagacagacagagcacacacgaacacgacagccaggagaaaacgag

SEQ ID NO: 581015 - DNA, 861 bp, Homo sapiens
caactaagggtgatttgtctcccaggtacagttggcaatgtctgaggtcatctgcaatcgtcacagctggagagtggtgctgacgtctgtgggtagaggccagggcatgctgcgaaactagcgcccatcatgcacaggacagtgcatcccccgccgcaaaaaataattattcaacccaaaatgctgttgagagaaaccctgcataaactgtgaaaatatccgtcttttcccctcatttctccatcgatctcgacccagaagctaagagacgtgattccaaagatgaagggagatagagctctgggagtcacgcagcgtataacaacactgctgtgtatttctacagcgaaattagttctcagtcgacggtaggtcatagtggcctcttctgaaaggtggggctggtgagcagcaactggagatgtcgtgagaaggacttacctaggaaggactgccctcagctgacccgagctcctagaggaaagcccgtatggtggctatctcgttgaacagctggctcgattcgcgaatctctagccatcccccttacccccgttagttctacgtgcggtcacaggaaaaggaaagcgtcttggctgctatcttcgtcaatgcggggaagccagaagtatctcagggctacctgttcgtatgcctttcctgtaagtctacaccatcgctatcatcaccacctctcaatgtactgaccttattcttcctttaaccagaagtgcatgtggaaacctcatacagaagcacgctacatgtgaccctggcttaccacgttccaagccagcagctaaccaccctagagaaactggcccacaaccatcgacgtccaactcgggtgtcaccggatgg

SEQ ID NO: 581016 - DNA, 254 bp, Homo sapiens
cgccaagggagtcgctgagcctaccgacaggaggtaaaaagtgtagtaccagcgggtacacaaacatacacaaagtagcaagtgtaacatgtcaccagagagggacaaaccacattctaaaaagagttaagacaacggagaaatcctttatgagggtaggtggcaccatggtttttattatgagcacagagtcttgctctgttgcgcaggctaggagtgcagaggtgcaacactcggttcaatgcaacgtttgc

SEQ ID NO: 581017 - DNA, 142 bp, Homo sapiens
tctagaggatccgtagataacgccattatagccattagagttctgcggagggctcggggatgccaccttggaaagaagccacgtagtccatagtctttgaaaataagtgtcactgctgtgcccaatccattgaaacttcagt

SEQ ID NO: 581018 - DNA, 223 bp, Homo sapiens
atggcagtgtgatcgagtgtctgagttcaacgtctccgggatacagagcgcacagaacccggctcaaagcaaagggtgctgataaagttacattttacacccgtaaagctgcattaaaagctcaaaatgctcttcacaacatgaaagtcctcccagggaatgcattacccctatacagatgaaacctgtctgcacagtgcagaagaacgaatgcgagtggaag

SEQ ID NO: 581019 - DNA, 1309 bp, Homo sapiens
  misc_feature (744)..(744): n is a, c, g, or t
  misc_feature (907)..(907): n is a, c, g, or t
  misc_feature (916)..(916): n is a, c, g, or t
caccggcgtcttccacccagtggcacacgctccaagtgtttcgccccgacccacgggggggcgccccccgcacagatgccgtggtccacccacacgccccggggttttccccaccgggttgcccacacacccggtttgggggtccccgcaaagcccgccttccgtctccaattatccctcccccggccttgtcgcccctggggagttcccccgccgccctggggaagagtccgcccttggtgctcttccctgggccactggtttttggagcccacgcccacgtggagtaatggtaatgaaccaacggaggaatgcccagaaaggcaaaagtgaagaggaaaaggcctcctctttaaaagaagagtgccgccccaagcgcccccccccctagagcgcgcgccccacacaaggtggcccacacacaaggcaatgggcacaagccaaattccctgctcgtcttgtcgcggtcgcgtgcgcggtcgtgtccccaggccagtggaatatcttggagcgctgtggatatacccgggccccctggggaccccgttcgccctccaaagttctgtccacccacgatatctttgcgtgcttcgccccatcccaagactttccagaatagccccaatagtttgtgacatggggggggaatagtttagcgccactttgtggcgctcccccaacgcgcccgtatcgcgtctcacacccctgagagcccctcacacccgcctgtcctgttttgagagncccccctgagagtgtgcctataggggggagaatatgtggagaagagaggagatttcgtccacctggcgcctgcgcgcacatctctttgtgtttgtcctgtctctctgggttatgagatcacataatatagctataatgagaattatggccacagcgggagagnctatatttntgttgagaagagatgagatgagaactataaatgtttgagaagaccacacggtttgaggagatctgtataaaatggtgaattttttaacgttccaccctataaataacttgtgaattggggagggtttgtggagaaattcacaattattgatggaaaacctatcttttttgtaaatgttggcactaacttggggagaatttaagtggcacaatacacttccccacgcacggcctctttgttggttgcacctaactgccaggttgctgggaaatagagtccacatttggttgatgaggctttgagctgcggttttggaaccctacctctcctccttagccccatatgctgttcttgggtcctattccaaataaagttattttctcctggtttcca

SEQ ID NO: 581020 - DNA, 1026 bp, Homo sapiens
  misc_feature (1)..(1): n is a, c, g, or t
  misc_feature (64)..(64): n is a, c, g, or t
  misc_feature (72)..(72): n is a, c, g, or t
  misc_feature (100)..(100): n is a, c, g, or t
  misc_feature (152)..(152): n is a, c, g, or t
  misc_feature (170)..(170): n is a, c, g, or t
  misc_feature (176)..(176): n is a, c, g, or t
  misc_feature (186)..(187): n is a, c, g, or t
  misc_feature (190)..(191): n is a, c, g, or t
  misc_feature (197)..(197): n is a, c, g, or t
  misc_feature (200)..(200): n is a, c, g, or t
  misc_feature (227)..(227): n is a, c, g, or t
  misc_feature (291)..(291): n is a, c, g, or t
  misc_feature (322)..(322): n is a, c, g, or t
  misc_feature (334)..(334): n is a, c, g, or t
  misc_feature (337)..(337): n is a, c, g, or t
  misc_feature (342)..(342): n is a, c, g, or t
  misc_feature (344)..(344): n is a, c, g, or t
  misc_feature (348)..(348): n is a, c, g, or t
  misc_feature (360)..(360): n is a, c, g, or t
  misc_feature (412)..(412): n is a, c, g, or t
  misc_feature (422)..(422): n is a, c, g, or t
  misc_feature (441)..(441): n is a, c, g, or t
  misc_feature (473)..(473): n is a, c, g, or t
  misc_feature (477)..(477): n is a, c, g, or t
  misc_feature (482)..(482): n is a, c, g, or t
  misc_feature (494)..(494): n is a, c, g, or t
  misc_feature (497)..(497): n is a, c, g, or t
  misc_feature (503)..(503): n is a, c, g, or t
  misc_feature (519)..(519): n is a, c, g, or t
  misc_feature (548)..(548): n is a, c, g, or t
  misc_feature (554)..(554): n is a, c, g, or t
  misc_feature (579)..(579): n is a, c, g, or t
  misc_feature (600)..(600): n is a, c, g, or t
  misc_feature (606)..(607): n is a, c, g, or t
  misc_feature (610)..(610): n is a, c, g, or t
  misc_feature (614)..(614): n is a, c, g, or t
  misc_feature (645)..(645): n is a, c, g, or t
  misc_feature (655)..(655): n is a, c, g, or t
  misc_feature (767)..(767): n is a, c, g, or t
  misc_feature (801)..(801): n is a, c, g, or t
  misc_feature (856)..(856): n is a, c, g, or t
  misc_feature (903)..(903): n is a, c, g, or t
  misc_feature (1024)..(1024): n is a, c, g, or t
ntttcctggcggagaggtcagtgcatcgagttctgtttccgtggaaaatgtgcaccttggaaancgcatganagccccctcggcagggtccccgcggatncgccgcgaagcaggcacagcagcaagttcctccagcacgaagctggcctgcncgggcccaggtgtgaggnactgtnctgctcccannagnncccgcngangcttccctctgcggtctcggcgcaacntctgtccctggccgccctcggagccgtgcccagcctggcatgcatatgcggtggttaaggatanagttaaagggtcaattacgcgtgttcacganagagacgcacgnggnctcanancgantcctcggtgganagcaataatgggttgatatactcaaagccttcgaactctgactggtcgatcntctttatggnatcctcatcgtctggggtnagctgcacgggctcgctggtgaactgtgtgtnaaanttgtncagaccgtagtngtntgtganctgtggctggaatggngggagcgcctgcttcttctccagcaagtnccagtntatgctgcggaagaacgcgtggganttgatgtcagaaaatccagtntgtggnnggnagcngagcatctctttggggtcttatttaaaaatncttttaaaanatgggaggctttgacggacaggaaccgggggatccggatgggcttctccaggatcacttggaaaaggtagtcctctgtgttcatgtccgggttgtcggtgatgatgtcgaanggggagcgcccggccatcatctcaaacatgaggnctcccagcgcccaccagtccacgctgaacccgtactcctctccccgcagattttngggggcgatgtaattcggggttcgcagaaagtgctcgttgtgtcacnagggcccaggccttccttgcacatgccgtagtctgtgagcttgatgtgcccgtccgcatccaggaggacgttgttcagcttcaggtcctgtagatgatcccctctcgtgcaggaagttgangg

SEQ ID NO: 581021 - DNA, 878 bp, Homo sapiens
cgtagtggctcatgcctgtaatcccaacacttgggaggctgagatgggaggatcacttgagctgagttcaagaccagcctgggcaacacagataaaccccatctctactaacattaaaaaaaaaaaaaaaatcagcgggggttgggtacgcacatccctgtagtcccacctacttgggaggggtggggctgaacatgggaggatcaactggagcccaagaaggtaaaggctgcagtggagccctgattggtcgccactggcaactccaagcagtgggcgtgcacaagacagcaaggcccaatatcgcaggttgcagaactcggatggaatcaagtcttccatggcggtagagcctgggctatcattattcgggggtaaaactccctttggaagtgggctctaaatggtgtacccaggattgcagaaccattggcgttaaataacgcgaaagacattgggtggggcacgggggctcacgcctggtaatcccagacatttggtggaggccgaggtggggcagatcatctgaggtccaagagttccaaacaccagctggacccaactaggggcagaacccctggtctctaagtaaaaatatccaacaatcacgccaggccttgttggggcaacactagccctgggtaaattcccccaagaccaaacctcccggaaaggccttggaaggcgcagggacaaacattcgggttggggcaccccctggaagaagagctcgcaaggttgaggacgtaaccgggaccaagggagattccaggcccccagtaacagagttcacaggacccaaggggcaacacaagagagcgaaaactgtcaccgaggctccacaacaagaagcgacagcgcagacagcaagcacacaa

SEQ ID NO: 581022 - DNA, 304 bp, Homo sapiens
  misc_feature (36)..(36): n is a, c, g, or t
  misc_feature (42)..(42): n is a, c, g, or t
aggacccggaatgtgtggtgttatgcgtcaagctgncggagnactgttgtgctgctgctactgctggaatcaagtgacgatttggggttgttcccctccttagaaaatgctgaaactctggaatcaacctctactcaataaacccagaaaatcccagaaagcttttctaaaatcactgacccccgaaaatcacccctttgaggatctacgctattccccaaggctctgcactgccattgaatagaaccctccaaaactctactcgaaactctgccataacaccacacattcagggtcctgctag

SEQ ID NO: 581023 - DNA, 290 bp, Homo sapiens
acattgccattatcctgcgtctgttttctctgtgacatgaagcaacagaaactgatactacaaacaggatataatcttaactttgatctcaggtttctgttgcttcatgtcacagagacaaacagagatcaaagttaagattatatcctgttgtcgtatcagatataaaactgtgtacaattataggatgtcatctaacactggaacatttttaggcagtacagtcaccacaaacatgtgttagataagacacacagtaaaatcattataactaaaagcttaaaaaaaaa

SEQ ID NO: 581024 - DNA, 272 bp, Homo sapiens
gtacccccatgtttggcccgcaacgtggtcggcatcatcctgaccgtgctggtgggccgctacgccatcgtcgccctcaatcgctacctggaaaaacagaagcagaccgaagcgctgcccgatatcgagcggcgcaaggaactcagctacgacacggcgctggcgcggctggccaagaaggtctgccccggttgcgagcggtcggttgatctgaccaatacggccattgattactgcccgcactgcggtatttgcctgtttgaccacgtgcg

SEQ ID NO: 581025 - DNA, 353 bp, Homo sapiens
gctgacctagaggacccgcgttatccgtacaggaagtctcttaccccactgcacatacctctgttttaaagataagtccactaactgtgagtaaaatgatatatataggccattaaccacaaactttaattggtattaatttccttggttgcctccccttcctcagcccattaggttaaacaccaaaaaaagactggtgtgtactgaataggaaaggggaaagtttattttgggacccttctaaagaggaaatcaaccaggaccaaagagcctttaaaggaacacaacagcaaatggcacaggcaacttcccttccccagcttgagttgccctaaggtggatttcttcaaagc

SEQ ID NO: 581026 - DNA, 260 bp, Homo sapiens
tggtgttaccgtcttacaccacagtcacagcacgcagatccgagctgcatctgcaactacaccacagctcagggcaatgccagatccctgacgcattgaccgagtgcaggaatcaaacccacattctcagatactagtctgattcttttctgctgcaccacaacaggaacttcctataatcccaaaattttggtaagaaagtccatttgctattttcctgactttttagaataatcatgataacagtatttaaaatctac

SEQ ID NO: 581027 - DNA, 759 bp, Homo sapiens
gtatgtacatatatatatatttagatgaagtctcgctgtgtcacccaggctgtagagcgcagtggcgcaatcacggctcactgcagccttgaactcctggactcagcctcctggctcaacctcccaaagtgctgggattactcttgagccagtttgaaatgaggaatcccttttcaaaaccatctttcaggctgacaggatggctcatgcctggaacctcagcacttgggaggttgaggcaggaggatggttgagcccaggagttcaaggctgcaatgagctatggatgtgcgccactggactccatccgtgggtgacaaagtgagaaacccctgtctcaaacaaacaaaaacaaaaaaataacaaaaacatttttgggggcggcgctgggccccgagaaaaattttttaaacccactctgttggggggcgggggcccaatgagggaaaagggaaatctggggcaaagggggtgtccaaaaagaaaaccctgcgggacaggacgacgcgaggtcgagagttcccacccaaagataaaaaaaaagcggccgggagagaagacccgggacggtttttgagaaacacaaacccaccagaggagagagatcaagaagggccaaacagcgggggtccacacacccagggggcgcccaagaggacgtcagaataaaataagcgccgcgacgggtgaggagcacaagaaacggacagagacagcgagcagaaaagaagaaggagcacgcgacaagatcgaagcatg

SEQ ID NO: 581028 - DNA, 431 bp, Homo sapiens
tcatacacgactatatcaaatcgctggccagtaccagctctacctaatgcgtccaggagcgatggtatataggcctcaacatcctgaggaggagaactatgcatcaccaggtccattacaggcatgtccacaccacgggcagacaccttggttgccagcaaaactttaaaactaccttctactgaagccttataacgtgtactttctactattgtgactgtgcaatgtccccatgtaaagactgggcatactgttatatgtgtggattcatggccatttcagttacattcttctctggtctcacagaaaataatagccctcccttcagagcccactgtagacttgaaggacaatctccaataactgctggcctcatagaccaatgacacattgatggacaaatgttccacagtagttgcagccttttgcgt

SEQ ID NO: 581029 - DNA, 583 bp, Homo sapiens
caaccaggcaaaggggctatgtgatagaataatcaggagagactctaacaagcactagtaagatacagctaaattcttcacagtacacaagacccatcaataatgtagtatagagaccaaaaggtcaagagagataaaatacataactgatgtgtggattaattcacgttcaagcatctacatgtgtaacagcacagctgatcaccaggcgataatgagtaaatcgtacaacgggttagtttcttcccacattattctataaatggacaccgatgggtagtgaagcaatggtttcgcagtccaacttcagaggctgctgtggcgggggtctagtactgcatctgctcaaagaactagtcggtaggattatcgtagccgttctgctgcatcttggacaggtggcgcacctctggggtgacagcggcgtcaacctccaccacaccatgatgcatggatgtgtactgtttcttcttcagcatcaccaatgtgatgacgatcactgtcgctatgacaacaccgaccaccatgagtccaatgattgcacctttgtttgaacccacatcttctgcaaagaacacaattt

SEQ ID NO: 581030 - DNA, 1001 bp, Homo sapiens
  misc_feature (12)..(12): n is a, c, g, or t
  misc_feature (56)..(56): n is a, c, g, or t
  misc_feature (128)..(128): n is a, c, g, or t
  misc_feature (188)..(188): n is a, c, g, or t
  misc_feature (191)..(191): n is a, c, g, or t
  misc_feature (266)..(266): n is a, c, g, or t
  misc_feature (282)..(282): n is a, c, g, or t
  misc_feature (288)..(288): n is a, c, g, or t
  misc_feature (300)..(300): n is a, c, g, or t
  misc_feature (397)..(397): n is a, c, g, or t
  misc_feature (434)..(434): n is a, c, g, or t
  misc_feature (484)..(484): n is a, c, g, or t
  misc_feature (487)..(487): n is a, c, g, or t
  misc_feature (501)..(501): n is a, c, g, or t
  misc_feature (513)..(513): n is a, c, g, or t
  misc_feature (519)..(519): n is a, c, g, or t
  misc_feature (530)..(530): n is a, c, g, or t
  misc_feature (535)..(535): n is a, c, g, or t
  misc_feature (568)..(568): n is a, c, g, or t
  misc_feature (574)..(575): n is a, c, g, or t
  misc_feature (590)..(590): n is a, c, g, or t
  misc_feature (597)..(597): n is a, c, g, or t
  misc_feature (607)..(607): n is a, c, g, or t
  misc_feature (612)..(612): n is a, c, g, or t
  misc_feature (618)..(618): n is a, c, g, or t
  misc_feature (625)..(625): n is a, c, g, or t
  misc_feature (636)..(636): n is a, c, g, or t
  misc_feature (641)..(641): n is a, c, g, or t
  misc_feature (663)..(663): n is a, c, g, or t
  misc_feature (675)..(675): n is a, c, g, or t
  misc_feature (683)..(683): n is a, c, g, or t
  misc_feature (689)..(689): n is a, c, g, or t
  misc_feature (692)..(692): n is a, c, g, or t
  misc_feature (694)..(694): n is a, c, g, or t
  misc_feature (703)..(703): n is a, c, g, or t
  misc_feature (747)..(747): n is a, c, g, or t
  misc_feature (758)..(758): n is a, c, g, or t
  misc_feature (768)..(768): n is a, c, g, or t
  misc_feature (790)..(790): n is a, c, g, or t
  misc_feature (799)..(799): n is a, c, g, or t
  misc_feature (811)..(811): n is a, c, g, or t
  misc_feature (828)..(828): n is a, c, g, or t
  misc_feature (839)..(839): n is a, c, g, or t
  misc_feature (856)..(856): n is a, c, g, or t
  misc_feature (878)..(878): n is a, c, g, or t
  misc_feature (880)..(880): n is a, c, g, or t
  misc_feature (901)..(901): n is a, c, g, or t
  misc_feature (904)..(904): n is a, c, g, or t
  misc_feature (911)..(911): n is a, c, g, or t
  misc_feature (934)..(934): n is a, c, g, or t
  misc_feature (949)..(949): n is a, c, g, or t
gtggtgagcgcntcgaggatgaggaggtgaaacagcggctccgggccgccgccgtngctgctgctgctgctgctgtggctgctcgcggttcccggcgctaacgcggccccgcggtcggcgctctattngccttccgacccgctgacgctgctgcaggcggacacggtgcgcgggcgcggtgcgtgggntcncgcagcgccatgggccgtggagttcttcgcctcctggtgcggccactgcatcgccttcgccccgacgtggaaggngctggccgaagacgtnaaagcntggaggccggcnctgtatctcgccgccctggtacgtgtgctgcaggagaccaacagtgctagtctgcagagacttcaacatccctggcttcccgactgtgaggttcttnaaggcctttaccaagaacggctcgggagcagtatttncagtggctggtgctgacgtgacagtactgctgtcgtggagaggctcattngangcccctgtgagtanccatacataganacgtgngccccccagcnctgtncccccactgggagcctggctcaagctgggaggnagattnnatgggattcttttgncgagaanataaacgaangagtnacctgngctctgnatcttttgaanaaggngagagctccttacctcgcggtnagaggagtgtgngctctagngacctngtncnccagccacnaaagggcggtgggcgggtggcgcaggggttgctggaacgacagnaggcccaatgntggttggagnaaagtttggttgtgcaccgacnttccccctnctttgctcaccngctagttcccgggaatnggctcttgtgntcccggagttccccgtngctcatgggaatcccaggtccntnctataaccgctttacctgcanganactctcntggggctcaccaggggaggctgncccaggaccacagtncgccccaaccactgctgaacaagatagctcccactggtttgggaaattgggg

SEQ ID NO: 581031 - DNA, 626 bp, Homo sapiens
  misc_feature (191)..(191): n is a, c, g, or t
  misc_feature (222)..(222): n is a, c, g, or t
  misc_feature (241)..(241): n is a, c, g, or t
  misc_feature (563)..(563): n is a, c, g, or t
  misc_feature (586)..(586): n is a, c, g, or t
ccacttccacacacctgctgcgcttctggcagcagccactacctgcaccaggacacaggaccaccacctgcctagagaccagctcctgcatcagacttctcataactggaaggagaccagtgtcccaacccgtgtgaaccccggaccggccagtcaccctctgctctccattagctctgtgtgagctcctnccggtttcttggctgtcagtcagtcccagantggggaggaagatatgggngacccccaccccccatctgtgagccaagcctcccttgtccctggcctttggacccaggcaaaggcttctgagccctgggcaggggtggtgggtaccagagaatgctgccttcccccaagcctgcccctctgcctcattttcctgtagctcctctggttctgtttgctcattggctgctgtgttcatccaagggggttctcccagaagtgaggggcctttccctccatcccttgaggcacggggcagctgtgcctgccctgcctttgcctgaggcaaccgctcctgcctgagcctggacatggggcccttccttgtgttgccnatttattaacagcaaataaaccnattaaatggagactattaaataactttattttaaaaatga

SEQ ID NO: 581032 - DNA, 606 bp, Homo sapiens
  misc_feature (9)..(9): n is a, c, g, or t
  misc_feature (17)..(17): n is a, c, g, or t
  misc_feature (102)..(102): n is a, c, g, or t
  misc_feature (501)..(501): n is a, c, g, or t
  misc_feature (598)..(598): n is a, c, g, or t
ttgttaatncaatagtnggtattatacacagtttttaggttaatccttcattctcagtatgtcttaagacctatgcctttacctcaggctcagtttttttantgaattaacagtatttcattggatatacatgccataatttatttaaactagtaattaggatatttttagtatttttcaattgctaaccttgtaacactgattgttctatccgcttcatttggggtcattttgtatttcatcatctttgaagaaggagtaaggaaatttttctggccttcctattccccattcctaaattaaaggcaaaaaaacctttgtcagtatcaaggctcaatttctctcacgcctgtaatcccagcactttgggaggccgaggcgggcagatcacgaggtcaggagatcgagaccatcctggctaacacggtgaagccccgtctctactaaaaatacaaaaaattagccgggcgtggtagcgggcgcctgtagtcccagctactngggaggctgaggcaggagaatggcgtgaacccgggaggcggagcttgcagtgagccgagatcgcgccactgcactccagcctgggcgacagagcganctccgtct

SEQ ID NO: 581033 - DNA, 618 bp, Homo sapiens
  misc_feature (17)..(17): n is a, c, g, or t
  misc_feature (59)..(59): n is a, c, g, or t
  misc_feature (71)..(71): n is a, c, g, or t
  misc_feature (75)..(75): n is a, c, g, or t
  misc_feature (114)..(114): n is a, c, g, or t
  misc_feature (183)..(183): n is a, c, g, or t
  misc_feature (214)..(214): n is a, c, g, or t
  misc_feature (233)..(233): n is a, c, g, or t
  misc_feature (555)..(555): n is a, c, g, or t
  misc_feature (578)..(578): n is a, c, g, or t
cttggtgggagggaagncctagaagcccctcgccccccctgggcctgaggcccctaggncatggagagccncagnccccataatgaggacagggtaccatgcccacctggccgncagaacccgggggcccagggccacccagaggtaagaggacatttagcattagctctgtgtgagctcctnccggtttcttggctgtcagtcagtcccagantggggaggaagatatgggngacccccaccccccatctgtgagccaagcctcccttgtccctggcctttggacccaggcaaaggcttctgagccctgggcaggggtggtgggtaccagagaatgctgccttcccccaagcctgcccctctgcctcattttcctgtagctcctctggttctgtttgctcattggctgctgtgttcatccaagggggttctcccagaagtgaggggcctttccctccatcccttgaggcacggggcagctgtgcctgccctgcctttgcctgaggcaaccgctcctgcctgagcctggacatggggcccttccttgtgttgccnatttattaacagcaaataaaccnattaaatggagactattaaataactttattttaaaaatga

SEQ ID NO: 581034 - DNA, 135 bp, Homo sapiens
ataaatgtcactgaaaatcagatgcaacactaacttgcaaggattcccacatcataaaaaagaagtgatgcttacatgtgctggccgtggacgatgtggaaaaactgaagcgtatacagcgctgttgtcagaaca

SEQ ID NO: 581035 - DNA, 477 bp, Homo sapiens
aattagctggatgtggtgctaatttcaaggagagctgcttgaacccaggaggcggaggtcgcagtgagccaagattgcgccactgcactccagccttggcgacagaggaagacttcttctcaaacaaaacaaaacaaaacaaaacaaaacaaaacaaacaaacaaacaccaacaagaaaaaataaagagcacagctgtgcgtggttgctcacgcctgtaatcccagcattttgggaggcccaggcgggcagatcagaaggtcaggagtttgagaccaccctggccaatatggtaaaatcccatctctgctaaaaataaaaaaaaaattagctgggcatggttgcgcaagcctgtaatcccagctactcaggaggctgaggcaggagaattgcttgaacccgggaggtagaggttgcattgagccaagattgtgccactacacgccagcctgggtgacagagcgagactccgtctcaa

SEQ ID NO: 581036 - DNA, 267 bp, Homo sapiens
tgcttgaggatcccctccctagatgaggaattgcccagatcacacgtacttgcgtcctcgctctccagaaggttccggtatgtggcaatctcgtctccaagcgggcttcacgtccagcagcacctggtactcctggttcttgcgatccaggtcggcccggatctcagacaactggtcttccaagttgctaatgaggctctgcatctggggccagctctgtgccgtagcggtcctccgctttcacacagggagttctgcagacagttt

SEQ ID NO: 581037 - DNA, 102 bp, Homo sapiens
tggatattatcggaatagcatctgtaaactgaagtgtagacctctgttttcttctctcctctatcatctgttatctgattcggttggctgggtcgtgacaga

SEQ ID NO: 581038 - DNA, 353 bp, Homo sapiens
cgcacaacgggtgatagcgataaccacgatgcatctccttcgaacccaggccattctccgatgcgaccgcccaggaaccgaggaaccggtagcgttcccggtagtcgctcggcacgcggatattgccggattcatccacaagctgcggcttcttttggtctatcggctgagcggaaggctgactcagcaatcccgccgacgtggccagcagcgtcaatgcgccagagacatggagcagatagcgacgatacatatcgtatctccacacagtatacgatctaactaatcgtccaatcgcggatagaactgtgtacagacttcatctttctttgctggggcagtacggcgcccaa

SEQ ID NO: 581039 - DNA, 674 bp, Homo sapiens
gacaaacttatgataaagtatttgtcttgtagatcaggtgttagttggttttttaatgttaaaatgcaagcctgccccctccccagcaaagtcacagctccatttcagtaaaggttggagtcaatatgctctggttggcaggcaaccctgtagtcatggagaaaggtatttcaaggatctagtccaatctttttctagagaaaaagataatctgaagctcacaaagatgaagtgacttcctcaaaatcacatggttcaggacagaaacaagattaaaacctggatccacagactgtgcgcctcagaaggaataatcggtaaattaacgaatttgctactcgaagtgtgccagaatgacacacaaggacagaattcctttcccagttgttaccctaagcaaggctagggagggcatgaacacaaaacataaagaaaccttggtcttctaacacttttctctgaatcatttaggtttacagactgtacagtgaacaattcttatcttatcttggccaagaaacacaagttttggatgaagcttttatactagtgggaacttactcccaacagggacttgagggacccaaggaaaaccctgatggcgggacggcagagcaggtgccaagagtaaaaactgtagccatacgctttagtacacgtgtcactaggctgac

SEQ ID NO: 581040 - DNA, 1387 bp, Homo sapiens
cttgctctcttccatcttcttcttctcctcctcatcctcaggcagctccagaccctccttggtaactagagagcaggctcttacccaaggagggtctggagctgactgaggatgaggccgagaagcaacaagatggcagcacgagcacggccaagcccgcgcaccaacctacgtgacaagcgtcactgacagaactcgcagacaagcaacggcgacgaagcgcgaccactcccaccacagtaaaacccgcagcccccacactcgcacgccactgcccacacaagacaactatcgcgcgccaccagccactaatgggagcgcgatacaagaacagccgcagcgcaacttcagcgagaacacacaccaccgaagcagcctatatgaatgcgacgaaaaagaccaacatggcagaatcaacacactggacccaagcaccaacatcgaaggaagacgcatccgccgccagaagggcctagcaggccagaaacaacggacaatacagctcaacgagacacagaacaacacgcgcaccctcgcggccgcgctgcgcatagcccggcaaccagcaagcaaccccgcgcacctaggcaagacaccaaccagcgcggagagcacaaacacaccaccatgtcgcacagcagaccacaccagcacgcacacgccggagcacaaccaagccacgacagttcaaacatcaggcacatagagaccaccaagcactacaagaccaaccaacaggcatccgagtgaaggcacaagagcacacaggaaaaagcgcacacgacagcggccccaggcacacagcaactgccaaagaacccaacaagcggaggctgcaacaacacacacacagcacaagggccagcaacgacacacacccacaccgagaaccgagacgaccccacgcaaacacacaggacaattagccgagatattcgaacaccaagagcagcggacaacacccacacagccaaaggctacacaacaaccacgaaccagacacagacgcccacaaacccagacgcatggaacccgaagggacataaccagagacaaccaaacaagagagcaagccaccccactcgacgagccacaacaacacccggcccacccacatccgcgtaccccacaccatcgccaaagcagcacaagatagccagacaacgccgcaccagcgaaccaccagccacaaacaggcacaacgacaaacagaactaggacagcaacactcacaacgcaagacaacccacacaccaaacacaaccaacaaacgattgagacagcccaaccactcaccgacagaaccgccaaagacgcatgccccacaagaccgaaaccccccataccagaacagcaaacaccacacccactgacacgcgcgacaacg

SEQ ID NO: 581041 - DNA, 850 bp, Homo sapiens
ttcaatgcccaaacaatgcaccaacgggccccttccagaaattctttccattcggggacctttggtgcccccccccaattttcctttcaaacggggtttttttacaacaaaaatatatacacaagatattcctccgcgttctgttccccaccgccactcaatacgcgtgctttactattctatataaggagacacaataaaatatctcctcttactgtcaaaaattgccccctccaccctctttcccaggtatacaatatgaataatagaacgcgtcttattaagacttacagacgaccaccccatcgaatgcgggttataacaccggttctcgctcaaatcgccccctagcaacatttcatatcattgcctggggagaaaaaaaaaagttacattggtatttatgattaaaatatctctctctctatcaacactctccccgatatggttggatccctctctcatccaacccttttcccccgccccctttcccgttgtaacaatgtcgaccacaactgatacacactggggatcatatcacgccacctggtctatcaaaattgtctcgcgttcgatctcaatagactaaacacatcacgcaggtaggagaattctggtaaacacgattcatggtaagacttctcctaaaacggttgtaaaaccagttggtggttcaccccccgcacgaagtttcggtccggaacaataagacgatctgtttcccctggagaagggtgtcgctccgccaggtcgacggcacgtggttatattactaggggagcggtggcattgttaatacaacccccgccgtcccctccacaattacacgcccaacctggcgcccaaaaca

SEQ ID NO: 581042 - DNA, 194 bp, Homo sapiens
  misc_feature (25)..(25): n is a, c, g, or t
  misc_feature (50)..(50): n is a, c, g, or t
  misc_feature (95)..(95): n is a, c, g, or t
  misc_feature (110)..(110): n is a, c, g, or t
gatcgaaccactgcactccagcctnggtgacagagagagacactgccttngaaaaaaaaagaatctcactcactatctagagaggattgtcagantattcacgattcagntcttgaaactttgattatgcaaaagaggtatatataaatatttcattatgattcaggttttaggctttgcagcttctataaggt

SEQ ID NO: 581043 - DNA, 286 bp, Homo sapiens
tgtggggctgggacgaggatcctcaaaaccctgctatctccttacttataagttgtgattctctagccctcctctactacaagaagaagaggataaagtacggcatttcttggaggacaagaggcagaatgatatgatcagactaatttctcaatagcaccacaagaagacaccaaaacgaagtatgctgctgagtaagaagaagagggtgtgtcatgctgctaatgccagggcctgtcactttccaaggtgaccgtctatcaggaccatgcctttattatatata

SEQ ID NO: 581044 - DNA, 439 bp, Homo sapiens
ggacttgttaccaggggtacacctatagagtctctgagtgaatggaccagatgaggtgtctaccacgactgtgtgaatcactactagagagcctacatagggccacaggactgatacgcaccatagcaatgagaggatacaatacgagctaatcctatgaggttgtaagcaccatccgtaaagatcagacaataacttccatgtaaatcttacctgcatgtcgatgtgtaaactgccattgatggagctcatacctgctgtttacataaagtgttgtacagctgttaataaatattatcagaaagcttatggcccacaagcctgataagactgacttacaatcttataccagtgaattttgacatctaacttacctgcaaagacctcggggataccatgctgtccgtttgaccacagctacattgtctgctgtggccct

SEQ ID NO: 581045 - DNA, 217 bp, Homo sapiens
tcctttaaatccaagcagtcggttccccagagtgtgatgttccccttcctgtgtccatgtgttctcattgttcagttcccacctatgagtgagaatatgtggtgtttggttatttgttcttgtgatagtttactgagaatgatgatttccaatttcatccaggtccctacaaaggacatgaactcatcattttttacgactgcttggattacaagga

SEQ ID NO: 581046 - DNA, 275 bp, Homo sapiens
  misc_feature (12)..(12): n is a, c, g, or t
  misc_feature (68)..(68): n is a, c, g, or t
  misc_feature (75)..(75): n is a, c, g, or t
  misc_feature (95)..(95): n is a, c, g, or t
  misc_feature (128)..(128): n is a, c, g, or t
gcagagactgtnccactgcacttcagcctgggcaacagaacaagaccctgtttcaaaatagatataantagagantgagagagcacgagcctgtntgatctggagcttcaactagatgattttttttnatgttcaaagagttattactggccagatgcagtggttcacacctgtaatcctagtactttgggaggccaagatgggtggatcgcttgagctcaggagttcaagaccagcctgggcaacatagcgagaccccccatctctgtttttta

SEQ ID NO: 581047 - DNA, 236 bp, Homo sapiens
ggccccccgggcccaaaaaggaccagggcaaaagcattaagccccccccttggcagggaaaaaggcaattttgggcccttggccaccatgtggaggggagaaaattctccccctggggttggaacatcctggggggaccccccacccacccccgttggggtgtcccctgtccctttttttccctttgggcccaggggggacatcctaaaaaaaaaactgttgggttagaaccccca

SEQ ID NO: 581048 - DNA, 434 bp, Homo sapiens
gttcctccagttgttatagcaggatctcagacgtccctctgccgatgataaaagctaagacagctgtcctcccacagctctcagctggggacctgtgtcccgtgtcccctcagtccagtacatgcttcatgatcaacggtccatggctgtagcgctcagaacagctacccctctcagggctccagaccggagctcgttgagcgagccagcgctgctcagcaggatgcggtccgcattcatcattacgcccaggcagcctatcggggagtgtggctgacttaaggggctacgtctgctcggagcagagcctggttctaagcggggcgcagcgcgtcagtccgagcatgcaggtgcgctggctggctcgtgcgccccgtacctagactgtggtttgagggtaccgcggaatccagcgtctgagcacacagtcgtag

SEQ ID NO: 581049 - DNA, 193 bp, Homo sapiens
agcagcgcagccaacataatttgaattcgatatgacgtcaaattggatttatacgcaggccgatccggtcatcggagtacatcggcaatatgcctcgaaggaaattcgcaaaggcacggtctttgttaacgcgtcacgctggagctctcccgagaccgataagttgatggatgcggcatcgagcgaaattcgc

SEQ ID NO: 581050 - DNA, 343 bp, Homo sapiens
tctggagacagaatctggctggtggtcacccaagctagagtgcaggggcgccatctcggctcactcccgggttcaagcgattctccggcctcagctggggagatagagatggcagtgagccaagatggtgccacggcactccagccggactaattttggtatttttagtaggcacagggtttcaccaggttgggccaggcgggtcgggaactccggacttcgagtgatccaggtgcctcggcctcccaaaaggcggggataaaagacgtgagccaccatgccgggccccacggttacttttattactacctagactacactggtggaaagggtcgccaatcgg

SEQ ID NO: 581051 - DNA, 156 bp, Homo sapiens
atattatttagatatacggcccttgatacgtatccatacgtctacgctcacaccccagttcttacaacagggttctgtcctgattctcaactcaggctctagatcgattatctctctaaagttcctctctcacacagatctgaacatgttaaattt

SEQ ID NO: 581052 - DNA, 113 bp, Homo sapiens
gagattgagtgaccgagacggcaagagagacagagagaccgacggggagacagagagacacgacggaggcgacagaggagagaccgcagaaagagagtgttggagacacgaga

SEQ ID NO: 581053 - DNA, 608 bp, Homo sapiens
  misc_feature (250)..(250): n is a, c, g, or t
  misc_feature (252)..(252): n is a, c, g, or t
  misc_feature (275)..(275): n is a, c, g, or t
  misc_feature (380)..(380): n is a, c, g, or t
  misc_feature (388)..(388): n is a, c, g, or t
aaaaagcaatcttggcccaccttaatccattaaacgtgagttgcccaggacaggtccaaaatctaagtcaagaccaaattgaggtctccaatgccaactcctttatacccagccccagtacattctgatcgctcttcctttccccaccattcccccttttcctttgaccaaatccgccatcgtcatcaagggccggtctcgatgggtgctgtctcttggaactgttgggtacacctccaagatgggcgancngggtagaggcgctcttctcttcncagacagggtggtggggcagaggcactcctcacatcccagacgatgggtggctgggcagaggcgctcctcacttcccagacggggtgccggggcagaggtgctcnccacttcncagatgatgggcggccgggcagaggcactccccacatcccagatggggtggccgggcagaggcgctcctcacttcccagacagggcggcggggcagaggcgcttctcacatcccagacgatgggtggccgggcagaaacgctcctcacttcccagacggggcggccaggcagagacgctcctcacttcccagatggtgcggctgggcagaggcactcccc

SEQ ID NO: 581054 - DNA, 152 bp, Homo sapiens
ggcggcctactctcttatggggctctaaaaggtattttatatgttctttttaacaaatatgtgtacacctttaaaacatcaatgtgtggatcaaaacaagacccagcttattttctgctgctgtaaattaagcaaacatgctataataaaaa

SEQ ID NO: 581055 - DNA, 232 bp, Homo sapiens
  misc_feature (17)..(17): n is a, c, g, or t
  misc_feature (25)..(25): n is a, c, g, or t
  misc_feature (32)..(32): n is a, c, g, or t
  misc_feature (35)..(35): n is a, c, g, or t
  misc_feature (148)..(148): n is a, c, g, or t
gcttagtagtaccaatntcgaccgngcttgtncgnccaactcaccctccaaattcccgccctggtgtccctgctcaggaatttctgcaacacgctgctcaaacctgaatttgacaaaatttcaaagcgctgtatctttatgttgatcngacaacggataaagtgccatacttggattctagatcactcactgttgcctgtcgctgagtccacttatgaaaaaaaaaaatctc

SEQ ID NO: 581056 - DNA, 138 bp, Homo sapiens
tcttaaagatgcttttttcactattccctgcaccctcgtcccagcctctcttcactttcaccctgacaccctttaggctcagcaaattacctgggctgtactgctgcaaagcttcacagacagcccccattacttcaa

SEQ ID NO: 581057 - DNA, 212 bp, Homo sapiens
aactcaccgcgtaatagatagggctcaggcgttgtgtatgatatgtttgcggtttcgatgattgttctttggagtatacacctgctgaggaaaggtattcctgctactgctaggctgtcaatggtgaggcaggttgaagtgagaggtatggcttttgagtagtcccccttgatgaaaagaactatgctcggtcctggccattatggcactgg

SEQ ID NO: 581058 - DNA, 104 bp, Homo sapiens
  misc_feature (104)..(104): n is a, c, g, or t
gaggaggcttaggtaggaggatccacctagcccaggaggtttaggcttcagttagtttttattattccacttcacttcagcctttgcgtacagaacaagacccn

SEQ ID NO: 581059 - DNA, 204 bp, Homo sapiens
tgactggcatagtattagcaaactcatcactagacatcgtactacacgacacagtactacgttgtagcccacttccacaaatgtcctatcaataggagctgtatttagccatcatagagaggcttcattcactgatttcccctaattctcaggactacaccctcagaccaaacactacgccaagaatccattttcacatatcat

SEQ ID NO: 581060 - DNA, 235 bp, Homo sapiens
  misc_feature (45)..(45): n is a, c, g, or t
  misc_feature (172)..(172): n is a, c, g, or t
acattacgatcactgatagttggtgtgcgactgaaacccacattntggtcaatctcctcgtagagcttcttcttcacctgaggattggcagcaggaaggccagggtccatttaactaagaggtggtgatctccacgccagccccaaagatgtcccctatatggtgagaatgngtcatctgaaagcagctctgagtcttgatctgggccagcattgccattattgagtttatctag

SEQ ID NO: 581061 - DNA, 353 bp, Homo sapiens
  misc_feature (348)..(348): n is a, c, g, or t
tcctacagattcagtgaaatttcctatcaaaattcctaatggcattttttaccagaaatagaaaacacctattcctaaaaatttccctaaatagcccaaagcaactttaatcaagagcaaaactggaagtatcataagtcctaatttgatttttgtcaaattatgccattaaatatgacatttgattaatgtcaaaaaatgccattaaaatccatttcaaagctacagtaatcaaaacagtatagtcttggaataaacccaggcatataggccaattaaataaaatagagatctcagaaataaaaccataaagttgtggttaacttcaacaaggctgcctagattacncaagg

SEQ ID NO: 581062 - DNA, 364 bp, Homo sapiens
gctacttacataacagacgactttacataaaataatcatctgcacaaaatgtaaagggtggggttatgcatgagatattaattttcctcaataatgttctacttgtactgttctagaactcattacagtttccacggcaaatttgttttcaaaatgccgaattgcgaaacaattgctgggcttcacgtttcttaatacctttcatagtttctctgcgttgctgtttgtaagtttccttgtgcatgacacagtctatcattaaagaagcccaggttatccatgttttcaatgcgatcagtaatcaccatgtgctcattaatcacattggactgatgcatctcggttccagccttgatgttcatca

SEQ ID NO: 581063 - DNA, 302 bp, Homo sapiens
ctcaaacgaatcacccaccttgacctcctaaagtgctgggattacaggcgtgagcattcgtgctgggcccaaattttaaaatacagtataacaaatatttgtatagcatttatattattaggtattataagtaatctagagattatttaaagtatacaggatgacgtgaatttaagttacatggaaatactacacccttttatgtcagggacttgaacatctaagggtttttagttagggggagccggtcctagaaccaatcccctgtaaatgccaagggatgactatatatatatatatat

SEQ ID NO: 581064 - DNA, 395 bp, Homo sapiens
cagagcaccttcaatgaggtggctccaagatacatctcacgagacggtagcagctccaggtacaggcaggcgtggcacatctgatgatcaaaggcgcacgggactcccatgctgagatgtacatgtaggaacctcgtgacacaccagagaactaacagacaagtcacactggaagttacaggtgcagaacccaagtcacgccccgacactgagtactggcctgtgccacaggtggtcactgctgtcttcatcctcttggtcagctctggtacatgttcgcctggtacaggtgccgctattcccagcaatgccgggagacgaagttcttgctcctagaacctcagatgaaggtcgcagacgtcagagcgggacgcccaagcacggcctgagcagag

SEQ ID NO: 581065 - DNA, 105 bp, Homo sapiens
agaaaacgcaagtactaagaacttgacaggcctttccagtgggactgtagagaaacctcgattacatgacagttcttagaatgcgagccaaaacccgtgccccga

SEQ ID NO: 581066 - DNA, 546 bp, Homo sapiens
  misc_feature (503)..(503): n is a, c, g, or t
agcgcggtgatctaaggatccctgggcaggtctctacctttcaggaaagcttctctttagtaatagatgaatggttccctgaagtgttaggagcgtaggatcacaagggggaaaataatccaaaaagacaggcaagatattatagcggggaaaaacattaatcataacttaggatttctctccccagggaacggttatcagctataaatcggtttaggattctatcaagatcagcaagggcaaaacctcggcaggcttccagcccacacaggggcaccttcctctcctcttccatgcagggcagtgggaagccccctccccagtttcctctccaggatcacggactagaccggggccaagtctgaggaggccggggagccagtacacattcaggggtcactgactcttcagataatgccctaaacaatgggagtgtgggctggtttgctccaagagcagttgcccggtcaggggaactccggcgcacttccactcaatacggnacggcgggggatgaaagagggatttttaaatggcagaaaagtg

SEQ ID NO: 581067 - DNA, 1160 bp, Homo sapiens
taaagtagtaatggctgcatatttattcataatttcaaattgtatggcttaatcccaaacattcttcaaatgtggtgaaatattttaacacatgtgacgtgcacaagagacattcatccaagcctcagattacaagaacacagaagagttggtaaacttcttaccagcactgtgatatccgtgggcctttcttcttcccatttccagctgtgttccctttctaacgtgcctttgggtcgcctcccttttcttgggcctcttcccgtgttccaggtctcttccagaccctcttctgcggttcgtgggtcttctttgtggcctcttccgcgaattccgagggcgtttccgtggccgactctccgagggcgttctccgtggccggcttccgagggcgtttccgtggccggctctccgagggcgtttccgtggccggtctcccgtgtctcttggggtctctcttcctctctctctccgagactgtgtgttcttgtggtccccaagtgtcagcttcccctctcttcgcgaggccctttttccccttttttctttaaaccctcctctctcttctctccaaaccttattcctctatttctccgattctcttttctcctgcggcctcccagggccttttctccccgggcctcccagggcctccctttttgggcccgtgttgccgtgggttcgtggtgataggtgtggatctctcctgtgggagattttctcccaaatctcctctcttggggggggcaatggggcgccccatttttgtgacacacttttgagagcccaggggtaagattgggtggcaagctttaagagatgctaaaggcgccacagtgtttttgggcccccgtggtttttccctgtggtgtgcaaacttttaacaccaatctttctctagagggcgcagtgtcccatccaagtgggcgccactcttggggcgaaaaggacccctttgtgggtgactccccttcccttgttgggctgggccccaaacggcttggaggagcccttttatcgccccttggtttcttaggccattctttcgcgccccctttggtcgtgtgcccaggcgccttgtgtggtataaccttggggatctgtgtccttcccacagcccccttcttagagagagtggtgcgccggtttatttctccgca

SEQ ID NO: 581068 - DNA, 610 bp, Homo sapiens
  misc_feature (293)..(293): n is a, c, g, or t
  misc_feature (298)..(298): n is a, c, g, or t
ggctaaatagccgcagcctctgcgcgtcgcctccacggttaccccggtctccgcccctccttctcgcggcgctcgagggaccatggcgatcctcgcgtgaacagatcaagatcaagaccggcgtggtgaagcggttggtcaaagaaaacgtgatgtatgaaaaagaggcaaaacaacaagaagaaacgattgaaacaaatgagagctgaagacggtgaaaattatgacattaaaaagcaggcagagatcctacaagaatccaggatgatgatcccagatggccagcgcaggtnggaangccgcatatttggatcttcaacggatactagaaaatgaaaacagacttggaagaagctgaggaatataaagaagcacgtttagtacgtggatccagtgaagttagaagcctgaaacttttctcgtatggggtggttttgcattaaatcctggggtccattttacaatccattatttttgaccactgctatgtgttcaagtagtatgagacatgtgattgtctttatctggtacatatatatttctttgtctaatttaatatgtcaaataaatgagttcatctaataaaattgtttatttttttcctttaaaa

SEQ ID NO: 581069 - DNA, 1055 bp, Homo sapiens
gcacctctacgggtgcagtatcctcccgaatcaaccctgacccctctccttcacccacagcaccaatcctacaaaaaaaaaaaaaaaaaaaaaaaaaaaaaaaaaaaaaaaaaaaaaaaaaaaaaaaggggggggggggaaaatcccccggggggccatagacccctttgggacaggcgggcccccatatggaaagagctctatataaaaaccgaagcacgggcgcggcgggttataacaaaaccggcgtgtagcgaggaaaaacaagcgctactagcggggaacctcttggggaagagagcaacactccaatctgtcgggggggggacaacacatgtgggcaccaacaccaccagcacgagatattgaacgccgcccacggaggaacataatacaaccgttacgacggttatttggtgtgctaacacaccaccgacacaatttgattagcgcgggagaaaaaaatttggaaacaggagaattattaatttgagacaaaatatttttatacaggggagctttgtgtaaaataaggaggggaagagagatgataagaatagaaggaaagagaatgatgaagatagagatgaaaaaaatgaagcaaacaagatgaagacaataaacgaataaaaggagtaatagataagtgaagaagaaatagatgatatacagaaaaagagaaacaatatagatcaagaagagaagagaaccaagacgacagaggaaacaaaaataacgaagaaagaaaagagagaaaacgaacagatcgaaatagcagaacaggatccgcaaatgaatagaggagacagagaacgacagaaagaaacaagaaacgaggaaaagaagaaaaagaagacaaaacgaaaggacagaaaagacagacacggaagaaataaaagagagaaagaagcaaagcaaggagaaagagaagagaagaagaaggagagctgagaagggcgagaaacgagaagagaaagaaaagaagagagaaacgagacaaagacagcgtcacgagagaaaagaagaaagcagtgacgagaaggccagcagagaaa

SEQ ID NO: 581070 - DNA, 256 bp, Homo sapiens
tgagttattttacaagatacaataccaaaacctatgttactattattcaacacatattcctatgctgaatacccatatgtaccataagtcgtgtcaggtgccaggcatgcgatgatgaacaagacaatcataatcccagcttttcgaaacttaaaaacagtctatgtctaaaaccaggaaattctatttcaggcacaatttacattattaatgtaataaatacttacacattggtaaggacattcgtttaggaaag

SEQ ID NO: 581071 - DNA, 1179 bp, Homo sapiens
agcggaggagcatggcgcaagctctgtctgaagaggagtttcatgcgtgatgcacggctcagtgtccttggcaactccgggacataacgaagctaccaggcttgtcagatgaactacgcaagaatggtgttgaatctcaccagttcttcgacgtgaaggtctgcctatcttgagagtaaggagtttcagtcaaatgctgcgagcaaggcatcgtggatgcaagagcaggaacatgctctaagcctttgcgttatgcttaatgtgtcgccttgtgacaatctcgcatgacgtaacctcgacatggcgcatggtagtgtggctcgtcatcttggcactgtagtgaacccctgtgtatttggtgcacttaacatcatgtggtcatactttaactctcatacatctctattcgcgatgcgttattcgttctgagtcctcctttcctcgatcgtctcgattcgtgttatgtgccgtggttatccagtctctactggactccagtgttctccttccgcataatcattcatctgttcgtctcttcctcgcactcctgtttccctgtttccggtcgatgttctgctctgttctatctagcttttcatcgtctcgtagagcgtccttgatctctcttcgctgggccccatttcccgtcatcgtacgtgtccttgagacatctactttgcgtttctccatgaagctcccgtccatcgttctcctcatgtttcatggttcttcttcccctgctatgtaattgcacatggtttaggtaaacgtttctactgcccaggatcatatattttcaacatcatttctccccgtcgccacaaatgtgcgcacttcttcccacccgttgtatatcttaaatcttcataccacacacattttccccacgagtcgtcctaaacttttccgcatacgtacatacaacacgcaagattcaatttcacttctttcccagtgggtcgttgtttacacatacacagacagacctccttatacccagttcctcttgggtgatttcgcacacatttgacatacttacttaaccctattccccaagtgagttactatacaatacctatgcccttttaccccattggtacatcttacattattaaattccgcttcacagcaatagatactacatttcacacgataataatcaacagcgttaaattcttc

SEQ ID NO: 581072 - DNA, 465 bp, Homo sapiens
gaattggggccgtaccatggcggagaagactcaaaagagtgtgaagattgctcctggcagcaagtctgtatgtgtagcaaagtgcaaatcagcaggcagcatgtacactcatcggcacctcaggaccagctgcatcccacctctcaaacgcaagcaattcatttgcggcaagcctgggctcaatcagtgcattaggcgcaaggagacaacctacacagcacagaactaggccccttagtcatacaatggcttgacccagcataagtatcacgtcctgaacacatgaacgatcccagaagccaaacagctcatgactcagttggccagccaatcaatgtcgttctgcaacgtctggcatgtctataaccgcacagcacatagaacgataggcgcagcatactaccatcgtacacttgtacatcagaacagcatactgatacggcagcacaatgtaactacttgaac

SEQ ID NO: 581073 - DNA, 455 bp, Homo sapiens
tttccgcgggacatttttttacacgagagagtcatctgtctaggaggagctatttcccgggttagcagcctagataaagaggaatgggtgaagaggactgtcgcacggttccagaaggtggaggtgaagggattgatacctagaccgcttaaaaccgttatcacggttattactgcataaccccctggtttgcgcgatccgatttacgcactgcgctcggtggctccacgttcagaggtctgagttattgagggaaacgcccaacctgtccacatttctcggatatttactgcttccaatttccgtatttcatgctgtatttcgcgattcgggctggttataactgcgcattttaattaattggtcatttcgagactgactttccacttgattcttatgttggggcttctccaaactgatgttgcttatccaaggccgtaacggcggaaatctag

SEQ ID NO: 581074 - DNA, 435 bp, Homo sapiens
atgttaaatgatccactaactttttttttcttggcccatgattaatggaatgtatgtaactaggtagggttcctttcttagatctagaggaagtacagccacccactgacatctgaatttatatacctgttgagttttgagtgcacccaaacactcgtataaaccagcgtgaagaagatttaagcttaccagtgttctacattcagactaaaacgagactacaatacacacgctagtcacaacttgaaagtcagacaagacatttcagcttgctctacctcccacgtactagagccgttgctttgggaaaataaaagatttagtaccaacgtcactcgccacgtttcttgccttatgttgcattcttgtacagtttcttatatttcttgatatctatgtaacataaagatcaaccagtcttttaccagattacat

SEQ ID NO: 581075 - DNA, 104 bp, Homo sapiens
aaacgttcatcggagcaggtgagtcggccctaaggcgagccagagatgttagctgatgggaagcaggttaatattcctgcaccgtcgtattacgccgatgcggg

SEQ ID NO: 581076 - DNA, 843 bp, Homo sapiens
tggtgtgctgtgaaaaccatgagtgctgcatgtcactagtcgtgtgacttctgactgatacctgtgcgattattcgtacatgctggacatgcttcgtgtggtgctgactgcccagtgccgacgagtgggcagtgcccgcaaatctgcagctgcagaggcgcttcaaggagttcctgcggcagtaccgagtgggcacctgaccgcacgggcttcaccttcaaatacagggatgaactcaagctggcattacaacctgggggagtactggattgacggtggagatggaggatctggcacagctttgatgaggacctgtgcgactacttgtacaagcatgccagccgagcacctgcagctgctggagcgaagctgccaagggaggtagctgatgagtgtgacccgtgccctggccttctggggaaggaggtgctccaggacatccagtgtcatgctcaagtcggacgccaggcccttacaggaattcgtagccctgaacgtcggacatgattgtcacacctggtgaaagatcccttggcatcatcatcgcgggactactgcggtaccgttgccaaaggccaacccagcattctctatgcaggtggccgcagcatggctgcaaggaagcgctcacgcaaccattgccagtgaggccccttggcctacgaggggtaatgcccatggccgatggaacggtgctaacacaggaatcactgcttgggcggaccccagaaatgcccaatttggaccccgaagcttacatcatggcccgagacaattggacaaattgcttggactttcaagagccttgaaggctgcatgagcttgcctggattcagggcccca

SEQ ID NO: 581077 - DNA, 202 bp, Homo sapiens
gcaatcttctccctcctcctccctcctccctgattaaagggccgctcccgcatcttcttccctgccccgcctctccgggaagcctctgctttctacctagctgagcaagttggcgcccatggtgggcgcgaggcatgggcggcttcttcctgtggcggccctccttgtggccgcctgcttctcccctctcttgctaccgccg

SEQ ID NO: 581078 - DNA, 386 bp, Homo sapiens
  misc_feature (329)..(329): n is a, c, g, or t
gtccaccttctgtgtctaccatgaccccccttcctcacactgacctgtgttccttcccctgttctcttttcttattaaaaataagaacctgggcagagtgcggcagctcatgcctgtaatcccagcacttagggaggccgaggagggcagatcacgaggtcaggagatcgaaaccatcctggctaacacggtgaaaccccgtctctactaaaaaatacaaaaaattagctgggcgcagaggcacgggcctgtagtcccagctactcaggaggcggaggcaggagaatggcgtcaacccgggaggcggaggttgcagtgagccaggattngcgactgcactccagcctgggtgacagggtgaaacgccatctcaaaaaataaaaatt

SEQ ID NO: 581079 - DNA, 860 bp, Homo sapiens
cggctggtactggtctgggagttttgggcattcggctcggcaccgtagcccctgacgccgtggcgttgggtggttccccccgtgcccgtgtctccttgccatgtcacttatgcagccctgtagcctctccaacgtgagctctggtgccgggagaggattcaactactctgccctcccagggcccgacgtgcggagaccctatgccggctggtgtttacactgatgtggccaatgcgcatccatgttgtgatgtggcctgggacaagcctggacttctgatagagacccatcacgggtgcctacagagctccctcactcccttgatggtcaagaccgtactctgaagatcttccctgcacaagacacaagagggctgagccaggtccgtagctgttcgtccagagcccaccttgctgactttagaactcgtaaggagagggccctatgccaggctgggacgttctagaccacatgagcttctcgctgatcctgagggccctggcacagagggcatccctcatgcgtgagaaggtcaagagcctctggctggcttcctcatgcccctgtccaggatccctcacatcaagggtctgcccccgagtaatgtgggaggaaatgagggagataacggagtgcggaagggatatggagggaaggaaagggggaggttgccactgctgtgaagggagatgagctgtattaagggaatcttggagcctccatctaggcggtagagggaagagcgaaaaccaccccaaggtgactacgggacacgagctagagtgccaggactcctgacaatggggggcccgggacaaacgccgcccagaagaactgagagacttgaaaacatggtccca

SEQ ID NO: 581080 - DNA, 656 bp, Homo sapiens
gggcagtgagagacttcggcggacatggctcccagcgtgcagcggggaacccgagtatcctaaaggcatccgggccgtgctgctggggcctccccgggcccggtaaagggaccccaggcaccacagatgtgtttgaaaacttctgtgtctgccattatagctactggggacatgctgagggcattggtggcttcgtggctcagagctaggaaaaaaacctgagggcaactatggatgctgggaaagtggtgagttgatgaaaatgggtagtggagctcatttgagaagaattgtggagacccctcttgtgcaaaaaatggtttcttcctggatgggttccctcggatcgtgtgaggcaggcagaaatgctcgatgacctcatggagaagaggaaagagaagctgtgattctggtggaatggaattcagcatcccaagactctctgctgatccgaagaatcacaggaaggctgattcaccccaagatgtggcctgttcctaccacgaggagttcaaccctccaaaaagagcccatgaaagatgacatcaccggggaacccttgatccggtcgatcagatgatatgaaacggccttgaaatccggctgaagcctaaccaaattcaaaaccaccccaattcacagagtactaccggaaa

SEQ ID NO: 581081 - DNA, 1082 bp, Homo sapiens
  misc_feature (224)..(224): n is a, c, g, or t
agcgggaggtttctgggcccagaagagaatgtaggtaggtctgtagtggtaaatgtagcgagcgtgtcagagaacttggcgcccgtgttcgactaagataccggtagaaggtgccacccgagttgagacatctcaccagtacatgttatcaacctatgtttgctcactccgtggtcaggcatcaccagaggtgctgtgggaggcgctgtgcctcgggtcatggnaccatcatcgtgcccaggcaggatcagactagggcgcagcgcaagctggactagcatcttgctgtgagagtcaacctgacgtgtaactggccctggcacatggtcgttgcgcacgtcctcattgcacctgcattgttctcagtgcaacctgaacggtcgtagacacttggtatttgtgactcgttcgacgaacatccgcattatcacatctctaggagtggagtcgactggtggattggatgtgtggcgttgcaagaaaacctcccaggaaactgctgtacagcgcttccttccccttacaattccgagaggtagcacagtactgcccttggccaggcatgacatcgtacaagaatgcacaggaaacgacacagcatcgggcagattgcgatcaagaacttccgagacaagttgccctgctttccgaaagaaggaactgaaaactatgcggggtaaagctttggctgatgcgccctttttgcccttggatagagcaggtgaagctaatgttcaagctattgatagcagacaactttgggagggtactggctccgtagaatcaccccgtccgaagattcgtgggaggcacattgatcttggctcaggtgcatctgggggtacctcccaagggtgtttcgaaaggccagtcttccgactccgcagtttaccaactggccttcaagaagctttcgcaattactgggtcaacggatccactgacccttgggagggtggagagtgttcgcttggtaccttggcaggatgccccgataaaggcagattttaagttgccttaccatgggccgtgaaggaaaatgctatctatggccagtggggatttgagtttagaagtaaacac

SEQ ID NO: 581082 - DNA, 988 bp, Homo sapiens
ggacgcgtgggtcgatccacgcgtcgccttggcagccatttctcccagacagtcttaaaggatgaacattggatttcatgccatcccatataaaacctgtcttaacaatttttagggatctgtacttggtcattcatgaaaagtacatctgcttagaaattatagactattatgatctgtccactagtgcccattgtgcactctcttttgcttctcattcttcttccctgttgttccttagtcatccaaataagccttgaataacgcaataaggagatattacttgtattgacatatggttggcattataaatttatgcatttcattgatctagagcaaaattgaagtataaattccacggacatggtaaaattgtgttttaataacccccagacccaaatgaataatttcaaagtcaataccagtagattcactgaaagtaaatttagtcctataattttcagcttaatgtataaacattaggaacacgataaggtggcaagggctgctattaccgtccgtcttagttcaaaacatttcggtttactgtcctttaatacacttcctatcatcgagcacttccacgcatgtattacaagtctgatccatggcctgtcgataactccagatacaagttactgttactacaaaaactttttatcagttgatctgaaccaatagttacctctgaacaggtaggtcactaaccgatgctttcatttctgaactagcgcttggccacaaatgtggttccccttttgtgaatccgaggtaatcaggacgttggggttccctgaagacaattcatcacgattgtgtgctcctatcgcttggtccggtttgtcaggaatgtcccttggctccattgggagaggatgttaatacggttcagttaagtaaatggatcttcacagagtagggtaacctttgcccctggcagagtgccaataattgaagtttcccagtcggttgacgaaaagggaatcgc

SEQ ID NO: 581083 - DNA, 264 bp, Homo sapiens
ggccacgattattggctcgaccgtctgcacatccgcgagcgctacaacggcatgaacaagttcacgtcggcaatggcgcaggtttgcacatctcccatattggtcatggtacaattaatgcaaatgccaaaccccttcatctacgtaatgttctgcatgtaccccaaatcaccaaaaacctcctttcagcttccaaactcacacaagataatgatgtctttcttgaaattcatccatctcatttttttgtcaaggatcagtgtg

SEQ ID NO: 581084 - DNA, 1068 bp, Homo sapiens
  misc_feature (443)..(443): n is a, c, g, or t
  misc_feature (449)..(449): n is a, c, g, or t
tcccgactctgatcttatgtattggttactcaaaaaatcttatttctgacgggatccaaacttaaaagtagaagctcgcagaaaaggaaagtctgcgtctctatcgcaattggtcccgtggcgcttctcctttagcctcctttcatgtctcgtgggccaaaagtttaagcatatttctgcagccctctctctttatttttattctgtggatacgcgttgcttcttcagaagccaatacgcgcgcgcgttgggtgcgtgcagagacacgttggagttacacagagaacgctagaatctgaggggtgcttgtggccctgagggtttctatacctttcttattattaaagcgggtctttcctataccaacgcatacctggggcggacctatcattcttccttatagaacagagcatgtgaacacatgttgtggccggtatccctgncatagnctacttattgtgggcgcccacagggcgagcgaagcgccacgtgtatagctattcgagctcgagctcccgaggaaatactcgctttcgtcctcccatagttttgtctcacgaattacacccagagtgttgaagaaagcgcctcgagaaattgtgcattcccacgaatggtgcacacccacgaaaacgtgattattacatacttttccatatgactacacagtgatctccctgtggttctggtaacacggagaatggccctcttaactcgagtaagccaggtgggcacacggcacatgtgggtcaggaacaccctgtgttacatggggaaaaccttgtttggtcagtacccaccagtgggattcgagaccaaatataacgcttctccattcttacacccaaaagggtcaggcagccaactctcggttggacaatagcgcttctctatagaaaggtccgaagtttggcgtccatcgtcgcacttcaatgacttttctgggacgcccagtggcttggacaggatatgtccaggttcctctggaaagcagttgaacgcctcggaggctggaactttggtatgaagcctcccgggggacacatgggggctccagtgcacaatgtg

SEQ ID NO: 581085 - DNA, 340 bp, Homo sapiens
aaaaagcgcgattgaagagtgaactcctatatactctttcccagcatgccagttaaatacttcaatcgaggccaggtgcagttactcatgcctgtaatcccagcatattgggaagccgaggcgggcagatcacctgcggtcaggcgttcgagaccagcctggccaatgtagtgaaaccccatctctactaaaaatacaaagagaagctggctgtggtagcgggggcctgtagtaccagctgaggcaggagaattgcttgaagccaggaggcggaggtggccgtgagctgaggtcccaccattgcactccagcctgggcaacaagagggaaactctatctc

SEQ ID NO: 581086 - DNA, 326 bp, Homo sapiens
  misc_feature (68)..(68): n is a, c, g, or t
  misc_feature (254)..(254): n is a, c, g, or t
gtcactttcaactggctgacaggtgcccagtatttagcccccaaattctaaggaaaagtaggacagantagcaagtgaaagggatccgatggtactccccacttggcgatagtgattgccccatctgggtcaccaaagtgtgtccagaattggttccttccagtgggttcttggtctcgctgactgcaagattgaagccgcggaccttcgtggtgagtgttacagctcttaaaggtggtgggtcttggagtctnttccttcagatgtgtccctgagtttctttccttctgctgggttcatgggtcttgctgacttcaagaatgaaa

SEQ ID NO: 581087 - DNA, 386 bp, Homo sapiens
  misc_feature (57)..(57): n is a, c, g, or t
  misc_feature (81)..(81): n is a, c, g, or t
  misc_feature (88)..(88): n is a, c, g, or t
  misc_feature (106)..(107): n is a, c, g, or t
  misc_feature (126)..(126): n is a, c, g, or t
  misc_feature (153)..(153): n is a, c, g, or t
caggatttgtgtccacacctctcccccgccgggggcaggggtgataagagaaatcgnactatagaggcaaagtcccccaangacctcngcggagatgagatttgtnnccaaaagatcttttacctncgagcaagtttaagcggcccacccttncgagagtgaggatcttctgcagatgccatgatgcaggcgctgctgggggcccgggctaaggagtccctggacctgcgggcccacctcaagcaggtgaagaaggaggacaccgagaaggaaaaccgggaggtgggagactggcgcaagaaaaagtttgagagctgagccttcctgcctactgcccctgccctgaggagggccctgaggaataaagcttctctctgagctgaaaa

SEQ ID NO: 581088 - DNA, 1080 bp, Homo sapiens
tggtgtcgccggggctagggagcgcgttctcccgggaatcgcggcgtgtgatccaagtggtggcggatcagttgggggctgcgtagcgggctggctcaagcaaccaggtacgtaggtcggcggccaattcgggcgcaagcgtgctgggaagccaggaagggccagacatggtcagtagcacggggctgaccacgcgggaacgacgaaccggcaagaatccaacgtatagagaaccccggtgcggatactgacgagagcgagacaggatcatgagtgtaccgcggggaccgtccatcgtgtgcatgacagactgtcgtcccttagcgaccgtcggcgctaggataccctcctgctcgagtgactcatatgtagcatgacccaggtggatctaaccgaacgtggcgcctatggtaagacacacttcagcgacgtcgaggagaaagcccatgagatgtgtgtcctgtccctgttctgaagggctgaggtaggaaggtcggagtggagcgcaatcttaggcattgaccacacaatcccacaatatttgagggtactagtacggacggctgctcactctccagatgtgacgtcactcgcaacaaattggggtacgcgccaggcgctacgggttgtggtcagtggatgccaacgctccctggagtgagggcccctgattatgacggccctgggaggcgcgcgaagcaaggcccatcggactaacaatcatatcccaggacggccggagcatgggtgcagaatccgagaggcactcggtttcaatcggagagcaggggaaccgaagccatgagcctgaggaagcggggcagcagaatcagtctggagacatagtgcattgggcaaccacccagggatggcgttggagggcgcctcagagacaggctgcggcaagggaaggaagggccccccgagagggcggaaaagccccctggggcaccacctccgcgtaacacccactggcatgccgcctcagaaaccctggagcccgcaatctgcagtgggcgaacctagaagagggcacagagacaggctccagtggagcagaccgggactcagggaagaaag

SEQ ID NO: 581089 - DNA, 1801 bp, Homo sapiens
tcaggattcactgcctggggtatcccactatatatatctcacctatgatgtagtggtgcttgaaatactcatctcattagctcgattttattattctaatctaaggttttttatattattcatactatgatatttttagggacaatcagtaatatttggggcagagtactgagggacctcttgaagtctgcaacagcatgcattttctttgtttttgtgggagtgcttccctgtagctgtctttgttctagaacactgctccaaatttatttccatgggatgtagggctagtagcccatgtgaaagtcttctgtaatctccttggggtgtgagttattgggttattctaacaggagttttccaaagggatggcccatttttaattcaacatttgctttttgaaaatccagaagtagacagttggatataatagtggtggaagagcatgggctgtaagcagaaggaaatagagatgacaaatgcctcttaaaggggatctagttgatacctctgttaaatagtgggagaacacagtagctggtaccttacactgtgctttaggaaaatcctatgaggatttcatttacaaatcctcataggattttctgggttgagggacaatgcaactattaagtagagggagagggagagggaaagggagacatgaagcactgggtctatgtgaagggacaggcagatatacccaaagagggagaaaatacttaataaaggaagagtatagctgcaaaacaagacatataggagctgaaggccagatatggcagaaaccagctggagaaagaagcacaggacaactaggacaacttagtcaagcacaatctgtcattccagtacggactaccaagttcaattcaggatgcttcagttgaagacatgtggggtaatgtgctcagctcatgagggtccaaggagtccccattttccctatcaccctatcctatgctcgtggtttggattgttagcacactaggcaatttcagagtccgctctagagttggttgccacgtcagtgcaagacagactctagaatcctcttaaccatggaatgcaaggcctgttcctgtggatctatcctgacttgagtatgtcagtactgttgggaaaatgagttcaagaatatttcagtttatatatcctggttgccgtcatatattttttcatttcaccacttgtttgtgtttgcctcactcaacagtcatgggtgtagaagctggtttcagcttggggctgttacaaactccctacataagccatgtagctgcaatccagggttcctcccaccctacggctttagcggtgggttctctggccctcttgataacaaatactccagtctaatggctatattaatgctgctcagaggctattaactcaaatccttgatgtgtttcatttacaattatgtggattatttattttaggagctttttttttttttttttttttttttaagggccaaatagccctacagataaatgagctgctgggctgtgtagaaaatattgtccaaatgttgccaaatattgacttcgtaaaggggatatcaagctgctgtttataaatctgaatgtcttaaaagcattcttgcttgctctctctgttatagatggtgtcttagccagtcctgagttttccaatgaacccaattttaatatatggtatttttgtatgccaaactggtgtcttgtcctttgtatatgtggtaatgttgattttatgactaccgtaaaaacacatttgctatgattaaagttcataaaatgatttcaaaaaaaaaaaa

SEQ ID NO: 581090 - DNA, 212 bp, Homo sapiens
aataacaagtgtggatcaagtaaaaaccatgtagaatgtagtcaacggagtcaaataagaccacacacaggctatcaatgccagagtcttgaatatcaggtcataaatctcaccaattgtgcaatataaccaacatgatgagaaaagcaacaactcacaattgacaataattagtacatatgattaacaaaaataaaatctgaaactgcata

SEQ ID NO: 581091 - DNA, 237 bp, Homo sapiens
aaccattggcctggtacaaccttttggcaggcgaattcgaggttggaccaatacttaacctgtgttctggaggctgtgtgaaccttctataggttgcgaggggaccaagaaccaaggttaccgggggaaggcaaactgggaggatgggacaggaggtattttacacggggcggaaatccatcccggttggggggagggggatatgggcatttggtggggggagtctgctcgaggcct

SEQ ID NO: 581092 - DNA, 1436 bp, Homo sapiens
tcaggattcactgcctggggtatcccactatatatatctcacctatgatgtagtggtgcttgaaatactcatctcattagctcgattttattattctaatctaaggttttttatattattcatactatgatatttttagggacaatcagtaatatttggggcagagtactgagggacctcttgaagtctgcaacagcatgcattttctttgtttttgtgggagtgcttccctgtagctgtctttgttctagaacactgctccaaatttatttccatgggatgtagggctagtagcccatgtgaaagtcttctgtaatctccttggggtgtgagttattgggttattctaacaggagttttccaaagggatggcccatttttaattcaacatttgctttttgaaaatccagaagtagacagttggatataatagtggtggaagagcatgggctgtaagcagaaggaaatagagatgacaaatgcctcttaaaggggatctagttgatacctctgttaaatagtgggagaacacagtagctggtaccttacactgtgctttaggaaaatcctatgaggatttcatttacaaatcctcataggattttctgggttgagggacaatgcaactattaagtagagggagagggagagggaaagggagacatgaagcactgggtctatgtgaagggacaggcagatatacccaaagagggagaaaatacttaataaaggaagagtatagctgcaaaacaagacatataggagctgaaggccagatatggcagaaaccagctggagaaagaagcacaggacaactaggacaacttagtcaagcacaatctgtcattccagtacggactaccaagttcaattcaggatgcttcagttgaagacatgtggggtaatgtgctcagctcatgagggtccaaggagtccccattttccctatcaccctatcctatgctcgtggtttggattgttagcacactaggcaatttcagagtccgctctagagttggttgccacgtcagtgcaagacagactctagaatcctcttaaccatggaatgcaaggcctgttcctgtggatctatcctgacttgagtatgtcagtactgttgggaaaatgagttcaagaatatttcagtttatatatcctggttgccgtcatatattttttcatttcaccacttgtttgtgtttgcctcactcaacagtcatgggtgtagaagctggtttcagcttggggctgttacaaactccctacataagccatgtagctgcaatccagggttcctcccaccctacggctttagcggtgggttctctggccctcttgatatcccctttacgaagtcaatatttggcaacatttggacaatattttctacacagcccagcagctcatttatctgtagggctatttggaaattaaaa

SEQ ID NO: 581093 - DNA, 128 bp, Homo sapiens
ggcccccgaatatttgcaggaccctatgtgcaacatttgcaatcatttattattaaacgatacacattttaaaaattcaagtcaaatccagatagatagatacaggccagttggttggtatcagctgg

SEQ ID NO: 581094 - DNA, 444 bp, Homo sapiens
ggcgtttatcgttgcacataccacatcttaacacgtgtattcaatgtttagctaccatctataagtgagaagatgtggtatgtggctttctgttcttctattaggtcacttaggataatggtctccagctccattcatgttgccacaaagaacatgacttggttcatttttatggctgcatggtttttggtgatgtatacataccatattttctttacccaattctctatggatggacacctaggttaattctatggcttgggtatggtgaatagtgctgcaatgaacataggggtgcatgtgtctcttagataaaataaattattttcccttgggtatatatactcaatagtgggattgctgggtcaaagggtagttctattttaagtggtgagaagaatctcaaaacttctctccaggggggcatcgataaacaccgggtac

SEQ ID NO: 581095 - DNA, 314 bp, Homo sapiens
gtgtgcggagtctgaatacgcaaccgattcccaggttccctatccctattccagagaggcaagcatttccctctctctcatctctgcagaagatccgaggcttgagagagaaaaactatagcagggcgcggtgtgtcacaccctgtaatcccagcactttggaagaggccatgatagcagatcacctgaggtccagagttcgagaactagccgtggacaacatttagaaaccctgtctctactaaaaatgatatcagggggctgggtgtgatggctcatgcctgttatccctctactaaaaatacaaaaatttg

SEQ ID NO: 581096 - DNA, 328 bp, Homo sapiens
cctttctctgaaaatgatggtataaaaggaaacagaaaataggccaactcatagttccttttcctttcagtttacccttattcatcagtaagccaaaggtagggagtgttggtagcatgtgtgcatatcaaaatgtgaaataaaagtatttggctttgttctgtgtagtgttttcccctgttctggtaagaatgaaatacatatccgtgtgccctccaaaatactaattgcataattttggtgattctgcatatgggttaaatgctcttatattttgatttaaaagtagccctgggtaacataaaaataaatgacccaattcatgcta

SEQ ID NO: 581097 - DNA, 157 bp, Homo sapiens
tatgtcagtggaaatcctacctaaaacaggttgagttatgggcagatatttgtatacagcatggtagcttatggttaaggaggtttggtcccctaaaggtgagatgtagttggcgtgtttgagagctgacttagtttaccagattgatgatagtttt

SEQ ID NO: 581098 - DNA, 954 bp, Homo sapiens
  misc_feature (1)..(2): n is a, c, g, or t
  misc_feature (31)..(32): n is a, c, g, or t
  misc_feature (309)..(309): n is a, c, g, or t
  misc_feature (432)..(432): n is a, c, g, or t
nnaaggcagcaggcgaacagcatagcgggtnnaacgaccccacgtgcgttgtcggagcatcgcgccaacgagggtgccacgcagtgtacgccagggaaacatcgtgcggtgttagcggcgtggtgggtgcccccccggagattgggcgccgccgcacccttagtatggtcgcaaccagaggatgcagcgtgggatttggtcccagccaagaaggagtggtgacaacaaatggagccactgcccgtgaggccccagcggtagccggcctgttcagccatcggatgttcgacaccagccgtaagggcgtgngtgacatgaacaccgacgggcgccaacagcgccgtcagatgagaagggcgtgtgcaccctggggtcttggagtgtatccccctcccctcctcgtggagagagatcttatgcccttctcccccncgcccacagggtatctccccgtcgagttctcctccccgctagaagttggcgctccacggccaactttcgttctgttattacccgcctacggggcaattcctcgacaaggcgagatatcccccacgaagcgagacttgcgataatcgcttagctcgttggtgcgctcgagcccctccgcgggtcttcttacctctgcgttaaattagcggagtgtctcacgcgtcaccccgctagtattatccactcttgatgatgaacagggatacttatgatttcccgcaggattatacagaggagaattatctcagctccagacccgtggatgagtagcattcattgcgggtaagccggtgatcacccacgtgttgcacgacggtcccacgtttggggccacgaaattctcgcggccgtgtactattggggtcttctcccccggcgggccttttcgaacacccctccaatagcacacaccttgtcctaaaaacccccagaaaaaaccctttaaaccaagcggacataaca

SEQ ID NO: 581099 - DNA, 130 bp, Homo sapiens
atgggttgacgtggcttacattttgtcttctgttccctatctcggtcattagaagccccttcgatcccatcatccctttatccttcaaatcaggggcactcagagatagctttcttggctaggggggcct

SEQ ID NO: 581100 - DNA, 185 bp, Homo sapiens
acagaagataaggaggaaacaatacagaaactagagaccctgagaagaggaagaagaagtaacttcagaggaggatgaggagaaagaagaagaagaagagaggaagaggaggaagaagaagagtatgatgaagaagaacatgaagaggaactgatacatcatgtatattttgacaatggagagga

SEQ ID NO: 581101 - DNA, 202 bp, Homo sapiens
tatgagccactgcaccagccacatattttttatttctaatgaatttgtttcccaatttattttcattttttgagacagagtcttctctgtcacccaggcgggagtgcaggggagcaatcctggctcacggcagcctcgacctcccaggctcaagcgatccttctacctcagttccccagatagctagaacttaaggtgcata

SEQ ID NO: 581102 - DNA, 161 bp, Homo sapiens
tgcgttgtgcggcggatgttcgggacgtccgtagagccccagcatgcggcgacacccccaagttggggaaccgcgggtaccagaggaggctgcccagtgaccggcccatgtaccccggagactgtcctccggaaacaactgagacccccaagtgcagcagt

SEQ ID NO: 581103 - DNA, 150 bp, Homo sapiens
  misc_feature (56)..(56): n is a, c, g, or t
gtggtttttaatgactaaaagaaagttttaagccgaacacagtggcttgcgcctanaatctcagctacttagaagtctgagatgggaggattgcttaaagccaggagttcaagaccagcctgggtaacatagtgagaccctgtctctata

SEQ ID NO: 581104 - DNA, 410 bp, Homo sapiens
  misc_feature (113)..(113): n is a, c, g, or t
aaaattttcttacaagtaaaatactacccctataaaaaatactgtaagaccctttgctatgacccaggataatttaaagtgatgtctcacagacctttatttagactgaaggncttataaaaattttgtgtgtgcctgtaatcccagcactttgggaggccgaggtgggcagatccgaggtcaggagttcaagaccagcctggccaatgtggtgaaaccccatctctactaaaaaaaaaaaaaaatacaaaactacaaaaattagctgggcgtggtgttgggcacctgtagtcccagctgcttgggaggctaaggtaggagaatcgcttgaatctgggaggcggaggttgtagtcaaccgagattgcgccactgcactccagcctaggcgacagagcgagactccatctc

SEQ ID NO: 581105 - DNA, 144 bp, Homo sapiens
tagactcgagctggtaccccatgctgcgcaaaccgggcagttcagcctcggatgctgatgttcgcgatggcgctgttgatcctgctgtgctggtggccgctgtccaaccggatgcaacatcaggggcataccgcataacgacag

SEQ ID NO: 581106 - DNA, 221 bp, Homo sapiens
gtacggcgcagtgtgctgagtttcggctttccccatccaaatcttatctcaattatatcccaatgtgttgaaggagggacctggtgggaggtgattggatcatgagggcagtttcctccatgctgttatcatgatagtaagtgagttctcatgagatctcatgctttaaaagtgtttggcagttccccccatccctcctgccaccatgcgtgaatagccag

SEQ ID NO: 581107 - DNA, 311 bp, Homo sapiens
gttagtagctcggtaccgaatccggggatgggatgggagaaagagcaaagacttgttgtcttttaagatctacctttggcagggcacggtggctcacgcctgtaatcccagcactttgggaagcccaggcaggaggatcacgagggcaggagatcgagaccatcctggctaaaacagtgaaaccccgtctctactaaaaatacaaaaaattagtctggcgtggtgtcgggcgcctgtagtcccagctatttgggaggctgaggcaggagaatggcgtgaacccgggaggcagagcttgcagtgagccgaga

SEQ ID NO: 581108 - DNA, 978 bp, Homo sapiens
ctctctgtgagggtccacctggtgctgctgttttgacccccctggggtggtgtatatctcctcactcatcgcgcggggtttccaataggttgcttcgcgcgcggtgtcccgccaaacaatctgtggaggccaccccctcttttttaagagaaccccggccgccctttgttttttctttcgacggaacgtgtctggtcgccgatacataccctgttgcggacagtttagtgctccgatctttgggacccccgcggcacctcctcggcccttcatggggggccgagcacatgtctggccgcgcgctcccccctcgacttgtggtcgtggatccataacacagggtgccctctcctcccctaggcgcggcggaattattccgcaacttgttcatcaagaaagccggcgggggctaccaccaccagctggggaaccgcaggcggggtcatcttgacaaaaccggtcccccagcggggtggcacccccccttgggggcgcctcccccccaaaccccccctggacgccgccacatcaagcgacgggcgtcccccctggagaacgtcctcatccacgcgccccttgaaaaagataagaatagaataatccctagagtttctaagaaaggcgaaactacataaattttggcaacacattaaggccagaacgccgaggttcatatctctgtagtatggaaaattcgattggaggccgcatgttgcggaagacggagtgtataagacacattgctctgttatgacgctccagacggatctttttctattaaatgtaataagaaattggcgccgcatttgggtgcgagacggtccagcccccagaaatgttttaagacattgttcgccgcccccccatagctggataaggtccggcctgatgactcgccgccccttggcccacgaaatgctctgcacttggaggctccccggcggttaaaaataaaaggccccaacacaaacaaaaaca

SEQ ID NO: 581109 - DNA, 134 bp, Homo sapiens
ttgacaagaattgaagaagtacaaagatgtccaggctgaaaaaatcatcatcgccgtacgcccctgatgcgttggcaggactgtggtcgccgtggcccgtgcacggtgagatcctcgacactctcggtgccacg

SEQ ID NO: 581110 - DNA, 608 bp, Homo sapiens
ccctaatattctggctatcaactccttttggcttatcttactaaccaacctagtcccatgtcctatttctttctttcttttattttttttagagatggagtctcgctctgttggccaggctggtctcgaattcctgacctcaagcaatctgctcgccttggcctcccaaagtgctggaattacaggcataacccatttcaccccgccatgttttctttcctctagcttactttagtgaagaatacagttatataatccttataatatagaaaattatgtgttagttacctttatgttgattatgtcgataatgtcatgggtacgtcttggcccaacagtaggctattagtagttaagtttctgggaagtcaaaagtttatcgctcatttaagactacggtgctcctaacccctgctttatccaaggggcaactgtattccccttttcttcttgatttactaattctattctacttccctcacagactttttactattgcaatatatttttatacttgaaagccttctgttgaccacccattgtagtaaattatctgtccttagatttaagcttttacggtggcccagaaatatcaggggggaccctct

SEQ ID NO: 581111 - DNA, 202 bp, Homo sapiens
aaagtagttgtcactgagaggggaggggaacacaaggagcaaagatgcagaaatacagaaatagaccaaactgtaaactgaggcttgtggatcatgtaaattgtagctgagttattaactcaggaaagagacggacaaagaaaaaaatatctaagaggaagatgaaattataaggtgtccatgagaatatagaaggtgatac

SEQ ID NO: 581112 - DNA, 313 bp, Homo sapiens
ccttggaaagaggttcccatccctcattggaatccccacccattccatccaggactttttttacacttgggggaaggggggtcaggacaatcatttcagtccggcatttttttttttgcttttttccccccaaaagcaaaacctgggcaaggggacttactaagtgggggtgggtgggggttgggaaaagggaaactggtgggatatggaacatggctttgagcaggactgttgagctcccaaagtgttttgactccaaatttgggagcaggaaaatgtgtaaccaaaaataaagtggaagcaggttggggta

SEQ ID NO: 581113 - DNA, 664 bp, Homo sapiens
aatgatggcgcgatgtaacacgagaaagcacataccaaggcatccacacaccacctgtccaaaaatggccttcgatacgggataatcctatttattacctcagaagtttttgtcttcgcaggattttgctgagccttttaccactccagcctagcccctactcccgccaactaggagggcgctggcccccaagaggtcatcaccccggtatatcccctagaagtcccactcctaaatcacatccgtattactcgcatcaggagtatcaatcacctgagctcaccatagtctaagtagaaaacaacccgaaaccaaataattcaagcatctgcttagttactagaatttgttacctgggtctctatttgtaccgctcctacaagcctcagagtacttcgagtctcccttcaccatttcgctgacggcgatctactggctcaacattgtttcgtagccaagcaggcttccacggactggtcacgtgattattggctcaacctttcctcactatctgcttcatccgcgcaactaaagtatttcacttgacatccaaagcatcactttggcttcgaagccgccgcctgatactggcgtttgtagatgtggtttgactatttctgtatgtctccgtctattgatgagggtcttcttagtcttccctcag

SEQ ID NO: 581114 - DNA, 688 bp, Homo sapiens
caaggagaagccagcgcctctacaccccaggtaggatgggggagggactcctggcctttggagctgagcttctctgctggggtgtctgagctgaaggtagggaggaggggtgggagactccagagccgctggagtcacttttgagacaacagacctgagtggtcaggagttgggaggaggccagcccaggggctgtggtaagtgaactggcggtttcacccagcccaagtccaagcccaagtccaggggctgtggtaagtgaactggcggtttcacccagcccaagtccaagcccaagtccaggctcagttggagaaagttttttgcccttccacaagtggaattcccaacttgggagtgacttaccccaaagtaagacatggtgggcatgaaggatatggaggtggctgtagacaaaagcccagagccctgagaacagaggagggctctcctgaggggatctggggtgggagcggctgagaaggcagagaaggcagtcagagcagtgggtgcaaagccagctcctggggaagtgtcccgggcacagaggcgctgtctgcccaaagaggaagggaggaggggacagttgaggaccagaactgtgatgcacaagaaggtgagaatgcaaacctacagcatcttcctcgtgttcccattagggcaggtggaaggagctcctacccagaaa

SEQ ID NO: 581115 - DNA, 172 bp, Homo sapiens
attttaaccttggtacggctgaagatgtcatgcaagggctggtagagaagattgtcatttttctattgtaaaatcaaagagaaaaggaatgtagccaggataatatcttgttttcctttcctaaaagagaaaataatggtttctaaaagctgtacaaaagagtgctaacaag

SEQ ID NO: 581116 - DNA, 165 bp, Homo sapiens
gacggactgtgcctgtgtgtgttctgtttttgtctttgtactcactccagactcagtgactgcaagacgggcatgtgccatgtgctttccgtgtgcattctccactgtgtgctatcacgcacccatggcacggatggcatagggggacgggcataccccgtcgta

SEQ ID NO: 581117 - DNA, 1265 bp, Homo sapiens
ttatgtatgaccaattatgatccatcgtatattgtggatacaaagctgttgttgtgatctctagaagttattgtacactctcgttgctcaaaacggtggttgatcatgtaacaatatttgtgcaggttataggaaaagattgtatccgtgcccttgtggtatcttccgtctcgattaccggagttttctttccctccgaggtctgttttcccggcattagaggttttttcccgagctcttgtgggcttgcataatgtgcccaggttccccatttggcaatttttccctcgccaaatttcggtggaggtcacttggaggagaggttgaggggacacaaattttgccccgtgtgcccctgtgccaagaaaagggcttgcccctaatttgtcttggaagaaggaaggccttgggggagtttggacacatttccagcaacttgtgtcccacaggaaaataggaccccccccctgtaggaatgaggccctcaggggctccccctccgcggcgttggcccagaatcccagccctggttcaaccccccgaatagccaagccaataggcccactgggggaagtccccacacacacaatcgctgtccccgtgcgaatcccccctggaaaccctccccagaaccaaactttgggcgtctttgccccccctgtgaccagggataacttggagcccaagaccccctgccctggtgggccccaagaccccctggaatggccccccaatgctccaagactgccggggaaagggttcctgagccacaggggcacttcttgggagggcttcttggctgccttttgcacatttaatttccccttgtttttctttttcttcttgcgttttaaaggggtttggtggccacccacctcgtttaagaatgagaccctctggggaccacgtgagaacgtaagaaaaattgttttctagcacgagagtttgtgagccacacaagttcacgaagtggattcactggtggtttggcacaccacgggaatttgttctctgttggaagcctgcttctgtgctccccacctccactttttctgtcccttctgcctgggctaatgggaaagtggggaagcacgagtggcccagctcccacaccctgggtaattcacaaaacggcagaacaccacacacacatgttcctccacgcggcgtcactcgaagcctgcaggcccccgtgtgtgcctcaaactgattttgacttcagggaaagtaaccccgagtggccttggcctgttgtctttccccgt

SEQ ID NO: 581118 - DNA, 544 bp, Homo sapiens
tcaaattcatggcctattgtgatcctaccagctcaacctcccaaatcgctgggattgcatacatgagccactgtgcctgactcaaaaatcatactttattcttgagcccattggtcagggtagattcgcacactccctctgcaatgactccaggaacccctgtcacagctcagatcggaagctgaggctgcagcctgccatcttctccgcatagtccgcatcgaagcgctcattctgcgccacggtgaatgtggtcttccagtccccagccatgcctttcctcatgaagggggagatgctgtggcccatgaactcctgggggacggtggtgtagttggtaataaggttctttttcatatcctttgaacgacgtgtgctgaaccattaaatccttgggtctcttttggcaggaagcgccccacaaacaccaagaatcttttggtttttcccttttgaggggtttccttcatggacttcataaaaaaaaggtaaataccaaggttgggttgcgggttaaaaatcccaccaatacctgcaccttgcc

SEQ ID NO: 581119 - DNA, 756 bp, Homo sapiens
  misc_feature (480)..(480): n is a, c, g, or t
attccgttctttttttttttggaaacagtctcgctctgtcgcccaggctggagtgcagtggcgcaatctcggctcactgcaacctccacctcccgggttcacgccattctcctgcctcagcctcccgagtagctgggattacgggcgcccgccaccacgcccgggctaatttttggtattttaagtagagacagggtttcaccgtgttagccaggagggtctcgatctcctgacctttgtgatccacccacctcggcctcccaaagtgctgggattacaggcgtgagccattggcccggccacatcagttcttatcaaagaaataaccagatttaatctggaatggatacgattatgcccaatattaggtaaaaaattataagaaagggttatcttaaatagatcttaggcaaaataccagttgatgaaggcatctgatgccttcatcggtcagtcatctccaaaaacagtaaaaataancatttttggtgtgggcaatatgaaattttaagggagtagaataccaatgatagaaacagagtgctgaatgtgagaatgggattctaaaagtgtgttctttctaaatggtgtcctaaatgggataaatttaatccaggtattatgataaatctgaggcagatgagttacaagtttggaaatacttactatttaatcacaatgtgaagttatgcatgatgtaaaaaaataccaaaattctaattagggttgtgcaaggcaaaaaaagaaaaagaaaaa

SEQ ID NO: 581120 - DNA, 108 bp, Homo sapiens
tctacctcaaccaccagagcagatgagactacaggtgcatgggttatgagcctggggtctcctttactcccagatagagaaagcagataaaagcagacttgcttttgt

SEQ ID NO: 581121 - DNA, 321 bp, Homo sapiens
ttcagcaatttaatccacttggggttttcagcggtatgtacatctaaagacaatagactagaactggaattatgttctacatagtgaaatcacaattgtggaattacaggaattctggtgatattaatggtgaaataacaaaatacaaaaggtcctattataacatgttgatgtgacgagtctgttttgaatagaacctgtaacttcagtttgggaagatgcttctccaccatgataggggcttataccacctattgaacggagccgagatggtattgaaagagtgtggaatataggcaggatgtagatcttgtatcttcc

SEQ ID NO: 581122 - DNA, 132 bp, Homo sapiens
cccagaaaaccctatttgagaaagggccctaccctccacaatcaaagggggatacaatctacccctttgggggaagctcagagaaattcagaaggcaactgctacattcaagctctgggaagctcccgagta

SEQ ID NO: 581123 - DNA, 506 bp, Homo sapiens
gctaggcatcatgctactttctataagcctctcccaaaagacaaaaaatgcattgctctggatcagaattgcacaaatgagctaagaagggggtaagaaccaccaataaccatatcctggttattccaggacacctgcgggcaggctcgttgccctattggccttagaattacccttcacggtggagggagcaagagcagacacctgccaggcatccaccggaagggttggtcccagccgggggacccgcaggattgagctcaaggtcaaggcccgccagccgcagggtccgtccatgggccctgctcagcgcgcatgcgccctccaatccgtgccgcatttccccccgcccgccgggcccagtgcgcacgcgtggacgtcgccacgccctgcagcagcggtcacgtgatgcggcccccggaagccggcggcgcgtggacaaagcgatcgcggccttccacttccggcgcccgcctgcaaggctctgctgcccacgtccccgcccg

SEQ ID NO: 581124 - DNA, 188 bp, Homo sapiens
agccggtacccatcagggcattatactcagtattactattttacggggtcttacctacacctcccctacttctatcatgggggtaaagtggttgcccactacaccccaacagactggacctttactttgcacacttgtaaacaccactttctgccacctaattcctaggtctgatgggagcaagatgg

SEQ ID NO: 581125 - DNA, 366 bp, Homo sapiens
cacagcaggcagcgaagaagtagcactcctgagcctaggagacgtggacagacagaagggcacagcagcgttgcacatgccaggcacccaccaagggcagctcttatacaccttctgcaaaaaggaggggacctggagtgcacaataatgaatggatttgcttgcagaaaagggggcgaggttaaaaagaaaatggggtggagatgacagattccatcagaaaacttagctgtacagagaaacacatcaaggctttgggtgggcgatatcagattcaaatcttatcaccaggacatattgggatcagttcagggggttgtggcccaagttcagagtcaaaaactattatctcctctctggcgtagg

SEQ ID NO: 581126 - DNA, 643 bp, Homo sapiens
ggggaacccttggaggtcaactgtgcagacaatacttggctcgtactcaggcgctttgcttgggtttggctccgtagccatgtcagacaaacccgatctggttgagaacgagaaattcgataagccgaaactgagaaatacagagacgcacgataaaaatccactgccttccaaagaaccgattgaacaggagaagcaagcaggcgaatagcaatgaggcgagcgccgccaatatgcacggcacattccacaggcatggccttgttattttacttcttgtagctggtcaactttgtaagaggcaagcaggtcggatcaagtttaaatgactgcgctggccctgacaacaaaaagaactactgacacagaaggccgcgcctgcctttcccatcggcctatctatcagggtggcagggaaggaaagagcttgcatgttggagaaggaagaacaggggtggaagaagaggggtgaacaacagtgcaatttagagtaagaccatactggcccaaggtgtcctgcgggcttgaaagcaggtaaataaaagtgcctttttttgttttgcgcaagggatttcaaaaaggggaaaggcccaactttttatatatgcaacacaaagggggtaataccccaccatcacaaaac

SEQ ID NO: 581127 - DNA, 1124 bp, Homo sapiens
  misc_feature (591)..(591): n is a, c, g, or t
gcctagccctgctagaggctacaggactttacaagcaagggtatgctgttcttccagcccctaggctgtgggcgctgtatacaagtaggaacttcctttccttcacttcccttgtagcccctaggtcagagcatagacacgccgcgtttgctacctcgatatcctcctgtgctcggacagaggctgggagagcagctgccagtgctgattcttcctgaccttacctgtcatttgttcccgccttcagtatggatggacagctcttgctggcgtacttgactacggagatggtggacgtgggatgagggtgcttcatccctctacccagggcctgagggttgtatctgaaaattggaatgaatactggtggacggacacgcaaccgggacattcctgggaaggagacggactggcagatagagagcccgacgtggcgtgattgaggaccgggctgacgcacccggactggctgggctgcgtaggggaccgaccctgccatggaggcacacaaactggcagcccgaagagccgcaagaaggctctctgtatggaccccagtatttcccctggggcaagctcgcgactgaagcntgggagcaccttgtgcaccttggatgtggaggaaacatattcgggccggtgcatgtggaggaaccaacacctgagacaggctggtggcccccccgcttggcttgaatagaaggtcatgagctatatcaaactggaccttagcagctttaactcggtcaccgacaaacaagttcctctcacagctaacttcattttccatagggcggatgaaccaaggattccattgtataactttgtggcgacaccgaggactaggcacacagccacaggctcagaagaaattcatgggaaaacactacaagagggggatcagatcccaaccggcatgaaagggaagttagttggccacgcgatccaaaaaagaaggcatggagaaggaccgaggggtaggacaaggacgagtggcccattacctgtacaacatgaaacaccgcatatattgaacacaaaacattagtgcacctgcgaatgtgtgatacaacagcggcaagagagacaacccataaatgagcgagcatgcatgaacaaccgca

SEQ ID NO: 581128 - DNA, 771 bp, Homo sapiens
catctcaggctaccagaaagaatggtcgacctagactttcagtcaggcatcctcgttgcattgtcctgtaagtcaagttagttgataaatagttcccccttcatcccttaagttatgttttagttttagtttttaatataggtaagtgggactctacctaaaattgtgcatcatacttatgggtaatatctttgtcatatattatttatcaaagtgatgaagtggagtatttggcttgtaccatttgcaattgctggcattatagtagttcatagtataactgaaagaaatgatttcttcataaggtgacattaagatatgaacattcatccaattggaatttagcaaagatctttccaaaattataagggagaaagaatcgggttatacttccatctttagaaagatctggcacctcttagtaactttcagtgatttcgtaaagtgtctaaaattgtataataaagtagatcagggttgagcaatagtcttaattgtttaaggccaaaggttttctgagaccttaggtttagtagtctgaacagctatgtgtggttatataaaaagaatattcttagggtgtaaatggctatttttaaaaaagctttttattaaccaatagtataaaatgtgataatcatattggtgctgcgatgttgcaggtatcctacatgaaagtggttgtattaaaactcaaaatagggcaaatattgataatattaaagggatagggtggtatatctggtaggtaaagcttgagaattgtcagat

SEQ ID NO: 581129 - DNA, 117 bp, Homo sapiens
gcgctgatgacagccgtggggcgaactgcggtgtgtactaggggcaggcacttaatcataccgcagtcttatgacccgcacttactgggacattcctcgatacatggggaataattg

SEQ ID NO: 581130 - DNA, 134 bp, Homo sapiens
ctggaccgtggcggacacgtagtggcggatcacgtacagggtaggtaacatatatacgtacgtgtccggtggccggacacgtaccggcacgtgtgttacctaccctttcggtccggccactacgtgtccggcca

SEQ ID NO: 581131 - DNA, 382 bp, Homo sapiens
agagtatcccctggggacccctatccctttcagacagagaatccaagatagctatgtaaggacacttaaataactcaagctaacacagagaaggaattcagaattccatcagataaatttaacaaagagattgagataataaaaaagaacctagcataaattctggagttgaaaatgcagttgaaagactgaaggatgtgtgtttttaatagctgaattgatcaagaagaagaaagaattggtgagcttcacgacaagctatttataagagacaaaataataaagaatgaaacatgcctagaagactctagaaaaatgcctcaaaagggcatatctcagagttattgaccataaagaagtggtagagagaagtagaggtaga

SEQ ID NO: 581132 - DNA, 414 bp, Homo sapiens
cattcaggggccggaggacgttttgctacagctgctgtgggcacaattgcaggcgctgtattagcaccaatcacaagtggtacggcgtccactgcttggtcaggtatctcaggttcttctaacgccttgcaagcgtctatggatgacaacttcgctcaggctgcagctgtacgtcgcagagcaagcgttgctgaagcaggaaaaactgggattctggcgtacagcaatgcgactactcctggatcgaaggtgactattgcggtttctatggcttttaactgcagcgttgccggcgcatctgcagatgcatccagcttgcaggcaattgtagcggcaccggtcaatatgcctagtggttcagccgtcacaccaacatcgtttccgtcggctcccgtgacagttcttacacatttc

SEQ ID NO: 581133 - DNA, 812 bp, Homo sapiens
gagaaggcgggtaggaagggcagtctgtcctgcgctggctgggcagggagcggcagcagcgagccggggaccccgtgctgcctgccctgcgctgcggtgggacttggggcttgcgtgtccctggcctggggtgtgctgtgtgctcctgtgtgacactgtgacctgtgtggctggctgatgctgtggcctgtgtgctggactggtgcttcctgcctgtgtgcctggtgctgctggtgccccctctgagctgccctgccttcccctgcatggcccctgtcttgagtgtcttggcatgtcatgatgacatgcctggtgctgcccactggccctgaggcgcccaactgtgcatgcacccatttgccctgcactcctgtgatgctgccccaatgctttccaactgccatgtgccattggctgcttgcacctggcaacattatgagtggaggcggtgagccgcaaggctggcagcggatggacacgacagacggttggcatacacgcatgaattggaaaccaaggaacgacttgaaccgcgacctgaaacccagcgagcagacacggcgacacgacaacacagggcgcgcacctggcgcagagggaaccaggcagacgttgcttcaacttgtaggaacgagccacgacacccaacgggtgtacaccaccacgattatgcttggcaaggcatcgcgtgcgagccgctcgcacgagcctacacgtgggcctacctcaccacgggccacagcaggaccgtgtcccccgggccgtttttcgccgtgcgcgcggccttcccagggtaaaagggtttgctgagc

SEQ ID NO: 581134 - DNA, 306 bp, Homo sapiens
taatttgggaaggaatggaaaatggacccccccggacccccccagcccctaggatgggatggatggttttttgggggatggggtaggggaaataaggcttgcggtttgttttcctggggggctccctccaatttttgcagatttttgcaccctcctcctgagccgggattgtcccattactaaaatgtaaataatcccgtattgtgggggggggggttccaagggggccccccttttttttccggcctggattttttaaaaacccatggggggaaaccccctttttaataaaagtaatagaatcca

SEQ ID NO: 581135 - DNA, 137 bp, Homo sapiens
ctgcggatgtacatatgatgattgtgaaaccccagaatgcagctgctctcctgggagcttgaagaagaaactggctacaaatggggacatatgcctgaatgtactaccagctggtctagtatagcagaccctgcaat

SEQ ID NO: 581136 - DNA, 157 bp, Homo sapiens
agaattgtgtaggcgtaatgaaaataggggaaatcaatgaatgaagctctgctatgatggcaaatacagatctattgattggacatagtggaagtgagctacaacgttatacgtgtcgtgtggtcctcgcgcgtctagtgatgagtttgttattcaa

SEQ ID NO: 581137 - DNA, 627 bp, Homo sapiens
gggaagccccctgccttttttggtctaaaaaactttccagggccggggcctgttttgccaaaaaggggcccaatgggtttaaaccggtttaaaagtgggggtgggggtgagggatgggccccgaattcctttcaggaaagctggtacctgtccccagggacctggcagggaaaaaaggccggggggggcttcccagacccaaattccaaaaaaaagtttaattggttgggggaaaaaactcccaaaaaaccccggggtccgttgggggggagtcccacaaataacaattttttctttgggaggggccggggggggggcccctacttgggtgcaaactttggaagggggccggggattggaagcttcccaaaaagcattacaagaaggggggccaccccttcttaaggctttccaaaaaacccccggacttgttggggttggcccccaagtgtttttaaccccttccccggggggggttttttttttttttaacccagaaattggccaggacaaattatgcctctgtaaaaccccttttttccagtttttgccaggatttaccaatcccagcggggtccccagggtttttcccctagggcctctcccaaaaatttggggtttttgggg

SEQ ID NO: 581138 - DNA, 562 bp, Homo sapiens
atcccatttacgctgcagcggtaaaagatcagagtacagtagggctatattttattccccttatccttactttaaggttgcaaccccattgacagaggcaaaataaacacgtttcatagcagaaagaccaaaaaattgaatgtaaaccatagctctccctggggagattacccaaatacaaggttcatctgtacttagaacaaggctcataacttcttgtagcatggacattcaacaggcacagagcaacaacattcacccaaataccagctgcaatttgtcctttaaggatgcctcacaaggatatgatgtccaggtagctagtccatatatatcggggaacagttgcccttatgtaggatgaggctgtctataaaatgtagtgccacaactttgtggtgaatatgtcccatcatttgctacaatctagacagatcatcctgtctacaaaaaatcattttcaacatttctaagaccattatcagttgatctgctcctgcaagaaaaggacctactttttgtcaatttacattacccgaggctctgcaactccccatttaac

SEQ ID NO: 581139 - DNA, 153 bp, Homo sapiens
ccttcccccacagttgatggcactatccttggggtctttactactagggtctcttctactacaaagcacaacactaatgttcgtttccttagcacctcagttcaatgtgcccctatttatttcaatcaagaactgcacatatccccagctgtt

SEQ ID NO: 581140 - DNA, 620 bp, Homo sapiens
  misc_feature (72)..(72): n is a, c, g, or t
  misc_feature (159)..(159): n is a, c, g, or t
  misc_feature (239)..(239): n is a, c, g, or t
  misc_feature (295)..(295): n is a, c, g, or t
  misc_feature (297)..(297): n is a, c, g, or t
  misc_feature (320)..(320): n is a, c, g, or t
gttgttgttgtttttcttaaaaaaaaaaaaaaaaatagagcgcaagaaaggcccagagccggagcaccaagnttaaaggaggcagctggtggctttgtcagcgacgggaacgcgtggggcagagacctgcagagaccctgggcaggggtccggaggctntgggaccgtttgttcctgagatttgtgtgtgtgaatgagattgtgtgagccacccggggggtgaacacacgccggtgagntacaggtagtgagggcaaggggggtgtggggaggccggaggggcggggcggggaananagatggcggcgtgagaggggccncagcaccagggacacgggtccccaggggccctcgtactggtgccattcctcctcctaacagcgtgtccccctcatttctcagggtaggaaacaccgaggtgcaaacggccataatctactcggaatccattctcagtctcacgtggccaagtcgatggtctctcccaaagcagatgtttaaaagcgagagtcttcctgccatcaatttgctctccacgcctcagtcccaaacccctagcaccaaagtgcctcagttttcccgctgtatactgagctgagtcactgaggtggacctgggtg

SEQ ID NO: 581141 - DNA, 564 bp, Homo sapiens
ttgtttttctgaatggattcattgaatgcagtttcagcaaaactagaaagctccaaatgactttaaagaaatgctgagaccaactcagtatgaatgaaattgtttttataagtttctctgtataagtgcctatttttaaaattaaaaacagttcaagtttagaaatgaatgtgaaatcaagcttcagtatatttactgaaaattacaatggaaaagatacctaggaaatacatatttgaagacagatatgaagtacttaaaccataaatacctttagctgtgtttatgataatgctcttaatcattactaggggcatgtgtcatttaagtatagactaggcaattaaatggtattttgatgaacttgcagaatgaaatataaatctacacattaaaaccaatacttggaaatcttttcaggtgtttttaaaattattttagcatctataatttattctaagacacaagcttaagttttttttaataaactatagattattttcttagaattggcaatctattattttagtaaacatataataaagatgtacatacaaaaccgaa

SEQ ID NO: 581142 - DNA, 927 bp, Homo sapiens
  misc_feature (356)..(356): n is a, c, g, or t
gaggacactgagatctagatgatcactgaaatcacatctaattttatggtgcttctaaagctcgtttcagcagagcgataactgtgcacacgcaggtcgcatatgagaccactctatcgtgactaagacaccttcattagagcttgcctcttctaggtaaacatacgactactaggataatgatcacattatccttataccaacattcgcactatgatctgggaaatagagatctgcagattcaagagatcataatgtcatcggatcctgtggtcgagttaggatgctcttcttgagattaacgatgtgacatgagtctgcaactgctaggatgagtaccctcgagagactcgcgngctgctctctgtgacatagtggttgcttgttagcagaacatcttatcaatatgttgcaacttacttgtagctaccaagtaacataactagctctatctgctgttgcagaataccgtggagaactattacttcttagacgatagtacacttggagtatcatgttgtggtctaatagactgatgcagcatggttacgaatacgtctcgacccttaataatgactacgtatcatcttcgtcgcgaacatagctagacaggtgatgctcagacataaatcctgctcgagaaatagacattgtctgactactcatcaagccgtctatgacagtctactgtgggttccttgcgggctgtaggacgtcttacaacacatcgcctatgaaatacacagcaccactctgtcagcttattaactactgatcagtgtcccacaacgatgacattgggggaagaagtattgattaatcctgatcctctgaggtgtgaacatgcatgatttactatccagattatgttcttgtagacctatacatatctctttatagtctcctggagactgatgattgtgcact

SEQ ID NO: 581143 - DNA, 385 bp, Homo sapiens
  misc_feature (25)..(25): n is a, c, g, or t
  misc_feature (32)..(32): n is a, c, g, or t
  misc_feature (50)..(50): n is a, c, g, or t
  misc_feature (68)..(68): n is a, c, g, or t
  misc_feature (90)..(91): n is a, c, g, or t
  misc_feature (283)..(283): n is a, c, g, or t
  misc_feature (285)..(285): n is a, c, g, or t
  misc_feature (288)..(288): n is a, c, g, or t
  misc_feature (290)..(290): n is a, c, g, or t
  misc_feature (295)..(295): n is a, c, g, or t
agactcctcgcacgaatgtgctgtngctcgcnggtaacctcacgcgatanctatctgatgactcccanactcctacaggctcgtacctgnncatcaatcgaattatcgcaggtatcagcacctgggatttcttacccatcatgggcgcattcgaaggtaagcgaacgggcattacaggttgcgtaacggcagccagttatgcggcaacaactcggcgatctcactggcgcgctgcgtcggcagccgcatcagcacatccttgagataagcatacggatcatgncnttngntgccnattggatcaaactcatcagcgcagccgcgcgatgtccgctgcgtaacgaccctgcaaagagccagttcttgcgtccgagcgcccatggcc

SEQ ID NO: 581144 - DNA, 310 bp, Homo sapiens
  misc_feature (208)..(208): n is a, c, g, or t
  misc_feature (210)..(210): n is a, c, g, or t
  misc_feature (213)..(213): n is a, c, g, or t
  misc_feature (215)..(215): n is a, c, g, or t
  misc_feature (220)..(220): n is a, c, g, or t
acagacacaagagaactgccctactgaacatgcggctgatcttgtcgctactcgagaacatcgcgacgatgcgaccctcgtggaagcgaacgggcattacaggttgcgtaacggcagccagttatgcggcaacaactcggcgatctcactggcgcgctgcgtcggcagccgcatcagcacatccttgagataagcatacggatcatgncnttngntgccnattggatcaaactcatcagcgcagccgcgcgatgtccgctgcgtaacgaccctgcaaagagccagttcttgcgtccgagcgcccatggcc

SEQ ID NO: 581145 - DNA, 431 bp, Homo sapiens
tcttacacgagggtcgaagattacaagcctgaactatctagatgtcagtctagttctctaacaaaaggcttgacaactgtagtcctagctacttgggcaggctgagatgggaggatctcatgggcccaggagtttgaggctgaagtgagagctatggttccgtcattgcattccagtaatgtgggcaacagagcaagaccctgtctcctaaaactgaaacacagaggctggaccagtggctcacacctgtaatcccagcacttcggcaggctgagataggcagatcacctgaggtcaggagttggagaccaacctggcgaacatggcaaaaccccgtctctactaaaaatacaaaaattagccaggcatggtggtgggcgcctgtaaacccagccactggggaggctgaggcaggagaatcgcttgaaccc

SEQ ID NO: 581146 - DNA, 955 bp, Homo sapiens
aaaaaaaaaaaaaaaaaaaatttaaaaagtcccaaatctgccaccattaattcttgatcttttgcaaaagcggcaccatgtactacagaacgggtcatccctccccttggtcagggtatagagggttcttgggatgtagaacacttttcaaagaaccaatgagctgctgcagaaagtctggcaagaaagcccatggactggaaggagctgtgatcatcagctgaggggtggccttggagaaagctgctgtaaacgtattggccagttacgaagttccactgaaaattttcctattaattcttaaagtactctgcataagggggaaaagcttccagaaaagcagccatgaaaccaggctgtccaggaaatggcagctgtatccaaccacaaacaacaaaggctaccctttgaccaaatgtctttctctgcaacatgggcttcggcctaaaatatgcagaagaacagatgaggtcaaatactcagtgggctctctttatctcccttgccttatatggtgaaacaggggagatgtgcaccatttcaggcacagccctagttgggcgcctgctgcatcctgggtattggcctgggtaagaactttcagtgacagatgtagggggtagtataggcttagaaaggtcccctggtctcagccttgcagggcaaggcatgccagatctctgccagattccactgcccccttgatcttggacaggagtcctcaaggcccatcgcagcataaggatgtttggcaacatttccagagatctgggccagaaattacgggcgtcaaatacccggaatggtaggacaaagggtcacaatatgctgagaagctaaatccagactaaaagacccgcgaagaagtcaagaggggaccagaaaataccttggaatgaaggggggaataagccagggaattggaacacaggcacaggagaacacggcaaaaggc

SEQ ID NO: 581147 - DNA, 122 bp, Homo sapiens
tacctagcagcactgggcatttcccgtgctggtcaggttttctctccctcctcacgatgccccgtggcagagaaatgaggatctcctgaagtggccagatgtgtctgagctcagagcatcct

SEQ ID NO: 581148 - DNA, 255 bp, Homo sapiens
cgttcaccatgttggcccggctgttctcgaactcgtgtagctccggtgactgcccgactcaggctccgaattgctcttttgagctgcgtgagccaccgctcctggtgggacttccttcttgtgagctggttgcgtgtgtctgaaggtatcttccggaccttctcatctgttactgactgctgtgaggcttgacttacgccttgtgttagaacagcctcccgtaggctttgggtcttctcctgttttctctcctcc

SEQ ID NO: 581149 - DNA, 161 bp, Homo sapiens
agttggtcaagataaaacaagttgagagatgagtgcaaggaaaaaaatatttccaaagtccatgtgaaattgtctcccattttttggcttgtgtgggggttcagtttgggttgcttgtctgtttccgggttggggggaaagttggttgaccgaatatcgtg

SEQ ID NO: 581150 - DNA, 453 bp, Homo sapiens
  misc_feature (6)..(6): n is a, c, g, or t
  misc_feature (39)..(39): n is a, c, g, or t
  misc_feature (142)..(142): n is a, c, g, or t
  misc_feature (255)..(255): n is a, c, g, or t
acagcnggctcgtgcactctgtgccctgagaaccggaancgaataatgggctctcatgggtgaaccctgggcttgcagccctgaaataatcccggtcactgctcgtgttgtctgaaactgaatcagagttagggaaagtccnatgtttgttctccaccgagaaaaaaagggcgttctctttacctcttttctaatatcttcctaaaaacaacaaacaaaaagtgactttgatgggaggctgtcttataatgagcncattctcctcactggtcttgaagcccaggctataaacagagtcatggctagggagctacagaatattagctcatgtgggaaaaggaagggagctgttggctagaactttgcttcatgtggggaaagcataaaaatattgtgggcagacttcagctttgtgtcccctggtaagtttgactcattagaacaaaacaagac

SEQ ID NO: 581151 - DNA, 342 bp, Homo sapiens
ggtaaagggacgcggcgtccacatgtgtcactcgggcaggctggtgcctctcattactggtgatgctagcacggtgatgtcttgggtaaacatggcggggtaagatttgccgagttccttttactttttttaacctttccttatgagcatgcctgctgttgggttgacagtgagggtcatactgacttgttggttgattgtcagatattgggctgttaattgtccgtacagtgtctgaatctgacgcaggcttctgcggaggaaactgttttcatgttacttatactaacattagttcttctatcgggtgatagatcggtccagttgggtgaaaggccgtcg

SEQ ID NO: 581152 - DNA, 225 bp, Homo sapiens
  misc_feature (29)..(29): n is a, c, g, or t
  misc_feature (41)..(41): n is a, c, g, or t
  misc_feature (79)..(79): n is a, c, g, or t
  misc_feature (168)..(168): n is a, c, g, or t
  misc_feature (207)..(207): n is a, c, g, or t
  misc_feature (212)..(212): n is a, c, g, or t
ctcaggtgaatgccggccaccagcaatgnctggacctggtnagactccgcttctgcctttcaccaagagagtgtttctncactcaactcaggtgggcatttggggtgacatctcaaaggccaggaattccgttaacttgttgggctgccagtaggggcgggaggaaangcggaggcgagccctggaggagggaggccacaactccgnagctncccacctggtgct

SEQ ID NO: 581153 - DNA, 1309 bp, Homo sapiens
agcggccaggtgggagaagaggattgctgagctcaggaggtcaatcaaggctgtagtaagccgagattgtgctactgcactccagcctaggcaacagggtgagaccatgtctcaaaaaaaaaaaaaaaaaaaaaaagacggctggaatctcagtttaattacagtactttcttcaaagttatgtggtcccattaagaaacaaaaccttattttaattaattaccagaaagacacttatttggccctctttaaaggtgttccgtggcatttgggtggccgtgatgttgtgcaggggcactgaggaggttaaaccccacggtgcgcccctttagttccagaagggttactcaagcggtggcccccaaagttttgctagtagcctccatgggtgttccttctcacttattcacacacttcagaagttaaaaaaattcacgtttccactttaatctcctaaattgaagagacgttacaaatttcctagttttcctaagtcttatattcccttagggaccccattcttaatggccctgtgttgttgaccaacatggggagggtattgcccctaaagccactttcgtgcattaccgtgacagttttgggggttgcgttccccaaatttgacaaccctttgtgtgctgtgcctttggaccttgttgagcctggtttccgtgtttctcgtggaccttaacccgtggcgccggggtttccccaccaggttgacgcacatctttaggcgatatttggcctgtttacccctcaaatttttcccccaccaccttacccagctttggctctttgggacaagtgctcactttttactaacgaattgttccacccccctggttttgggtccccctttcggcccactcatgtttggggccccctcctgttgcgggtttacgggaaaaagcttttggccccctcccaaaggccaccccggtttgtgtttttcagggaagacggggaacattttgggacccctgtggggggaataacgttagaagctctttggtaaaaacgctttttaaaaggggctctccttgtgggaaccgaaactctccggagtatctccacggacccttgtgtccagcggttgcttatatcttggacaaaaagggccccttgtctgccccctgtgaaatgtgttagcgggtttagttgccccccccaaggaatttttcgtgggaggccacgcccgggtggttcacggcgtgtatcccccgccttttggtgggggattaggccggagagctgttcaacacccgggtgtttggcccccctcggcgcaactttgtgtgagtacccc

SEQ ID NO: 581154 - DNA, 277 bp, Homo sapiens
  misc_feature (261)..(261): n is a, c, g, or t
tgtttactatactatgttattttcaaagatgcgcctcctgtttataaaagaaaaaagttaactttaaaatagcctcaggcaggtccttcaggagggattccagaaggcattgatatcataggagatgataggtccatgtgttatggcccgaaggccttccagtgggacaataggtggaggtggaagaaagtgatattgatgtcctgacccagtgtttgggctagactaatatgtgtgtttgtgtcttagtatttaacaagnaaagttttagaaagtt

SEQ ID NO: 581155 - DNA, 127 bp, Homo sapiens
aatttatatagctcttaatttagggagtgctttgacccctgcccgtggagccaagcactgagcagggaggtgaacgccagtccagaaagaaggtcctggagcccttgctctgtcctctccatcacgg

SEQ ID NO: 581156 - DNA, 767 bp, Homo sapiens
cgagccccgtgtcccacggcgtgcagcagctgcgtgcgtgcggaggatgaacgcggagggggcggatggagtccgcggtgagtgatgagctagctacagctgaatatggactggagaccgtgtgtgaatccggtggttgatcaccaagccgaagaaccttgaatgacgccatacgtgacctcactccagcaaattactcgagatcgatgtgagcaacccgcacgacggtgggggtcaggaacgtgcgtgcacggcttcaccagcttactgaaactcagaggttcagatgacataatcttcctaattatctcaaagcctgaaaagaatcatactgttagaagaaagatactgatgaactctatgagatggtttgcgaacgtgaaattagacaaatgagagagcactggatcgtagtctcccccgagtccctgggataagcgttctatgcgtcaactaccttttagaggagatgatggaatatttgatgacagattttatatgaggaaagaaaagaagggctggagcagtttataaacaaggtcgctggtcatcctctggcacagaacgaaccgttgtcttcacatgtatttacaagatgaaataatagataaaagctatactccatctaaaataagacttgcctgaaatttggcaagaaggggcaaaacgtgactattaatgattgataatgcaccagtgaagcaagttctaattttaggcatgctgcgagaaaactgttataccatgaccttcagtaatactaaacg

SEQ ID NO: 581157 - DNA, 601 bp, Homo sapiens
  misc_feature (1)..(1): n is a, c, g, or t
  misc_feature (10)..(10): n is a, c, g, or t
  misc_feature (46)..(47): n is a, c, g, or t
  misc_feature (49)..(49): n is a, c, g, or t
  misc_feature (53)..(53): n is a, c, g, or t
  misc_feature (108)..(108): n is a, c, g, or t
  misc_feature (137)..(137): n is a, c, g, or t
  misc_feature (154)..(154): n is a, c, g, or t
  misc_feature (157)..(157): n is a, c, g, or t
  misc_feature (160)..(161): n is a, c, g, or t
  misc_feature (164)..(164): n is a, c, g, or t
  misc_feature (172)..(172): n is a, c, g, or t
  misc_feature (177)..(177): n is a, c, g, or t
  misc_feature (185)..(186): n is a, c, g, or t
  misc_feature (188)..(189): n is a, c, g, or t
  misc_feature (191)..(192): n is a, c, g, or t
  misc_feature (209)..(209): n is a, c, g, or t
  misc_feature (211)..(213): n is a, c, g, or t
  misc_feature (224)..(225): n is a, c, g, or t
  misc_feature (231)..(231): n is a, c, g, or t
  misc_feature (233)..(234): n is a, c, g, or t
  misc_feature (237)..(237): n is a, c, g, or t
  misc_feature (239)..(240): n is a, c, g, or t
  misc_feature (243)..(243): n is a, c, g, or t
  misc_feature (259)..(259): n is a, c, g, or t
  misc_feature (269)..(270): n is a, c, g, or t
  misc_feature (272)..(272): n is a, c, g, or t
  misc_feature (278)..(281): n is a, c, g, or t
  misc_feature (283)..(283): n is a, c, g, or t
  misc_feature (288)..(288): n is a, c, g, or t
  misc_feature (293)..(293): n is a, c, g, or t
  misc_feature (295)..(296): n is a, c, g, or t
  misc_feature (299)..(299): n is a, c, g, or t
  misc_feature (301)..(301): n is a, c, g, or t
  misc_feature (308)..(308): n is a, c, g, or t
  misc_feature (310)..(310): n is a, c, g, or t
  misc_feature (314)..(314): n is a, c, g, or t
  misc_feature (320)..(320): n is a, c, g, or t
  misc_feature (327)..(327): n is a, c, g, or t
  misc_feature (332)..(333): n is a, c, g, or t
  misc_feature (335)..(335): n is a, c, g, or t
  misc_feature (338)..(339): n is a, c, g, or t
  misc_feature (341)..(343): n is a, c, g, or t
  misc_feature (346)..(348): n is a, c, g, or t
  misc_feature (359)..(359): n is a, c, g, or t
  misc_feature (361)..(361): n is a, c, g, or t
  misc_feature (365)..(365): n is a, c, g, or t
  misc_feature (367)..(367): n is a, c, g, or t
  misc_feature (370)..(370): n is a, c, g, or t
  misc_feature (374)..(374): n is a, c, g, or t
  misc_feature (380)..(380): n is a, c, g, or t
  misc_feature (383)..(385): n is a, c, g, or t
  misc_feature (394)..(395): n is a, c, g, or t
  misc_feature (397)..(397): n is a, c, g, or t
  misc_feature (470)..(470): n is a, c, g, or t
  misc_feature (475)..(475): n is a, c, g, or t
  misc_feature (482)..(482): n is a, c, g, or t
  misc_feature (599)..(599): n is a, c, g, or t
nacaccagcngcacgcgccgtggctccggcatctcttcggcttagnngngtanccgagtgcgcggcagcgccggaggaccccagcagccatgtccggagccccatagngaagcgcggggactgccttcattcagacncagcagctggacgcagncanggnnganacattccnggagnacatgtgnngnnannaaaatagaatatacaanannnaaacaacaaannaggaanannggnannaanaagataaaaatggccnagcttcccgnngnaggggnnnngnggggnggggngnnggnangcggggnangaangggtgnggagggngaaannanatnnannnaannntatgtaggacnangtcntntanatcnattaanaannngcgcaaagnnanggaaagctttgcttctgaccccatcctctaccggcccgttgctgtggctctagacactaaaggacctgagatncgaantgggctnatcaagggcagcggcactgcagaggtggagctgaagaagggagccactctcaaaatcacgctggataacgcctacatggaaaagtgtgacgagaacatcctgtggctggactaaaanaa

SEQ ID NO: 581158 - DNA, 235 bp, Homo sapiens
tgcgccagaagttcagtacctgtcttagacagcatcggtttggctcagctgagggatcatggagtgctgtttatggtgttgaatttctatgaaaatttctttagcaactctggagcccaggctgccaggttggagtctttgttctcccgctttctagctttgctgtccttccgcatgttacttaatttctgggcctcaatttcctcatctgcgagatatctagtgcccttatcaa

SEQ ID NO: 581159 - DNA, 110 bp, Homo sapiens
aaggcgagcacgaccatgcccacggcgtcttctactgcacggacgcctgacgacttgcctcccggcacctggcgtggcagcagctttgactgacaacctgccgcgcacct

SEQ ID NO: 581160 - DNA, 225 bp, Homo sapiens
  misc_feature (204)..(204): n is a, c, g, or t
  misc_feature (210)..(212): n is a, c, g, or t
  misc_feature (221)..(221): n is a, c, g, or t
gaagacctggggtccaagaaatgggatttaatacgagagagagagacgtattcctggattatgaagtaaggccccaaggtaaaggctgtgcctcggcccttgaagtcaccagtccagagaagacccagaagctctgggaaaggctccctcaggacaaaggaactgatgaaagtagttggtcacatggaaaagagagttataaantggggnnnaattagaancaat

SEQ ID NO: 581161 - DNA, 137 bp, Homo sapiens
tgtagtcgttctattgagcattaagtgtacactttaaattaagtattcacttacgaatttggtcactgtcctatcaacggacataatagaaaatattacacagaactcaaacatgaaaataataaacaactacaccg

SEQ ID NO: 581162 - DNA, 347 bp, Homo sapiens
ttgtgccctgtcccttcaccttggatccacactgcttggctcactcatcactagtggcctccacgacacggtggcgacgctctgcttctcacgtttcacactgtggacacggaccactctggtccccgcggcaggctgcggggctctctggggcttgcgggcagcccaacttgtgtcctcacgaccgcccacttcacggcttcttccgggggggctgaacgctacgacatcggccgggtgtgtgctgctgggacgcacgtggcccggacgctggacggcctgggacgtggggacggtgtggtggccacgcctggggtgtccctctggggtcgtacgtacggcggacg

SEQ ID NO: 581163 - DNA, 270 bp, Homo sapiens
aaaatggctcacgctttcgtcgagacggggcccgagcggataccgcaggaaacagatcccgcgcgcgtcatcgatgacgtgcagctggtttttctgcaaaacggcaaaaaagatcttgctgctgtacgaagtaaagatttcgcgcagaaagctgtaggcgaagaatgcccccagactgagctcgccctccttgagcagcggcaacgccagcagcatgaacaacaccatctccagactgccgatcagctggtaaatgctgccttttatctg

SEQ ID NO: 581164 - DNA, 396 bp, Homo sapiens
ccttccttaggcaaccggtggtctacgctcccgggaggctcaccatattgatgcacgaacttagtgcggacacccgatcgcatagcgcactacagcccagaactcctggactcaagcgatcccccacctcagcctccttactagctgggactacaagcatgcaccacacccggctaatttttttttaacttttatttttgtagagacagggtttcgccatgttgcataggctgctctcgaactcctgatctcagtgtgatttacttgcgtcggcctcccagagctctgggattacaggcgtgagccactgtgctcggccatttccagcttttgatttagggtgtgagacattcagctcttcctttgcttgagccctttgaggcgattagggttagt

SEQ ID NO: 581165 - DNA, 743 bp, Homo sapiens
  misc_feature (46)..(46): n is a, c, g, or t
  misc_feature (81)..(81): n is a, c, g, or t
  misc_feature (126)..(126): n is a, c, g, or t
  misc_feature (147)..(147): n is a, c, g, or t
  misc_feature (160)..(160): n is a, c, g, or t
  misc_feature (170)..(170): n is a, c, g, or t
  misc_feature (180)..(180): n is a, c, g, or t
  misc_feature (182)..(182): n is a, c, g, or t
  misc_feature (216)..(216): n is a, c, g, or t
  misc_feature (300)..(300): n is a, c, g, or t
  misc_feature (333)..(333): n is a, c, g, or t
  misc_feature (342)..(342): n is a, c, g, or t
  misc_feature (367)..(367): n is a, c, g, or t
  misc_feature (376)..(376): n is a, c, g, or t
  misc_feature (378)..(378): n is a, c, g, or t
  misc_feature (380)..(380): n is a, c, g, or t
  misc_feature (438)..(438): n is a, c, g, or t
  misc_feature (450)..(450): n is a, c, g, or t
  misc_feature (457)..(457): n is a, c, g, or t
  misc_feature (462)..(463): n is a, c, g, or t
  misc_feature (471)..(471): n is a, c, g, or t
  misc_feature (478)..(478): n is a, c, g, or t
  misc_feature (491)..(491): n is a, c, g, or t
  misc_feature (510)..(510): n is a, c, g, or t
  misc_feature (522)..(522): n is a, c, g, or t
  misc_feature (524)..(525): n is a, c, g, or t
  misc_feature (533)..(533): n is a, c, g, or t
  misc_feature (541)..(541): n is a, c, g, or t
  misc_feature (549)..(549): n is a, c, g, or t
  misc_feature (551)..(551): n is a, c, g, or t
  misc_feature (555)..(555): n is a, c, g, or t
  misc_feature (557)..(557): n is a, c, g, or t
  misc_feature (559)..(559): n is a, c, g, or t
  misc_feature (571)..(571): n is a, c, g, or t
  misc_feature (576)..(576): n is a, c, g, or t
  misc_feature (578)..(578): n is a, c, g, or t
  misc_feature (582)..(582): n is a, c, g, or t
  misc_feature (584)..(584): n is a, c, g, or t
  misc_feature (599)..(599): n is a, c, g, or t
  misc_feature (614)..(614): n is a, c, g, or t
  misc_feature (617)..(617): n is a, c, g, or t
  misc_feature (628)..(628): n is a, c, g, or t
  misc_feature (637)..(639): n is a, c, g, or t
  misc_feature (643)..(643): n is a, c, g, or t
  misc_feature (661)..(661): n is a, c, g, or t
  misc_feature (743)..(743): n is a, c, g, or t
gcccagtcatatcccatgatcttcagcatttggaatacttgctganaatgctttttttgtcctttatctgttacatatatnattgtatcaaaattatacttgtccattcgatctatagcagctgcnagatctctggttgcatagagngaagtcccatcanttcgcattanagtacaaatngngggggggtcgccattgccagagagatctactacngccgttccttttattgttttcagtaggagttctttactctccagcaactttaagacctcttgagatttttcacgataaaatgantctcctgaatattcatcaaaatatactcccagncgcttgtcnacccgaatgtactcttcaatgctcnagtcccganantnctgccacagtgaaagtgcttgcacatcgcccagttccaatcgttggaagaactcctgngctgcgtttgcnacacttntatcnncggctgcntctttantaacttgtacatnaacttcacagagatgctgncgaggactggantnnattttttnctcatagncaaaaagntngaancnanttcccagaagancaaantncatncnccaatcgccaaggtnatttattcttattanttnatgtcctaaancttcttttnnntttnctattaaatttcctatgntggtagaacgctaatgtccaacatgatattttttggcaacattaggtgaactgaattcaaccacaatcttcttctgggggan

SEQ ID NO: 581166 - DNA, 253 bp, Homo sapiens
aaaggaagagctaataaatctcttctttgctgcagtcatctactttttttttagttcaaaaaaaatttttttttgaagcagtcttgctctgttacccaggctggagtgcagtggtgtgatctcggctcactgcaacctctgcctcccaggttccagcaattctcctgcctcagcctccctggtagctgggatgacaggcgcctgccatcatgcctgactaatttttgtatttttagtagagacggcgtttcac

SEQ ID NO: 581167 - DNA, 188 bp, Homo sapiens
aaagagcagcttgagacaactgaggtgtgcctggaatatatttcctaactcagattgagcgaatggctcaacctgtttggtttaaaaacaaaacagcaacaaaactacctgtaaataataccaggtttgggggcacatgggaagcacacgatagtaaaacgtatttactttgacagcatccaggatta

SEQ ID NO: 581168 - DNA, 225 bp, Homo sapiens
  misc_feature (41)..(41): n is a, c, g, or t
ctggggccttgtttttaaagccaaaaacccaatgtaatccnccccaaggtaggttcacaaaaccccctttgtttttaatattgaacaaaaaaaacccagtctcccctcttcatgggaaaagtggtgaattccccccccaaaaataaatgcctcttggtccttaaaaacccctccctccatccctgggcccctccctggatgacattaaaaaagggtttagctgga

SEQ ID NO: 581169 - DNA, 1337 bp, Homo sapiens
ggaagagtgaagtggtctcaaaccccgtgcaggttgcgaccaggccagaccagtgtgcgctcgctgcctgcgtggccgggctgtagtgcgaggtgcgcgccccagtgccgagacccggggcttcagtgagcctggccccgtggagagaagagtgctggcaggctggactgtgagaaaacaactccaaatgttggcgaaatggcaccgccccatactccctgtggcttgcctgacctgactccgcctgacccctagcgcctggccagtcagagtacgggtcgagcccgggccatggagacccccctggtgggaggctgggcaccagatggaaggccttggcgctgcccctggggggcctcccgaccgaaggaacccaccagtcggagtagaacccacaagaaggctccggggacccatttcccgggcaccctcttgggaagtagacccaggtgattgctggattagggacaatccgtcgctaccttaccgttcctaccgtttgtgaagggcggcatcgttggccacaggttgccacggagcccgtggagttacatctgatatcgcgaaaagttacatgctttgattgaacggggacgacgaacacagcaaggcgagggtgcctcctgtacgcagaaggattggcagctggggcgaccccttttagcaaggacgtggcccccttggataccggggggagccagtggcgcgacgaccatcacgcagcatggacccaaaagcttgccagacacttgtgacctttcgattccacttgcggaggcagggcagaagaggaacagctaagagaagtttggataccacgccgagttcaaggggttttccagagggacaacggccttacagaagtaccctatggggacagttgggttggggcttccacggagaggacggcgcgttaaaccacagttaactcggcgtaccgcacttccttaccaagacgacagttggagtcactacccccataggttcatttgagaggtgaccagcaccttcaaccgaggacgccgctctattgagcagagagacttgacccaccagagagggagcacgaaagcacgattcacaagcagccagttcaaacattttagccaaggccatctagttatcagttagtgtaggcagcacagacagctccagccaccgagttgcgggcccgagagggggcacttatcccagttggaagtctagttacagctacagaggagagcaacagaacattggaggcagttgaattgttcgccactagccacgaggcagctgcaggtttcacaggtatggcagcttagaagcaccaataacgggatgagtagatctacatg

SEQ ID NO: 581170 - DNA, 193 bp, Homo sapiens
ccttaggaagaggaattaacggtacttatcgacacacctatataaagtgccgatctacaaagtagctaaaacttccattaaaagctgtttaactggaagttgagagtctgctttgtacctcaagagttacattagcctgttgtggataaatgtaaattatagtccaagtaagatactctgcaaggaacccgcg

SEQ ID NO: 581171 - DNA, 255 bp, Homo sapiens
tctttaggggaaaaaacccccccttcgggtttttcttgggggggggggggccaaacccccttggggggggggacccccttttttttaaaaaaaaaaaattttttgcccccccaaaaaggccccccccccccgggggccccccccccccaggggggggcgcttttttttttcgcgaaaaatttttttaatcccccagagcgggccccaactttttttttttttttggggcacgggccccccccccaaaatttaaaa

SEQ ID NO: 581172 - DNA, 976 bp, Homo sapiens
  misc_feature (937)..(937): n is a, c, g, or t
cgggcgagacgggacaggagcgtgacctccccagtcccgaggggccggacgctcgggcgcctccgccgctcgccccactcggcaggccgtgcgcgccggttgtcccttcctcgtctctccctgaccccagtcccgtcagtccgtgtgtatgttggggtgtctgtgtagtcggtgctgaagttggtgaagctcgacgcgggttgtctgtagcgtagggtcagttcggctgatcgggttttcgacgttcagagcggtgagccattcttgctcttgtgtggaatgagtctccaggtctactggaggtgatggtacagacacgatgaggacattgacaagagcagtgccgtatgaggacttcaaagccgactaaaccttgtaaccctaagcggaagtgtacataacttccgcattccggttaaatgggaaagtgaatatgtcaccaatcgtttaattcctaagagggcgagcaaagtagggaacagaactagtcacccatttgcggggcattaacatcgcgtggtccccaaagaacagcttggtggggaggcaggcgaagcaaaagccgtcctacgcaagcccgccataaccttagcaaagtgctttctatcaggagatggccaataggtggttggtagaactctttagggtagcctacaaaattcccgttccaacgccacgtttgtgaaaaaccctaaggtcgcaaccaacaaattggtttgcttgtgttgcgcaccctggtaaggaaagacaaaagacaaaaaccgcgcgttgcccacacacatttcgcatagaaccccttaagaagataaatcaaagaggagctggcgtacgcgattctcggcagcacccatttgtttttccccattacggtataccttgtgtgttaagccaaagagggttggtgccgcaccgttaatgttaacacacagttggtgancccgttaatatacagtcaagacgaaagagatttaccaac

SEQ ID NO: 581173 - DNA, 788 bp, Homo sapiens
  misc_feature (5)..(5): n is a, c, g, or t
atccncactgtttgccatcgccaaacagtgaggacagatcagcgccagtgcagtgagcaccggcacggaacctttttactcggcctgcaagacaccacggcgcaactgatcgcgctcgatggattcaaacaaggccttgaagttgccttcaccaaaaccatcatcgcccttgcgatgaatgaactcgaagaatacggggcccatcaaggtttcagagaaaatctgcagcaagagacggcggtggccaccttccgatgtgccatcgagcaaaatgccacggttttgcagttctgcagtcggctcaccgtgcgccggcaagcggccttccagcatctcgtaataggtttgtggcggcgcagtcataaagcgcatgcccatggctttgagcttgtcccaggaggcaatcagatcgtcagtcaggaaggccacgtgctggatgccttcaccattgaattgcatcaggaactcttcgatctggcccgaacccttggcggattcctcattcagaggaatgcggatcttgccatcgggggcggtcatggctttggacgtcaggccagtgtattcgcccttgatgtcgaagtagcgaatctcacggaaattgaacaggtgctcatagaactgggcccagtaggccatgcgaccgcggtacacgttgtgggtcaggtgatcgatctctttcaagcctgcgcccacgggatgacgatccacgccgtccaggtaaacgaagtcaatgtggtagatggagttgccgtagacgcgcccgcgaatttagtagtagtaggcgg

SEQ ID NO: 581174 - DNA, 500 bp, Homo sapiens
  misc_feature (31)..(31): n is a, c, g, or t
  misc_feature (35)..(35): n is a, c, g, or t
  misc_feature (99)..(99): n is a, c, g, or t
  misc_feature (105)..(105): n is a, c, g, or t
  misc_feature (109)..(109): n is a, c, g, or t
  misc_feature (130)..(130): n is a, c, g, or t
  misc_feature (133)..(133): n is a, c, g, or t
  misc_feature (151)..(151): n is a, c, g, or t
  misc_feature (163)..(163): n is a, c, g, or t
  misc_feature (174)..(174): n is a, c, g, or t
  misc_feature (233)..(233): n is a, c, g, or t
  misc_feature (277)..(277): n is a, c, g, or t
  misc_feature (350)..(350): n is a, c, g, or t
cccaccccaaatgcaaacgcgccacggatgngatnttggccttatcatgtgtcgcaagtcccgcttctggtattgtatctcagttaagaagtgaagaantcttcngggnagattgtctatgtgggcagtnttngagaagtcccccctgggntgagaattcggnatctggtgcgntatgactccggagcggcaccaaaacatgtacgggaatacgggactgaccacgcaggcgntgtcacccagtgctaccgagacatgggtgcccggcaccgcgccngagcccatccattcagatcatgaaggtggaggagatcgcggccagcaagtgccgccggccggctgtcaagcanttccacgactccaagatcaagttcccttgccccaccgggtcctgcgccgtcagcacaagccacgcttcaccaccaagaggcccaacaccttcttctaggtgcagggccctcgtccgggtgtgccccaaataaactcaggaacgccccggt

SEQ ID NO: 581175 - DNA, 337 bp, Homo sapiens
ccttttttttttttaattgggggccggcaactttcttaacaatgattctacttccggggctatcacattataaggctctgggcctctttttggcggcggtttggctattcttaaacttaggccaagtaccaaggtgggctgttagaagggattcggttcattcaacatgcaactttagggaagggaagtaagttcatttttaagtggggtggtcagtaggtgcggggtctagggtagtgaatccggtaagttcaaatttatgattaggtgacgagtggacatggagatggtccttttccctgatcaaaaaatgaataaagcctttttaaaaaaaaaa

SEQ ID NO: 581176 - DNA, 335 bp, Homo sapiens
tcagagggagagatgagagctggcacgatcatcgaggtacaaggagatcaaggactatcgctggacaagcatggtgaaaccccgactctactgaaaatacaaaacagacaggggagctggcgtgagcctgaatcccagctacttgagaggccgcggccggagaaccgctggaacccaggcggtggagggcgcagtgagccgagatcgcgccactgcactccaacctggtcgacacaacaagactccatctgagaaaaagaaaatgaaaaaagagggagcaagggaggaagagaaatgcacaggaacggcagcatggtgaggatgcagaacccaca

SEQ ID NO: 581177 - DNA, 154 bp, Homo sapiens
taccgttttctcgtcaaaagctaatatctcttagaaagcaaggtcttccagtccaggctcttcgtaattttatttttttttggaaatagaaatctcactggtgtcgccaaggcgggagtgcgtgggacctgtgatctcagctcacggcaacctt

SEQ ID NO: 581178 - DNA, 102 bp, Homo sapiens
tgatttgccagtgtctgatgtaagtgagaattcatgaagcgcggtaacgggggagtaactatgatctattaggtagccaatagctcgtatctaattagtgac

SEQ ID NO: 581179 - DNA, 361 bp, Homo sapiens
gctcgacgccgccgctcgtattcgtcggagttttatagccggggaatgtccaaaagcatcaaagatcctgacaagtggcctcgcgacagatcgttctaccttttcaggcgtttgcgcgacagattctgatctacctgtagacgttggttgcaaaataatcactgaaacgaacgcgagccaactgcttctatgccgctggaaggacactgcacaggatggtgaaaatattctaggagatagtgctactggctcccgttgaaagtaagagcccggcgaagagagtatttaaatttctagctgcttttcagtttaaagtgaataatccatctcaggatttatctttgatgctgaaaagtcgacg

SEQ ID NO: 581180 - DNA, 130 bp, Homo sapiens
ctcagagtatcccgggagcatcactttgctttcgaggcattaagtagtaataaaacgtatttctgaccagctgggcaagtatagcgagacccccatatctacaaaaaattttaaacattaggccaggtgt

SEQ ID NO: 581181 - DNA, 606 bp, Homo sapiens
gggacccacaagcctcaaccagagatgttttgcgacgcacaccccgcctccccgcgggtacaacattttgttctgggaaacaaacccccaccaccgcttctctgtggaaaaaactctttctgactattttcttgatgttgctgactctgtgtcttgtccatacactccagtgttttctctcccacgcggcacatgcgcacgccgcgacatgcgactctttgtggcggcttctccacagagagacatctcatttcatcttctacgagggacccccctcttgtcaaaaacgaggccgctctcttctcttatagggcggaatatcttcttctcgggaggccggttctacacgtcacccggctcagacattgttattgtgtaaagatgatcagtagggaaaataaagagacgatcttcaggaaaaacatgtttctgtgcaacaggcgcgtctcttgtaaaccacatgtctagaagaagttcaagccccaggtctctccccagcaggcggcaacgtttatcttctctcatacgaggcattcccggcgtaattccctcaattcctgtgcggagcatatcaaagggcgggtggggcggccaacaaatgtcgag

SEQ ID NO: 581182 - DNA, 195 bp, Homo sapiens
aggatatgatatggcaaattcagagcctttccattatggtcattccacatctaaattacaaatctgaaaaaaagattttcgagctgaaagatatccaaatctggtaacatggggagacccgaaagtttctactcctactcttagcaactagctttaacgatttcttctggacttaccacacacactacaataaca

SEQ ID NO: 581183 - DNA, 809 bp, Homo sapiens
gggccgtctttccttggcactccagagaataggaactacaaagctgaatttgcatcatgccgactgaaggctgtaccatttggagttctgtggtgactgatcagccctctggaagactccatgaaactgtcacagagtcaaagacaaagaaagtgaagcggaaaggaagcactatcttccacgtcctcctccctccgtccgagcgtccgtggtggacccgtctgagcagcagtccgtcgatgggacttgacccccatcgtcctatgtttgcagccgactgcgtgacccctgcagccgttggcgagcatgccgatggaacagctccagaaggaaacggtgatagagatgataacgtccgtttgtaggatcaggattttgagccttgtgaccatcaaatgggggagaaatccttgtcccggtagcagctccactaccgtaaccacgctgtctattagatctgttctatggtgatctgaaaaaggcaaaagctgggactgccacattggcaatgtcagagaaggtgcggacccggctggaggagctggatgactttgaggagggttcccaaaaggagctgttgaacttgactcagcaggattacgtgaaccgcatagaggagctcaaccaagtcgctgaaggatgcctggggcctcagaccagaaagtgaaggctctaaaaatagtcatccaggtgttcaaagcttctttcagacaccagtgttattcagttctacccaagcgaatttgtccttatcaccgacatacttgatccatttggaaagctcggtacgagcgcatctttccggtgtg

SEQ ID NO: 581184 - DNA, 233 bp, Homo sapiens
atgaacggcgggatcatgtccccggccaaactaggcctgctctgacatccgcaatatacgtccactagcagtgcgcaagacctcccgcgagacaggtgtagttataaatgcccatctcacagatgaggaaaagatctcaaagtagcttgatgatttacccaaagttcccgaaccaggcctttaaaactttttatgcatgcaccgcctcttgatcacatcagcctcatactgca

SEQ ID NO: 581185 - DNA, 348 bp, Homo sapiens
gagagagagagagagagagagagagagagagagagagagagagagagagagagacagagccccagagactttcatctccttaccttctttctctcttctcttcctctttctcccttcttccctcccttcttttctctcttctttctcttctctctcttccctcttctcctcttctctgtctttccctttccttcccttctctttactctttctctcttttccccttctctcttttcctcctctttctgctctctctctttctccttttctctctccttctcttctctctcttttcctacctttttctcctttgcatcctctctctcctcctcttctctcttccttcct

SEQ ID NO: 581186 - DNA, 109 bp, Homo sapiens
tgaataatgtaacctagaagtaaataaaaggggaaacaggaaagagaacaggttaggttaaaggagagtatagacgaataataggtaagtatgcaaaattgatagcaac

SEQ ID NO: 581187 - DNA, 209 bp, Homo sapiens
  misc_feature (15)..(15): n is a, c, g, or t
  misc_feature (80)..(80): n is a, c, g, or t
  misc_feature (83)..(84): n is a, c, g, or t
  misc_feature (87)..(88): n is a, c, g, or t
  misc_feature (92)..(92): n is a, c, g, or t
  misc_feature (95)..(96): n is a, c, g, or t
  misc_feature (103)..(103): n is a, c, g, or t
  misc_feature (136)..(136): n is a, c, g, or t
  misc_feature (145)..(145): n is a, c, g, or t
  misc_feature (156)..(157): n is a, c, g, or t
  misc_feature (159)..(159): n is a, c, g, or t
  misc_feature (172)..(172): n is a, c, g, or t
  misc_feature (180)..(180): n is a, c, g, or t
  misc_feature (182)..(182): n is a, c, g, or t
  misc_feature (185)..(186): n is a, c, g, or t
  misc_feature (199)..(199): n is a, c, g, or t
  misc_feature (206)..(206): n is a, c, g, or t
  misc_feature (208)..(208): n is a, c, g, or t
gtgggggaaaagatncagccctcccacctcattttttactataatatgttgctaggtataattttattttatataaaaantgnntannttantcnnaataccntacgactaagtgttggtggtttgagggaaatgnaaaaaatgnttaatttaaanntntgtataggtgaantaagaaantnagnnagaaaggcaaggnggaaatnana

SEQ ID NO: 581188 - DNA, 258 bp, Homo sapiens
  misc_feature (8)..(8): n is a, c, g, or t
  misc_feature (32)..(32): n is a, c, g, or t
  misc_feature (35)..(35): n is a, c, g, or t
  misc_feature (58)..(58): n is a, c, g, or t
  misc_feature (106)..(106): n is a, c, g, or t
  misc_feature (110)..(110): n is a, c, g, or t
  misc_feature (117)..(117): n is a, c, g, or t
  misc_feature (120)..(120): n is a, c, g, or t
  misc_feature (225)..(225): n is a, c, g, or t
tccccccnaatgccggcttgcttggtggccgnggncggacatggcaagggcaccgaancgccccagctctcttcctgctgccggggccgccccggccgggagtaangagncccggcnctntgccccgcagccggccggggaaggcgcggtcccgccctgggaggaggccagcgggggccccggctccttgagcttacggtgccgggggaggaagtgggcttcggncgcccaggctcgtcctcgggccgcccagcgcgc

SEQ ID NO: 581189 - DNA, 911 bp, Homo sapiens
  misc_feature (651)..(651): n is a, c, g, or t
atgcacgaaagactactagccgcggggaaaccgtaggcccgcaaatgcacctcgggaaccccaaaagggggggtcccttaaaatggacggcccgcggggccagccccaaaagaaacttcgcggtgagtagccggatgtagaggagtgaaaatgagaagataaacttagagtggacctgtagaacccccgcgtgatacttttcgcggattccccgcgaggcgcggaagcagaaccggagggaaagccgcacgccgctgctcgcgcccaggggtcaaaacggccaagatccctccacggaaccggggaaactcctgtgacgcccgcaggagcctagttttctgttgaagagccgttagccccaatgtcggcccaaggtagtaggaaaaagagggggtcttcttcgcccccagggggaacgcccagttccgccaataatgtggaagaaattgcttctcggagtgtgctgtaccccagaggcgtatttccaagaatcttctctgcgccctgtgagggagaatcttctctttatagagaaatcagtgttagacacgcaaaaattggtgaaaaagttttcccgtgcttatattcaaagttgttgtaacacgatgaaaatcttggcgcgtcctccttttataaaagcagagggtaganactttccccttcggtctgttgtagtaaaatgttgtcaccgggtgttaatttcaccacaaaagtgtggtgtccacacagcgccgtggtaatgttttaaaagagtgggaccgcgcacccttgccgtgggtttaaaggaattgtattggggaagtcttattaactaggacaaatatgtaggtaagccgggggtccagaaaaggaaaatggggggggaccaaaaaaaaaaaggggaaaaaaaacccctttttttttaaaaaaaa

SEQ ID NO: 581190 - DNA, 84 bp, Homo sapiens
gcggccgcctactactactactgctcgaattcaagcttctaacgatgtacggggacatgaaagctaataaacctgtcagagaac

SEQ ID NO: 581191 - DNA, 347 bp, Homo sapiens
  misc_feature (347)..(347): n is a, c, g, or t
attccatgtgatgtttgtgcctctgttgcttatttccaaacctcataggctatcttgcctatgaacagttgaaagttttgacttctttggactcaattgaattcactaaaacaatgaattttaataatttttttccaaattcttattcccattgcctttaaaagtcctttagaggcaggttgtataatcataatagcctcctctgaactgccttgagttgtttttcttttctgcttttctgtcacttatgtaaagagtacatgtatttacataaaccttctctgtcccggcctatttcaaaataaagtggaaataaaaatctttagctcaatcttaaaaaaaaaaan

SEQ ID NO: 581192 - DNA, 379 bp, Homo sapiens
gggtccccccccctgggaggggggcccccttttttttttgccccggggggccgaaaatataaaatttggggggggctttaaaaccccccttttgggggtaaaggcccttccccttttaaccccaaaacccaaatttttttccccccccccccccaaaaagcccccaaattttgccttttcccccccccaaaaaattttttgccccccccccggggtttcccccccccccccccgggggggcccccccaaaacccccctttttgggggggttttttcccccccccccaaaaaaaggggttaaaatttccctttttacccctttggggggggggggttttttttttccccccccccccccccccttaaattttctttttta

SEQ ID NO: 581193 - DNA, 226 bp, Homo sapiens
tcggtctaccttgtttagcttcagagtaggatttgttcactggccaatgcctgccatgaaactatggctttcagcatctgtcttgctctactggctcttgacaaaactcttgatgtgtcttcaatgaaaagtaattgtactacctgtgtgctccatgtggcttgtgcttgatgctccacacatgctcatcttgcacaaatgtgtttgtccatgacgaatgtgtaga

SEQ ID NO: 581194 - DNA, 175 bp, Homo sapiens
cggagtcattcagtccaggaggtcgatggctgcagttgtgcactgtgatcagcctgggcgacaaaacaagactctgtcaggccgggcgtggtggctcacgcctgtaatcccagcactttgggaggcgaggtgggcggatcacgaggtcaggagatcgagaccatcctggctaaca

SEQ ID NO: 581195 - DNA, 133 bp, Homo sapiens
tacggctcacaaacaggggcttcagaactaagcatacagggatctattccacgtgaggtcccaaagggtggtattccaaggatcggtatcctggggacatatggcgcacaggaggcccaaatttcttcgggaa

SEQ ID NO: 581196 - DNA, 257 bp, Homo sapiens
gcatagagtctctgtgacttccgggtacgcctgtggaaacatgcacgtgtgccgctggggcagagaagcccagtggccccacgaacgacgcgggggagaggttgcccatgcatgtagactaggggttcgggcgggggaagccttgcaaaagcccaggcagaacatcaatcagtgacacatctcttctcttctaaggtgacaggcagagtctctggggcattcctccacaaaatgcagctcagtggggacggactagc

SEQ ID NO: 581197 - DNA, 132 bp, Homo sapiens
ttgcaggcattgtgtgcagtatcgtacggatctacttgtccatgatggtaaagggtagcttactggttgtcctccgatcaggttagaatgaggaggtctgcggctaggagcaatcactttattgactcctag

SEQ ID NO: 581198 - DNA, 303 bp, Homo sapiens
gtttttaaagttgattaaaattatttttctgttaaagccttctgaaagggtttgtctttccctagaatgatttggaccccctcgtggtcaactgaacatgaatgtcagtagtagtctaattatgggaagggtaaacgtgttagattaaggcttttaaagctttaacccatataaactatgggcttgtatcatgatttaactgtttttagatcttttttacccagtgattcattcctctatttggccaggggctttatgaaatgttgtgaattgatcctgtaatcaataaagggcttttaccca

SEQ ID NO: 581199 - DNA, 340 bp, Homo sapiens
gctgctttcactgtatcccataggttttggtatgttgtgtttccatgatcgtttgtttcaagaaatttttttaatttccttcttaatttcttcattgatccattggtatttaaggaacatattatttaatttccatgtgtttgtatagtttctaaaatttatcttgttactgatttcttgttttatttcattgtggtctgagaagatacttgaggctgagtacagtggcacatacttgtggtcctagctatctcaggaggctgaggtgggaggatcacttgagcctgggaagcaggtcgcagtgagcctgagtcacataatcggtcaccgacagaggact

SEQ ID NO: 581200 - DNA, 210 bp, Homo sapiens
tcagctggtcctacgtgtgctgatcagaactcagcctggccatcgcatcggctatccggacctgttctggtcggtgttcacgaccatcaatatcaccgggcatgccatcgaaggggtcttgctgctggccggcgcctatctggtgctgacgctggggacctcatgggcgttgaacctctggtatgcacggctgcgccgcaaaggatgatt

SEQ ID NO: 581201 - DNA, 120 bp, Homo sapiens
ggggcgggggaagaggggagtggggagggacggggtcagtcttcctttcaggctcccaaacacggcggcgggcacggctcttgcggctccaagccggaaccgtcgtggggctccaaggtc

SEQ ID NO: 581202 - DNA, 248 bp, Homo sapiens
acacacacacacacacacacaacacaccacacacacacacacacactatcgcatccacagcgtcaaatccactgggtcctgaagagtctatatggattgagacgaatacaagagcgtgggctatctaccatcagagccatgatacaaaagagttccatcaccctgatatttaaacatgctatcccatagtagtacactcttgtgtctccactcgtggaacgctagggtcgcgcgcgcgaatacgtaat

SEQ ID NO: 581203 - DNA, 1053 bp, Homo sapiens
gattgtagacatgaaatgcgaacacttacttacgatattaatgttaagctcaatcttagggacctggaatggttgcattagtgcttataatcgttggatcgccacatttcccaaaaataataataaaaatgcagtaagcgcttttttaaggatagaatatttaaagttttgacaagaattcgaatgattgcaagttatcaatgtaaagtgagatttggaatgcttattagaagactttccacaattcaaacatgaaaatacataagaacatggaggaaaaggagaaaaaaatgaaatacaaaaaaaaactaacacactaacaagaataacaaacaacatataaacacttagcgcatcataatatatacacaccacataataacacacctaaaactctctatcttcacactgccttacgcacggaacagccctaacgagccaaacgaccaatccggccctccgaggtacgcgcattgcactgacacgaagggcgacgccacttgaacgcactctgccctttccccctcacgtctctacagaatacagagggactgttcgcaccccgacgcacttaccacgaaccagttcaaaacacctttgagagcgctgcactcgacacctccactggccaaaggcatttctcgactccgtcccacccatttaaccccagcgcttgtactaacttcgcatcaattgaaatttcctcacgcgatagagtttaacgacctctccgacagggccacacccttggcactgaacaccaacgacacaaaaacttaccaaggatttacacggccaaagggcggcctgctcttcagagacggcggggccattcggaccgccttccaaagcaccaatgggctaagttacgtccaccggccggactcaacccgcaaccaggctttcccaccggtggaacttcaccaatggctgtcacacaatttaacggctgggctccgtctctgttcggacttacgctgggccccgaacaaaccccgcgtcgcccttcatgtgtatggcgcagaacatatttaacgttatgccttgtactaa

SEQ ID NO: 581204 - DNA, 359 bp, Homo sapiens
  misc_feature (38)..(38): n is a, c, g, or t
  misc_feature (65)..(65): n is a, c, g, or t
  misc_feature (139)..(139): n is a, c, g, or t
  misc_feature (165)..(165): n is a, c, g, or t
  misc_feature (186)..(186): n is a, c, g, or t
  misc_feature (223)..(223): n is a, c, g, or t
  misc_feature (231)..(231): n is a, c, g, or t
  misc_feature (271)..(271): n is a, c, g, or t
  misc_feature (340)..(340): n is a, c, g, or t
tttttttttaattatggggtcttgccgtgttgcctagnctggtcttgaactcctgggctcaagtnatcctctcacctcagcctcccagagtgctgggatttcaggcgtgagctctaccctgctgtgcacagcgtatttnaaggctgtttgatcactgagattttnctttgtcactcactgcctgtnttgggggtaaggcctgcctgggcttccagctccctgnatgacagncttgcctgtacctctgcttccccggggccgtgtgtctgtntgcacagcagcaccagcagcaggacagggcaggaggcaggcgggatgcagtgggcagttagtaaagggnccagagcatttgggtggct

SEQ ID NO: 581205 - DNA, 1258 bp, Homo sapiens
tgttcctcatccgcctccttgctacgccgcagaccgcctccggccgcgacgcctcctaccgccgccgcggactccgtgcagctattatcgcacagagtccctgaactctcgctttctttttaatccccatgcatcggatcaccggcgtgccccaccatgtcagacgcagaccgtagacaccagctccgaacatccacccacccaaggcacttcacacagggaaggacagcacaggcaacgtatgtggcaagcaggccagcaacaatggcaagcagcactgcccactgcctaccggcgcacatggtcacactcgcaccgcacacacatgggcgcagccagcgcaggcctgcacacactgcccaggtccagcaccgcacacgcacagcacggcacacgcaaagggtaggcgcgccacgcgcacacgcaaggccaagggccacggcccacagccaccacgccacagcgcctcgccatcgcgctcgcccacgccggccacacgccaagcggcatccgcgcacgcccacacttctccgcccacaaccaaccgacaaaactcaggccacacggcgcgccaccacgccctcggcaaacgcattccctcaacgccccttcaccaccccggcacggcgatccgcccccgaaacaacgggcccacggcgcatggccacaagcgccgattaggccaacaacacgacacacactacacgggcacaattatgggaccacaccccgccggcgccacaacagttgtgggcaaaaacaccgcgggtcaacacgcgtcggcgcacgatccccccgggccaaaccagctctgaagccgccccgaacaagccgcgacccacaacagacgcgcccccagccaacgcaggcagccacacaacctcacgcgccgcggcacacaacaccagccgccacacgcggagcaaacaccaccccgcgcgaacaaacagcgccaggcgccgtcacaccacagcctttcgacgccaaacaacagcccccggactgtatccaccgggcgcgacaacacccccccctccaaccgaggcccccacccacaacaagcaatcgcagcacgccaacacacacccaacacgaccaacaaccacgactgagccagcgggcgccgccaaccacccacccgccactaacagcacagcaccccccgcggccgaaccattcgcccccacccgaccaacacaggcacaactcgaacgcataccctcactaaaccgcacacagcagcaaccatgccaccgcg

SEQ ID NO: 581206 - DNA, 622 bp, Homo sapiens
gactgcctgtaatagcactgggattctgcctcccagccaaaatgctccaggtatagtgcacgcaaagaagaaatgagctgcgatatgaggtgtacatgtgatgtctggcagtccaaattcatgttctctgcagcctgctgtttcgggtagtttgtgaataaaggtcacccgcctacttgtctatgcacactgtgggtgtgtaactcagttcctggattctcggttctaaaaatcagacttccaactgggaaacatttttggggtgaaattaactggacacctatctcggaggtttcattttacttagcaaccagtgacagtcgtacctacctacccttccctgggataactcttcagattttgactgtcagctgtactgggtagtcaactccagcgtcggcacaggcagaaggacttcagtctgctggtctcattgggtatccactgccattgatatgggtggggtgcagagtgagcactcatgtgtccatagatggagatccaggacagactgggaggactccgggaagaggctaacttggggaagaggacccaaaggcaggtacttcctcctcactgatgcctcagggttgctgtgtgggtgtgtaagctgataaggttc

SEQ ID NO: 581207 - DNA, 185 bp, Homo sapiens
cgcgaatacacacacttcttgaagtcatagcaaagtcgccgatcttcacgacgccgaggcaccaaactgcacacgccgaatcaccaaaccattatcgccgatcttcacgagatcggcgacttgctatggaccctcggcgtgtgcatgcacacgccgaagatccataccgatgtcgccgatcttca

SEQ ID NO: 581208 - DNA, 189 bp, Homo sapiens
gtggtatgattctgttccaaggttaaagtactgggcgagagaccgagtagcgaacaagtaccgcgaggtgaaagatgaagaggactttgaaacagagagttaaagatgtgctatgaaattgccgtgtgtagggaagctggatcttggccttcgtgccagggtaccggagctctgaattctgtcaatcat

SEQ ID NO: 581209 - DNA, 82 bp, Homo sapiens
aacccggcctttttttgggggcccccctgcccccaattttttcccccgtttttttgcccccctttaaaggttttttggggga

SEQ ID NO: 581210 - DNA, 560 bp, Homo sapiens
attgcttgaacccaggaagtggaggttggagtgagccaagattgtgccattgcactccagcctgggtgacacagtgagactgtctcaaacaaacagacaaacaaaagagaatatcgcaggtatttaatccattttgcgtcttctcccccatcctctctgggtctcaattaaccacatttggaaataggaatcattcatttgtacctcatagggctgcagtgaagggaagaggtgacaaggtctgtgcacacgctttatacacttgggggagttctccttccccaaggcttaaaggagggtaattccctaagcatatcactctgtgaatccaagggtttccctcctgccagctgtgactcagagggacctcagcccaactgccactgaaagaggcagcagggatagagtctatggaagctggacctcctggtgtacagggggttttggaactggtgaggccagggtttgaatcatggctctaacaccgactagctgggtgagcagaaaattcaatttctgggcctaccaaattgaagaccagatcccagaccttgggaccc

SEQ ID NO: 581211 - DNA, 829 bp, Homo sapiens
ttatgcacagtcgtaagtcttcgtgaaacctatggtgaaatgtgtgctctgttgtgctctaaagacgctgaaagacatgaatgctgtcttgcaaagcatggatgacaaaccaaagctcccccgctgggtgagaacagaggttgatgtgatgtgcacggcttgtgcgtgactatggctgagacctttatgataacaaaactactgtactatgaagatggctccagtaagatgacatccattagcctttgatgccccggaatctcgctttacttatgctgataagaggtaataatctgctgtttactggaatgttgccaagtctgactgactcatatggctggcctgcctgttgtccaacaggtcgatagatacttcgggatgactgagtggagatggctttcgtctgaccagatcggagactcaagtgtgccaatctccaatgaatgtcggctgagcgagctttcaaatgaatgggcagtagttcgcctgaggcagagatttcccaaagctgagttggcgcgaagtttccaagttacgtgacagatcttatccaaagtccacacggaatgctgccattggcgatctgcttgcatgtgctgatgacccgggcggaccttgcccagtggttctgtggaaatcgaggattgatctcccagtagctggatgggatgctgtggaagccctctggttgcaaaatcccatggaggccggagttgggcggaggttatttctcgcgggggctcctgggcggggttggcgaacgaaaggggtgccacatgggggggccgcgtcccggaggtgggctttgaacggtctgtacacttgcgtg

SEQ ID NO: 581212 - DNA, 289 bp, Homo sapiens
caaccgcagttcggtctcgacttcgacagcgatctgaccaccaccccgcaacccaacgcctggcagcgccgctggtcggaattcttcgccgagcagcgcatcggctggcagctgcagctggcggcggagaaaggcatgaccttcggcgatatcgacgacatcgtcgatcgggtgtatctgcgcttgcagcaccaccagccgcagccttccctgctgcacggcaacctgtggccgggcaactgcgcgatgaccgccaacgggccgattctgttcgacccggccagctact

SEQ ID NO: 581213 - DNA, 440 bp, Homo sapiens
atgtaaggtactatagaggatcttgtgcggagctgggagtagagttgagagtgagtctgagaatctcattgtgtatgtgggggtgtccctgctaaaagcctggaggccggggcaggtgggctgcccgtgctgacggaggagagggaggccatttcccatctcctggcagccaagagcccacacagacccagaactttggagacaagagtcctgggaaccctggcaatgagaatgcattggagttccaaggccgtggccatggtttggggcagagcagacaggagcagtgggtgggaggaaggaagggagtcccctcccacagagccatgttccccacaatgttcatccacaccccgatgtcaactgccaagccctgggcagcatccaggtctccggataaaccctgggagatgcctaggaccatggcaccgagtgcccag

SEQ ID NO: 581214 - DNA, 983 bp, Homo sapiens
cgaaccctccggtgtaccgacccaggctaagcttgaggcatggctgagcaggagcccacagagcgagcaggtggcccagattgcagcggagaacgaggagtgatgatgcactcgtgtcaactacgaagtcctcccgggcccataagagacatccatggagatccaggagctggacaaggacgatgatgagcctgctgaatagtacaacggagggccctgctggtggccgcgctggcaaggtttccagcaagaccgccaagcgttcctccatacgtcggatgagtgacatgtgaccttgatcctcttgaggtgatgcagagcatctggcctccgaggacccccacgtgtgagcctgagatcgctgagcgcggcagactcctggcagcagcatgtccaacgaaggcacgtcgtctatgctgcctgagagggcaggcggtcgtgggagtacacgtgagtaagagagagtcgtcgttctcccggggtttaacccgatgcagcattagctgtccgggccatgatagtcacatctcgtgaccattacagtgagcgagggtagacaggccgttcaagaatttgtagcaagactagacttacagtggtatggacagcttagtggtgcctcgcggggccgcaggcagtcacgaagtttcccttgtagcgcccccggtggtgaagtgacgggtcgaacccaatgggggtcattgtctgggggcccacggggggctacgctgaacaagacaatccaagattgcccgatttacacgagcaacgcacggaacaaagatgcggagacagcgtggttccctgggggaagattggggagatcttcaaccgaatgcaaacggaaagggaggtgggaaaggggacattggagtcccccaagccctgagaaggcccgggacgcagggcctagaacatgggaacgggaacgggaaccgagctgcacccggcggactctgtttttcccggggaacacacggcca

SEQ ID NO: 581215 - DNA, 771 bp, Homo sapiens
gagtctacatgaaaaggatggtgtcttggagcttccactaaacttaataaccatgaaacagtctattattgctactatgtgtgtcttctagttagatgtcccaaggtgtcaatcgacaactgaggagggtgttctatcgaggtgacgccgatggttcacttcgagccccgtatggacaagaacgcacgagaagaggctgtctggctacaaacaggaaagggcaatcgagaagatagtgtggatgagttaaataacaatgtggaagctgtattcccaggacctcctcttgcttccttatcagtcactgtgtattggctgtagaaggaccatgtggcataagaggagtgcgagaagcaagtgagaaagattagatgaataaggtgtaaagtaccaattgagtactgcactgcaagaatctggaaaagtcgaagcctattatatatagatgagactgtgaatagcaatataactcaatagacctatcggggtgcttgggttgcatgtgcctgggagaagggtgagaagtcacagattaaagatgtgagtaatctgatgtcatctagatcaagatggatgtattgtacttatgcaccatggacttggcgagaatgcaagtattacctgtgaggggtcgtaggtctaaggaatgtgaggaaataatctaggaaatggaggtgaaatcatcgtagagaatgtatcttctattcaatcctgactagttcgtagtttagaccgtaatataagtagtactgtgacatgatataccaattt

SEQ ID NO: 581216 - DNA, 177 bp, Homo sapiens
  misc_feature (28)..(28): n is a, c, g, or t
agacgttgtcgcttcggatgccaagacncttcgttgttggcaaagttcgccagtacaatcgccccagcagttgggtttgttcgttggaatagttgccgacaaccgtaccgtcatcattgatttgataactcaccagatcgcccggtttgtagccgttctgggtggttgccacaatat

SEQ ID NO: 581217 - DNA, 708 bp, Homo sapiens
gccctggtctccggacttcacttcccaggaggcctcgcgcgcgacgtggcaagtgctgcgagcctataagtaaggcgaggcggaacccgccgctcgtgctctggggcggcattgcgcagccggcctgtagagcattcagggacagatgtcttctgcatctcaactaggaaccttctgggagcgcggagctccgtgcgccttgagtagccgagacggcgaggttcccggagatcctcggccgtcactatcgatcccactgtggtatagggggtgaagtcgcctgcaaaatgttaagctgattgtgctcataggtgcccaatttcgcaggaaattggaagcccagagccatggttcctctgaagcctagtcaattaagggcatagaaggaggttgcgtggatctagaatgggtcgtcgtggaccgggttcataccttcgtcacatcgccttgctcgctggggtccctgaggcgtctaatgatgcatccttcttctagtatctacatggatggcagtacttggggtcgagtggcttttatgccgtgggaaatgtgccagcaattcaacgatgcttcaatcgtaggcaaccgctagttgcttatggttgctggcatggtgcgacattctattaggtaggtgacgtaagaagcgtgtaccggtctgatcccactcgtgggtggggccctagagttgcccctgacactcactcc

SEQ ID NO: 581218 - DNA, 164 bp, Homo sapiens
ctcctgggcatacgagctaaggatcatcagcaatggcccgctgggcattggggaagcgctggggactgtagttcggggtcttcctgcagctcgtttttgtgtatcataccggcagctgctgcctgtagcgtctcctagaaccctctggtgcctccaggttcccg

SEQ ID NO: 581219 - DNA, 425 bp, Homo sapiens
gataagcggcagggtcggctcgctttcgcgcaggtcgtcgcgggcgttcttgcccatgtcctcgacggtgcccgcgtagtcgagccagtcgtccatgatctggaatgcggtgccgatccggcgcccgtattcggcggcggcagcctcggtcggcgcatcggcgcccgcgagtaccgcgcccaggcgggccgacgcctcgaacagcttggctgtcttgtagcggatcacctgcatgtagcgcgtttcgtcgacgtccgcatcgtgcatgttgaggagctgcagcacctcgccttcggaaatgatcgtcgtcgcttcggacaggatctccatcacgcgcatcttgccgacgccgaccatcatctcgaacgagcgcgagtagaggtaatcgcctaccagcacgctcgccgcgttgccgaacagcgcat

SEQ ID NO: 581220 - DNA, 185 bp, Homo sapiens
tatcttgctgatcagaccagcaggtgcagcttgctcggcctgttgctggtgacctggctggtactcggcacctggtactggtggaccaccaacctgcattggctcgatgccttgcgtcatgtggcgctgaacgtgacgtctgtggtgactaccaccggctttgcactggggcaaagaatcgtgcc

SEQ ID NO: 581221 - DNA, 841 bp, Homo sapiens
  misc_feature (23)..(23): n is a, c, g, or t
  misc_feature (107)..(107): n is a, c, g, or t
  misc_feature (124)..(124): n is a, c, g, or t
  misc_feature (356)..(356): n is a, c, g, or t
  misc_feature (365)..(365): n is a, c, g, or t
  misc_feature (368)..(369): n is a, c, g, or t
  misc_feature (371)..(371): n is a, c, g, or t
  misc_feature (408)..(408): n is a, c, g, or t
  misc_feature (420)..(420): n is a, c, g, or t
  misc_feature (444)..(444): n is a, c, g, or t
  misc_feature (480)..(480): n is a, c, g, or t
  misc_feature (482)..(482): n is a, c, g, or t
  misc_feature (558)..(558): n is a, c, g, or t
  misc_feature (611)..(611): n is a, c, g, or t
  misc_feature (614)..(614): n is a, c, g, or t
  misc_feature (616)..(616): n is a, c, g, or t
  misc_feature (627)..(627): n is a, c, g, or t
  misc_feature (656)..(656): n is a, c, g, or t
  misc_feature (658)..(658): n is a, c, g, or t
  misc_feature (662)..(662): n is a, c, g, or t
  misc_feature (670)..(670): n is a, c, g, or t
  misc_feature (672)..(672): n is a, c, g, or t
  misc_feature (674)..(674): n is a, c, g, or t
  misc_feature (678)..(678): n is a, c, g, or t
  misc_feature (697)..(697): n is a, c, g, or t
  misc_feature (709)..(709): n is a, c, g, or t
  misc_feature (711)..(711): n is a, c, g, or t
  misc_feature (717)..(717): n is a, c, g, or t
  misc_feature (722)..(722): n is a, c, g, or t
  misc_feature (728)..(728): n is a, c, g, or t
  misc_feature (732)..(733): n is a, c, g, or t
  misc_feature (752)..(752): n is a, c, g, or t
gagtcagaacaccctgtgtcagnactgcgcccccgggaccttctctcccaatgggaccctggagaaatgtcagcaccagaccaagtgcagcttgctggtgacaaagnccggcgctggaccagcngctcccactgggtatggtggtctctctcagggagcctcgtcatcgtcattgtttgctccacagttggcctaatcatatgtgtgaaaagaagaaagccaaggggtgatgtagtcaaggtgatcgtctccgtccagcggaaaagacaggaggcagaaggtgaggccacagtcattgagccctgcaggcccctccggacgtcaccacggtggccgtggaggagacaaaacccttntttattttnatnngncttaaccactaacctacatactctgcacccctacgcnagagatacctgnagcaacggctgctgaaagaggctntccacctggcgaaaccaccggagcccggaggctttngnggcttccgccctgggctggcttccgtctcctccagtggagggagaggtggggcccctgctggggtagagctggggncgccacgtgccattcccatgggccagtgagggcctggggcctctgttctgctntgncntgagctccccngagtcctgaggaggagcgccagttgcccntngctnacagaccncncncccngccctcctgggccagcccngagggcccttcngncccctnctgtntgcgcntctnnctcttgtggcctcagcagnacaggcccgggctctgcctctcttcctaggctggactgggttgaatcagtgtggtgtttagtggaaaccacatcgaaagtgattttata

SEQ ID NO: 581222 - DNA, 436 bp, Homo sapiens
  misc_feature (275)..(278): n is a, c, g, or t
tgcgggttctccatggtgaccttggagtggtcattacctccgggcagcgacctcgcccactttcggggaccccttccctgtgctcctggtggagtcctggggtgaggctgtgggggcagcttggaacagccgcagtggaccaaccggtgcccagtcatacccgcttctgatcacgaaggcggtggccctcgtgtgcgctcttggtcaaagcctggagggaattggaataccaagtttgctctactgctggaggaatttaaagaacttttgttgannnnagcgtttgtgatttaacataaaaggtgtcatttaatgttatcccccatcccccagaccgtataaaaaccatgtaacaatattatggggagtttgaggaaaggaaatcatttctaccagaatgccacgtagagtactactattaaaaattttgtaatgt

SEQ ID NO: 581223 - DNA, 465 bp, Homo sapiens
  misc_feature (304)..(307): n is a, c, g, or t
gcgctcgggggtcttggcctccgggcggtggcgtggaggcgccaagatcagggtcccgggttttgtcggccaccacgccgcaatgtgaggattcgcctcggcggagcccctgggagcttcggggtagctgctcgggatggggcgaggggcgcggcgcggcgcagagagtgagacctggacttaagagtcggggagtcctgggccacaccgagccctgtctgcgggttctccatggtgaccttggagggaattggaataccaagtttgctctactgctggaggaatttaaagaacttttgttgannnnagcgtttgtgatttaacataaaaggtgtcatttaatgttatcccccatcccccagaccgtataaaaaccatgtaacaatattatggggagtttgaggaaaggaaatcatttctaccagaatgccacgtagagtactactattaaaaattttgtaatgt

SEQ ID NO: 581224 - DNA, 341 bp, Homo sapiens
agcggaacagcaaatatgcagaacagcaaatatgtgcctggttcttcctctggaagcttcgtctcagaggggcacctggcatatggggtgtcagtctgcccctactgggaggtgcctcccagttaggctacttggcagtcagggacccacttgaggaggcagtctgtctgttctcagatcttaaactgcatgctgggagaaccaccactctcttcaaagctgtcagacagggacatttaagtctgcagctggctctttctttctttctttctttctttctttctttctttctttctttctttctttctttctttctttttctttcctggctggttccgctg

SEQ ID NO: 581225 - DNA, 364 bp, Homo sapiens
  misc_feature (87)..(87): n is a, c, g, or t
  misc_feature (129)..(129): n is a, c, g, or t
  misc_feature (142)..(142): n is a, c, g, or t
attgagtgtcgtgtgagcggtgcggttctcaggagtatgtcgcaacaactggtgtatgacacctcggacaggatgactatcactccntaaggactagaggaaggatccaaacgctgatggggaggctgnaagacggagccgncggactgtgcagatcctcaagcagacctacagcaagtttgacacaaactcgcacaaccatgacgcactgctcaagaactacgggctgctctactgcttcaggaaggacatggacaaggtcgagacattcctgcgcatggtgcagtgccgctctgtggagggcagctgtggcttctaggtgcccgagtagcatcctgtgacccctccccagtgcctctcctgg

SEQ ID NO: 581226 - DNA, 1017 bp, Homo sapiens
ggagaccctgagagacggagcgcgaacagaagaacagcctgcgcaaggcagctgtcacactacatgagcatcaatgactccttctacaccagccacctgcgatgtctcgctggatgtgcctctaagttcagtgacgatgctgccgagcccaacaactgatgccgaggccctggtcaatggctttgagcactggcggcctggccaagctgccacgtgtgacatactaatgacctccatcgccgcaagaatggagggcctcgcaccgccctcccccagccatcgtctccgacctactcagtgagctcagacatctctgcagatccagaaagctgcaagcaagcagctgcatgcgagatggagcgggaacacaggcgggccatgctggcaactgctgcaggactacacgagaatgcagctaggaggcacactgcggtggcttcccttgtccagaatcatgccagtggacgacaggtcgaccctgcctcacagacgaatctagagtgccctgtcggagcactgcaaggccaagcaacggacgcgggcatgacatggcccctggaccaaacgcaggaagggaccggtgaccatgccaacttgacgcgatgggggactaactacgaaggttgggacatttctacgtggcctgagcatctttgagcccttgcaagttaccatggtggctggtgggctgaagcgctggccgcagcctccgaccggaacccaaccctccaagggtcactatgctgcctgtactaacgcaaaggaaggggcatcggcgtgacgggcccccaagccaacggccggaagggcacgaaagggagcccgcctacatggacacaggtaagacaggggcccatagggcacactccaaccgcgaaccaaaacgggataatccccagtggcatctacaacacaacggaccacgacccggccagtaggaaccccgcagaagacctcgagatggagcccaaggatttagcacaacacgcaacgctatcaagcccccagcgcacaccg

SEQ ID NO: 581227 - DNA, 777 bp, Homo sapiens
  misc_feature (14)..(14): n is a, c, g, or t
  misc_feature (84)..(84): n is a, c, g, or t
  misc_feature (153)..(153): n is a, c, g, or t
  misc_feature (157)..(157): n is a, c, g, or t
  misc_feature (159)..(159): n is a, c, g, or t
  misc_feature (173)..(173): n is a, c, g, or t
  misc_feature (200)..(200): n is a, c, g, or t
  misc_feature (204)..(204): n is a, c, g, or t
  misc_feature (213)..(213): n is a, c, g, or t
  misc_feature (217)..(217): n is a, c, g, or t
  misc_feature (219)..(220): n is a, c, g, or t
  misc_feature (278)..(278): n is a, c, g, or t
  misc_feature (280)..(280): n is a, c, g, or t
  misc_feature (341)..(341): n is a, c, g, or t
  misc_feature (343)..(343): n is a, c, g, or t
  misc_feature (349)..(350): n is a, c, g, or t
  misc_feature (383)..(383): n is a, c, g, or t
  misc_feature (388)..(388): n is a, c, g, or t
  misc_feature (396)..(398): n is a, c, g, or t
  misc_feature (401)..(401): n is a, c, g, or t
  misc_feature (403)..(404): n is a, c, g, or t
  misc_feature (410)..(413): n is a, c, g, or t
  misc_feature (422)..(422): n is a, c, g, or t
  misc_feature (425)..(426): n is a, c, g, or t
  misc_feature (430)..(432): n is a, c, g, or t
  misc_feature (437)..(437): n is a, c, g, or t
  misc_feature (441)..(441): n is a, c, g, or t
  misc_feature (444)..(444): n is a, c, g, or t
  misc_feature (454)..(454): n is a, c, g, or t
  misc_feature (468)..(468): n is a, c, g, or t
  misc_feature (473)..(473): n is a, c, g, or t
  misc_feature (476)..(476): n is a, c, g, or t
  misc_feature (479)..(479): n is a, c, g, or t
  misc_feature (483)..(483): n is a, c, g, or t
  misc_feature (485)..(485): n is a, c, g, or t
  misc_feature (542)..(542): n is a, c, g, or t
  misc_feature (669)..(669): n is a, c, g, or t
  misc_feature (676)..(676): n is a, c, g, or t
  misc_feature (678)..(678): n is a, c, g, or t
  misc_feature (684)..(684): n is a, c, g, or t
  misc_feature (687)..(688): n is a, c, g, or t
  misc_feature (696)..(696): n is a, c, g, or t
  misc_feature (705)..(707): n is a, c, g, or t
  misc_feature (711)..(712): n is a, c, g, or t
  misc_feature (718)..(718): n is a, c, g, or t
  misc_feature (723)..(723): n is a, c, g, or t
  misc_feature (727)..(727): n is a, c, g, or t
  misc_feature (732)..(732): n is a, c, g, or t
  misc_feature (735)..(735): n is a, c, g, or t
  misc_feature (737)..(737): n is a, c, g, or t
  misc_feature (743)..(743): n is a, c, g, or t
  misc_feature (748)..(748): n is a, c, g, or t
  misc_feature (750)..(750): n is a, c, g, or t
  misc_feature (753)..(754): n is a, c, g, or t
  misc_feature (757)..(757): n is a, c, g, or t
  misc_feature (760)..(761): n is a, c, g, or t
  misc_feature (764)..(764): n is a, c, g, or t
  misc_feature (775)..(775): n is a, c, g, or t
ccacaaggagcttntcatgcccctgtgccgcatagcctcacctctttcctccagagtggctctctgcggccctgtgtgcctgcnacagagtgttcttttctggagtcaggatgttttcggtcaccctctctggttctgcgcctgtcccagacnagcncnaccccagggggaanaggagcggcaccggggaagggcgccanggcncgccgggcncacncnnacgggcgggcgccagggacggaagcaggccccacccggggaagggcacagcggcggcngnccgtccaacgccttttggttttggggggagaggggaaggaacagggggccaggccagcagngngggggnnacaaggagagggaaaaagggccggtgggttaanacaanaaaaaagnnnacngnnaaaagnnnnggggtgggnggnngggnnnggggnaggnagnggccgggggnaaacggaagggggnggggnggnggngggngncggggagccgggggggcagggcagggggaagccacatagacatccctttcttccctngcacgctcgctagcagctggtaaggtcttcacaccctgattcctcaagttttctgcttagtggcactgacattaagtagtggggggacagtccatgccaggacaccctggagtagccttcccccttngccgtgncngccctnacnncctgtccntttggagtnnngggnncttttnttttncttnctttngtncntgtatnttaancnttnntanaannaantgtttttcccnga

SEQ ID NO: 581228 - DNA, 138 bp, Homo sapiens
  misc_feature (20)..(20): n is a, c, g, or t
  misc_feature (47)..(47): n is a, c, g, or t
ccaaacccaggcctaaaaanccaacaattgaaaattgggttctcctnctaagccttagtatttcaaagctcaaaacagttacaaaaataagcaaacaaataagacaaaaaaaccttgccagcagatctgctgaatact

SEQ ID NO: 581229 - DNA, 419 bp, Homo sapiens
  misc_feature (184)..(184): n is a, c, g, or t
  misc_feature (311)..(311): n is a, c, g, or t
  misc_feature (318)..(318): n is a, c, g, or t
  misc_feature (320)..(320): n is a, c, g, or t
  misc_feature (326)..(326): n is a, c, g, or t
  misc_feature (329)..(330): n is a, c, g, or t
  misc_feature (338)..(338): n is a, c, g, or t
  misc_feature (347)..(349): n is a, c, g, or t
  misc_feature (353)..(354): n is a, c, g, or t
  misc_feature (360)..(360): n is a, c, g, or t
  misc_feature (365)..(365): n is a, c, g, or t
  misc_feature (369)..(369): n is a, c, g, or t
  misc_feature (374)..(374): n is a, c, g, or t
  misc_feature (377)..(377): n is a, c, g, or t
  misc_feature (379)..(379): n is a, c, g, or t
  misc_feature (385)..(385): n is a, c, g, or t
  misc_feature (390)..(390): n is a, c, g, or t
  misc_feature (392)..(392): n is a, c, g, or t
  misc_feature (395)..(396): n is a, c, g, or t
  misc_feature (399)..(399): n is a, c, g, or t
  misc_feature (402)..(403): n is a, c, g, or t
  misc_feature (406)..(406): n is a, c, g, or t
  misc_feature (417)..(417): n is a, c, g, or t
atggataatgtgcctgttttttaacacaacaaaaaagccttcctccaaaatcccctttttgttcttcctggacctgggcattcagcctcctgctcttaactgaattgggagcctctgccacctgccccgtgtatcctggctctcagctcatggggaagccacatagacatccctttcttccctngcacgctcgctagcagctggtaaggtcttcacaccctgattcctcaagttttctgcttagtggcactgacattaagtagtggggggacagtccatgccaggacaccctggagtagccttcccccttngccgtgncngccctnacnncctgtccntttggagtnnngggnncttttnttttncttnctttngtncntgtatnttaancnttnntanaannaantgtttttcccnga

SEQ ID NO: 581230 - DNA, 283 bp, Homo sapiens
ttcatctctctcatttatactgtaataaccaactttcttgcttcgaggaagtacttgagtggtcaaaatatcgtttctcaggttcgtgggtacactgtgtgtctgcatgactggctgttaatactgatgccccacatttctcagatcgcctttgttgcgatgactgctcatttattcacaagtcacaacatctttagctggtattccagccaatcctaacttgtactagcgtagcttctactgcaatctcatctaaaggcaatacctcaatgtcatagatact

SEQ ID NO: 581231 - DNA, 135 bp, Homo sapiens
  misc_feature (27)..(28): n is a, c, g, or t
  misc_feature (92)..(92): n is a, c, g, or t
catgataaatgcagagggaacaccagnngacgtttttcttcaactctgcacagctattgactctattattttctgaaggcaaaagggcgtgngtgttagaatggaaacagaaaaacattaaaaagttcattcctt

SEQ ID NO: 581232 - DNA, 146 bp, Homo sapiens
tgcagaactgtgaggcaattagacaattaaacctcttcttttttttgtgtgttgttgttgtttttcggtggtggtggttggttttgagacaggctctcactctgtcacccaggcttcagtgcctgaccaggcttcagtgcctgacc

SEQ ID NO: 581233 - DNA, 136 bp, Homo sapiens
ccgtacttttcgtccattgctgattccttgaggttccccggtgcgcggaaaagcgtagtcctcactaaataatacaaaattagccgggcattgtggcatgtgcctgtaatcccagctactcaggaggctgaggcac

SEQ ID NO: 581234 - DNA, 337 bp, Homo sapiens
agggttgcaatcctagtctctgataaaacagactttgaactaacaaagatcaaaagagacaaagaaggccattacttaatggtaaagggatcaattcaacaagaagagctaacactcctatatatatatgcacccaatacaggagcacccagattcataaagcaagttcttagagacctacaaagagacttagactcccacacaataataatgggagactttaacacccactgtcaacattagacagatcaatgagacagaaagtcaacaggatatccttgttgaacaatatccttgatgacatggaggcctgtcatggatcgggggaaggggaggg

SEQ ID NO: 581235 - DNA, 191 bp, Homo sapiens
ggagaagcgggcacaggcaaatgcccgccagactttgaaggagcatgtgcaggactttgccatgcagttgagcagcagcatggcctgaggggctgctggactgaccgagggggtgcccagcaagactgcagccttttcctccctcagatccccccagaccccccaggggccataataaagcggattttaga

SEQ ID NO: 581236 - DNA, 602 bp, Homo sapiens
gcacgagttctccttcacgatttccatcaaagagtgaacggttaaaaaggtatgtcagaaagggcattccagcggaatggagaggaaatgcatggtggcatttcgctagagggcaagagaagttaaacaagaataaaggcgtctattcacaacttttacgaaagatgaagcagatcaagaaacaaaaccctaatgaaaaacaagttcaagacttggatattattgaacgtgacttgaatagaacatttccggacaatatacatttccaaagtagcttgcataacaaagagggacctccgattataaaatctttacgccgggtgcttgttgcgttctctctctacaatccgaagattggctattgtcaatctatgaactttcttgcaggcttgctattgttatttttagacgaggaaagggccttttggatgctagtgattattacttcaagatacctaccgggggtgcataatatcaatctagaaggtgttaacattgaccaaggggtactgatgctatgtgtcaaagaatatattccagaagtttggtcgtacattaagccttccattgaccaccaccaaaaaaataacaaaactttttct

SEQ ID NO: 581237 - DNA, 172 bp, Homo sapiens
atggcatgtagtgaggacaagagagctgtaagacgcctccgtactgcttcgtgaactgtgctaagcgtaccctctcttccagcacccaggccatgtattgagatcgtttctctctatgaaggcattgagttctatacctccattacccgtgcccgatttgaagaactgaatg

SEQ ID NO: 581238 - DNA, 868 bp, Homo sapiens
tagagcatattggctgtcaggctgtttcgaggcgcgcctaatgcggcgggatcccatccccgggacggcggcgggccggagagacaaatcggggcccggggcatgtcccgtgccccgttaggaggcgtgcggcggctatggagatcgcgccgctggaggctccgcccgtgcgggcgcggacggggacgttgaagaggccccagctgatgccgggtctcccaggccccggtcgccccccgccgatgggcgcctcaaggctgcagccaagcgctgtcacattcccgtccgacgaggatatcgtgtctggagcagtgtacgcccaaaagacccctggagaccttgcccagaatgtgaccgtggacgagggtcatcgggcggcctacaatgcaggcctgccaagaaggctgaactgcaggcagatccccaagctcctcaggcagctgcagggaatcacagacctcgggcaccgctcgattgtctggacctgaaaggtgagaagcttgactacaagacctgtagaggccctggaagaggtcttcaagaggctgcagtccaaggtcgtggacctggagcagacaaccctggatgaagatggttgcctcggccctcttcgacattgatcgaggtactacgagttcgcgccacccactcttcaacatcttcttcaacaaagcacaatcgggcacccgggggcttggcagggcgggccgccccacattattgccgcaagaagaagctgccctgcaagtaatcttgggacgccccggaaaaaggccccctttttgggaccacttcgtgggccctttctgtggcccgtggccctgggcaatccggaacaatcgttggagtgctgcccttggagaaaggc

SEQ ID NO: 581239 - DNA, 1139 bp, Homo sapiens
  misc_feature (1139)..(1139): n is a, c, g, or t
ggtagtttccagtgaaagttttccggtttgcaggccgcgcacatctgtggcagtgtgccatcctcggtcccctatgctcgtttgctcgcagccccgtatcggctaacaagtgagtttcagtggcgtcatggccagggtgccaccgctggccagccgggtgtgaggctgcctttctgctgcccgcgcgctccagtggtctctggtgtccgccggcgtccgtattcggcctgaacgcagcccctccgcggcgacgagcagtctcgctgccggagctcatggcctcggagtgcgccgtccccgccgcggtcgccgaccgcgcccagctccgcccgagcctgagctggaccagctaaggcggaaggtggagacagttggacacgtgaactgcggaggctgcaaggcggcaggtgcgggagatcgagaagcatgcttgcatcagacagaactgggtgtaccagaactgcaggaaagcaagaacgcaggagctaccgcaacagcaaggtgtgaaagaactcaggtaagagatagtccaagcgtgggagaaatgaagataataagaagagtctgatgtaggaggtaggaagagaggaaacagtggttccatttgtaacaagtcgtacagatgcatagtgttatcagaagggtactagcaaatgacagtaaggtactgacgagataaaaggtgaagtgaggctgggtgaggatcaagagaagatcacagcgtagtacgagagtatcctataagtggaaaaacgagacaggaaccattgacacaaggtagaacaaactgcactgcgataaaccccagggggagccggagaaagcaacacagaagacaaagtgggcaggaaaactaagaccgaaaggggacagcgcaaaaggaccatacaccggtacagcgaggggaagcacacgaggagagcaaggcaagaaaacgacaaacaaaagaggacgaaaaccaacccgtaccacagaccgggatcgaaggcaacacaagaggaaggagagagaaagcgggagggagaggagagaaaagcggagacgaagagcaacagaaaaggacgacggacgaacggagggcagagagacaacgaagaggaggaaagggcgcaaaggaacgggaagaagacgcaagagcn

SEQ ID NO: 581240 - DNA, 332 bp, Homo sapiens
  misc_feature (303)..(303): n is a, c, g, or t
  misc_feature (306)..(306): n is a, c, g, or t
ataagtagagagtttatttgggccaagcatgagggttacaacccaactgtatggagacaagttgtcctgaacaatacacattcttattagcaacagttataagtaggttttcaaagaaaaagaagaggcagttcctaagttatttaccacgaatttacattgaaacagcataagctatcaattggctataaattgctctctgtatcaaattccagggaaaatgaagataatgtgcaaggcagcttagtcgggaacaaaatgactttaaacaattgcccccagctatggtttgtggaggggcanttngcacaaggaagcaaggcttaaaggac

SEQ ID NO: 581241 - DNA, 547 bp, Homo sapiens
catctcagaggatgtaagacctggaaatgtaagaactgactagtgataaacataaacatacatagtaagaaaaaatcctaagtataatgggaattggctatggtgccctctcactactgcccctcccgtgtgctatgtagctctgcaggtatggataaacagtcacgggcttacagtgatagaaacacaggtatacgggccaaacagcagaagcaggccaagctcacagaaggtaaagtggggtaagtgtcagagaggcctttcttattataataaggaggaaacgtgggagaaatgctggaaacatatctagtgaaataaacatgattgagcaatagcaaaaaccactgaggacctcaggacacctctcctagagcgatattcctggtcccacacagcttccaagagtttaactggatattgcaatttagcaaatactcactttgcctctgccttgtaatgtaccctgtaaccgataatagggaggcctgaaagcaagcgaagacaagcggctgggcaatgatcacacaggcaaagagggcaggac

SEQ ID NO: 581242 - DNA, 244 bp, Homo sapiens
gaggagttacttgaggcgtgagagaggtgggaaatcaggtccaaggtgatggatagaaaacgcctcccgaactcgcatccagctttcctaacttaacatagcctctgccgataaagccgttattcgcaaaactcaaatcattcactgaaatgcaagtacagtccactttggttcttcttttcccaacacaatcccaaagagcgttctccctctacccctttactcacctacccacaagcacctg

SEQ ID NO: 581243 - DNA, 101 bp, Homo sapiens
atgcatatccgctctaactaagctctgtgtatacatacagagggaagagtgagtcgagctagtagtggtctagagctggcacgtcttcggtgccatgcctg

SEQ ID NO: 581244 - DNA, 177 bp, Homo sapiens
  misc_feature (68)..(68): n is a, c, g, or t
ggcggactcgcggaggcaaggccgaggataaggagtggatgcccgtcaccaagttaggccgcttagtncgggacattaagatcaagtccctggggggggatctatctttttttccctgacctattaaggaattagagatcattgatttttttccggggggcccttttaatgatgagg

SEQ ID NO: 581245 - DNA, 727 bp, Homo sapiens
agcggcgtgcgcgctgagacgcgagggctaatgggtagcgggagcgctaggggaagcctggccggcgtcgggcccccgggggcatccgcgagctatcggcggttggaccggcggctctcggtggggttccggacgcggatctggcgccgaattctcacgagacctgataccttccttatttgtatattctcttacttaaaaagccagatgtcttttttttttttttccatggaaaagagaaattggacagggtaaacggccgttgggaggggccaccgggggacgcggcccgagcccgggttctaccgtgaagaatatcttctattggccacatttcctctcccggtttcctttcttcgcccctctcctctttccctttcccctcgagggtacatgagaactacgggaccgattacgctaacctctgggcccttggtcaaaaatgggagccgaaagggtggatttagacagacccccgtgctcagggcagcaccggtaatctcggtattatattaccaggggccttcggtaatttttgacaattgggatgccaccggggacaacacggcttagacagcacgggaagacctttataattatcctaggtggcttttctccaatcagcctagcctggattggaaattcatttaatattttggagacgggggaactccattttacaagatagtttaacctcagcgatctcggatgttggcgcctaatacct

SEQ ID NO: 581246 - DNA, 696 bp, Homo sapiens
  misc_feature (23)..(23): n is a, c, g, or t
  misc_feature (67)..(67): n is a, c, g, or t
  misc_feature (90)..(90): n is a, c, g, or t
ctttcaggtcttccgaggctganattcacgtttcattctgccacactcgggaacggtgatcggggangcatggggatccgggagaagcanccacaaaactagcatcctcctggaggagctcggtttcttgttgttggaaacgaagctcaactcatataaggagtctggaattcccctgccggagttacaacctccgaacttccgtcgtcgtaattgaggctcatatggagagctgtactaaaaagggctggatcaggtgcaacaccgaccgatcaaggaacgagtggattcggtggcgatcactgatgcctcgttcacaggatacttcgtcctgtgttgtacgctggagtttcacgaccgtctgaaaaacattgtgccgacccctgacctggaagagcagccagtacctccatgcatggctgtggcgaagacggactggggattgccgctctatcgaacatgttgtggattaggaagcacgtccaagtaggagaagtcttcgtgacttctctctagtgcctttgtgccctggtgttgcccactgaattgcctgtgaacatctaagtgtagtggtagcattaaggggaatacgcttacgaaggcctcaaaggttatcacgcgagcactttgtagtcaactgctattaagagtaaaagtagtatcacgttgggcctaatcctcaatgatagatcctca

SEQ ID NO: 581247 - DNA, 364 bp, Homo sapiens
ggtcgaccggagtttcgccgcctgtatccggatatgcagttggagctcaacagcaacgacctgatcatcgacctgctggagcaaagtaccgatatcgccattcgtatcggcaacctggcggattcgaccctgcacgcgcgttccctgggcagcagccgctgaatatcctcgccagccccgcgtatctggaaaagcatgggctgcaagccagcgtcagaggtttgtccgggcatacattgctcgggtttacccagaccgaaagcctgaaccactggcctttgcggcatgcccagggtgatcgctggcagatccagccgggcatctgcgcgtccagggcgagacattgcgccagttggccctggaa

SEQ ID NO: 581248 - DNA, 437 bp, Homo sapiens
tagaggatcccgacaggcatccctaaccagcacggccactccccggctcacttccaccctgggtctccatctatgaactaccacactcggtagcttatattgtgggtggcttcccccacggaataacggctcggggggacaggggttggggtatggctggcatatggtagacacccaataaatacctcgcgggtgagacaattaaggatactcctaaatggggggtctgagccaccagaaaatcaccaaacctggtggaacagggcatttcacaggactagtgttccacagaacacacttcagttgatcccctaaaactggaagacccgggccacatccacagcagacacagatgagaactcgggaacccccagcccctccactcaccagccaggtgacatttccggggtgatcacaacggctctgagaccgggtta

SEQ ID NO: 581249 - DNA, 509 bp, Homo sapiens
  misc_feature (17)..(17): n is a, c, g, or t
  misc_feature (33)..(33): n is a, c, g, or t
  misc_feature (42)..(42): n is a, c, g, or t
  misc_feature (62)..(62): n is a, c, g, or t
  misc_feature (118)..(118): n is a, c, g, or t
  misc_feature (280)..(280): n is a, c, g, or t
aaaaaccctaaagcccngggaactttaagttanccggagccntggacaggaattgggtcccngcagcctgagtccaggggggcatgcagctgcaaccttcccacctattttttttttntcctgtaattaccttagggaagacccaaatgggcacccagagataagactccccttagatcccccaccttagatcacccaccctttcctcagggggtaataaagtcatcttccttggaatgtagcaatctataaccaatcaaagcactgtaacatacgcacnggtcttgtatggaaaatgttgtaatcctgctaaaattcctctctctttgcctgtggaagtgaaaccttaacttctccagtttggaatgctcaccccatgcctttggagtcaatgcttactgggtggctattctcaaactttgcactcaaagaaactctatacttagtcttattttctgaatctcattatttaaggttgacataataaacaactaatagtaacatataaa

SEQ ID NO: 581250 - DNA, 120 bp, Homo sapiens
gttatatgctgttcagggagaagaagaaagaagaaaggaagaggaggagtgggaggaggaggagaggagaaggaggagaaagagaaagagaaggaaaaagagaaagagaaggagaagaag

SEQ ID NO: 581251 - DNA, 137 bp, Homo sapiens
tgggtggcggggaggggggctgcaggaccccaagtggggtgtcccgtgagccagagggccaattggcgtgtccccccagcagcatgggcatctgtgtgctgaaccctctgagccctctgccccactgcccgcctggg

SEQ ID NO: 581252 - DNA, 116 bp, Homo sapiens
cgtggtgtgtcatgcactacaattggtaacaatcggaacagtcttctaatgggtctacaggttcagagatgaagcccaaggcacttcggggttgggcacataaaataataaaaggg

SEQ ID NO: 581253 - DNA, 465 bp, Homo sapiens
  misc_feature (465)..(465): n is a, c, g, or t
ttctgtttccgatctacattatggcaaatttttaaatgtcagctcaaaaacatgctaacaaaatgtgtcttgtcggaataactgtacaagttttctccagcttattgtcactgaaaaggtctaactgatcacgagaatgtctatcggtgatctgtacgtgagccagtgactgccttctcttttatgggggatgcagaaagtgcaagagttgcactatccatcgcttccctgggttctttaaaaaacacccgttgccctattgcctgctcctctgaacagcttacccccatgggactgtactgagggcctgctcaagatgcatttttacaacacgggtgatattcaaaggcgggtactgcttgcagtcaaattcgttgaccacttaagattggtcccctaaattgattgttaccatgtggaagcgtctgcatgctagtcatgtcccatgatagctacctctttatn

SEQ ID NO: 581254 - DNA, 316 bp, Homo sapiens
tgcttccagacaccaagggccattgtgaatcccatcctggaagggaaaggtagcatcgccatctacaggagcagaagaatggacattgctaaatgacctagcactattctctggccgcgattttatcatatcgccttgtgtcatccgtccagaatagtttctcctcgtcaccttttctgcatgggacgttaagctgctatatcaccctgcagaggcgtcatcaaagtgccagtagcagttcttcttgctgagcctcctgaatttttttgtgttttctcgaaatgtaacctacaaagacatgcctggggtaagtacc

SEQ ID NO: 581255 - DNA, 309 bp, Homo sapiens
  misc_feature (17)..(17): n is a, c, g, or t
  misc_feature (133)..(133): n is a, c, g, or t
  misc_feature (160)..(160): n is a, c, g, or t
  misc_feature (162)..(162): n is a, c, g, or t
  misc_feature (170)..(170): n is a, c, g, or t
  misc_feature (180)..(180): n is a, c, g, or t
  misc_feature (185)..(185): n is a, c, g, or t
  misc_feature (191)..(191): n is a, c, g, or t
  misc_feature (263)..(263): n is a, c, g, or t
  misc_feature (267)..(267): n is a, c, g, or t
cagtcacatttgtggantggtggccagtggtataccatccctggaaggattttgggacaatatttcagggatttcatggactttttggctccttttttccatttcctttgggggaagggggaattgaccatgnttaagtgcatcctatcaaggggcagcncngtccccanggccattggntcatnaaacantttgaagtcaaaagggtggggcagatcacttcaagcaagcccccatgatggttttcagtcctgtttttttgngggnaggggcccctttgtttaaaaataaactgaatatggatgttta

SEQ ID NO: 581256 - DNA, 447 bp, Homo sapiens
tcgttgcctgggactccgtccctgaatatgaaggttcttagcatttgccatctgtagttacgctcacatgacagattatcttatcaatgtgtctgtttctccttccctttcatgctttcaggactacatcccctctactactacttctccctacaatgggacttcaccttctaaacctgtccaaacactcctactatgacctcttacactacgttctgactcaaactatgaggctacgtcactacatatccttttcctcttcgcataggtgacgggtgggagctcccgcacgaatagacaaacacttgctgtacacaagcagatgatgtcatatataggacgaaaacaaggtaagctaggccctggttccctccatgaaagcttgttcctggtagcaaaaggcaaccaccactttcaaaacatcattcacttcctctatggggttcc

SEQ ID NO: 581257 - DNA, 962 bp, Homo sapiens
  misc_feature (962)..(962): n is a, c, g, or t
gaaagtgaaaagtggccgggtgcagtggctcatacctgtaatcccagcactttgggaggccgagacgggcggattacctgagatcaggagtttaagatcagcctggccaacatggtgaaacaccgtctctactaaaaatacaaaaattagccaggtgtggtggcacacgcctgtaatcccagctactcgggaggctgaggcaggagaactgcttgagcccgggaggcagaggttgcagggagctgagatcgtgccactgtactccagcctggccgacagcacaagactttgtctcaacaaaaaaaaaagaaagaaaagaaacgtgaaaagtggccgggcaccggtggctcgttcctgtagtcttagcactttgggaggccaaggtgggcggatcacctgaagtcaggggttcgggaccagccgtggccaacatggtgataccccatctctactaaaaatacaaaaattagccaggcgtggtggcacccgcctgtggtcccagtacttgggagactgaagcataagaatcacttgagcccgggaggcggaggttgcagtgagccaaatgtgccatgcattcaggcctggttgaccaaaggaagactctgtctcacaaaaattttcattactagttactaaaattacaaagttcgccgggattgggggacacgcctgtagtcccagtactcaggaggcgagaggaaatcggtgaactaggagcaaggttggagtgagcaagatacgcctgcactcaacggagaagaagaacacgttcaaaaagaaagcagtgaagactggcaaagggaattcggccactatgagggctgcacaaaattacaatcaaaaaaacacggggggacacgatcacacttaaggggaacacaggcgcaaccaaaggaacttaaaagggcgagaaacaagggacaagaggcaccgacaaaggcacgtatcggcggcagcgn

SEQ ID NO: 581258 - DNA, 284 bp, Homo sapiens
tattacccaacacaggggggtttttttatccccttttggtccaaaaagtgggtcccagggtcactccttttaatatgctggaattttttgccaattttttggcaatccctttaaattaatcctgctttttttttttttttggtggtttcctcctttccttttttgccccaggttttaggtaattgtaccccgtggttccctaggccacacccaggaacaggggggatttacggcccatctttttaaccggaaaaaccttccccgggggcaccattttttccctg

SEQ ID NO: 581259 - DNA, 295 bp, Homo sapiens
gcctttgcgagcagatcgcctgaggtcaggagttcaggaccagtctggccaacatggtgaaaccccaatctctactaaaaatacaaaagtagccgggcatggtggtgcatgcctgtaatcccagctacttgggaggctgaggcaggataattgtacaaacatacagcctacaacaattctctaatggtgagggatgaaataagtgaccgataatgctggaggaagaggaagtgaatgtggccccagtataggttagaatgaaaaaatccctaccaatgttaatcaaatataaaat

SEQ ID NO: 581260 - DNA, 823 bp, Homo sapiens
  misc_feature (797)..(797): n is a, c, g, or t
ggccccccctcggttaggggtgccgcttcatactgaccccccttgtttctacaaagcgttgtttatagtccgcccccttggcgtgcaccagccaccacacggggtgatattccctcccaccggggggttgcacagcaggggaggattaacgatcaccaaagatttggcggacaccgcgcaatatacctccgatgcgcgtttccttcggcgacaccaccagtggaacccccacacctcgcggcacccgcggtagatataaagacacagtaattctgtgctatacacgcacacctcgagcagtcgcacgctccacccaattgggggggacacacaccactgtcagagagacctctctctcaccccccctgtcattacagcacagtgtggtgacactcaactgaaaggggctgtctttcacagagagtgacatatttctggcgcacgccctcttgccccacactttcggcccttagatacacacgttgtaagcctcctaggccaccctctgtcacaacacacaccctcggaggtgtcgagcgccaccccctcgctcaccccgcgcagaagtggcgcgaccagagtattaacactttgtgttatttgagcagcgagtgtctcctcagtaagtagtggaatatgtatcctctccgcgattataggggtcaacatgagtcgccacgtgccactcagacgtagaccaaacccgacacagctttgctcgctcggtgagacgggtgtatctccctcatagctcccctcgctggtggggttggaagaccttagaatacaaacatgtnttcgcacggtaccaaacaaaacacaa

SEQ ID NO: 581261 - DNA, 698 bp, Homo sapiens
  misc_feature (120)..(120): n is a, c, g, or t
tccccactccctcagccctggggtccccctatcctaagactcggaaaggcccaccctgaggttctattgccttcctggtggtatcagcttccagctgtttcaacccttcccagcccgttngtggcgatgggcccatgccccctctccaggctctctagaggcaggcaggtccttggaatccccagcctgcaagcagaggctggccagctccccagctcagcacacagagacacctggcacctgctgctcatgaagaagtgcacaaggcacaaatgtgtacacttcccatgggaccacagacccagctcagtctgttgaagaccaagcacaaaggccttgaagagtggacattcccaggtccctggcaccttcccttgagccagctccattgctacttattcatgtgactgaagctgaccacaggcagctggcaggtccttttttcaaccagcaggctaggctggccatagacccagctctgcctcaccctgccatgttccagtaatggagcctccagcctgggctctattacattcttctctacagctgccccataacccgtggcttatccctggcactggggccacaccccacgccccctggataggcaacactgtcctgctccagcctgtgctgaaatgaactgtactcctaatttttttttaaaaaaaagtattaaatatctctttctatataaa

SEQ ID NO: 581262 - DNA, 255 bp, Homo sapiens
tctatgggatagctgattcctgaggaaaaaacaacgacaagcgagaccttcagtagtggccaggggtaatcaccggggccaaaactcatcccactataaggcagaagaggaacgagaggaggtgcctcacaggaaaagaggagaagaggaccatgctcgatcctctctgggaataggcctgagattacctctcgtactgggtgatacacatctgctcaaccacgcgctccatcatcttaacgtcggtctcggtga

SEQ ID NO: 581263 - DNA, 718 bp, Homo sapiens
atgaggccccagaaagcacacgtctcgggggcctgcccgcatggggtttcgcgaggccccgttgtggtacgagaaatgaggcccagttgtctgcgcacaaataagcatggctctcctaggacacggtgataccattattggaagtctaagacatgcgagactggtggcccgccaatagcatcccgtgatctgtgttaacgcatagggagggctctgcatagcacccgcgtatagcggtgtcatgtttggagtcgccctttgtgactgattcatctggccctgaccgtggccgtcatcttgactaccttggttgatttgtttggtattggggacattttaaaggctgaggtatttttgaatgtcatcgttatgtcatagacgtagttttcgcaaccctgagattaactgccctaactccctttgtggtgataagcccaactacctggactctggtcctgggatccctttcctgtgtgggtgccccgtgtcctctggcctagggttaagtgtgccagataactactcgtgcaggtattcagaatgttgttcctaattaaagcaccttgttgtctgtcttctttaatccaatcacatcttatataccgccgtcagagatgagtatactagaatcatgcgattgtctggaggtcttttaatttgatgttttcagaagggggtggatttaaatcctgaaataatatttccaccccacgaaata

SEQ ID NO: 581264 - DNA, 171 bp, Homo sapiens
cgctcacaacatgcacagtaaaaaaaaaaaaaaaaaaaaaaaaaaaaaaaaaaaaaaaggggggtttttggggggggggggttctttaagagtggacgggggggtttgaaggttgggaaggggggggggtttaaaaaggtgggggggggtggtgaggatagaaaggaaata

SEQ ID NO: 581265 - DNA, 499 bp, Homo sapiens
  misc_feature (10)..(10): n is a, c, g, or t
  misc_feature (78)..(78): n is a, c, g, or t
  misc_feature (101)..(101): n is a, c, g, or t
  misc_feature (131)..(131): n is a, c, g, or t
  misc_feature (166)..(166): n is a, c, g, or t
  misc_feature (192)..(192): n is a, c, g, or t
  misc_feature (237)..(237): n is a, c, g, or t
  misc_feature (252)..(253): n is a, c, g, or t
  misc_feature (272)..(272): n is a, c, g, or t
  misc_feature (284)..(284): n is a, c, g, or t
  misc_feature (368)..(368): n is a, c, g, or t
  misc_feature (371)..(371): n is a, c, g, or t
  misc_feature (409)..(409): n is a, c, g, or t
  misc_feature (432)..(432): n is a, c, g, or t
  misc_feature (486)..(486): n is a, c, g, or t
cggcttcatnagtctcattttaaaaacagtccgactcaaaccatgtggaaataagtatgcaaaaagtctgcaaaacanaacacacttcaaacatgtctaantcgacacactacctcacaccctggcttctncagtcactccattgtcatcccatggcagccaagtnatccttaactccagtgggagtgagcntcccaaatccagcctcattgcagagtccaactcctatgtcatccnctgtaattggccctnnaaagctttcctttagggtnaagagggctgtntgaatggcatctccaagtcccagacctccattatatctttcctcaaggaaagttttcccattaacatagttctttcccattccngtngctttccaggcaaagtaagccccaaagggatcttactnaaataaatatggccgtccctcantccaaccacaaataagtaaagaaactccaaatggacgaacaccacccgactaantatattcttgcat

SEQ ID NO: 581266 - DNA, 118 bp, Homo sapiens
cctgttttaaattgttttccccaaaactagtcggtgtatatgttgcaatcgagatcgctcgggagaatatgttactgcgataaggagctagggttaggatgacgtgggaagaacaaag

SEQ ID NO: 581267 - DNA, 210 bp, Homo sapiens
  misc_feature (24)..(25): n is a, c, g, or t
  misc_feature (40)..(40): n is a, c, g, or t
  misc_feature (69)..(69): n is a, c, g, or t
  misc_feature (73)..(73): n is a, c, g, or t
  misc_feature (92)..(92): n is a, c, g, or t
  misc_feature (106)..(106): n is a, c, g, or t
  misc_feature (122)..(122): n is a, c, g, or t
  misc_feature (129)..(129): n is a, c, g, or t
  misc_feature (177)..(177): n is a, c, g, or t
  misc_feature (194)..(194): n is a, c, g, or t
  misc_feature (200)..(200): n is a, c, g, or t
ctggcggagtggcgcggcggcagnngcggcggcaggcgcngcgggaggctgaggctgacaagcccgaanggcnggggcggctcaagtaccangcacctgacatcgncgtgcagctgagctcngagctgncagactcgctcaggaccctgaagcccgagggaacatccttcgagaccngttcaagagcttccagnggaggnatatgatccg

SEQ ID NO: 581268 - DNA, 313 bp, Homo sapiens
  misc_feature (152)..(152): n is a, c, g, or t
  misc_feature (226)..(226): n is a, c, g, or t
tcgcagtggaggatcatgaggttcagaagcaggtggtattaagccttgaggatggagatatgcagatatgatgagtaatatcactggtgaggaacatagaaaacaggacagagcaggaaatccagagcatgttggagaaatagtaatcattntgcaagcaaaggttatgtgcagtgaagtcatgggaacaaagggtggggcgcattcaggccaggctaaagagtcntggctttagctcctgtacacagaaaatggtagctgttactcagatgtcatcgagcagaggtgaatgtggccctcctgtgtggggaga

SEQ ID NO: 581269 - DNA, 843 bp, Homo sapiens
ggccgacgaaagctatcttgcctggcgaccggacgtgaccaggagtgagaggcggtgggagggaactgggtgtctgcttgccatgctgtgcacatggtctgtgtacgccacgaggtggaccgcgtggccacctggagagagactgttgccctcaggatcgaccccggaacgtaactgcccttacccctccatgggtccggctcaggttgcagtcgcaccgtgctcgcttctagtgctgtcctgtgactccatcctgacgaaacagtgaagcagtctccatatggatcgtgatactgacatgcacgatgggacagtacgatagtatgacgaatgccttgagtgtgcactttggactccgttctgatggaaacgagtatggacgatacgttcgttagcccctacctctaggattggaccactgcattggagaccatggtgcgagacgcgagagaaggaggtgccgatgctccgtcccagtacctcggttccttagcgaccgtacctgacgagatgttcacaaaagtcatgggttcagccaatatccatgtgttgaacatgacactcaacgaagaagagtacctggtgggtgccctcgctcgcttagtcgtatgaggaacatctcctacctagatcggtcaccatggtgacttcgacggctgaaggcataatggagacccagatttgaacgtgggtgttgagcccggggacccttgcagtgagggaagactgctgccagagaatgctctgacgtgaatttggctggaaaccccacagcgggccaggttgggtgcgaccaagccacagaagcccccccaggggaaggggaacaaacggaggggggaa

SEQ ID NO: 581270 - DNA, 111 bp, Homo sapiens
tgagggagttgcaactgagcccacacacgcctggcatattagccttctctgagcaagcgcagacagccagaaacccggggcagcctttcactttgctacccagcctctggc

SEQ ID NO: 581271 - DNA, 459 bp, Homo sapiens
ccatgcaaaaaataaaaataaaaaataaggtctataaggataaacactagagaactgacaagttatctctgggtgttgtaatttttatttctttcttttagctttacctatatttctgattttctatgataatttgaaatgcaacttgaaaagaaaaggttaactttaattttaaaatgtaaaaaaaaaactatactatgaacatagagaaataacaatgagtaaaatctggaaggaggcctgaaagatgtggacaaattccaaaaagtaaggtcctaagctttaaagaactccccaacttttcagcaaacatgtctctgcagaggaagcactgtgtggcggataaatacaaacgctatttgaatctggattcgaggcctatgctaaggcacttaagaaccataaagctacttgccaacacctttccaaatcagatccaaaagccagagccaggaatcc

SEQ ID NO: 581272 - DNA, 885 bp, Homo sapiens
gtgaggatgtcagcgcctgtgtggccgcgggactcaaggctggcctggctcaagtgagacagcacgtccaggaggcgacctcgtccgcgggtttgcattctggggtggacgagctgggtccccggcctccgacgactaacttgggtgtggagtgtttgcccctgccaggggtgttctggtcctgagcccgtgtgggaggctcccggagctgcagcctgggcccatgcccagcccctgctgcctggctggccatggcatgtgcacccctgtggacgcttggcacaatgtggcttgcactggttggagtgagcttgctccgctgggtgcatacgaaggccttctgcatggctgtgcaagctagctccacgatctaccaacaatccctggaaggacaactccaattccctgcaggtgaaaactgtgccaccttggtcaggtgtacttggatctccgccttcccagcggagttttgacttgaacccggagttggctgagcacgatcaaggagctgaaggctctgctagaccaagaagggaaccgacggcacagcagcctaactcgacatagacagcgtccctacctacaagtggaagcggcaggtgactcagcggaaccctgtggggacagaaaaagcgcaagatgtccctgtagttagaccacctggagcccatggagcctggctggagcatctcacctacttggagtatacgctccttctgcaagatcctgtttcagggactatcacgagttacggggactcatgggtgcactgtggacaacgccggtcctggagcggttcatcctccctcttcaacagcggtctcaacaggggttgcagctcatgatcctccacagaaccaggacccgcagatgggcctggtcatc

SEQ ID NO: 581273 - DNA, 1346 bp, Homo sapiens
  misc_feature (519)..(519): n is a, c, g, or t
gagaacactccttcatggcgccttgtgatccttgtacacaagatgggcgcccggtatgtgttccgcgcgcacctatctaccgtagactgctcttcgcgcctgcggcccgcgtggattccggcgtgaggcggttgcgggctacgagtcagcgcgtgcgactcagtcctgcgacatccatcccctcgacctcggggcccgtgggcgcgcccgctcgctgctcgtggtctgcccgtgatgcgcttatccgtgtttcctaagccggacagtacttgttccttgtcggccggcagcggacatacagctactctgctccagtcgtcgctgtacttgggcggcccaaggtaagaagcgctcacgactccgaagaagtctagcgaacaccggtcgcctctccctagctgcgcggaaatcactcggccttcgcacggcgtacctgactacggctagatggccttggactcgtgagtggagcaacaccatggcagaaccgctgtggaagagaccttggcctcgggaganatccacggcgaacttcattgcgcagccgcgttgaattcgtccgccattgtcgccattgcagcaccaaagtaggaagacctcggtcgcttgattcgcataccgcttgctcaggggatcccggttcgcaagggtccatcctctctccagtcgaatcgaccaagcatggtagggtgaggtgcgtttgctcgcggtttaggacccgggtctggccgggcaccctgtgccccatcacgggacgaccatcccgttgcgtttcaagcccccaggcctgcgcttgcccttcttggaggtgcatggggttgcccagagcagggacacgctagctagcggccccctggggctccccgagaagggttcgcctcccccggatttcccgctaacgctcgtcgggccattggttggcgtctgcttggcaggttccgcgggaatccttgaccgtttctggggaatgaaagcccccctgggggagggatatgggcccgggggcggcaaggcagggccgtcgcggctggtttccctatgggctttgcggcacgagatgaccgccagggtttcccatgtgtgagcgtacacgcggaagggcccttgaaagacccggtggtccccggggccgagacaccggacgtagaaatgcccgcccgggtgacattgtatccccccagaaactcgggtcgtcccacagagggggccttggggacttacggaatttctttcgcagtgagtttctcccttataattcaaggatggcgcgagttttacatcacacgattacatgtcgattctcaagaaatcatataaaacgtggggtgtatacacacattcaagtc

SEQ ID NO: 581274 - DNA, 1166 bp, Homo sapiens
  misc_feature (92)..(92): n is a, c, g, or t
  misc_feature (94)..(95): n is a, c, g, or t
  misc_feature (104)..(104): n is a, c, g, or t
  misc_feature (125)..(125): n is a, c, g, or t
  misc_feature (127)..(127): n is a, c, g, or t
  misc_feature (129)..(129): n is a, c, g, or t
  misc_feature (146)..(147): n is a, c, g, or t
  misc_feature (155)..(155): n is a, c, g, or t
  misc_feature (168)..(168): n is a, c, g, or t
  misc_feature (171)..(171): n is a, c, g, or t
  misc_feature (197)..(197): n is a, c, g, or t
  misc_feature (212)..(212): n is a, c, g, or t
  misc_feature (248)..(248): n is a, c, g, or t
  misc_feature (262)..(262): n is a, c, g, or t
  misc_feature (328)..(328): n is a, c, g, or t
  misc_feature (334)..(334): n is a, c, g, or t
  misc_feature (356)..(356): n is a, c, g, or t
  misc_feature (359)..(359): n is a, c, g, or t
  misc_feature (608)..(608): n is a, c, g, or t
  misc_feature (678)..(678): n is a, c, g, or t
  misc_feature (731)..(731): n is a, c, g, or t
  misc_feature (774)..(775): n is a, c, g, or t
taggctggtacgagctggctttgaatcggcagagggcaaggtgcagatggtgttggaaagcactatggtgtgtgtggacaacagtgagtatntnnggaatggangacttcttacccaccaggctngnangcccagcaggatgctgnncaagatantttgtcattcaanganccgcagcaaccctgagaacaacgtgngccttatcacactgnctaatgactgtgaagtgctgaccacactcaccccanacactggccgtctnctgtaccaagctacatactgtccaacccaagggcaagatcaccttctgcatgggcatccgcgtggnccatcntggtctctgaagcaccgacaanggncaagaatcacaagatgcgcatcattgcctttgtgggaagcccagtggaggacaatgagaaggatctggtgaaactggctaaacgcctcaagaaggagaaagtaaatgttgacattatcaattttggggaagaggaggtgaacacagaaaagctgacagcctttgtaaacacgttgaatggcaaagatggaaccggttctcatctggtgacagtgcctcctgggcccagtttggctgatgctctcatcanttctccgattttggctggtgaaggtggtgccatgctgggtcttggtgccagtgactttgaatttggagtngatcccagtgctgatcctgagctggccttggccttcgtgtatctatggaagancagcggcagcggcaggaggaggaggcccggcgggcagctgcannttctgctgctgaggccggattgtacgagtggtactgaggactcagatcaatgccctgtctgaagatgaccatcagccagcaagagtttggccgcactgggcttcctgaactaagccgtatgactgaggaagagcaaattgtatgcatgcaaatgtcctgcatggagcagagttggcaaggcggatcagcagaaatgtgcaggtcaagtatgacacattgagccagcagagagtgttacaattgggacccgagtcttaaggctaaaactccgtgtccaagtacttaatgttgccggccagccaggaagaaaaggacaaatacagggagttttgctacgaagatttcgcaggtaaaaactcttgaagttcttatttctaacaccgggtttcta

SEQ ID NO: 581275 - DNA, 1280 bp, Homo sapiens
gttttttttttttccaggttgaaattcttaattctggaggtaggaagggggtcagcatgctcaggtgtgggaagggtccagcccagcttcctccagccccccaggtgcatgtgcccagaccccaattaagtttacccagattactcagctgtgcccttcccttccgtgggatccatcgtgtccttcgtgttcacacccttagacagggccaacctggactcaacacaagggctgctgagtccccagcctgtgggcagtgccacaacggcaggctaaggggaggggtgaagcagcaggaccatagccctgggccgaggaggggcagaggggccacttcgggctccaagggtcaggactgggaaaaccacatcctgggcaggcctggggcccagacccacaaggtctgtgcctgaaaagaggtggaagaaaggaggatggggagacagccaaatcacaacctcaaaaagagagaggtcaagagacccacgagccccatgacacgaatgacagcaagaaccataccgagcatacaataataggagcataaacatgaaccgacgaaatgcacaaacacagaaacaccagagcatgacgatacgggcacgacacgagagagctaccaaggcccctaggggaaacacaaaaaggatggacacagaacaacactgcataacaaaggaggaaaacaccgggggaaagaaggagacacatcaaaaaggagagaaataggaacaaatcataacgagagaagggggcacgggacccaaagggcgcaaaaacaacacaagaacccacaggcggaaaagaggcacagagatgaaagcacccaaagctgtgtagtcgaaaaccccaagaacacagggaccggaccagtatccaaagaggagcacacaaacaatagacgaggcggacaaacaacaccaacaagggcgcacgaggtgaaaaaaccaacaaggagtcaagaggcaaaactaccgcaacaaggacccgcgaaggacgacagcggagcacaagcacaggacaacaaacaagaacaccgacaaaccccaggagatagagaaaaacaaagacaaaaaggaaccaatgcacgagaaagaacggcttatcgcaaaacacaagcgaaaaacaacaagccgaccacaaaaagtagaggacaaaacccaggaaagaaaaaaagcacagaacaaacgggagacaacccagaagagcacaccgcgcggagaacgcacaaaggacaaaaagcaaactgagaagaaacacaagaacagccaccagaaaaa

SEQ ID NO: 581276 - DNA, 1581 bp, Homo sapiens
  misc_feature (9)..(9): n is a, c, g, or t
ggggggacnaacacaatggcatggatgaggccgtgggttttatctggcacgaagggagagagagagagagagagagagagagagagagagagagagagagagagagagagagagagagagagagagagatgagagatatatatatatatatatgagtatgatatgatcatctcatgagcatgagatgagatgtcatctgttttgtgcatcgtgttcgtatcgtgagtgtgcctctcatctgcatcgcggcggcgggacgcgagagtactcgtctctctcatgagcatgatgctctgctgctgcagtagagatatgtgtctatcatgtctcatgtagtgatgctagtgtctcatcgtactcattttgtcctgctcttcttgtcttgttctcttctctcttttatgatcataatatcatcaatatcagcatcagctcatcatcttctacataagcgcatgaatatcatcagatgatagatagaaagtaggaagaggcgacaggatggtaggtagaatggaggacatagcgagtagttgaacgcacgttcgaggaagaaggagagttaagaagcctgggtggagggagaaggaaggggttaggggaggggaggatgaggagatgagtaagatagatagaggatttatatgaaggatgatagagagtgagtcaggagtgcgtcgttgcgtcgatgagagaggatggcgggcgggagggaagggggcggaaggatgggcgtgtgggtggcggttagggcagggaggaaagaggggcggcagcagctcgcgcggcgagccccgtcttcttatgttcgcgtcgcgagagtagtgtcgtcttacttattagtaagtgcgtcgtcgctcatcgttcgtttttagttcgtcgtagagcgtcgtcgatcgaagccggtagacggtgggtgtagattggccgttggtgagtgcggatctcagtcatatgaggcagaagaagaacgcggccgctgacgggcagccggtataagtaccacaacggccattatctgcatcttcctacatcgtcgatcaaacatctatctaatttttttttttatcattcttcttctatctatgaacaaacgtcatcagatacatcaacatgatactaccagtaccaacacgtatttcttactacaatcactcatatttaactatcatcactcaactcatcataaaccgctagcgctctcctcctctgtctcaacacaactctccaacactaccacacatatacttctaatgatacaagtaacacatagatcacatactcttaattcttagactaccacgttctaaaatgtaaatatctcacagtactaagccttaatataaactcaacctacaatagtaaagtaaatcccctctaatcatcgcctacatcaagagaagctatatcctactcacctttcaatacccccccaccagctcctacgaccacaacttcactataagcagcaccacactttctcctccctaccatcatcactacgatacaattccgtttacatcaactaaatcctcacagacatatagaaaataccaataaacacctactattcaaacaaag

SEQ ID NO: 581277 - DNA, 647 bp, Homo sapiens
atccctgacgcaccgccgtgatgcccaggaagacaggcgacctggaagtccaactacttccttaagatcatccaactatttggatgattatccgaaatgtttcatttgtggggagcagacaaattgtggggctccaaggcagaatgcagcagatccgcatgtccctttcgcggggaaaggctgtgggtggctgatggggcaaagaacacccatgcgccagggccatccgaggccactggaaaacaaccccaagctcttgggagaaactggttggctcatattccggggggaattgttgggctttggttggttcccccagggagggaacttccacttggaagattccagggggaccattgtttgcttggcccattaagtgttggccgcttggttggcccgtggcttggttgccattgcccccattgtgaagtcccttgtgccagcccaagaacactggtctcgggcccgagaagacctcctttttccaaggctttaggtatcaccactaaaattctccagggtgcaccatttgaaatcctgagttgatgtgcagctgatcaagactggtgaccaagtgggagccagcgaagccacgctgctgaacattgctcacatctcccccttctcctttgggctggtcatccagc

SEQ ID NO: 581278 - DNA, 1012 bp, Homo sapiens
  misc_feature (94)..(94): n is a, c, g, or t
  misc_feature (108)..(108): n is a, c, g, or t
  misc_feature (174)..(174): n is a, c, g, or t
  misc_feature (180)..(180): n is a, c, g, or t
  misc_feature (202)..(202): n is a, c, g, or t
  misc_feature (205)..(205): n is a, c, g, or t
  misc_feature (454)..(454): n is a, c, g, or t
  misc_feature (524)..(524): n is a, c, g, or t
  misc_feature (577)..(577): n is a, c, g, or t
  misc_feature (620)..(621): n is a, c, g, or t
tgggttgtgcatccagtcgtacattagggacgaggtggtgttggagagccacgaattgtgtgtgactgtgaagtgctgaccacactcaccccanacactggccgtctnctgtaccaagctacatactgtccaacccaagggcaagatcaccttctgcatgggcatccgcgtggnccatcntggtctctgaagcaccgacaanggncaagaatcacaagatgcgcatcattgcctttgtgggaagcccagtggaggacaatgagaaggatctggtgaaactggctaaacgcctcaagaaggagaaagtaaatgttgacattatcaattttggggaagaggaggtgaacacagaaaagctgacagcctttgtaaacacgttgaatggcaaagatggaaccggttctcatctggtgacagtgcctcctgggcccagtttggctgatgctctcatcanttctccgattttggctggtgaaggtggtgccatgctgggtcttggtgccagtgactttgaatttggagtngatcccagtgctgatcctgagctggccttggccttcgtgtatctatggaagancagcggcagcggcaggaggaggaggcccggcgggcagctgcannttctgctgctgaggccggattgtacgagtggtactgaggactcagatcaatgccctgtctgaagatgaccatcagccagcaagagtttggccgcactgggcttcctgaactaagccgtatgactgaggaagagcaaattgtatgcatgcaaatgtcctgcatggagcagagttggcaaggcggatcagcagaaatgtgcaggtcaagtatgacacattgagccagcagagagtgttacaattgggacccgagtcttaaggctaaaactccgtgtccaagtacttaatgttgccggccagccaggaagaaaaggacaaatacagggagttttgctacgaagatttcgcaggtaaaaactcttgaagttcttatttctaacaccgggtttcta

SEQ ID NO: 581279 - DNA, 260 bp, Homo sapiens
  misc_feature (97)..(97): n is a, c, g, or t
  misc_feature (240)..(241): n is a, c, g, or t
ccctatcatagaagagcttatcacctttcatgatcacgccctcataatcattttccttatctgcttcctagtcctgtatgcccttttcctaacactncacgaacaataactaactaatagctaacgatcttcagacgctcaggcaaattcagaaaccgtctgaacgtatcactggcccgccatcatcctagttccatcatcgccctcgccatcgcctacgcatccgtttacagtaaccanngacgacggtcaacgattcc

SEQ ID NO: 581280 - DNA, 1966 bp, Homo sapiens
caaaatcccactctgcatcaactgaacgcaaatcagccactataattaagctaagcccttactagaccaatgggacttaaacccacaaacacttagttcacagctaagcaccctaatcaagctggcttcaactctacttctcccgccgccgggaacacaccaggcgggacgaagccccggcaggtttgaacgctgcttcttcgaactttgcaattcactatgaaaatcacctcggacgctggtaccaccagaggcctaacccctgtctttagatttacagtccaatgcttcactcagccattttacctcacccccactgatgttcgccgaccgtatgactattctctacaaaacacaaagacattggaacactatacctattattcggcgcatgagctggagtcctaggcacagatctaagcactaccttataacgagccgagcatgggccagaccaggcaacctttctaggtcacgaccacatctacaacgataatcgtacaagcccatgcatttgtaatactcttcttcatagtaatacccatcataatcggaggcttggcacctgactagtaacactaatactcggagcccacgatatggcgtacccagcataaacaaaataaggctaatgacgtataactcactatctcactaatcgtgtcacattgctactaggcagacgaacggaccaggtgtacagtcaacatcctaaaggacagtcaccctgaaccagcaacctacatctacttaaaagggagatcacaaactagggcaaaatatacacaagttaaaaccgacaaacacaacgcaacttgacagatacgacaacatcacgctagtatacacagacacgcccgcacctgttcttctcccactatatttttgcctccctcgagcacactacgagcctgacagaccgagcacactgacgagcaaatgaaaagcacaccgagacgagagaaagaagtagggacaagaacgggggacgaggacgaggacacagaacgacactcaaaccaagcgcgagaactaacgagaggcgcagaagcggcacagagacacaacgcaacaggaagcgcaagaaggtcagacacaggaagaaaaaagagggagacaagcaggcgagagacgaagagaaagaagaagaaagcagagaaaacgcagcagacaaaacaggagaaacaacacaaagacaagccaacaaagagggagaagaacacaaagagaaagagaggagcagaacgacagcgacgaaacagacagaagaagagacgagaagacgacgaaagaaaggacacacagaaagcgaagaacaagacaccagacaacagagcaagaaaaagacgaagacgaagacaaacagaagcagaagcacgcgaagaaacacacacgaaagacaagcacacgaagagagacggacagcgagagacaggcaaagcacccacacaacaggcgagaagacgagagaaaagaccagacagggaagacagcagacgaagaccgcagcatcaaaagaacagaggacagacgaggagagcaacagaggaacaacgaagaagaacagagcagcgagcaagcagaacaagagaccagagaagcagaggagagaacgaaaagagaacgaagcagagaggcagaggagacgacacaccacgaaacagagagaagccaagagaagaagatcgaaccggcgagaaaaagacgagaagaagaaaaaaacaaaaccaaagaaactgcgcgcaaaaaaacagacgaggacggagcaaccgaaagaagagagaaggcaagagaaaaaacaacacagaagaaagaagacatgacgaagaaagacaagaaggaaaaggagaaacagagaagacaaggaagagaagacaacgaggagagaaacgaagcagacgaaggaagagaaaagacggaaaaagaacacaggacaggagaagaaaagaagaaagagaaggaaaat

SEQ ID NO: 581281 - DNA, 270 bp, Homo sapiens
ctgcaggttcggcacgaggagagatagatagagagagatagagatagagagcgatagcgatatagatatcctgtcttacctctttccttctctttatctctttgttcccccccttcatgtttaccgtctcttgccttttccttctccttcttccccccttctccgtttttgttctttccttctccttttctccctgctctttctttccttttctgcttctttttttctttctccttttgtttctctctttctctctctttttttttctct

SEQ ID NO: 581282 - DNA, 993 bp, Homo sapiens
  misc_feature (32)..(32): n is a, c, g, or t
  misc_feature (148)..(148): n is a, c, g, or t
  misc_feature (309)..(309): n is a, c, g, or t
  misc_feature (318)..(318): n is a, c, g, or t
  misc_feature (340)..(340): n is a, c, g, or t
  misc_feature (343)..(343): n is a, c, g, or t
  misc_feature (348)..(348): n is a, c, g, or t
  misc_feature (428)..(428): n is a, c, g, or t
  misc_feature (430)..(430): n is a, c, g, or t
  misc_feature (437)..(437): n is a, c, g, or t
  misc_feature (454)..(454): n is a, c, g, or t
  misc_feature (479)..(480): n is a, c, g, or t
  misc_feature (491)..(492): n is a, c, g, or t
  misc_feature (500)..(500): n is a, c, g, or t
  misc_feature (507)..(508): n is a, c, g, or t
  misc_feature (515)..(515): n is a, c, g, or t
  misc_feature (519)..(519): n is a, c, g, or t
  misc_feature (523)..(523): n is a, c, g, or t
  misc_feature (525)..(525): n is a, c, g, or t
  misc_feature (529)..(529): n is a, c, g, or t
  misc_feature (532)..(532): n is a, c, g, or t
  misc_feature (536)..(536): n is a, c, g, or t
  misc_feature (555)..(555): n is a, c, g, or t
  misc_feature (572)..(572): n is a, c, g, or t
  misc_feature (574)..(574): n is a, c, g, or t
  misc_feature (631)..(631): n is a, c, g, or t
  misc_feature (644)..(644): n is a, c, g, or t
actccagcgcaatttgatgctgatgaactcgngctgccatgaagggccttggaactgatgaagatactctaattgagattttggcatcaagaactaacaaagaaatcagagacattaacagggtctacagagaggaactgaagagagntctggccaaagacataacctcagacacatctggagattttcggaacgctttgctttctcttgctaagggtgaccgatctgaggactttggtgtgaatgaaaacttggctgattcagatgccagggccttgtatgaagcaggagaaaggagaaagggaacanacgtaaacntgttcaatacctatccttaccnccngaagntatccacaacttcgcagagtgtttcagaaatacaccaagtacagtaagcataacatgatacaaagttctgtacctggagntnaaaggtnacatttaaaaatacctnacagctatcgtgaagtgcgccacanncaaaccagctnncttggcanagaagcnncatcaanccangaangntgtnggnaccncccataaggcattgatcangattatggtttcccgtncngaaattgacatgaatgatatcaaagcattctatcagaagatgtatggtatctccctntgccaagccaccntggatgaaaccaaaggagattatgagaaaatcctggtggctctttgtggaggaaactaaacattcccttgatggtctcaagctatgatcagaagactttaacttatatattttcatcctataagcttaaataggaaagtttcttcaacaggattacagtgtagctacctacatgctgaaaaatatagcctttaaatcatttttatattataactctgtataatagagataagtccattttttaaaaatgttttccccaaaccataaaaccctatacaagttgttctagtaacaatacatgagaaagatgtctatgtagctgaaaataaaatgacatcacaagaaaaaaa

SEQ ID NO: 581283 - DNA, 512 bp, Homo sapiens
agagatggaggtttcactatgttgcccaggccaatccttctcactggactcaagcaatcctcctgcattagcctcccaaagtagtgggattacaggtgtgaaccactacacctggcctcttgctaagtcaaggctgttcttatttgaaagataagaacaccctagtgtagagagggatttagctaaagtcacgcagcctttagtgacctaactggaattttatcccaactctgtaagactccaataccgtaatcgccactgtctacttccttgtgtctgagaatgaccaggggaccggcagacagatgcttgctctgggtgtgcctgtacactgtgcttcctgcctggtgcatgcctgagcctgcagggctggtggggctggaggcctgtggggtccctggagactggtggttctttctccacaactgttactgatggtattgaaaggtgagaatgtacctgctggatgtgtgtatcagatgagggaggattttaccacagacgcactggtg

SEQ ID NO: 581284 - DNA, 235 bp, Homo sapiens
aatgcgctacacaagaaaatagtcagtaaataaattaagcaagtaagggtacatcgaaaattacaaaacactgaagacggaaattgaagacacagccaggagcagtagcccacacctgtaatcccagcattctgggaggccaaggcaggaggatcacttaagctcagcagttcaagaccaacctgggcaatacagagaaactgcgactttacaaaaataaaaaaagactccagaa

SEQ ID NO: 581285 - DNA, 553 bp, Homo sapiens
  misc_feature (179)..(179): n is a, c, g, or t
  misc_feature (196)..(196): n is a, c, g, or t
cctagctcgcctgcaccccctctctgatccgagctggatccagagttgcatactgaccaatttctgcatcagtgttatctcgaccagaggctagtaggactggagagggctctacggtatttaatggggcccagaatggtgtgtctcagctaatccaaagggagtttcagaccagtgcnatcagcagagacattgntactgctgcaaatttattggtgcaggtgctgcaacagtaggagtggctggtctggtgctggtattggaacagctttggcagccttatcattggtttatcgcctagaaacccttcgctgcatagcagcagctgttctcattatgctatcctgggatttgccttgttctgtatagctatgggtctctttcgtctgatgaggtgagatcatgattgttgtttatcacatgatcacaaacaaactgctagcacagtgatggcatatcatatagaataacaagaactaatttctctgtatcatgcagcgtgcatcccgattacctcctcagtgtcccggtcaacgagtatgtatttagctcc

SEQ ID NO: 581286 - DNA, 329 bp, Homo sapiens
caaataattttaagtatgcttatcattataagctgagtttgtcattcctatattaaattaacaaagattaggaaatggacgatggtaagaacatggaaaataaagatgggaatagggatttgtacttgatgtagctaagtttggcaaatagaataataaaacaatatttctacctctgtatcacttacagacgacaaacacaaactgcagcaaagggaaaggatatggaaatacaagtgatgtaaagccaaatattagttatgacaacaaataaatagatgtgtttaaatatccccatgaaagggaaacttcaggttggattataattt

SEQ ID NO: 581287 - DNA, 458 bp, Homo sapiens
  misc_feature (179)..(179): n is a, c, g, or t
  misc_feature (196)..(196): n is a, c, g, or t
  misc_feature (340)..(340): n is a, c, g, or t
  misc_feature (344)..(344): n is a, c, g, or t
  misc_feature (384)..(384): n is a, c, g, or t
  misc_feature (458)..(458): n is a, c, g, or t
cctagctcgcctgcaccccctctctgatccgagctggatccagagttgcatactgaccaatttctgcatcagtgttatctcgaccagaggctagtaggactggagagggctctacggtatttaatggggcccagaatggtgtgtctcagctaatccaaagggagtttcagaccagtgcnatcagcagagacattgntactgctgcaaatttattggtgcaggtgctgcaacagtaggagtggctggtctggtgctggtattggaacagctttggcagccttatcattggtatgccaggtaatcatttctatcctaaatagtaagagcatgcttgcagtanttgnaacttactactgaataatactacttgcataagtgcttacntgggcttgcataattaggcttggatgcatacttactttttatacaccatttggatgtatgagcattatgggctn

SEQ ID NO: 581288 - DNA, 207 bp, Homo sapiens
aaaactttggggggtttcccccgaaaaatttcccccccggtttaaaaaaaaaagttggggggggcgttttttaaaccctaaaaggttttcccccccccccggggaatttgggcccccccgggggggtttgggtcccgttgaatttttgggcccttttccccggggggggggggggttttttttttccccccaaacctttttttttta

SEQ ID NO: 581289 - DNA, 715 bp, Homo sapiens
  misc_feature (38)..(38): n is a, c, g, or t
  misc_feature (65)..(65): n is a, c, g, or t
  misc_feature (76)..(76): n is a, c, g, or t
  misc_feature (79)..(79): n is a, c, g, or t
  misc_feature (111)..(111): n is a, c, g, or t
  misc_feature (114)..(114): n is a, c, g, or t
  misc_feature (116)..(117): n is a, c, g, or t
  misc_feature (121)..(121): n is a, c, g, or t
  misc_feature (124)..(124): n is a, c, g, or t
  misc_feature (138)..(138): n is a, c, g, or t
  misc_feature (149)..(150): n is a, c, g, or t
  misc_feature (155)..(156): n is a, c, g, or t
  misc_feature (159)..(159): n is a, c, g, or t
  misc_feature (161)..(161): n is a, c, g, or t
  misc_feature (170)..(173): n is a, c, g, or t
  misc_feature (175)..(175): n is a, c, g, or t
  misc_feature (182)..(183): n is a, c, g, or t
  misc_feature (186)..(186): n is a, c, g, or t
  misc_feature (188)..(188): n is a, c, g, or t
  misc_feature (192)..(193): n is a, c, g, or t
  misc_feature (200)..(201): n is a, c, g, or t
  misc_feature (206)..(206): n is a, c, g, or t
  misc_feature (216)..(216): n is a, c, g, or t
  misc_feature (219)..(219): n is a, c, g, or t
  misc_feature (221)..(222): n is a, c, g, or t
  misc_feature (227)..(227): n is a, c, g, or t
  misc_feature (229)..(229): n is a, c, g, or t
  misc_feature (231)..(231): n is a, c, g, or t
  misc_feature (233)..(233): n is a, c, g, or t
  misc_feature (237)..(237): n is a, c, g, or t
  misc_feature (240)..(240): n is a, c, g, or t
  misc_feature (262)..(262): n is a, c, g, or t
  misc_feature (267)..(267): n is a, c, g, or t
  misc_feature (273)..(273): n is a, c, g, or t
  misc_feature (278)..(278): n is a, c, g, or t
  misc_feature (282)..(282): n is a, c, g, or t
  misc_feature (291)..(291): n is a, c, g, or t
  misc_feature (298)..(298): n is a, c, g, or t
  misc_feature (309)..(309): n is a, c, g, or t
  misc_feature (315)..(316): n is a, c, g, or t
  misc_feature (325)..(326): n is a, c, g, or t
  misc_feature (337)..(337): n is a, c, g, or t
  misc_feature (344)..(344): n is a, c, g, or t
  misc_feature (352)..(352): n is a, c, g, or t
  misc_feature (364)..(364): n is a, c, g, or t
  misc_feature (411)..(411): n is a, c, g, or t
  misc_feature (446)..(446): n is a, c, g, or t
  misc_feature (502)..(502): n is a, c, g, or t
  misc_feature (506)..(506): n is a, c, g, or t
  misc_feature (615)..(615): n is a, c, g, or t
  misc_feature (684)..(684): n is a, c, g, or t
atattagaaccacttttggtaatttgtaaggggctgangactgctgatatcacacatcccatggnaaactccgtanganttcttctaaacatctttgtcattttcttaaanttntnntggnggnagctgatgctggtnctcttttttannaaaannttnantttgtgttnnnntntaatagnngcntntttnntagatgnnttttntagatgaggnggntnntgggntntntnaggnctntgcattctcatatgcagaaacnaggtngggtgnggagntagntgtgtgtgntgggganggggtgagaantacagnnaaatgggtnngtgagagaggnaaaaganatctaganaaactaaatggnataattaagtttggaaactgcctatgatatagcctgttggctctggnatcaaataatacagtatgttaaatctgtaaaatgnggtaacagtgtttcctcaaagagatgttaagatgacatgtaagaagtggttagggnaggnattgcaaaaaaatgtcttatatatcattttaaaatttatttttataaaaactcacaacattattttgcgtccactgtatttatttttacaattacctttatagcaagtnatagtttttgaataaaatttaagcaaatcatcaacagtaccaaaacactagagttgttacacgaaggantgattctacaaaacattaccctaggtgatgg

SEQ ID NO: 581290 - DNA, 1563 bp, Homo sapiens
  misc_feature (479)..(479): n is a, c, g, or t
  misc_feature (1026)..(1026): n is a, c, g, or t
tcccaattggtagtcgggcccactggggtccaaattttaactacaaatttggcttggtctactttgaacacttgtgaatctctttaaaagccctcgagtgtgtttatatttctcagaaacgaggccctcgaggaaagttgtgcagaacgtggtgcgagggagggtgtgcttaaggcgcacagagttcattttcctcccaaattattacactttattgtgggacaggtctctctcacacaaacacaggagaatatattctctctctcaaggctgtgaggacatgtgtgctgtgtgagtataacacacagagacatgtgtggctataacaggacacacaccacacctctctccttatttctctcttattatgtagagtataacaacccccaagagaaacatatgagctgataggtgtttatagacagtgagatgtgcgtgtctattacaccaccgagtgtttctctctctcctcatcacanagatgtgaggagtgacgagtgggcccagagtgtcctcccgggtaaactttaattatctcgtgttgtgttctcccaacacccacatcctccagagcgcgcgagagacgtattaaaaataatcttcaaaagagaagctgtgggaagagagatgatatatactctatcatctggtgtgctggtcacccccaacaaagaagtctctggtgggccccaaatatcttcttctccccgagatcttgtgggcgctctaataatatctcccccatattatgtgcgttacgaggtgagcaaccccgaatgttggtcttcccaaccaagacggtgtgcttatatatgctgctcagaatgtggcgcaatgaggagggatctccccaaagagcgcgtgcgcgccgagaagccccactaaaaacacacacccccaaaagacgacaccactcctccatttatgagcgcggacgcgctgtgttgtccaaaacagaaaagaaggcccctctccgagagacacaaagaaaaacacaccgcctgtgtggggctgtgtgggcgagcnccgcggtgtcacaacaaacataatttttctctcctaatatgatcaccctctccgttgtgattcaccgagagaaaaaccgcctggtggggtggctgttcctctcctgatgagaaaaaggcccaaggcgcgggggggttttcttccccccccccctttcttccgtgggaaacatctcgttgggtgtgggcgcccgtggaatgacaacccaccaacacccaaggggggggagcctcttgcgccggtggagaaaaagaagcgcccatcaaaaaaccacggggggagcagcgccccccacaaggccgggggttgttttaggaaacgcgaccgagctcacccagggtagtggttctacattttccccacagaagagctcttctccccaaaacagtatttggttggctctcccgcgcaggcggcctcttccaccccagaaggggggttccccccccggacttgagggcacacgacaaatgggtcggaccatccctttgagaattttgtacaacaacaacaggagcacgacacacaacacagctg

SEQ ID NO: 581291 - DNA, 117 bp, Homo sapiens
gcatctggtcctgacatctgggacagatccacatgcccttgggaattgttttcagaggaaatggaacgaacatagacattctcacataagcccagttcatcaccatttcctccctta

SEQ ID NO: 581292 - DNA, 161 bp, Homo sapiens
  misc_feature (38)..(38): n is a, c, g, or t
aagaaaacgttcactatcagaggcaagtaacgcacganaggcgagcagaatttcatgttctgctacctcatattcttctggttgccaaacagatttatgcatgtgctgacttctgcaatccgtgtatgctgcgtccgtcgattactgcgttgacgtgaatg

SEQ ID NO: 581293 - DNA, 152 bp, Homo sapiens
  misc_feature (38)..(38): n is a, c, g, or t
aagaaaacgttcactatcagaggcaagtaacgcacganaggcgagcagaatttcatgttctgctacctcatattcttctggttgccaaacagatttagcaggcgactgcgcaaatccgtagcgcctcctcatccgcctgccgccgttgtttt

SEQ ID NO: 581294 - DNA, 191 bp, Homo sapiens
tggtcaacagtaagggtcttgagattatctcctaactggttagccaattctaaaatagccttggtcattgaagtactatctcgtccactaagccgtttaacgatggtaagccgactcttacgctcgacaaacgtagctactgcttgacctttacgttttccagataaaactgtatcagcttcgaggtgacc

SEQ ID NO: 581295 - DNA, 848 bp, Homo sapiens
ctgatttttgtatttctttgtcttagaggccgggtttcaccatgcccggccttcagtctctttttgtaggtttctcctcatttccattacctccaaacattggcatatcccaggactatgtcttttctttgtctatattcattcactgagtgattcagtcccatggctttccaaaaaaaaaaaaacctttttttggaaaccttgattctctaccttgaatcccagaactcaattgtccagttgcctacttgacatctccaggttggtgagataggcatcccaatatgctgccgatgggcatttgtgaaggtaggcctaagctaatgtgggggggtcactaatagccgaagaattgttaaatggattctgggaaaaattatgtctgggcgctgtgtgtgacccatgcctgcaggtctgggccactttgggcaggacgtgtggtgggtgggatctggttggcttagcgggccaagaatgttaccaggcctgggtccaatatgggcaacgctttggtctcaaaaacaaaaaaagagacttctgggaaattagccatggtctttggccctatttatatcccacttctcgtaaaaatttccggcctataattaattcccaggcccttaggagagggacattttggggcgcagcaatacttgaacgcacgggaaaaaacgggccctagggccacgagactcggcagacacagctggtggcgcgcacgcgtctcacctcccgtgagggccagaaaggcggcgggtgtcactcccccgggtgctggaaacggttccagagacacgcgcgggggccaaacatggcggaaccccccagtccgagccacaacacacaca

SEQ ID NO: 581296 - DNA, 178 bp, Homo sapiens
ctactactactaaatgcgcgggggctcgacgaatttggtgagtaacaactctctcagaggccaggcactgtggcgcagacctggaatcctagtactttgggaggctgaggcgggaggatcacttgggcccaggagtttgagaccagcttgggcaatatagtgagactttgtctctaca

SEQ ID NO: 581297 - DNA, 809 bp, Homo sapiens
  misc_feature (37)..(37): n is a, c, g, or t
  misc_feature (44)..(44): n is a, c, g, or t
  misc_feature (60)..(60): n is a, c, g, or t
tttacttttttgtcgcgagcgcgctattgtgttggtnacggggnattcgcgcattatggncggggtgaagatttggaataaaattgattcattttaaaaaaaaaaaaaaaaaaaaaaaaaaaaaaaaacaaaaaaaaaaaaaaaaaaaaaaaaaaaaaacttgcaagaccgcttaggcccagaacaactttagactgggccaggcttttgctggcgcccgaatttggggctcctttgtccttttccccctttggggggccgttttccatttaacgggcgggggttttccaccgtggggcctgggaaacccctggtgttccccaccttattcgctttgcgggccacccccttttcgcccgttggggaaaaaccgaaggggccgggccggttcgcctttcccaggggggtgcgaatccttgttgggggaggggaaattcgcggcggtaatttttttttaaaattccgggtaaatttttgggttactccgctctttttttacccaaagggccccacccggcaaatcccttttaaaatcaaaagattggcccggggtggggttggttgtgtggcccttttggaccaggggcccccttttaagccctggggccccaccgcaatggggcaaaacccgcctttagggggttcccctctttgggacccttcccctccccaaggtttttgggggcggggggcccccaacgcctcaatcggccccttaaagggcgccccccttttagaatgtggctgggcccgtaaggggggggggagggaggggaggccctgggggggggctcttggggcctcccacc

SEQ ID NO: 581298 - DNA, 149 bp, Homo sapiens
gacaagagtcttttaaaaatatcttttaccctggcttgagtgccatgacgtgatcacggctcactgtaaccacaacctttcgggtcaagtgatcctcccacgctcaatgcatccccaccctgacatgctgggactaccttgattggccg

SEQ ID NO: 581299 - DNA, 665 bp, Homo sapiens
  misc_feature (1)..(1): n is a, c, g, or t
  misc_feature (534)..(534): n is a, c, g, or t
ngggagagactctgccttttcaacatggatggctcctcccgctgccgctgccgctccaggagacagcattacagagcatcagttaggtgcagagactgggcagtgcacccgtgtgcaaagacgggagacacgaatcttccctgaaggagtgacagtctagggaggaaggcagactgcagattcttcatgtttacaaaaaaatgtgccaagtgctgtacaatctttgcattctttcccattttccagctgattttttgttctcaaagagctggcaaaatacagagtccttggaagtataataaaataatcagaatctagtcattattatttctcctcaccatttggaaaaaatttgtgtccattatatttccaaaaacttccaacctgtattatcttttgtaaagataaaaaattttttacttgaggtgaataattttcagcaagagtacatctttgtttcctattcaaactacttggccatgtgtttgaattctttgcatttttgctactttcttttagattcatcgattattntctgacaatggaacttggcgacctacttctctcgggaatctcaatacttggaacacggaccctcctagacggaccctttggcataacgaattggaccaactgtaggttcaggactagagagccgctgcctt

SEQ ID NO: 581300 - DNA, 107 bp, Homo sapiens
gagccgaggtgccgatcgaaggttgcctgagcaaggatacaccaaggttcctgtgccaggctacacaaaggtaccagagccgtgtccttcaacggtcactccaggcg

SEQ ID NO: 581301 - DNA, 121 bp, Homo sapiens
attgtgctggagcagaaactacaggtaaccccagcaacaatggaggatgcagcagcaatggaagcctttgacacctgaagcccaagcgggtacagaaggcaagcgacagtgttggtgagct

SEQ ID NO: 581302 - DNA, 543 bp, Homo sapiens
  misc_feature (490)..(490): n is a, c, g, or t
cgcccccccccctccgatcacaaaatattgttttagttcccaatttggggtaggaaaaaagagttggggtaacaacctttttttatacctttttgttcaaaatttgtccccgaaggagggggcgccaaaaacccctccaaggcaagttttgcccccgatgttccatcgaaaaaagaccccaagtgaggggggctgtgggggtaaaaaagatgctcttagctatctttccaattccggtttgcgcttgtcccccctcttcagccattgctaatgcggggtgccccgtaagagcctgaccccaaaaaaaaaggttagagcggcctcccgcacctgactaggcaaaaagaaggttacattttctaagcaatttttctaaaatcaagccctatcttttttataggttaaccagttctcatataaactaccaaaccgaggtctagagtaatgaagttttgacgtggcgctttaccaaatgtgtcccagagttccncggtccctgtggctcatcgcctgtattcacagtcccctggggccgcctaaacc

SEQ ID NO: 581303 - DNA, 205 bp, Homo sapiens
attgaggtggggaactagagaggactctaaggcaggaacatctggaccatctgcagggaaaagctacctccccgggagccacgagctccaaccccacacactatgtctactctggagagccggcatggcagagctggactggctgccacaggagggaagtgccccacgacagggacaaggaggacgatagacacgatggctaagg

SEQ ID NO: 581304 - DNA, 802 bp, Homo sapiens
  misc_feature (696)..(696): n is a, c, g, or t
aaaataaacctattcggtgcattgttggaggtagttttgagtcttcgtgagttctctcaaagaccatatgatgctcgtgaagagtaaaatggatgctgaggttgtgaaatatctgaacgacaataaaacatcttttgagccggactatgacaaaatgaaagactccatgcttgatcacatgcatgaatattccacgacccactccttgggaagatcctgacctcccccaccgaagacacccagaaagccttaatactaatacaacgttgctctgatgattcttttcttccttgcttttttttttaaataaaaatattattaactggacttcctaatctatacttctatcaactggaaacgaaatccctgagccgcagggcaaaactctcggatatcgggctacatctactagacaccacatgaatcctctcacctaatcgggtcatcggtgcaaggctttttataccttcaccatcctactgccgatcctgtcgggttgataagttaacaatcgttgggccaccctctatgattacaccctcgagaacaaaacaggccaatcctgcccccaaaccaaaaaaaagtcgcctcgctggccctcattcgttgagctctcccgccgcttcactttaatgagggtctaattctcgatactcacgtcgtgactccctgcactacggtacctctactcgggtnagccgccttcggctcctcctagggcggtatcgcgtatctccccaaacgcttgcttcacccttgcccgcttgctgctttcagcccgtaacggcctctaccctataac

SEQ ID NO: 581305 - DNA, 749 bp, Homo sapiens
cttccccagtttcttcatctatttaacatgtgacatagcttcaagggccctaaccatggtctaactggttttctttgaacatggtccaagttataaatgttcagtgaacaggccaaaagaaggtttccagctggtggcccctattaatatagtcctgggaaagctgactttccctcttttagaaggcctacaacacaaccaagggtacacacatacgtagtcataaacacaaccataacatacacattaacacaactatggcatggccatttggcaaggcacgaacacacacacacacgcttcacatggcacacataatttccacacacaacacaatatactcacatctactggtggtatgcacccactcacaaatctccatggacaggcacacaggtcacacaaagactttattcacattggattactttcaacgaaagctactctttttccttaaggtaaaacccagttcctttttggaggtctccattctggtatttggggtggttgaactcaagtggttagaacttatattcgctggtggatttctaatctggggggtactggtcccaaaataacccgtaggacacaatgtgctaattaggttattactcaaccacagcaggggtatatgtaagcttcccatgttgggcctatggcatggtcctgttaactccttagccagggaccttgaactggggatataggggcggcttatggccctaaagaggctaacccgtgatagtgcc

SEQ ID NO: 581306 - DNA, 244 bp, Homo sapiens
gattttgtttgagacggagcgcgctctgttgcccaggctggagtgcagtggcacgatcttggctcgctgcaagctccacgcccggctaattttttgtatttttagtagagatggggtttcactgtgtgagccaggatgatctcgatctcctgacctcatgatccgcccgccgcaaatgaatttttgacatttttacttttaagtcttgaaattatttttaagaatagataatacttagtcgacg

SEQ ID NO: 581307 - DNA, 555 bp, Homo sapiens
  misc_feature (56)..(56): n is a, c, g, or t
  misc_feature (117)..(117): n is a, c, g, or t
  misc_feature (211)..(211): n is a, c, g, or t
  misc_feature (213)..(213): n is a, c, g, or t
  misc_feature (286)..(286): n is a, c, g, or t
  misc_feature (377)..(377): n is a, c, g, or t
  misc_feature (406)..(406): n is a, c, g, or t
ttcaccattaaacctattatttcactaacatacttatacaaatttttatccactanccactcttcttaacatctcaacatctcccccttctccttttttctttcatccatcattttntctacaattcatcatctacaacccttaatttctttatatcacatattaaactcttcattctctcttcctttatttttgtcctcaattttccatntncttcttcataattttctacccaactttttcatcattaccccattctatcatcaacttttacaaactattcctntccttttctttttatacttattacaccttcccactttctaaaatttcaattccttcttttcttatccatcttccttttgttcttcttcccnctttcttcttccaccacatcttctcgctntcttcttcatccccatctaatttttaatccaattaatattcttattattcttactattatattttattttttctcttttactaatcaccaaaaatcaaccaacttatccatttttattttcaaaacaattaaataaattcttacttctt

SEQ ID NO: 581308 - DNA, 177 bp, Homo sapiens
acgacaggcgactcctcccaatttgaggccagtacatgtaccatgttcgtcaaggtggagcccaggtgcaagggtctgcattcagctcccactagtcatctcctacactggtgatgacgggttacaaggtgatgctgggaggtcagccatctcactgcgcttttgagggctttgttc

SEQ ID NO: 581309 - DNA, 376 bp, Homo sapiens
ttagcaggccaagagcccatcaccattgacacatttacttatcagaatggtgtcactatgcttggtgttgagtatgcagttgtggcacagaacccttggcccctgcatcttcccaagcttacagtttagtgggagcagatagacaataacatgctttataatactgtttggtcagtgcttggctggaaagcagtagaaatttataggatgaagtaggatttaggctgacctgaaggagaaataggaataagccaggtttgggagtagaggaagggtaagaatgttttagcatgatctggaaagccaacttcaatttcctcacagccattcacattcctcctttctttcctaaagtctaagctatcagttggaaaaa

SEQ ID NO: 581310 - DNA, 420 bp, Homo sapiens
  misc_feature (11)..(11): n is a, c, g, or t
  misc_feature (22)..(22): n is a, c, g, or t
  misc_feature (49)..(49): n is a, c, g, or t
cctttggaggntttccatttanggatcccctgaacctaatattccatantaattgcctgtcagaggtaatttataaattcccccagtccatttagccataaggattttagtgaacagatcctgaggttcctcccaaaaacaccctcaatgcccaagcaaatgattcctgcctattagtccttcttaatgcaccctggcaatttccctgtctttcctactttgatcttctttctcttctcaggtttgcaacattaagaaaggggtagtggcaaaaagaaagaatgtcaacttagaaggctaactttgggggaaatcagtatagccgaggcatcccccaaaagcttcctttgcgttaatgcaaacttccacacaatatttaccaacttctatgaaccagaaaaggctcattcttaaaaaaaa

SEQ ID NO: 581311 - DNA, 138 bp, Homo sapiens
  misc_feature (45)..(45): n is a, c, g, or t
  misc_feature (74)..(74): n is a, c, g, or t
  misc_feature (101)..(101): n is a, c, g, or t
  misc_feature (105)..(105): n is a, c, g, or t
caccgagctctggggtctcgacacacacacagtacctttgaacancactttctccagctcagagtcacctgggnacatgtgtcacggcactcagctctcgnccgnctgtgctgtgggcagggaatccagcggcgtctg

SEQ ID NO: 581312 - DNA, 279 bp, Homo sapiens
ggtgagcccgccaacaatgggatgacaatctacaaggtcttgccggtaggagcaacttgacaagaggagcaagaaaattggagttcaaggcaagcctttggcacattttgcgtgcttgggccttgaggtatggtctgacatacagcctcccatctccagctgagtcccggggtttggggaggggtgtcggggtcccaggacctgagcctggacatgtcctaaccccaaattccccgatttctcccaagtctgtcttggggttgcaataagtctgtttcc

SEQ ID NO: 581313 - DNA, 726 bp, Homo sapiens
  misc_feature (25)..(25): n is a, c, g, or t
  misc_feature (77)..(77): n is a, c, g, or t
  misc_feature (81)..(82): n is a, c, g, or t
  misc_feature (85)..(85): n is a, c, g, or t
  misc_feature (101)..(103): n is a, c, g, or t
  misc_feature (105)..(105): n is a, c, g, or t
  misc_feature (108)..(108): n is a, c, g, or t
  misc_feature (110)..(111): n is a, c, g, or t
  misc_feature (113)..(115): n is a, c, g, or t
  misc_feature (118)..(120): n is a, c, g, or t
  misc_feature (122)..(122): n is a, c, g, or t
  misc_feature (124)..(125): n is a, c, g, or t
  misc_feature (127)..(128): n is a, c, g, or t
  misc_feature (134)..(134): n is a, c, g, or t
  misc_feature (137)..(137): n is a, c, g, or t
  misc_feature (142)..(143): n is a, c, g, or t
  misc_feature (146)..(146): n is a, c, g, or t
  misc_feature (148)..(153): n is a, c, g, or t
  misc_feature (155)..(157): n is a, c, g, or t
  misc_feature (163)..(163): n is a, c, g, or t
  misc_feature (168)..(169): n is a, c, g, or t
  misc_feature (173)..(173): n is a, c, g, or t
  misc_feature (178)..(178): n is a, c, g, or t
  misc_feature (182)..(182): n is a, c, g, or t
  misc_feature (184)..(185): n is a, c, g, or t
  misc_feature (193)..(193): n is a, c, g, or t
  misc_feature (203)..(203): n is a, c, g, or t
  misc_feature (205)..(205): n is a, c, g, or t
  misc_feature (210)..(211): n is a, c, g, or t
  misc_feature (217)..(218): n is a, c, g, or t
  misc_feature (221)..(221): n is a, c, g, or t
  misc_feature (223)..(224): n is a, c, g, or t
  misc_feature (226)..(227): n is a, c, g, or t
  misc_feature (230)..(230): n is a, c, g, or t
  misc_feature (232)..(232): n is a, c, g, or t
  misc_feature (238)..(238): n is a, c, g, or t
  misc_feature (241)..(241): n is a, c, g, or t
  misc_feature (250)..(252): n is a, c, g, or t
  misc_feature (254)..(255): n is a, c, g, or t
  misc_feature (257)..(258): n is a, c, g, or t
  misc_feature (261)..(261): n is a, c, g, or t
  misc_feature (268)..(268): n is a, c, g, or t
  misc_feature (271)..(272): n is a, c, g, or t
  misc_feature (275)..(276): n is a, c, g, or t
  misc_feature (283)..(283): n is a, c, g, or t
  misc_feature (287)..(287): n is a, c, g, or t
  misc_feature (292)..(293): n is a, c, g, or t
  misc_feature (297)..(297): n is a, c, g, or t
  misc_feature (300)..(300): n is a, c, g, or t
  misc_feature (317)..(317): n is a, c, g, or t
  misc_feature (319)..(319): n is a, c, g, or t
  misc_feature (323)..(323): n is a, c, g, or t
  misc_feature (359)..(359): n is a, c, g, or t
  misc_feature (401)..(401): n is a, c, g, or t
  misc_feature (403)..(403): n is a, c, g, or t
  misc_feature (437)..(437): n is a, c, g, or t
  misc_feature (441)..(441): n is a, c, g, or t
  misc_feature (443)..(444): n is a, c, g, or t
  misc_feature (455)..(455): n is a, c, g, or t
  misc_feature (457)..(457): n is a, c, g, or t
  misc_feature (460)..(460): n is a, c, g, or t
  misc_feature (478)..(478): n is a, c, g, or t
  misc_feature (480)..(480): n is a, c, g, or t
  misc_feature (483)..(484): n is a, c, g, or t
  misc_feature (512)..(512): n is a, c, g, or t
  misc_feature (516)..(516): n is a, c, g, or t
  misc_feature (519)..(519): n is a, c, g, or t
  misc_feature (542)..(543): n is a, c, g, or t
  misc_feature (555)..(555): n is a, c, g, or t
  misc_feature (571)..(571): n is a, c, g, or t
  misc_feature (577)..(578): n is a, c, g, or t
  misc_feature (588)..(589): n is a, c, g, or t
  misc_feature (599)..(599): n is a, c, g, or t
  misc_feature (601)..(601): n is a, c, g, or t
  misc_feature (609)..(610): n is a, c, g, or t
  misc_feature (615)..(615): n is a, c, g, or t
  misc_feature (618)..(618): n is a, c, g, or t
  misc_feature (626)..(627): n is a, c, g, or t
  misc_feature (630)..(631): n is a, c, g, or t
  misc_feature (638)..(638): n is a, c, g, or t
  misc_feature (641)..(641): n is a, c, g, or t
  misc_feature (643)..(643): n is a, c, g, or t
  misc_feature (645)..(646): n is a, c, g, or t
  misc_feature (649)..(652): n is a, c, g, or t
  misc_feature (655)..(655): n is a, c, g, or t
  misc_feature (658)..(658): n is a, c, g, or t
  misc_feature (660)..(660): n is a, c, g, or t
  misc_feature (665)..(665): n is a, c, g, or t
  misc_feature (704)..(704): n is a, c, g, or t
agtaaaataaaaacaaggggaaggngactctgacacttggttttcagagcaagtgtggggctggggcagagcccaanatanntgntgtggggaaagggagnnntnagncnncnnnatnnntnannanngtctanaanacagnnatntnnnnnntnnnaaaaanaattnnacgnatgcnaaangnnaaggaagnagcttaaaananatccnncggtcnnctnanntnnagntnaatcantancaataagcnnngnnannganagaaatnganntgnntaatganaaangtaanncacnctngaagaaaaaaagtcctnantagncactcgccaaattattattaaaacttcatcggcaanaaaactaattaatgggaccaaaaataacctaactcaagaaangnaagccgctagtaaaccgtgaaaaatgaggtaaanaagnannagccctaatanancanaaaaccccatttgttacntntgnncgaatttctctcaaagccatctaatctnctancancaggcggtgggaaaagaaacccnnggaactgaaccngaaacaagcaggtggntgtatnnaggcggagtnntgcgataagnangaccaagnngctgnagngagggggnnggnnggggggnggngngnngtnnnnccnggncnttcangaacttctgcctgaccgaatcgcgatgagtgttcttgtntaaaacacgccttccacgagaa

SEQ ID NO: 581314 - DNA, 103 bp, Homo sapiens
gaattttatctgttttaaaaatgaacttctccgctacacagaagtacaaatatggtagtcagttttgtatttaggaatgtattggtagcagggatgtttccat

SEQ ID NO: 581315 - DNA, 346 bp, Homo sapiens
gtaacttgttaagatcagcgggctttcttgttaaagttatttaagttttgaaggctccaccacttcaagtctttaaattttttgagactagaataattttaaataaaatgcccctttgttttttaatgaaataaagattgaagaggttgagtcaggactgagctggtgaaaaaattttgtgggtattttggaaatttaaaacggaaagaacttggtgagctatgaattactctcagtctcctttttacagggttgttgtgaccccttttttccaaaaaattttgtggaatgtttttgtaggactttgttttccccaagcttgaattaaagcaggattcggtttcca

SEQ ID NO: 581316 - DNA, 1058 bp, Homo sapiens
attcctagaggccgaggcgaccgacatgtttttatttgggtttccatttttttatttcattcgtctttttaagccttaaagctgttctacatcttgacatgcacttctcagatgtttggggggaaacatccttcttaaacatgggtccttgtgcttgcctctctgggagaggcaggatcctgagcaggtgaatcataaggcatttatgccatattgttattatgcgggcatctgcacccacctctcgccacccacaagcctttgggccatctatgagttttgtcgtgctggcgtttccccatgtatttggcgtacattactcatagttaagagtgggtttaaccttttgcacttggatttccactgcttctatggcgcggaacagattgacagagattctccctcttagaagactctgcgtcttccaaacttccattcctcgtcacaaatgatagatattacatagttgactacggtgcgcacgactcgttcacaaagaaaacctactagaaacctactccctgaaatcacaacctcacacatacacacaaagactacttatatacatactcttatctataaataaaccaatttacctaacactacataacacctctatccaacgatagcaccaaatcaaacaacgcaccttcgttccttcaccttctacacgcggcccacattcttatgctcacttcaatctgacttatcatatacctcacatccctcatactcatgccgcttaaactatcattgtcaactcgtcactgcgctaccctacgtcccccacaaaaccaacgcttcgcttgttttactcactttctcgcatacatatgtcgcatcagaaaccacttagtttcgatcatatgacttcctcacgtatctacaatctccttcacctcttccataaatcaagactaccatacattatctataacatctttccacgtcttcacattccactacaaaaccacgctcgttattgctccatccgcccctctcttccccctcctttatccttctccctaccactaatcatcacacacatctaccacctc

SEQ ID NO: 581317 - DNA, 430 bp, Homo sapiens
tacacttgcagatatgtcatttgtgtaaaacaaacgaaagttccaaaataactgaataatagcaaataattatggtcttgtttccccaatttcagcagttattttgttttctcggtatcttttgctcaaatacaatgtcaatcaatgcaccagcctgaatggacctcgatgggactgtactgagggggaaaaaagcaatctcaaaagatcacgtatgatgtgattccctttatatgacatccttgagcccacaaaattacagagatggagaacagattagtttcaggagtatggctataaggggtagctttgtgatgatggtatagttctgtatcttgactgaggtagggaaccggttgcacaaagctacaggtgctaaactgcatagaaccacacacacacacgtgcatgtcgatctaacgaaatctga

SEQ ID NO: 581318 - DNA, 101 bp, Homo sapiens
aggcggtacctcagatcggctaacggcgcatgatagaaattcacatttaaaagtttaaagatggaggctgggtgtggtggctcacgcgtgtaatcccagca

SEQ ID NO: 581319 - DNA, 638 bp, Homo sapiens
tggataactgtgtgcctactcattgacttggaaacatgaaatagtcccagattctatatcttaaggagcaatttatagggactaactactcttggcaaaggacaagcccagtatgcggtctaaccaattgccaaggatgatcagcgaccatagaactgttatcagattgtcatgggattattgcgttgtacgagatctagttcattgtaaattaacctagactcagaatagtaactggtaccacagtgagagtagaatagggacgggatttacagaagtcagccggaatccaactgtattgttaaccctttaacttcctattaactaagcatctttatcttggtggtagggtctaccttctgcttccctggaaaggatgaatttacatcatgggacaagcctatcttccaagtctattggtggtgggtccgcttgtttggggttgttggcagctaggagataaaaatttcaaaatacaattaaaagttcttagaagataatgtcttaatttgtaccaattgcgaggtagaagtagaggcctaccttgaattaagggttatagctcagtttgtaacacattgtggaagaataggtaccagcttgggaaggaaaatgtatataaaataaagcaacgtgtt

SEQ ID NO: 581320 - DNA, 393 bp, Homo sapiens
  misc_feature (1)..(1): n is a, c, g, or t
naggcatggaatacactgtggtcatgtcatacgtaacatctcagctctgcattaaatatcccatcataactggtaagtacagggcactctagtgacactgacactgcgtctgtactctatagtacaatattccactgtgtgtaagaatcaacgtcagttaatgtcagtgctactataccataagatagtttgaactcaactattaaagttgcaataactctagagcatatggtcaggactaggcattgtaacctgcgcgtatcgctgttacttcgccagactgacaggctccatgatagttaggaactgtgagtctgacattagctatggcggtgaaaacctggaaggcacagtcatagatagtcgcggtgtgcacacaggagaacgcaacac

SEQ ID NO: 581321 - DNA, 161 bp, Homo sapiens
gtacttttcacaggtctcctgactcgtgatctgcgctcggcctcccaaagtgctgggattactggcatgagccactgcgcccggcgaacgcctgactaatttttaagaaatttcttgtagagactaggtctcactagtcttccaggctggtctcgaactcc

SEQ ID NO: 581322 - DNA, 86 bp, Homo sapiens
  misc_feature (45)..(45): n is a, c, g, or t
aaatagtgaccttagggaaagcacatatggatatgaatttcattnccatatgatctgaaaccactggatggctgaaggtgttaata

SEQ ID NO: 581323 - DNA, 229 bp, Homo sapiens
cgtactgcgacctctgttattgtaatgcagacggaggaccaacatagaacatactcgccagtactcggctgtgcaaaacaggggctagcgctgaagtacaaatgggaacacgtgcttcttcctgttttacatcaatacttagaacacgacttggatcctacaagcatctggactctaggtctcagtactggagtgtctcacccatgggccccacgcagaaggcgcctaa

SEQ ID NO: 581324 - DNA, 204 bp, Homo sapiens
cttgtctgcgttccgtgttcatggctggtgcagtgctccgcggggccggatcctccgcgcggccgagtcctatctcctgggaaatggggcggacagtgtttccctgactgactattgtgagcgccctctctctcctggctggaacggagaccatggtccccaatcagggcccccgggcccctgttgaaaatcggagggcccctg

SEQ ID NO: 581325 - DNA, 469 bp, Homo sapiens
gaataaagagaagtatataaagtaccatgacgaaacatataaatgaagtggcctatatcactaacaaataatatctgagttcaaagaaacagtatttggagaacagagaataattcacaaccatgcatgacattcaatgcacactgatcactcacaccaagctgtgcatgatactgtttcagaaattctaatctgttctagctctaacattgctaactctctagcagaaaatacacaggcagtaacacagtccctatagacattgtacttataggaggctcaatccagttataactgaaagcacatgacctggtaaggatgttacaaaataatagctgtcagcaaaggagggcttataatttcaaaggatacttttaattctgctttaatttaaggtgccaagaagctatttaagtgattacatttgaccaaatgtagcactaatagccattgtcatcttctccgcgat

SEQ ID NO: 581326 - DNA, 198 bp, Homo sapiens
  misc_feature (16)..(16): n is a, c, g, or t
  misc_feature (63)..(63): n is a, c, g, or t
  misc_feature (73)..(73): n is a, c, g, or t
  misc_feature (117)..(117): n is a, c, g, or t
  misc_feature (159)..(159): n is a, c, g, or t
  misc_feature (182)..(182): n is a, c, g, or t
  misc_feature (193)..(193): n is a, c, g, or t
atttctgaaacatttntgaaatgttactaattcacaacaagattacaaatatattcctaaganctggataaancgacttcataccacagtagggaaagagctgagctgagccacagnagttataattgaccaaaatcacttatcttttagttacaggtnagactcactttaaagagattaanattcttccacnaatat

SEQ ID NO: 581327 - DNA, 81 bp, Homo sapiens
gccgcggacacggccatgtattactgtgcgacagtaccgtacagtggtgacccgaaaggctttgactactggggccaggga

SEQ ID NO: 581328 - DNA, 818 bp, Homo sapiens
ggtaagggaaactgcgaggcgaacgtgaccgtggtaccgagcatttcagatctgctcggtagacctggtgcaccaccaccatgttggtgcaaggctggtgtgtctccgtgtattaccttctagggtttgccacccagctttcaccaatggcctcccctgttgtgaagaattccatcacgaagaatcaatggctgtggaacacctagcagggagtatgcgcacctaaagcaagaattggggatccggctggtgggaggaactgtgccgagaatcaacagaggcgagcattggaaccatcgatggaaagatatttagaattgatcagatgggaagatggtttgtagctggaggggctgctgtggtcttggagcattgtgctagtatgggctttgggactgtctaattgagattggagctattgaaaaaggctgtaattttggcctcagtatgtcgaaggatagaattcattccacctatatgtacttagcagggagtatgggtttaaacagtttgtctgccatagcaatcagcagaaccgccttgttctcattgaacttcattgactgagagggctcttgggtgacaaattggtgtgacctttggcagcatggttggcgctggaaatgctggttacgatccaaataccatatgacagatgccaggggccaaagcgtttgctggtgcgtaacttctggttggatcggtggcgggtgggtccctggccattttagggggcccttctctccaggtggttgtacacagccgcgctgggggggcgtccacttgccggttttcgccgaaattttctctttggtgcc

SEQ ID NO: 581329 - DNA, 321 bp, Homo sapiens
cccccccccccccccccggggccggggttggggcctggttttgggggccaagggggcccccccccttatttcccccccccctttttccccccctttggggatggtggggggggggggatttagttttttttgggttttcccccggccccttttttttttggggccgtttttttaagggggggggggggggtttttttttttttttttgtttttaggaaggcctttccccttttcccccccccccccaccccctgggggggcccggaggggggggtttttttccccgggtttttttgggggggtaaaaaggggcaaaaagga

SEQ ID NO: 581330 - DNA, 255 bp, Homo sapiens
gggcccccttttttaaaaaaaaaatttttttttaaagccccaaaggggggtttttaaggggccccttttttccccccccgggggtgtgggtttttttttaaaaaaaaggttaaaaaattttccccccccccctttgggcccccaacgccctttttaatttttcccatttttaaggggggggggggggggggggaggggttttttttttaaaaagggttttttcccccaaaaaaaaggggttttttttttttttta

SEQ ID NO: 581331 - DNA, 394 bp, Homo sapiens
  misc_feature (222)..(222): n is a, c, g, or t
  misc_feature (232)..(232): n is a, c, g, or t
  misc_feature (278)..(278): n is a, c, g, or t
taaatcccttgcgtaagcgcttcgcaactccttggcctcacggtttcactccctgggctgcaaaactgatgaagtgtttcttcaccccatccagcacgccccagagttcttaaaattcagtgaaacccaatgtgccagacatattctctatccagcattgagaccataagtggacaagtctccagttgaaaggtttgtagcttccggcaatgccggactgcngcagacaccnctgtagctcgtccgcatctatctgcccatcctgtccagctacggcnacaaagtacccgtaaagaggatcctgagtttgtgcaggaaacgagggtcctccgggagcccctccgtacccgcctgcgtagtacccgccgccagcgccagggtgcccggggtacga

SEQ ID NO: 581332 - DNA, 298 bp, Homo sapiens
  misc_feature (1)..(1): n is a, c, g, or t
  misc_feature (12)..(12): n is a, c, g, or t
  misc_feature (39)..(39): n is a, c, g, or t
  misc_feature (49)..(49): n is a, c, g, or t
  misc_feature (66)..(66): n is a, c, g, or t
  misc_feature (73)..(73): n is a, c, g, or t
  misc_feature (82)..(82): n is a, c, g, or t
  misc_feature (88)..(88): n is a, c, g, or t
  misc_feature (132)..(132): n is a, c, g, or t
  misc_feature (157)..(158): n is a, c, g, or t
  misc_feature (174)..(174): n is a, c, g, or t
  misc_feature (186)..(186): n is a, c, g, or t
  misc_feature (205)..(205): n is a, c, g, or t
  misc_feature (215)..(215): n is a, c, g, or t
  misc_feature (251)..(251): n is a, c, g, or t
  misc_feature (264)..(265): n is a, c, g, or t
nttccggcgganagctccaccgctgaggccgacgaggcnagtcctttantataagcccctactggnactatantatacgttngggggncgctactacaaaaattttcttttctttttgtgtttgcttattgngtacttagctatagataatttttgnntacaaagcctacgggncatataaatgcnatagttaactgatcctgtntgctgatgtnctttttatggggggggggggacatcttttaatccancatcttctcctgnntcttgccttcctttttcttcttcttagattctg

SEQ ID NO: 581333 - DNA, 327 bp, Homo sapiens
attcgcgggcgcgtcgacaatctatgcaacaaatcccctatgacacaagtttacctatgtaacaaacctgcacttgtacccctgaacttaaaagtttaaaaaaaaaaaaaaaggagttagtggctaataaactctaaataaagcatttcaaacttaaaagcaaaatctagccaggtgccgtggctcacgcctgtaatcccagcacttttggaggccaaggcaggaggatcgcttgaggtcaggagtttgaaaccagcctgagcagcaaagcaagaccccgtttctacaaaaaaagtcgacgcggccgcgaatttagtagtagtagta

SEQ ID NO: 581334 - DNA, 552 bp, Homo sapiens
gacctcgggttactgtctggcaaggccagacgtcccgggccgtcttctattccaaatgctcatcatgcaaagtccataagaaatccagagcacagttcgtggagagaaggaatgcccaaggtgaacatggtagggaggtcttcgattcggtggagcttcaccacgttggagtcgtctgctgggcctgtcaagatccgtatatgggctgcatcgtagcgatctccaattccagtagggaacactgtcactctgttggacctggtggtatcagctgctgtcattccactgaatccacagagacgtccgtgtaacaggatgaccatcgactttgtaggttcccggcctggtaccatgcagttctgaagtcgagtatcgcgcagcaaagcccaaggtcatcacctcgatttggctgggggctccctcccgactgcagtgacgttcacaaggctcagcaaatgggcttgctccgggaccacgttccagtggcacgtcgattgtggtgatgcttccatactgcagcagctgacacctgatagatgaggtatagccgag

SEQ ID NO: 581335 - DNA, 171 bp, Homo sapiens
agtcacctcctaaagtgctgggataacaggcatgagccactgcgcccggaaaggagcctctcattctatggactgaagtcacatattcaatccagacggggatattctagagccccgaccatgtgctcggtgccatgtacctagctatatctacctcttatggtgtgggca

SEQ ID NO: 581336 - DNA, 350 bp, Homo sapiens
ccaggcgtccacgtacttgcaaaagatgtccatgtacaacctgaaatgcccggcggaggaaaactgactggccagtacaccatacagggcaaatgtcatagattatgatcacaaggtgctgctaacatttccccaacgagtgaaaaaccaagggacatcacatttcttacccatcctaccaagatattcctgggaatggcacagtggtcatcaacattaccacactctggatgattatagccactatgacctgcttgatgccaacacccagatgagagtggctgaaggccacaaagcaagtttctgtgttgaagacacatcctgtgactatggctaccacaggcgattct

SEQ ID NO: 581337 - DNA, 748 bp, Homo sapiens
  misc_feature (664)..(664): n is a, c, g, or t
ctactagtagtatctagcggctactacggttgccctactacctatttacgtatataccggaaacataggcctaccgggtagtaggctagtactactagataggtagtacatacaaggtagtatacaacgacatagaaggtagcgtaaagtactatacaacgccagaggaggtagaagaagcgcaagggaaggcgggtagctactatactagccgtagagtagaggacaagaagaacatacatacctaggaggaggggcgaaggagatacctaggtagggcgatagtagggccagactagtacgacgataccctaacgccacctataagtacaagatagctagccagataaaggactagccgctaatagccctactaatagatagcaacctaatagaggaccaagggagagcaaggaaggaggatactaggtagttatatactatactaggggcccccggagtactagcgcccccttaaaagagcgaaaatagatattatagcgcagctaccaagggacgccatacaaggaagaagctagacaggggatcaaggcatgaatatgcaaggcaaactagcttacgagggagggttcaagggaccggctagcaccctaggcaagagaagctaggggggggcagtagccggtcaatacttcccctaggnaggggcaagcctttaggagaggcccctatactaggcgccccctaggcctaggagccatttagggagaccccaaaacctagccct

SEQ ID NO: 581338 - DNA, 284 bp, Homo sapiens
tccctgaacgcaccggtgagcctatgcaccgtttaagccacaagatccgctttagccagttggaatgcaggaaatgttacagtaaaacacgtcccacagtttcgcccaaatttcaagagtttattttcaaaagcgttattggggtatgttggcaccccagggttttcaaagttaatcgaaaagactcttttaaaaaaacttattttgataaattattacacacgcaaaaaaactgatcacacttactgaatctctccacgacatgaaaaataaactttattttc

SEQ ID NO: 581339 - DNA, 1068 bp, Homo sapiens
  misc_feature (499)..(499): n is a, c, g, or t
ttccatcaataaagccatggagaaagaccatgaagaggtggcgacatatggcgtcctagacagtctatggctttgaaatattccagagacaaatggcttcgaggcagatgtggtagtcaccctttcgttgaactgagagaacactgcatgcacgactttcttaatctcgtacagcatgtacaattcacatacggcaggaaccatgtgaatgacttactgttgccaagcagggcaataaatgactggacacctcattgcagtactctctcaatgagtaacaatcgtagtgtgtacctcactagagaaacaaagttgaacccctcctggacactcatgtagcattcctgaggactgaacgctgtgtgcgaccacgaactgtcattgtcgcgattggtgctgacgtggtggccagtactcaggaccagcttgagctctcgaggataaacctgtcagcactggcaggactacgagtgaagtgtcactgaagggcaactttcanatgcagattgggaagcccaaggcactgtcactgcatatccagtcaagttcagtgtctggggaacagcgtaatccctagttgaagcattgagactggggctatattgcatgtacaacgggaaaccccgggggtgatggctgcccgttgtactataaatggggaagttcgtccaaatgcggccagcgcgtcatacctggccacggtatgtgccctaggccgcaaggacggtggccctttttatcgcacttgaggagaaggttgcatttcacattgttttccccgtgggcaccacacttccttggccaaggggctctggcagccacaaggcacaaacaggggggctaggcgcgccagaaagccattaatctttagcccgcggcggaagaagggcaaatagaataggtcaacacatcggaaacaaccgaaaagggacccgagagttggaaccccattttgggtggaaggtgcaacgcccacttggcaaatcgacaggaggtgggtaaccggccctcagcaacgataacacaattatcaggcgtgggctaggttccaagtggcccagaaacgcg

SEQ ID NO: 581340 - DNA, 103 bp, Homo sapiens
gaatatatatatcactcaaacaatgttcaaccagtaactactactaatcaacgcccatcatcatacaaagccccctgcacaatagagatacagatagaggaga

SEQ ID NO: 581341 - DNA, 219 bp, Homo sapiens
tcgaatttaaatcagtagttttattacaatacgcactgacacacaattggaatcggaatgccctgacattttctgacgatttcacggaaagcaaatgtgaccatccacgcagtagagccacccacaccttttcctaacaaaaaggaaaagctttcacatgtcgtaactgaacaatgcaagcttttcttactcttgtcaaacaaacttcagtctcagaaa

SEQ ID NO: 581342 - DNA, 295 bp, Homo sapiens
cagactatccatcttgggtcgctttgctggtacgtgatatgagacagacagttgcggtgggtgtcatcaaagcagtggacacagaaggctgctcagccatcagacagcctgcccgacattcgtcttcaccattcaatgtgagtccagttacccctgtgccacccgagtgcctacattcctgcagacgcgaggggagctgcatcacgtggcttccagggctatgaacctaccccaccgcaatctggagcagctttggactcctgggtgatgtcttcatcgcgccaagtacggcgcc

SEQ ID NO: 581343 - DNA, 354 bp, Homo sapiens
gggcccttcgtctggcccatttcttcaggaaatctcttgaagagaagggcccgaaatacttaaccaagtaggactcccccttattttctccaatagtccccaaccagtacaggtcacttgaagccataaccattcttcttggttaagggatccacgcccttgtttcagaaatcacaccacagaagccgtgtaacgctcacagagcgcatcgctgtgtggatagtgtcgcgatatgacccgggtgtttaaagtgttttctctactctcgataaggccctgtgcgcactgtacggaatgtgggtgtagagcgtgctctccacataggccacacagccgcctgagtcacagagtcag

SEQ ID NO: 581344 - DNA, 533 bp, Homo sapiens
ctgttttttttaatagctcttttggacagcatgtttccaccaatccaacatcctcaatcatgttttgaaagctgtacttccacccttccaatactcctatgcgggggatgtgtcattcaacagcgttagcagtcccctcttgatctcttgtaagattgttgaaaccattctatctgaaacaattatcttcacccactagaaagaaacccatcctatagttagcgaagaacgtgccgcctgaataacatatgctagaatcgcgggcaacttatacactctctctccgatacacccttgaacccaagaggcaccacctgtgtccaggagttgacagtgacatagactctgaaatatagagtccttctcttaccgctcacattggtctatgcattcttgatgtcgaacaactgccgactgagcactatggctctctgagacacgctctgagctttgtacttatgttgatcgatgagcacatgactcgctgctgttaagcatacctcccagaaggcgggccactcattggctagccc

SEQ ID NO: 581345 - DNA, 116 bp, Homo sapiens
gtgcgggttcataaaacagggagttagaataggtcttggtgacaaaatatgttgtgtagagttcagggagagtgcgtcatatgttgttcctaggaagattgtagcggtgagggcgt

SEQ ID NO: 581346 - DNA, 159 bp, Homo sapiens
agttcacgaggcagaggtctggcctcaattagctaaatgtagatgctgctaacagttccctcctcaaaggcaccttggtgctgtgggggcccttgcctcttcccttcccactgggtgccttacaaaacagtgttcttttgaaaatgttcctcaggaata

SEQ ID NO: 581347 - DNA, 1391 bp, Homo sapiens
tataagcctctaagacccatttttaaaagtcagtattttatacagtgttccaagaattaccacaattatgtaatacatctcttacaccattcatactacaaaccatttacgctactcattatactactcccatgtgcatctctaccgttatatccaattctgctggtatactgatcctctagtgctttgtaactacgctgatcacgtcatgtatttataagatcctcaagctcccatagtatatgatgaaccaagaactaattagaaatctcagttgattgacactgagtgtccctcgagcattatacctatatatgggcactcgtgtttgtaagtcgcgtctccattcgcaaatgattctaatctcgatacctagcctgctttactaaagttgctaggtttcacttacttgtttaccttgtggatacctacgatcttaattcctaagcccattcgactcggtttgcaagctatgtctatataatcgcaggacgcaaaattgtttgtgatactagcactaattggtatttggattagtctcttatttttaccttgttatctttagtttattgcaacaactttaataaatgcgtgagaattaccttagttagtttctagggatatccattgaggtattacgatatagggtagtggaaagtgatttttaagttagtattactaatcgaacaaaggggtaatgccaaggttttttgacaaaatacgagttcctagagtcgttgtacaccctccaagtttttcctaattcaatgtttactccggcaatgatcaagtaacacgctgaggtttttaaagttatctacgccatacctttcccatagtaccaagaaccgtaagcaatagcaacctaacggctcatgcgaaccacttaaaaagttgtctcacaaaagccgtatttacacgaggggggaatagcacgggcaataacacatacgcttaggcatttcccggtagttttacagcaagcacacttcagtctgcagaaacttacgtggccaattgcgcatcatctgacatttgcctcctgccagctttgagagagacctagacccgcttgataaattatacaacgttggttgaggtttccccaagtggtatggtaattaagtatcttggccccctgcacattggccgcaccttggagccaatcgacataattacactaggacttgaatttgcccccgattccctccattacgcgtcctactaattgggaggtcaaacacctgtgccagtagtttcgaaacgcttgctaccatcatgtctgtacatctgaaaagactcgggtccgagggaaggttcctgttaggagcttgtcacataaccgccacgcaccacgcccggatatgtgccaaggctcacgacaggactcc

SEQ ID NO: 581348 - DNA, 1074 bp, Homo sapiens
ccatggttgggtacgagtgtgtatttgttgtaaggtagttatgaggaaattcttcttctaggacttgtggggaaggagtgggaaggcgccatgcggttgggtctagtatctgtttgttctgggctgtaagtggtggcaatgtctatgtgaatggaattgtgtttggttgtgtattgtaagccagtaggaggcgtgtggtggtagagcgcgaagtggcgagcgtgggaaggttgtactgggtggggcgggagtctatggctgaggtttgaatgaataatgtgaactaactataatgaccgaaccaatgtaggctatttgtttgcgtatgggagtatactatatatttgatgtggatatcggttgttttaggtgattgacgtgtcctgttctgtcagttattgggagcatgagcgccctagtgtgggaatgctttaggatctgatgttatatctaggctggtgtgtcaaggggtttgcgtagctgtgtatggggtattgtgctatgattgtggtctttgtttgttttgaatgagtgttagggtgtgtatgtgttttttaagtggggtctattgtgtctggtcctgtgtggtgtataaggcggtgttgcatctagtagaggatcacttagtgcataggatacatgggtctgcgatgctttgtgtgcctagtatgtagtatgattgcctagtatagatgactgtcttgacagtatattttagtgagtaggtagctgtcctgcatacctacgtataaaatagcctatatagcgtcttagatgtagttactactacaaggaagtaaatagtacgccgttcgcgctatagagttgtggtactcctacgctgtaagattgatcgggctatgaagagatatatagatattgcacgagaaatatacagtgcaagtgtattgaacactttcttctgatgagtgttcgtctatacctacaggatggagttattactaactgttactagttctagcacctgttttatgtgccgaatcactgtggggtataggtcaggaaggtgtagtccattcaataggtaaattgtaaattaaaaatagataatta

SEQ ID NO: 581349 - DNA, 109 bp, Homo sapiens
cgcaacgtaacatatctcacactaaacgctgttacaaaaatccttcaggccaaatgtataacatttagcaaactttttctgcaaagaatcagatagtaaatgttctaag

SEQ ID NO: 581350 - DNA, 373 bp, Homo sapiens
  misc_feature (7)..(7): n is a, c, g, or t
  misc_feature (14)..(14): n is a, c, g, or t
  misc_feature (19)..(19): n is a, c, g, or t
  misc_feature (61)..(61): n is a, c, g, or t
  misc_feature (316)..(316): n is a, c, g, or t
  misc_feature (358)..(358): n is a, c, g, or t
ctcaagntgatccntcaantgatagaagctagccaggtagctgggcacagcagcacacaantgtagtgccagctactagggaggctgaggcaagaggattctttgagcccaggacttcaggctgtagtgtgcaataatcacgactgtgaatagccagtgcactccagcctgggcaacatagtgagatcctgtctctaaaaaaaatttttttaaaaggagcaagccaggacaagatggagggaaaatattctaaggaaggccacagcatgtacaaaagcctacaactggttgcttttaaaaagctgagctctctttnggggctgggtacagtggtttacacctgtgatcccagcacttngggaggcagaggtgg

SEQ ID NO: 581351 - DNA, 385 bp, Homo sapiens
  misc_feature (78)..(78): n is a, c, g, or t
ttgtatggatataacacagtttacttatcccattcatgcaaatattgatggacatttgagttgtctcccaatttttgnctattaaaaataaagctgttctggctgggtatggtggctcacacctgtaatgtccgaactttgggaggccaaggctgggtggatcacttgaggtcaggatttcgagaccagcctggctaacgtagtgaaaccccatctctactaaaaataacagaaattagcgaggtgtggtggtgcacacctgtaatcccagctacttgggaggctgagaaactgaggcacaagaatcactttgaacccgtgtggtggaggttgcagttagcccagatcatgccagcctgggtgacagaacaagactgcttcttaa

SEQ ID NO: 581352 - DNA, 275 bp, Homo sapiens
tagggtgaagtaaaaagcaaatgagtgacagacataagtaaggagagaatttgaccttctaagctgggcgaagtggctcacacccataatcccagcactttgggaggtagaggccagcaggtcacttgaggtcaggagttcaagaccagcctggccagaatggtgaaaccccatcactactaaaaatgcaaaaattagccgggcatggtggcaggtgcctgtagtcccagctactcggcaggctgcagcaggaaaatggcataaacccgggaggt

SEQ ID NO: 581353 - DNA, 435 bp, Homo sapiens
  misc_feature (12)..(13): n is a, c, g, or t
  misc_feature (16)..(16): n is a, c, g, or t
  misc_feature (70)..(70): n is a, c, g, or t
  misc_feature (75)..(75): n is a, c, g, or t
  misc_feature (374)..(374): n is a, c, g, or t
  misc_feature (383)..(384): n is a, c, g, or t
  misc_feature (389)..(389): n is a, c, g, or t
cgcagtaacacnnccncgggtgatgagaagctcgcggttgatgcctgtaacagacattaactgttcacgnatgtngcaaacatcccccagtatagcctgcaggcgcgagggagaaagatggtttgccagttcggcgaccaggcccggcacatcaacattggtcacctgcgcagaccatgatggcgttttagcgcatccatcagcaacgttgccagccagtgtaaacgcgccggagcttgttcatgattaagggccgctagcagcgaataccagtcgcccgatggcacgctatatgccaacgcctgacacaatgtttcacgagcctgccagttatctccctgaaacaacgccagtgccgcgccaggggaaccggngcttaagcnnaatgnggcaagtaatgcatcctgtgacattgtcacttcgcggtgaaagcca

SEQ ID NO: 581354 - DNA, 143 bp, Homo sapiens
gaaactggaccactgagtgatcagcgcacgtcagtttaaggcctgcgacaacttatttttaactttttaccaacttcctgggccccgaagctttacacagtggaaatatacagaccacgagcacagggactcacggattctct

SEQ ID NO: 581355 - DNA, 190 bp, Homo sapiens
ctcatcttgtaccagtgacaactatgaagagtcctgcctggccttacaccttcagattacttttgatagtgcaaaaaaaaaaagggccatttccttctaatttaacctaataaccttttaaggccctaaaatggttatcaaaagttccttaaccaggttgagtggttaaccaatttgcggttttttcata

SEQ ID NO: 581356 - DNA, 261 bp, Homo sapiens
gaggatccactctctcacactggttagttatgggatctccccccttccacagtatatcttttttttaaaaaatattttttttccatcaaggtcatcttctgtttttcttttttttttttttaaattctttttttttcctttttttctttttttttttttttttctcttctaaataaaaatttttttaagtaggggaaataccagggggtcgttcaacccgggcccgtgaaaacgcaacccggggcccggcggtaaaaacca

SEQ ID NO: 581357 - DNA, 80 bp, Homo sapiens
cagaattttgatgggaatggaacatgtgaatgtcactctgatcacttttatgtaaaaattataatttaattaataaaaaa

SEQ ID NO: 581358 - DNA, 948 bp, Homo sapiens
  misc_feature (948)..(948): n is a, c, g, or t
aaattctgcaagaatataaactatctcatagttggacaaaaaaagaaaaggttgcagaaagcacaccaaatgcactcttttgaagagcataatttgggctatatgttttgctttacccatgaagaaacagcacgtaagaaatacattatcctggaccaaccaggctttcggggatcacagatgtttgtctccatcacaattaaattttcagtgaataaaatacctgctggaatgtgtatttttcctgcctaggcttatgctaaccgtttatgattaataagcttcagaaaccgacgattgtggaatgaatatgacatttaacataacataagcctgaacgggagtcagtgacccagataacatcaatatgctgacactacatgccaatattttgctataaaactctttctttgacacatctaggttggtatgagatatcatctgtcctctacaggtggcctctaggcaaactgagaagaaaaatgtgtgcatatatacaggacatagtttcaccttctcattaatcatctaggaattgggtgaaacatttttgtaatggcagcgtgataaatggactgatttagattttagttaaaataataagtacaacacatttcagatgtatagaatatttttaaaggatacttctagaactacaacaactgtcacagatattacgtgttgacataacttatgttttactgcaacatttacaccttcgtggcctttgatggctccattctccttcttctccctctagaggtatttgctttaacccgttggtcccctatccatttttcctcgggtttgggcccaaacctgtgtttgcctacagggttaccggtgggcccttggcctgccggatccagccatcccgtcggcgcacagggtcttgggtatacccccgacttctcttaacaccgtggtggtcttatttattcgttgggn

SEQ ID NO: 581359 - DNA, 634 bp, Homo sapiens
taaggttaatcatccctagcttcccagaacacttaatcaggacagagacatattctttaatgagctggagatctctaacaacagttctgaaggatcacagggaggacacagcaaactaatctacttctcatgcaataaccaccatttatctgatcgctggagcatagacaatggtctcaaattcacacaataaaaactgcatgcatcagcagcacacaatatacacagcccgccttacatttaggacttagcacccaacagcagaagcaccactcagcacagcaggctggcatcgcctgtgcgcattgtttcgcagatttccacgagttgagggatactggggcagcatcctctcatcagttaactcgagaggcccatccaggggcgcaatcacttaaccaagtggcacaggcacaaagagggcctcccaaatctggttgccaagattctagcgtttactgacgtaatttcctttcatgtttggcccaacggctttctttgccctttattcggtaaggcaccaaaacagcagacattacacaaaattacacgacacaacccacagacgccgaacgaaagtcaagcaagttgcgagtaccacaggaacagggactcggagaacaacgaaggagga

SEQ ID NO: 581360 - DNA, 298 bp, Homo sapiens
cgtcccatatgctggctgcacattatagctcggctgaccatccaaatttcataatagcaacttgaggacccaatcatgtcttaaccatctttgcatttttcagtatgtcttgaatagagaatttatgaaaataaatgtttgcataagctgataaaggagatgaagaaaaacacacagaaggagaaaaccaagggtgtgggatcagaaaatccaagagaagagagtgtttctggagaatgaagcaataactgaatgctgctgagaagtcagaatgatgaagcctgaaaagtttccccta

SEQ ID NO: 581361 - DNA, 133 bp, Homo sapiens
ggaaccggtttcaagcccaaggccaagcaggaaaacggcgaaaggactggaggggtgcctctgatcaaagcccccaaaaaagaaacacccgatgaaaatggttaaacccaaaaagccgatgattttgttttga

SEQ ID NO: 581362 - DNA, 268 bp, Homo sapiens
gaacgcgcagcaggccttggggaaggcccaggcccggcagccatggcgctagaagggaggaatgaaatgtgtgaaggtcttgctctacggccccctgctggccttttgcgccttgtcagtgggactgatttccgtggttgtggggcaaagcttgtcctgagtcagcccatatccaggggctcccgtgctctctgtgccagtggtcatcatcgcgtggtgtctcctctcctgtgctctgtgtctctcggccctcaagagactatgctat

SEQ ID NO: 581363 - DNA, 1048 bp, Homo sapiens
gtgctcgtggacgccgccgaggaagcatcgttaaggtctctcttcagcctgccgtcatgtctaagtcagagtctcctaaagagcccgaacaggctgaggaagctcttcatcggacgggttgagctttgaaacaactgagtgagagcctgaggagccatttagagcaagggggaacgctcacggtactgtgtggtacatgagagatccaaacaccaagcgctccaggggctaccggcgcttgtcacatatgccactgtggcaggaggtggatgcagctagtgaatgcacaggccaccacaaggtgcgatgggaagacgttgtggacacaaagagagctgtctccagagaagattctcaacgaccaggtgcccacttacctgtgaaaaagatactcgtagcgaggcactccaggaacgacactgcaacgacacatcaccgtaagcagcatcatccggacacagtcatggcaaccacctcgcacgtgatagcacctcatgactggaccgacggcagaggcaagcaaaagggggctcaggtcacccggccaacctataggacgagcctgccctccgacgcgtcacacactggcatccaagaaactaccatacaggggcactggccaccaactgggcaccgtacacaaaacagcccagggcaaacggccacgaagaatgggcacacgcgcgtcacatcaaggccccaaaagaacggccagaaggcgagatcagggaaaacactatgctggaagaccagacacaatgtgcgggacccaagagggacaaacaccacacacaacctaacagcagagaccaactaccatggcaccacgatcggctacgcaaacccccacgacgtagtaagcacgcacacagccgacccgcaagacaggacacaaaacggaaaccgacccacacacgagcacaagagccaagagagcaccaacaacagcacctcacggagccctcacaccacaacaaccaacgagcaacacataagcacaacccacccacacaagcccacaagaacagcagacaagcgaaacaaatcg

SEQ ID NO: 581364 - DNA, 444 bp, Homo sapiens
  misc_feature (3)..(3): n is a, c, g, or t
  misc_feature (231)..(231): n is a, c, g, or t
  misc_feature (360)..(360): n is a, c, g, or t
  misc_feature (363)..(363): n is a, c, g, or t
  misc_feature (369)..(369): n is a, c, g, or t
  misc_feature (377)..(377): n is a, c, g, or t
  misc_feature (401)..(401): n is a, c, g, or t
  misc_feature (405)..(405): n is a, c, g, or t
  misc_feature (415)..(415): n is a, c, g, or t
tantagtttgtccatgtgtttttaaagaatgaaaattgacaattttttttggtgggtaaatttatgatgtttacctttttcctgttttgcttttaataatgtctgattagtatttacctataaatcattcaaatgagatcactgggaatattaatggtacaatatcgacaattttgcttttggtgtgtctccagccatctattgatggccattttcggggtcctatttggngtaagtgccgctgatgggagaacaagatttgtcatgggacttgtacgtttctttttgctgatccaattttccattgcttccttttcatatgaatagccatctgatgcggtggcagggtctttcatgggnggnctggtngttgggcntgtgggttcctcaggggttcctgngggnaggggtttcnccttggtcctgagctcttcaattttcctc

SEQ ID NO: 581365 - DNA, 1368 bp, Homo sapiens
  misc_feature (54)..(54): n is a, c, g, or t
  misc_feature (168)..(168): n is a, c, g, or t
  misc_feature (206)..(206): n is a, c, g, or t
  misc_feature (210)..(210): n is a, c, g, or t
  misc_feature (270)..(270): n is a, c, g, or t
  misc_feature (766)..(766): n is a, c, g, or t
  misc_feature (1036)..(1036): n is a, c, g, or t
  misc_feature (1239)..(1239): n is a, c, g, or t
  misc_feature (1241)..(1241): n is a, c, g, or t
  misc_feature (1253)..(1253): n is a, c, g, or t
gagtctcatctgactccactcgggctcagtgcctcatcactgtacctgtgctcncagtcatcaattatagaccccacaacatgcgccctgaagacagaatgttccatatcagagctgtgatcttgagagccctctccttggctttcctgctgagtctccgaggagctnggggccatcaaggcggaccatgtgtcacacttatgccngcgnttgtacatgacccatagaccaacaggggagtttatgtttgaatttgatgaagatgagcangttctatgtggatctggacaagaaggagaccgtctggcatctggaggagttggccgagccttttcctttgaggctcagggcgggctggctaacattgctatattgaacaacaacttgaataccttgatccaaggcgttccaaccacactcaggccgccaatgataccccctgaggtgacgcggtgtttcccaaggagcctgtggagctgggccagcccaacaccctcatctgccacattgacaggttcttcccaccagtgctcaatgtcacatggctgtgcaatggggagccggtcactgagggtgtcgctgagagcctcttcctgcccagaacagattacagcttccacaagttccattacctgacctttgtgccctcagcagaggacgtctatgactgcagggtggagacactggggcttggaccagccgctcctcaagcactgggaggcccaagagccaatccagatgcctgagacaacggagactgtgctcntgtgccctgggcctggtgctgggcctagtgggcatcatcgtgggcaccgtcctcatcataaagtctctgcgttctggccatgacccccgggcccaggggcccctgtgaaatactgtaaaggtgacaaaatatctgaacagaagaggacttaggagagatctgaactccagctgccctacaaactccgtcacagcttttcttctcacttcatgtgaaaactaccccagtggctgactgaattgctgacccttcaagctctgtccttatccnttaccttaaagcagtcattccttagtaaagtttccaacaaatagaaattaatgaataaatgttgacactttgatagcactgatatggagattatcctttcattgagccttttatcctctggtcttctttgaagaacccctcactgtcaccttcctgagaatactctaagaccaataaatacttcagtatttcagaaaaaaaangncgtttacacgtntgactggaaaccctgcgttaccacttattccttgacacatccgcttgcagttgcgtaagccacgagcccaccgatgccttcacaatgccacctaatggtatgcaatgaacctaat

SEQ ID NO: 581366 - DNA, 918 bp, Homo sapiens
  misc_feature (78)..(78): n is a, c, g, or t
  misc_feature (100)..(100): n is a, c, g, or t
  misc_feature (316)..(316): n is a, c, g, or t
  misc_feature (586)..(586): n is a, c, g, or t
  misc_feature (789)..(789): n is a, c, g, or t
  misc_feature (791)..(791): n is a, c, g, or t
  misc_feature (803)..(803): n is a, c, g, or t
ctgccggctgagactcctctgtctcccccacctgaatcatcaccttctcctccactgcaggagacgcccttgtctccnccggaagagtcacccccatctnctgcacttgagacgcctctatccccaccacctagagcctcttcctgcccagaacagattacagcttccacaagttccattacctgacctttgtgccctcagcagaggacgtctatgactgcagggtggagacactggggcttggaccagccgctcctcaagcactgggaggcccaagagccaatccagatgcctgagacaacggagactgtgctcntgtgccctgggcctggtgctgggcctagtgggcatcatcgtgggcaccgtcctcatcataaagtctctgcgttctggccatgacccccgggcccaggggcccctgtgaaatactgtaaaggtgacaaaatatctgaacagaagaggacttaggagagatctgaactccagctgccctacaaactccgtcacagcttttcttctcacttcatgtgaaaactaccccagtggctgactgaattgctgacccttcaagctctgtccttatccnttaccttaaagcagtcattccttagtaaagtttccaacaaatagaaattaatgaataaatgttgacactttgatagcactgatatggagattatcctttcattgagccttttatcctctggtcttctttgaagaacccctcactgtcaccttcctgagaatactctaagaccaataaatacttcagtatttcagaaaaaaaangncgtttacacgtntgactggaaaccctgcgttaccacttattccttgacacatccgcttgcagttgcgtaagccacgagcccaccgatgccttcacaatgccacctaatggtatgcaatgaacctaat

SEQ ID NO: 581367 - DNA, 182 bp, Homo sapiens
cactaggcgtatcctgaaaactggagggccttcaaggctctcatcgctgctcagtacatcggggctcaagtccgcatgttcaccgcaccatacaagttggattttggccaaaccaaccgcacccctaaatttcaccgcaaatttcctgccggcaaggtcccatcatttgagggtgatgatgg

SEQ ID NO: 581368 - DNA, 1064 bp, Homo sapiens
tagggtcccaggacgctacccggggaatgcccccggtataggaagcacagtcgagaccttcgagaaaacaaagcccggagcaaagcgtactccatgggtgcgggatctccaggaataatcgaagggggcagatgaaaagccagataacagcaggaaagtgaacacggctttcaacgggatacaggggactagcttattgggggaccactttgtacggtgggctgaaagtgaattttagtgaagctatttatggcatggattcacgtgaaagcatttacgggttttcgttggagtctgttgttaaggtatggctggcccagtgaacttccaacgctatgctacttcagcccaataagacaactttggaagaaagctgagagtaagtaattacatgaattgtataaacatctagacagcagtgcagcagctagttattgatggctcctatggatattgccaggatttaaacctgagtcaacagagtaatactaacccctatgtgtaactacaagatgtgattgcaacttgctggaacttgcaagtgacaaatgggctcctcccctcgacaatcctgtcattgtgcattgtgtgtgctagacagaatactaagttgcagtatggtcgtactagtctaacgtcgtaggtatcctgttgcttgcttcattacgccctttcactaggtgaattctcccacagtggtctgtatctcgacatttatctttttaaagggaaagaagtatagtatatatagtttccttgttattgatcaggtcctgtacaatggtgtagctaaaagaatcagagtttattgtataaagcaaaatagtttatgttgaagagaaggtactcttccgttattgatatcatggtatgcattaattccatgttgttactattgtgcacaaaagccctgttcacaggggaatggtgtaaacagtttatactgttttgttcactgtatttagtagacataactgttggatagttactgaatcatgactgtaaagaatactgtgaccatcttcaggtatgggatttgctgataattcaagtcaatcatgagg

SEQ ID NO: 581369 - DNA, 171 bp, Homo sapiens
gcacgcccagcctcccacagtgctgggatacaggtgtgagccaccgcacctggcataagtttgttttaaattacagagttgtggtaatttgttacaatggccataggaaactcaaacactagatatttgaaatggtcgatgcatttgtataccatttttaaaaaattcatt

SEQ ID NO: 581370 - DNA, 90 bp, Homo sapiens
aaattgacagatgtgtcctttggaaatagaggagataaattattattggcttttaaaggccaagtagaattttccagctaaagagaagga

SEQ ID NO: 581371 - DNA, 265 bp, Homo sapiens
ggtaccgaggcacagacgctttcctgtggcttggcaactggcatgcggtctaggatcctctacgcacaacgcctgctcgcctcctccgtgtggttgatcggaaatcagggtggacgaagttgttgcgcaacaacttcgtccactctgacctgtgtcaccaagggtgtggacgctcggcgtgtgcagcaacaacttcgtccatcccgatctactgtggggggtgtcttaggggtttggttggttcggggtatggatgttcggcgtg

SEQ ID NO: 581372 - DNA, 790 bp, Homo sapiens
  misc_feature (790)..(790): n is a, c, g, or t
atgtttcagtatcttctctatcataggccctaagttcattgggggaaaaaaaataagaagattcaacagaatcagcatttgaagtgtaccattggtagttgtttatgaaattaccagatattcataaatgtgacaaatgaacagcaggattatgaattatcaaaggaaaaagtatttgctgaggtgaaaaaatctgatgtttgaggaagtttttatttttatttatttgtttgtttttttttttttggaggcgaaactctttgtcgccgaggtttctccgtgggctaagcctcacgagtagcggggacttctcaggggtgtgcaccacaccacgccgcagaataatctcgtggtattttgcagcagaagacggggaggaagtctctaatttttataaacaaatatctggatgttcagaggccccgtttcttacaataaaatgtggagtcttagtaaagcaggatttttatgaacacccatttcctgacttttggcttaatttaagattttctccatccggtttctagcacaaaatttggcctgctgtgttccaacaatctaatttatgtggtcctgtgccataagtgactattttcacctattctaattccttgggttccgaccatggtaaagttcctaaagaccttttttttaacacaggtagacctttggttcttcacaaccactggggtccgcatttcctttggcagaaagcttgaaggttcggattccggttacatgcataatggcgataactcacttctccggcaataccctgtgcttcttgcan

SEQ ID NO: 581373 - DNA, 1001 bp, Homo sapiens
  misc_feature (36)..(36): n is a, c, g, or t
  misc_feature (90)..(90): n is a, c, g, or t
  misc_feature (108)..(108): n is a, c, g, or t
  misc_feature (180)..(180): n is a, c, g, or t
  misc_feature (226)..(226): n is a, c, g, or t
  misc_feature (228)..(228): n is a, c, g, or t
  misc_feature (231)..(231): n is a, c, g, or t
  misc_feature (244)..(244): n is a, c, g, or t
  misc_feature (255)..(255): n is a, c, g, or t
  misc_feature (259)..(259): n is a, c, g, or t
  misc_feature (262)..(262): n is a, c, g, or t
  misc_feature (266)..(266): n is a, c, g, or t
  misc_feature (281)..(281): n is a, c, g, or t
  misc_feature (297)..(297): n is a, c, g, or t
  misc_feature (301)..(301): n is a, c, g, or t
  misc_feature (304)..(305): n is a, c, g, or t
  misc_feature (307)..(307): n is a, c, g, or t
  misc_feature (310)..(310): n is a, c, g, or t
  misc_feature (316)..(316): n is a, c, g, or t
  misc_feature (321)..(321): n is a, c, g, or t
  misc_feature (326)..(326): n is a, c, g, or t
  misc_feature (333)..(333): n is a, c, g, or t
  misc_feature (337)..(337): n is a, c, g, or t
  misc_feature (341)..(342): n is a, c, g, or t
  misc_feature (348)..(348): n is a, c, g, or t
  misc_feature (361)..(361): n is a, c, g, or t
  misc_feature (366)..(368): n is a, c, g, or t
  misc_feature (371)..(371): n is a, c, g, or t
  misc_feature (374)..(377): n is a, c, g, or t
  misc_feature (382)..(382): n is a, c, g, or t
  misc_feature (388)..(388): n is a, c, g, or t
  misc_feature (393)..(393): n is a, c, g, or t
  misc_feature (396)..(396): n is a, c, g, or t
  misc_feature (399)..(399): n is a, c, g, or t
  misc_feature (401)..(402): n is a, c, g, or t
  misc_feature (407)..(407): n is a, c, g, or t
  misc_feature (409)..(411): n is a, c, g, or t
  misc_feature (418)..(418): n is a, c, g, or t
  misc_feature (425)..(425): n is a, c, g, or t
  misc_feature (427)..(427): n is a, c, g, or t
  misc_feature (435)..(436): n is a, c, g, or t
  misc_feature (441)..(441): n is a, c, g, or t
  misc_feature (453)..(453): n is a, c, g, or t
  misc_feature (463)..(463): n is a, c, g, or t
  misc_feature (470)..(470): n is a, c, g, or t
  misc_feature (474)..(474): n is a, c, g, or t
  misc_feature (481)..(481): n is a, c, g, or t
  misc_feature (488)..(488): n is a, c, g, or t
  misc_feature (493)..(493): n is a, c, g, or t
  misc_feature (495)..(495): n is a, c, g, or t
  misc_feature (500)..(501): n is a, c, g, or t
  misc_feature (503)..(503): n is a, c, g, or t
  misc_feature (506)..(507): n is a, c, g, or t
  misc_feature (535)..(535): n is a, c, g, or t
  misc_feature (539)..(539): n is a, c, g, or t
  misc_feature (549)..(549): n is a, c, g, or t
  misc_feature (553)..(553): n is a, c, g, or t
  misc_feature (560)..(560): n is a, c, g, or t
  misc_feature (571)..(571): n is a, c, g, or t
  misc_feature (575)..(575): n is a, c, g, or t
  misc_feature (585)..(585): n is a, c, g, or t
  misc_feature (594)..(594): n is a, c, g, or t
  misc_feature (600)..(600): n is a, c, g, or t
  misc_feature (602)..(602): n is a, c, g, or t
  misc_feature (605)..(606): n is a, c, g, or t
  misc_feature (612)..(612): n is a, c, g, or t
  misc_feature (618)..(618): n is a, c, g, or t
  misc_feature (621)..(621): n is a, c, g, or t
  misc_feature (627)..(627): n is a, c, g, or t
  misc_feature (629)..(629): n is a, c, g, or t
  misc_feature (667)..(667): n is a, c, g, or t
  misc_feature (733)..(733): n is a, c, g, or t
  misc_feature (971)..(971): n is a, c, g, or t
tagatagggtggggagaggggagagggaggaggggnggggaaacacgtcttaaaataaactctttagagactaagtgggtgtgtcttttncacagtagggtggagagnggggaggggagggggcgggggtccccttcccaatgtccccgcgggcttgagtaccaggcggcggggccagcnccgccgcgatcgccccctcttcccctccctgttaaatacacaaatntnttnttttccatatgantcgagtctgtntccngcngaanaaaaacatacaaaanaagtggaagggggggnttgnganngnggngggggnagggntgggngcagggnaggngggnnggagtncagtgtggtttgnggggnnnctnggnnnnagggngggtgngcacnggntgngnngtggncnnnagtgggnggggtgngngcaggggnngaagngagggggtgtgngtgaaggggnaggggangttnagaaggngtgtgcnttgancncaagnngnagnngagagcggtggctgaggtgggtgatgancttntgtttgagcngggncacctgntccgcggaggnggcngggggtactngagagggcngcgttntnggnnttgagngtgttnacnttgtgntncaggcgcgcgaggcgtccagcttgggcttccgggactnggtggcggcgagccggttccgcagccgcttgcgctccactttgatgcgctcttggtcttccatgtngatgggggacaccggcggcgtggcgtcccggctgcgcgcctccggcacgttctgcggttcctccttgaaggtggaggcgccgcggcccaagcccagctgcgccgggtggccaccggcgaagggcggcgcgtgtgggaggtagctgatggtggtcgtcgggtacgagctcccggtcccgacggcagccccggcgccttccgaggacgcagaggctggggagtagctgctgaggttggtntaacgggaggtgggtccgggccggcgtaga

SEQ ID NO: 581374 - DNA, 227 bp, Homo sapiens
gcacgctaagctactgtaagtacgcactcttctaccgcggtgtacacatagtttgccaggtgtgcgcgtctatcccaaggggtctaggggaccaaattccagctacccgccatcgggaggcacggtaagagaccgtaaggggacacaatacccgagcaccgcagatagcgaggtctccgatgcgctaccagtctgtcaacagaggcttcgggaccgcggggtccctt

SEQ ID NO: 581375 - DNA, 1032 bp, Homo sapiens
agttcaccaccccgaaatactttcttctaccgtcaagacccatgtatctaataattatgggactgatcgtcatctgtgctgtcattactcactagcaagaacagatagtcatgcattatggaacacaaccttacagatgtattgagtgcagatcaaagccttgaatcatggcctcacacatgactgtactgtcacggtaaagtcatcctggatgagaaacggactatacatgttgagctgctgctggcaaggtctttcaggtccataaaatcaagacccttgcgacagtcgatttgtggaatatttcgatacttggaagatgaaacgcatacaagaattgtacatggacatgtccatctagcaacgtttcagtactgctaaactcaatgtcccttgactagtcaaatctgtaatgatgtcacacagtagtaggcgaaaccttactaaatgtcattgacgatgtgacatggtcctacagctcgatatctactgccttgtggcttagattcatgaaatgcgtcatacttggagagaacacctatacacgctaattcatgtagatgtggcaagatccttttagtggtgaggatcaacacttaccaaccgtcaggtaattcatattggcaagtaaaactctacaaaatgcgattgtaatgtggcaaggtcgtacatttcagacttttcggggccttgctaattcattcagagaatggcgcactgggtgagatagctatacaagtgtttagtggatgtggtacaggccttcaatccgacttcagccgtgccaggcattggagaatcatactgggaggaaccgtcacactgcatgagggtggtagggtttcagtggaactccacctggagagggcgcggagagttcactggccacaaaccttcagtgtagactgtggtcaccttagggttaagattaccccgggtccccatggcgaagccttcaggttcacgtggaaggcctgtcgttaccacaccgggccatggaacaagtaggcccatggccccataatatagtaa

SEQ ID NO: 581376 - DNA, 799 bp, Homo sapiens
agcggtgcgggaagtctgaagccggtaaacatggccgtcaccgacagcctcagccgggctgcgactgtcttggcaactgtgttgctcttgtccttcggcagcgtggcccgcatagttcatatcgaggagtcaagcagtagacaattctttagaagtgggccatacgaaacaactggggctgttctggtagtgtacatcccgtattctgcgtttagattgatcggacatgtctgcaacataccctcttctgttatatagacagtgtcaaggaggctaggtagtccctgacagtcacattcgtcctagatgcttgcggcatgactatggacctgtacatcctagtaaatcccaaatgcagactacagttgttgatgtcactaagacatatggtaactaagatgtgtcatggcagatgcatgtggaacgtggattatagaagttcatgaggtaacgtgtggcagaatttctcctaggggtattaactggggggatcccagccatagtactccatcggttccagagaacgtcttctttgctgatgacagaagcaagtattctaactttactatgacatgggcttggtggacatggttacttaaaatttcacgattctgaagaagttaccatcatagaactcgcggatgcttttgaacaatgtgtggcagaatgagacgctacaattgagctactgggtattcatttgatactttgccaaggagcatcccatgtattgaagcgatttgattcctccttaacattaatgggctctagctaagtaagtccgagtggggcacgaacg

SEQ ID NO: 581377 - DNA, 247 bp, Homo sapiens
  misc_feature (21)..(21): n is a, c, g, or t
  misc_feature (94)..(94): n is a, c, g, or t
  misc_feature (229)..(229): n is a, c, g, or t
  misc_feature (232)..(232): n is a, c, g, or t
  misc_feature (244)..(245): n is a, c, g, or t
ttccctgatcctacttttaanattttcctgtccttgatagaaaacattattatagtttaataatgttttgttgttgttggtttttgttttttgnagctccgtctaaaaaaaaaaaaaaaatcaggggcagttgtgatggctaacacctgtaaccccagcacctttagaggcccaggtgggaggatcccttgaggccaagagtttgagatgagcctgggtaacatagggnaancctgcctctacnnaa

SEQ ID NO: 581378 - DNA, 204 bp, Homo sapiens
  misc_feature (135)..(135): n is a, c, g, or t
  misc_feature (159)..(159): n is a, c, g, or t
  misc_feature (198)..(198): n is a, c, g, or t
gccccctacaccggccccgactccgttgccaggtgctctggactacattgtccttctccacggcgcttgtacggcgagagttgacctctaatccaccccgcccggccgccctcgtcttgttgcgccgttgccctnccttgcacctccgccgtcgcccantctcctgcctgggttcggtttcagcatcccagcctccancccggg

SEQ ID NO: 581379 - DNA, 465 bp, Homo sapiens
agtctctacagatcccccggccgccacagctactcctttaagatacatcctgaatatgctttatctcacaggcacattttctatatttttatcacataatatactgtaatttccaaaagtataattctatatcacttaagttgaacaacagaacaatgcttcatatagtttatgaagttcaagtatgcaaagaatatacactagctttcttttatagcggtgctatcaatacagagaggcttgggggtcagcaaagggtaataggattggtaataccaattattatagtactcgctgcaacttcggcataggtgtgttggctctacaccatgttatcccaatcatctttgggaattcctatgcatgttgattgtctgatatcaggagttcaggatcatcctgtgctacatggttaaatcccttttctctactattaatactattttttaaactttttttaaaatt

SEQ ID NO: 581380 - DNA, 446 bp, Homo sapiens
  misc_feature (13)..(13): n is a, c, g, or t
  misc_feature (42)..(42): n is a, c, g, or t
  misc_feature (64)..(64): n is a, c, g, or t
cagagatgagcangtcaattagtcagctagagtccctgaccngggaattacgggaaaggaaacngaattttagggaattccaagtcacaagcagacaaggattacttaccagctgcaagctgtattggaagctgagcgaagagacagagggcatgattctgagatgattggagaccttcaagcacgaattacatctttacaagaagaagtgaaacatctcaaacataatcttgaaagagtggaaggagaaagaaaagaggctcaagacatgcttaatcattcagaaaaggaaaagaataatttggagatagatttgaattacaagctcaagtctatacaacagcggttagaacaagaagtaaatgaacataaagtcaccaaagcacgcctaactgacaagcaccaatctatcgaagaggcaaagtctgttgccatgtgtgaaatgg

SEQ ID NO: 581381 - DNA, 955 bp, Homo sapiens
tcgccatgagcccgtaagcaggcgcctctgcaggcctcctagtgacctccgggctagccatgtgatttcacttccactccataacgctcctcatactaggcctactacatcaacacgctaagcatataccaatgatggcgcgagtgtgacacgagaaagcacataccaaggccaccacagcaccgacgtgtccaaagataggcctatcgatagcggagataatcctattgtagttaccctcagaagtttctttgcttcgtcgaggattgtatgtctgaggcctgtttaccactccagcctagccccgtaccccccagatgtaggagggcagatggcccccaagcaggctactcacctcgctgaatcccccctgagaagtcccactcctagaaacacaatccgtattactcgcatcaggagtatcaaatcagctgaggctcagcatagtctaatagagagaaacaaccgaaagcaaataattcaagcactgtttattacaatggtactgggtctctattttagccctccgtacaagcctcagagtagttcgagtctcccttcaccattgccgaggcagctacggctcaacatttttggtagccacaaggcttccacggagttcacgtcattatggggtcaactttcctcattatctgcttcatccgcaactaatattgcactttacatccaaacatcacttgggctcgaagcgccgctgatactggcatagagacgtgcgagagcatgcggatgtctcgtctatgatgaggtcttgcaaaaagaagaaacaaggcacaacgccatgaaagcaggggggggcgccaaaaggacccagggggccgaccaaaccattgggaggggccaaagaggagaaaaagaggggggaaacccggaaaacgtggggagaaccttggggctggacccaagggcggcaagggtgcactggcgccgtaac

SEQ ID NO: 581382 - DNA, 124 bp, Homo sapiens
gaagcatggataatatctgaagagtctcataagactgcatgtggccaatggatttcccagaagaaatcgtgagcgaggctgaatattctgagaaacctcactaaatagaactctctccttcaga

SEQ ID NO: 581383 - DNA, 197 bp, Homo sapiens
ggcggtctcttcctgacttccggcaacagaccattattctgtcagttacgatgtagcaggtcaattatacttcttttaaaaagtttttaggaggctgaggcaggagaatcacttaaactgggagaggcggaggtggcagtgagccaagatcatgccacggcattccagccggggcagcaagagcaaaactcggtctc

SEQ ID NO: 581384 - DNA, 229 bp, Homo sapiens
tgccggaccgagttggacgtgggactgaagaagctaggaggggctcaacagctggaggtctagatccacttaatttttgtactgcaacgggctcatcgccgtgtttcattgagaagacacgtgcggcgtagggcttctgtcaccgaaaaggggtcgcagtttgcagaggggctacgatcttcaaagtaacccttcttctcctggccgacagtccggggaatgcgtatgc

SEQ ID NO: 581385 - DNA, 839 bp, Homo sapiens
gagacctgggggtgcaatcgatgagagatgcctgtatatgatgtgatacccgcgggactgtcctcgttggaaagcctgcatcgcgagccctaggtgctctccatttgaggaagttggctgggggagtgggtgcttgccttgcggatgcgtcactgctccccgctgccctgcccccaccgtcccagcctctgctgcctgctaaacgccctggagagcggagctgtgcactgttgacgattcctcggctgggctggcacaggcaccaagatgtccaagcgagtggtcttgcctgagaagccagtcacgcctgggagctggtacacaggccatcaggaacgcagctcgaatgcacagactagaaggtcctggctatccacaagtcacagtactacaaaaagacctgactagagccaaaatatggcccccccatgcagggaaaataccgaacgttgcagagagacataggttgcatgccaaatgagctaacacacaaccagaagtgagtcatcccgcacaagtcacccagcggagaaaacacttacaaaaccttgaggaccatactcaattcactgttagcacccgtaatctacgcagtgtgacaacttatccaagacggctggcacataactattacctacggggaagcaaacccatccgaggcaaacgcgacaccgtcccggcaaaatcgggcacgccagaaaggcagcatccaaccccgggagggagcacgggccaggaacaggacacaggggacactggctgcggcaaccgcgacacggcacaaccaggcaagccaccagcagcgacaagcagctagaaccaacacaagaaacccggga

SEQ ID NO: 581386 - DNA, 147 bp, Homo sapiens
gggcttagcagcagttgatctgtagaatatcttcaaaggagagatgtcaactattctgcactattcccagcctctgctcctccctgtactaccctctccccgtccctctctccctcacagttcacccctacaatttctcatccttgg

SEQ ID NO: 581387 - DNA, 348 bp, Homo sapiens
tccacataggtgcaagcagttacagtatgacctggataaacgacatgtacggttaacgagccggctgcagtgactcacacctgtgatctcaacacttggggaagctgagcacgggaggatagcttgagcccaggagtaggagaccagctagggcaacgtgatgaaacccggtctctacacctaccaacaacatcagccaggcagtggtggcacaagcctgtggtcccagctactcagaaggctgaggtgggcgtatggctcgagcccaggaggtcacggctgccgccacgctgtcgcaccactgcactctagccggggcaacagcaagaccctcgtctcaaacaaaga

SEQ ID NO: 581388 - DNA, 338 bp, Homo sapiens
  misc_feature (325)..(325): n is a, c, g, or t
tgctctagaggacccgatcagagcatacccctatatgcagctgaataacagagggatttctttcatcctggcagaaaatgtgtgtgcttactttttcattataacccttgggcaggaaacatccagccacaaagaaggctttctcccctctaacaaattttggtattggtgaatccgatattgaatatatgggaataacccggaggaattctttccaacactattaatttataccggaccctttcctgctgtggaaactttaatttccccgatatttttaaattcaacctacaatgtttttatcaagaaggctagaacgacagcnatgcatagaaagg

SEQ ID NO: 581389 - DNA, 371 bp, Homo sapiens
  misc_feature (137)..(137): n is a, c, g, or t
gttggcgaggcagtctcatcaggcgctgacgcgtgtgacaaggactgtcggtctgggacgcagctgggttgggggagatgaaatggaggcgcctaagcggcggtccggggtttgggtagggcgagacttcgtccggnctcggagtgagggggggggggaggtcgcagcaactgagacaggaaaagtctgcccggctggtgcggcacggacacgttttcggttcgaaccaaggcaagcagagccaaacggagcgaacaagaccaagccgtgggcccctttctttgcttgggacacccggagcggagccggatctctgctttcacgtgatgctagggcaagccctagtgtaggccccaggccttcagactggc

SEQ ID NO: 581390 - DNA, 1026 bp, Homo sapiens
  misc_feature (245)..(245): n is a, c, g, or t
ggccgaccggagcctcgctgctgcgcgtccctagacggatctttcctcatgagtccgagatggctgctacatcatagttcagtgttgggtgacacagcgtaggaccatagaatgcacctgtcgaacaggtctgctcgaagagatcgagagcatacgcagtgaatgcccgtcacgagtgcgcagcatagtagatggagcgcacgtatacgataggtcgctcgcgcctagtgagctgatgcctgtanagagtccttcctatcacgtagcgtctcgtactggttggtccttgcaggatcgctgtcaccgatgcgatcgtctcgtggcgtttccttcatgctccttctgtgacgggagacatctgccttgcgcactgtatcggcactccgactgtgaccatgcgacgcaacgtcggaagcgcgtacgaatactcagtcaggctcgtgacctctgactgactgtgcagggacacggggaagacttgacgggatcgtttcagcatgcgtagcgcccccgtaaatccatcactagggattgcgcattgtgccttccggtttccttgctttgtccacgcattaatcttgatgtctgacacactcgttatagtacctgctccataggaatccttatcgttgaccggcgtcaggagtcacgacagggtggaacgtgcgcaaagagtcatggagcgattccccatactaggccgtccctattcgttcgcgacacagtctggtactccgaccgctttcgtgttggcagacccggcctgggtggacgtagattgagtccttgggcgccctttctcgttccgtgggacggtccagtgcggggtcgctgggtcgggtgaattcccgtagccggtacgctttcagctacacctccacagtggtccccctttcactggcgagtcttcttcagggcagacattgccacgacaaagtccgttaaggcagcggtgtggttccctggcgccagccgccccaggggtccagagaaggggttttgcctggtgctgcatttcactttctc

SEQ ID NO: 581391 - DNA, 296 bp, Homo sapiens
agaggtggaggctgcaggaggtggaggctgcagtgagccgtgatggcaccaccgctctccagcctgggtgacagagtgagaccccatctccaaaggggtgggggaacagatcttcttggaaactgaattgttgtacatgggtgtgagggctgaagttaacgtgggtatgtgtgtatcatcgagtaggatcacgatggccatgaacagtggctattgatgcaggtagtgggtagcagtgaagggggaattggttcagtatcgtgagggttgtggtgggcccatgattgtctgacttg

SEQ ID NO: 581392 - DNA, 759 bp, Homo sapiens
  misc_feature (123)..(123): n is a, c, g, or t
  misc_feature (136)..(137): n is a, c, g, or t
  misc_feature (143)..(143): n is a, c, g, or t
  misc_feature (145)..(145): n is a, c, g, or t
  misc_feature (147)..(147): n is a, c, g, or t
  misc_feature (149)..(149): n is a, c, g, or t
  misc_feature (156)..(156): n is a, c, g, or t
  misc_feature (158)..(158): n is a, c, g, or t
  misc_feature (164)..(164): n is a, c, g, or t
  misc_feature (168)..(168): n is a, c, g, or t
  misc_feature (181)..(181): n is a, c, g, or t
  misc_feature (185)..(185): n is a, c, g, or t
  misc_feature (192)..(192): n is a, c, g, or t
  misc_feature (199)..(199): n is a, c, g, or t
  misc_feature (202)..(202): n is a, c, g, or t
  misc_feature (205)..(205): n is a, c, g, or t
  misc_feature (207)..(207): n is a, c, g, or t
  misc_feature (209)..(209): n is a, c, g, or t
  misc_feature (213)..(213): n is a, c, g, or t
  misc_feature (219)..(219): n is a, c, g, or t
  misc_feature (221)..(221): n is a, c, g, or t
  misc_feature (223)..(223): n is a, c, g, or t
  misc_feature (237)..(237): n is a, c, g, or t
  misc_feature (244)..(246): n is a, c, g, or t
  misc_feature (251)..(251): n is a, c, g, or t
  misc_feature (264)..(265): n is a, c, g, or t
  misc_feature (268)..(268): n is a, c, g, or t
  misc_feature (273)..(273): n is a, c, g, or t
  misc_feature (276)..(276): n is a, c, g, or t
  misc_feature (281)..(282): n is a, c, g, or t
  misc_feature (288)..(288): n is a, c, g, or t
  misc_feature (290)..(291): n is a, c, g, or t
  misc_feature (296)..(296): n is a, c, g, or t
  misc_feature (306)..(307): n is a, c, g, or t
  misc_feature (314)..(314): n is a, c, g, or t
  misc_feature (317)..(317): n is a, c, g, or t
  misc_feature (333)..(333): n is a, c, g, or t
  misc_feature (336)..(336): n is a, c, g, or t
  misc_feature (344)..(344): n is a, c, g, or t
  misc_feature (437)..(437): n is a, c, g, or t
  misc_feature (447)..(447): n is a, c, g, or t
  misc_feature (449)..(450): n is a, c, g, or t
  misc_feature (452)..(452): n is a, c, g, or t
  misc_feature (458)..(458): n is a, c, g, or t
  misc_feature (462)..(463): n is a, c, g, or t
  misc_feature (468)..(468): n is a, c, g, or t
  misc_feature (473)..(474): n is a, c, g, or t
  misc_feature (498)..(498): n is a, c, g, or t
  misc_feature (505)..(505): n is a, c, g, or t
  misc_feature (510)..(510): n is a, c, g, or t
  misc_feature (513)..(513): n is a, c, g, or t
  misc_feature (523)..(523): n is a, c, g, or t
  misc_feature (527)..(527): n is a, c, g, or t
  misc_feature (533)..(534): n is a, c, g, or t
  misc_feature (734)..(738): n is a, c, g, or t
cgtccgcctcgtgctatttacactaaaatcaaaagggccacctgcggttttctcccattgttcttatacttggccccaccccggtgtggtagcgggctggtggaaacttctccatacaacacngggtggtccagtnnaacccntnancnttcacanantcgttntggncctggtgccaagngtgnttgttancccgtcnacnggncnancctntttctntncngaatgtcccggagnaaggtgnnnggganccagagccccacnnctnccggncanaggtnntggacntnnacagntgctggactnntccgtgntgnacagcccttcctcacnttntgaggccnccacgctgaggggaggcctctactggggtccttgccctttggcgcagtttgaattaaagacccctgtgcccttctcagccggccttttgctgnacagataagngnnanttgttnctgnntattnctagnngtaccttgaggaaccctggaagcncagaagnaaggngcncccagaagcngggncagggnnctggttggggaggaccagaaatcaggttatcaatactctggctgaccatcgtcatcgtgggactgactttggtggaagtccttggttacttatcattactgtgtttctgagaagttataaatttgccatctccctctgcacaagttacctttgtgtgagtatactaactttctgtagaggtatacttgtaatcacaaatnnnnntaaattatatgaaacaaaaaa

SEQ ID NO: 581393 - DNA, 178 bp, Homo sapiens
tggcaagaatgggcagccaccaaaaaatacggttgtgctgctaagacgggtgattttagctctggctttcaatcctaagtagattgggcctgaccaggcgttcttcttgtgttcctcttctcctcttctggagagggatgaaggagatcctttgcgagaggcatgttctcgtgtgcgt

SEQ ID NO: 581394 - DNA, 278 bp, Homo sapiens
  misc_feature (22)..(22): n is a, c, g, or t
  misc_feature (24)..(24): n is a, c, g, or t
  misc_feature (28)..(28): n is a, c, g, or t
  misc_feature (239)..(239): n is a, c, g, or t
  misc_feature (254)..(254): n is a, c, g, or t
gaattcggcacgagctcgtcgntntctnttaaatgcttaacgattaacagaagccccagcctcagccttcgggctgccactcagggtagtctgtttagtaaacagtcaaccaccaatatcttgagcaggttgaacagatggctccagggttcaggccaactgtgttttcctcaatttcacacagctttgggtaatgacaatcataaaaatcaagaaaagtataaacataaacactgccntctccccaccctccnccatgaatacacagggactccaat

SEQ ID NO: 581395 - DNA, 685 bp, Homo sapiens
  misc_feature (123)..(123): n is a, c, g, or t
  misc_feature (136)..(137): n is a, c, g, or t
  misc_feature (143)..(143): n is a, c, g, or t
  misc_feature (145)..(145): n is a, c, g, or t
  misc_feature (147)..(147): n is a, c, g, or t
  misc_feature (149)..(149): n is a, c, g, or t
  misc_feature (156)..(156): n is a, c, g, or t
  misc_feature (158)..(158): n is a, c, g, or t
  misc_feature (164)..(164): n is a, c, g, or t
  misc_feature (168)..(168): n is a, c, g, or t
  misc_feature (181)..(181): n is a, c, g, or t
  misc_feature (185)..(185): n is a, c, g, or t
  misc_feature (192)..(192): n is a, c, g, or t
  misc_feature (199)..(199): n is a, c, g, or t
  misc_feature (202)..(202): n is a, c, g, or t
  misc_feature (205)..(205): n is a, c, g, or t
  misc_feature (207)..(207): n is a, c, g, or t
  misc_feature (209)..(209): n is a, c, g, or t
  misc_feature (213)..(213): n is a, c, g, or t
  misc_feature (219)..(219): n is a, c, g, or t
  misc_feature (221)..(221): n is a, c, g, or t
  misc_feature (223)..(223): n is a, c, g, or t
  misc_feature (237)..(237): n is a, c, g, or t
  misc_feature (244)..(246): n is a, c, g, or t
  misc_feature (251)..(251): n is a, c, g, or t
  misc_feature (264)..(265): n is a, c, g, or t
  misc_feature (268)..(268): n is a, c, g, or t
  misc_feature (273)..(273): n is a, c, g, or t
  misc_feature (276)..(276): n is a, c, g, or t
  misc_feature (281)..(282): n is a, c, g, or t
  misc_feature (288)..(288): n is a, c, g, or t
  misc_feature (290)..(291): n is a, c, g, or t
  misc_feature (296)..(296): n is a, c, g, or t
  misc_feature (306)..(307): n is a, c, g, or t
  misc_feature (314)..(314): n is a, c, g, or t
  misc_feature (317)..(317): n is a, c, g, or t
  misc_feature (333)..(333): n is a, c, g, or t
  misc_feature (336)..(336): n is a, c, g, or t
  misc_feature (344)..(344): n is a, c, g, or t
  misc_feature (363)..(363): n is a, c, g, or t
  misc_feature (373)..(373): n is a, c, g, or t
  misc_feature (375)..(376): n is a, c, g, or t
  misc_feature (378)..(378): n is a, c, g, or t
  misc_feature (384)..(384): n is a, c, g, or t
  misc_feature (388)..(389): n is a, c, g, or t
  misc_feature (394)..(394): n is a, c, g, or t
  misc_feature (399)..(400): n is a, c, g, or t
  misc_feature (424)..(424): n is a, c, g, or t
  misc_feature (431)..(431): n is a, c, g, or t
  misc_feature (436)..(436): n is a, c, g, or t
  misc_feature (439)..(439): n is a, c, g, or t
  misc_feature (449)..(449): n is a, c, g, or t
  misc_feature (453)..(453): n is a, c, g, or t
  misc_feature (459)..(460): n is a, c, g, or t
  misc_feature (660)..(664): n is a, c, g, or t
cgtccgcctcgtgctatttacactaaaatcaaaagggccacctgcggttttctcccattgttcttatacttggccccaccccggtgtggtagcgggctggtggaaacttctccatacaacacngggtggtccagtnnaacccntnancnttcacanantcgttntggncctggtgccaagngtgnttgttancccgtcnacnggncnancctntttctntncngaatgtcccggagnaaggtgnnnggganccagagccccacnnctnccggncanaggtnntggacntnnacagntgctggactnntccgtgntgnacagcccttcctcacnttntgaggccnccacgctgaggtttgctgnacagataagngnnanttgttnctgnntattnctagnngtaccttgaggaaccctggaagcncagaagnaaggngcncccagaagcngggncagggnnctggttggggaggaccagaaatcaggttatcaatactctggctgaccatcgtcatcgtgggactgactttggtggaagtccttggttacttatcattactgtgtttctgagaagttataaatttgccatctccctctgcacaagttacctttgtgtgagtatactaactttctgtagaggtatacttgtaatcacaaatnnnnntaaattatatgaaacaaaaaa

SEQ ID NO: 581396 - DNA, 111 bp, Homo sapiens
gcggcttcctccgtagtggactccgcgggccttcgcgagatgcaggcctggggtagtctccaactggactgagaagagaagaatggagacgcctcttccattagtgccttt

SEQ ID NO: 581397 - DNA, 243 bp, Homo sapiens
gattctggtctagctgttctgtttgataacagctcctcagccctggctgagctggggcaggacctcccgggttctgggagtgctgggctcccaggaggcagcaaagccacctctacttttcttcttctaggctggttcttcagagaggccagagcccagaaactcacaggaccaagctccttacagaatattaaagtcttcttatacaaaagccccagttgtgctctggaaggaacccacgcg

SEQ ID NO: 581398 - DNA, 203 bp, Homo sapiens
  misc_feature (1)..(1): n is a, c, g, or t
  misc_feature (197)..(197): n is a, c, g, or t
nttcggcacagggcaacaaagcaaaacaaaaaagtaaaaaaaaaaaaagtaaaaacagacaaaaaaaccaaaaataattagctaggtgtgatgatgcacacctgtagtcccagttcctcaggaggctaagaaagaaggatcgcttgagcccaggaggtctgcaccactgtcttccagcctgggacaacagagcaagntcctgt

SEQ ID NO: 581399 - DNA, 1074 bp, Homo sapiens
gccgtgccaggctcaggcagacccacagtgggacccaggctgctccctgctcctggggtcgtgatggggcccagtgcggagtagacggcgccctgtcttctgcggggccagccctcctcaaggcacacccggagggcttcccgtgcccagtctcgcataccgctgttcccttggtgttctgactcgtccctgtgggcctgaggagtctggacggattatacggtggtgcacacccctgcctgtaataccattaaggcagacgtcgtaccctgcatgccctgcaaggggagctatacttccgtgagtccacagcccacgtccacaggggcagcgagtcagggcctcatgcacgcccgtcgggacagggcggagggagccggaccttcaggcggggcaggggggattccatttggccttttgcagccagtcttgacggacacccggagaaagcgtcaaggccgggcagttaacccttggcgcctcagcgtggtaaagcccagcactttgggctgtgactgcgcgccgagacacgatcttgctgggtcgagacggcagaccggccgccccttccttcccaattagtgatgggaggcatcgaaagatggggacatttgatgccaattctggcaccttcccccggaagcaacagggtgtgcacctggttccctgggaggaacagggacccatttcgccaaggaaggttccatggaaggccccaaagctgttgcatgcctgaacggacattcaaaggtggacctttgcggcaattcgactcccccctgggtaccggaagagggctagagtgaggcccccccatggtccactggtgggcaacaagcaagaggctgggagctgggtttggacaccggggagctgggggtcaggcccaagccacgcatgcttgaaccccctggggcccaagagccatggggctaggcaaatggagacacgaaatcacggcatgagcacagaacaggaagagaaagcaaaaggccactccacacaacgggcaacgagctcacgaggagcacgatcattgcagaaagaagcgagggagggcacatggatataaag

SEQ ID NO: 581400 - DNA, 192 bp, Homo sapiens
acatggaccaatagtgattctgtgggcgcgaacagtggatagtatttgttgacttaagaaccttaaatatcttgaaaagtaatggcattcttgctcatgatatgcatttgttagtgaggtctcaccatagtattttaatgttgcttcttcttaaaattatattcataaatagtgtagccgtcacagaggtga

SEQ ID NO: 581401 - DNA, 300 bp, Homo sapiens
tcatttctctcctgggtttcaaaaaggtaattatttgagtgccccttaagtgtcaggccctgtgctagacactgaggttacagtggtaacagtatttgccttcagagagcttagtcttcacagtaaaggcagacactaaataagaagtcacagcagaacagaggtttgctaaactcttggcctctgagcttaggatggggtctctacattttaaaggggtatatggaaaggggagtgatatcgcgtgtccccacagcagcagcagtactctctgctgtggcgcctttcacaaaaaatatt

SEQ ID NO: 581402 - DNA, 410 bp, Homo sapiens
aattataaagtctatagtccagtggtatgatctatgaagttatcaggaactagtattcaagagtccatttcatagtctattgctagtacatctccgttgacagcaaaaagcagatagaggacagtagctgatattaaatactttgaggcaagaatcaaagcaactttctgccagtcttcctgaaatacgaaaatgacatcacggctgctacgttggattattgaaagcaaaagttcctaatcctggaggagcaatgactctgattgtcaaggatgtggagctttcctcgccagtggctgagttacgagcagagcaagcatagagcccattatgctttggagtaatttgagggataaagagcttttgtcctgatagctgaaacttcccattaattgtccaagaatactgtg
